(19) United States
(12) Patent Application Publication
(10) Pub. No.: US 2025/0059576 A1
(43) Pub. Date: Feb. 20, 2025

(54) ANALYSIS OF NUCLEIC ACIDS ASSOCIATED WITH SINGLE CELLS USING NUCLEIC ACID BARCODES

(71) Applicant: Bruker Spatial Biology, Inc., Billerica, MA (US)

(72) Inventors: Yann Chong TAN, Singapore (SG); Gary WITHEY, San Francisco, CA (US)

(21) Appl. No.: 18/435,438

(22) Filed: Feb. 7, 2024

Related U.S. Application Data
(63) Continuation of application No. 16/402,626, filed on May 3, 2019, now abandoned.
Application No. 16/402,626 is a continuation of application No. 15/428,064, filed on Feb. 8, 2017, now Pat. No. 10,316,345.
Application No. 15/428,064 is a continuation of application No. 14/586,857, filed on Dec. 30, 2014, now Pat. No. 9,580,736.
(60) Provisional application No. 61/922,012, filed on Dec. 30, 2013.

(51) Int. Cl. C12P 19/34; B01L 3/00; C12N 15/113; C12Q 1/6804; C12Q 1/6806

(52) U.S. Cl. CPC C12P 19/34; C12Q 1/6804; C12Q 1/6806; B01L 3/502784; C12N 15/113

(57) ABSTRACT

Provided herein are methods and compositions for analyzing nucleic acids associated with single cells using nucleic acid barcodes. According to some embodiments, a method for producing one or more polynucleotides of interest comprises: obtaining a plurality of RNAs associated with one or more samples, wherein the samples are obtained from one or more subjects, each RNA is associated with a single sample, and the RNAs associated with each sample are present in a separate reaction volume; adding an adapter molecule to the RNAs associated with each sample, wherein the adapter molecule is generated using an enzymatic reaction and comprises a universal priming sequence, a barcode sequence, and a binding site; and incorporating the barcode sequence into one or more polynucleotides associated with each sample, thereby producing the one or more polynucleotides of interest.

### CROSS-REFERENCES TO RELATED APPLICATIONS

[0001] This application is a continuation of U.S. application Ser. No. 16/402,626, filed May 3, 2019, which is a continuation of U.S. application Ser. No. 15/428,064, filed Feb. 8, 2017, now U.S. Pat. No. 10,316,345, which is a continuation of U.S. application Ser. No. 14/586,857, filed Dec. 30, 2014, now U.S. Pat. No. 9,580,736, which claims benefit of U.S. Application No. 61/922,012, filed Dec. 30, 2013, the entire contents of each of which are incorporated herein by reference.

### REFERENCE TO AN ELECTRONIC SEQUENCE LISTING

[0002] The contents of the electronic sequence listing (BRUK_054_C07US_SeqList_ST26.xml; Size: 60,766,823 bytes; and Date of Creation: Oct. 8, 2024) are herein incorporated by reference in their entirety.

### BACKGROUND OF THE INVENTION

[0003] Variable genes such as immunoglobulin (Ig) and T cell receptor (TCR) genes are formed from rearrangement of V(D)J gene segments with P/N nucleotide additions between the junctions. A fully functional Ig or TCR protein is formed by association of two genes—heavy and light chain genes for Ig, alpha and beta genes for an αβTCR and gamma and delta genes for a γδTCR. This combinatorial approach results in an extremely large variety of different possible sequences.

[0004] This repertoire allows the immune system to be able to respond to novel immunological insults that have not yet been encountered by the organism. Immunoglobulin genes also undergo somatic hypermutation which further increases the repertoire size.

[0005] Correspondingly, any nucleic acid analysis of variable genes that allows for expression of the native Ig or TCR protein to investigate its functional properties requires not just sequencing individual B (for Ig genes) or T cells (for TCR genes), but also requires native pairing of the two genes that make up the protein. This can be done by single cell cloning and Sanger sequencing, but is slow and laborious (see, e.g., Wrammert et al., Nature, 2008, 453:667-671).

[0006] High-throughput methods have been developed for high-throughput sequencing of natively paired genes, and fall into two approaches. The first approach is to attach a unique nucleic acid barcode identifier to nucleic acids from a cell, and pairing is achieved via bioinformatically linking together genes if they share the same barcode and therefore originate from the same cell (PCT/US2012/000221). The second approach is to physically link nucleic acids from the two genes together (see, e.g., U.S. Pat. No. 7,749,697).

[0007] The first approach is superior as it allows pairing for multiple genes (such as B or T cell co-expressed genes that identify specific T cell or B cell subsets), while the second approach is limited to physically linking a few nucleic acids. To date, experimental data exists only for cases in which no more than two nucleic acids have been physically linked.

[0008] Associating nucleic acids unambiguously to a single cell (the first approach) rather than associating them with each other via linking (the second approach) has advantages. When nucleic acids are associated with each other, it can be difficult to distinguish PCR and sequencing errors from true biological variation. Assumptions have to be made about the accuracy of the sequencing platform and reads arbitrarily assigned to different sequences based on a percentage similarity cutoff, i.e. all reads with >95% similarity are assigned to a sequence and any differences between them are assumed to be due to sequencing errors. This is unable to distinguish between sequences that are very similar to one another (see Zhu et al., Frontiers in Microbiology, 2012, 3:315).

[0009] Furthermore, assumptions about how many cells share an identical sequence are made using the relative frequency of reads assigned to the sequence. This is an approximate measure and is affected by PCR amplification biases, as is well known in the field. Therefore, associating Ig or TCR nucleic acids with each other can only give an approximate, but not true representation of the repertoire sequenced (see Zhu et al., Frontiers in Microbiology, 2012, 3:315).

[0010] However, associating nucleic acids to single cells using nucleic acid barcodes allows for unambiguous differentiation between similar or even identical sequences from single B or T cells as each read can be assigned to a cell.

[0011] Furthermore, by building a consensus sequence with all reads associated with a cell, very accurate and almost completely error-free sequences can be obtained and an accurate representation of the repertoire sequenced can be obtained. This is also generalizable to analysis of all nucleic acids in a cell.

[0012] Still, technical difficulties in delivering unique barcodes to each single cell remain. The current best technology to attach nucleic acid barcodes to variable genes has unique barcodes in aqueous solution and each barcode exists in a separate storage container even before the reaction to attach barcodes to variable gene nucleic acids (PCT/US2012/000221), otherwise the nucleic acid barcodes will be mixed before use. This creates a logistical difficulty of barcoding many thousands of cells, due to the large number of containers required to contain the individual barcodes.

[0013] The requirement for a large number of storage containers also makes this approach incompatible with any sort of approach where a unique barcode cannot be individually pipetted into each individual reaction container (which will also contain a single cell). An example is nanoliter-sized reaction containers such as a nanowell approach, where it is impractical to pipette a unique barcode individually to each nanowell as there are thousands to hundreds of thousands of nanowells.

[0014] This is also infeasible in a nanodroplet approach, in which droplets are made using a water-in-oil emulsion, as hundreds of thousands of nanodroplets are generated with only a few aqueous streams (see for e.g., products by Dolomite Microfluidics or Raindance Technologies), and it is not possible to have unique barcodes in individual storage containers before delivering to the nanodroplet.

[0015] One method to deliver unique barcodes to individual reaction containers is by using limiting dilution to deposit a unique barcode into the majority of reaction containers. One may perform limiting dilution of barcodes attached to manipulable objects, such as beads, each of which has multiple copies of one particular barcode attached, or one may perform limiting dilution of barcodes in solution. Upon diluting such beads, multiple copies of one particular nucleic acid barcode are present in a reaction container, whereas upon diluting barcodes in solution, only a single copy of a particular nucleic acid barcode is present in a reaction container.

[0016] Moreover, addition of a nucleic acid barcode to the sample-derived nucleic acids of interest present in a reaction container will be more complete if the introduced barcode is amplified, to ensure that it is present in a sufficient quantity in the reaction chamber. For example, a typical mammalian cell contains roughly 400,000 copies of mRNA. To maximize the efficiency of the overall single-cell analysis, as many of these mRNA copies as possible should be barcoded. Therefore, at a minimum, roughly the same number of copies of a particular nucleic acid barcode as there are mRNA copies need to be present in the reaction container. Limiting dilution of barcodes in solution leads to just a single copy of a particular barcode in the reaction container, while dilution of small (e.g. 1-2 μm in diameter) beads bearing barcodes would be expected to provide maximally tens of thousands of copies. Thus, amplification of the barcode in either case is important to generate sufficient quantities of a particular nucleic acid barcode in a reaction container such that successful addition of the barcode to the greatest number of sample-derived nucleic acids occurs. However, beads are expected to provide significantly more starting material for and therefore significantly better barcode amplification. Also, a sufficiently large bead may contain hundreds of thousands of nucleic acid barcode molecules. In this case, cleavage of nucleic acid barcodes from the bead may be sufficient to generate sufficient quantities of a particular nucleic acid barcode in a reaction container.

[0017] Furthermore, if the nucleic acids are attached to a solid surface, they will not be as free to move about in comparison to nucleic acids in solution. Solid phase kinetics are much slower than aqueous phase kinetics for nucleic acid complementary base pairing, and may result in much less efficient addition of barcodes to nucleic acids of interest. Preferably, nucleic acid barcodes should exist in the aqueous phase before participating in the barcoding reaction.

[0018] This current invention improves upon a previous invention (PCT/US2012/000221) to attach unique barcodes to each sample, where each sample is usually a single cell, but is generalizable to any type of sample. The current invention enables delivery of unique barcodes to any type of reaction container, and is also suitable for nanoliter-sized reaction containers and does not require keeping unique nucleic acid barcodes in separate storage containers. It is amendable to but does not require manually pipetting a unique barcode into each reaction container. It delivers one or more copies of a unique barcode or unique barcode set into each reaction container and the barcode is attached to nucleic acids of interest in a reaction that occurs in the aqueous phase with rapid aqueous phase kinetics. As the reaction attaches barcodes to all nucleic acids of interest in a cell, i.e. all reverse transcribed RNA in a cell, the current invention enables single cell transcriptomics analysis, and is not limited to associating immunoglobulin variable genes to specific samples. Furthermore, the amplification reaction can occur at a sufficiently low temperature that it is compatible with mesophilic enzymes (that are otherwise inactivated at high temperatures) to add barcodes to nucleic acids of interest.

### SUMMARY OF THE INVENTION

[0019] Disclosed herein are methods and compositions for analyzing nucleic acids associated with single cells using nucleic acid barcodes. One method disclosed herein for producing one or more polynucleotides of interest comprises obtaining a plurality of nucleic acids associated with one or more samples, wherein the samples are obtained from one or more subjects, and the nucleic acids associated with a sample are present in a separate reaction volume. The nucleic acids can be RNA or DNA molecules (for example, cDNA molecules). In some embodiments, an adapter molecule is added to the nucleic acids associated with the sample. In some embodiments, the adapter molecule is generated using an enzymatic reaction and comprises a universal priming sequence, a barcode sequence, and a binding site. In some embodiments, the barcode sequence is incorporated into one or more polynucleotides associated with the sample, thereby producing the one or more polynucleotides of interest. In some embodiments, the method comprises adding an adapter molecule to the nucleic acids associated with the sample, wherein the adapter molecule is generated using an enzymatic reaction and comprises a universal priming sequence, a barcode sequence, and a binding site; and incorporating the barcode sequence into one or more polynucleotides associated with the sample, thereby producing the one or more polynucleotides of interest.

[0020] Disclosed herein is a method for producing one or more polynucleotides of interest. The method comprises obtaining a plurality of RNAs associated with one or more samples, wherein the samples are obtained from one or more subjects, and the RNAs associated with the sample are present in a separate reaction volume; adding an adapter molecule to the RNAs associated with the sample, wherein the adapter molecule is generated using an enzymatic reaction and comprises a universal priming sequence, a barcode sequence, and a binding site; and incorporating the barcode sequence into one or more polynucleotides associated with the sample, thereby producing the one or more polynucleotides of interest. In some embodiments, each RNA, or at least one of the plurality of RNAs, is associated with a single sample from the one or more samples. Some embodiments of the method further comprise generating the adapter molecule using the enzymatic reaction.

[0021] In some embodiments, the adapter molecule is generated by contacting a template molecule with one or more enzymes. In some embodiments, the template molecule is a DNA molecule comprising an RNA polymerase (RNAP) promoter, and the one or more enzymes include an RNA polymerase. The RNAP promoter can be selected from the group consisting of T7, T3, and SP6. In some embodiments, the template molecule is a DNA molecule comprising a nicking endonuclease restriction site, and the one or more enzymes include a nicking endonuclease and a strand-displacing DNA polymerase. The nicking endonuclease restriction site can be selected from the group consisting of Nt.BbvCI, Nt.BspQI, Nt.BsmAI, Nt.BstNBI, Nt.AlwI, and Nt.BsmAI. The strand-displacing DNA polymerase can be selected from the group consisting of Klenow exo−, Bst Large Fragment and engineered variants of Bst Large Fragment. The DNA molecule can be a double-stranded molecule or a single-stranded molecule that is useful as a template for generating a double-stranded molecule.

[0022] In some embodiments, the template molecule is bound to a solid support, the solid support is contacted with an aqueous solution, and the adapter molecule is released into the aqueous solution as it is generated. In some embodiments, adding the adapter molecule to the RNAs associated with one sample comprises combining the aqueous solution with the reaction volume in which the RNAs are present. In some embodiments, the aqueous solution is present in the same reaction volume as the RNAs associated with one sample. In some embodiments, the template molecule comprises an endonuclease restriction site, the one or more enzymes comprise a restriction endonuclease, and the adapter molecule comprises a portion of the template molecule, said portion being generated and released into the aqueous solution upon contacting the template molecule with the restriction endonuclease. In some embodiments, the solid support is a bead or a surface (e.g., the surface of a microtitre well or tube).

[0023] In some embodiments of the method, the adapter molecule is free in solution prior to adding the adapter molecule to the RNAs associated with one sample. In some embodiments, the adapter molecule is generated in a compartment, and adding the adapter molecule to the RNAs associated with one sample comprises combining the compartment with the reaction volume in which the RNAs are present. In some embodiments, the adapter molecule is generated in the reaction volume in which the RNAs to which the adapter molecule is added are present. In some embodiments, the adapter molecule is not generated in the reaction volume in which the RNAs to which the adapter molecule is added are present. In some embodiments, the enzymatic reaction is an isothermal reaction. In some embodiments, the adapter molecule further comprises a unique molecular identifier (UMI) sequence. In some embodiments, the adapter molecule is an RNA molecule. The adapter molecule can be generated using RNAP.

[0024] In some embodiments of the method, the adapter molecule is a DNA molecule. The adapter molecule can be generated using DNAP.

[0025] In some embodiments, producing the one or more polynucleotides of interest comprises reverse-transcribing the RNAs associated with the sample, thereby synthesizing a plurality of first-strand cDNAs, at least some of the RNAs associated with the sample comprise a sequence region complementary to the binding site of the adapter molecule, and the adapter molecule is used as a primer for reverse transcription, such that the barcode sequence is incorporated into first-strand cDNAs associated with the sample. In these embodiments, the binding site can comprise a poly-T tract or a random tract. The binding site can occur at the 3′ end of the adapter molecule. The adapter molecule can be generated in a compartment, and reverse-transcribing the RNAs associated with the sample can occur upon combining the compartment with the reaction volume in which the RNAs are present. Reverse-transcribing the RNAs associated with the sample can occur in the same reaction volume where the adapter molecule added to the RNAs is generated.

[0026] Some embodiments of the method further comprise reverse-transcribing the RNAs associated with the sample to obtain a plurality of cDNAs, wherein reverse-transcribing an RNA comprises synthesizing a first strand of cDNA using a reverse transcriptase and a first-strand primer. In these embodiments, the reverse transcriptase can be MMLV H− reverse transcriptase. The adapter molecule can be generated in a compartment, and adding the adapter molecule to the RNAs associated with one sample can comprise combining the compartment with the reaction volume in which the RNAs are present. First stands of cDNA can be synthesized prior to or subsequent to combining the compartment with the reaction volume.

[0027] In some embodiments, reverse-transcribing the RNAs associated with the sample occurs in the same reaction volume where the adapter molecule added to the RNAs is generated. In these embodiments, a buffer in the reaction volume can comprise at least one of Tris, potassium ions, chloride ions, sulphate ions, ammonium ions, acetic acid ions, or magnesium ions at a pH range from pH 8.0 to pH 8.8.

[0028] In some embodiments, the reverse transcriptase has template switching activity, at least some first strands of cDNA associated with the sample comprise a 3′ overhang, the binding site of the adapter molecule comprises a 3′ portion complementary to the 3′ overhang, and the adapter molecule serves as a template for the reverse transcriptase, such that the barcode sequence is incorporated into first strands of cDNAs associated with the sample. In these embodiments, the 3′ overhang can comprises one or more C nucleotides and the 3′ portion of the binding site can comprise one or more G nucleotides. The first-strand primer can comprise a poly-T tract or a random sequence.

[0029] In some embodiments, producing polynucleotides of interest comprises amplifying the first strands of cDNA for each sample using a first (e.g., forward) primer and a second (e.g., reverse) primer, the second primer having the same sequence as at least a portion of the first-strand primer, wherein the first primer or the second primer is the adapter molecule. In these embodiments, the first primer or the second primer can be the adapter molecule. The first-strand primer can comprise a poly-T tract or a random sequence.

[0030] In some embodiments of the method, each sample comprises a cell. The cell can be a blood cell, an immune cell, a tissue cell, or a tumor cell. In some embodiments, the cell is a B cell or T cell. The B cell can be a plasmablast, a memory B cell, or a plasma cell. In some embodiments, the RNAs associated with each sample comprise mRNAs, for example at least 1, 3, 10, 30, 100, 300, 1,000, 3,000, 10,000, 30,000, 100,000, 300,000, or 1,000,000 mRNAs. In some embodiments, the RNAs associated with each sample comprise the transcriptome of a cell or the total RNA of a cell. In some embodiments, at least 10, 30, 100, 300, 1,000, 3,000, 10,000, 30,000, 100,000, 300,000, or 1,000,000 polynucleotides of interest are produced per sample. In some embodiments, the one or more samples comprise at least 10, 30, 100, 300, 1,000, 3,000, 10,000, 30,000, 100,000, 300,000, or 1,000,000 cells. In some embodiments, the one or more samples are obtained from the same subject. Some embodiments further comprise contacting the samples with a lysis buffer.

[0031] Some embodiments further comprise contacting the samples with a nucleic acid marker, thereby allowing the nucleic acid marker to bind to a subset of the samples; and washing the samples, thereby removing the nucleic acid marker from samples to which the nucleic acid marker does not bind, wherein, for samples within the subset, the adapter molecule added to the RNAs associated with the sample is also added to the nucleic acid marker, and one or more polynucleotides of interest are produced using the labeled nucleic acid marker. In these embodiments, the nucleic acid marker can comprise a nucleic acid coupled to a molecular label. The molecular label can be an antibody, antigen, or protein. The molecular label can have affinity for one or more cell surface moieties. In some embodiments, the nucleic acid is an RNA. In some embodiments, the nucleic acid is a DNA and can comprise an RNAP promoter. In some embodiments, the sample is contacted with a first nucleic acid marker and a second nucleic acid marker, wherein the first nucleic acid marker comprises a first nucleic acid coupled to a first molecular label, and the second nucleic acid marker comprises a second nucleic acid coupled to a second molecular label. The first nucleic acid and second nucleic acid can comprise different sequence regions. In some embodiments, the first and second molecular labels are different (e.g., two different antibodies to different cell surface antigens). Thus, the method allows multiplex labeling of samples, such as single cells, with nucleic acid markers comprising adapter molecules, and producing one or more polynucleotides of interest that are associated with the sample.

[0032] In some embodiments of the method the one or more samples are obtained from the same subject. In some embodiments, the one or more samples are obtained from at least 3, 10, 30, or 100 different subjects.

[0033] Also disclosed herein are barcode adapter constructs. Some such barcode adapter constructs comprise an RNAP promoter, a universal priming sequence, a barcode sequence, and a binding site. The RNAP promoter can be selected from the group consisting of T7, T3, and SP6. Other barcode adapter constructs comprise a nicking endonuclease restriction site, a universal priming sequence, a barcode sequence, and a binding site. The nicking endonuclease restriction site can be selected from the group consisting of Nt.BbvCI, Nt.BspQI, Nt.BsmAI, Nt.BstNBI, Nt.AlwI, and Nt.BsmAI.

[0034] Further disclosed herein is a solid support comprising a barcode adapter construct as described above. In some embodiments, the barcode adapter construct is bound to the solid support via a covalent bond. In some embodiments, multiple copies of the barcode adapter construct are bound to the solid support. For example, at least 10, 30, 100, 300, 1,000, 3,000, 10,000, 30,000, 100,000, 300,000, or 1,000,000 copies of the barcode adapter construct can be bound to the solid support. In some embodiments, each copy of the barcode adapter construct comprises the same barcode sequence. An adapter template library comprising a plurality of solid supports coupled to multiple copies of the adapter construct is also disclosed herein. In some embodiments, the plurality of solid supports comprises at least 10, 30, 100, 300, 1,000, 3,000, 10,000, 30,000, 100,000, 300,000, or 1,000,000 solid supports. In some embodiments, at least two of the solid supports comprise adapter constructs with different barcode sequences or UMI sequences. In some embodiments, every solid support of the plurality of solid supports comprises an adapter construct with a different barcode sequence or a different UMI sequence.

[0035] Also disclosed herein is a nucleic acid marker comprising a nucleic acid coupled to a molecular label. In some embodiments, the molecular label is an antibody, antigen, or protein. In some embodiments, the molecular label has an affinity for one or more cell surface moieties. In some embodiments, the nucleic acid is an RNA. In some embodiments, the nucleic acid is a DNA. The DNA can comprise an RNAP promoter sequence. In some embodiments, a plurality of nucleic acid markers are described, where at least one of the plurality comprises a first molecular label (i.e., a first antibody) and at least one of the plurality comprises a second molecular label (i.e., a second antibody). In some embodiments, the first and second molecular labels are different, thus providing compositions useful for multiplex labeling of different cell surface moieties (e.g., different cell surface antigens) with nucleic acid markers described herein.

[0036] Further disclosed herein are kits comprising adapter constructs described herein. The kit can comprise a plurality of solid supports coupled to adapter constructs described herein. In some embodiments, the kit comprises an adapter template library comprising a plurality of adapter constructs. In some embodiments, the kit comprises an adapter template library comprising a plurality of adapter constructs coupled to a plurality of solid supports. The kit can further comprise enzymes for generating an adapter molecule described herein from the adapter construct by an enzymatic reaction. In some embodiments, the kit comprises a cell suspension buffer described herein.

[0037] Further disclosed herein is a cell suspension buffer comprising an osmoprotectant. In some embodiments, the osmoprotectant is a betaine or a close structural analog thereof. For example, the osmoprotectant can be a glycine betaine. In some embodiments, the osmoprotectant is a sugar or polyol. For example, the osmoprotectant can be trehalose. In some embodiments, the osmoprotectant is an amino acid. For example, the osmoprotectant can be proline. In some embodiments of the cell suspension buffer, the osmolarity of the buffer is about 250-350 mOsm/L. In some embodiments, the osmoprotectant contributes up to 10%, 20%, 30%, 40%, 50%, 60%, 70%, 80%, 90%, or 100% of the osmolarity of the buffer. In some embodiments, the buffer comprises about 230-330 mM betaine and about 10 mM NaCl.

[0038] Also disclosed herein is a method of attaching a polynucleotide to a solid support, wherein the polynucleotide contains a barcode sequence. The method comprises the steps of: a) generating a hydrophilic compartment of an inverse emulsion, the hydrophilic compartment containing: a solid support, a barcode oligonucleotide comprising a barcode sequence, and an oligonucleotide bound to a surface of the solid support via a capture moiety, wherein the bound oligonucleotide comprises a 3′ sequence complementary to a 3′ sequence of the barcode oligonucleotide; and b) performing a polymerase extension reaction to incorporate the barcode sequence into the bound oligonucleotide on the solid support. In some embodiments, the barcode oligonucleotide further comprises a 5′ sequence identical or complementary to a PCR reverse primer sequence. These embodiments can further comprise performing a PCR reaction using a fluorophore-labeled reverse primer. In some embodiments, the solid support is a bead. In some embodiments, the capture moiety is streptavidin. In some embodiments, the capture moiety comprises a carboxyl group, epoxy group, or hydroxyl group. In some embodiments, the capture moiety comprises gold to capture thiolyated oligonucleotides.

[0039] In some embodiments, the barcode oligonucleotide further comprises a universal priming sequence and a binding site. The barcode oligonucleotide can further comprise an RNAP promoter selected from the group consisting of T7, T3, and SP6. Alternatively or in addition, the barcode oligonucleotide can further comprise a nicking endonuclease restriction site selected from the group consisting of Nt.BbvCI, Nt.BspQI, Nt.BsmAI, Nt.BstNBI, Nt.AlwI, and Nt.BsmAI. The binding site can be one or more G nucleotides.

[0040] Another method of attaching a polynucleotide to a solid support, wherein the polynucleotide contains a barcode sequence, is also disclosed. The method comprises the steps of: a) providing: a solid support, a first barcode oligonucleotide comprising a W sequence, and an oligonucleotide bound to a surface of the solid support via a capture moiety, wherein the bound oligonucleotide comprises (i) an S1x sequence and (ii) a sequence complementary to a 3′ sequence of the first barcode oligonucleotide; b) performing a polymerase extension reaction or a ligation reaction to incorporate the W sequence into the bound oligonucleotide; c) providing a second barcode oligonucleotide comprising an (i) S2y sequence and (ii) a 3′ sequence complementary to the 3′ end of the bound oligonucleotide resulting from step b); and d) performing a polymerase extension reaction or ligation reaction to incorporate the S2y sequence into the bound oligonucleotide, thereby attaching a polynucleotide to the solid support, wherein the polynucleotide contains a barcode sequence, and the barcode sequence comprises the S1x, W, and S2y sequences.

[0041] In some embodiments of this method, the solid support is a bead. In some embodiments, the capture moiety is streptavidin. In some embodiments, the capture moiety comprises a carboxyl group, epoxy group, or hydroxyl group. In some embodiments, the capture moiety comprises gold to capture thiolyated oligonucleotides. In some embodiments, a chosen barcode oligonucleotide, the chosen barcode oligonucleotide being either the first barcode oligonucleotide or the second barcode oligonucleotide, further comprises a universal priming sequence and a binding site. The chosen barcode oligonucleotide can further comprise an RNAP promoter selected from the group consisting of T7, T3, and SP6. Alternatively or in addition, the chosen barcode oligonucleotide can further comprise a nicking endonuclease restriction site selected from the group consisting of Nt.BbvCI, Nt.BspQI, Nt.BsmAI, Nt.BstNBI, Nt.AlwI, and Nt.BsmAI. The binding site can be one or more G nucleotides.

[0042] Further disclosed herein is a solid support prepared by any embodiment of the foregoing methods, wherein the solid support is attached to a polynucleotide and the polynucleotide contains a barcode sequence. Also disclosed is a barcode library comprising a plurality of these solid supports.

[0043] In addition, a microfluidic droplet device is disclosed herein for encapsulating cells, barcode adapter templates, and reagents for producing polynucleotides of interest. The device comprises (a) three independently controlled pressure sources, (b) three microfluidic pathways, (c) three flow sensors, (d) two sample loops, (e) a microfluidic droplet chip, and (f) a sample collection container, wherein: each pressure source is coupled to and drives fluid through one of the microfluidic pathways, one of the flow sensors is disposed along each microfluidic pathway downstream of the respective pressure source, a first microfluidic pathway passes through a first sample loop, a second microfluidic pathway passes through a second sample loop, the first and second sample loops being in contact with a thermal cooling unit, the first and second microfluidic pathways merge at a first junction to form a combined pathway, the combined pathway and third microfluidic pathway merge at a second junction to form a sample pathway, the second junction occurring within the microfluidic droplet chip and downstream of the first junction, and the sample pathway passes into the sample collection container downstream of the second junction, such that (a)-(f) are fluidly connected.

[0044] In some embodiments of the device, each pressure source comprises a pressure pump. In some embodiments, each pressure source comprises a syringe pump. In some embodiments, the first sample loop is configured to meter the flow of an aqueous solution toward the microfluidic droplet chip, wherein the aqueous solution comprises cells and barcode adapter templates. In some embodiments, the second sample loop is configured to meter the flow of a reaction mixture toward the microfluidic droplet chip, wherein the reaction mixture comprises reagents for cell lysis and reagents for producing polynucleotides of interest. In some embodiments, the third microfluidic pathway is configured to deliver an oil/surfactant mix to the microfluidic droplet chip. In some embodiments, the thermal cooling unit comprises a Peltier device. In some embodiments, the thermal cooling unit comprises an ice bin. In some embodiments, the first junction occurs within the droplet chip. In some embodiments, the third microfluidic pathway is split into two subpathways upstream of the microfluidic droplet chip, the two subpathways merge with the combined pathway at the second junction, and the second junction has flow-focusing geometry. In some embodiments, the second junction has a t-junction geometry. In some embodiments, the first microfluidic pathway is configured to accommodate cells, and the second microfluidic pathway is configured to accommodate barcode adapter templates bound to solid supports.

[0045] Disclosed herein is a method for producing one or more polynucleotides of interest, comprising obtaining a cDNA library comprising a plurality of cDNAs associated with one or more samples obtained from one or more subjects, wherein each cDNA is associated with a single sample in the one or more samples, and wherein the cDNAs associated with each sample are present in a separate container or compartment. In some embodiments, an adapter molecule is added to the cDNAs associated with each sample to produce the one or more polynucleotides of interest. In some embodiments, the adapter molecule is generated from an adapter construct comprising a universal priming sequence, a barcode, and a cDNA binding site.

[0046] In some aspects, the adapter molecules are generated using an isothermal reaction. In some aspects, the adapter construct further comprises an RNA polymerase (RNAP) promoter. In some aspects, the RNAP promoter is selected from the group consisting of T7, T3, and SP6. In some aspects, the adapter construct further comprises a nicking endonuclease restriction site. In some aspects, the nicking endonuclease restriction site is selected from the group consisting of Nt.BbvCI, Nt.BspQI, Nt.BsmAI, Nt.BstNBI, Nt.AlwI, and Nt.BsmAI. In some aspects, the adapter is an RNA adapter generated by RNAP. In some aspects, the adapter is a DNA adapter generated by a nicking endonuclease and strand displacing DNA polymerase. In some aspects, the strand displacing DNA polymerase is selected from the group consisting of Klenow exo− and Bst Large Fragment and its engineered variants, such as Bst 2.0.

[0047] In some aspects, the method further comprises allowing the 3′ end of the adapter molecule to attach to the 3′ end of each cDNA in the library to produce the one or more polynucleotides of interest.

[0048] In some aspects, the adapter is added by annealing the adapter to the ‘3 tail of a cDNA generated during a reverse transcription reaction. In some aspects, each cDNA comprises at least one C nucleotide, wherein C is located at the 3′ end of each cDNA, wherein the adapter region comprises at least one G nucleotide, wherein G is located at the 3′ end of the adapter region, and wherein the adapter region is attached to each cDNA via binding between the G and C. In some aspects, the adapter molecule is single-stranded, and further comprising incorporating the complementary of the adapter molecule into each cDNA by allowing an enzyme to make the adapter molecule double-stranded. In some aspects, the complementary of the adapter molecule is incorporated into each cDNA to produce the polynucleotide of interest by an MMLV H-reverse transcriptase.

[0049] In some aspects, each sample comprises a cell. In some aspects, the cell is a blood cell, an immune cell, a tissue cell, or a tumor cell. In some embodiments, the cell is a B cell or a T cell. In some aspects, the B cell is a plasmablast, memory B cell, or a plasma cell.

[0050] Also disclosed herein is a method of attaching a barcode to a solid support comprising the steps of: a) generating a hydrophilic compartment of an inverse emulsion, the hydrophilic compartment comprising: a solid support contained therein, wherein the solid support comprises an oligonucleotide bound to the surface via a capture moiety, wherein the oligonucleotide comprises a 3′ sequence complementary to a 3′ sequence on a barcode oligonucleotide; a barcode oligonucleotide comprising a 3′ sequence complementary to the 3′ end of the bound oligonucleotide, and a barcode sequence; and b) performing a polymerase extension reaction to add the sequence of the barcode to the bound oligonucleotide on the solid support.

[0051] In some aspects, the barcode oligonucleotide further comprises a 5′ sequence identical or complementary to a reverse PCR primer. In some aspects, the method further comprises performing a PCR reaction using a fluorophore-labeled reverse primer.

[0052] In some aspects, the solid support is a bead or a surface. In some aspects, the capture moiety is streptavidin. In some aspects, the barcode oligonucleotide further comprises a RNA polymerase (RNAP) promoter and/or an endonuclease restriction site, a universal priming sequence, a cDNA binding site. In some aspects, the RNAP promoter selected from the group consisting of T7, T3, and SP6. In some aspects, the nicking endonuclease restriction site is selected from the group consisting of Nt.BbvCI, Nt.BspQI, Nt.BsmAI, Nt.BstNBI, Nt.AlwI, and Nt.BsmAI. In some aspects, the cDNA binding site is one or more G nucleotides.

[0053] Also disclosed herein is a method of attaching a barcode to a solid support comprising the steps of a) providing a solid support, with an oligonucleotide bound to the solid support via a capture moiety, wherein the oligonucleotide comprises an S1ₓ sequence, and a sequence complementary to a 3′ sequence on a first barcode oligonucleotide; a first barcode oligonucleotide comprising a 3′ sequence complementary to a sequence of the bound oligonucleotide, and a W sequence; and b) performing a polymerase extension reaction or ligation reaction to add the W sequence to the S1ₓ sequence of the bound oligonucleotide on the solid support; c) providing a second barcode oligonucleotide with a S2_{y} sequence comprising a 3′ sequence complementary to the 3′ end of the oligonucleotide extended in step b); d) performing a polymerase extension reaction or ligation reaction to add the S2_{y} sequence to the S1ₓ and W sequences of the bound oligonucleotide on the solid support, where the barcode sequence comprises the S1ₓ, W, and S2_{y} sequences.

[0054] In some aspects, the solid support is a bead. In some aspects, the capture moiety is streptavidin. In some aspects, the first or second barcode oligonucleotide further comprises a RNA polymerase (RNAP) promoter and/or a nicking endonuclease restriction site, a universal priming sequence, a cDNA binding site. In some aspects, the RNAP promoter selected from the group consisting of T7, T3, and SP6. In some aspects, the endonuclease restriction site is selected from the group consisting of Nt.BbvCI, Nt.BspQI, Nt.BsmAI, Nt.BstNBI, Nt.AlwI, and Nt.BsmAI. In some aspects, the cDNA binding site is one or more G nucleotides.

[0055] Also disclosed herein is a solid support with an attached barcode generated by any of the the methods disclosed above. Also disclosed herein is a beaded barcode library comprising a plurality of such solid supports with attached barcodes.

[0056] Also disclosed herein is a barcode adapter construct comprising a universal priming sequence, a barcode, and a cDNA binding site. In some aspects, the construct further comprises an RNAP promoter. In some aspects, the RNAP promoter is selected from the group consisting of T7, T3, and SP6. In some aspects, the construct further comprises a nicking endonuclease restriction site. In some aspects, the nicking endonuclease restriction site is selected from the group consisting of Nt.BbvCI, Nt.BspQI, Nt.BsmAI, Nt.BstNBI, Nt.AlwI, and Nt.BsmAI.

[0057] Also disclosed herein is a barcode adapter template bead comprising a solid support and a barcode adapter molecule bound to the solid support via a capture moiety, wherein the barcode adapter molecule comprises a barcode sequence and a cDNA binding site. In some aspects, the cDNA binding site comprises one or more G nucleotides. In some aspects, the barcode sequence comprises a sequence S1ₓ-W-S2_{y}. Also disclosed herein is a beaded barcode library comprising a plurality of the barcode adapter template beads as disclosed above.

[0058] Also disclosed herein is a polynucleotide library comprising a plurality of barcode adapter template beads comprising a solid support and a barcode adapter molecule bound to the solid support via a capture moiety, wherein the barcode adapter molecule comprises a barcode sequence and a cDNA binding site, wherein a cDNA region is coupled to the 3′ end of the adapter.

[0059] In some aspects, the cDNA binding site comprises one or more G nucleotides. In some aspects, the barcode sequence comprises a sequence S1ₓ-W-S2_{y}.

[0060] In some aspects, the cDNA is derived from a B cell. In some aspects, the B cell is a plasmablast, memory B cell, or a plasma cell. In some aspects, the cDNA is a B-cell derived variable immunoglobulin region.

[0061] Also disclosed herein is a microfluidic droplet device as shown in FIGS. 17-19.

### BRIEF DESCRIPTION OF THE DRAWINGS

[0062] These and other features, aspects, and advantages will become better understood with regard to the following description, and accompanying drawings, where:

[0063] FIG. 1 is a map of an adapter molecule, or a template molecule for generating an adapter molecule, according to some embodiments of the invention. The sequence of an adapter molecule can include an RNA polymerase promoter and/or a nicking endonuclease site, followed by a universal priming sequence (used in subsequent PCR steps for annealing primers) followed by a barcode sequence and a nucleic acid binding sequence.

[0064] FIGS. 2A and 2B show methods of amplifying or generating an adapter molecule according to some embodiments of the invention. In FIG. 2A, RNA barcode adapters are synthesized in a linear amplification reaction by an RNAP, such as T7, which binds to a promoter sequence on a DNA template and synthesizes single-stranded barcode adapter RNA. In FIG. 2B, a nicking endonuclease such as Nt.BbvCI (NEB) is used to introduce a nick on the sense strand of a DNA template. DNA barcode adapters are then synthesized in an amplification reaction by a strand-displacing enzyme, such as Klenow exo−, which extends the nick and displaces the single-stranded barcode adapter.

[0065] FIG. 3 shows the incorporation of barcode sequences into first strand cDNA according to some embodiments of the invention. Here RNA barcode adapters are synthesized to demonstrate barcoding of cDNA. DNA barcode adapters (synthesized in FIG. 2B) may also be used. An RNAP primes off its promoter and synthesizes RNA barcode adapters (FIG. 3, top left). In the same reaction, reverse transcription occurs and 1^{st} strand cDNA is generated (top right). The MMLV-based H− reverse transcriptase has 3′ tailing activity and adds several dCs to the 3′ end of the 1^{st} strand cDNA. The barcode adapter base-pairs with the tailed dCs (bottom) and the reverse transcriptase continues transcription using the barcode adapter as a template, incorporating the barcode sequence into the 1^{st} strand cDNA. All mRNAs in the reaction are therefore barcoded.

[0066] FIG. 4 shows that RNA barcode adapters have less background than DNA barcode adapters in embodiments of the invention. In the barcoding reaction in FIG. 3, both oligo(dT) and barcode adapters are present, and both oligos can prime the reverse transcription reaction. When the reaction is primed with oligo(dT) (FIG. 4, top), the reaction proceeds as normal. When the RT reaction is misprimed with a DNA barcode adapter (middle), during PCR the forward primer can prime off both the sense and anti-sense strands and create amplification of non-desired products. When the RT reaction is primed with RNA barcode adapter (bottom), the growing strand cannot use RNA nucleotides as a template when using a proof-reading DNA polymerase in PCR1, and as a result misprimed cDNAs will not contain barcode adapter sequences on both the sense and anti-sense strands. Therefore non-desired products should not be exponentially amplified, resulting in significantly less background.

[0067] FIGS. 5A-C are cartoons illustrating the segregation of reaction volumes for generating barcode adapters and performing reverse transcription, according to some embodiments of the present invention. Barcode adapter molecules can be enzymatically generated in a plurality of first reaction volumes, such as droplets, which are represented by the vertical lines in FIG. 5A. Each first reaction volume can contain barcode adapter molecules in aqueous solution, all with the same barcode sequence. Separately, RNA molecules can be reverse transcribed in a plurality of second reaction volumes, which are represented by the horizontal lines in FIG. 5B. Each second reaction volume can contain RNA molecules all derived from the same sample. The first and second reaction volumes can then be combined, such as by merging droplets, as represented by the crossed lines in FIG. 5C. The products of the reactions in FIGS. 5A and 5B are mixed together, such that one barcode sequence is introduced into the reaction volume corresponding to each sample. The barcode sequence can be incorporated into first-strand cDNA or PCR products.

[0068] FIGS. 6A-D show the amplification of barcode adapter templates to produce barcode adapter molecules, in various embodiments of the invention. FIG. 6A shows barcode adapter templates attached to a solid surface, such as a bead. FIG. 6B shows barcode adapter molecules in aqueous solution, resulting from amplification of the barcode adapter templates in FIG. 6A. FIG. 6C shows a single barcode adapter template molecule. The molecule is in aqueous solution and is held inside a container. FIG. 6D shows the container of FIG. 6C with multiple barcode adapter molecules, which result from amplification of the single template molecule.

[0069] FIGS. 7A-D show the generation of barcode adapter molecules from templates, wherein the templates are attached to solid surfaces. Upon generation, the barcode adapter molecules are in aqueous solution. FIGS. 7A and 7B show barcode adapter templates attached to solid surfaces. FIG. 7C shows barcode adapter molecules amplified enzymatically from the barcode adapter templates in FIG. 7A. FIG. 7D shows barcode adapter molecules released into solution upon the chemical or enzymatic cleavage of the barcode adapter templates in FIG. 7B from the solid surface.

[0070] FIG. 8 shows incorporation of a barcode sequence into a first strand of cDNA using a DNA barcode adapter. (Top) The barcode adapter, including a 3′ poly-T tract, is generated from a barcode adapter template using a DNA polymerase. Barcode adapter molecules are in aqueous solution. (Bottom) The barcode adapter anneals to the poly-A tail of an mRNA and serves as a primer for reverse transcription. The barcode sequence is incorporated into the 5′ end of the first strand of cDNA.

[0071] FIG. 9 shows incorporation of a barcode sequence into a first strand of cDNA using a DNA barcode adapter. (Top) The barcode adapter, including a 3′ random or semi-random sequence tract, is generated from a barcode adapter template using a DNA polymerase. Barcode adapter molecules are in aqueous solution. (Bottom) The barcode adapter, by annealing to a region of an RNA that is at least partially complementary to the 3′ sequence tract, serves as a primer for reverse transcription. The barcode sequence is incorporated into the 5′ end of the first strand of cDNA.

[0072] FIG. 10 is a schematic overview of a barcoding workflow that eliminates individual pipetting steps. In brief, barcoding reactions occur in water-in-oil droplets, where cells and beads containing barcode adapters are distributed by a droplet generating device. Barcode adapters are enzymatically amplified or released from a solid surface, such as a bead, and the barcodes are added to all transcripts from a cell.

[0073] FIG. 11 shows incorporation of a barcode sequence into an amplicon using a DNA barcode adapter that serves as a forward primer for RT-PCR. The barcode adapter is generated enzymatically from a DNA template using a DNA polymerase (upper left). Barcode adapter molecules are in aqueous solution. In a separate reaction volume, or in the same reaction volume, a first strand of cDNA is synthesized (upper right) using an mRNA template, a reverse transcriptase, a primer containing a poly-T tract, and a template-switching oligonucleotide. The template-switching oligonucleotide contains a sequence region complementary to a sequence region in the barcode adapter. The barcode sequence is then incorporated into an amplicon during PCR amplification of the cDNA (bottom). The barcode adapter serves as a forward primer for PCR.

[0074] FIG. 12 shows incorporation of a barcode sequence into an amplicon using a DNA barcode adapter that serves as a reverse primer for RT-PCR. The barcode adapter is generated enzymatically from a DNA template using a DNA polymerase (upper left). Barcode adapter molecules are in aqueous solution. In a separate reaction volume, or in the same reaction volume, a first strand of cDNA is synthesized (upper right) using an mRNA template, a reverse transcriptase, a primer containing a poly-T tract, and a template-switching oligonucleotide. The primer contains a 5′ sequence region complementary to a 3′ sequence region in the barcode adapter. The barcode sequence is then incorporated into an amplicon during PCR amplification of the cDNA (bottom). The barcode adapter serves as a reverse primer for PCR.

[0075] FIG. 13 shows incorporation of a barcode sequence into an amplicon using a DNA barcode adapter that serves as a reverse primer for RT-PCR. The barcode adapter is generated enzymatically from a DNA template using a DNA polymerase (upper left). Barcode adapter molecules are in aqueous solution. In a separate reaction volume, or in the same reaction volume, a first strand of cDNA is synthesized (upper right) using an mRNA template, a reverse transcriptase, a primer containing a 3′ random sequence tract, and a template-switching oligonucleotide. The primer can anneal to the mRNA through the random sequence tract, and also contains a 5′ sequence region complementary to a 3′ sequence region in the barcode adapter. The barcode sequence is then incorporated into an amplicon during PCR amplification of the cDNA (bottom). The barcode adapter serves as a reverse primer for PCR.

[0076] FIG. 14A-C illustrates methods of interrogating a population of cells for a selected phenotype using a nucleic acid marker, according to embodiments of the present invention. In addition to barcoding RNA from cells, any RNA, including RNA from non-cell sources, can be barcoded. Non-cell RNA may be introduced into reaction volumes by any means, such as by labeling cells with a nucleic acid marker. This marker can include a nucleic acid coupled to a molecular label, such as an antibody (FIG. 14A), an antigen (FIG. 14B), or pNMC (FIG. 14C). The nucleic acid marker can bind to some or all cells in the population, depending on the phenotypes of the cells and their affinities for the molecular label. All cells in the population can then be lysed and mRNAs in each cell can be barcoded. For cells that bind the nucleic acid marker, the associated nucleic acid can be barcoded as well. This nucleic acid can be an RNA, or a dsDNA template with an RNAP promoter, such as a T7, T3 or SP6 promoter. Sequencing can then associate non-endogenous RNA sequences with specific cells, thereby detecting which cells bound to the molecular label. Different molecular labels can be coupled to different nucleic acid sequences, enabling identification of multiple cellular phenotypes.

[0077] FIG. 15 shows synthesis of barcode adapter template beads in one reaction according to some embodiments of the invention. (Left) Beads are coupled to an oligonucleotide. Coupling may be done by coupling biotinylated oligos onto streptavidin coated beads, and may also be coupled using other means known in the field. (Right) Coupled beads, forward and reverse primers, and a barcode oligo containing a barcode sequence and sequences complementary to the forward and reverse primers are all present in a reaction container, with the barcode oligo preferably present at only a single copy. PCR is then conducted to amplify the barcode sequence and incorporate it into the bead-coupled oligonucleotides to form barcode adapter template beads.

[0078] FIG. 16 shows synthesis of barcode adapter template beads in multiple steps according to some embodiments of the invention. (Top) Beads are coupled to (multiple copies of) an oligonucleotide containing a unique S1 sequence. Multiple, separate coupling reactions are performed, with each coupling reaction using an oligonucleotide containing a different unique S1 sequence. Beads, each coupled to an oligonucleotide with a different unique S1 sequence, are then pooled together, forming a library of beads having S1ₓ sequences. (Middle) These beads are then used in an extension reaction. In each reaction, an oligonucleotide that contains a unique W sequence complementarily base-pairs with the S1ₓ-containing oligonucleotide coupled to the bead, and an extension reaction using a DNA polymerase is performed. Beads from all the extension reactions are pooled, and a library of beads containing a combination of S1ₓ sequences each with the unique W sequence are formed. (Bottom) The double-stranded DNA from the previous step is denatured and the antisense strand washed off the beads. Additional, separate extension reactions are performed on the beads as before, but the oligonucleotide that complementarily base-pairs with the S1ₓ and W containing oligonucleotide coupled to the beads contains a different unique S2 sequence in each separate reaction. Beads from all extension reactions are pooled, and a library of beads containing barcode adapter templates is obtained, with a combination of S1ₓ, W, and S2_{y} sequences forming the barcode sequence. A large number of unique barcode sequences can thus be obtained in this combinatorial approach. Furthermore, multiple unique W sequences can each be combined with the S1ₓ and S2_{y} sequences, yielding barcodes of the general format S1ₓ-W_{z}-S2_{y}.

[0079] FIG. 17 shows a droplet device according to embodiments of the invention. Three Dolomite P-Pumps are equipped with flow sensors. The first P-Pump is connected directly to a 2-Reagent Droplet Chip via microfluidic tubing that incorporates a T-junction to split the line into two inputs. This is the oil input line. The other two P-Pumps are connected via fluidic tubing to FEP sample loops that fit into the grooves of a Peltier device used to keep samples chilled while the device is operating, and each of these loops is connected to the 2-Reagent Droplet Chip. Each sample loop incorporates a four-way valve at its front end so that sample can be loaded into the loop by means of a syringe. The first sample loop is to be filled with the cell and barcoded bead suspension while the second loop is to be filled with RT/lysis mix. The sample loops can be oriented horizontally and above or level with the droplet chip so as to avoid any uphill sections through which it may be difficult for cells and beads to travel.

[0080] FIG. 18 provides details of the configuration of the droplet device shown in FIG. 17. Parts given by IDEX H&S part number: 1.0.A) 1528 (110 mm); 1.0B) P-732; 1.0.C) P-232/P-248; 1.0.D) 1688 (300 mm); 1.0.E) M-645; 1.0.F) P-630; 1.0.H) P-632; 1.0.J) P-702; 1.0.K) 1529 (50 mm); 1.0.L) V-101D; 1.0.N) P-732; 1.0.0) P-624; 1.0.T) 1531 (900 mm); 1.2.A) P-630; 1.2.B) 1516 (500 mm); 1.2.C) P-702; 1.2.D) 1529 (150 mm); 1.2.E) P-702; 1.2.G) 1560 (150 mm); 1.3.A) 1528 (135 mm); 1.5.A) 1516 (150 mm); 1.5.B) 1529 (300 mm); 1.7.A) 61005; 1.7.B) 65020; 2.0.A) 1477 (1254 mm); 2.0.B) 1527 (1254 mm); 2.0.C) 1520 (120 mm); 2.0.D) 1520 (600 mm); 2.0.E) 1520 (200 mm); 2.0.F) 1520 (200 mm). Exit tubing (from the chip to the sample collection tube) is 180 mm of 1562.

[0081] FIG. 19 shows an alternative embodiment of the droplet device described herein. The sample loops are in contact with an ice bin.

[0082] FIG. 20 shows RNA barcode adapters amplified from barcode adapter template beads, which were made using a multi-step approach. Barcode adapter template beads were used in an in vitro transcription reaction. Bands were present from beads made using S1-oligo+W-oligo-a+S2-oligo-a and S1-oligo+w-oligo-b+S2-oligo-b respectively.

[0083] FIG. 21 shows a barcoding reaction performed in a variety of buffers. 1, 2, and 3 refer to three reaction buffers, which were respectively the 0.5×MMLV, 1× Thermopol DF and 0.5×TAE buffers described below. K, L, and G refer to kappa, lambda and gamma immunoglobulin chains. All chains were amplified in the different reaction buffers used.

[0084] FIG. 22 shows that a barcoding reaction works better using RNA barcodes. 1, 2, and 3 refer to three reaction conditions, which were the 1×MMLV and 0.5×MMLV conditions using RNA barcode adapters, and 1×MMLV using DNA barcode adapters. K, L, and G refer to kappa, lambda and gamma immunoglobulin chains. The bands in the reaction using DNA adapters were obscured due to high background.

[0085] FIG. 23 shows amplified products from barcoding single B cells in droplet reaction containers with barcode adapter templates. The bands corresponding to kappa and lambda light chains (“K/L”) and mu heavy chain (“M”) can be clearly seen.

[0086] FIG. 24 shows RT/PCR amplification of light-chain (kappa/lambda) and heavy-chain (gamma) targets following co-encapsulation with barcoded beads in an aqueous-in-oil emulsion. Each sample is run in paired lanes—one for kappa/lambda light chain (left) and one for gamma heavy chain (right). Emulsion samples included the cell+bead co-encapsulated experimental sample (Cell+bead), as well as two control samples prepared identically except that in one, barcode template adapter beads were replaced with aqueous barcode adapter templates (Cell+aq BC), and one in which the cells were replaced with purified human PBMC RNA template obtained from AllCells (RNA+bead). Bulk positive and negative controls, which did not enter the emulsion device (R− and R+1 Respectively), were also included. Product bands were visible for the experimental sample and all positive controls, and were absent in the negative control.

[0087] FIG. 25 illustrates methods of making barcode adapter template beads using multiple barcode adapter template types. Barcode-containing oligos were successfully generated with the expected length of 82 bp (upper left). Mono-color barcode adapter template beads were successfully obtained (right). The top graph was first gated on AF647-beads and the bottom graph was first gated on FAM-Cy3-beads so that the gates drawn in both graphs showed only monocolor beads. Beads were successfully used for barcoding RNA (lower left). Here, T cell receptor alpha and beta chains were successfully barcoded and amplified. Previously-generated beads were used as positive controls (lanes 1-2), and mono color barcode adapter template beads (lanes 4-7) were compared with a negative control (lane 3). DNA was analyzed on a 2% agarose gel, with a 100 bp ladder loaded in the left lane.

[0088] FIG. 26 illustrates efficient barcoding of T cell receptor alpha chain by encapsulating barcode adapter template beads and cells in droplets of varying sizes. Barcoded RNA was amplified after barcoding and analyzed on a 2% agarose gel.

[0089] FIG. 27 shows library PCR amplification products of TCR alpha and beta chains. Products were visualized on a 2% agarose gel. A 100 bp ladder was loaded in the right lane.

[0090] FIG. 28 shows library PCR amplification products of IFNγ, CD8 and CD4 genes. Products were visualized on a 2% agarose gel. A 100 bp ladder was loaded in the right lane.

[0091] FIG. 29 shows library PCR amplification products of a transcriptomics library. Products were visualized on a 2% agarose gel. A 100 bp ladder was loaded in the right lane.

### DEFINITIONS

[0092] As the term is used herein, “incorporating” a sequence into a polynucleotide refers to covalently linking a series of nucleotides with the rest of the polynucleotide, for example at the 3′ or 5′ end of the polynucleotide, by phosphodiester bonds, wherein the nucleotides are linked in the order prescribed by the sequence. A sequence has been “incorporated” into a polynucleotide, or equivalently the polynucleotide “incorporates” the sequence, if the polynucleotide contains the sequence or a complement thereof. Incorporation of a sequence into a polynucleotide can occur enzymatically (e.g., by ligation or polymerization) or using chemical synthesis (e.g., by phosphoramidite chemistry).

[0093] As used herein, the terms “amplify” and “amplification” refer to enzymatically copying the sequence of a polynucleotide, in whole or in part, so as to generate more polynucleotides that also contain the sequence or a complement thereof. The sequence being copied is referred to as the template sequence. Examples of amplification include DNA-templated RNA synthesis by RNA polymerase, RNA-templated first-strand cDNA synthesis by reverse transcriptase, and DNA-templated PCR amplification using a thermostable DNA polymerase. Amplification includes all primer-extension reactions.

[0094] As used herein, the term “isothermal” refers to a reaction, such as an enzymatic reaction, that is carried out at a constant temperature or range of temperatures.

[0095] The term “associated” is used herein to refer to the relationship between a sample and the DNA molecules, RNA molecules, or other polynucleotides originating from or derived from that sample. A polynucleotide is associated with a sample if it is an endogenous polynucleotide, i.e. it occurs in the sample at the time the sample is selected, or is derived from an endogenous polynucleotide. For example, the mRNAs endogenous to a cell are associated with that cell. cDNAs resulting from reverse transcription of these mRNAs, and DNA amplicons resulting from PCR amplification of the cDNAs, contain the sequences of the mRNAs and are also associated with the cell. The polynucleotides associated with a sample need not be located or synthesized in the sample, and are considered associated with the sample even after the sample has been destroyed (for example, after a cell has been lysed). Molecular barcoding or other techniques can be used to determine which polynucleotides in a mixture are associated with a particular sample.

[0096] As the term is used herein, a “reaction volume” (or equivalently a “container” or “compartment”) is a space where a volume of liquid, for example an aqueous solution, can be held and remain segregated (e.g., isolated) from other such volumes of liquid or the surrounding medium. The segregation between a reaction volume and its surroundings can result from solid barriers around the reaction volume or from phase separation. For example, an aqueous microfluidic droplet suspended in a hydrophobic carrier fluid can constitute a reaction volume because water is immiscible in the carrier fluid. Thus, two droplets that are separated from each other in the carrier fluid remain segregated, and nucleic acids or other hydrophilic species dissolved in one droplet cannot exit the droplet or transit to another droplet. Reaction volumes can also be defined by, for example, flasks, beakers, centrifuge tubes, and wells in a multi-well plate.

[0097] “Adding” a barcode adapter to the RNAs associated with a sample involves introducing the adapter molecule into the reaction volume containing these RNAs, such that the RNAs can take part in a barcoding reaction. Once added, the barcode adapter can react directly with one or more RNAs, for example by hybridizing with an RNA, or can take part in a polymerization reaction or series of reactions (for example, reverse transcription or RT-PCR) in which RNA molecules serve as templates.

[0098] In some aspects, a composition can include a polynucleotide. The term “polynucleotide(s)” refers to nucleic acids such as DNA molecules and RNA molecules and analogs thereof (e.g., DNA or RNA generated using nucleotide analogs or using nucleic acid chemistry). As desired, the polynucleotides may be made synthetically, e.g., using art-recognized nucleic acid chemistry or enzymatically using, e.g., a polymerase, and, if desired, can be modified. Typical modifications include methylation, biotinylation, and other art-known modifications. In addition, a polynucleotide can be single-stranded or double-stranded and, where desired, linked to a detectable moiety. In some aspects, a polynucleotide can include hybrid molecules, e.g., comprising DNA and RNA.

[0099] “G,” “C,” “A,” “T” and “U” each generally stand for a nucleotide that contains guanine, cytosine, adenine, thymidine and uracil as a base, respectively. However, it will be understood that the term “ribonucleotide” or “nucleotide” can also refer to a modified nucleotide or a surrogate replacement moiety. The skilled person is well aware that guanine, cytosine, adenine, and uracil may be replaced by other moieties without substantially altering the base pairing properties of an oligonucleotide comprising a nucleotide bearing such replacement moiety. For example, without limitation, a nucleotide comprising inosine as its base may base pair with nucleotides containing adenine, cytosine, or uracil. Hence, nucleotides containing uracil, guanine, or adenine may be replaced in nucleotide sequences by a nucleotide containing, for example, inosine. In another example, adenine and cytosine anywhere in the oligonucleotide can be replaced with guanine and uracil, respectively to form G-U Wobble base pairing with the target mRNA. Sequences containing such replacement moieties are suitable for the compositions and methods described herein.

[0100] As used herein, and unless otherwise indicated, the term “complementary,” when used to describe a first nucleotide sequence in relation to a second nucleotide sequence, refers to the ability of a polynucleotide comprising the first nucleotide sequence to hybridize and form a duplex structure under certain conditions with a polynucleotide comprising the second nucleotide sequence, as will be understood by the skilled person. Such conditions can, for example, be stringent conditions, where stringent conditions may include: 400 mM NaCl, 40 mM PIPES pH 6.4, 1 mM EDTA, 50° C. or 70° C. for 12-16 hours followed by washing. Other conditions, such as physiologically relevant conditions as may be encountered inside an organism, can apply. The skilled person will be able to determine the set of conditions most appropriate for a test of complementarity of two sequences in accordance with the ultimate application of the hybridized nucleotides.

[0101] Complementary sequences include base-pairing of a region of a polynucleotide comprising a first nucleotide sequence to a region of a polynucleotide comprising a second nucleotide sequence over the length or a portion of the length of one or both nucleotide sequences. Such sequences can be referred to as “complementary” with respect to each other herein. However, where a first sequence is referred to as “substantially complementary” with respect to a second sequence herein, the two sequences can be complementary, or they may include one or more, but generally not more than about 5, 4, 3, or 2 mismatched base pairs within regions that are base-paired. For two sequences with mismatched base pairs, the sequences will be considered “substantially complementary” as long as the two nucleotide sequences bind to each other via base-pairing.

[0102] “Complementary” sequences, as used herein, may also include, or be formed entirely from, non-Watson-Crick base pairs and/or base pairs formed from non-natural and modified nucleotides, in as far as the above embodiments with respect to their ability to hybridize are fulfilled. Such non-Watson-Crick base pairs includes, but are not limited to, G:U Wobble or Hoogstein base pairing.

[0103] The term percent “identity,” in the context of two or more nucleic acid or polypeptide sequences, refer to two or more sequences or subsequences that have a specified percentage of nucleotides or amino acid residues that are the same, when compared and aligned for maximum correspondence, as measured using one of the sequence comparison algorithms described below (e.g., BLASTP and BLASTN or other algorithms available to persons of skill) or by visual inspection. Depending on the application, the percent “identity” can exist over a region of the sequence being compared, e.g., over a functional domain, or, alternatively, exist over the full length of the two sequences to be compared.

[0104] For sequence comparison, typically one sequence acts as a reference sequence to which test sequences are compared. When using a sequence comparison algorithm, test and reference sequences are input into a computer, subsequence coordinates are designated, if necessary, and sequence algorithm program parameters are designated. The sequence comparison algorithm then calculates the percent sequence identity for the test sequence(s) relative to the reference sequence, based on the designated program parameters.

[0105] Optimal alignment of sequences for comparison can be conducted, e.g., by the local homology algorithm of Smith & Waterman, Adv. Appl. Math. 2:482 (1981), by the homology alignment algorithm of Needleman & Wunsch, J. Mol. Biol. 48:443 (1970), by the search for similarity method of Pearson & Lipman, Proc. Nat'l. Acad. Sci. USA 85:2444 (1988), by computerized implementations of these algorithms (GAP, BESTFIT, FASTA, and TFASTA in the Wisconsin Genetics Software Package, Genetics Computer Group, 575 Science Dr., Madison, Wis.), or by visual inspection (see generally Ausubel et al., infra).

[0106] One example of an algorithm that is suitable for determining percent sequence identity and sequence similarity is the BLAST algorithm, which is described in Altschul et al., J. Mol. Biol. 215:403-410 (1990). Software for performing BLAST analyses is publicly available through the National Center for Biotechnology Information web-site. The BLAST algorithm parameters W, T, and X determine the sensitivity and speed of the alignment. The BLASTN program (for nucleotide sequences) uses as defaults a wordlength (W) of 11, an expectation (E) or 10, M=5, N=−4 and a comparison of both strands.

[0107] Identical sequences include 100% identity of a polynucleotide comprising a first nucleotide sequence to a polynucleotide comprising a second nucleotide sequence over the entire length of one or both nucleotide sequences. Such sequences can be referred to as “fully identical” with respect to each other herein. However, in some aspects, where a first sequence is referred to as “substantially identical” with respect to a second sequence herein, the two sequences can be fully complementary, or they may have one or more, but generally not more than about 5, 4, 3, or 2 mismatched nucleotides upon alignment. In some aspects, where a first sequence is referred to as “substantially identical” with respect to a second sequence herein, the two sequences can be fully complementary, or they may be at least about 50, 60, 70, 80, 81, 82, 83, 84, 85, 86, 87, 88, 89, 90, 91, 92, 93, 94, 95, 96, 97, 98, or 99% identical to each other. To determine the percent identity of two nucleotide sequences described herein, the default settings of BLASTN described above can be used.

[0108] Where a first sequence is referred to as “distinct” with respect to the identity of a second sequence herein, the two sequences have at least one or more mismatched nucleotides upon alignment. In some aspects, distinct sequences can have 2, 3, 4, 5, 6, 7, 8, 9, 10, 11, 12, 13, 14, 15, 16, 17, 18, 19, 20, 21, 22, 23, 24, 25, 26, 27, 28, 29, 30, 31, 32, 33, 34, 35, 36, 37, 38, 39, 40, 41, 42, 43, 44, 45, 46, 47, 48, 49, 50, or more mismatched nucleotides upon alignment. In some aspects, distinct sequences can be about 1, 2, 3, 4, 5, 6, 7, 8, 9, 10, 11, 12, 13, 14, 15, 16, 17, 18, 19, 20, 21, 22, 23, 24, 25, 26, 27, 28, 29, 30, 31, 32, 33, 34, 35, 36, 37, 38, 39, 40, 41, 42, 43, 44, 45, 46, 47, 48, 49, 50, 60, 70, 80, 81, 82, 83, 84, 85, 86, 87, 88, 89, 90, 91, 92, 93, 94, 95, 96, 97, 98, 99, or less than 100% identical to each other. In some aspects, where a first sequence is referred to as “distinct” with respect to a second sequence herein, the two sequences can have substantially or fully identical sequences, but instead differ from one another based upon differing patterns of modification within the sequences. Such modifications are generally known in the art, e.g., methylation.

[0109] In some aspects, a polynucleotide can be present in a library of polynucleotides. In some aspects, a polynucleotide library can include a plurality of polynucleotides. In some aspects, each polynucleotide in the plurality of polynucleotides can be derived from a single sample. In some aspects, a single sample can include a single cell such as a B cell.

[0110] Conventional notation is used herein to describe nucleotide sequences: the left-hand end of a single-stranded nucleotide sequence is the 5′-end; the left-hand direction of a double-stranded nucleotide sequence is referred to as the 5′-direction. The direction of 5′ to 3′ addition of nucleotides to nascent RNA transcripts is referred to as the transcription direction. The DNA strand having the same sequence as an mRNA is referred to as the “coding strand;” sequences on the DNA strand having the same sequence as an mRNA transcribed from that DNA and which are located 5′ to the 5′-end of the RNA transcript are referred to as “upstream sequences;” sequences on the DNA strand having the same sequence as the RNA and which are 3′ to the 3′ end of the coding RNA transcript are referred to as “downstream sequences.”

[0111] The term “messenger RNA” or “mRNA” refers to an RNA that is without introns and that can be translated into a polypeptide.

[0112] The term “cDNA” refers to a DNA that is complementary or identical to an mRNA, in either single stranded or double stranded form.

[0113] The term “amplicon” refers to the amplified product of a nucleic acid amplification reaction, e.g., RT-PCR.

[0114] The term “hybridize” refers to a sequence specific non-covalent binding interaction with a complementary nucleic acid. Hybridization may occur to all or a portion of a nucleic acid sequence. Those skilled in the art will recognize that the stability of a nucleic acid duplex, or hybrids, can be determined by the Tm. Additional guidance regarding hybridization conditions may be found in: Current Protocols in Molecular Biology, John Wiley & Sons, N.Y., 1989, 6.3.1-6.3.6 and in: Sambrook et al., Molecular Cloning, a Laboratory Manual, Cold Spring Harbor Laboratory Press, 1989, Vol. 3.

[0115] As used herein, “region” refers to a contiguous portion of the nucleotide sequence of a polynucleotide. Examples of regions are described herein an include identification regions, sample identification regions, plate identification regions, adapter regions, and the like. In some aspects, a polynucleotide can include one or more regions. In some aspects, a polynucleotide can include less than 2, 2, 3, 4, 5, 6, 7, 8, 9, 10, 11, 12, 13, 14, 15, 16, 17, 18, 19, 20, 21, 22, 23, 24, 25, 26, 27, 28, 29, 30, 31, 32, 33, 34, 35, 36, 37, 38, 39, 40, 41, 42, 43, 44, 45, 46, 47, 48, 49, 50, or more regions. In some aspects, regions can be coupled. In some aspects, regions can be operatively coupled. In some aspects, regions can be physically coupled.

[0116] As used herein “variable region” refers to a variable nucleotide sequence that arises from a gene recombination or gene conversion event, such as V(D)J recombination and homologous recombination between upstream VH gene segments and rearranged VDJ genes to produce a final, expressed gene product. Examples are but not limited to immunoglobulin genes and T cell receptor genes. For example, it can include a V, J, and/or D region of an immunoglobulin or T cell receptor sequence isolated from a T cell or B cell of interest, such as an activated T cell or an activated B cell.

[0117] As used herein “B cell variable immunoglobulin region” refers to a variable immunoglobulin nucleotide sequence isolated from a B cell. For example, a variable immunoglobulin sequence can include a V, J, and/or D region of an immunoglobulin sequence isolated from a B cell of interest such as a memory B cell, an activated B cell, or plasmablast.

[0118] As used herein, “barcode” or “barcode sequence” refers to any unique sequence label that can be coupled to at least one nucleotide sequence for, e.g., later identification of the at least one nucleotide sequence.

[0119] As used herein, “barcode set” refers to any unique set of sequences that can be coupled to nucleotide sequences from a sample, where a nucleotide sequence is coupled to one barcode sequence in the set, for, e.g., later identification of the nucleotide sequences.

[0120] The terms “barcode adapter”, “barcoded adapter”, and “barcode adapter molecule” are used interchangeably herein to refer to an oligonucleotide that comprises a unique barcode sequence.

[0121] The terms “barcode adapter template”, “adapter template”, “template molecule”, “barcode adapter construct”, and “adapter construct” are used interchangeably herein to refer to a nucleic acid molecule comprising a barcode sequence that can be used as a template to amplify and produce single stranded barcode adapter molecules.

[0122] As used herein, “barcode adapter template bead” refers to a bead coupled to one or more barcode adapter templates.

[0123] As used herein, “barcoding” or “barcoding reaction” refers to a reaction that links a barcode sequence, or the complement of a barcode sequence, with a nucleic acid. The barcode adapter need not necessarily be covalently linked with the nucleic acid, but the barcode sequence information itself is linked with or incorporated into the nucleic acid. “Barcoding nucleic acids”, “barcoding cells”, “barcoding nucleic acids from cells”, “barcoding nucleic acids from reaction containers”, and “barcoding reaction containers” are used interchangeably.

[0124] As used herein “identification region” refers to a nucleotide sequence label (e.g., a unique barcode sequence) that can be coupled to at least one nucleotide sequence for, e.g., later identification of the at least one nucleotide sequence. In some aspects, a barcode sequence is used as a sample identification region. In some aspects, a barcode set is used as a sample identification region.

[0125] As used herein “immunoglobulin region” refers to a contiguous portion of nucleotide sequence from one or both chains (heavy and light) of an antibody.

[0126] As used herein “adapter region” or “adapter molecule” refers to a linker that couples a first nucleotide sequence to a second nucleotide sequence. In some aspects, an adapter region can include a contiguous portion of nucleotide sequence that acts as a linker. In some aspects, an adapter region or adapter molecule can include a binding site, such as a cDNA binding site. For example, a binding site can have the sequence GGG and couples a first sequence to a second sequence via binding between GGG and CCC. In some aspects, the adapter region or adapter molecule can comprise elements such as an RNA polymerase promoter, a nicking endonuclease restriction site, a universal priming sequence, a barcode, and a cDNA binding site.

[0127] The term “sample” can include RNA, DNA, a single cell or multiple cells or fragments of cells or an aliquot of body fluid, taken from a subject (e.g., a mammalian subject, an animal subject, a human subject, or a non-human animal subject). Samples can be selected by one of skill in the art using any means now known or later discovered including centrifugation, venipuncture, blood draw, excretion, swabbing, ejaculation, massage, biopsy, needle aspirate, lavage sample, scraping, surgical incision, laser capture microdissection, gradient separation, or intervention or other means known in the art. Samples can also be selected by one of skill in the art using one or more markers known to be associated with a sample of interest. Samples can also be selected using methods known in the art such as cell sorting and FACS.

### DETAILED DESCRIPTION OF THE INVENTION

[0128] Embodiments of the invention provide a method to generate unique nucleic acid barcoded adapters in each reaction container such that the nucleic acid barcoded adapters are in aqueous phase but the template from which they were generated can either be attached to a solid surface (such as attached to beads) or be free in solution. Nucleic acid barcoded adapters are any polynucleotide sequence that comprise a unique barcode sequence and may or may not have modifications (for example, biotinylated or contain C18 spacers) or contain modified polynucleotides (such as 2′-O-methyl RNA bases).

[0129] Also provided are compositions generated using the methods disclosed herein. Accordingly, the present invention provides compositions of RNA and DNA adapters and constructs for their generation. Also provided are barcode adapter template bead libraries, emulsion droplet libraries loaded with RNA barcode adapters, emulsions containing barcode libraries with cells, barcoded cDNA libraries, and microfluidic droplet generating devices, among others.

[0130] In some embodiments, the barcoded adapter template is a double-stranded DNA (dsDNA) template which comprises the following sequence: 5′-T7 promoter-universal priming sequence-barcode sequence-binding sequence-3′. The T7 promoter sequence allows for synthesis of an RNA barcoded adapter from the template by T7 RNA polymerase. The universal priming sequence is used for complementarity to PCR primers that are used downstream. The binding sequence consists of 1 or more guanine bases (G's) and allows for complementary base-pairing of the barcoded adapter to the 3′ end of 1^{st} strand cDNA (FIG. 1).

[0131] Other promoter sequences can be used, such as but not limited to T3 and SP6 promoter sequences, which allows for synthesis of an RNA barcoded adapter by T3 and SP6 RNA polymerases respectively. Other RNA polymerases which do not have a specific promoter sequence may also be used, as long as a full length or near full length barcoded adapter is synthesized in a large fraction of cases (FIG. 2A). Isothermal amplification may also be used, typically using DNA polymerases with strand-displacement activity such as Bst large fragment and Klenow 3′→5′exo− as long as full length or near full length barcoded adapters are synthesized in a large fraction of cases. Specific primer or nicking endonuclease sequences may be used instead of a promoter sequence, depending on the isothermal amplification method used (FIG. 2B). Barcoded adapters thus generated will comprise DNA nucleotides instead of RNA nucleotides. Both RNA or DNA barcoded adapters can be attached to polynucleotides of interest.

[0132] Attaching barcoded adapters to 3′ end of 1^{st} strand cDNA has been previously described (PCT/US2012/000221). Briefly, H− MMLV reverse transcriptases have a 3′ dC tailing activity and add non-templated dCs to 1^{st} strand cDNA. If a barcoded adapter ending in at least 1 G is also present, the adapter can base-pair with the 3′ dC of the 1^{st} strand cDNA and the reverse transcriptase undergoes template switching and continues transcription using the barcoded adapter as a template. The reverse transcriptase thus covalently adds the barcode sequence to the 3′ end of the 1^{st} strand cDNA via phosphodiester bonds (FIG. 3).

[0133] In some embodiments, barcoded adapters are linearly amplified from double-stranded DNA (dsDNA) containing a 5′ T7 promoter using a T7 RNA polymerase. In some embodiments, the barcoded adapters are linearly amplified in the same reaction as the reverse transcription reaction. Amplifying barcoded adapters from a dsDNA template provides at least the following advantages:
[0134] 1. Barcoded adapter templates can be attached to beads (a unique barcode per bead) and stored in the same storage container
[0135] 2. Multiple copies of a unique barcoded adapter can be delivered into a reaction container without use of an individual pipetting step
[0136] 3. Barcoded adapters are amplified, overcoming the limited amount of polynucleotides that can be attached to each bead
[0137] 4. Amplified barcodes are in aqueous phase and utilize much more rapid liquid phase rather than solid phase kinetics

[0138] There are also advantages involved in using an RNA barcoded adapter rather than a DNA barcoded adapter:
[0139] 1. An RNA barcoded adapter may be more efficient in the template switching reaction which attaches the barcode sequence to polynucleotides of interest as reverse transcriptases typically use RNA rather than DNA as a template and template switching is used by the reverse transcriptase in vivo to switch to an RNA template in the replication of retroviruses.
[0140] 2. Using an entirely RNA transcript as an adapter results in less background when using proof-reading DNA polymerases in downstream PCR reactions. Background occurs when the barcode adapter misprimes and initiates reverse transcription, resulting in barcode adapter sequences added at both the 5′ and 3′ end of 1^{st} strand cDNA. These can be amplified in PCR by just one primer complementary to the barcode adapter. However, if proof-reading DNA polymerases are used during PCR, they will not transcribe the RNA primer (FIG. 4), eliminating background from barcode adapter mispriming.

[0141] Due to the large number of barcoding reactions involved, NextGen sequencing is best suited to sequencing the barcoded nucleic acids to bioinformatically associate nucleic acids from the same reaction container with one another. Additional barcodes may be associated with a set of samples that are distinct from another set of samples and can be associated using PCR primers with unique barcode sequences. These additional barcodes are also referred to as plate-IDs. Plate-IDs confer advantages such as distinguishing between different sets of samples in the same sequencing run, or bioinformatically tracking and eliminating any potential contaminations between different sets of samples.

[0142] As PCR and NextGen sequencing errors are unavoidable, the barcodes described herein can be designed to be a reasonable distance (e.g., Hamming or edit distance) apart in sequence space, so that the sequences of any two barcodes will differ from each other by at least several nucleotides. Thus, the majority of barcode sequencing reads can be correctly assigned, with a small percentage of unassigned and misassigned barcodes.

[0143] In some embodiments, pre-determined barcode sequences are designed with a minimum Hamming or edit distance apart. In some embodiments, barcodes comprise random nucleotides, such as (N)₁₅, which results in a total possible space of 4¹⁵, or ˜1 billion unique barcode sequences. If the number of samples to be barcoded is much fewer than this total space, e.g. 1 million, or 0.1% of the total barcode space, we expect the barcodes should be of sufficient distance apart from one another that the majority of barcodes should be correctly assigned.

[0144] As long as the misassignment rate is sufficiently low, misassigned sequencing reads can be detected and discarded simply because the nucleic acids linked to the misassigned barcode sequence are different from the consensus sequence. We would expect the consensus sequence for each gene (e.g. gamma heavy chain, TCR alpha chain) associated to a barcode sequence to be assembled from correctly assigned reads as the barcode sequences were designed to be of a sufficient distance apart.

[0145] Samples in reaction containers can be barcoded with either a unique barcode, or a unique barcode set. A unique barcode set can be used by, e.g., delivering two or more barcode adapter template beads per reaction container, and each nucleic acid of a sample is barcoded with one of the barcodes in the unique barcode set. Nucleic acids are then associated to a sample by use of a unique barcode set.

[0146] One method to distinguish which barcode sets are used for which samples is by examining reads from NextGen sequencing. Each barcode sequence is expected to be associated with assembled contigs from different samples as barcode sequences are reused in unique barcode sets. But contigs from the same sample are expected to be identical. For example, identical immunoglobulin gamma heavy chain contigs may be observed to be using barcode sequences a, b and c. And barcode sequences a, b and d may be observed to be associated with another immunoglobulin gamma heavy chain contig. From this, we can then conclude that a, b and c comprise barcode set1, and a, b and d barcode set2.

[0147] In some embodiments, a library of barcode adapter template beads of N unique barcode sequences is sufficiently diverse to barcode n samples that such the majority of samples are barcoded with either a unique barcode or a unique barcode set. If the number of barcode adapter template beads greatly exceed N, sampling with replacement can be approximated, and the number of samples barcoded with a unique barcode, U follows the binomial distribution and is given by:

$$U = N * ( \begin{matrix}n \\ k\end{matrix} ) {{p}^{k} ( 1 - p )}^{n - k}$$

[0148] Where k=1, and p=1/N.

[0149] The fraction of samples that are not barcoded with a unique barcode (and thus have two or more samples associated with one another) is given by

$$1 - U / n$$

[0150] The relationship between N, n and the fraction of samples not barcoded with a unique barcode is given in Table 1.

TABLE 1
Fraction of samples not barcoded with a unique barcode

| # unique | # samples barcoded (n) | | | | |
|---|---|---|---|---|---|
| barcodes (N) | 1,000 | 10,000 | 100,000 | 1,000,000 | 10,000,000 |
| 1,000 | 63.19% | 100.00% | 100.00% | 100.00% | 100.00% |
| 5,000 | 18.11% | 86.47% | 100.00% | 100.00% | 100.00% |
| 10,000 | 9.51% | 63.21% | 100.00% | 100.00% | 100.00% |
| 50,000 | 1.98% | 18.13% | 86.47% | 100.00% | 100.00% |
| 100,000 | 0.99% | 9.52% | 63.21% | 100.00% | 100.00% |
| 500,000 | 0.20% | 1.98% | 18.13% | 86.47% | 100.00% |
| 1,000,000 | 0.10% | 0.99% | 9.52% | 63.21% | 100.00% |
| 5,000,000 | 0.02% | 0.20% | 1.98% | 18.13% | 86.47% |
| 10,000,000 | 0.01% | 0.10% | 1.00% | 9.52% | 63.21% |
| 50,000,000 | 0.00% | 0.02% | 0.20% | 1.98% | 18.13% |
| 100,000,000 | 0.00% | 0.01% | 0.10% | 1.00% | 9.52% |

[0151] As can be seen, if N=10n, >90% of the samples will be barcoded with a unique barcode.

[0152] The number of samples barcoded with a unique barcode set, U_{SET}, with x barcodes in a set also follows the binomial distribution, and can be thought of as a barcode library with

$$( \begin{matrix}N \\ x\end{matrix} )$$

unique barcode combinations (N is assumed to be sufficiently large that combination is essentially without repetition), with nx barcodes used to barcode n samples and is given by:

$${U}_{SET} = ( \begin{matrix}N \\ x\end{matrix} ) * ( \begin{matrix}n \\ k\end{matrix} ) {{p}^{k} ( 1 - p )}^{n - k}$$

[0153] Where k=1, and

$$p = 1 / ( \begin{matrix}N \\ x\end{matrix} ) .$$

[0154] The fraction of samples that are not barcoded with a unique barcode (and thus have two or more samples associated with one another) is given by

$$1 - \frac{{U}_{SET}}{n}$$

[0155] The relationship between N, n, x and the fraction of samples not barcoded with a unique barcode is given in Tables 2 and 3.

TABLE 2
Fraction of samples not barcoded with
a unique barcode set when x = 2

| # unique | | | | | |
|---|---|---|---|---|---|
| barcodes (N) | | | | | |
| when using | | | | | |
| barcode set | # samples barcoded (n) | | | | |
| with x = 2 | 1,000 | 10,000 | 100,000 | 1,000,000 | 10,000,000 |
| 100 | 18.28% | 86.74% | 100.00% | 100.00% | 100.00% |
| 500 | 0.80% | 7.70% | 55.14% | 99.97% | 100.00% |
| 1,000 | 0.20% | 1.98% | 18.14% | 86.49% | 100.00% |
| 5,000 | 0.01% | 0.08% | 0.80% | 7.69% | 55.07% |
| 10,000 | 0.00% | 0.02% | 0.20% | 1.98% | 18.13% |
| 50,000 | 0.00% | 0.00% | 0.01% | 0.08% | 0.80% |
| 100,000 | 0.00% | 0.00% | 0.00% | 0.02% | 0.20% |

TABLE 3
Fraction of samples not barcoded with
a unique barcode set when x = 3

| # unique | | | | | |
|---|---|---|---|---|---|
| barcodes (N) | | | | | |
| when using | | | | | |
| barcode set | # samples barcoded (n) | | | | |
| with x = 3 | 1,000 | 10,000 | 100,000 | 1,000,000 | 10,000,000 |
| 100 | 0.62% | 6.00% | 46.12% | 99.79% | 100.00% |
| 500 | 0.00% | 0.05% | 0.48% | 4.71% | 38.30% |
| 1,000 | 0.00% | 0.01% | 0.06% | 0.60% | 5.84% |
| 5,000 | 0.00% | 0.00% | 0.00% | 0.00% | 0.05% |
| 10,000 | 0.00% | 0.00% | 0.00% | 0.00% | 0.01% |
| 50,000 | 0.00% | 0.00% | 0.00% | 0.00% | 0.00% |
| 100,000 | 0.00% | 0.00% | 0.00% | 0.00% | 0.00% |

[0156] As can be seen, when using unique barcode sets instead of unique barcodes, a much smaller number of unique barcodes in the barcode adapter library is required to barcode a similar number of samples such that the majority of samples can be identified with a unique barcode set.

### I. METHODS

### A. Producing Polynucleotides of Interest

[0157] In some aspects, the present invention provides methods for producing one or more polynucleotides of interest. Such polynucleotides can be barcoded nucleic acids, for example cDNAs or DNA amplicons containing barcodes, wherein a common barcode or barcode set indicates that a group of polynucleotides are derived from the same sample. According to the methods, a plurality of RNAs associated with one or more samples is obtained as described below. The RNAs associated with each sample are present in a separate reaction volume. An adapter molecule is then added to the RNAs associated with each sample to incorporate a barcode sequence into one or more polynucleotides derived from the RNAs.

[0158] To maximize barcoding reaction kinetics, the barcode adapter is preferably free in solution prior to or at the time it is added to the RNAs. Adding the barcode adapter can be achieved by pipetting, by pouring one reaction volume into another, or by merging two or more reaction volumes. For example, the barcode adapter can be generated and/or encapsulated in one reaction volume, which can then be combined with another reaction volume containing RNAs associated with one sample (FIG. 5A-C). In some embodiments, the barcode adapter added to the RNAs from a sample is generated in situ in the reaction volume where the RNAs are present.

[0159] In some embodiments, barcode adapters are generated enzymatically from barcode adapter templates. A barcode adapter template can be a double-stranded DNA molecule containing a barcode sequence, as well as other sequence regions to facilitate generation of the barcode adapter and the subsequent barcoding of nucleic acids (FIG. 1). Barcode adapter templates can be prepared using standard molecular cloning techniques. In some embodiments, a barcode adapter template includes a promoter for RNA polymerase (RNAP), such as a T7, T3, or SP6 promoter. An RNA barcode adapter can then be generated by contacting the template molecule with an appropriate RNAP and allowing in vitro transcription to occur (FIG. 2A). In some embodiments, a barcode adapter template includes a nicking endonuclease restriction site, such as a Nt.BbvCI, Nt.BspQI, Nt.BsmAI, Nt.BstNBI, Nt.AlwI, or Nt.BsmAI site. DNA barcode adapters can be generated from such a template by contacting the template with a nicking endonuclease specific for the restriction site, and then exposing the template to a strand-displacing DNA polymerase (FIG. 2B). Examples of suitable strand-displacing DNA polymerases include Klenow exo− fragment, Bst Large Fragment, and engineered variants thereof. In general, barcode adapters are generated from barcode adapter templates by contacting the templates with one or more enzymes. In some embodiments, the enzymatic reactions are isothermal reactions.

[0160] A barcode adapter template can be free in solution when it is used to generate barcode adapters, or it can be bound to a solid support. Examples of solid supports that can be used in embodiments of the present methods and compositions include beads, chromatographic resins, multi-well plates, microcentrifuge tubes, or other objects having solid surfaces. A barcode adapter template can be bound to a solid support using any desired mechanism or capture chemistry, for example a biotin-avidin, biotin-streptavidin, or gold-thiol interaction. In some embodiments, any solid support to which a barcode adapter template is attached is contacted with an aqueous solution, and barcode adapter molecules generated from the template are released into this solution as they are generated (FIGS. 6A, 6B, 7A-D). The aqueous solution can be in the same reaction volume as the RNA molecules associated with the sample to which the barcode adapter molecule is to be added. That is, the barcode adapter molecule can be generated in situ for the barcoding reaction. Alternatively, the aqueous solution contacting the solid support for a barcode adapter template can be held in a different reaction volume from the target RNAs, and barcode adapters generated from the template can be added to these RNAs upon combining the two reaction volumes.

[0161] In some embodiments, barcode adapters are generated by cleaving barcode adapter templates from a solid support (FIGS. 7B and 7D). Template molecules can contain endonuclease restriction sites that facilitate cleavage of the template molecules upon exposure to an appropriate enzyme (e.g., a restriction endonuclease). The nucleic acid molecule that is released into solution upon such cleavage can serve as a barcode adapter and take part directly in a barcoding reaction, or can be subjected to further enzymatic reactions (e.g., in vitro transcription) to generate adapter molecules.

[0162] Regardless of how barcode adapter molecules are generated, libraries of these molecules can be prepared to barcode nucleic acids from many samples. Adapter molecules can be segregated into different reaction volumes, such that each reaction volume contains, for example, one adapter molecule on average. Alternatively, each reaction volume can contain multiple copies of an adapter molecule, wherein each copy contains the same barcode sequence. The reaction volumes can be microfluidic droplets or can be enclosed in microcentrifuge tubes or other containers.

[0163] A barcode adapter molecule can include, in addition to a barcode sequence, a universal priming sequence or universal priming region, and a binding site, as described below under “Compositions”. The adapter molecule can also include a unique molecular identifier (UMI) sequence. In some embodiments, a UMI sequence contains randomized nucleotides and is incorporated into the barcode adapter (or the barcode adapter template from which the adapter is generated) independently of the barcode sequence. Thus, a set of barcode adapter molecules containing the same barcode sequence can contain different UMI sequences. In embodiments where the set of barcode adapter molecules containing the same barcode sequence but different UMI sequences is added to the RNAs associated with one sample, every RNA sequence can be linked to a different UMI sequence during barcoding. Methods of preparing barcode adapter template beads with UMI sequences, wherein the template molecules on each bead contain the same barcode sequence and a library of different UMI sequences, are disclosed below in Examples 12 and 13.

[0164] Barcode adapters can be RNA or DNA molecules, or RNA-DNA hybrids. For example, an adapter can include RNA nucleotides covalently linked to DNA nucleotides in a common oligonucleotide strand. A barcode adapter can also be single-stranded or double stranded. If double-stranded, the barcode adapter can have one or more blunt ends or ends with single-stranded overhangs.

[0165] In some embodiments, the barcode adapter is a single-stranded DNA molecule and serves as a primer for reverse transcription. The barcode adapter can be generated using a DNA polymerase (DNAP). Here, the binding site of the barcode adapter is an RNA binding site (e.g., an mRNA binding site) and contains a sequence region complementary to a sequence region in one or more RNAs. In some embodiments, the binding site is complementary to a sequence region common to all RNAs in the sample to which the barcode adapter is added. For example, the binding site can be a poly-T tract, which is complementary to the poly-A tails of eukaryotic mRNAs (FIG. 8). Alternatively or in addition, the binding site can include a random sequence tract (FIG. 9). Upon adding the barcode adapter to the RNAs associated with a sample, reverse transcription can occur and first strands of cDNA can be synthesized, such that the barcode sequence is incorporated into the first strands of cDNA. It will be recognized that reverse transcription requires appropriate conditions, for example the presence of an appropriate buffer and reverse transcriptase enzyme, and temperatures appropriate for annealing of the barcode adapter to RNAs and the activity of the enzyme. It will also be recognized that reverse transcription, involving a DNA primer and an RNA template, is most efficient when the 3′ end of the primer is complementary to the template and can anneal directly to the template. Accordingly, the barcode adapter can be designed so that the binding site occurs at the 3′ end of the adapter molecule.

[0166] When the barcode adapter is used as a primer for first strand cDNA synthesis in reverse transcription, and in other embodiments of the present methods involving reverse transcription (described below), the reverse transcription reaction can occur in the same reaction volume where the barcode adapter is generated. Thus, the barcode adapter can be added to a sample, or the RNAs associated with the sample, at the time the barcode adapter is generated. For example, a microfluidic droplet can contain a bead to which barcode adapter templates are bound, and a cell (FIG. 10). Barcode adapter molecules can be generated if one or more enzymes, such as a nicking endonuclease, strand-displacing DNA polymerase, or RNA polymerase, are also present in the droplet. Reverse transcription can then occur if lysis reagents are present in the droplet to release RNAs from the cell, and if reverse transcriptase, primers, and other appropriate reagents are present. Enzymes and reagents for generating barcode adapters and facilitating lysis and reverse transcription can be added to the droplet all at once, for example by merging a droplet containing the enzymes and reagents with the droplet containing the bead and cell, or can be added in steps.

[0167] In some embodiments of the present methods, the RNAs associated with each sample are reverse-transcribed but the barcode adapter does not prime first strand cDNA synthesis. Instead, a standard DNA primer containing a poly-T tract, random sequence, or other RNA binding site is used. In these embodiments, the barcode adapter can be generated in the same compartment or reaction volume where first-strand cDNA synthesis occurs. In this case, it can be beneficial to include a buffer in the reaction volume with Tris, potassium ions, chloride ions, sulphate ions, ammonium ions, acetic acid ions, and/or magnesium ions at a pH of about 8.0 to 8.8. Alternatively, the barcode adapter can be generated and first strand cDNA synthesis can occur in different compartments, in which case the compartments can be combined before or after first strand cDNA synthesis, as desired. The compartments can also be combined before or after the barcode adapter is generated. The different possibilities for carrying out enzymatic reactions and combining compartments provide flexibility for optimizing reaction conditions. Regardless of how the barcode adapter is added to the RNAs associated with a sample, however, the barcode adapter can take part in enzymatic barcoding reactions during or immediately after first strand cDNA synthesis.

[0168] As described above, the present methods can employ a reverse transcriptase enzyme (for example MMLV H⁻ reverse transcriptase) that adds one or more non-templated nucleotides (such as Cs) to the end of a nascent cDNA strand upon reaching the 5′ end of the template RNA. These nucleotides form a 3′ DNA overhang at one end of the RNA/DNA duplex. If a second RNA molecule contains a sequence region, for example a poly-G tract at its 3′ end, that is complementary to the non-templated nucleotides, and binds to the non-templated nucleotides, the reverse transcriptase can switch templates and continue extending the cDNA, now using the second RNA molecule as a template. Such a second RNA molecule is referred to herein and known in the art as a template-switching oligonucleotide.

[0169] In embodiments of the present methods, the barcode adapter serves as a template-switching oligonucleotide for reverse transcription (FIG. 3). Thus, the barcode sequence is incorporated into the first strand of cDNA after template switching, and is present in DNA molecules resulting from amplification (for example, by PCR) of the first strand of cDNA. In these embodiments, any reverse transcriptase that has template switching activity can be used. The binding site of the barcode adapter is a cDNA binding site and preferably occurs at the 3′ end of the adapter molecule. The binding site can include a G-tract (comprising one or more G nucleotides), or any other sequence that is at least partially complementary to that of the 3′ overhang generated by the reverse transcriptase. It will be recognized that the overhang sequence, and thus an appropriate sequence for the binding site of the barcode adapter, may depend on the choice of reverse transcriptase used in the method.

[0170] In other embodiments, the RNAs associated with each sample are reverse-transcribed, but a barcode sequence is not incorporated into the first strand of cDNA at all. That is, the barcode adapter does not serve as a primer for first strand cDNA synthesis or as a strand-switching oligonucleotide. Rather, the barcode adapter serves as a primer for PCR amplification of the first strand of cDNA or its complement. In these embodiments, the cDNA is amplified using a forward primer and a reverse primer, where the reverse primer has the same sequence as at least a portion of the primer for first-strand cDNA synthesis. The barcode adapter can be either the forward primer or the reverse primer, and is a single-stranded DNA oligonucleotide. When the barcode adapter is the forward primer, it can anneal to a part of the first-strand cDNA (or its complement) resulting from extension of the cDNA following strand-switching (FIG. 11). Alternatively, the barcode adapter can anneal to a part of the first-strand cDNA templated on an RNA from the sample. Thus, template switching, and the addition of a template-switching oligonucleotide to the reaction volume for the sample, need not occur to carry out these embodiments of the invention. When the barcode adapter is the reverse primer, it can be used in conjunction with any primer for first-strand cDNA synthesis, including a primer that includes a random sequence (FIGS. 12 and 13).

[0171] The methods of the present invention can be practiced with any desired samples. In some embodiments, each sample includes a cell, and can be for example a single cell. A cell can be enclosed in a reaction volume such as a microfluidic droplet, and if desired can be lysed to release RNA molecules into the reaction volume. For this purpose, the cell can be contacted with a lysis buffer at any convenient time. The cell can be a B cell, for example, a plasmablast, memory B cell, or plasma cell, or any other kind of cell.

[0172] The inventors have found that cells can be advantageously suspended in a cell suspension buffer comprising an osmoprotectant prior to lysis. The osmoprotectant can protect the cells from osmotic stress and ensure that cellular physiology remains stable or unperturbed prior to barcoding. In some embodiments, cells are suspended in the cell suspension buffer along with barcode adapter molecules and/or barcode adapter templates. In some embodiments, cells are suspended in the cell suspension buffer before being contacted with reagents for reverse transcription, PCR, and/or lysis. The cell suspension buffer can be included in any reaction volume and is compatible with the methods described herein for forming and combining aqueous reaction volumes.

[0173] In some embodiments, the osmoprotectant in the cell suspension buffer is a betaine or a close structural analog thereof. Examples of betaines and close structural analogs include glycine betaine (also called N,N,N-trimethylglycine), proline betaine (also called stachydrine), beta-alanine betaine, ectoine, choline-O-sulfate, trigonelline, dimethylsulfoniopropionate (DMSP), and dimethylthetin. In some embodiments, the osmoprotectant is glycine betaine. In addition to serving as osmoprotectants, betaines have been shown to reduce the formation of secondary structure in PCR and improve the specificity of amplification. Betaines can therefore can be generally beneficial to include in the present methods.

[0174] In some embodiments, the osmoprotectant is a sugar or polyol, such as trehalose. Other useful sugars or polyols include sucrose, fructose, raffinose, mannitol, and myo-inositol. In some embodiments, the osmoprotectant is an amino acid such as proline. A single osmoprotectant can be included in the cell suspension buffer, or multiple osmoprotectants can be included in combination. Each osmoprotectant can be present at any useful concentration. In some embodiments, the osmolarity of the cell suspension buffer is about 250-350 mOsm/L. In some embodiments, the osmoprotectant contributes up to 10%, 20%, 30%, 40%, 50%, 60%, 70%, 80%, 90%, or 100% of the osmolarity of the buffer. An exemplary cell suspension buffer used herein (see, e.g., Examples 7-9, 11, and 14) includes about 230-330 mM betaine and about 10 mM NaCl.

[0175] In embodiments where each sample includes at least one cell, the RNAs associated with the sample can include mRNAs. The sample can include, for example, at least 1, 3, 10, 30, 100, 300, 1,000, 3,000, 10,000, 30,000, 100,000, 300,000, or 1,000,000 mRNA molecules, which can represent any number of genes, alleles, reading frames, or distinct sequences. In some embodiments, the RNAs associated with the sample include all mRNAs from the sample, a full or partial transcriptome of the cell, or the total RNA from the cell.

[0176] It will be recognized that more RNAs per sample can be barcoded and more polynucleotides of interest can be produced if larger numbers of barcode adapter molecules can be delivered to the reaction volume for each sample. However, without being bound by any theory, the present methods place no limits on the number of RNAs that can be barcoded per sample, Accordingly, the number of polynucleotides of interest produced per sample can be at least 10, 30, 100, 300, 1,000, 3,000, 10,000, 30,000, 100,000, 300,000, or 1,000,000. Each polynucleotide of interest can be present in multiple copies. Furthermore, the number of cells or samples that can be barcoded in one execution of the method is limited only by the challenges (discussed above) of preparing many barcode adapter templates with unique barcode sequences. In some embodiments, the one or more samples include at least 10, 30, 100, 300, 1,000, 3,000, 10,000, 30,000, 100,000, 300,000, or 1,000,000 cells. Samples (for example, each being a single cell) can be obtained from the same subject or different subjects. For example, at least 2, 3, 4, 5, 6, 7, 8, 9, 10, 20, 30, 40, 50, 60, 70, 80, 90 or 100 different subjects can provide samples.

[0177] The present methods can also be used to interrogate a population of cells for a phenotype of interest using a nucleic acid marker. The nucleic acid marker includes a nucleic acid linked to a binder, which can specifically bind to a subset of cells from the population that do or do not present the phenotype. For example, the binder can bind to certain proteins, glycoproteins, glycolipids, or other moieties present on the surfaces of some cells. In some embodiments, the binder is a molecular label such as an antibody, antigen, or protein (FIG. 14A-C). In some embodiments, the binder is a peptide-MHC complex. The nucleic acid can be linked to the binder covalently, using a non-covalent capture moiety, or otherwise as desired.

[0178] To interrogate cells for the phenotype, cells are contacted with the nucleic acid marker and then washed. Thus, the nucleic acid marker is retained only on the cells to which the binder binds. The cells can then be enclosed in reaction volumes and lysed as described above, so that RNAs in the cells can be barcoded. During the barcoding reaction, the nucleic acid of the nucleic acid marker is also barcoded, so that the marker sequence appears in RNA or amplicon sequencing data for a cell that retains the marker. In some embodiments, the nucleic acid of the nucleic acid marker is an RNA molecule with a sequence not endogenous to cells of the population. In some embodiments, the nucleic acid is a double-stranded DNA molecule comprising an RNAP promoter. Thus, the nucleic acid can be transcribed while in the same reaction volume as the cell (or a lysate thereof), and the resulting RNA molecules can be barcoded along with RNAs from the cell.

[0179] Cells can be interrogated for multiple phenotypes using multiple nucleic acid markers, each including a different binder linked to a different nucleic acid sequence. For example, cells can be contacted with a first nucleic acid marker and a second nucleic acid marker, wherein each nucleic acid marker includes a molecular label linked to a nucleic acid. The molecular labels of the two nucleic acid markers can be different from each other (for example, be different proteins or have affinities for different cell surface moieties). The nucleic acids linked to these molecular labels can contain sequences that differ from each other in whole or in part. Cells can be contacted with two or more nucleic acid markers simultaneously or sequentially.

[0180] As a further example, three antibodies can be linked to different non-endogenous RNA sequences, and barcoded sequencing data for cells treated with these antibodies can reveal whether each cell presents targets for none, some, or all of the antibodies. The copy number of barcoded amplicons may also reveal phenotypes by degree, for example the relative abundances of a cell surface moiety on different cells, where the moiety is targeted by the nucleic acid marker.

### B. Attaching Polynucleotides to Solid Supports

[0181] Another aspect of the present invention provides methods for attaching a polynucleotide to a solid support, wherein the polynucleotide contains a barcode sequence. The polynucleotide can be a barcode adapter template or a precursor to such a template. The polynucleotide can thus be used as described above to enzymatically generate barcode adapters and incorporate the barcode sequences into amplicons derived from RNAs.

[0182] In some embodiments, the methods involve generating a hydrophilic compartment (i.e., an aqueous droplet) of an inverse emulsion. The compartment can be generated as desired, for example by mixing an aqueous solution in a hydrophobic carrier fluid and optionally agitating the mixture. The aqueous solution can have a solid support, oligonucleotides, and reagents suspended therein, so that each compartment contains all necessary components for attaching the polynucleotide to the solid support when the compartment is formed. In these embodiments, prior to adding the solid support to the compartment, an oligonucleotide is bound to the surface of the solid support via a capture moiety. This oligonucleotide is referred to herein as the “bound oligonucleotide” and contains a 3′ sequence complementary to a 3′ sequence of a barcode oligonucleotide. The polynucleotide is thus formed on the solid support through a polymerase extension reaction involving the bound oligonucleotide and barcode oligonucleotide, and this reaction takes place within the compartment.

[0183] In preferred embodiments, when the hydrophilic compartment is formed, the barcode oligonucleotide is present at a low or limiting concentration (for example, one molecule per compartment). This concentration is convenient when a library of barcode oligonucleotides having randomized sequences is used to prepare a plurality of barcode template beads. If every barcode oligonucleotide is assumed to have a different barcode sequence, and the solid support in each compartment is desired to have only one barcode sequence, then one barcode oligonucleotide (at most or on average) can be present per compartment. Once this condition is met, multiple solid supports (e.g., multiple beads) can be present in a compartment, or multiple copies of the bound oligonucleotide can be bound to each solid support, but all polynucleotides resulting from the polymerase extension reaction in the compartment will contain the same barcode sequence.

[0184] Preferred solid supports for use in the present methods are beads, for example spherical beads made of metals and/or polymeric materials and having diameters in the range of ˜0.1 to 10 micrometers. Beads having other characteristics can be used instead or in addition. The solid support can be functionalized with a capture moiety to attach the bound oligonucleotide to the surface (FIG. 15, left). Examples of capture moieties include avidin, streptavidin, biotin, carboxyl groups, epoxy groups, hydroxyl groups, thiol groups, and gold. Some capture moieties have binding partners to which they bind specifically and non-covalently. For example, streptavidin takes biotin as its binding partner. Such a capture moiety can be coupled directly (e.g., covalently) to the solid support, and the binding partner can be coupled to the bound oligonucleotide, or vice versa, so that the bound oligonucleotide is bound to the solid support through a non-covalent interaction. Other capture moieties provide a direct covalent linkage between the bound oligonucleotide and solid support.

[0185] The bound oligonucleotide is preferably a single-stranded DNA molecule that is bound to the solid support at its 5′ end. Thus, 3′ end of the bound oligonucleotide is free in solution and, when hybridized to the barcode oligonucleotide, can be extended by an enzyme such as DNA polymerase. The extension reaction is templated using the barcode oligonucleotide, so that the barcode sequence gets incorporated into the DNA strand bound to the bead. If desired, the bound oligonucleotide and/or the barcode oligonucleotide can have sequences designed to minimize intramolecular secondary structure.

[0186] The barcode oligonucleotide can contain sequence regions discussed above, such as a universal priming sequence and/or a binding site. Upon performing a primer extension reaction with the bound oligonucleotide and the barcode oligonucleotide, these sequence regions will be incorporated into the polynucleotide bound to the solid support. If the polynucleotide is subsequently used as a barcode adapter template, the sequence regions will also be present in barcode adapter molecules generated from the template. Other sequences, such as an RNAP promoter and/or a nicking endonuclease restriction site, can be included in the barcode oligonucleotide to facilitate the enzymatic production of barcode adapter molecules. The RNAP promoter can be selected from the group consisting of T7, T3, and SP6 promoters. The nicking endonuclease restriction site can be selected from the group consisting of Nt.BbvCI, Nt.BspQI, Nt.BsmAI, Nt.BstNBI, Nt.AlwI, and Nt.BsmAI sites. The binding site within the barcode oligonucleotide can contain one or more G nucleotides.

[0187] In some embodiments, the barcode sequence and other sequence regions are incorporated into the bound oligonucleotide and/or the polynucleotide attached to solid support using PCR (FIG. 15, right). In these embodiments, the barcode oligonucleotide serves as a template for PCR, and the bound oligonucleotide serves as a primer, with enzymatic extension of the bound oligonucleotide proceeding from its 3′ end. The barcode oligonucleotide also includes a 5′ sequence identical or complementary to a PCR reverse primer sequence. Thus, a reverse primer can anneal to the 5′ end of the barcode oligonucleotide (or its complement) and prime extension in a direction opposite that of the bound oligonucleotide. If desired, this reverse primer can be fluorophore-labeled, so that polynucleotides generated by PCR and attached to the solid support are fluorescent. The label can be used to determine whether a solid support (for example, a bead) has been successfully attached to a polynucleotide that includes the barcode sequence.

[0188] The above methods can be performed in a single step. In other embodiments of the present methods, a polynucleotide containing a barcode sequence is attached to a solid support in multiple steps. In these embodiments, the barcode sequence is made up of several sequence regions, for example S1ₓ, W, and S2_{y} regions. These sequence regions can be introduced into the polynucleotide as part of two or more barcode oligonucleotides, with each barcode oligonucleotide being used in a separate step or enzymatic reaction. In the polynucleotide resulting from the separate steps, the S1ₓ, W, and S2_{y} regions are not necessarily contiguous. Various S1ₓ, W, and S2_{y} sequences can be combined on different solid supports to form different barcodes sequences or libraries of barcode sequences.

[0189] To attach a polynucleotide to a solid support in multiple steps, wherein the polynucleotide contains a barcode sequence, a solid support and oligonucleotide bound to the solid support are provided as described above. The solid support and bound oligonucleotide can be provided in a hydrophilic compartment of an emulsion, or in any other desired reaction volume. Also provided is a first barcode oligonucleotide (FIG. 16, top and middle). The bound oligonucleotide comprises an S1ₓ sequence and a sequence complementary to a 3′ sequence of the first barcode oligonucleotide. The first barcode oligonucleotide comprises a W sequence. In the first step of the multistep procedure, a polymerase extension reaction or a ligation reaction is performed to incorporate the W sequence into the bound oligonucleotide. Thus, after this step, the S1ₓ sequence and W sequence are present in the same nucleic acid strand bound to the solid support. If an extension reaction is used, the bound oligonucleotide can serve as a primer and the first barcode oligonucleotide can serve as a template, as discussed above for the single-step procedure, so that the bound oligonucleotide is extended from its 3′ end. In some embodiments, a portion of the first barcode oligonucleotide that is complementary to the S1ₓ sequence in the bound oligonucleotide contains an inosine tract.

[0190] Subsequently, a second barcode oligonucleotide is provided to incorporate a S2_{y} sequence into the bound oligonucleotide (FIG. 16, bottom). The second barcode oligonucleotide comprises the S2_{y} sequence, as well as a 3′ sequence complementary to the 3′ end of the bound oligonucleotide resulting from the first step of the multistep procedure. Thus, the second barcode oligonucleotide may include a sequence region complementary or identical to a portion of the first barcode oligonucleotide. The second barcode oligonucleotide is reacted with the bound oligonucleotide (now extended to include both the S1ₓ sequence and the W sequence) through a polymerase extension reaction or ligation reaction. After this step, the S1ₓ, W, and S2_{y} sequences are all present in the same nucleic acid strand bound to the solid support.

[0191] As desired, the same or different reaction conditions can be used for the first and second steps of a multistep procedure to attach a polynucleotide to a solid support. For example, the same enzyme (e.g., a DNA polymerase) or different enzymes (e.g., a DNA polymerase and a ligase) can be used for reactions of the first barcode oligonucleotide and second barcode oligonucleotide, although using the same enzyme can be more convenient. To mix reagents and the solid support for consecutive steps, reagents can be apportioned into reaction volumes, and reaction volumes can be split, combined, or otherwise handled, all as desired. For example, the solid support and bound oligonucleotide can be distributed into many reaction volumes, and different first barcode oligonucleotides can be added to each reaction volume, so that different W sequences are coupled to the same S1ₓ sequence. Each of these reaction volumes can in turn be split into many more volumes for the addition of the second barcode oligonucleotide, so that many S2_{y} sequences are coupled to each W sequence. In some embodiments, solid supports are washed to remove unbound oligonucleotides. In some embodiments, solid supports are heated after incorporating the W sequence into the bound oligonucleotide, to melt the duplex of the bound oligonucleotide and first barcode oligonucleotide, and allow the bound oligonucleotide and second barcode oligonucleotide to anneal.

[0192] Sequence regions that can be included in barcode adapter molecules and/or barcode adapter templates, such as a universal priming sequence, binding site, RNAP promoter, or nicking endonuclease restriction site, can be distributed between the first barcode oligonucleotide and the second barcode oligonucleotide as desired. For example, all such sequences can be included in one barcode oligonucleotide, or some can be included in one barcode oligonucleotide and some can be included in the other. In some embodiments, a chosen barcode oligonucleotide, being either the first barcode oligonucleotide or the second barcode oligonucleotide, further comprises a universal priming sequence and a binding site. In some embodiments, this chosen barcode oligonucleotide also comprises an RNAP promoter or a nicking endonuclease restriction site. It will be recognized that the present methods provide many options for incorporating different sequence regions into barcode adapter templates. The optimal designs of these templates and the oligonucleotides used to prepare them may depend on what mechanisms are used for enzymatically generating barcode adapter molecules and barcoding RNAs.

[0193] Any of the methods described herein for attaching polynucleotides to solid supports can be used to prepare one or more solid supports for use in barcoding samples, cells, or RNAs. The polynucleotide(s) attached to each solid support includes barcode sequences and can serve as a barcode adapter template. The present methods can also be used to prepare a barcode library, which includes a plurality of solid supports, each associated with a barcode sequence. Any two solid supports (for example, beads) can have barcode sequences that differ from each other in whole or in part. In some embodiments, every solid support in the barcode library is associated with a different barcode sequence.

[0194] A barcode adapter template bead prepared according to the present methods includes a bead bound to a barcode adapter template. The bead can be bound to multiple copies of the template molecule, for example at least 10, 30, 100, 300, 1,000, 3,000, 10,000, 30,000, 100,000, 300,000, or 1,000,000 copies. In some embodiments, each copy of the template molecule bound to one bead includes the same barcode sequence. In embodiments where the template molecule has a barcode sequence of the form S1ₓ-W-S2_{y}, each copy of the template molecule bound to one bead includes the same S1ₓ, W, and/or S2_{y} sequence. The present methods also allow preparation of a beaded barcode library comprising a plurality of barcode adapter template beads. Every bead in the library can be associated with a different barcode sequence, and copies of barcode adapter templates on each bead can comprise the same barcode sequence.

[0195] In some embodiments, the present methods can be used to prepare a polynucleotide library by physically capturing cDNAs prepared from or obtained from one or more samples (e.g., cells) on barcode adapter template beads. Each bead includes a template molecule with a cDNA binding site at the 3′ end. The bead can be contacted with an enzyme to render the binding site single-stranded (for example, leaving a 3′ overhang at the end of the template molecule free in solution). The bead is then contacted with one or more cDNAs from a sample such that the cDNAs bind to copies of the template molecule through the binding sites. In preferred embodiments, the binding site includes one or more G nucleotides, for example a poly-G tract, and is complementary to the non-templated poly-C tract added to the end of cDNAs by reverse transcriptase.

[0196] The beads in a polynucleotide library can be used as desired, for example to sequence the cDNAs from a plurality of samples or separate the cDNAs from different samples. In the latter case, beads corresponding to different samples can be pelleted using centrifugation or magnetism, and then resuspended and separated using standard methods. If desired, following the binding of cDNAs to template molecules on a bead, the template molecules can be enzymatically extended, thereby incorporating the cDNA sequences into DNA duplexes bound the bead and associating these sequences with a barcode sequence. If the number of copies of cDNA molecules from a sample is comparable to the number of copies of the barcode adapter template on a bead, then these cDNA molecules can be captured on a small number of beads (for example, at most about 1, 3, 10, 30, 100, 300, or 1000 beads per sample). RNAs from samples can be reverse transcribed using standard methods or as discussed above to generate cDNA. B cells (e.g., plasmablasts, memory B cells, and plasma cells) can be used as samples, and in some embodiments the cDNA is a B-cell derived variable immunoglobulin region.

### II. COMPOSITIONS

### A. Polynucleotides

[0197] In some aspects, a polynucleotide can include a cDNA region. In some aspects, a polynucleotide can include a sample identification (barcode)-adapter region. In some aspects, a polynucleotide can include a sample identification (barcode) region. In some aspects, a polynucleotide can include an adapter region. In some aspects, a polynucleotide can include a universal primer region. In some aspects, a polynucleotide can include an amplicon region. In some aspects, a polynucleotide can include a plate identification region. In some aspects, a polynucleotide can include a first plate identification region. In some aspects, a polynucleotide can include a second plate identification region. In some aspects, a polynucleotide can include a restriction site region. In some aspects, a polynucleotide can include a first restriction site region. In some aspects, a polynucleotide can include a second restriction site region. In some aspects, a polynucleotide can include a sequencing region. In some aspects, a polynucleotide can include a first sequencing region. In some aspects, a polynucleotide can include a second sequencing region.

[0198] In some aspects, a polynucleotide can include a plurality of any region described herein. For example, a polynucleotide can include a first sample identification (barcode) region and a second sample identification (barcode) region. In some aspects, the first sample identification (barcode) region and the second sample identification (barcode) region are identical or substantially identical. In some aspects, the first sample identification (barcode) region and the second sample (barcode) identification region are distinct. In some aspects, an identification (barcode) region is coupled to a variable immunoglobulin region.

[0199] In some aspects the sequence of a region will be at least long enough to serve as a target sequence for a primer or a probe in a PCR reaction. In some aspects, a region can be 1 to greater than 5000 base pairs in length. For example, a region can be from 1-10,000 nucleotides in length, e.g., 2-30 nucleotides in length, including all sub-ranges therebetween. As non-limiting examples, a region can be from 1-30 nucleotides, 1-26 nucleotides, 1-23 nucleotides, 1-22 nucleotides, 1-21 nucleotides, 1-20 nucleotides, 1-19 nucleotides, 1-18 nucleotides, 1-17 nucleotides, 18-30 nucleotides, 18-26 nucleotides, 18-23 nucleotides, 18-22 nucleotides, 18-21 nucleotides, 18-20 nucleotides, 19-30 nucleotides, 19-26 nucleotides, 19-23 nucleotides, 19-22 nucleotides, 19-21 nucleotides, 19-20 nucleotides, 20-30 nucleotides, 20-26 nucleotides, 20-25 nucleotides, 20-24 nucleotides, 20-23 nucleotides, 20-22 nucleotides, 20-21 nucleotides, 21-30 nucleotides, 21-26 nucleotides, 21-25 nucleotides, 21-24 nucleotides, 21-23 nucleotides, or 21-22 nucleotides. In some aspects, a region can be about 1, 2, 3, 4, 5, 6, 7, 8, 9, 10, 11, 12, 13, 14, 15, 16, 17, 18, 19, 20, 21, 22, 23, 24, 25, 26, 27, 28, 29, 30, 31, 32, 33, 34, 35, 36, 37, 38, 39, 40, 41, 42, 43, 44, 45, 46, 47, 48, 49, 50, or more nucleotides in length. In some aspects, a region can be less than 50, 50-100, 100-200, 200-300, 300-400, 400-500, 500-600, 600-700, 700-800, 800-900, 900-1000, or greater than 1000 nucleotides in length. In some aspects, a region can be less than 1000, 1000-2000, 2000-3000, 3000-4000, 4000-5000, 5000-6000, 6000-7000, 7000-8000, 8000-9000, 9000-10000, or greater than 10000 nucleotides in length. In some aspects, a region can include at least two nucleotides, at least 3, at least 4, at least 5, at least 6, at least 7, at least 8, at least 9, at least 10, at least 15, at least 20 or more nucleotides of a polynucleotide disclosed herein.

[0200] In some aspects a polynucleotide can be derived from or associated with a single sample. In some aspects a region can be derived from or associated with a single sample. In some aspects, a cDNA region can be derived from or associated with a single sample. In some aspects, an amplicon region can be derived from or associated with a single sample. A “single sample” includes a sample comprising polynucleotides that is taken from a single source. In some aspects, a single source includes a sample taken at a particular time point or at a particular location, e.g., in a subject or flask of cells or plate of cells. In some aspects, a first single sample is taken from a first subject at a first time point and a second single sample is taken from the first subject at a second time point that is distinct from the first time point. In some aspects, a first single sample is taken from a first subject at a first location and a second sample is taken from the first subject at a second location that is distinct from the first location. In some aspects, a first single sample is taken from a first subject at a time point and a second single sample is taken from a second subject at a time point. In some aspects, a first single sample is taken from a first subject at a location and a second sample is taken from a second subject at a location. In one embodiment, a sample comprises polynucleotides that include mRNA derived from one or more B cells. In another embodiment, a sample comprises polynucleotides including cDNA derived from one or more B cells. In another embodiment, a single sample comprises mRNA derived from one or more B cells sorted into a single well of a 96-well or 384-well plate. Samples are generally derived from a prokaryotic cell(s) (e.g., a bacterial cell(s)), a eukaryotic cell(s) (e.g., a mammalian and yeast cell(s)), or other sources of genetic material such as a virus or phage. The term “mammal” or “mammalian” as used herein includes both humans and non-humans and include but is not limited to humans, non-human primates, canines, felines, murines, bovines, equines, and porcines. In some aspects, the methods of the invention are applied to single samples in a plate with at least 96 wells, at least 384 wells, at least 1536 wells, or more wells. In further aspects, the methods of the invention are applied to single samples in at least one, two, three, four, five, six, seven, eight, ten, fifteen, twenty, thirty or more plates with at least 96 wells each.

[0201] In some aspects a 5′ adapter region sequence and/or a sample identification region are added to all cDNAs from a single sample, e.g., during RT and not just to Ig genes. In some aspects, 3′ gene specific primers (GSPs) can be used to amplify any expressed gene in the single sample. In some aspects, genes are amplified that have a 5′ variable region, e.g., T cell receptors and B cell receptors without needing multiple degenerate 5′ primers to amplify the gene(s) of interest. GSPs can include primers specific for IgG, IgM, IgD, IgA, IgE, TCR chains, and other genes of interest.

[0202] In some aspects, multiple rounds of PCR can also be performed, e.g., using nested GSPs. For such nested GSPs, the GSP for the second round of PCR hybridizes to its target gene sequence at a position 5′ along that sequence relative to the position hybridized to by the GSP used in the first round of PCR.

[0203] In some aspects, cDNA region or an amplicon region can include a DNA polynucleotide. In some aspects, cDNA region or an amplicon region can include a cDNA polynucleotide. In some aspects, cDNA region or an amplicon region can include an RNA polynucleotide hybridized to a DNA polynucleotide. In some aspects, cDNA region or an amplicon region can include an mRNA polynucleotide hybridized to a cDNA polynucleotide.

[0204] In some aspects, a universal primer region is not fully complementary to any human exon. In some aspects, a universal primer region is not fully complementary to any expressed human gene. In some aspects, a universal primer region has minimal secondary structure.

[0205] In some aspects, an amplicon region comprises an immunoglobulin heavy chain amplicon sequence. In some aspects, an amplicon region comprises an immunoglobulin light chain amplicon sequence. In some aspects, an amplicon region comprises a T cell receptor alpha amplicon sequence. In some aspects, an amplicon region comprises a T cell receptor beta amplicon sequence.

[0206] In some aspects, a polynucleotide is present in a library of polynucleotides and can be differentiated from other polynucleotides present in the library based on a region of the polynucleotide.

[0207] In some aspects, the sequence of the sample identification region of each polynucleotide in a library derived from a first single sample is distinct from the sequence of the sample identification region of the other polynucleotides in the library derived from one or more samples distinct from the first single sample. In some aspects, the sequence of the sample identification region of each polynucleotide in a library derived from a first single sample differs by at least 1 nucleotide from the sequence of the sample identification region of the other polynucleotides in the library derived from one or more samples distinct from the first single sample. In some aspects, the sequence of the sample identification region of each polynucleotide in a library derived from a first single sample differs by at least 2, 3, 4, 5, 6, 7, 8, 9, 10, 11, 12, 13, 14, 15, 16, 17, 18, 19, 20, 21, 22, 23, 24, 25, 26, 27, 28, 29, 30, 31, 32, 33, 34, 35, 36, 37, 38, 39, 40, 41, 42, 43, 44, 45, 46, 47, 48, 49, 50 or more nucleotides from the sequence of the sample identification region of the other polynucleotides in the library derived from one or more samples distinct from the first single sample. In some aspects, the sequence of the sample identification region of each polynucleotide in a library derived from a first single sample can be about 1, 2, 3, 4, 5, 6, 7, 8, 9, 10, 11, 12, 13, 14, 15, 16, 17, 18, 19, 20, 21, 22, 23, 24, 25, 26, 27, 28, 29, 30, 31, 32, 33, 34, 35, 36, 37, 38, 39, 40, 41, 42, 43, 44, 45, 46, 47, 48, 49, 50, 60, 70, 80, 81, 82, 83, 84, 85, 86, 87, 88, 89, 90, 91, 92, 93, 94, 95, 96, 97, 98, 99, or less than 100% identical to the sequence of the sample identification region of the other polynucleotides in the library derived from one or more samples distinct from the first single sample. In some aspects, the sequence of the sample identification region of each polynucleotide in a library derived from a first single sample is less than 100% identical to the sequence of the sample identification region of the other polynucleotides in the library derived from one or more samples distinct from the first single sample. In some aspects, a sample-identification region acts as a digital barcode on all 1^{st} strand cDNA reverse transcribed from a single sample. In some aspects, the sample identification region is at least 1 nucleotide in length. In some aspects, a sample-identification region can comprise at least 3 nucleotides, and sample-identification regions can differ from each other by at least 1 nucleotide. In one embodiment, sample-identification regions are 3-15 nucleotides in length and differ from each other by at least 1 nucleotide. In some aspects, sample-identification regions can comprise at least 64 variants (using sample-identification regions 3 nucleotides in length with each sample-ID differing from each other by at least 1 nucleotide), or in some aspects larger numbers of variants. In some aspects, the sequence attached 3′ to the sample-identification region can be an adapter region comprising at least 1 G. In a preferred embodiment, the sequence attached 3′ to the sample-identification region can be an adapter region comprising at least 2 G's. In one embodiment, a sequence attached to the 5′ end of a sample-identification region is a universal primer sequence that can be used during PCR amplification to avoid the need for the subsequent addition of a 5′ universal primer sequence (by ligation or another method) or the use of multiple degenerate 5′ primers to amplify genes with variable 5′ regions. In some aspects, the sequence of the first plate identification region of each polynucleotide in a library derived from a first set of single samples is distinct from the sequence of the first plate identification region of the other polynucleotides in the library derived from one or more single sample sets distinct from the first set of single samples. In some aspects, the sequence of the first plate identification region of each polynucleotide in a library derived from the first set of single samples differs by at least 1 nucleotide from the sequence of the first plate identification region of the other polynucleotides in the library derived from one or more single sample sets distinct from the first set of single samples. In some aspects, the sequence of the first plate identification region of each polynucleotide in a library derived from the first set of single samples differs by at least 2, 3, 4, 5, 6, 7, 8, 9, 10, 11, 12, 13, 14, 15, 16, 17, 18, 19, 20, 21, 22, 23, 24, 25, 26, 27, 28, 29, 30, 31, 32, 33, 34, 35, 36, 37, 38, 39, 40, 41, 42, 43, 44, 45, 46, 47, 48, 49, 50 or more nucleotides from the sequence of the first plate identification region of the other polynucleotides in the library derived from one or more single sample sets distinct from the first set of single samples. In some aspects, the sequence of the first plate identification region of each polynucleotide in a library derived from the first set of single samples can be about 1, 2, 3, 4, 5, 6, 7, 8, 9, 10, 11, 12, 13, 14, 15, 16, 17, 18, 19, 20, 21, 22, 23, 24, 25, 26, 27, 28, 29, 30, 31, 32, 33, 34, 35, 36, 37, 38, 39, 40, 41, 42, 43, 44, 45, 46, 47, 48, 49, 50, 60, 70, 80, 81, 82, 83, 84, 85, 86, 87, 88, 89, 90, 91, 92, 93, 94, 95, 96, 97, 98, 99, or less than 100% identical to sequence of the first plate identification region of the other polynucleotides in the library derived from one or more single sample sets distinct from the first set of single samples. In some aspects, the sequence of the first plate identification region of each polynucleotide in a library derived from the first set of single samples is less than 100% identical to sequence of the first plate identification region of the other polynucleotides in the library derived from one or more single sample sets distinct from the first set of single samples. In some aspects, the sequence of the second plate identification region of each polynucleotide in a library derived from a first set of single samples is distinct from the sequence of the second plate identification region of the other polynucleotides in the library derived from one or more single sample sets distinct from the first set of single samples. In some aspects, the sequence of the second plate identification region of each polynucleotide in a library derived from the first set of single samples differs by at least 1 nucleotide from the sequence of the second plate identification region of the other polynucleotides in the library derived from one or more single sample sets distinct from the first set of single samples. In some aspects, the sequence of the second plate identification region of each polynucleotide in a library derived from the first set of single samples differs by at least 2, 3, 4, 5, 6, 7, 8, 9, 10, 11, 12, 13, 14, 15, 16, 17, 18, 19, 20, 21, 22, 23, 24, 25, 26, 27, 28, 29, 30, 31, 32, 33, 34, 35, 36, 37, 38, 39, 40, 41, 42, 43, 44, 45, 46, 47, 48, 49, 50 or more nucleotides from the sequence of the second plate identification region of the other polynucleotides in the library derived from one or more single sample sets distinct from the first set of single samples. In some aspects, the sequence of the second plate identification region is identical to the sequence of the first plate identification region on a polynucleotide. In some aspects, the sequence of the second plate identification region of each polynucleotide in a library derived from the first set of single samples can be about 1, 2, 3, 4, 5, 6, 7, 8, 9, 10, 11, 12, 13, 14, 15, 16, 17, 18, 19, 20, 21, 22, 23, 24, 25, 26, 27, 28, 29, 30, 31, 32, 33, 34, 35, 36, 37, 38, 39, 40, 41, 42, 43, 44, 45, 46, 47, 48, 49, 50, 60, 70, 80, 81, 82, 83, 84, 85, 86, 87, 88, 89, 90, 91, 92, 93, 94, 95, 96, 97, 98, 99, or less than 100% identical to sequence of the second plate identification region of the other polynucleotides in the library derived from one or more single sample sets distinct from the first set of single samples. In some aspects, the sequence of the second plate identification region of each polynucleotide in a library derived from the first set of single samples is less than 100% identical to sequence of the second plate identification region of the other polynucleotides in the library derived from one or more single sample sets distinct from the first set of single samples. In some aspects, a plate-identification region (e.g., a first plate identification region or a second plate identification region) can comprise at least 2 nucleotides, and plate-identification regions differ from each other by at least 1 nucleotide. In one embodiment, plate-identification regions are 2-10 nucleotides in length and differ from each other by at least 1 nucleotide. In some aspects, use of plate-identification regions is found in only some embodiments, as the use of a larger number of different sample-identification regions (one per single sample to be analyzed) can eliminate the need for plate-identification regions. In some aspects, plate-identification regions are used to reduce the number of unique oligonucleotides containing a sample-identification region that need to be synthesized.

[0208] In some aspects, a polynucleotide includes one or more adapter regions. In some aspects, an adapter region includes one or more G's. In some aspects, an adapter region includes 2, 3, 4, 5, 6, 7, 8, 9, 10 or more G's. In some aspects, adapter regions are attached to the 3′ ends of cDNAs using the template switching property of MMLV H⁻ reverse transcriptases. Different methods to attach adapter regions exist, including but not limited to, doing PCR with primers with 5′ flanking adapter region sequences, sticky and blunt end ligations, template-switching-mediated addition of nucleotides, or other methods to covalently attach nucleotides to the 5′ end, to the 3′ end, or to the 5′ and 3′ ends of the polynucleotides. These methods can employ properties of enzymes commonly used in molecular biology. PCR can use, e.g., thermophilic DNA polymerase. Sticky ends that are complementary or substantially complementary are created through either cutting dsDNA with restriction enzymes that leave overhanging ends or through 3′ tailing activities of enzymes such as TdT (terminal transferase). Sticky and blunt ends can then be ligated with a complementary adapter region using ligases such as T4 ligase. Template-switching utilizes the 3′ tailing activity of MMLV H⁻ reverse transcriptase to add one or more cytosines (C's) to the 3′ end of cDNAs and its ability to switch template from mRNA to an adapter region with complementary G's. In some aspects, a cDNA includes 1, 2, 3, 4, 5, 6, 7, 8, 9, 10 or more C's on its 3′ end.

[0209] In some aspects, a polynucleotide includes one or more restriction site regions. Restriction site regions include one or more restriction sites. Restrictions sites can include: NheI, XhoI, BstBI, EcoRI, SacII, BbvCI, PspXI, AgeI, ApaI, KpnI, Acc65I, XmaI, BstEII, DraIII, PacI, FseI, AsiSI, and AscI. In some aspects, any rare 8-cutter enzyme restriction site can be used.

[0210] In some aspects, one or more regions of a polynucleotide described herein can be operatively coupled to one or more other regions of the polynucleotide. In some aspects, two or more distinct regions of a single polynucleotide can be operatively coupled. For example, a universal primer region can be operatively coupled to an adapter region. In some aspects two or more regions can be operatively coupled together that are substantially identical to each other in sequence or identical in description. For example, a first sample identification region can be operatively coupled to a second sample identification region. In some aspects, the sequences of the first sample identification region and the second sample identification region are identical or substantially identical. In some aspects, the sequences of the first sample identification region and the second sample identification region are different or distinct.

[0211] In some aspects, one or more regions of a polynucleotide described herein can be coupled to one or more other regions of the polynucleotide. In some aspects, two or more distinct regions of a single polynucleotide can be coupled. For example, a universal primer region can be coupled to an adapter region. In some aspects two or more regions can be coupled together that are substantially identical to each other in sequence or identical in description. For example, a first sample identification region can be coupled to a second sample identification region. In some aspects, the sequences of the first sample identification region and the second sample identification region are identical or substantially identical. In some aspects, the sequences of the first sample identification region and the second sample identification region are different or distinct.

[0212] In some aspects, a polynucleotide includes the sequence 5′-A-B-3′, wherein A is a sample identification region, and wherein B is an adapter region. In some aspects, a polynucleotide includes the sequence 5′-A-B-C-3′, wherein A is a universal primer region, wherein B is a sample identification region, and wherein C is an adapter region. In some aspects, a polynucleotide includes the sequence 5′-A-B-C-3′, wherein A is a sample identification region, wherein B is an adapter region, and wherein C is an amplicon region derived from a single sample. In some aspects, a polynucleotide includes the sequence 5′-A-B-C-D-3′, wherein A is a universal primer region, wherein B is a sample identification region, wherein C is an adapter region, and wherein D is an amplicon region derived from a single sample. In some aspects, a polynucleotide includes the sequence 5′-A-B-C-D-E-3′, wherein A is a plate identification region, wherein B is a universal primer region, wherein C is a sample identification region, wherein D is an adapter region, and wherein E is an amplicon region derived from a single sample. In some aspects, a polynucleotide includes the sequence 5′-A-B-C-D-E-F-3′, wherein A is a first restriction site region, wherein B is a universal primer region, wherein C is a sample identification region, wherein D is an adapter region, wherein E is an amplicon region derived from a single sample, and wherein F is a second restriction site region.

[0213] In some aspects, the regions of each of the above sequences can be rearranged in a different order, e.g., 5′-C-A-D-B-3′ or 5′-E-A-C-B-D-F-3′ or 5′-B-A-3′. In some aspects, one or more regions of the above sequences can be deleted, e.g., 5′-A-D-3′ or 5′-B-C-3′. In some aspects, one or more additional regions can be added to the above sequences, e.g., 5′-A-A₂-B-3′ or 5′-A-B-C-D-E-F-G-3′. In such examples the one or more additional regions can be any region disclosed herein or equivalents thereof. In some aspects, one or more regions of the sequences above can be modified, e.g., methylated.

[0214] In some aspects, a polynucleotide can include an adapter molecule. In some aspects, a polynucleotide adapter molecule can include a universal primer region, a sample identification region, and an adapter region, wherein the 3′ end of the universal primer region is coupled to the 5′ end of the sample identification region, and wherein the 3′ end of the sample identification region is coupled to the 5′ end of the adapter region. In some aspects, an adapter molecule includes a polynucleotide comprising at least 2 nucleotides that bind to C's added by a reverse transcriptase at the 3′ end of a 1st strand cDNA. In some aspects, an adapter molecule includes a deoxyribose polynucleotide comprising 3-6 G's (DNA G's). In another embodiment, an adapter molecule includes a ribose polynucleotide consisting of 3-6 G's (RNA G's). In other embodiments, the adapter molecule can utilize nucleotide analogues, such locked nucleic acids (LNAs), e.g., LNA G's. In other embodiments, the nucleotide base may also be a universal or degenerate base such as 5-nitroindole and 3-nitropyrrole that can base-pair to C's as well as other nucleotides, in any combination.

[0215] In some aspects, a polynucleotide can include a primer or a probe. In some aspects, a primer can include a universal primer region and a plate identification region, and wherein the 3′ end of the plate identification region is coupled to the 5′ end of the universal primer region.

[0216] In some aspects, a composition can include a polynucleotide composition library. In some aspects, a polynucleotide composition library includes a plurality of polynucleotide compositions. In some aspects each composition is present in a separate container. In some aspects, a container can be a test tube. In some aspects, a container can be a well in a plate. In some aspects, a container can be a well in a 96-well plate. In some aspects, a container can be a well in a 384-well plate. In some aspects, each composition comprises a cDNA region derived from a single sample. In some aspects, each composition comprises a sample identification-adapter region comprising a sample identification region coupled to an adapter region. In some aspects the sequence of the sample identification region of each sample identification-adapter region in a library is distinct from the nucleotide sequence of the sample identification region of the other sample identification-adapter regions present in each separate container in the library. In some aspects the sample identification-adapter region is attached to the cDNA region. In some aspects the sample identification-adapter region is attached to the cDNA region by binding between their 3′ regions. In some aspects the sample identification-adapter region is attached to the cDNA region by G:C binding. In some aspects, the cDNA region comprises an RNA polynucleotide hybridized to a DNA polynucleotide. In some aspects, the cDNA region comprises an mRNA polynucleotide hybridized to a cDNA polynucleotide.

[0217] In some aspects, the plurality of polynucleotide compositions in a polynucleotide library can comprise at least 2, at least 3, at least 10, at least 30, at least 100, at least 300, at least 1000, at least 3000, at least 10,000, at least 30,000, at least 100,000, at least 300,000, at least 1,000,000, at least 3,000,000, at least 10,000,000, at least 30,000,000, or more members. In other aspects, the plurality of polynucleotide compositions in a polynucleotide library can comprise at least 2, at least 3, at least 10, at least 30, at least 100, at least 300, at least 1000, at least 3000, at least 10,000, at least 30,000, or more genes of a cell sample's whole transcriptome. In other aspects, the plurality of polynucleotide compositions in a polynucleotide library comprises at least 1, at least 2, at least 3, at least 10, at least 30, at least 100, at least 300, at least 1000, at least 10,000, at least 100,000, at least 1,000,000, at least 10,000,000, at least 1,000,000,000 or more of the different antibody species present in the blood of an individual. These the antibody species can be expressed by plasmablasts, plasma cells, memory B cells, long-lived plasma cells, naïve B cells, other B lineage cells, or combinations thereof.

### B. Vectors

[0218] In some aspects, a composition can include a vector. The term “vector” is used to refer to a carrier nucleic acid molecule into which a nucleic acid sequence can be inserted for introduction into a cell where it can be replicated. Vectors can be used in the transformation of a host cell with a nucleic acid sequence. In some aspects, a vector can include one or more polynucleotides described herein. In one embodiment, a library of nucleic acid sequences encoding target polypeptides may be introduced into a population of cells, thereby allowing screening of a library. A nucleic acid sequence can be “exogenous” or “heterologous” which means that it is foreign to the cell into which the vector is being introduced or that the sequence is homologous to a sequence in the cell but in a position within the host cell nucleic acid in which the sequence is ordinarily not found. Vectors include plasmids, cosmids, and viruses (e.g., bacteriophage). One of skill in the art may construct a vector through standard recombinant techniques, which are described in Maniatis et al., 1988 and Ausubel et al., 1994, both of which references are incorporated herein by reference. In some aspects, a vector can be a vector with the constant regions of an antibody pre-engineered in. In this way, one of skill can clone just the VDJ regions of an antibody of interest and clone those regions into the pre-engineered vector.

[0219] The term “expression vector” refers to a vector containing a nucleic acid sequence coding for at least part of a gene product capable of being transcribed. In some cases, RNA molecules are then translated into a protein, polypeptide, or peptide. Expression vectors can contain a variety of “control sequences,” which refer to nucleic acid sequences for the transcription and possibly translation of an operably linked coding sequence in a particular host organism. In addition to control sequences that govern transcription and translation, vectors and expression vectors may contain nucleic acid sequences that serve other functions as well.

[0220] In some aspects, a vector can include a promoter. In some aspects, a vector can include an enhancer. A “promoter” is a control sequence that is a region of a nucleic acid sequence at which initiation and rate of transcription are controlled. It may contain genetic elements at which regulatory proteins and molecules may bind such as RNA polymerase and other transcription factors. The phrases “operatively positioned,” “operatively linked,” “under control,” and “under transcriptional control” mean that a promoter is in a correct functional location and/or orientation in relation to a nucleic acid sequence to control transcriptional initiation and/or expression of that sequence. A promoter may or may not be used in conjunction with an “enhancer,” which refers to a cis-acting regulatory sequence involved in the transcriptional activation of a nucleic acid sequence.

[0221] A promoter may be one naturally associated with a gene or sequence, as may be obtained by isolating the 5′ non-coding sequences located upstream of the coding segment and/or exon. Such a promoter can be referred to as “endogenous.” Similarly, an enhancer may be one naturally associated with a nucleic acid sequence, located either downstream or upstream of that sequence. Alternatively, certain advantages will be gained by positioning the coding nucleic acid segment under the control of a recombinant or heterologous promoter, which refers to a promoter that is not normally associated with a nucleic acid sequence in its natural environment. A recombinant or heterologous enhancer refers also to an enhancer not normally associated with a nucleic acid sequence in its natural environment. Such promoters or enhancers may include promoters or enhancers of other genes, and promoters or enhancers isolated from any other prokaryotic cell, and promoters or enhancers not “naturally occurring,” i.e., containing different elements of different transcriptional regulatory regions, and/or mutations that alter expression. In addition to producing nucleic acid sequences of promoters and enhancers synthetically, sequences may be produced using recombinant cloning and/or nucleic acid amplification technology, including PCR, in connection with the compositions disclosed herein (see U.S. Pat. Nos. 4,683,202, 5,928,906, each incorporated herein by reference).

[0222] In some aspects, a promoter and/or enhancer that effectively directs the expression of the DNA segment in the cell type chosen for expression. One example of such promoter that may be used is the E. coli arabinose or T7 promoter. Those of skill in the art of molecular biology generally are familiar with the use of promoters, enhancers, and cell type combinations for protein expression, for example, see Sambrook et al. (1989), incorporated herein by reference. The promoters employed may be constitutive, tissue-specific, inducible, and/or useful under the appropriate conditions to direct high level expression of the introduced DNA segment, such as is advantageous in the large-scale production of recombinant proteins and/or peptides. The promoter may be heterologous or endogenous.

[0223] In some aspects, vectors can include initiation signals and/or internal ribosome binding sites. A specific initiation signal also may be included for efficient translation of coding sequences. These signals include the ATG initiation codon or adjacent sequences. Exogenous translational control signals, including the ATG initiation codon, may need to be provided. One of ordinary skill in the art would readily be capable of determining this and providing the necessary signals. It is well known that the initiation codon must be “in-frame” with the reading frame of the desired coding sequence to ensure translation of the entire insert. The exogenous translational control signals and initiation codons can be either natural or synthetic. The efficiency of expression may be enhanced by the inclusion of appropriate transcription enhancer elements.

[0224] In some aspects, a vector can include sequences that increase or optimize the expression level of the DNA segment encoding the gene of interest. An example of such sequences includes addition of introns in the expressed mRNA (Brinster, R. L. et al. (1988) Introns increase transcriptional efficiency in transgenic mice. Proc. Natl. Acad. Sci. USA 85, 836-40; Choi, T. et al. (1991) A generic intron increases gene expression in transgenic mice. Mol. Cell. Biol. 11, 3070-4). Another example of a method for optimizing expression of the DNA segment is “codon optimization”. Codon optimization involves insertion of silent mutations in the DNA segment to reduce the use of rare codons to optimize protein translation (Codon engineering for improved antibody expression in mammalian cells. Carton J M, Sauerwald T, Hawley-Nelson P, Morse B, Peffer N, Beck H, Lu J, Cotty A, Amegadzie B, Sweet R. Protein Expr Purif. 2007 October; 55(2):279-86. Epub 2007 Jun. 16.).

[0225] In some aspects, a vector can include multiple cloning sites. Vectors can include a multiple cloning site (MCS), which is a nucleic acid region that contains multiple restriction enzyme sites, any of which can be used in conjunction with standard recombinant technology to digest the vector (see Carbonelli et al., 1999, Levenson et al., 1998, and Cocea, 1997, incorporated herein by reference.) “Restriction enzyme digestion” refers to catalytic cleavage of a nucleic acid molecule with an enzyme that functions only at specific locations in a nucleic acid molecule. Many of these restriction enzymes are commercially available. Use of such enzymes is understood by those of skill in the art. Frequently, a vector is linearized or fragmented using a restriction enzyme that cuts within the MCS to enable exogenous sequences to be ligated to the vector. “Ligation” refers to the process of forming phosphodiester bonds between two nucleic acid fragments, which may or may not be contiguous with each other. Techniques involving restriction enzymes and ligation reactions are well known to those of skill in the art of recombinant technology.

[0226] In some aspects, a vector can include a termination signal. The vectors or constructs will generally comprise at least one termination signal. A “termination signal” or “terminator” is comprised of the DNA sequences involved in specific termination of an RNA transcript by an RNA polymerase. Thus, in certain embodiments, a termination signal that ends the production of an RNA transcript is contemplated. A terminator may be necessary in vivo to achieve desirable message levels.

[0227] Terminators contemplated for use include any known terminator of transcription described herein or known to one of ordinary skill in the art, including but not limited to, for example, rho dependent or rho independent terminators. In certain embodiments, the termination signal may be a lack of transcribable or translatable sequence, such as due to a sequence truncation.

[0228] In some aspects, a vector can include an origin of replication.

[0229] In order to propagate a vector in a host cell, it may contain one or more origins of replication sites (often termed “ori”), which is a specific nucleic acid sequence at which replication is initiated.

[0230] In some aspects, a vector can include one or more selectable and/or screenable markers. In certain embodiments, cells containing a nucleic acid construct may be identified in vitro or in vivo by including a marker in the expression vector. Such markers would confer an identifiable change to the cell permitting easy identification of cells containing the expression vector. Generally, a selectable marker is one that confers a property that allows for selection. A positive selectable marker is one in which the presence of the marker allows for its selection, while a negative selectable marker is one in which its presence prevents its selection. An example of a positive selectable marker is a drug resistance marker.

[0231] Usually the inclusion of a drug selection marker aids in the cloning and identification of transformants, for example, genes that confer resistance to neomycin, puromycin, hygromycin, DHFR, GPT, zeocin and histidinol are useful selectable markers. In addition to markers conferring a phenotype that allows for the discrimination of transformants based on the implementation of conditions, other types of markers including screenable markers such as GFP, whose basis is colorimetric analysis, are also contemplated. Alternatively, screenable enzymes such as chloramphenicol acetyltransferase (CAT) may be utilized. One of skill in the art would also know how to employ immunologic markers, possibly in conjunction with FACS analysis. The marker used is not believed to be important, so long as it is capable of being expressed simultaneously with the nucleic acid encoding a gene product. Further examples of selectable and screenable markers are well known to one of skill in the art.

[0232] In one aspect, the vector can express DNA segments encoding multiple polypeptides of interest. For example, DNA segments encoding both the immunoglobulin heavy chain and light chain can be encoded and expressed by a single vector. In one aspect, both DNA segments can be included on the same expressed RNA and internal ribosome binding site (IRES) sequences used to enable expression of the DNA segments as separate polypeptides (Pinkstaff J K, Chappell S A, Mauro V P, Edelman G M, Krushel L A., Internal initiation of translation of five dendritically localized neuronal mRNAs., Proc Natl Acad Sci USA. 2001 Feb. 27; 98(5):2770-5. Epub 2001 Feb. 20.). In another aspect, each DNA segment has its own promoter region resulting in expression of separate mRNAs (Andersen C R, Nielsen L S, Baer A, Tolstrup A B, Weilguny D. Efficient Expression from One CMV Enhancer Controlling Two Core Promoters. Mol Biotechnol. 2010 Nov. 27. [Epub ahead of print]).

### C. Host Cells and Expression Systems

[0233] In some aspects, a composition can include a host cell. In some aspects, a host cell can include a polynucleotide or vector described herein. In some aspects, a host cell can include a eukaryotic cell (e.g., insect, yeast, or mammalian) or a prokaryotic cell (e.g., bacteria). In the context of expressing a heterologous nucleic acid sequence, “host cell” can refer to a prokaryotic cell, and it includes any transformable organism that is capable of replicating a vector and/or expressing a heterologous gene encoded by a vector. A host cell can, and has been, used as a recipient for vectors. A host cell may be “transfected” or “transformed,” which refers to a process by which exogenous nucleic acid is transferred or introduced into the host cell. A transformed cell includes the primary subject cell and its progeny.

[0234] In particular embodiments, a host cell is a Gram negative bacterial cell. These bacteria are suited for use in that they possess a periplasmic space between the inner and outer membrane and, particularly, the aforementioned inner membrane between the periplasm and cytoplasm, which is also known as the cytoplasmic membrane. As such, any other cell with such a periplasmic space could be used. Examples of Gram negative bacteria include, but are not limited to, E. coli, Pseudomonas aeruginosa, Vibrio cholera, Salmonella typhimurium, Shigella flexneri, Haemophilus influenza, Bordotella pertussi, Erwinia amylovora, Rhizobium sp. The Gram negative bacterial cell may be still further defined as bacterial cell which has been transformed with the coding sequence of a fusion polypeptide comprising a candidate binding polypeptide capable of binding a selected ligand. The polypeptide is anchored to the outer face of the cytoplasmic membrane, facing the periplasmic space, and may comprise an antibody coding sequence or another sequence. One means for expression of the polypeptide is by attaching a leader sequence to the polypeptide capable of causing such directing.

[0235] Numerous prokaryotic cell lines and cultures are available for use as a host cell, and they can be obtained through the American Type Culture Collection (ATCC), which is an organization that serves as an archive for living cultures and genetic materials. An appropriate host can be determined by one of skill in the art based on the vector backbone and the desired result. A plasmid or cosmid, for example, can be introduced into a prokaryote host cell for replication of many vectors. Bacterial cells used as host cells for vector replication and/or expression include DH5-alpha, JM109, and KC8, as well as a number of commercially available bacterial hosts such as SURE™ Competent Cells and SOLOPACK™ Gold Cells (STRATAGENE™, La Jolla). In some aspects, other bacterial cells such as E. coli LE392 are contemplated for use as host cells.

[0236] Many host cells from various cell types and organisms are available and would be known to one of skill in the art. Similarly, a viral vector may be used in conjunction with a prokaryotic host cell, particularly one that is permissive for replication or expression of the vector. Some vectors may employ control sequences that allow it to be replicated and/or expressed in both prokaryotic and eukaryotic cells. One of skill in the art would further understand the conditions under which to incubate all of the above described host cells to maintain them and to permit replication of a vector. Also understood and known are techniques and conditions that would allow large-scale production of vectors, as well as production of the nucleic acids encoded by vectors and their cognate polypeptides, proteins, or peptides.

[0237] In some aspects, a host cell is mammalian. Examples include CHO cells, CHO-K1 cells, or CHO-S cells. Other mammalian host cells include NS0 cells and CHO cells that are dhfr-, e.g., CHO-dhfr-, DUKX-B11 CHO cells, and DG44 CHO cells.

[0238] Numerous expression systems exist that can comprise at least a part or all of the compositions disclosed herein. Expression systems can include eukaryotic expression systems and prokaryotic expression systems. Such systems could be used, for example, for the production of a polypeptide product identified as capable of binding a particular ligand. Prokaryote-based systems can be employed to produce nucleic acid sequences, or their cognate polypeptides, proteins and peptides. Many such systems are commercially and widely available. Other examples of expression systems comprise of vectors containing a strong prokaryotic promoter such as T7, Tac, Trc, BAD, lambda pL, Tetracycline or Lac promoters, the pET Expression System and an E. coli expression system.

### D. Polypeptides

[0239] In some aspects, a composition can include a polypeptide. In some aspects, a polypeptide encoded by a polynucleotide described herein can be expressed, e.g., from a host cell. The terms “polypeptide” or “protein” include a macromolecule having the amino acid sequence of a native protein, that is, a protein produced by a naturally-occurring and non-recombinant cell; or it is produced by a genetically-engineered or recombinant cell, and comprise molecules having the amino acid sequence of the native protein, or molecules having deletions from, additions to, and/or substitutions of one or more amino acids of the native sequence. The term also includes amino acid polymers in which one or more amino acids are chemical analogs of a corresponding naturally-occurring amino acid and polymers. The terms “polypeptide” and “protein” encompass antigen binding proteins, antibodies, or sequences that have deletions from, additions to, and/or substitutions of one or more amino acids of antigen-binding protein. The term “polypeptide fragment” refers to a polypeptide that has an amino-terminal deletion, a carboxyl-terminal deletion, and/or an internal deletion as compared with the full-length native protein. Such fragments can also contain modified amino acids as compared with the native protein. In certain embodiments, fragments are about five to 500 amino acids long. For example, fragments can be at least 5, 6, 8, 10, 14, 20, 50, 70, 100, 110, 150, 200, 250, 300, 350, 400, or 450 amino acids long. Useful polypeptide fragments include immunologically functional fragments of antibodies, including binding domains. In the case of a binding antibody, useful fragments include but are not limited to a CDR region, a variable domain of a heavy and/or light chain, a portion of an antibody chain or just its variable region including two CDRs, and the like.

[0240] The term “isolated protein” means that a subject protein (1) is free of at least some other proteins with which it would normally be found, (2) is essentially free of other proteins from the same source, e.g., from the same species, (3) is expressed by a cell from a different species, (4) has been separated from at least about 50 percent of polynucleotides, lipids, carbohydrates, or other materials with which it is associated in nature, (5) is operably associated (by covalent or noncovalent interaction) with a polypeptide with which it is not associated in nature, or (6) does not occur in nature. Typically, an “isolated protein” constitutes at least about 5%, at least about 10%, at least about 25%, or at least about 50% of a given sample. Genomic DNA, cDNA, mRNA or other RNA, nucleic acids of synthetic origin, or any combination thereof can encode such an isolated protein. Preferably, the isolated protein is substantially free from proteins or polypeptides or other contaminants that are found in its natural environment that would interfere with its therapeutic, diagnostic, prophylactic, research or other use.

[0241] In some aspects, a polypeptide can include an antigen binding protein (ABP). An “antigen binding protein” (“ABP”) as used herein means any protein that binds a specified target antigen. “Antigen binding protein” includes but is not limited to antibodies and binding parts thereof, such as immunologically functional fragments. Peptibodies are another example of antigen binding proteins. The term “immunologically functional fragment” (or simply “fragment”) of an antibody or immunoglobulin chain (heavy or light chain) antigen binding protein, as used herein, is a species of antigen binding protein comprising a portion (regardless of how that portion is obtained or synthesized) of an antibody that lacks at least some of the amino acids present in a full-length chain but which is still capable of specifically binding to an antigen. Such fragments are biologically active in that they bind to the target antigen and can compete with other antigen binding proteins, including intact antibodies, for binding to a given epitope. In some embodiments, the fragments are neutralizing fragments. These biologically active fragments can be produced by recombinant DNA techniques, or can be produced by enzymatic or chemical cleavage of antigen binding proteins, including intact antibodies. Immunologically functional immunoglobulin fragments include, but are not limited to, Fab, a diabody (heavy chain variable domain on the same polypeptide as a light chain variable domain, connected via a short peptide linker that is too short to permit pairing between the two domains on the same chain), Fab′, F(ab′)2, Fv, domain antibodies and single-chain antibodies, and can be derived from any mammalian source, including but not limited to human, mouse, rat, camelid or rabbit. It is further contemplated that a functional portion of the antigen binding proteins disclosed herein, for example, one or more CDRs, could be covalently bound to a second protein or to a small molecule to create a therapeutic agent directed to a particular target in the body, possessing bifunctional therapeutic properties, or having a prolonged serum half-life. As will be appreciated by one of skill in the art, an antigen binding protein can include nonprotein components. Additional details about antigen binding proteins and antibodies such as modifications, variants, methods of making, and methods of screening can be found in U.S. Pat. Pub. 20110027287, herein incorporated by reference in its entirety for all purposes.

[0242] In some aspects, a polypeptide can include an antibody. The term “antibody” refers to an intact immunoglobulin of any isotype, or a fragment thereof that can compete with the intact antibody for specific binding to the target antigen, and includes, for instance, chimeric, humanized, fully human, and bispecific antibodies. An “antibody” is a species of an antigen binding protein. An intact antibody will generally comprise at least two full-length heavy chains and two full-length light chains, but in some instances can include fewer chains such as antibodies naturally occurring in camelids which can comprise only heavy chains. Antibodies can be derived solely from a single source, or can be “chimeric,” that is, different portions of the antibody can be derived from two different antibodies. The antigen binding proteins, antibodies, or binding fragments can be produced in hybridomas, by recombinant DNA techniques, or by enzymatic or chemical cleavage of intact antibodies. Unless otherwise indicated, the term “antibody” includes, in addition to antibodies comprising two full-length heavy chains and two full-length light chains, derivatives, variants, fragments, and muteins thereof. Furthermore, unless explicitly excluded, antibodies include monoclonal antibodies, bispecific antibodies, minibodies, domain antibodies, synthetic antibodies (sometimes referred to herein as “antibody mimetics”), chimeric antibodies, humanized antibodies, human antibodies, antibody fusions (sometimes referred to herein as “antibody conjugates”), and fragments thereof, respectively. In some embodiments, the term also encompasses peptibodies.

[0243] A therapeutically effective amount of an ABP can be administered to a subject in need thereof. ABPs can be formulated in pharmaceutical compositions. These compositions can comprise, in addition to one or more of the ABPs, a pharmaceutically acceptable excipient, carrier, buffer, stabilizer or other materials well known to those skilled in the art. Such materials should be non-toxic and should not interfere with the efficacy of the active ingredient. The precise nature of the carrier or other material can depend on the route of administration, e.g. oral, intravenous, cutaneous or subcutaneous, nasal, intramuscular, intraperitoneal routes.

[0244] Pharmaceutical compositions for oral administration can be in tablet, capsule, powder or liquid form. A tablet can include a solid carrier such as gelatin or an adjuvant. Liquid pharmaceutical compositions generally include a liquid carrier such as water, petroleum, animal or vegetable oils, mineral oil or synthetic oil. Physiological saline solution, dextrose or other saccharide solution or glycols such as ethylene glycol, propylene glycol or polyethylene glycol can be included.

[0245] For intravenous, cutaneous or subcutaneous injection, or injection at the site of affliction, the active ingredient will be in the form of a parenterally acceptable aqueous solution which is pyrogen-free and has suitable pH, isotonicity and stability. Those of relevant skill in the art are well able to prepare suitable solutions using, for example, isotonic vehicles such as Sodium Chloride Injection, Ringer's Injection, Lactated Ringer's Injection. Preservatives, stabilizers, buffers, antioxidants and/or other additives can be included, as required.

[0246] ABP administration is preferably in a “therapeutically effective amount” or “prophylactically effective amount” (as the case can be, although prophylaxis can be considered therapy), this being sufficient to show benefit to the individual. The actual amount administered, and rate and time-course of administration, will depend on the nature and severity of disease being treated. Prescription of treatment, e.g. decisions on dosage etc., is within the responsibility of general practitioners and other medical doctors, and typically takes account of the disorder to be treated, the condition of the individual patient, the site of delivery, the method of administration and other factors known to practitioners. Examples of the techniques and protocols mentioned above can be found in Remington's Pharmaceutical Sciences, 16th edition, Osol, A. (ed), 1980.

[0247] A composition can be administered alone or in combination with other treatments, either simultaneously or sequentially dependent upon the condition to be treated.

### III. IMMUNE CELLS

[0248] A sample can include immune cells. The immune cells can include T cells and B cells. T-cells (T lymphocytes) include, for example, cells that express T cell receptors. B-cells include, for example, activated B cells, blasting B cells, plasma cells, plasmablasts, memory B cells, B1 cells, B2 cells, marginal-zone B cells, and follicular B cells. T cells include activated T cells, blasting T cells, Helper T cells (effector T cells or Th cells), cytotoxic T cells (CTLs), memory T cells, central memory T cells, effector memory T cells and regulatory T cells. A sample can include a single cell (e.g., a single T or B cell) or at least 1,000, at least 10,000, at least 100,000, at least 250,000, at least 500,000, at least 750,000, or at least 1,000,000 cells.

### A. B Cells

[0249] As used herein a “B cell” refers to any cell that has at least one rearranged immunoglobulin gene locus. A B cell can include at least one rearranged immunoglobulin heavy chain locus or at least one rearranged immunoglobulin light chain locus. A B cell can include at least one rearranged immunoglobulin heavy chain locus and at least one rearranged immunoglobulin light chain locus. B cells are lymphocytes that are part of the adaptive immune system. B cells can include any cells that express antibodies either in the membrane-bound form as the B-cell receptor (BCR) on the cell surface or as secreted antibodies. B cells can express immunoglobulins (antibodies, B cell receptor). Antibodies can include heterodimers formed from the heavy and light immunoglobulin chains. The heavy chain is formed from gene rearrangements of the variable, diversity, and junctional (VDJ) genes to form the variable region, which is joined to the constant region. The light chain is formed from gene rearrangements of the variable and junctional (VJ) genes to form the variable region, which is then joined to the constant region. Owing to a large possible number of junctional combinations, the variable regions of the antibody gene (which is also the BCR) have huge diversity, enabling B cells to recognize any foreign antigen and mount a response against it.

### B. B-Cell Activation and Differentiation

[0250] B cells are activated and differentiate when they recognize an antigen in the context of an inflammatory immune response. They usually include 2 signals to become activated, one signal delivered through BCR (a membrane-bound form of the rearranged immunoglobulin), and another delivered through CD40 or another co-stimulatory molecule. This second signal can be provided through interaction with helper T cells, which express the ligand for CD40 (CD40L) on their surface. B cells then proliferate and may undergo somatic hypermutation, where random changes in the nucleotide sequences of the antibody genes are made, and B cells whose antibodies have a higher affinity B cells are selected. They may also undergo “class-switching”, in which the constant region of the heavy chain encoding the IgM isotype is switched to the constant region encoding the IgG, IgA, or IgE isotype. Differentiating B cells may end up as memory B cells, which are usually of higher affinity and classed switched, though some memory B cells are still of the IgM isotype. Memory B cells can also become activated and differentiate into plasmablasts and ultimately, into plasma cells. Differentiating B cells may also first become plasmablasts, which then differentiate to become plasma cells.

### C. Affinity Maturation and Clonal Families

[0251] A clonal family is generally defined by the use of related immunoglobulin heavy chain and/or light chain V(D)J sequences by 2 or more samples. Related immunoglobulin heavy chain V(D)J sequences can be identified by their shared usage of V(D)J gene segments encoded in the genome. Within a clonal family there are generally subfamilies that vary based on shared mutations within their V(D)J segments, that can arise during B cell gene recombination and somatic hypermutation.

[0252] Activated B cells migrate and form germinal centers within lymphoid or other tissues, where they undergo affinity maturation. B cells may also undergo affinity maturation outside of germinal centers. During affinity maturation, B cells undergo random mutations in their antibody genes, concentrated in the complementary determining regions (CDRs) of the genes, which encode the parts of the antibody that directly bind to and recognize the target antigen against which the B cell was activated. This creates sub-clones from the original proliferating B cell that express immunoglobulins that are slightly different from the original clone and from each other. Clones compete for antigen and the higher-affinity clones are selected, while the lower-affinity clones die by apoptosis. This process results in the “affinity maturation” of B cells and consequently in the generation of B cells expressing immunoglobulins that bind to the antigen with higher affinity. All the B cells that originate from the same ‘parent’ B cell form clonal families, and these clonal families include B cells that recognize the same or similar antigenic epitopes. In some aspects, we expect that clones present at higher frequencies represent clones that bind to antigen with higher affinity, because the highest-affinity clones are selected during affinity maturation. In some aspects, clones with different V(D)J segment usage exhibit different binding characteristics. In some aspects, clones with the same V(D)J segment usage but different mutations exhibit different binding characteristics.

### D. Memory B Cells

[0253] Memory B cells are usually affinity-matured B cells, and may be class-switched. These are cells that can respond more rapidly to a subsequent antigenic challenge, significantly reducing the time included for affinity-matured antibody secretion against the antigen from ˜14 days in a naive organism to ˜7 days.

### E. Plasmablasts and Plasma Cells

[0254] Plasma cells can be either long-lived or short-lived. Long-lived plasma cells may survive for the lifetime of the organism, whereas short-lived plasma cells can last for 3-4 days. Long-lived plasma cells reside either in areas of inflammation, in the mucosal areas (in the case of IgA-secreting plasma cells), in secondary lymphoid tissues (such as the spleen or lymph nodes), or in the bone marrow. To reach these divergent areas, plasmablasts fated to become long-lived plasma cells may first travel through the bloodstream before utilizing various chemokine gradients to traffic to the appropriate areas. Plasmablasts are cells that are affinity matured, are typically classed-switched, and usually secrete antibodies, though generally in lower quantities than the quantity of antibody produced by plasma cells. Plasma cells are dedicated antibody secretors.

### F. Characteristics of TCR and BCR Genes

[0255] Since identifying recombinations are present in the DNA of each individual adaptive immune cell as well as their associated RNA transcripts, either RNA or DNA can be sequenced. A recombined sequence from a T-cell or B-cell can also be referred to as a clonotype. The DNA or RNA can correspond to sequences from T-cell receptor (TCR) genes or immunoglobulin (Ig) genes that encode antibodies. For example, the DNA and RNA can correspond to sequences encoding alpha, beta, gamma, or delta chains of a TCR. In a majority of T-cells, the TCR is a heterodimer consisting of an alpha-chain and beta-chain. The TCR-alpha chain is generated by VJ recombination, and the beta chain receptor is generated by V(D)J recombination. For the TCR-beta chain, in humans there are 48 V segments, 2 D segments, and 13 J segments. Several bases may be deleted and others added (called N and P nucleotides) at each of the two junctions. In a minority of T-cells, the TCRs consist of gamma and delta chains. The TCR gamma chain is generated by VJ recombination, and the TCR delta chain is generated by V(D)J recombination (Kenneth Murphy, Paul Travers, and Mark Walport, Janeway's Immunology 7th edition, Garland Science, 2007, which is herein incorporated by reference in its entirety).

[0256] The DNA and RNA analyzed in the methods can correspond to sequences encoding heavy chain immunoglobulins (IgH) with constant regions (alpha, delta, gamma, epsilon, or mu) or light chain immunoglobulins (IgK or IgL) with constant regions lambda or kappa. Each antibody can have two identical light chains and two identical heavy chains. Each chain is composed of a constant (C) and a variable region. For the heavy chain, the variable region is composed of a variable (V), diversity (D), and joining (J) segments. Several distinct sequences coding for each type of these segments are present in the genome. A specific VDJ recombination event occurs during the development of a B-cell, marking that cell to generate a specific heavy chain. Diversity in the light chain is generated in a similar fashion except that there is no D region so there is only VJ recombination. Somatic mutation often occurs close to the site of the recombination, causing the addition or deletion of several nucleotides, further increasing the diversity of heavy and light chains generated by B-cells. The possible diversity of the antibodies generated by a B-cell is then the product of the different heavy and light chains. The variable regions of the heavy and light chains contribute to form the antigen recognition (or binding) region or site. Added to this diversity is a process of somatic hypermutation which can occur after a specific response is mounted against some epitope. In this process mutations occur in those B-cells that are able to recognize the specific epitope leading to greater diversity in antibodies that may be able to bind the specific epitope more strongly. All these factors contribute to great diversity of antibodies generated by the B-cells. Many billions and maybe more than a trillion distinct antibodies may be generated. The basic premise for generating T-cell diversity is similar to that for generating antibodies by B-cells. An element of T-cell and B-cell activation is their binding to epitopes. The activation of a specific cell leads to the production of more of the same type of cells leading to a clonal expansion.

[0257] Complementarity determining regions (CDR), or hypervariable regions, are sequences in the variable domains of antigen receptors (e.g., T cell receptor and immunoglobulin) that can bind an antigen. The chain of each antigen receptor contains three CDRs (CDR1, CDR2, and CDR3). The two polypeptides making T cells (alpha and beta) and immunoglobulin (IgH and IgK or IgL) contribute to the formation of the three CDRs.

[0258] The part of CDR1 and CDR2 that is coded for by TCR-beta lies within one of 47 functional V segments. Most of the diversity of CDRs is found in CDR3, with the diversity being generated by somatic recombination events during the development of T lymphocytes.

[0259] A great diversity of BCR is present inter and intra-individuals. The BCR is composed of two genes IgH and IgK (or IgL) coding for antibody heavy and light chains. Three Complementarity Determining Region (CDR) sequences that bind antigens and MHC molecules have the most diversity in IgH and IgK (or IgL). The part of CDR1 and CDR2 coded for by IgH lies within one of 44 functional V segments. Most of the diversity in naive B cells emerges in the generation of CDR3 through somatic recombination events during the development of B lymphocytes. The recombination can generate a molecule with one of each of the V, D, and J segments. In humans, there are 44 V, 27 D, and 6 J segments; thus, there is a theoretical possibility of more than 7,000 combinations. In a small fraction of BCRs (about 5%) two D segments are found. Furthermore, several bases may be deleted and others added (called N and P nucleotides) at each of the two junctions generating a great degree of diversity. After B cell activation a process of affinity maturation through somatic hypermutation occurs. In this process progeny cells of the activated B cells accumulate distinct somatic mutations throughout the gene with higher mutation concentration in the CDR regions leading to generating antibodies with higher affinity to the antigens. In addition to somatic hypermutation activated B cells undergo the process of isotype switching. Antibodies with the same variable segments can have different forms (isotypes) depending on the constant segment. Whereas all naive B cells express IgM (or IgD), activated B cells mostly express IgG but also IgM, IgA and IgE. This expression switching from IgM (and/or IgD) to IgG, IgA, or IgE occurs through a recombination event causing one cell to specialize in producing a specific isotype. There is one segment for each IgM, IgD, and IgE, two segments for IgA, and four segments for IgG.

### IV. COMPUTER IMPLEMENTATIONS

[0260] In some aspects, one or more methods described herein can be implemented on a computer. In one embodiment, a computer comprises at least one processor coupled to a chipset. In some embodiments, the chipset is coupled to a memory, a storage device, a keyboard, a graphics adapter, a pointing device, and/or a network adapter. A display is typically coupled to the graphics adapter. In one embodiment, the functionality of the chipset is provided by a memory controller hub and an I/O controller hub. In another embodiment, the memory is coupled directly to the processor instead of the chipset.

[0261] The storage device is any device capable of holding data, like a hard drive, compact disk read-only memory (CD-ROM), DVD, or a solid-state memory device. The memory holds instructions and data used by the processor. The pointing device may be a mouse, track ball, or other type of pointing device, and is used in combination with the keyboard to input data into the computer system. The graphics adapter displays images and other information on the display. The network adapter couples the computer system to a local or wide area network.

[0262] As is known in the art, a computer can have different and/or other components than those described previously. In addition, the computer can lack certain components. Moreover, the storage device can be local and/or remote from the computer (such as embodied within a storage area network (SAN)).

[0263] As is known in the art, the computer is adapted to execute computer program modules for providing functionality described herein. As used herein, the term “module” refers to computer program logic utilized to provide the specified functionality. Thus, a module can be implemented in hardware, firmware, and/or software. In one embodiment, program modules are stored on the storage device, loaded into the memory, and executed by the processor.

[0264] Embodiments of the entities described herein can include other and/or different modules than the ones described here. In addition, the functionality attributed to the modules can be performed by other or different modules in other embodiments. Moreover, this description occasionally omits the term “module” for purposes of clarity and convenience.

### V. KITS

[0265] Further disclosed herein are kits comprising adapter constructs described herein. A kit can comprise a plurality of solid supports coupled to adapter constructs described herein. In some embodiments, the kit comprises an adapter template library comprising a plurality of adapter templates. In some embodiments, the kit comprises an adapter template library comprising a plurality of adapter templates coupled to a plurality of solid supports. The kit can further comprise enzymes for generating an adapter molecule (e.g., a barcode adapter molecule) described herein from the adapter template construct by an enzymatic reaction. In some embodiments, the kit comprises a cell suspension buffer described herein.

[0266] A kit can include a polynucleotide, a polynucleotide library, a vector, and/or a host cell disclosed herein and instructions for use. The kits may comprise, in a suitable container, a polynucleotide, a polynucleotide library, a vector, and/or a host cell disclosed herein, one or more controls, and various buffers, reagents, enzymes and other standard ingredients well known in the art.

[0267] The container can include at least one well on a plate comprising one or more wells. The container can include at least one vial, test tube, flask, bottle, syringe, or other container means, into which a polynucleotide, a polynucleotide library, a vector, and/or a host cell may be placed, and in some instances, suitably aliquoted. Where an additional component is provided, the kit can contain additional containers into which this component may be placed. The kits can also include a means for containing the polynucleotide, a polynucleotide library, a vector, and/or a host cell and any other reagent containers in close confinement for commercial sale. Such containers may include injection or blow-molded plastic containers into which the desired vials are retained. Containers can include labeling with instructions for use and/or warnings.

### VI. DEVICES

[0268] Embodiments of the present invention include devices for generating and transporting reaction volumes. These volumes can occur on a microfluidic scale and can be phase-separated from a carrier fluid. Examples of reaction volumes that can be handled by the devices include aqueous droplets in an inverse emulsion (i.e., a water/oil emulsion). The devices allow barcode adapter templates, barcode adapter molecules, samples (e.g., cells), and/or RNAs obtained from these samples to be encapsulated in droplets, separately or together. The devices also allow reagents to be introduced into droplets, so that barcode adapter molecules can be enzymatically generated and the RNAs from individual samples can be barcoded.

[0269] Non-limiting examples of devices as used and claimed herein are depicted in FIGS. 17-19. A skilled artisan will recognize that variations of these devices can also be constructed and used in the present methods. A device generally includes three microfluidic pathways, each coupled to a pressure source and a flow sensor. The pressure source for a microfluidic pathway drives fluid through the pathway, and the flow sensor, which occurs downstream of the pressure source, can be used to measure the rate of flow through the pathway. In some embodiments, the first pathway 101 and second pathway 102 merge at a first junction 104 to form a combined pathway, which then merges with the third pathway 103 at a second junction 105. The second junction occurs in a microfluidic droplet chip and can be a site where microfluidic droplets are generated.

[0270] Devices as described herein can be assembled from tubing and fluidics components available from IDEX Corporation (Lake Forest, Illinois, U.S.A.), and using a microfluidic droplet chip available from Dolomite Microfluidics (Charlestown, Massachusetts, U.S.A.). Some features of the microfluidic droplet chip are described in U.S. Pat. Nos. 7,268,167, 7,375,140, 7,717,615, 7,772,287, 8,741,192, and 8,883,864, which are incorporated herein by reference. Suitable pressure sources include syringe pumps and pressure pumps. Pressure pumps are available from Dolomite Microfluidics. The pressure sources can be controlled independently.

[0271] In some embodiments, the first and second microfluidic pathways transport aqueous solutions. Each pathway can include an injection port and a valve (e.g., a four-way valve) to bring a solution introduced in the injection port in-line with the pathway. In some embodiments, a reservoir holding an aqueous carrier fluid is disposed upstream of each four-way valve. The aqueous carrier fluid can mix with an aqueous solution in the four-way valve as the carrier fluid is driven downstream, or push a plug of the aqueous solution downstream toward the first junction. In some embodiments, a flow resistor is disposed in each microfluidic pathway.

[0272] Once an aqueous solution is introduced into the first or second microfluidic pathway, it can pass through a sample loop that meters the flow of the solution toward the first junction. Metering can be achieved as desired, for example using fluidic resistance or valves disposed along the sample loop. In some embodiments, one sample loop is associated with each of the first and second microfluidic pathways, and the sample loops are in contact with a thermal cooling unit. The thermal cooling unit can be included to prevent thermal denaturation of enzymes, nucleic acids, or other biological components in the aqueous solutions, or to establish optimal temperatures for enzymatic reactions. Portions of the thermal cooling unit in contact with the sample loops for the first and second microfluidic pathways can be controlled independently or jointly. Any substance or apparatus can be used as a thermal cooling unit provided that it can cause the temperatures of aqueous solutions passing through the sample loops to deviate from the ambient temperature. Examples of suitable thermal cooling devices are Peltier devices and ice bins.

[0273] In some embodiments, the aqueous solution transported through the first microfluidic pathway contains cells and barcode adapter template beads. In some embodiments, the aqueous solution transported through the second microfluidic pathway contains reagents for cell lysis and reagents for producing polynucleotides of interest (e.g., enzymes for generating barcode adapter molecules). The injection port, valve, and/or sample loop associated with each microfluidic pathway can be configured or customized to accommodate the contents of the aqueous solution passing through that pathway. For example, the sample loop associated with the first microfluidic pathway can have an enlarged interior diameter to accommodate cells and beads. It will be recognized many other options exist for allocating cells, beads, and reagents between the first and second microfluidic pathways, so that all of these components are combined at the first junction. For example, cells can be transported through the first microfluidic pathway and beads can be transported through the second microfluidic pathway. Each pathway can be configured as desired, in view of the contents of the aqueous solution it carries.

[0274] The combined pathway resulting from the merger of the first microfluidic pathway and the second microfluidic pathway is in turn merged with the third microfluidic pathway in the microfluidic droplet chip. This occurs at the second junction, which is downstream from the first junction. Any desired distance can be established between the first junction and second junction. In some embodiments, the first junction is also located within the microfluidic droplet chip. In some embodiments, the first junction is immediately upstream of the second junction, so that fluid in the combined pathway travels a negligible distance (for example, less than 10, 3, 1, 0.3, or 0.1 cm) before being combined with fluid from the third microfluidic pathway. This arrangement can reduce the mixing of components in the combined pathway. In some embodiments, the dimensions of the microfluidic pathways in the device, inside and/or outside the microfluidic droplet chip, are such that the movement of fluids is governed by laminar flow.

[0275] The third microfluidic pathway can be configured to deliver an oil/surfactant mixture to the microfluidic droplet chip. Thus, at the second junction in the device, aqueous and hydrophobic phases can mix and microfluidic droplets can form. The geometry of the second junction can be selected to ensure that these droplets have desired characteristics. For example, a geometry can be selected to facilitate the formation of monodisperse droplets, having desired sizes and spaced apart from each other by desired distances, at suitable flow rates in the microfluidic pathways. In some embodiments, the third microfluidic pathway is split into two subpathways upstream of the microfluidic droplet chip, which then merge together along with the combined (aqueous) pathway at the second junction. The two subpathways can approach each other at an large angle (for example, approximately or at least 30, 60, 90, 120, 150, or 180 degrees), so that the oil/surfactant mixture forms a sheath around the aqueous mixture as it enters the second junction. With this geometry, aqueous droplets are ‘pinched off’ from the aqueous mixture and flow in approximately the same direction as the aqueous mixture as they exit the junction. This approach to generating droplets is known in the art as flow focusing. In other embodiments, the combined aqueous pathway intersects the third microfluidic pathway at a right angle, thus giving the second junction a t-junction geometry. In these embodiments, an oil/surfactant mixture flows straight through the junction. The aqueous mixture approaches the junction in a direction perpendicular to that at which droplets formed from this mixture get carried away from the junction. The physics of droplet formation in various microfluidic geometries is described in Thorsen et al., Phys. Rev. Lett. 86, 4163-4166, 2001, and elsewhere.

[0276] The fluid pathway containing droplets, which results from the merger of the combined pathway containing an aqueous mixture and the third microfluidic pathway containing an oil/surfactant mixture, constitutes a sample pathway. The sample pathway is delivered to a sample collection container, which occurs downstream of the second junction. In the sample collection container, droplets can be subjected to thermal cycling. The droplets can also be broken open and barcoded nucleic acids can be harvested.

[0277] In operation, the device described herein can be used to encapsulate barcode adapter template beads and cells into aqueous microfluidic droplets, so that each droplet contains approximately one bead and one cell on average. The number of beads and cells in each droplet can be tuned as desired, for example by adjusting the concentrations of beads or cells in solutions loaded into the device, or by adjusting the flow rates in the three microfluidic pathways. The reagents included in each droplet allow barcode adapter molecules to be enzymatically generated from the one bead in the droplet. These reagents also allow the one cell to be lysed and RNAs from the cell to undergo barcoding reactions. Thus, the RNAs from the cell can be barcoded within the droplet, and nucleic acids derived from these RNAs (and containing a barcode sequence) can be later traced to one cell when the nucleic acids from multiple cells are mixed.

### VII. EXAMPLES

### A. Example 1: Making Barcode Adapter Template Bead Library in a Single Reaction

[0278] The method described below was used to create a barcode adapter template bead library using emulsion PCR, where polymerase chain reaction (PCR) was performed to attach unique barcode adapter templates to each bead (see FIG. 15).

TABLE 4
Oligos used to make barcode adapter template bead library in a single
reaction

| Primer name | Sequence (SEQ ID NO:) |
|---|---|
| emB-T7bridge2 | dual-biotin-C18spacer-C18spacer-TAA TAC GAC TCA CTA TAG GAT |
| | AAA GCG GCC GCA AAT (1) |
| emB-BCbridge2 | mCmCC CCT GTT TAA ACC THH HTH HHH THH HHT HHH THH |
| | HHA TTT GCG GCC GCT TTA T (2) (random combination of HH |
| | HTH HHH THH HHT HHH THH HH (3), has 3¹⁸ or 387 × 10⁶ |
| | possibilities, giving 387 million unique barcodes) |
| emB-T7bridgefree | TAA TAC GAC TCA CTA TAG GAT AAA GCG GCC GCA ATT (4) |
| emB-Rv3 | AlexaFluor647-C18spacer-mCmCC CCT GTT TAA ACC T (5) |

[0279] Streptavidin-coated M-270 Dynabeads® (Life Technologies) were coupled with biotinylated oligonucleotide (“emB_T7bridge2”):
[0280] 1. Beads were resuspended by gently swirling
[0281] 2. 1 mL of M270 beads (approx. 6.7×10⁸ beads) were placed into each of three 1.5 mL microfuge tubes, for a total of 3 mL
[0282] 3. Placed on magnet for 3 minutes.
[0283] 4. Supernatant was removed from each tube and resuspended in 1 mL (1× vol) Bind/Wash Buffer (BWB; 1M NaCl, 5 mM Tris, 0.5 mM EDTA)
[0284] 5. Step 4 was repeated twice more followed by final resuspension in 540 μL volume BWB
[0285] 6. 60 μL of 100 μM emB_T7bridge2 was added to beads and incubated for 15 minutes with gentle rotation
[0286] 7. Following incubation, beads were washed 3× with 1 mL BWB buffer, and combined into a single tube
[0287] 8. Beads were stored at 4° C. with 0.01% sodium azide
[0288] 9. Beads were washed 3× with 10 mM Tris before use

[0289] Barcode oligonucleotides and forward and reverse primers were added to the coupled beads from above in an emulsion-based PCR:
[0290] 1. The following PCR mix (3 mL total volume) was prepared in three 1.5 mL microcentrifuge tubes (VWR Cat. No. 20170-650):

| | | |
|---|---|---|
| ddH₂O | 715.9 | μL |
| 10X HiFi PCR buffer | 100 | μL |
| 50 mM MgSO₄ | 50 | μL |
| 10 mM dNTP mix | 20 | μL |
| emB_T7bridge2-labeled Dynabeads (1.2 × 10⁷ beads/μL) | 50 | μL |
| emB_T7bridgefree (10 μM) | 4 | μL |
| emB_BCandbridge2 (1 pM) | 16.6 | μL |
| emB_Rv3 (100 μM) | 30 | μL |
| Thermostable inorganic pyrophosphatase | 1.5 | μL |
| (NEB 2,000 units/mL) | | |
| Platinum Taq Hifi (Life Technologies, 5 units/μL) | 12 | μL |
| Total volume | 1000 | μL |

[0291] 2. An oil-surfactant mix was prepared (1 mL total volume):

| | |
|---|---|
| a. Mineral oil (Sigma) | 900 μL |
| b. EM90 (Evonik) | 100 μL |

[0292] 3. 800 μL of oil-surfactant mix and 200 μL of PCR mix were combined into each of 15 Axygen 2.0 mL Maxymum Recovery conical-bottom microcentrifuge tubes (MCT-200-L-C). Tubes were sealed and shaken for 3 seconds
[0293] 4. Tubes were placed into a Qiagen TissueLyzer II, and shaken for 5 minutes at 14 Hz
[0294] 5. The emulsion was divided among the wells of a VWR 96-well PCR plate (83007-374), with 160 μL of emulsion added per well
[0295] 6. Tubes were thermocycled using the following program:

| | | |
|---|---|---|
| Initial: | 94° C. | 2’ |
| 35 Cycles: | 94° C. | 20” |
| | 42° C. | 30” |
| | 68° C. | 15” |
| 50 Cycles: | 55° C. | 5.5’ |
| | 72° C. | 30” |
| Final extension: | 68° C. | 5’ |
| Hold: | 10° C. | hold |

[0296] The emulsion was broken and beads were recovered:
[0297] 1. The contents of the PCR plate was transferred into 1.5 mL microcentrifuge tubes (VWR 20170-650), with no more than 0.5 mL of emulsion volume per tube
[0298] 2. 100 μL of 1 uM emB_T7bridgefree primer was added to each tube
[0299] 3. Tubes were topped off with isobutanol, sealed and shaken to mix thoroughly
[0300] 4. Tubes were centrifuged for 1 min at 14,000 rpm
[0301] 5. Tubes were placed on a magnetic strip to draw the beads to the side of the tubes, then as much of the supernatant as possible was aspirated as possible while leaving the pelleted beads behind
[0302] 6. 1 mL of isobutanol was added, mixed well by pipetting up and down until the remaining oil/emulsion volume had dispersed into the isobutanol
[0303] 7. Tubes were placed on a magnetic strip to draw the beads to the side of the tubes, then the isobutanol was aspirated. Beads from all of the tubes were combined into a single tube by first aspirating the supernatant from the tube into which the beads will be combined and then transferring the full volume from another tube, allowing time for the beads to collect at the magnet, then aspirating the supernatant and repeating
[0304] 8. 1 mL of fresh isobutanol was added, mixed well and let rest for 60 seconds
[0305] 9. Isobutanol was aspirated
[0306] 10. 1 mL of 100% ethanol was added, mixed well and let rest for 60 seconds
[0307] 11. Ethanol was aspirated
[0308] 12. Steps 10 and 11 were repeated
[0309] 13. 1 mL of 70% ethanol was added, mixed well and let rest for 60 seconds
[0310] 14. Ethanol was aspirated
[0311] 15. Steps 13 and 14 were repeated
[0312] 16. 1 mL PBS was added, mixed well and let rest for 60 seconds.
[0313] 17. PBS was aspirated
[0314] 18. Steps 16 and 17 were repeated

[0315] Beads that incorporated barcode adapter templates were then sorted from non-barcoded beads using a Becton Dickenson FACS Aria III, utilizing the fluorescence from the Alexa Fluor 647 dye incorporated into the emB_Rv3 reverse primer.

[0316] Beads were stored in 0.01% sodium azide at 4° C. for storage.

[0317] Note that this example makes barcode adapter template beads with a T7 RNAP promoter sequence for amplification of barcode adapters by T7 RNAP. By replacing the T7 RNAP promoter sequence “TAA TAC GAC TCA CTA TAG G” (SEQ ID NO:6) in emB-T7bridge2 with other RNAP promoter sequences, barcode adapters can be amplified using other RNAPs. Also by replacing the promoter sequence with a nicking endonuclease site, such as Nt.BbvCI's “CCT CAG C”, barcode adapters can be amplified using a nicking endonuclease (e.g. Nt.BbvCI) and a strand-displacing DNAP such as Klenow exo−.

[0318] Also, “HH HTH HHH THH HHT HHH THH HH” (SEQ ID NO:3) in emB-BCbridge2 gives ˜387 million unique barcodes. When this barcode library is used to barcode even, for example, 10 million cells, only 2.5% of the unique barcodes are used. It is expected that the majority of the barcodes are of sufficient distance from one another that the majority of barcode sequence reads from NextGen sequencing are easily distinguishable from one another (with a proportion of reads being discarded), regardless of PCR and sequencing errors.

[0319] The emulsion can be made using a variety of methods known to the field, and in this case was made using a shaking method and the resulting droplets were polydisperse with an average droplet diameter of ˜25 μm. Barcode oligonucleotides were amplified with forward and reverse primers and the reverse primer was labeled with a fluorescent tag, which in this example was Alexa Fluor 647—so that beads that incorporated barcode adapter template were distinguishable from unlabeled beads. Bright fluorescent beads that incorporated barcode adapter template were then FACS sorted from dim unlabeled beads.

[0320] At the specified concentrations of beads and barcode oligonucleotide in this example, by Poisson distribution beads were loaded into droplets at an average of ˜7 beads per droplet, and we observed that roughly 28% of droplets contained one or more copies of a unique barcode oligonucleotide, while the rest of the droplets contained no barcode oligonucleotide at all. Of the droplets that contained at least one barcode oligonucleotide, ˜70% should contain exactly one barcode oligonucleotide while the remaining ˜30% should contain two or more barcodes. Therefore ˜70% of the barcode template adapter bead library was monoclonal (one unique barcode sequence per bead) and ˜30% was polyclonal.

[0321] The end yield of the method described below was roughly 12 million barcode adapter template beads of which ˜8.4 million are monoclonal barcode adapter template beads. And although droplets were filled with ˜7 beads per droplet on average, after breaking the emulsion the yield of beads was ˜2%. Based on a binomial distribution, ˜7.7 million unique barcode sequences were present in this barcode adapter template bead library.

[0322] The concentrations of beads and barcode oligonucleotide can be adjusted to obtain a barcode adapter template bead library with differing proportions of monoclonal and polyclonal beads and a different number of unique barcode sequences present. This will allow for barcoding nucleic acids from single cells to achieve differing proportions of nucleic acids associated to a single cell via a unique barcode, or a set of unique barcodes, and also to change the percentage of barcoded nucleic acids discarded from further analysis.

[0323] This barcode adapter template bead making process can be optimized to achieve a ratio of monoclonal:polyclonal beads of, e.g., 90%:10%, 99%:1%, or any other ratio. This improvement over the current ˜70%:30% ratio can be achieved by several different methods, including further diluting the oligo containing the barcode sequence (emB-BCbridge2 in this case) so that fewer copies are divided among the droplets in the emulsion, resulting in a reduced incidence of multiple barcode sequences being encapsulated in any given droplet.

### B. Example 2: Making Barcode Adapter Template Bead Library in a Single Reaction II

[0324] The method described below was used to create a barcode adapter template bead library using emulsion PCR, where polymerase chain reaction (PCR) was performed to attach unique barcode adapter templates to each bead (see FIG. 15).

TABLE 5
Oligos used to make barcode adapter template bead library in a single
reaction II

| Primer name | Sequence (SEQ ID NO:) |
|---|---|
| emB-T7bridgeIsceI | dual-biotin-C18spacer-C18spacer-TAA TAC GAC TCA CTA TAG GAT |
| | AGG GAT AAC AGG GTA ATA GGA (7) |
| emB_BCbridgeISceI_2 | mCmCC CCA GTT TAA ACT CCTH HHT HHH HTH HHH THH HTH |
| | HHH TCC TAT TAC CCT GTT ATC CC (8) |
| | (random combination of HH HTH HHH THH HHT HHH THH HH (3), |
| | has 3¹⁸ or 387 × 10⁶ possibilities, giving 387 million |
| | unique barcodes) |
| emB- | TAA TAC GAC TCA CTA TAG GAT AG GGATAACAGGGTAATAGGA |
| T7bridgefreeIsceI_2 | (9) |
| emB_IsceI_RV | AlexaFluor647-C18spacer-mCmCC CCA GTT TAA ACT CCT (10) |

[0325] Streptavidin-coated M-270 Dynabeads® (Life Technologies) were coupled with biotinylated oligonucleotide (“emB_T7bridgeIsceI”):
[0326] 1. Beads were resuspended by gently swirling
[0327] 2. 1 mL of M270 beads (approx. 6.7×10⁸ beads) were placed into each of three 1.5 mL microfuge tubes, for a total of 3 mL
[0328] 3. Placed on magnet for 3 minutes.
[0329] 4. Supernatant was removed from each tube and resuspended in 1 mL (1× vol) Bind/Wash Buffer (BWB; 1M NaCl, 5 mM Tris, 0.5 mM EDTA)
[0330] 5. Step 4 was repeated twice more followed by final resuspension in 540 μL volume BWB
[0331] 6. 60 μL of 100 μM emB_T7bridgeIsceI was added to beads and incubated for 15 minutes with gentle rotation
[0332] 7. Following incubation, beads were washed 3× with 1 mL BWB buffer, and combined into a single tube
[0333] 8. Beads were stored at 4° C. with 0.01% sodium azide
[0334] 9. Beads were washed 3× with 10 mM Tris before use

[0335] Barcode oligonucleotides and forward and reverse primers were added to the coupled beads from above in an emulsion-based PCR:
[0336] 1. The following PCR mix (3 mL total volume) was prepared in three 1.5 mL microcentrifuge tubes (VWR Cat. No. 20170-650):

| | | |
|---|---|---|
| ddH₂0 | 715.9 | μL |
| 10X HiFi PCR buffer | 100 | μL |
| 50 mM MgSO₄ | 50 | μL |
| 10 mM dNTP mix | 20 | μL |
| emB_T7bridgeIsceI-labeled Dynabeads (1.2 × 10⁷ beads/μL) | 50 | μL |
| emB_T7bridgefreeIsceI_2 (10 μM) | 4 | μL |
| emB_BCbridgeISceI_2 (1 pM) | 16.6 | μL |
| emB_IsceI_RV (100 μM) | 30 | μL |
| Thermostable inorganic pyrophosphatase | 1.5 | μL |
| (NEB 2,000 units/mL) | | |
| Platinum Taq Hifi (Life Technologies, 5 units/μL) | 12 | μL |
| Total volume | 1000 | μL |

[0337] 2. An oil-surfactant mix was prepared (1 mL total volume):

| | |
|---|---|
| a. Mineral oil (Sigma) | 900 μL |
| b. EM90 (Evonik) | 100 μL |

[0338] 3. 800 μL of oil-surfactant mix and 200 μL of PCR mix were combined into each of 15 Axygen 2.0 mL Maxymum Recovery conical-bottom microcentrifuge tubes (MCT-200-L-C). Tubes were sealed and shaken for 3 seconds
[0339] 4. Tubes were placed into a Qiagen TissueLyzer II, and shaken for 5 minutes at 14 Hz
[0340] 5. The emulsion was divided among the wells of a VWR 96-well PCR plate (83007-374), with 160 μL of emulsion added per well
[0341] 6. Tubes were thermocycled using the following program:

| | | |
|---|---|---|
| Initial: | 94° C. | 2’ |
| 35 Cycles: | 94° C. | 20” |
| | 42° C. | 30” |
| | 68° C. | 15” |
| 50 Cycles: | 55° C. | 5.5’ |
| | 72° C. | 30” |
| Final extension: | 68° C. | 5’ |
| Hold: | 10° C. | hold |

[0342] The emulsion was broken and beads were recovered:
[0343] 1. The contents of the PCR plate was transferred into 1.5 mL microcentrifuge tubes (VWR 20170-650), with no more than 0.5 mL of emulsion volume per tube
[0344] 2. 100 μL of 1 uM emB_T7bridgefreeIsceI_2 primer was added to each tube
[0345] 3. Tubes were topped off with isobutanol, sealed and shaken to mix thoroughly
[0346] 4. Tubes were centrifuged for 1 min at 14,000 rpm
[0347] 5. Tubes were placed on a magnetic strip to draw the beads to the side of the tubes, then as much of the supernatant as possible was aspirated as possible while leaving the pelleted beads behind
[0348] 6. 1 mL of isobutanol was added, mixed well by pipetting up and down until the remaining oil/emulsion volume had dispersed into the isobutanol
[0349] 7. Tubes were placed on a magnetic strip to draw the beads to the side of the tubes, then the isobutanol was aspirated. Beads from all of the tubes were combined into a single tube by first aspirating the supernatant from the tube into which the beads will be combined and then transferring the full volume from another tube, allowing time for the beads to collect at the magnet, then aspirating the supernatant and repeating
[0350] 8. 1 mL of fresh isobutanol was added, mixed well and let rest for 60 seconds
[0351] 9. Isobutanol was aspirated
[0352] 10. 1 mL of 100% ethanol was added, mixed well and let rest for 60 seconds
[0353] 11. Ethanol was aspirated
[0354] 12. Steps 10 and 11 were repeated
[0355] 13. 1 mL of 70% ethanol was added, mixed well and let rest for 60 seconds
[0356] 14. Ethanol was aspirated
[0357] 15. Steps 13 and 14 were repeated
[0358] 16. 1 mL PBS was added, mixed well and let rest for 60 seconds.
[0359] 17. PBS was aspirated
[0360] 18. Steps 16 and 17 were repeated

[0361] Beads that incorporated barcode adapter templates were then sorted from non-barcoded beads using a Becton Dickenson FACS Aria III, utilizing the fluorescence from the Alexa Fluor 647 dye incorporated into the emB_IsceI_RV reverse primer.

[0362] Beads were stored in 0.01% sodium azide at 4° C. for storage.

[0363] Note that this example makes barcode adapter template beads with a T7 RNAP promoter sequence for amplification of barcode adapters by T7 RNAP. By replacing the T7 RNAP promoter sequence “TAA TAC GAC TCA CTA TAG G” (SEQ ID NO:6) in emB-T7bridgeIsceI with other RNAP promoter sequences, barcode adapters can be amplified using other RNAPs. Also by replacing the promoter sequence with a nicking endonuclease site, such as Nt.BbvCI's “CCT CAG C”, barcode adapters can be amplified using a nicking endonuclease (e.g. Nt.BbvCI) and a strand-displacing DNAP such as Klenow exo−.

[0364] Also, “HH HTH HHH THH HHT HHH THH HH” (SEQ ID NO:3) in emB-BCbridgeIsceI_2 gives ˜387 million unique barcodes. When this barcode library is used to barcode even, for e.g., 10 million cells, only 2.5% of the unique barcodes are used. It is expected that the majority of the barcodes are of sufficient distance from one another that the majority of barcode sequence reads from NextGen sequencing are easily distinguishable from one another (with a proportion of reads being discarded), regardless of PCR and sequencing errors.

[0365] At the specified concentrations of beads and barcode oligonucleotide in this example, by Poisson distribution beads were loaded into droplets at an average of ˜7 beads per droplet, and we observed that roughly 25% of droplets contained one or more copies of a unique barcode oligonucleotide, while the rest of the droplets contained no barcode oligonucleotide at all. Of the droplets that contained at least one barcode oligonucleotide, ˜75% contained exactly one barcode oligonucleotide while the remaining ˜25% contained two or more barcodes. Therefore ˜75% of the barcode template adapter bead library was monoclonal (one unique barcode sequence per bead) and ˜25% was polyclonal.

[0366] The end yield of the method described below was roughly 50 million barcode adapter template beads of which ˜37.5 million were monoclonal beads. Although droplets were filled with ˜7 beads per droplet on average, after breaking the emulsion the yield of beads was ˜11%. Based on binomial distribution, ˜28 million monoclonal beads with unique barcode sequences were present.

[0367] The concentrations of beads and barcode oligonucleotide can be adjusted to obtain a barcode adapter template bead library with differing proportions of monoclonal and polyclonal beads and a different number of unique barcode sequences present. This will allow for barcoding nucleic acids from single cells to achieve differing proportions of nucleic acids associated to a single cell via a unique barcode, or a set of unique barcodes, and also to change the percentage of barcoded nucleic acids discarded from further analysis.

### C. Example 3: Making Barcode Adapter Template Bead Library in Multi-Steps

[0368] In this example reactions as per FIG. 16 were done, except that only one S1, one W, and one S2 barcode sequence used. Therefore, pooling of beads coupled to different S1 sequences did not occur, and similarly, beads were not pooled after the polymerase extension reaction to add W sequences to the S1 oligo.

[0369] This example can be easily extended to be done as per FIG. 16 simply by having multiple S1-oligo, W-oligo and S2-oligo with unique barcode sequences.

TABLE 6
Oligos used to make barcode adapter template bead library in a single
reaction

| Primer name | Sequence (SEQ ID NO:) |
|---|---|
| S1-oligo | Desthiobiotin-C18spacer-ATA TTA ATA CGA CTC ACT ATA GGC ATA GGG |
| | ATA ACA GGG TAA TGA [S1] AG (11), where S1 = GATGGAT |
| W-oligo-a | CCT CCT CCT CCT CCC [W] CTI III III TCA TTA CCC TGT TAT |
| | CCC TAT GCC (12), where W = AGTGAGCTGCGT |
| W-oligo-b | CT CCT CCT CCC [W] CTI III III TCA TTA CCC TGT TAT CCC |
| | TAT GCC (13), where W = AGTGAGCTGCGT |
| S2-oligo-a | mCmCC CT [S2] TCC TCC TCC TCC TCC C (14), where S2 = CCTAACC |
| S2-oligo-b | mCmCC CT [S2] CTC CTC CTC CC (15), where S2 = CCTAACC |

[0370] Streptavidin-coated M-270 Dynabeads® (Life Technologies) were coupled with biotinylated oligonucleotides containing S1 sequence in individual reactions:
[0371] 1. Beads were resuspended by gently swirling
[0372] 2. M270 beads (Life Technologies) were placed on magnet for 3 minutes.
[0373] 3. Supernatant was removed from each tube and resuspended in (1× vol) 0.5× Bind/Wash Buffer (BWB; 1M NaCl, 5 mM Tris, 0.5 mM EDTA)
[0374] 4. Step 4 was repeated twice more followed by final resuspension in BWB buffer
[0375] 5. 10 μM S1-oligo was added to beads and incubated for 15 minutes with gentle rotation
[0376] 6. Following incubation, beads were washed 3× with BWB buffer
[0377] 7. Beads were stored at 4° C. with 0.01% sodium azide
[0378] 8. Beads were washed 3× with 10 mM Tris before use

[0379] Coupled beads were then pooled together, and an extension reaction using w-oligo was performed.

[0380] For w extension reaction:

| | | |
|---|---|---|
| ddH₂O | 26.1 | μL |
| 10x Taq buffer | 5 | μL |
| 100 mM MgCl₂ | 4.25 | μL |
| 20% Tween 20 | 0.125 | μL |
| 100X BSA | 5 | μL |
| S1-coupled beads (1 mg in 20 μL) | 5 | μL |
| dNTP | 1 | μL |
| Taq (NEB) | 0.5 | μL |
| TIPP (NEB) | 0.025 | μL |
| 100 μM W-oligo-a OR W-oligo-b | 3 | μL |

[0381] Incubated at 55° C. overnight in an shaking incubator, shaking at 800 rpm.

[0382] Beads were pooled and washed thrice with 1×BWB buffer. The anti-sense strand was then melted in 70° C. melt buffer (50 mM NaCl, 10 mM Tris pH 8.0). Beads were pelleted with a magnet and supernatant removed entirely, then beads are washed thrice in 1 mL TE0.1 and then resuspended in TE0.1 at 1 mg/20 uL.

[0383] For s2 extension reaction (per 250 pg beads):

| | | |
|---|---|---|
| ddH₂O | 24.5 | μL |
| 10x Taq buffer | 5 | μL |
| 100 mM MgCl₂ | 4.25 | μL |
| 20% Tween 20 | 0.125 | μL |
| 100X BSA | 5 | μL |
| S1 + w-a or S1 + w-b Beads | 5 | μL |
| dNTP | 1 | μL |
| 100 μM S2-oligo-a OR S2-oligo-b | 3 | μL |

S2-oligo-a was used with S1+w-a beads, and S2-oligo-b was used with S1+w-b beads. Incubated at 60° C. for 10 min then slowly cooled to 37° C. Incubated at 37° C. for 2 hours, shaken at 800 rpm. Reaction was then allowed to cool to room temperature.
Then the following was added:

| | | |
|---|---|---|
| dNTP (NEB) | 1 | μL |
| Ecoli pyrophosphatase (NEB) | 0.1 | μL |
| Klenow fragment (NEB) | 1 | μL |

Reaction was incubated at 25° C. for 3 hours, shaking at 800 rpm. Every hour reaction was refreshed with 1 μL dNTP.

[0384] Beads were pooled and washed thrice with 1×BWB buffer. Beads were stored at 4° C. with 0.01% sodium azide and were washed 3× with 10 mM Tris before use.

[0385] A small aliquot of barcode adapter template beads were also used in an in vitro transcription reaction using T7 RNAP to determine if making of the beads was successful. If successful, T7 RNAP would be able to transcribe RNA off the double stranded T7 promoter present in the s1-oligo sequence. Megascript T7 kit (Life Technologies) was used and manufacturer's instructions were followed. 5 μL of reaction was run on an RNA Flashgel (Lonza). See FIG. 20.

[0386] The number of unique barcode sequences as formed from the combination of S1, W, and S2 sequences can be increased or decreased as desired. For example, as can be seen in Table 1, if the number of unique barcodes is ˜10× greater than the number of cells to be barcoded, as determined by the binomial distribution, we can expect ˜10% of cells to share identical barcodes and thus discarded during bioinformatic linking of nucleic acids to one another (this is detectable as more than one variable gene nucleic acid, such as two immunoglobulin heavy chains or two TCR alpha chains being associated with each other) Therefore, from such a library we can expect ˜90% of barcoded cells to be successfully barcoded with a unique sequence enabling proper informatics linkage of nucleic acids to one another. Therefore, the number of S1ₓ, W, and S2_{y} sequences required is dependent on the desired number of cells to be barcoded. In Table 7, the W-extension reaction is envisioned to occur in 96-well plates, and an identical number of S1ₓ and S2_{y} sequences are used. As can be seen, to barcode 10 million cells, at most 323 S1ₓ and S2_{y} oligos and 960 W_{z} oligos are required. These are manageable numbers, especially if the reactions are done in 96-well plates, necessitating a total of only 18 96-well plates to perform the reactions to make a barcode adapter template bead library of the desired size.

TABLE 7
Number of S1ₓ, W_{z}, and S2_{y} sequences required to obtain a barcode adapter template
library of sufficient size to barcode nucleic acids from a desired number of cells

| | | | | | |
|---|---|---|---|---|---|
| # cells to be barcoded | 1,000 | 10,000 | 100,000 | 1,000,000 | 10,000,000 |
| # unique beads required | 10,000 | 100,000 | 1,000,000 | 10,000,000 | 100,000,000 |
| # S1/S2 required if 96 w | 11 | 33 | 103 | 323 | 1021 |
| # S1/S2 required if 960 w | 4 | 11 | 33 | 103 | 323 |
| # S1/S2 required if 9600 w | 2 | 4 | 11 | 33 | 103 |

[0387] Also, it is desirable for the barcodes in S1ₓ, S2_{y}, and W_{z} to be designed to be a minimum Hamming distance apart, with this minimum being 2. With this minimum, only barcode sequence reads from NextGen sequencing with an exact match to the barcode sequence are used; barcode sequence reads with errors are discarded. If the Hamming distance or edit distance used is increased to a minimum of 3, then error-correction is possible.

[0388] Note that this example makes barcode adapter template beads with a T7 RNAP promoter sequence for amplification of barcode adapters by T7 RNAP. By replacing the T7 RNAP promoter sequence “TAA TAC GAC TCA CTA TAG G” (SEQ ID NO:6) in emB-T7bridge2 with other RNAP promoter sequences, barcode adapters can be amplified using other RNAPs. Also by replacing the promoter sequence with a nicking endonuclease site, such as Nt.BbvCI's “CCT CAG C”, barcode adapters can be amplified using a nicking endonuclease (e.g. Nt.BbvCI) and a strand-displacing DNAP such as Klenow exo−.

### D. Example 4: Making Aqueous Barcode Adapter Template

[0389] In this example, aqueous barcode adapter templates that were not coupled to beads were synthesized to demonstrate the broad applicability of the present methods.

A reaction mix was prepared as described below:

| | | |
|---|---|---|
| ddH2O | 353 | μL |
| 10x HiFi Buffer | 50 | μL |
| 50 mM MgSO₄ | 20 | μL |
| 10 mM dNTP mix | 10 | μL |
| 10 μM emB_T7bridge2 | 25 | μL |
| (Refer to Table 4) | | |
| 1 pM emB_BCbridge2 | 13 | μL |
| (Refer to Table 4) | | |
| 10 μM emB_RV3 | 25 | μL |
| (Refer to Table 4) | | |
| Platinum Taq HiFi | 4 | μL |
| (Life Technologies) | | |
| Total Volume | 500 | μL |

[0390] The reaction mix was then aliquoted into a 96-well PCR plate at 25 μL per well and thermocycled as follows:

| | | |
|---|---|---|
| Initial: | 95° C. | 1’ |
| 22 Cycles: | 95° C. | 20” |
| | 46° C. | 30” |
| | 68° C. | 30” |
| Final extension: | 68° C. | 5’ |
| Hold: | 10° C. | hold |

[0391] The resulting PCR product, which is the barcode adapter template, was then blunted to remove A overhangs:

| | | |
|---|---|---|
| NEBuffer 2 | 162 | μL |
| 10 mM dNTPs | 30 | μL |
| T4 DNA polymerase (New England Biolabs) | 2 | μL |

[0392] 2.5 μL of the blunting mix was added to each 25 μL reaction volume, and incubated at 12° C. for 15 minutes. 1 μL of 250 mM EDTA was then added to each 25 μL reaction volume and heated to 75° C. for 20 minutes to inactivate the enzyme.

[0393] The reaction was cleaned up and quantitated:
[0394] 1. Reactions were then pooled and cleaned up using Zymo Research RNA Clean and Concentrator kit following manufacturer instructions
[0395] 2. Picogreen quantitation kit (Life Technologies) was used to quantify the DNA and barcode adapter template concentration adjusted to 55 ng/uL

[0396] Note that this example makes barcode adapter template beads with a T7 RNAP promoter sequence for amplification of barcode adapters by T7 RNAP. By replacing the T7 RNAP promoter sequence “TAA TAC GAC TCA CTA TAG G” (SEQ ID NO:6) in emB-T7bridge2 with other RNAP promoter sequences, barcode adapters can be amplified using other RNAPs. Also by replacing the promoter sequence with a nicking endonuclease site, such as Nt.BbvCI's “CCT CAG C”, barcode adapters can be amplified using a nicking endonuclease (e.g. Nt.BbvCI) and a strand-displacing DNAP such as Klenow exo−.

### E. Example 5: Adding Barcodes from Barcode Adapter Templates to mRNA in Different Reaction Buffers

[0397] This example shows that the present methods are useable in a variety of different buffers. Barcode adapter templates were made as described above in Example 4.

TABLE 8
Composition of reaction buffers

| Buffer name | Composition | |
|---|---|---|
| 1x MMLV | 50 | mM Tris-HCl |
| | 75 | mM KCl |
| | 3 | mM MgCl2 |
| | 10 | mM DTT |
| | pH 8.3 @ 25° C. | |
| 1x Thermopol DF | 20 | mM Tris-HCl |
| | 10 | mM (NH4)2SO4 |
| | 10 | mM KCl |
| | 2 | mM MgSO4 |
| | pH 8.8@25° C. | |
| 1x TAE | 40 | mM Tris |
| | 20 | mM acetic acid |
| | 1 | mM EDTA |

[0398] The following reactions were set up:

### Using 0.5×MMLV Buffer

| | | |
|---|---|---|
| ddH2O | 4.8 | μL |
| 10x MMLV buffer (NEB) | 1.25 | μL |
| 100X BSA (NEB) | 1.25 | μL |
| 100 mM MgCl2 | 1.75 | μL |
| 50 μM oligo(dT)₂₀VN (SEQ ID NO: 16) | 0.5 | μL |
| NTP mix (from Life Technologies | 2 | μL |
| Megascript SP6 kit) | | |
| dNTP (NEB) | 1.25 | μL |
| barcode adapter template (55 ng/μL) | 0.6 | μL |
| Ribolock (Thermo Scientific) | 0.6 | μL |
| Total PBMC RNA (50 ng/ul) | 4 | μL |

[0399] The above was heated to 55° C. for 3 minutes, then the following was added:

| | | |
|---|---|---|
| Ribolock (Thermo Scientific) | 0.4 | μL |
| E. coli inorganic pyrophosphatase (NEB) | 2 | μL |
| T7 RNAP (NEB) | 1 | μL |
| T4gp32 (NEB) | 0.6 | μL |
| Maxima H-RTase (Thermo Scientific) | 3 | μL |

[0400] T7 RNAP linear amplification of barcode adapters from barcode adapter template, reverse transcription and addition of barcodes to 1^{st} strand cDNA was performed at 42° C. for 2 hours.

Using Thermopol buffer:

| | | |
|---|---|---|
| ddH2O | 3.3 | μL |
| 10x Thermopol DF (NEB) | 2.5 | μL |
| 1M DTT | 0.25 | μL |
| 100X BSA(NEB) | 1.25 | μL |
| 100 mM MgCl2 | 1.75 | μL |
| 50 μM oligo(dT)₂₀VN (SEQ ID NO: 16) | 0.5 | μL |
| NTP mix (from Life Technologies | 2 | μL |
| Megascript SP6 kit) | | |
| dNTP (NEB) | 1.25 | μL |
| barcode adapter template (55 ng/μL) | 0.6 | μL |
| Ribolock (Thermo Scientific) | 0.6 | μL |
| Total PBMC RNA (50 ng/μL) | 4 | μL |

[0401] The above was heated to 55° C. for 3 minutes, then the following was added:

| | | |
|---|---|---|
| Ribolock (Thermo Scientific) | 0.4 | μL |
| E. coli inorganic pyrophosphatase (NEB) | 2 | μL |
| T7 RNAP (NEB) | 1 | μL |
| T4gp32 (NEB) | 0.6 | μL |
| Maxima H-RTase (Thermo Scientific) | 3 | μL |

[0402] T7 RNAP linear amplification of barcode adapters from barcode adapter template, reverse transcription and addition of barcodes to 1^{st} strand cDNA was performed at 42° C. for 2 hours.

### Using TAE Buffer:

| | | |
|---|---|---|
| ddH2O | 4.55 | μL |
| 5x TAE | 1.25 | μL |
| 1M DTT | 0.25 | μL |
| 100X BSA (NEB) | 1.25 | μL |
| 100 mM MgCl2 | 1.75 | μL |
| 50 μM oligo(dT)₂₀VN (SEQ ID NO: 16) | 0.5 | μL |
| NTP mix (from Life Technologies | 2 | μL |
| Megascript SP6 kit) | | |
| dNTP (NEB) | 1.25 | μL |
| barcode adapter template (55 ng/μL) | 0.6 | μL |
| Ribolock (Thermo Scientific) | 0.6 | μL |
| Total PBMC RNA (50 ng/μL) | 4 | μL |

[0403] The above was heated to 55° C. for 3 minutes, then the following was added:

| | | |
|---|---|---|
| Ribolock (Thermo Scientific) | 0.4 | μL |
| E. coli inorganic pyrophosphatase (NEB) | 2 | μL |
| T7 RNAP (NEB) | 1 | μL |
| T4gp32 (NEB) | 0.6 | μL |
| Maxima H-RTase (Thermo Scientific) | 3 | μL |

[0404] T7 RNAP linear amplification of barcode adapters from barcode adapter template, reverse transcription, and addition of barcodes to 1^{st} strand cDNA was performed at 42° C. for 2 hours.

[0405] The reaction was then cleaned up using a modified traditional phenol/chloroform method:
[0406] 1. 200 μL of TE0.1 (10 mM Tris pH 8.0, 0.1 mM EDTA) was added to each reaction mix
[0407] 2. 200 μL of Phenol/chloroform/isoamyl alcohol (Sigma) was added to each reaction mix and shaken vigorously in pre-spun Gel Phase Lock tubes (5Prime)
[0408] 3. Gel Phase Lock tubes were centrifuged at 14,000 g for 3 minutes and the top aqueous fraction was pipetted into Amicon 100 kDa columns (Millipore) and spun at 14,000 g for 3 minutes
[0409] 4. 450 μL TE (10 mM Tris, pH 8.0, 1 mM EDTA) was then pipetted into the Amicon column, and spun at 14,000 g for 3 minutes
[0410] 5. 450 μL of 10 mM Tris (pH8.0) was then pipetted into the Amicon column and spun at 14,000 g for 5 minutes
[0411] 6. The Amicon column was inverted into a new collection tube and spun at 1000 g for 2 minutes to collect the elute which contained the purified mRNA/1st strand cDNA duplex

[0412] Two rounds of PCR (PCR1 and PCR2) were then performed:

TABLE 9
PCR1 and PCR2 primer sequences

| Primer name | Sequence (SEQ ID NO:) |
|---|---|
| L_GSP1 | TYT GTG GGA CTT CCA CTG CTC (17) |
| G_GSP1 | TCT TGT CCA CCT TGG TGT TGC TG (18) |
| K_GSP1 | CGA TTG GAG GGC GTT ATC CAC (19) |
| K_GSP2 | CTA TGC GCC TTG CCA GCC CGC TCA GTC AGA TGG CGG GAA GAT |
| | GAA GAC (20) |
| L_GSP2 | CTA TGC GCC TTG CCA GCC CGC TCA GGA GGA GGG YGG GAA CAG |
| | AGT GAC (21) |
| G_GSP2 | CTA TGC GCC TTG CCA GCC CGC TCA GGG GAA GTA GTC CTT GAC |
| | CAG GCA G (22) |
| BC_Long | GAG AGA CTG ACA GCG TAT CGC CTC CCT CGC GCC ATC AGA CGA |
| | GTG CGT GGA TAA AGC GGC CGC AAA T (23) |
| FW_1short | GAG AGA CTG ACA GCG TAT CGC CTC (24) |
| 2FR | CGT ATC GCC TCC CTC GCG (25) and CTA TGC GCC TTG CCA GCC |
| | C (26) mixed 1:1 |

[0413] The following PCR1 Phusion (Thermo Scientific) reaction mix was set up per RT reaction:

| | | |
|---|---|---|
| H2O | 11.28 | μL |
| 5x GC buffer | 5 | μL |
| MgCl2 | 0.15 | μL |
| DMSO | 1 | μL |
| dNTP | 0.5 | μL |
| 10 μM FW1-short | 1 | μL |
| 10 μM BC-Long | 1 | μL |
| 10 μM K-GSP1 | 0.56 | μL |
| 10 μM L-GSP1 | 1.25 | μL |
| 10 μM G-GSP1 | 0.56 | μL |
| ET-SSB (NEB) | 0.25 | μL |
| BSA | 0.25 | μL |
| Phusion | 0.2 | μL |
| cDNA template | 2 | μL |

| | | |
|---|---|---|
| Initial: | 95° C. | 5’ |
| 18 Cycles: | 98° C. | 30” |
| | 62° C. | 30” |
| | | 100 |
| | 72° C. | 45” |
| Final extension: | 72° C. | 5’ |
| Hold: | 10° C. | hold |

[0414] The reactions from PCR1 were then diluted 50× and used as a template in 3 separate PCR2 reactions, one for kappa light chain, one for lambda light chain and one for gamma heavy chain.

[0415] The following PCR2 Phusion (Thermo Scientific) reaction mixes were set up per RT reaction:

| | | |
|---|---|---|
| H2O | 17.82 | μL |
| 5x GC buffer | 6 | μL |
| MgCl2 | 0.18 | μL |
| DMSO | 1 | μL |
| dNTP | 0.6 | μL |
| 10 μM 2FW | 1.2 | μL |
| 10 μM K or L or G-GSP2 | 0.6 | μL |
| BSA | 0.3 | μL |
| Phusion | 0.3 | μL |
| Dil. PCR1 template | 2 | μL |

| | | |
|---|---|---|
| Initial: | 95° C. | 5’ |
| 28 cycles: | 98° C. | 30” |
| | 65° C. | 30” |
| | 72° C. | 45” |
| Final extension: | 72° C. | 5’ |
| Hold: | 10° C. | hold |

[0416] 5 μL of product was run on a gel (FIG. 21). As can be seen, the barcoding reaction works well in a variety of different buffers that contain a variety of different ions such as potassium, ammonium, chloride, sulphate, and acetate ions.

### F. Example 6: RNA Barcode Adapters Amplified from Barcode Adapter Templates Work Better than Unamplified DNA Barcode Adapters

[0417] This example shows that the present methods are useable in a variety of different buffers with different salt concentrations. Also, using amplified RNA barcode adapters generated from barcode adapter templates works better (i.e., produces the desired amplified reaction product) than just adding DNA barcode adapters into the reaction, presumably because the reaction with RNA barcode adapters results in lower background (see FIG. 4). Barcode adapter templates were made as described above in Example 4.

TABLE 10
Additional oligo sequences

| Primer name | Sequence (SEQ ID NO:) |
|---|---|
| DNA barcode | TYT GTG GGA CTT CCA CTG CTC (17) |
| adapter w24 | |
| FW1_Long | GAG AGA CTG ACA GCG TAT CGC CTC CCT CGC GCC ATC AGA |
| | CGA GTG CGT CAC GAC CGG TGC TCG ATT TAG (27) |

[0418] The following reactions were set up and buffer compositions are as in Table 8:

### Using 1×MMLV Buffer

| | | |
|---|---|---|
| ddH₂O | 3.55 | μL |
| 10x MMLV buffer (NEB) | 2.5 | μL |
| 100X BSA (NEB) | 1.25 | μL |
| 100 mM MgCl₂ | 1.75 | μL |
| 50 μM oligo(dT)₂₀VN (SEQ ID NO: 16) | 0.5 | μL |
| NTP mix (from Life Technologies | 2 | μL |
| Megascript SP6 kit) | | |
| dNTP (NEB) | 1.25 | μL |
| barcode adapter template (55 ng/μL) | 0.6 | μL |
| Ribolock (Thermo Scientific) | 0.6 | μL |
| Total PBMC RNA (50 ng/ul) | 4 | μL |

[0419] The above was heated to 55° C. for 3 minutes, then the following was added:

| | | |
|---|---|---|
| Ribolock (Thermo Scientific) | 0.4 | μL |
| E. coli inorganic pyrophosphatase (NEB) | 2 | μL |
| T7 RNAP (NEB) | 1 | μL |
| T4gp32 (NEB) | 0.6 | μL |
| Maxima H-RTase (Thermo Scientific) | 3 | μL |

[0420] T7 RNAP linear amplification of barcode adapters from barcode adapter template, reverse transcription, and addition of barcodes to 1st strand cDNA was performed at 42° C. for 2 hours.

### Using 0.5×MMLV Buffer

| | | |
|---|---|---|
| ddH₂O | 4.8 | μL |
| 10x MMLV buffer (NEB) | 1.25 | μL |
| 100X BSA(NEB) | 1.25 | μL |
| 100 mM MgCl₂ | 1.75 | μL |
| 50 μM oligo(dT)₂₀VN (SEQ ID NO: 16) | 0.5 | μL |
| NTP mix (from Life Technologies | 2 | μL |
| Megascript SP6 kit) | | |
| dNTP (NEB) | 1.25 | μL |
| barcode adapter template (55 ng/μL) | 0.6 | μL |
| Ribolock (Thermo Scientific) | 0.6 | μL |
| Total PBMC RNA (50 ng/ul) | 4 | μL |

[0421] The above was heated to 55° C. for 3 minutes, then the following was added:

| | | |
|---|---|---|
| Ribolock (Thermo Scientific) | 0.4 | μL |
| E. coli inorganic pyrophosphatase (NEB) | 2 | μL |
| T7 RNAP (NEB) | 1 | μL |
| T4gp32 (NEB) | 0.6 | μL |
| Maxima H-RTase (Thermo Scientific) | 3 | μL |

[0422] T7 RNAP linear amplification of barcode adapters from barcode adapter template, reverse transcription, and addition of barcodes to 1st strand cDNA was performed at 42° C. for 2 hours.

### Using DNA Barcode Adapter

| | | |
|---|---|---|
| ddH₂O | 13 | μL |
| 10x MMLV buffer (NEB) | 2.5 | μL |
| 100X BSA (NEB) | 0.25 | μL |
| 100 mM MgCl₂ | 0.75 | μL |
| 50 μM oligo(dT)₂₀VN (SEQ ID NO: 16) | 1 | μL |
| 10 μM DNA barcode adapter w24 | 2.5 | μL |
| Ribolock (Thermo Scientific) | 0.6 | μL |
| Total PBMC RNA (50 ng/ul) | 2 | μL |

[0423] The above was heated to 55° C. for 3 minutes, then the following was added:

| | | |
|---|---|---|
| Ribolock (Thermo Scientific) | 0.4 | μL |
| T4gp32 (NEB) | 1 | μL |
| Maxima H-RTase (Thermo Scientific) | 1 | μL |

[0424] Reverse transcription and addition of barcodes to 1st strand cDNA was performed at 42° C. for 2 hours.

[0425] The reaction was then cleaned up using a modified traditional phenol/chloroform method:
[0426] 1. 200 μL of TE0.1 (10 mM Tris pH 8.0, 0.1 mM EDTA) was added to each reaction mix
[0427] 2. 200 μL of Phenol/chloroform/isoamyl alcohol (Sigma) was added to each reaction mix and shaken vigorously in pre-spun Gel Phase Lock tubes (5Prime)
[0428] 3. Gel Phase Lock tubes were centrifuged at 14,000 g for 3 minutes and the top aqueous fraction was pipetted into Amicon 100 kDa columns (Millipore) and spun at 14,000 g for 3 minutes
[0429] 4. 450 μL TE (10 mM Tris, pH 8.0, 1 mM EDTA) was then pipetted into the Amicon column, and spun at 14,000 g for 3 minutes
[0430] 5. 450 μL of 10 mM Tris (pH8.0) was then pipetted into the Amicon column and spun at 14,000 g for 5 minutes
[0431] 6. The Amicon column was inverted into a new collection tube and spun at 1000 g for 2 minutes to collect the elute which contained the purified mRNA/1^{st} strand cDNA duplex

[0432] Two rounds of PCR (PCR1 and PCR2) were then performed:

[0433] The following PCR1 Phusion (Thermo Scientific) reaction mix was set up per RT reaction that used a barcode adapter template:

| | | |
|---|---|---|
| H₂O | 11.28 | μL |
| 5x GC buffer | 5 | μL |
| MgCl₂ | 0.15 | μL |
| DMSO | 1 | μL |
| dNTP | 0.5 | μL |
| 10 μM FW1-short | 1 | μL |
| 10 μM BC-Long | 1 | μL |
| 10 μM K-GSP1 | 0.56 | μL |
| 10 μM L-GSP1 | 1.25 | μL |
| 10 μM G-GSP1 | 0.56 | μL |
| ET-SSB (NEB) | 0.25 | μL |
| BSA | 0.25 | μL |
| Phusion | 0.2 | μL |
| cDNA template | 2 | μL |

[0434] The following PCR1 Phusion (Thermo Scientific) reaction mix was set up per RT reaction that used a DNA barcode adapter:

| | | |
|---|---|---|
| H₂O | 11.28 | μL |
| 5x GC buffer | 5 | μL |
| MgCl₂ | 0.15 | μL |
| DMSO | 1 | μL |
| dNTP | 0.5 | μL |
| 10 μM FW1-short | 1 | μL |
| 10 μM FW-Long | 1 | μL |
| 10 μM K-GSP1 | 0.56 | μL |
| 10 μM L-GSP1 | 1.25 | μL |
| 10 μM G-GSP1 | 0.56 | μL |
| ET-SSB (NEB) | 0.25 | μL |
| BSA | 0.25 | μL |
| Phusion | 0.2 | μL |
| cDNA template | 2 | μL |

| | | |
|---|---|---|
| Initial: | 95° C. | 5’ |
| 18 Cycles: | 98° C. | 30” |
| | 62° C. | 30” |
| | 72° C. | 45” |
| Final extension: | 72° C. | 5’ |
| Hold: | 10° C. | hold |

[0435] The reactions from PCR1 were then diluted 50× and used as a template in 3 separate PCR2 reactions, one for kappa light chain, one for lambda light chain, and one for gamma heavy chain.

[0436] The following PCR2 Phusion (Thermo Scientific) reaction mixes were set up per PCR1 reaction:

| | | |
|---|---|---|
| H₂O | 17.82 | μL |
| 5x GC buffer | 6 | μL |
| MgCl₂ | 0.18 | μL |
| DMSO | l | μL |
| dNTP | 0.6 | μL |
| 10 μM 2FW | 1.2 | μL |
| 10 μM K or L or G-GSP2 | 0.6 | μL |
| BSA | 0.3 | μL |
| Phusion | 0.3 | μL |
| Dil. PCR1 template | 2 | μL |

| | | |
|---|---|---|
| Initial: | 95° C. | 5’ |
| 28 cycles: | 98° C. | 30” |
| | 65° C. | 30” |
| | 72° C. | 45” |
| Final extension: | 72° C. | 5’ |
| Hold: | 10° C. | hold |

[0437] 5 μL of product was run on a gel (FIG. 22). As can be seen, the barcoding reaction works well in buffers with differing salt concentrations. While the reaction works better in a low salt buffer (0.5×MMLV) due to the salt sensitivity of the T7 RNAP, it also works in a higher salt buffer (1×MMLV). Note that due to non-specific priming during the RT step when using DNA barcode adapters (refer to FIG. 4), there was exceptionally high background and the desired bands were obscured.

### G. Example 7: Barcoding Nucleic Acids from Cells Using Aqueous Barcode Adapter Templates in Droplets Made Using a Microfluidic Droplet Device

[0438] A device for creating monodisperse emulsions was used to encapsulate single cells along with barcoded beads and other reagents necessary for the barcoding assay. Three Dolomite P-Pumps were equipped with flow sensors (Dolomite 3200016, 3200095, and 3200098). The first P-Pump was connected directly to a 2-Reagent Droplet Chip (Dolomite 3200287) via microfluidic tubing that incorporated a T-junction to split the line into two inputs. This was the oil input line. The other two P-Pumps were connected via fluidic tubing to PEEK sample loops that coiled around an ice bin that served to keep samples chilled while the device was operating, and each of these loops were connected to the 2-Reagent Droplet Chip. Each sample loop incorporated a four-way valve at its front end so that sample could be loaded into the loop by means of a syringe. The first sample loop was filled with cells while the second loop was filled with RT/barcoding/lysis mix. An example of the device configuration is as shown in FIGS. 17-19. The ice bin was filled with ice prior to use.

[0439] A murine B220+B cell population was FACS sorted and a cell suspension was prepared using 300 mM betaine with 10 mM NaCl and 0.5 mg/ml BSA as a suspension buffer. Cells were used at a concentration of 4,500 cells/μL.

An RT/aqueous barcode mix was prepared as follows:

| | | |
|---|---|---|
| 10X Thermopol DF | 30 | μL |
| 1M DTT | 3 | μL |
| 1M MgCl₂ | 3.6 | μL |
| 50 μM oligo(dT)₂₀VN (SEQ ID NO: 16) | 6 | μL |
| NTP mix (from Life Technologies | 48 | μL |
| Megascript SP6 kit) | | |
| dNTP (NEB) | 15 | μL |
| barcode adapter template (55 ng/μL) | 7.2 | μL |
| 10% Tween-20 | 1 | μL |
| Ribolock (Thermo Scientific) | 12 | μL |
| E. coli inorganic pyrophosphatase (NEB) | 24 | μL |
| T7 RNAP (NEB) | 12 | μL |
| T4gp32 (NEB) | 7.2 | μL |
| Maxima H-RTase (Thermo Scientific) | 36 | μL |
| Total volume | 205 | μL |

[0440] The cell suspension was loaded into one sample loop and the RT/barcoding/lysis mix was loaded into the other sample loop using syringes. Cell and barcode concentrations were chosen in such a way as to minimize the occurrence of multiple cells or barcodes in a single droplet, while keeping those concentrations high enough so that a large enough number of cells were encapsulated with barcodes. The 4-way valves were switched so that the sample loops were in line with the pump, and all three pumps were activated. The two aqueous inputs were flowed at rates so that they mixed at a 1:2 (cell suspension:RT/barcoding/lysis mix) ratio. The aqueous and oil inputs were flowed at rates so that droplets that were ˜50 μm in diameter are formed, and at a high enough flow rate so that cells flowed through the device. The emulsion was collected in a Sorenson Bioscience 0.2 mL PCR tube. After the sample had been created, it was first given a pre-heat step (3 minutes at 55° C.) and then incubated for 2 hours at 42° C. to allow the reaction to proceed. Following the reaction, the emulsion was broken using the “breaking non-bead emulsion” process described below. This produced a purified sample of cDNA for subsequent PCR amplification and sequencing.

[0441] Non-bead emulsions were broken as follows:
[0442] 1. 200 μL TE, 400 μL phenol/chloroform/isoamyl alcohol, 800 μL chloroform were pipetted into pre-spun Gel Phase Lock tubes
[0443] 2. Each sample was pipetted into a corresponding Gel Phase Lock tube
[0444] 3. Tubes were spun down for 3 minutes at 14,000 g
[0445] 4. The aqueous layers were pipetted into 100 kDa Amicon tubes (Millipore).
[0446] 5. Tubes were spun down for 3 minutes at 14,000 g
[0447] 6. 450 μL of TE was pipetted into the Amicon tubes
[0448] 7. Tubes were spun down for 3 minutes at 14,000 g
[0449] 8. 450 μL of 10 mM Tris was added to the Amicon tubes
[0450] 9. Tubes were spun down for 5 minutes at 14,000 g
[0451] 10. Amicon tubes were placed inverted into fresh collection tubes
[0452] 11. Tubes were spun down for 2 minutes at 1,000 g

[0453] Two rounds of PCR (PCR1 and PCR2) were then performed, using the following primers in addition to some primer sequences listed in Table 9.

TABLE 11
Additional primers for PCR of murine immunoglobulin genes

| | |
|---|---|
| Primer name | Sequence (SEQ ID NO:) |

| | |
|---|---|
| L_GSP1_murine | ACT CTT CTC CAC AGT GTC CCC TTC ATG (28) and |
| | ACT CTT CTC CAC AGT GTG ACC TTC ATG (29) mixed 50:50 |
| G_GSP1_murine | CTG GAC AGG GAT CCA GAG TTC C (30) and |
| | CTG GAC AGG GCT CCA TAG TTC C (31) mixed 50:50 |
| K_GSP1_murine | CCA TTT TGT CGT TCA CTG CCA TC (32) |
| M_GSP1_murine | CCA GAG AAG CCA TCC CGT GGT (33) |
| K_GSP2_murine | CTA TGC GCC TTG CCA GCC CGC TCA GCA CTG GAT GGT GGG AAG |
| | ATG GA (34) |
| L_GSP2_murine | CTA TGC GCC TTG CCA GCC CGC TCA GGG CCT TGT TAG TCT CGA |
| | GCT CTT C (35) and |
| | CTA TGC GCC TTG CCA GCC CGC TCA GGG CTT TGT TTT CCT KGA |
| | GCT CCT C (36) mixed 50:50 |
| G_GSP2_murine | CTA TGC GCC TTG CCA GCC CGC TCA GGG GGC CAG TGG ATA GAC |
| | HGA TG (37) and |
| | CTA TGC GCC TTG CCA GCC CGC TCA GCA GGG ACC AAG GGA TAG |
| | ACA GAT G (38) mixed 50:50 |
| M_GSP2 murine | CTA TGC GCC TTG CCA GCC CGC TCA GGR AAG ACA TTT GGG RAG |
| | GAC TGA CTC (39) |

[0454] The following PCR1 Phusion (Thermo Scientific) reaction mix was set up per RT reaction that used a barcode adapter template:

| | | |
|---|---|---|
| H₂O | 10.53 | μL |
| 5x GC buffer | 5 | μL |
| MgCl₂ | 0.15 | μL |
| DMSO | 1 | μL |
| dNTP | 0.5 | μL |
| 10 μM FW1-short | 1 | μL |
| 10 μM BC-Long | 1 | μL |
| 10 μM mK-GSP1 | 0.5 | μL |
| 10 μM mL-GSP1 | 0.5 | μL |
| 10 μM mG-GSP1 | 0.56 | μL |
| 10 μM mM-GSP1 | 0.56 | μL |
| ET-SSB (NEB) | 0.25 | μL |
| BSA | 0.25 | μL |
| Phusion | 0.2 | μL |
| cDNA template | 2 | μL |

| | | |
|---|---|---|
| Initial: | 95° C. | 5’ |
| 18 Cycles: | 98° C. | 30” |
| | 62° C. | 30” |
| | 72° C. | 45” |
| Final extension: | 72° C. | 5’ |
| Hold: | 10° C. | hold |

[0455] The reactions from PCR1 were then diluted 50× and used as a template in 3 separate PCR2 reactions, one for kappa and lambda light chains, one for mu heavy chain, and one for gamma heavy chain.

[0456] The following PCR2 Phusion (Thermo Scientific) reaction mixes were set up per PCR1 reaction:

| H₂O | to 30 μL | |
|---|---|---|
| 5x GC buffer | 6 | μL |
| MgCl₂ | 0.18 | μL |
| DMSO | 1 | μL |
| dNTP | 0.6 | μL |
| 10 μM 2FW | 1.2 | μL |
| 10 μM mK and mL or mM-GSP2 | 0.6 | μL |
| BSA | 0.3 | μL |
| Phusion | 0.3 | μL |
| Dil. PCR1 template | 2 | μL |

| | | |
|---|---|---|
| Initial: | 95° C. | 5’ |
| 28 cycles: | 98° C. | 30” |
| | 65° C. | 30” |
| | 72° C. | 45” |
| Final extension: | 72° C. | 5’ |
| Hold: | 10° C. | hold |

5 μL of PCR product was run on a gel (FIG. 23). Bands corresponding to kappa and lambda light chain, and to mu heavy chain were clearly seen. Only the mu heavy chain was amplified as the majority of B220+B cells were expected to be naïve B cells which are IgM+.

[0457] The immunoglobulin heavy and light chains thus amplified can be purified and prepared for next generation sequencing, such as, but not limited to, 454 sequencing. As this example used barcode adapter templates at concentrations of >1 copy per reaction container, a unique set of barcodes are incorporated into the nucleic acids in each reaction container rather than a unique barcode. Paired immunoglobulin heavy and light chains can be associated with each other by them sharing a unique set of barcodes, rather than by a unique barcode.

[0458] Barcode adapter templates can also be used at a concentration such that by limiting dilution the majority of reaction containers that contain a barcode adapter template will contain it at 1 copy per reaction container. In this case, paired immunoglobulin heavy and light chains can be associated with each other by them sharing a unique barcode sequence.

### H. Example 8: Barcoding Nucleic Acids from Cells Using Barcode Adapter Template Beads in Droplets Made Using a Microfluidic Droplet Device

[0459] This example describes an embodiment of the invention based on predicted results rather than results actually achieved. A microfluidic device to generate droplets as described in Example 7 is used, with the only difference being that the first sample loop contained both cells and barcode adapter template beads as made in Examples 1, 2 or 3.

[0460] A murine B220+B cell population is FACS sorted and a cell and barcode adapter template bead suspension is prepared using 300 mM betaine with 10 mM NaCl and 0.5 mg/ml BSA as a suspension buffer. Cells are included at a concentration of 4,500 cells/μL and beads are used at a concentration of 60,000 beads/μL.

[0461] An RT mix is prepared as follows:

| | | |
|---|---|---|
| ddH₂O | 7.4 | μL |
| 10X Thermopol DF | 36 | μL |
| 1M DTT | 3.6 | μL |
| 1M MgCl₂ | 4.3 | μL |
| 50 μM oligo(dT) | 7.2 | μL |
| NTP mix (from Life Technologies Megascript SP6 kit) | 57.6 | μL |
| dNTP (NEB) | 18 | μL |
| 10% Tween-20 | 1.2 | μL |
| Ribolock (Thermo Scientific) | 14.4 | μL |
| E. coli inorganic pyrophosphatase (NEB) | 28.8 | μL |
| T7 RNAP (NEB) | 14.4 | μL |
| T4gp32 (NEB) | 8.6 | μL |
| Maxima H- RTase (Thermo Scientific) | 43.2 | μL |
| Total volume | 244.8 | μL |

[0462] The cell and barcoded bead suspension is loaded into one sample loop and the RT/barcoding/lysis mix is loaded into the other sample loop using syringes. The 4-way valves are switched so that the sample loops are in line with the pump, and all three pumps are activated. The two aqueous inputs are flowed at rates so that they mix at a 1:2 (cell and bead suspension:RT/barcoding/lysis mix) ratio. The aqueous and oil inputs are flowed at rates so that droplets that are ˜50 μm in diameter are formed, and at a high enough flow rate so that cells and beads flow through the device. The emulsion is collected in a Sorenson Bioscience 0.2 mL PCR tube. After the sample has been created, it is first given a heat step (3 minutes at 55° C.) and then incubated for 2 hours at 42° C. to allow the RT/barcoding reaction to proceed. Following the barcoding reaction, the emulsion is broken using the “breaking non-bead emulsion” process described in Example 7. Subsequent PCR reactions are performed as in Example 7.

[0463] The immunoglobulin heavy and light chains thus amplified are purified and prepared for next generation sequencing, such as, but not limited to, 454 sequencing. As this example uses barcode adapter templates beads at ˜1 bead per reaction container, paired immunoglobulin heavy and light chains are paired by their shared use of a unique barcode sequence.

### I. Example 9: Barcoding Nucleic Acids from Cells Using Barcode Adapters Amplified from Barcode Adapter Templates Beads with a DNA Polymerase

[0464] This example describes an embodiment of the invention based on predicted results rather than results actually achieved. A microfluidic device to generate droplets as described in Example 7 is used, with the only difference being that the first sample loop contained both cells and barcode adapter template beads as made in Examples 1, 2 or 3. In this example, the barcode adapter template beads comprise a 5′ Nt.BbvCI nicking endonuclease sequence rather than a T7 RNAP promoter sequence to allow for amplification of barcode adapters by a DNA polymerase.

[0465] A murine B220+B cell population was FACS sorted and a cell and barcode adapter template bead suspension was prepared using 300 mM betaine with 10 mM NaCl and 0.5 mg/ml BSA as a suspension buffer. Cells are included at a concentration of 4,500 cells/uL and beads are used at a concentration of 60,000 beads/μL.

[0466] An RT mix is prepared as follows:

| | | |
|---|---|---|
| ddH₂O | 32.7 | μL |
| 10X Thermopol DF | 36 | μL |
| 1M DTT | 3.6 | μL |
| 1M MgCl₂ | 4.3 | μL |
| 50 μM oligo(dT) | 7.2 | μL |
| dNTP (NEB) | 36 | μL |
| 10% Tween-20 | 1.2 | μL |
| Ribolock (Thermo Scientific) | 14.4 | μL |
| E. coli inorganic pyrophosphatase (NEB) | 28.8 | μL |
| Nt. BbvCI (NEB) | 14.4 | μL |
| Klenow exo- (NEB) | 14.4 | μL |
| T4gp32 (NEB) | 8.6 | μL |
| Maxima H- RTase (Thermo Scientific) | 43.2 | μL |
| Total volume | 244.8 | μL |

[0467] The cell and barcoded bead suspension is loaded into one sample loop and the RT/barcoding/lysis mix is loaded into the other sample loop using syringes. The 4-way valves are switched so that the sample loops are in line with the pump, and all three pumps are activated. The two aqueous inputs are flowed at rates so that they mix at a 1:2 (cell and bead suspension:RT/barcoding/lysis mix) ratio. The aqueous and oil inputs are flowed at rates so that droplets that are ˜50 μm in diameter are formed, and at a high enough flow rate so that cells and beads flow through the device. The emulsion is collected in a Sorenson Bioscience 0.2 mL PCR tube. After the sample has been created, it is first given a heat step (3 minutes at 55° C.) and then incubated for 2 hours at 42° C. to allow the RT/barcoding reaction to proceed. Following the barcoding reaction, the emulsion is broken using the “breaking non-bead emulsion” process described in Example 7. Subsequent PCR reactions are performed as in Example 7.

[0468] The immunoglobulin heavy and light chains thus amplified are purified and prepared for next generation sequencing, such as, but not limited to, 454 sequencing. As this example uses barcode adapter templates beads at ˜1 bead per reaction container, paired immunoglobulin heavy and light chains are paired by their shared use of a unique barcode sequence.

### J. Example 10: Barcoding Nucleic Acids from Cells Using Barcode Adapter Templates in Multi-Well Reaction Containers

[0469] This example describes an embodiment of the invention based on predicted results rather than results actually achieved. Barcode adapter templates with a composition as in FIG. 1 are synthesized as duplex oligos from a vendor such as IDT. Each unique barcode adapter template is kept in a different storage container such that there is no mixing or cross-contamination of barcode sequences. Activated B cells (plasmablasts) are single cell sorted using a FACS Aria II (Becton Dickenson) into 10 μL of a lysis buffer into all wells of a 96-well plate. The composition of the buffer in each well is:

| 10 mM Tris pH 8.0 | to 10 | μL |
|---|---|---|
| 10x MMLV buffer | 1 | μL |
| 100 mM MgCl₂ | 0.3 | μL |
| 1M DTT | 0.015 | μL |
| 100x BSA (NEB) | 0.075 | μL |
| dNTP | 0.5 | μL |
| 10 μM oligo(dT)₂₅ (SEQ ID NO: 40) | 0.5 | μL |
| 20% IGEPAL-630 (Sigma) | 0.15 | μL |
| 1 μM barcode adapter template | 0.25 | μL |
| Ribolock (Thermo Scientific) | 0.4 | μL |
| Maxima H- RTase (Thermo Scientific) | 0.25 | μL |

[0470] The plate is then incubated at 55° C. for 3 minutes, then incubated at 42° C. for 2 hours for the RT/barcoding reaction to occur. The reactions in all wells of a 96-well plate were then pooled together and cleanup is performed using a modified traditional phenol/chloroform method:
[0471] 1. 400 μL of Phenol/chloroform/isoamyl alcohol (Sigma) is added to and shaken vigorously in pre-spun Gel Phase Lock tubes (SPrime)
[0472] 2. Gel Phase Lock tubes are centrifuged at 14,000 g for 3 minutes and the top aqueous fraction is pipetted into Amicon 100 kDa columns (Millipore) and spun at 14,000 g for 3 minutes
[0473] 3. Step 2 is repeated as necessary to get the entire aqueous volume spun through the Amicon column
[0474] 4. 450 μL TE (10 mM Tris, pH 8.0, 1 mM EDTA) is then pipetted into the Amicon column, and spun at 14,000 g for 3 minutes
[0475] 5. 450 μL of 10 mM Tris (pH8.0) is then pipetted into the Amicon column and spun at 14,000 g for 5 minutes
[0476] 6. The Amicon column is inverted into a new collection tube and spun at 1000 g for 2 minutes to collect the elute which contained the purified mRNA/1^{st} strand cDNA duplex

[0477] The following PCR1 Phusion (Thermo Scientific) reaction mix is set up:

| | | |
|---|---|---|
| H2O | 11.28 | μL |
| 5x GC buffer | 5 | μL |
| MgCl₂ | 0.15 | μL |
| DMSO | 1 | μL |
| dNTP | 0.5 | μL |
| 10 μM FW1-short | 1 | μL |
| 10 μM FW-Long | 1 | μL |
| 10 μM K-GSP1 | 0.56 | μL |
| 10 μM L-GSP1 | 1.25 | μL |
| 10 μM G-GSP1 | 0.56 | μL |
| ET-SSB (NEB) | 0.25 | μL |
| BSA | 0.25 | μL |
| Phusion | 0.2 | μL |
| cDNA template | 2 | μL |

| | | |
|---|---|---|
| Initial: | 95° C. | 5′ |
| 18 Cycles: | 98° C. | 30″ |
| | 62° C. | 30″ |
| | 72° C. | 45″ |
| Final extension: | 72° C. | 5′ |
| Hold: | 10° C. | hold |

[0478] The reaction from PCR1 is then diluted 50× and used as a template in 3 separate PCR2 reactions, one for kappa light chain, one for lambda light chain and one for gamma heavy chain.

[0479] The following PCR2 Phusion (Thermo Scientific) reaction mixes are set up:

| | | |
|---|---|---|
| H2O | 17.82 | μL |
| 5x GC buffer | 6 | μL |
| MgCl₂ | 0.18 | μL |
| DMSO | 1 | μL |
| dNTP | 0.6 | μL |
| 10 μM 2FW | 1.2 | μL |
| 10 μM K or L or G-GSP2 | 0.6 | μL |
| BSA | 0.3 | μL |
| Phusion | 0.3 | μL |
| Dil. PCR1 template | 2 | μL |

| | | |
|---|---|---|
| Initial: | 95° C. | 5′ |
| 23 or 28 cycles: | 98° C. | 30″ |
| | 65° C. | 30″ |
| | 72° C. | 45″ |
| Final extension: | 72° C. | 5′ |
| Hold: | 10° C. | hold |

[0480] The immunoglobulin heavy and light chains thus amplified are purified and prepared for next generation sequencing, such as, but not limited to, 454 sequencing. As this example uses a unique barcode adapter templates individually pipetted into each reaction container (in this case wells of a 96-well plate), paired immunoglobulin heavy and light chains are bioinformatically paired by their shared use of a unique barcode sequence.

### K. Example 11: Barcoding Nucleic Acids from Cells Using Barcode Adapter Template Beads in Droplets Made Using a Microfluidic Droplet Device

[0481] The method described below was used to create a barcode adapter template bead library using emulsion PCR, where polymerase chain reaction (PCR) was performed to attach unique barcode adapter templates to each bead (see FIG. 15).

TABLE 12
Oligos used to make barcode adapter template
bead library in a single reaction

| Primer name | Sequence (SEQ ID NO:) |
|---|---|
| emB-T7bridgeIsceI | dual-biotin-C18spacer-C18spacer- |
| | TAA TAC GAC TCA CTA TAG GAT AGG |
| | GAT APC AGG GTA ATA GGA (7) |
| emB- | mCmCC CCA GTT TAA ACT CCTH HHT |
| BCbridgeIsceI2 | HHH HTH HHH THH HTH HHH TCC TAT |
| | TAC CCT GTT ATC CC (8) (random |
| | combination of HH HTH HHH THH |
| | HHT HHH THH HH (3), has 3¹⁸ or |
| | 3⁸⁷ x10⁶ possibilities, giving |
| | 387 million unique barcodes) |
| emB- | TAA TAC GAC TCA CTA TAG GAT |
| T7bridgefreeIsceI_2 | AGG GAT APC AGG GTA ATA |
| | GGA (9) |
| emB_IsceI_RV | AlexaFluor647-C18spacer-mCmCC |
| | CCA GTT TAA ACT CCT (10) |

[0482] Streptavidin-coated M-270 Dynabeads® (Life Technologies) were coupled with biotinylated oligonucleotide (“emB_T7bridgeIsceI”):
[0483] 1. Beads were resuspended by gently swirling
[0484] 2. 1 mL of M270 beads (approx. 2×10⁹ beads) were placed into each of three 1.5 mL microfuge tubes, for a total of 3 mL
[0485] 3. Placed on magnet for 3 minutes.
[0486] 4. Supernatant was removed from each tube and resuspended in 1 mL (1×vol) Bind/Wash Buffer (BWB; 1M NaCl, 5 mM Tris, 0.5 mM EDTA)
[0487] 5. Step 4 was repeated twice more followed by final resuspension in 540 μL volume BWB
[0488] 6. 60 μL of 100 μM emB_T7bridge2 was added to beads and incubated for 15 minutes with gentle rotation
[0489] 7. Following incubation, beads were washed 3× with 1 mL BWB buffer, and combined into a single tube
[0490] 8. Beads were stored at 4° C. with 0.01% sodium azide
[0491] 9. Beads were washed 3× with 10 mM Tris before use

[0492] Added barcode oligonucleotides and forward and reverse primers to the coupled beads from above in an emulsion-based PCR:
[0493] 1. The following PCR mix (3 mL total volume) was prepared in three 1.5 mL microcentrifuge tubes (VWR Cat. No. 20170-650):

| | | |
|---|---|---|
| ddH₂O | 572.7 | μL |
| 10X HiFi PCR buffer | 80 | μL |
| 50 mM MgSO₄ | 40 | μL |
| 10 mM dNTP mix | 16 | μL |
| emB_T7bridgeIsceI-labeled Dynabeads (2 × 10⁵ beads/μL) | 40 | μL |
| emB_T7bridgefreeIsceI_2 (10 μM) | 3.2 | μL |
| emB_BCbridgeIsceI_2 (1 pM) | 13.3 | μL |
| emB_IsceI_RV (100 μM) | 24 | μL |
| Thermostable inorganic pyrophosphatase (NEB 2,000 | 1.2 | μL |
| units/mL) | | |
| Platinum Taq Hifi (Life Technologies, 5 units/μL) | 9.6 | μL |
| Total volume | 800 | μL |

[0494] 2. An oil-surfactant mix was prepared (20 mL total volume):

| | | |
|---|---|---|
| a. Mineral oil (Sigma) | 18.4 | mL |
| b. EM90 (Evonik) | 1.6 | mL |

[0495] 3. 800 μL of oil-surfactant mix and 200 μL of PCR mix were combined into each of 12 Axygen 2.0 mL Maxymum Recovery conical-bottom microcentrifuge tubes (MCT-200-L-C). Tubes were sealed and shaken for 3 seconds
[0496] 4. Tubes were placed into a Qiagen TissueLyzer II, and shaken for 5 minutes at 14 Hz
[0497] 5. The emulsion was divided among the wells of a VWR 96-well PCR plate (83007-374), with 160 μL of emulsion added per well
[0498] 6. Tubes were thermocycled using the following program:

| | | |
|---|---|---|
| Initial: | 94° C. | 2′ |
| 35 Cycles: | 94° C. | 20″ |
| | 42° C. | 30″ |
| | 68° C. | 15″ |
| 50 Cycles: | 55° C. | 5.5′ |
| | 72° C. | 30″ |
| Final extension: | 68° C. | 5′ |
| Hold: | 10° C. | hold |

[0499] The emulsion was broken and beads recovered:
[0500] 1. The contents of the PCR plate was transferred into 1.5 mL microcentrifuge tubes (VWR 20170-650), with no more than 0.5 mL of emulsion volume per tube
[0501] 2. 100 μL of 1 uM emB_T7bridgefreeIsceI_2 primer was added to each tube
[0502] 3. Tubes were topped off with isobutanol, sealed and shaken to mix thoroughly
[0503] 4. Tubes were centrifuged for 1 min at 14,000 rpm
[0504] 5. Tubes were placed on a magnetic strip to draw the beads to the side of the tubes, then as much of the supernatant as possible was aspirated as possible while leaving the pelleted beads behind
[0505] 6. 1 mL of isobutanol was added, mixed well by pipetting up and down until the remaining oil/emulsion volume had dispersed into the isobutanol
[0506] 7. Tubes were placed on a magnetic strip to draw the beads to the side of the tubes, then the isobutanol was aspirated. Beads from all of the tubes were combined into a single tube by first aspirating the supernatant from the tube into which the beads will be combined and then transferring the full volume from another tube, allowing time for the beads to collect at the magnet, then aspirating the supernatant and repeating
[0507] 8. 1 mL of fresh isobutanol was added, mixed well and let rest for 60 seconds
[0508] 9. Isobutanol was aspirated
[0509] 10. 1 mL of 100% ethanol was added, mixed well and let rest for 60 seconds
[0510] 11. Ethanol was aspirated
[0511] 12. Steps 10 and 11 were repeated
[0512] 13. 1 mL of 70% ethanol was added, mixed well and let rest for 60 seconds
[0513] 14. Ethanol was aspirated
[0514] 15. Steps 13 and 14 were repeated
[0515] 16. 1 mL PBS was added, mixed well and let rest for 60 seconds.
[0516] 17. PBS was aspirated
[0517] 18. Steps 16 and 17 were repeated.

[0518] Beads that incorporated barcode adapter templates were then sorted from non-barcoded beads using a Becton Dickenson FACS Aria III, utilizing the fluorescence from the Alexa Fluor 647 dye incorporated into the emB_IsceI_RV reverse primer.

[0519] Beads were stored in 0.01% sodium azide at 4° C. for storage. The microfluidic device shown in FIGS. 17-19 and described in Example 7 was used encapsulate single cells along with barcoded beads and the other reagents necessary for the barcoding assay. A CD19⁺IgG⁺ memory B cell population was FACS sorted and cultured for 6 days in complete IMDM medium (IMDM+10% FBS+100 U/mL IL-2, 50 ng/mL IL-21, 50 ng/mL CD40L, 5 μg/mL anti-CD40L mAb and 1× Normocin) before a cell suspension was prepared using 300 mM betaine with 10 mM NaCl and 0.5 mg/ml BSA as a suspension buffer. Cells were used at a concentration of 2,500 cells/μL and barcoded beads at a concentration of 100,000 beads/uL.

[0520] An RT/aqueous barcode mix was prepared as follows:

| | | |
|---|---|---|
| 10X Thermopol DF | 24 | μL |
| H₂O | 10.6 | μL |
| 200X BSA | 4 | μL |
| 1M DTT | 2.4 | μL |
| 1M MgCl₂ | 2.9 | μL |
| 50 μM oligo(dT) | 4.8 | μL |
| NTP mix (from Life Technologies Megascript T7 kit) | 25.4 | μL |
| dNTP (NEB) | 11.9 | μL |
| 10% Tween-20 | 0.8 | μL |
| Ribolock (Thermo Scientific) | 9.5 | μL |
| E. coli inorganic pyrophosphatase (NEB) | 19.1 | μL |
| T7 RNAP (NEB) | 9.5 | μL |
| T4gp32 (NEB) | 5.7 | μL |
| Maxima H- RTase (Thermo Scientific) | 28.6 | μL |
| Total volume | 159.1 | μL |

[0521] The cell and bead suspension was loaded into one sample loop and the RT/barcoding/lysis mix was loaded into the other sample loop using syringes. Cell and bead concentrations were chosen in such a way as to minimize the occurrence of multiple cells or barcodes in a single droplet, while keeping those concentrations high enough so that a large enough number of cells were encapsulated with beads, keeping in mind that cells and beads do not migrate through the tubing at the same rate as the suspension fluid, effectively leading to a dilution. The 4-way valves were switched so that the sample loops were in line with the pump, and all three pumps were activated. The two aqueous inputs were flowed at rates so that they mixed at a 1:2 (cell suspension:RT/barcoding/lysis mix) ratio. The aqueous and oil inputs were flowed at rates so that droplets that were ˜150 μm in diameter are formed, specifically 1 μL/min (cell/bead suspension line), 2 μL/min (RT mix line), 3 μL/min (oil line). The emulsion was collected in a Sorenson Bioscience 0.2 mL PCR tube. After the sample had been created, it was first given a pre-heat step (3 minutes at 50° C.) and then incubated for 2 hours at 42° C. to allow the reaction to proceed. Following the reaction, the emulsion was broken using the protocol described below. This produced a purified sample of cDNA for subsequent PCR amplification and sequencing.

[0522] The following procedure was used to break the emulsion and recover the product:
[0523] 1. Phase lock tubes (SPrime) were spun down to push the gel to the bottom.
[0524] 2. Samples and 200 μL TE buffer, 400 μL phenol chloroform mix, 800 μL chloroform were added to each phase lock tube.
[0525] 3. Tubes were spun down for 3 minutes at 14,000 g
[0526] 4. The aqueous layer was transferred to a second pre-spun phase lock tube and an equal volume of phenol chloroform was added
[0527] 5. Tubes were spun down for 3 minutes at 14,000 g
[0528] 6. 450 μL of TE was added to the Amicon filter
[0529] 7. Steps 5 and 6 were repeated
[0530] 8. 450 μL of 10 mM Tris was added to the Amicon filter
[0531] 9. Step 5 was repeated
[0532] 10. Each filter unit was then placed inverted into a new collection tube
[0533] 11. Tubes were spun at 1000 g for 2 minutes, and the cleaned up sample was spun into the collection tube

[0534] Two rounds of PCR (PCR1 and PCR2) were then performed, using the following primers in addition to some primer sequences listed in Table 13.

TABLE 13

| Primer name | Sequence (SEQ ID NO:) |
|---|---|
| bc_fwlong_ | GAG AGA CTG ACA GCG TAT CGC CTC CCT CGC |
| ISceI | GCC ATC AGA CGA GTG CGT GGA TAG GGA TAA |
| | CAG GGT AAT AGG A (41) |
| FW_1short | GAG AGA CTG ACA GCG TAT CGC CTC (24) |
| L_GSP1 | TYT GTG GGA CTT CCA CTG CTC (17) |
| G_GSP1 | TCT TGT CCA CCT TGG TGT TGC TG (18) |
| K_GSP1 | CGA TTG GAG GGC GTT ATC CAC (19) |
| 2FR | 50:50 mix of: CGT ATC GCC TCC CTC GCG |
| | (25) and C TA TGC GCC TTG CCA GCC C (26) |
| K_GSP2s | CTA TGC GCC TTG CCA GCC CGC TCA GTC |
| | AGA TGG CGG GAA GAT GAA GAC (20) |
| L_GSP2s | CTA TGC GCC TTG CCA GCC CGC TCA GGA |
| | GGA GGG YGG GAA CAG AGT GAC (21) |
| G_GSP2s | CTA TGC GCC TTG CCA GCC CGC TCA GGG |
| | GAA GTA GTC CTT GAC CAG GCA G (22) |

[0535] The following PCR1 Q5 (NEB) reaction mix was set up per RT reaction that used a barcode adapter template:

| | | |
|---|---|---|
| H₂O | 11 | μL |
| 5x Q5 buffer | 5 | μL |
| 50 mM MgCl₂ | 0.15 | μL |
| DMSO | 1 | μL |
| dNTP | 0.5 | μL |
| 10 μM FW1-short | 1 | μL |
| 2.5 μM BCfw_longIsceI | 1 | μL |
| 10 μM K-GSP1 | 0.56 | μL |
| 10 μM L-GSP1 | 0.5 | μL |
| 10 μM G-GSP1 | 0.56 | μL |
| ET-SSB (NEB) | 0.25 | μL |
| 100X BSA | 0.25 | μL |
| Q5 enzyme | 0.2 | μL |
| cDNA template | 2 | μL |

| | | |
|---|---|---|
| Initial: | 95° C. | 5′ |
| 18 Cycles: | 98° C. | 30″ |
| | 56° C. | 30″ |
| | 72° C. | 45″ |
| Final extension: | 72° C. | 5′ |
| Hold: | 10° C. | hold |

[0536] The reactions from PCR1 were then diluted 25× in 10 mM Tris-HCl (pH 8.0) and used as a template in two separate PCR2 reactions, one for kappa and lambda light chains and one for gamma heavy chain.

[0537] The following PCR2 Q5 (NEB) reaction mixes were set up per PCR1 reaction:

| H2O | to 20 | μL |
|---|---|---|
| 5x Q5 buffer | 4 | μL |
| 50 mM MgCl₂ | 0.12 | μL |
| DMSO | 0.67 | μL |
| dNTP | 0.4 | μL |
| 10 μM 2FW | 0.8 | μL |
| 10 μM K- and L- or G-GSP2 | 0.4 | μL |
| BSA | 0.2 | μL |
| Phusion | 0.2 | μL |
| Dil. PCR1 template | 1.33 | μL |

| | | |
|---|---|---|
| Initial: | 95° C. | 5′ |
| 25 cycles: | 98° C. | 30″ |
| | 65° C. | 30″ |
| | 72° C. | 45″ |
| Final extension: | 72° C. | 5′ |
| Hold: | 10° C. | hold |

[0538] 10 μL of PCR product was run on a gel (FIG. 24). Bands corresponding to kappa and lambda light chain, and to gamma heavy chain were clearly seen.

[0539] Two 4-cycle PCR reactions were performed separately on the heavy and the light chain amplicons to add 454 LibA sequencing adapters. In LibPCR1, “A” adapter was added to the 5′ end of the amplicons, and “B” adapter added to the 3′ end; and vice versa in LibPCR2. The LibPCR details were as follows, with Lib1-FR primer mix used in LibPCR1 and Lib2-FR mix used in LibPCR2, and the primers are listed in Table 14.

| H2O | to 20 μL | |
|---|---|---|
| 5x Q5 buffer | 6 | μL |
| 50 mM MgCl₂ | 0.18 | μL |
| DMSO | 1.2 | μL |
| dNTP | 0.6 | μL |
| 10 μM Lib1-FR or Lib2-FR mix | 1.2 | μL |
| BSA | 0.3 | μL |
| Q5 | 0.3 | μL |
| Template | 2 | μL |

| | | |
|---|---|---|
| Initial: | 95° C. | 5’ |
| 25 cycles: | 98° C. | 30” |
| | 65° C. | 30” |
| | 72° C. | 45” |
| Final extension: | 72° C. | 5’ |
| Hold: | 10° C. | hold |

TABLE 14

| Primer | |
|---|---|
| mix | |
| name | Sequence (SEQ ID NO:) |
| Lib1- | CCA TCT CAT CCC TGC GTG TCT CCG ACT CAG NNNN |
| FR | CGT ATC GCC TCC CTC GCG CCA T (42) and CCT |
| | ATC CCC TGT GTG CCT TGG CAG TCT CAG NNNN CTA |
| | TGC GCC TTG CCA GCC CGC TCA (43) mixed 1:1 |
| Lib2- | CCT ATC CCC TGT GTG CCT TGG CAG TCT CAG NNNN |
| FR | CGT ATC GCC TCC CTC GCG CCA T (44) and CCA |
| | TCT CAT CCC TGC GTG TCT CCG ACT CAG NNNN CTA |
| | TGC GCC TTG CCA GCC CGC TCA (45) mixed 1:1 |

[0540] Amplicons were then purified using both Ampure (Beckman Coulter) beads cleanup according to manufacturer's instructions using a bead:DNA ratio of 0.68:1 and gel purification using Flashgel Recovery gel (Lonza) according to the manufacturer's instructions.

[0541] Amplicons were then quantified using Kapa qPCR library quantification (KAPA) according to the manufacturer's instructions, and the appropriate amounts of the heavy and light chain amplicon libraries were then used in 454 emulsion PCR, and the emulsions broken and clonally amplified 454 beads loaded onto the 454 sequencer for sequencing as per manufacturer's instructions. As both A and B adapters are added to both the 5′ and 3′ ends of the amplicons, we were able to sequence from both directions and obtain both forward and reverse reads.

[0542] Sequences were generated from a standard 454 run, and the resulting sequences were analyzed., though other next generation sequencing platforms could have been used as well.

[0543] Sequences were analyzed by writing a computer program. The computer program performed the following steps on the sequence reads from the regions of the 454 pico titer plate. Region 1 sequences were derived from the heavy chain library created as described above. Region 2 sequences were derived from the light chain library created as described above. For each read, two global-local alignments were computed to determine the strand having subsequence matching to the sequences T2′ and T1 from Table 15. The global-local alignment scored a match as 0, a mismatch as −1 and used a gap open penalty and gap extension penalty of −1. Scores were required to be greater than −4 or the read was discarded. For the heavy chain region, 611×10³ reads of 841×10³ reads satisfied the alignment score constraint. For the light chain region, 617×10³ reads of 856×10³ reads satisfied the alignment score constraint. Based on the global-local alignments, the sequence of the DNA barcode was extracted from the read. For the heavy chain region reads satisfying the alignment score constraint, 397×10³ reads had a barcode sequence consistent with the expected pattern and were assigned to have the observed barcode. For the light chain region reads satisfying the alignment score constraint, 437×10³ reads had a barcode sequence consistent with the expected pattern and were assigned to have the observed barcode.

[0544] Reads with identical DNA barcode sequences were grouped together for assembly. The groups of reads with identical barcodes were assembled using newbler, the 454 assembler. The assembly consensus sequences for region 1 sequences which had identical barcode sequences to region 2 sequences were grouped into heavy and light chain pair sets.

[0545] The heavy and light chain pair sets contained heavy and light chain sequences derived from the B cell or B cells present in the emulsion RT bubble.

[0546] Among the heavy and light chain read pair sets, 2,551 had at least 10 reads from the heavy chain region and at least 10 reads from the light chain region. Of the 2,551 such pairs, 1,820 had assembled to exactly one heavy chain and exactly one light chain. 61 of those pairs were found to have a heavy and light chain which were unique across the entire data set of sequences produced.

[0547] An example of paired heavy and light chain sequences produced from barcoded heavy and light chain reads having shared barcode “GCCGACCACGGCACAAGCGCCGAAAAT” (SEQ ID NO:124) is

(SEQ ID NO: 125)
″MEFGLSWLFLVAILKGVQCGVQLLESGGGLVQPGGSLRLSCAGSQFTFS
TYAMNWVRQAPGKGLEWVSGISGDGYRIQYADSVEGRFSISRDNSNNMVY
LQMTSLRAEDTAVYFCAKDLFPRTIGYFDYWGQGTRVTVSS″(heavy
chain amino acid sequence)
and
(SEQ ID NO: 126)
″MEAPAQLLFLLLLWLPDTTGKIVMTQSPATLSVSPGERATLSCRASQSIS
INLAWYQHKPGQAPRLLIYGASTRATAIPARFSGSVSGTEFTLTISSLQS
EDFAVYYCQQYDDWPRTFGQGTKVEI″ (light chain amino
acid sequence).

[0548] The analysis demonstrates the ability to associate the heavy chain sequence from a B cell with the corresponding light chain sequence from a B cell.

TABLE 15
Sequences used to identify DNA
barcodes in reads from B cells

| Sequence name | Sequence (SEQ ID NO:) |
|---|---|
| T2′ | GGGATAACAGGGTAATAGGA (46) |
| T1 | AGGAGTTTAAACTGGGGG (47) |

### L. Example 12: Barcoding Nucleic Acids from Cells Using Barcode Adapter Template Beads in Droplets Made Using a Microfluidic Droplet Device

[0549] This example describes an embodiment of the invention based on predicted results rather than results actually achieved. A barcode adapter template bead library is prepared as in Example 11, except that emB_BCbridgeISceI_2 is replaced with emB_BCbridgeISceI_N and emB_IsceI_RV is replaced with emB_ISceI_RV_n. emB_ISceI_RV_n contains unique molecular identifiers (UMI), such that when prepared, the barcode adapter template bead library will comprise beads each with a unique sample barcode and a random H (A,C,T nucleotides) octomer UMI to barcode individual mRNA molecules with different UMIs.

TABLE 16
Additional oligos used to make barcode adapter
template bead library with sample barcodes and
UMIs in a single reaction

| Primer name | Sequence (SEQ ID NO:) |
|---|---|
| emB_BCbridgeISceI_N | ACC CAG TTT AAA CCT CCT HHH THH |
| | HHT HHH HTH HHT HHH HTC CTA TTA |
| | CCC TGT TAT CCC (48) |
| emB_ISceI_RV_n | AlexaFluor647-C18spacer-mCmCC |
| | CHH HHH HHH ACC AGT TTA |
| | AAC CTC CT (49) |

[0550] Cells along with beads are encapsulated in droplets for the barcoding reaction as described in Example 11, with the only difference being PBMCs are used rather than activated memory B cells, and the oligo(dT) used is oligodT_n, with the sequence being CAC GAC CGG TGC TCG ATT TAG TTT TTT TTT TTT TTT TTT TTT TTT T (SEQ ID NO:50). The emulsion is then broken as described in Example 11.

[0551] One round of PCR is then performed, using the following primers:

TABLE 17

| Primer name | Sequence |
|---|---|
| bc_fwlong_ | GAG AGA CTG ACA GCG TAT CGC CTC CCT |
| ISceI | CGC GCC ATC AGA CGA GTG CGT GGA TAG |
| | GGA TAA CAG GGT AAT AGG A (41) |
| FW_1short | GAG AGA CTG ACA GCG TAT CGC CTC (24) |
| RV_1 | CAC GAC CGG TGC TCG ATT TAG (51) |

[0552] The following PCR Q5 (NEB) reaction mix is used per reaction, and multiple reactions are set up, and each reaction is cycled for a different number of cycles from 15-26 cycles to find the optimal cycle number to use:

| | | |
|---|---|---|
| H₂O | 9.65 | μL |
| 5x Q5 buffer | 5 | μL |
| 50 mM MgCl₂ | 0.15 | μL |
| DMSO | 1 | μL |
| dNTP | 0.5 | μL |
| 10 μM FW1-short | 1 | μL |
| 2.5 μM BCfw_longIsceI | 1 | μL |
| 10 μM RV_1 | 1 | μL |
| ET-SSB (NEB) | 0.25 | μL |
| 100X BSA | 0.25 | μL |
| Q5 enzyme | 0.2 | μL |
| cDNA template | 5 | μL |

| | | |
|---|---|---|
| Initial: | 95° C. | 5’ |
| 15-25 Cycles, in 2 | 98° C. | 30” |
| cycle increments: | 56° C. | 30” |
| | 72° C. | 45” |
| Final extension: | 72° C. | 5’ |
| Hold: | 10° C. | hold |

[0553] 5 μL of PCR product is run on a gel and the cycle number that gives a good amount of product but is not over cycled is used in subsequent downstream steps.

[0554] Product is then prepared according to Illumina's paired end sequencing kit and the forward end sequenced on an Illumina high-throughput sequencer, though other sequencing platforms could have been used as well. Sequences are generated and analyzed. Sample barcodes are then used to assign reads to individual cells, and UMIs are then used to perform single-cell RNA sequencing analysis using methods well established in the field (Nat Methods. 2014 February; 11(2):163-6. doi: 10.1038/nmeth.2772. Epub 2013 Dec. 22).

### M. Example 13: Barcode Adapter Template Synthesis Using Combinatorial-Generated Barcodes

[0555] A barcode adapter template bead library was synthesized in this example.

[0556] Barcode-containing oligos (as in FIG. 15) were combinatorially generated from two oligos, BC_part1_sense and BC_part2_type(1, 2,or 3)_antisense. Each BC_part1_sense and BC_part2_type(1, 2, or 3)_antisense oligos contains a unique sequence, “barcode part1” and “barcode part2”, respectively. These sequences combined create a unique barcode sequence. “Barcode part1” and “barcode part2” are (16,11) and (12,7) Hamming codes respectively, following the method of Generalized DNA barcode design based on Hamming codes, Bystrykh 2012 PLoS One. 2012 7: e36852. Therefore, the barcodes thus designed are error-correcting.

[0557] BC_part2 oligos are also divided into three types, BC_part2_type1_antisense, BC_part2_type2_antisense and BC_part2_type3_antisense. This allows for amplification to generate barcode adapter templates with 3 different non-mispriming reverse primers (Rv_type1, Rv_type2 and Rv_type3). When each of those reverse primers is covalently coupled to a different fluorophore, generated barcode adapter template beads can be identified via fluorescence in different colors. In addition, barcode adapter template beads that have more than one type of barcode type will fluoresce in more than one color. As barcode adapter template beads in this example are made in emPCR utilizing limiting dilution to put beads with one barcode-containing oligo with the required primers in a droplet. Poisson statistics indicate that a small percentage of droplets will contain more than one barcode-containing oligo, in effect generating a non-monocode barcode adapter template bead. By having different types of barcode adapter template beads fluorescing in different colors, followed by FACS sorting of monocolor beads will greatly increase the percentage of monocode beads obtained via emPCR generation of barcode adapter template beads.

TABLE 18
Combinatorially generated barcodes-sequences

| Name | Sequence (SEQ ID NO:) |
|---|---|
| Barcode adapter | Dual-biotin-C18spacer-C18spacer- |
| template | ATATAATACGACTCACTATAGGAAGATAGGGATAACAGGGTAATG |
| | [barcode part1] GCTGAGACATGTGAAGAGG [barcode part2] [X] |
| | GAGGGA DDDD DDDD GCGGG |
| | Where [X] = GCTCTTCG (52), TCGTCTCG (53) or ACCTCAGC, |
| | (54), the italicized portions are called “fixed sequence 1” |
| | and “fixed sequence 2”, respectively, and the underlined |
| | portion is the molecular barcode, also known as the UMI. |

Barcode adapter template sequence is generated from:

| | |
|---|---|
| SAV_bead_linker | Dual-biotin-C18spacer-C18spacer- |
| | ATATTAATACGACTCACTATAGGAAGATAGGGATAACAGGGTAATG |
| | (55) |
| Linker_free | ATATTAATACGACTCACTATAGGAAGATAGGGATAACAGGGTAATG |
| | (56) |
| Barcode-containing | ATATTAATACGACTCACTATAGGAAGATAGGGATAACAGGGTAATG |
| oligo | [barcode part1] GCTGAGACATGTGAAGAGG [barcode part2] [X] |
| | GAGGGA |
| | Where [X] = GCTCTTCG (57), TCGTCTCG (58) or ACCTCAGC |
| | (59) |
| Ry_type1 | 6-FAM-mCmCCGC HHHH HHHH TCCCTC CGAAGAGC (60) |
| Ry_type2 | Cy3-mCmCCGC HHHH HHHH TCCCTC CGAGACGA (61) |
| Ry_type3 | AlexaFluor647-mCmCCGC HHHH HHHH TCCCTC GCTGAGGT |
| | (62) |

Barcode-containing oligo is generated from:

| | |
|---|---|
| Make_longbc_fw | GATAGGGATAACAGGGTAATG (63) |
| BC_part1_sense | GATAGGGATAACAGGGTAATG [barcode part1] |
| | GCTGAGACATGTGAAGAGG (64) |
| BC_part2_type1_ | TCCCTC CGAAGAGC [barcode part2] CCTCTTCACATGTCTCAGC |
| antisense | (65) |
| Make_longbc_rv1 | TCCCTC CGAAGAGC (66) |
| BC_part2_type2_ | TCCCTC CGAGACGA [barcode part2] CCTCTTCACATGTCTCAGC |
| antisense | (67) |
| Make_longbc_rv2 | TCCCTC CGAGACGA (68) |
| BC_part2_type3_ | TCCCTC GCTGAGGT [barcode part2] CCTCTTCACATGTCTCAGC |
| antisense | (69) |
| Make_longbc_rv3 | TCCCTC GCTGAGGT (70) |

[barcode part1] = SEQ ID NOS: 127-45126;
[barcode part2] = SEQ ID NOS: 45127-47561.

[0558] Barcode-containing oligo was PCR generated using the conditions in Table 19 and the following thermocycling conditions: 94° C. for 2 min, followed by 53° C. for 2 hours, 7 cycles of 94° C. for 15 s, 53° C. for 30 s and 68° C. for 20 s, which is then followed by 68° C. for 1 min and a 10° C. hold. The reaction was cleaned up using Zymo DNA cleanup and concentration kit and concentrations quantified with Qubit (Life Technologies).

TABLE 19
Mastermix for making barcode-containing oligos

| | | |
|---|---|---|
| H₂O | 14.675 | μL |
| 10x buffer | 2.5 | μL |
| 50 mM MgSO4 | 0.25 | μL |
| 10 mM dNTP | 0.5 | μL |
| BC_part1 (50 nM) | 2 | μL |
| BC_part2_type1, 2 or 3_antisense (50 nM) | 2 | μL |
| Make_longbc_fw (10 μM) | 1.25 | μL |
| Make_longbc_rv_1, 2 or 3 (10 μM) | 1.25 | μL |
| Taq polymerase DNA (5 U/μL) | 0.2 | μL |
| 3x BSA (0.3 ug/ul) | 0.375 | μL |

[0559] The size of 82 bp for barcode-containing oligos was confirmed on a gel (FIG. 25, upper left).

[0560] 9.8 μm SuperAvidin microsphere beads (Bang's Lab) were coupled with biotinylated SAV-bead-linker oligo. 15 million beads were incubated with 60 μL of 10 μM oligo for 1 hour, and then washed 3× with BWB buffer (1M NaCl in TE), followed by 3 washes in 10 mM Tris to generate coupled SAV_beads_linker beads.

[0561] An emPCR to generate barcode adapter template beads proceeded as follows:

TABLE 20
Mastermix for making barcode adapter template beads

| H₂O | to 50 μL | |
|---|---|---|
| One Taq 5x buffer | 10 | μL |
| SAV-bead-linker coupled beads (50K/μL) | 10 | μL |
| 10 mM dNTP | 1 | μL |
| Barcode-containing oligo type1 (10 fg/μL) | 0.3 | μL |
| Barcode-containing oligo type2 (10 fg/μL) | 0.3 | μL |
| Barcode-containing oligo type3 (10 fg/μL) | 0.3 | μL |
| Linker_free (10 μM) | 1 | μL |
| Rv_type 1 (100 μM) | 0.6 | μL |
| Rv_type2 (100 μM) | 0 | μL |
| Rv_type3 (100 μM) | 0.6 | μL |
| One Taq 5 U/μL | 0.6 | μL |
| TIPP 2 U/μL | 0.075 | μL |
| 3x BSA (0.3 μg/μL) | 0.75 | μL |

[0562] The emulsion was creating by shaking emulsion oil with the mastermix in Table 20. The emulsion oil formulation was 10 mL AR20 silicone oil (Sigma), 7.5 mL 7225C Formulation Aid (Dow Corning), 7.5 mL 0749 Resin (Dow Corning) and 0.1% Triton X-100 (Sigma). 12 mL of emulsion oil was shaken with 4 mL of mock mix (without oligos, primers and enzymes of the mastermix in Table 20) at 30 Hz for 5 min in TissueLyser (Qiagen), and then shaken at 12 Hz for 5 min after adding 4 mL of mastermix. This gave the majority of larger droplets between 30-80 μm in diameter. The thermocycling conditions were:

| | | |
|---|---|---|
| Initial: | 94° C. | 2’ |
| 35 cycles: | 94° C. | 30” |
| | 53° C. | 60” |
| | 68° C. | 90” |
| 50 cycles: | 94° C. | 30” |
| | 59° C. | 6’ |
| Hold | 10° C. | |

[0563] Emulsion were broken by washing with breaking mix 1 followed by breaking mix 2, followed by 70% ethanol washes, and TE washes. Beads were resuspended in TE with 0.001% Tween 20.

| Breaking Mix 1 | μL |
|---|---|
| Isobutanol | 1200 |
| Isopropanol | 800 |
| AR-20 | 500 |
| TE | 187.8 |
| Linker_free (100 μM) | 12.2 |
| Total volume | 2700 |

| Breaking Mix 2 | μL |
|---|---|
| Isobutanol | 9000 |
| Isopropanol | 9000 |
| TE | 1800 |
| 10% Tween 20 in TE | 200 |
| Total volume | 20000 |

[0564] Beads were run on a BD FACS Jazz and bright, monocolor beads were sorted (FIG. 25, right). A barcoding reaction performed as in Example 14 was done to verify that the beads were useable as barcode adapters for barcoding RNA, except that the reaction was done in open PCR with multiple beads in a PCR tube and with purified PBMC RNA. As in FIG. 25, lower left, bands were obtained showing that beads were indeed useable as barcode adapter templates for barcoding RNA.

### N. Example 14: Barcoding Nucleic Acids from T Cells Using Barcode Adapter Template Beads in Droplets of Varying Volumes

[0565] Cryopreserved PBMCs were thawed and incubated in AIM V media (Life Technology) overnight at a density of 3 million cells per mL. T cells were then isolated with magnetic-activated cell sorting (MACS) using CD3 microbeads (Miltenyi Biotec) according to manufacturer' instructions. In brief, T cells were centrifuged at 300 g for 10 minutes, and suspended in MACS buffer (2% fetal bovine serum and 2 mM EDTA in 1×PBS) containing 20% CD3 microbeads for 15 minutes at 4° C. Magnetically labeled T cells were then separated using magnetic separation column, followed by co-stimulation with 1× ionomycin, and 1× phorbol 12-myristate 13-acetate (PMA) for 3 hours. After removing the media containing both stimuli, cells were incubated with 1× of DNAse (Sigma) as anti-clumping agent for 15 minutes.

[0566] Cells were centrifuged to remove the supernatant containing DNAse, and washed 3 times with cell suspension buffer (CSB) containing 5% of 1M NaCl, 1.5% of 500 mM EDTA, 33.8% of 4M Betaine, and 7.5% of 20 mg/ml bovine serum albumin (BSA). Cells were also filtered with 40 m cell strainer (BD Falcon) to remove cell clumps after resuspending in 1 mL CSB. Cell suspensions were then run on a droplet generator device as in Example 8 to encapsulate cells and barcode adapter template beads into droplets, where the beads were generated as in Example 13. In this example, cells and beads were encapsulated into droplets of different sizes: 1.4, 3.1 and 5.6 nL.

[0567] Droplets containing both cells and barcodes underwent reverse transcription by incubating at 50° C. for 3 minutes followed by 42° C. for 3 hours in the following final reaction buffer composition:

RT reaction mix

| Tris-HCl pH 8 | 20 | mM |
|---|---|---|
| NaCl | 3.33 | mM |
| KCl | 10 | mM |
| (NH₄)₂SO₄ | 10 | mM |
| MgSO₄ | 15 | mM |
| EDTA | 0.5 | mM |
| Betaine | 90 | mM |
| BSA | 0.4 | mg/ml |
| DTT | 4 | mM |
| Tween 20 | 0.30% | |
| dNTPs | 2 mM | mM |
| NTPs | 8 mM | mM |
| Ribolock | 1.6 | U/μL |
| T7 RNAP | 4 | U/μL |
| E. coli IPP | 0.001 | U/μL |
| T4gp32 | 0.25 | μg/μL |
| Maxima H- | 3 | U/μL |
| Oligo(dT) | 0.1 | μM |
| Random hexamer and octomers | 25 | nM |
| Random pentadecamer | 6.25 | nM |

[0568] The emulsion was then broken with a phenol/chloroform mixture and concentrated in an Amicon 100 kDa column (Millipore) as in Example 8. cDNA were subjected to 18 cycles of PCR1, followed by PCR2 using the reaction mix per RT reaction listed below and thermocycling conditions listed in Table 21. Primers used are in Table 22.

| Reaction mix for PCR1 | | | Reaction mix for PCR2 | | |
|---|---|---|---|---|---|
| H₂O | 15.64 | μL | H₂O | 17.82 | μL |
| 5X Q5 Buffer | 6.00 | μL | 5X Q5 Buffer | 6.00 | μL |
| MgCl₂ | 0.19 | μL | MgCl₂ | 0.18 | μL |
| DMSO | 1.20 | μL | DMSO | 1.00 | μL |
| dNTP | 0.63 | μL | dNTP | 0.60 | μL |
| Index_sID | 0.63 | μL | FW2-N-V2 | 0.60 | μL |
| PCR1_short_n_v2 | 0.63 | μL | RV2-n | 0.60 | μL |
| TRAC 53-78/TRBC | 0.63 | μL | TRAC GSP2/TRBC | 0.60 | μL |
| 37-60 | | | GSP2 | | |
| ET-SSB | 0.31 | μL | BSA | 0.30 | μL |
| BSA | 0.31 | μL | Q5 Enzyme | 0.30 | μL |
| Tipp | 0.60 | μL | Template | 2.00 | μL |
| Q5 Enzyme | 0.25 | μL | Total | 30.00 | μL |
| Template | 3.00 | μL | | | |
| Total | 30.00 | μL | | | |

TABLE 21
Thermocycling condition of PCR1 and PCR2

| PCR1 | | | | PCR2 | | | |
|---|---|---|---|---|---|---|---|
| 95° C. | 5 | minutes | | 95° C. | 5 | minutes | |
| 98° C. | 30 | seconds | 18 cycles | 98° C. | 30 | seconds | 24 cycles |
| 62° C. | 30 | seconds | | 65° C. | 30 | seconds | |
| 72° C. | 45 | seconds | | 72° C. | 35 | seconds | |
| 72° C. | 5 | minutes | | 72° C. | 5 | minutes | |

| | | | |
|---|---|---|---|
| 10° C. | Hold | 10° C. | Hold |

TABLE 22
Primer sequences for PCR 1 and PCR2

| Name | Sequence (SEQ ID NO:) |
|---|---|
| FW2-N-V2 | CTATGCGCCTTGCCAG AATGATACGGCGACCACCGAGATCTACA (71) |
| Index_sID | GGCGACCACCGAGATCTACAC [i5 index primers] TCG TCG |
| | GCA GC GGAAGATAGGGATAACAGGGTAATG (72) |
| PCR1_short_n_v2 | GGCGACCACCGAGATCTACA (73) |
| PCR1-RV-N v2 | ATTAGGAGACACAATAGGGAGGCA (74) |
| RV2-n | GTGGGCTCGGAGATGTGTATAAGAGA (75) |
| TRAC 53-78 | GGTGAATAGGCAGACAGACTTGTCAC (76) |
| TRAC GSP2 | GTGGGCTCGGAGATGTGTATAAGAGACAG N |
| | TACACGGCAGGGTCAGGGT (77) and |
| | GTGGGCTCGGAGATGTGTATAAGAGACAG NN |
| | TACACGGCAGGGTCAGGGT (78) and |
| | GTGGGCTCGGAGATGTGTATAAGAGACAG NNN |
| | TACACGGCAGGGTCAGGGT (79) and |
| | GTGGGCTCGGAGATGTGTATAAGAGACAG NNNN |
| | TACACGGCAGGGTCAGGGT (80) |
| | (2.5 μM each, pooled and mixed to yield 10 μM) |
| TRBC 37-60 | CTCTGCTTCTGATGGCTCAAACAC (81) |
| TRBC GSP2 | GTGGGCTCGGAGATGTGTATAAGAGACAG N |
| | ATGGCTCAAACACAGCGACCTC (82) and |
| | GTGGGCTCGGAGATGTGTATAAGAGACAG NN |
| | ATGGCTCAAACACAGCGACCTC (83) and |
| | GTGGGCTCGGAGATGTGTATAAGAGACAG NNN |
| | ATGGCTCAAACACAGCGACCTC (84) and |
| | GTGGGCTCGGAGATGTGTATAAGAGACAG NNNN |
| | ATGGCTCAAACACAGCGACCTC (8 5) |
| | (2.5 μM each, pooled and mixed to yield 10 μM) |

[i5 index primers] = SEQ ID NOS: 47562-47605.

[0569] As can be seen from FIG. 26, at the 3 droplet volumes tested, the reaction was successfully completed.

### O. Example 15: Amplifying and Sequencing TCR Alpha and Beta Genes from Barcoded Nucleic Acids

[0570] Barcoded T cells cDNA were generated as described in Example 14. In brief, PBMCs were co-stimulated with 1× of ionomycin and PMA in AIM V media for 3 hours. CD3, CD4 or CD8-expressing T cells were magnetically labeled and isolated separately using MACS kits (Miltenyi Biotec) and ran through a droplet device to encapsulate cells with barcode adapter template beads, which were generated as in Example 13. Emulsion containing both cells and barcodes were reverse transcribed at 50° C. for 3 minutes and 42° C. for 3 hours. The emulsion was then broken with a phenol/chloroform mixture and concentrated using an Amicon 100 kDa column (Millipore).

[0571] Reverse transcription and PCR1 and PCR2 were performed as in Example 14, with different index_sID primers, each with a unique index ID barcode, used for each sample. This allows for pooling and multiplexing of samples in the same next-gen sequencing run, where different samples are distinguished from one another via the index ID barcode.

[0572] PCR2 products were then concentrated with AMPure magnetic beads (Roche) according to manufacturer instruction at a ratio of 1 μl PCR 2 products to 1.8 μmagnetic beads. Samples were then prepared for Illumina sequencing using an additional library PCR to add adapters for Illumina sequencing. Primers used are listed in Table 23.

| | | |
|---|---|---|
| H₂O | 16.22 | μL |
| 5X GC Buffer | 6.00 | μL |
| MgCl₂ | 0.18 | μL |
| DMSO | 1.20 | μL |
| dNTP | 0.60 | μL |
| 10 μM Next i5 n | 0.60 | μL |
| 10 μM Next i7 FULL n | 0.60 | μL |
| BSA | 0.30 | μL |
| Phusion DNA Polymerase | 0.30 | μL |
| Template | 4.00 | μL |
| Total | 30.00 | μL |

### Thermocycling Condition for Library PCR

| | | | |
|---|---|---|---|
| 95° C. | 5 | minutes | |
| 98° C. | 30 | seconds | 4 cycles |
| 65° C. | 30 | seconds | |
| 72° C. | 35 | seconds | |
| 72° C. | 5 | minutes | |

| | |
|---|---|
| 10° C. | Hold |

TABLE 23
Primer sequence used in library PCR Amplification

| Name | Sequence (SEQ ID NO:) |
|---|---|
| Next_i5_n | AATGATACGGCGACCACCGAGATCTA (86) |
| Next i7_FULL_n | CAAGCAGAAGACGGCATACGAGAT TCGCCTTA |
| | GTCTCGTGGGCTCGGAGATGTGTATAAG (87) |

[0573] Amplified product were cleaned with Pippin Prep and DNA Purification and Concentrator kit (Zymo Research) to remove small fragments and analyzed with agarose gel electrophoresis (FIG. 27), and sequenced using Illumina sequencing.

[0574] Paired end reads from Illumina sequencing were analyzed to determine T cell receptor (TCR) germline, TCR CDR3, and infer full length sequence. Sequencing generated 21,207,225 filtered, paired end reads. The DNA barcodes were used to assign paired reads to the transcript of a TCR within individual T cells on the basis of the forward read sequence. The identification of the DNA barcodes within the forward reads was done using a python script. For each forward read, the edit distance to fixed sequence 1 was computed using a global/local alignment. An edit distance of 2 or less was required or the read pair was discarded. From the location of fixed sequence 1 and the known lengths of barcode part1 (BC1) and barcode part2 (BC2), candidate BC1 and BC2 sequences were extracted from the forward read. BC1 and BC2 were checked to verify that they satisfied the Hamming condition for a Hamming(16, 11) or Hamming(12, 7) DNA barcode, respectively (see Table 18 for the sequence and relative positions of the named sequences to one another). On the basis of BC1 and BC2 a paired read was assigned to a specific T cell. As a result 3,712,013 read pairs were assigned to T cells.

[0575] Paired reads assigned to T cells were then compared to known variants of V, J and constant germline TCR sequences using the program blastn with an e-value cutoff of 10⁻⁵. If either read of the pair was scored as a hit to a germline by blast, the count of that germline and associated allele was incremented by one for the corresponding TCR alpha or beta chain (of the cell identified by BC1, BC2). In addition for each germline allele combination and specific cell a list of sequences that had a hit to it was stored.

[0576] For each cell identified by a unique combination of BC1 and BC2, the v, j and/or constant germline allele composition for alpha and beta chains was then assigned based on the majority of the counts indicated above, and for each germline the sequence that had the longest HSP associated with it was selected as a representative portion of the transcript for that germline.

[0577] Next the composition of the CDR3 region was determined using the following steps. For each j germline the location of the sequence of 4 amino acids (AA) satisfying the pattern FG*G was determined when possible, and the list of v germlines that had the combination of CA in the last 10 AA of its sequence was identified. For each cell, the 4 AA pattern of the j germline and the CA combination were sought in all three frames of the translated representative sequence for j. The CDR3 was determined to be the sequence of AA between CA and the 4 AA pattern. The putative AA sequence of the TCR was obtained by combining the AA sequence of the v germline up to CA followed by the CDR3 sequence followed by the AA sequence of the j germline beginning with the 4 AA pattern. Using a similar approach the nucleotide sequence of the CDR3 and the putative full length nucleotide sequence of the TCR were determined.

[0578] The D germline and D allele were assessed by evaluating the edit distance based on a global-local alignment between the D germlines and the nucleotide sequence of the CDR3. A D germline/allele was assigned to the TCR provided the edit distance to the closest germline sequence was less than or equal to 2.

[0579] Table 24 shows summary statistics for the samples that were processed, including estimated number of cells barcoded, cells with a TCR alpha or beta chain assigned, cells with both a TCR alpha and beta assigned, and number of inferred full length alpha or beta chains.

TABLE 24
TCR alpha and beta chains

| | | | Cells | | | Cells |
|---|---|---|---|---|---|---|
| | Esti- | Cells | with TCR | Cells | Cells | with both |
| | mated | detected | alpha and/ | with | with | alpha |
| | number | (unique | or beta | beta | alpha | and beta |
| Subject | of cells | BC1/BC2) | detected | detected | detected | detected |
| SBJCT3 | 20800 | 6682 | 6226 | 5159 | 1172 | 105 |
| SBJCT4 | 24046 | 3988 | 3722 | 2772 | 998 | 48 |
| SBJCT5 | 22652 | 3664 | 3435 | 2726 | 751 | 42 |

### P. Example 16: Amplifying and Sequencing Cell Subtypes-Specific Genes from Barcoded Nucleic Acids

[0580] Barcoded T cells cDNA were generated as described in Example 15. In brief, PBMCs were co-stimulated with 1× of ionomycin and PMA in AIM V media for 3 hours. CD3, CD4 or CD8-expressing T cells were magnetically labeled and isolated separately using MACS kits (Miltenyi Biotec) and ran through a droplet device. Emulsion containing both cells and barcodes were reverse transcribed at 50° C. for 3 minutes and 42° C. for 3 hours as in Example 14. The emulsion was then broken with a phenol/chloroform mixture and concentrated using an Amicon 100 kDa column (Millipore). PCR1 and PCR2 at different cycles were then performed using the thermocycling conditions in Table 21, along with the specific primers for T cells targeted subset genes, e.g. CD4, CD8, and interferon gamma (IFNγ) as listed in Table 25. Reaction mixes were prepared as follows:

| Reaction mix for PCR1 | | | Reaction mix for PCR2 | | |
|---|---|---|---|---|---|
| H₂O | 10.61 | μL | H₂O | 12.42 | μL |
| 5X Q5 Buffer | 6.00 | μL | 5X Q5 Buffer | 6.00 | μL |
| MgCl₂ | 0.19 | μL | MgCl₂ | 0.18 | μL |
| DMSO | 1.20 | μL | DMSO | 1.00 | μL |
| dNTP | 0.63 | μL | dNTP | 0.60 | μL |
| 2.5 μM index sample ID | 0.63 | μL | 10 μM FW2-N-V2 | 0.60 | μL |
| 10 μM PCR1_short_n_v2 | 0.63 | μL | 1 μM Gene specific | 6.00 | μL |
| | | | primer | | |
| 1 μM Gene specific primer | 6.30 | μL | BSA | 0.30 | μL |
| ET-SSB | 0.31 | μL | Q5 Enzyme | 0.30 | μL |
| BSA | 0.31 | μL | Template | 2.00 | μL |
| Tipp | 0.60 | μL | Total | 30.00 | μL |
| Q5 Enzyme | 0.25 | μL | | | |
| Template | 3.00 | μL | | | |
| Total | 30.00 | μL | | | |

TABLE 25
T cells targeted gene reverse primer
sequence for PCR1 andP CR2 in addition
to the sequence used in PCR1 and PCR2.

| Name | Sequence (SEQ ID NO:) |
|---|---|
| IFNγ (PCR1) | GCTTCCCTGTTTTAGCTGCTGG (88) |
| IFNγ (PCR2) | GTGGGCTCGGAGATGTGTATAAGAGACAG N |
| | CGACAGTTCAGCCATCACTTGG (89) and |
| | GTGGGCTCGGAGATGTGTATAAGAGACAG NN |
| | CGACAGTTCAGCCATCACTTGG (90) and |
| | GTGGGCTCGGAGATGTGTATAAGAGACAG NNN |
| | CGACAGTTCAGCCATCACTTGG (91) and |
| | GTGGGCTCGGAGATGTGTATAAGAGACAG NNNN |
| | CGACAGTTCAGCCATCACTTGG (92) |
| | (2.5 μM each, pooled and mixed to |
| | yield 10 μM) |
| CD4 (PCR1) | GCTGAGACACGGAGAGGGTC (93) |
| CD4 (PCR2) | GTGGGCTCGGAGATGTGTATAAGAGACAG N |
| | AGCAGGTGGGTGTCAGAGTT (94) and |
| | GTGGGCTCGGAGATGTGTATAAGAGACAG NN |
| | AGCAGGTGGGTGTCAGAGTT (95) and |
| | GTGGGCTCGGAGATGTGTATAAGAGACAG NNN |
| | AGCAGGTGGGTGTCAGAGTT (96) and |
| | GTGGGCTCGGAGATGTGTATAAGAGACAG NNNN |
| | AGCAGGTGGGTGTCAGAGTT (97) |
| | (2.5 μM each, pooled and mixed to |
| | yield 10 μM) |
| CD8 (PCR1) | GTGAGGGCGAGAGTAGGCAG (98) |
| CD8 (PCR2) | GTGGGCTCGGAGATGTGTATAAGAGACAG N |
| | TCACCGAGGAAGGACCCTCT (99) and |
| | GTGGGCTCGGAGATGTGTATAAGAGACAG NN |
| | TCACCGAGGAAGGACCCTCT (100) and |
| | GTGGGCTCGGAGATGTGTATAAGAGACAG NNN |
| | TCACCGAGGAAGGACCCTCT (101) and |
| | GTGGGCTCGGAGATGTGTATAAGAGACAG NNNN |
| | TCACCGAGGAAGGACCCTCT (102) |
| | (2.5 μM each, pooled and mixed to |
| | yield 10 μM) |

[0581] PCR2 products were then prepared for Illumina sequencing as in Example 15, and the products were analyzed with agarose gel electrophoresis (FIG. 27) before Illumina sequencing.

[0582] Paired end reads from Illumina sequencing were analyzed to determine T cell subtype based on the gene specific markers. Sequencing generated 19,205,611 filtered, paired end reads. The DNA barcodes were used to assign paired reads to transcripts within individual T cells on the basis of the forward read sequence. The identification of the DNA barcodes within the forward reads was done using a python script. For each forward read, the edit distance to fixed sequence 1 was computed using a global/local alignment. An edit distance of 2 or less was required or the read pair was discarded. From the location of fixed sequence 1 and the known lengths of barcode part1 (BC1) and barcode part 2 (BC2), candidate BC1 and BC2 sequences were extracted from the forward read. BC1 and BC2 were checked to verify that they satisfied the Hamming condition for a Hamming(16, 11) or Hamming(12, 7) DNA barcode, respectively. For forward reads satisfying the Hamming condition, a candidate molecular barcode was extracted based on the known lengths of X, fixed sequence 2 and the molecular barcode (see Table 18 for the sequence and relative positions of the named sequences to one another). If the molecular barcode sequence had no “C” nucleotides, the paired reads were assigned to a T cell (on the basis of BC1 and BC2) and a specific transcript within the T cell (on the basis of the molecular barcode). 3,902,569 read pairs were assigned to transcripts within individual T cells.

[0583] Paired reads assigned to T cell transcripts were then compared to known splice variants of the marker genes using the program blastn with an e-value cutoff of 10⁻⁶ and setting perc_identity to 98. If either read of the pair was scored as a hit by blast, the corresponding transcript from the T cell (identified by BC1, BC2 and the molecular barcode) was associated with the marker gene.

[0584] For each cell identified by a unique combination of BC1 and BC2, the number of distinct times a transcript from a given marker gene was seen was determined by counting the number of distinct molecular barcodes observed from read pairs associated with the given marker gene.

[0585] The number of each type of T cell detected was determined on the basis of the marker genes. T cells where it was determined that at least one CD4 transcript and one IFNγ transcript were assigned were counted as Th1 cells. T cells where it was determined that at least one CD4 transcript was assigned and no IFNγ transcript was assigned were counted as non-Th1 CD4 samples. T cells where it was determined that at least one CD8 transcript and one IFNγ transcript were identified were counted as IFNγ+ cytotoxic T cells. T cells where it was determined that at least one CD8 transcript and no IFNγ transcript was assigned were counted as IFNγ− cytotoxic T cells.

[0586] Table 26 shows the total number of CD4 T cells detected, the number of Th1 CD4 T cells, total cytotoxic T cells and IFNγ+ cytotoxic T cells resulting from processing three different samples using the procedure described here.

TABLE 26
Subset summary.

| | | CD4 | IFNγ− | IFNγ+ |
|---|---|---|---|---|
| Subject | CD4 | Th1 | CD8 | CD8 |
| SBJCT3 | 19 | 0 | 31 | 0 |
| SBJCT4 | 26 | 1 | 43 | 1 |
| SBJCT5 | 28 | 0 | 26 | 2 |

### Q. Example 17: Performing Single Cell Transcriptomics

[0587] Barcoded T cells cDNA were generated as described in Example 15. In brief, PBMCs were co-stimulated with 1× of ionomycin and PMA in AIM V media for 3 hours. CD3, CD4 or CD8-expressing T cells were magnetically labeled and isolated separately using MACS kits (Miltenyi Biotec) and ran through a droplet device. Emulsion containing both cells and barcodes were reverse transcribed at 50° C. for 3 minutes and 42° C. for 3 hours as in Example 14. The emulsion was then broken with a phenol/chloroform mixture and concentrated using an Amicon 100 kDa column (Millipore). A single round of PCR was performed to amplify the entire transcriptome, conditions shown below:

Whole transcriptome PCR conditions

| | | |
|---|---|---|
| H₂O | 28.525 | μL |
| 5x Q5 buffer | 12 | μL |
| Mg++ | 0.375 | μL |
| DMSO | 2.4 | μL |
| dNTP | 1.25 | μL |
| index sID (2.5 μM) | 5.00 | μL |
| PCR1_short_n_v2 (10 μM) | 1.25 | μL |
| PCRl-RV-N-v2 (10 μM) | 1.25 | μL |
| ET-SSB | 0.625 | μL |
| BSA | 0.625 | μL |
| Tipp | 1.2 | μL |
| Q5 enzyme | 0.5 | μL |
| Template | 5 | μL |
| total | 60 | μL |

Thermocycling conditions

| | | | |
|---|---|---|---|
| 95° C. | 5 | minutes | |
| 98° C. | 30 | seconds | 15 cycles |
| 62° C. | 30 | seconds | |
| 72° C. | 10 | minutes | |
| 72° C. | 5 | minutes | |

| | |
|---|---|
| 10° C. | Hold |

[0588] An adapter was added to the library using 5 cycles of PCR, with the same PCR conditions and thermocycling conditions as above, but using FW2-n-V2 as the forward primer instead. Samples were then pooled, cleaned using Ampure beads and prepared for Illumina sequencing using Nextera XT DNA Preparation kit (Illumina), which tagmented DNA into smaller fragments, using manufacturer's instructions, except that 5 ng of DNA template was used, and custom in-house primers were used instead during the amplification step. The house primers used, Next_i5_n_v2 and Next_i7_n ensured that only tagmented fragments containing the barcode would be amplified. A gel was run, and shown in FIG. 29.

TABLE 27
Additional primers used for whole transcriptomic
amplification and library prep

| Name | Sequence (SEQ ID NO:) |
|---|---|
| v2_PCR1_RV_n | AT TAGGAGACACAATAGGGAGGCA (103) |
| Next_i5_n_v2 | CTATGCGCCTTGCCAG AATGATAC (104) |
| Next_i7_n | CAAGCAGAAGACGGCATACGAGAT TCGCCTTA |
| | GTCTCGTGGGCTCGG (105) |

[0589] The barcoded amplicon library was sequenced using an Illumina NextSeq instrument. Paired end reads were analyzed to associate paired reads with individual cells, and to identify the genes that were expressed in those cells. Sequencing generated 371,918,220 filtered, paired end reads. The DNA barcodes were used to assign paired reads to transcripts within individual cells on the basis of the forward read sequence. The identification of the DNA barcodes within the forward reads was done using a python script. For each forward read, the edit distance to fixed sequence 1 was computed using a global/local alignment. An edit distance of 2 or less was required or the read pair was discarded. From the location of fixed sequence 1 and the known lengths of BC1 and BC2, candidate BC1 and BC2 sequences were extracted from the forward read. BC1 and BC2 were checked to verify that they satisfied the Hamming condition for a Hamming(16, 11) or Hamming(12, 7) DNA barcode, respectively. For forward reads satisfying the Hamming condition, a candidate molecular barcode was extracted based on the known lengths of X, fixed sequence 2 and the molecular barcode. If the molecular barcode sequence had no “C” nucleotides, the paired reads were assigned to a cell (on the basis of BC1 and BC2) and a specific transcript within the cell (on the basis of the molecular barcode). 37,110.172 read pairs were assigned to transcripts within individual cells.

[0590] Paired reads assigned to cellular transcripts were then compared to known splice variants of genes as reported in release 78 of Ensembl (www.ensembl.org) using the program blastn with an e-value cutoff of 10⁻⁶ and setting perc_identity to 98. If either read of the pair was scored as a hit by blast, the corresponding transcript from the cell (identified by BC1, BC2 and the molecular barcode) was associated with gene If there was more than one blast hit, the best match was selected by finding the gene having the largest sum of lengths of HSPs for forward and reverse reads. In case of a tie between two different genes, assignment of the read pair to a gene was considered ambiguous and not considered further.

[0591] For each cell identified by a unique combination of BC1 and BC2, the number of distinct times a transcript from a given gene was seen was determined by counting the number of distinct molecular barcodes observed from read pairs associated with the given gene.

[0592] Table 33 show the genes most frequently detected after processing four samples using this procedure. The table shows the Ensembl gene ID, the Ensembl description of the gene and the number of cells the gene was detected in.

### R. Example 18: Incorporating Barcode Adapter into 5′ End of 1st Strand cDNA

[0593] This example describes an embodiment of the invention based on predicted results rather than results actually achieved. Cells and barcode adapter template are put together in reaction containers whereby the majority of reaction containers have only one cell and one template molecule, or one cell and one barcode adapter template bead, for example, by a droplet generator device and the reaction containers are water-in-oil droplets, such as in example 14. The barcode adapter sequence comprises a fixed sequence, a barcode sequence, optionally a UMI, and either oligo(dT) or a random or semi-random sequence (Barcode_adapter_5c_oligodT and Barcode_adapter_5c_randomer respectively in Table 28), or in combination. The template switching oligo (TSO) comprises a fixed sequence, optionally a UMI, and a 1^{st} strand cDNA complementary sequence (5′adapter in Table 28).

[0594] The reverse transcription reaction is performed at 50° C. for 3 minutes, followed by 42° C. for 3 hours, in the following reaction conditions:

RT reaction mix

| Tris-HCl pH 8 | 20 | mM |
|---|---|---|
| NaCl | 3.33 | mM |
| KCl | 10 | mM |
| (NH₄)₂SO₄ | 10 | mM |
| MgSO₄ | 15 | mM |
| EDTA | 0.5 | mM |
| Betaine | 90 | mM |
| BSA | 0.4 | mg/ml |
| DTT | 4 | mM |
| Tween 20 | 0.30% | |
| dNTPs | 2 mM | mM |
| NTPs | 8 mM | mM |
| Ribolock | 1.6 | U/μL |
| T7 RNAP | 4 | U/μL |
| E. coli IPP | 0.001 | U/μL |
| T4gp32 | 0.25 | μg/μL |
| Maxima H- | 3 | U/μL |
| Oligo(dT) or | 0.1 | μM |
| random primer | | |

[0595] Barcoding occurs during the RT reaction as the barcode adapter primes the reaction and is incorporated into the 5′ end of 1^{st} strand cDNA. Barcode adapters are generated off either an RNAP or DNAP (with the appropriate RNA promoter or strand-displacing DNAP recognition site, such as a nick created by a nicking enzyme, on the barcode adapter template) as reverse transcription is able to utilize both DNA and RNA as primers (FIGS. 8 and 9).

[0596] The emulsion is broken as in Example 14, and the resulting barcoded nucleic acid library is then pooled and amplified using forward and reverses primers that comprise sequences complementary to the fixed sequences added by 5′adapter and barcode_adapter_5c_oligodT or barcode_adapter_5c_randomer in the barcoding reaction respectively, such as in Example 17. The reaction conditions are shown below:

| | | |
|---|---|---|
| H₂O | 28.525 | μL |
| 5x Q5 buffer | 12 | μL |
| Mg++ | 0.375 | μL |
| DMSO | 2.4 | μL |
| dNTP | 1.25 | μL |
| index sID (2.5 μM) | 5.00 | μL |
| PCR1_short_n_v2 (10 μM) | 1.25 | μL |
| PCRl-RV-N-v2 (10 μM) | 1.25 | μL |
| ET-SSB | 0.625 | μL |
| BSA | 0.625 | μL |
| Tipp | 1.2 | μL |
| Q5 enzyme | 0.5 | μL |
| Template | 5 | μL |
| total | 60 | μL |

Thermocycling conditions

| | | | |
|---|---|---|---|
| 95° C. | 5 | minutes | |
| 98° C. | 30 | seconds | 15 cycles |
| 62° C. | 30 | seconds | |
| 72° C. | 10 | minutes | |
| 72° C. | 5 | minutes | |

| | |
|---|---|
| 10° C. | Hold |

[0597] Target genes of interest can also be amplified by performing amplification using forward primers comprising gene-specific sequences and using a reverse primer comprising sequences complementary to the fixed sequence added by barcode_adapter_5c_oligodT or barcode_adapter_5c_randomer in the barcoding reaction, such as in Examples 14 and 16. The reaction conditions for amplifying TCR alpha and beta chains in two successive PCR reactions are shown below, where the products of PCR1 were diluted 50× before being used in PCR2:

| Reaction mix for | | | Reaction mix for | | |
|---|---|---|---|---|---|
| PCR1 | | | PCR2 | | |
| H₂O | 15.64 | μL | H₂O | 17.82 | μL |
| 5X Q5 Buffer | 6.00 | μL | 5X Q5 Buffer | 6.00 | μL |
| MgCl₂ | 0.19 | μL | MgCl₂ | 0.18 | μL |
| DMSO | 1.20 | μL | DMSO | 1.00 | μL |
| dNTP | 0.63 | μL | dNTP | 0.60 | μL |
| PCR1_i5_new | 0.63 | μL | FW2-N-V2 | 0.60 | μL |
| PCR1_short_n_v2 | 0.63 | μL | RV2-n | 0.60 | μL |
| TRAC 53-78/ | 0.63 | μL | TRAC GSP2/ | 0.60 | μL |
| TRBC 37-60 | | | TRBC GSP2 | | |
| ET-SSB | 0.31 | μL | BSA | 0.30 | μL |
| BSA | 0.31 | μL | Q5 Enzyme | 0.30 | μL |
| Tipp | 0.60 | μL | Template | 2.00 | μL |
| Q5 Enzyme | 0.25 | μL | Total | 30.00 | μL |
| Template | 3.00 | μL | | | |
| Total | 30.00 | μL | | | |

Thermocycling condition of PCR1 and PCR2

| PCR1 | | | | PCR2 | | | |
|---|---|---|---|---|---|---|---|
| 95° C. | 5 | minutes | | 95° C. | 5 | minutes | |
| 98° C. | 30 | seconds | 18 cycles | 98° C. | 30 | seconds | 24 cycles |
| 62° C. | 30 | seconds | | 65° C. | 30 | seconds | |
| 72° C. | 45 | seconds | | 72° C. | 35 | seconds | |
| 72° C. | 5 | minutes | | 72° C. | 5 | minutes | |

| | | | |
|---|---|---|---|
| 10° C. | Hold | 10° C. | Hold |

[0598] The library is then prepared for next-gen sequencing, such as on the Illumina or Ion Torrent platform.

TABLE 28
Primer sequences

| Primers | Sequence (SEQ ID NO:) |
|---|---|
| 5′ adapter | GGAAGATAGGGATAACAGGGTAATG [UMI] |
| | GCGGG (106) |
| Barcode_adapter_ | ATTAGGAGACACAATAGGGAGGCA [barcode |
| 5c_oligodT | part1] GCTGAGACATGTGAAGAGG [barcode |
| | part2] [X] GAGGGA [UMI] TTTTT TTTTT |
| | TTTTT TTTTT TTTTT, Where [X] = |
| | GCTCTTCG (107), TCGTCTCG (108) or |
| | ACCTCAGC, (109) and the barcode |
| | comprises [barcode part1] |
| | and [barcode part2] |
| Barcode_adapter_ | ATTAGGAGACACAATAGGGAGGCA [barcode |
| 5c_randomer | part1] GCTGAGACATGTGAAGAGG [barcode |
| | part2] [X] GAGGGA [UMI] Nₓ, |
| | Where x ranges from 6 to 15, [X] = |
| | GCTCTTCG (110), TCGTCTCG (111) or |
| | ACCTCAGC, (112), and the barcode |
| | comprises [barcode part1] and |
| | [barcode part2] |

### S. Example 19: Incorporating Barcode Adapter into 5′ End During PCR

[0599] This example describes an embodiment of the invention based on predicted results rather than results actually achieved. Cells and barcode adapter template are put together in reaction containers whereby the majority of reaction containers have only one cell and one template molecule, or one cell and one barcode adapter template bead, for example, by a droplet generator device and the reaction containers are water-in-oil droplets, such as in example 14. The template switching oligo (TSO) comprises a fixed sequence, optionally a UMI, and a 1^{st} strand cDNA complementary sequence (5′adapter in Table 29). The 3′ adapter sequence comprises a fixed sequence, optionally a UMI, and either oligo(dT) or a random or semi-random sequence (3′_adapter_oligodT and 3′_adapter_randomer respectively in Table 29), or in combination.

[0600] The reverse transcription reaction with a cell and a barcode adapter template bead is performed at 50° C. for 3 minutes, followed by 42° C. for 3 hours, followed by standard PCR cycling conditions, in the following reaction conditions:

RT reaction mix

| Tris-HCl pH 8 | 20 | mM |
|---|---|---|
| NaCl | 3.33 | mM |
| KCl | 10 | mM |
| (NH₄)₂SO₄ | 10 | mM |
| MgSO₄ | 7 | mM |
| EDTA | 0.5 | mM |
| Betaine | 90 | mM |
| BSA | 0.4 | mg/ml |
| DTT | 4 | mM |
| Tween 20 | 0.30% | |
| dNTPs | 2 | mM |
| Ribolock | 1.6 | U/μL |
| Klenow fragment | 0.4 | U/μL |
| Nt.BbvCI | 0.3 | U/uL |
| E. coli IPP | 0.001 | U/μL |
| T4gp32 | 0.25 | μg/μL |
| Maxima H- | 3 | U/μL |
| 5′adapter | 1 | μM |
| 3′_adapter_PCR_oligodT | 0.1 μM (each) | |
| and/or 3′_adapter_PCR_randomer | | |
| 3′_PCR_primer | 0.5 | μM |

[0601] 5′_PCR_barcode_adapter_primer is generated off a barcode_adapter_template using either a DNAP (with the appropriate strand-displacing DNAP recognition site, such as a nick created by a nicking enzyme, on the barcode adapter template). Here, Klenow fragment is used as the DNAP and Nt.BbvCI is used as the nicking endonuclease, and the recognition site is “CCTCAGC”. After reverse transcription, primers with their 3′end complementary to the adapter sequences added to the 1^{st} strand cDNA are used for amplification, with the forward primer being 5′_PCR_barcode_adapter_primer, which is generated from barcode adapter templates, and reverse primer being 3′_PCR_primer.

[0602] Barcoding occurs during the PCR reaction as the barcode adapter (5′_PCR_barcode_adapter_primer) is the forward primer, and the barcode adapter is incorporated into the 5′ end of 1^{st} strand cDNA (FIG. 11).

[0603] Target genes of interest can also be amplified by performing amplification using 5′_PCR_barcode_adapter_primer as the forward primer, and reverse primers comprising gene-specific sequences.

[0604] The library is then pooled and prepared for next-gen sequencing, such as on the Illumina or Ion Torrent platform.

TABLE 29
Primer sequences

| Primers | Sequence (SEQ ID NO:) |
|---|---|
| 5′adapter | GGAAGATAGGGATAACAGGGTAATG [UMI] |
| | GCGGG (106) |
| 3′_adapter_PCR_ | ATTAGGAGACACAATAGGGAGGCA [UMI] |
| oligodT | TTTTT TTTTT TTTTT TTTTT TTTTT (113) |
| 3′_adapter_PCR_ | ATTAGGAGACACAATAGGGAGGCA [UMI] Nₓ |
| randomer | (114), where x ranges from 6-15 |
| 5′_PCR_barcode_ | GGCGACCACCGAGATCTACAC [barcode part1] |
| adapter_primer | GCTGAGACATGTGAAGAGG [barcode part2] |
| | GGAAGATAGGGATAACAGGGTAATG (115), |
| | the barcode comprises [barcode part1] |
| | and [barcode part2] |
| 3′_PCR_primer | ATTAGGAGACACAATAGGGAGGCA (116) |

### T. Example 20: Incorporating Barcode Adapter into 3′ End During PCR

[0605] This example describes an embodiment of the invention based on predicted results rather than results actually achieved. This example is similar to Example 19, except that the barcode adapter generated from barcode adapter templates is used as the reverse primer in PCR. Reverse transcription is performed as in Example 19, and in PCR 5′_PCR_primer is the forward primer, and 3′_PCR_barcode_adapter_primer is generated from barcode_adapter template and used as the reverse primer (FIG. 12). The reverse transcription reaction with a cell and a barcode adapter template bead is performed at 50° C. for 3 minutes, followed by 42° C. for 3 hours, followed by standard PCR cycling conditions, in the following reaction conditions:

RT reaction mix

| Tris-HCl pH 8 | 20 | mM |
|---|---|---|
| NaCl | 3.33 | mM |
| KCl | 10 | mM |
| (NH₄)₂SO₄ | 10 | mM |
| MgSO₄ | 7 | mM |
| EDTA | 0.5 | mM |
| Betaine | 90 | mM |
| BSA | 0.4 | mg/ml |
| DTT | 4 | mM |
| Tween 20 | 0.30% | |
| dNTPs | 2 | mM |
| Ribolock | 1.6 | U/μL |
| Klenow fragment | 0.4 | U/μL |
| Nt.BbvCI | 0.3 | U/μL |
| E. coli IPP | 0.001 | U/μL |
| T4gp32 | 0.25 | μg/μL |
| Maxima H- | 3 | U/μL |
| 5′adapter | 1 | μM |
| 3′_adapter_PCR_oligodT | 0.1 μM (each) | |
| and/or 3′_adapter_PCR_randomer | | |
| 5′_CR_primer | 0.5 | μM |

[0606] Target genes of interest can also be amplified by performing amplification using and reverse forward primers comprising gene-specific sequences, and 3′_PCR_barcode_adapter_primer as the reverse primer.

[0607] The library is then pooled and prepared for next-gen sequencing, such as on the Illumina or Ion Torrent platform.

TABLE 30
Primer sequences

| Primers | Sequence (SEQ ID NO:) |
|---|---|
| 5′_PCR_primer | GGAAGATAGGGATAACAGGGTAAT G (117) |
| 3′_PCR_barcode_ | GTGGGCTCGGAGATGTGTATAAGAGA [barcode |
| adapter_primer | part1] GCTGAGACATGTGAAGAGG [barcode |
| | part2]ATTAGGAGACACAATAGGGAGGCA (118), |
| | the barcode comprises [barcode part1] |
| | and [barcode part2] |

### U. Example 21: Barcoding RNA from Non-Cell Sources

[0608] In embodiments of the current invention, all RNA in the reaction container are barcoded, provided that the primer used in the reaction can bind to and initiate reverse transcription for a particular RNA. Therefore, exogenously introduced RNA can also be barcoded. In this example, RNA generated using in vitro transcription was barcoded.

[0609] SpikeIn sequence was ordered from IDT and PCR amplified with Phusion DNA polymerase using SPIKEIN-FW and SPIKEIN-RV as primers to obtain double stranded material with a 5′ T7 RNAP promoter sequence and a 3′ poly A tail. The product was then cleaned up with Qiagen MinElute kit and the DNA product was used for in vitro transcription with Life Technologies' T7 MEGAScript kit. The RNA thus obtained was then cleaned up by washing and concentrating with 10 mM Tris using Amicon 30 kDA columns (Millipore).

[0610] In each well of eight 96-well plates, a single memory B cell along with 0.5 ng yeast tRNA (Life Technologies) and 0.1 pg of Spike-In RNA were reverse transcribed. In a 10 μL reaction per well, the reaction was:

| 10x MMLV buffer (NEB) | 1 | μL |
|---|---|---|
| 10 mM Tris pH 8.0 | To 10 μL | |
| 1 μM biotinylated oligo(dT)₂₅ | 0.003 | μL |
| (SEQ ID NO: 40) | | |
| 100 mM MgCl₂ | 0.3 | μL |
| Ribolock | 0.025 | μL |
| T4gp32 (NEB) | 0.006 | μL |
| MaxH⁻ (Fisher Scientific) | 0.04 | μL |
| wellID-adapter | 1 | μL |

[0611] The reaction was incubated at 55° C. for 3 minutes, and then at 42° C. for 2 hours. Each well in a 96-well plate had a different well barcode in the wellID-adapter. The reaction was then cleaned up by binding 1^{st} strand cDNA with streptavidin paramagnetic C1 Dynabeads (Life Technologies) that binds to the biotinylated oligodT, and then using a magnet to pull down the 1^{st} strand cDNA, and washing them 3× with BWB buffer (2M NaCl in TE) and then 3× with 10 mM Tris, and resuspended in 15 μL of 10 mM Tris.

[0612] Two rounds of PCR amplification was done to amplify up heavy and light chain immunoglobulin genes. A different plate barcode sequence was added to all pooled barcoded cDNA in a different plate.

Per well for PCR1:

| | | |
|---|---|---|
| H₂O | 27.575 | μL |
| 5x Q5 Buffer | 12.5 | μL |
| MgCl2 | 0.375 | μL |
| DMSO | 2.5 | μL |
| dNTP | 1.25 | μL |
| FW1-short | 2.5 | μL |
| K-GSP1 | 1.4 | μL |
| L-GSP1 | 1.25 | μL |
| G-GSP1 | 1.4 | μL |
| ET-SSB (NEB) | 0.625 | μL |
| BSA | 0.625 | μL |
| Q5 Enzyme | 0.5 | μL |
| Plate-ID | 5 | μL |
| Template | 5 | μL |

Product from PCR1 was diluted 50x and used
in PCR2. Reaction per well for PCR2:

| | | |
|---|---|---|
| H₂O | 18.42 | μL |
| 5x Q5 buffer | 6 | μL |
| MgCl₂ | 0.18 | μL |
| DMSO | 1 | μL |
| dNTP | 0.6 | μL |
| 2FR | 0.6 | μL |
| G-GSP2 or K-GSP2 and L-GSP2 | 0.6 | μL |
| BSA | 0.3 | μL |
| Q5 | 0.3 | μL |
| Template | 2 | μL |

[0613] The amounts of resulting amplified material was normalized and prepared as in Example 11 for 454 sequencing. Primers used in this example may be found in Tables 13, 14 and 32.

[0614] 454 reads obtained were binned based on plate- and well-ID barcodes. Therefore, reads can be binned back to the original well in a specific plate. Reads were assembled with Newbler after clipping off the barcode sequences. For each contig, we performed a Smith-Waterman alignment of the contig with the Spike-In sequence using a scoring matrix of 2 for a match, −1 for a mismatch, −1 for a gap open and −1 for a gap extension. Any contig with a score >800 was considered a match. We counted the number of wells on each plate for which a match was observed. The Spike-In sequence was detected in the large majority of the wells (Table 31).

TABLE 31
Wells in which Spike-In sequence was detected

| RT Plate | | Wells in which | |
|---|---|---|---|
| physical | Plate-ID | sequence was | Percent |
| barcode | barcode | present | (%) |
| F041172 | p029 | 87 | 90.6 |
| F041173 | p061 | 76 | 79.2 |
| F041174 | p066 | 90 | 93.8 |
| F041189 | p069 | 93 | 96.9 |
| F041056 | p103 | 92 | 95.8 |
| F041170 | p149 | 87 | 90.6 |
| F041175 | p158 | 94 | 97.9 |
| F041171 | p193 | 82 | 85.4 |

TABLE 32
Sequences used

| Primers/ | |
|---|---|
| Oligos | Sequence (SEQ ID NO:) |
| Spike-In | ATCGTCTAAT ACGACTCACT ATAGGGTCCC |
| | TGAGCTGAAC GGGAAGGAAG GCTGGGGCTC |
| | ATTTGAGGTG CAGCTGTTGG AGATGACCCA |
| | GTCTCCAGCC TCCCTGCGTC ATGGGTGTGA |
| | ACCATTAGCT GTGCTCGCGC TACTCTCTCT |
| | TTCTGGCCTG GAGGCTATCC AGCACAGCGA |
| | CACCCACTCC TCCGTACTCC AAAGATTCAG |
| | GTTTACTCAC GTCATCCAGC AGAGAATGGA |
| | AAGTCAAATT TCCTGAATTG CTATGTGTCT |
| | GGGTTTCATC CATCCGACAT TGAAGTTGAC |
| | TTACTGAAGA ATGGAGAGAG AATTGAAAAA |
| | GTGGAGCATT CAGACTTGTC TTTCAGCAAG |
| | GACTGGTCTT TCTATCTCTT GTACTACACT |
| | GAATTCACCC CCACTGAAAA AGATGAGTAT |
| | GCCTGCCGTG TGAACCATGT GACTTTGTCA |
| | CAGCCCAAGA TAGTTAAGTG GGCACAAAGA |
| | GCTTCAACAG GGGAGAATCG AGACATGTAA |
| | GCAGCATCAT GGAGCTGGGC TGCCTGGTCA |
| | AGGAC (119) |
| SPIKEIN-FW | ATCGTCTAATACGACTCACTATAGGGTCC (120) |
| SPIKEIN-RV | TTTTT TTTTT TTTTT TTTTT TTTTT TTTTT |
| | TTTTT GTC CTT GAC CAG GCA GCC CAG (121) |
| wellID- | CACGACCGGLJGCTCGAT TAG [well-barcode] |
| adapter | AGGAGGG (122) |
| Plate-ID | GAGAGACTGACAGCGTATCGCCTCCCTCGCGCCATCAG |
| | Pate-barcode] CACGACCGGTGCTCGATTTAG (123) |

[well-barcode] = SEQ ID NOS: 47606-47711;
[plate-barcode] = SEQ ID NOS: 47712-47719.

### V. Example 22: Barcoding RNA from Non-Cell Sources to Identify Cell Populations

[0615] This example describes an embodiment of the invention based on predicted results rather than results actually achieved. As shown in Example 21, exogenously introduced RNA can be barcoded. In this example, barcoded RNA is used to identify specific cell populations. Spike-In DNA is generated as in Example 21, except that SPIKEIN-FW has a 5′ NH2 modification. It is conjugated to an anti-CD4 antibody using All-in-One Antibody-Oligonucleotide Conjugation Kit (Solulink). RNA generated from Spike-In DNA using in vitro transcription may also be conjugated instead to anti-CD4 antibody.

[0616] T cells are prepared and sequenced as in Example 15, with an additional step being the T cells are incubated with the Spike-In conjugated anti-CD4 antibody before running the T cells on a droplet generator and subsequently barcoding the RNA. Reads obtained are binned based on index-ID and barcodes added by barcode adapters. Therefore, reads can be binned back to the original reaction container. Smith-Waterman alignment of the contig with the Spike-In sequence using a scoring matrix of 2 for a match, −1 for a mismatch, −1 for a gap open and −1 for a gap extension is done. Any contig with a score >800 is considered a match. We then count the reaction containers in which a match was observed. For reaction containers in which the Spike-In sequence is detected, the T cell is then identified as a CD4 T cell (FIG. 14A). Multiple antibodies coupled with different Spike-In sequences can be used, with the end result being different cells with different cell surface antigens can be identified in the same experimental run.

### W. Example 23: Barcoding RNA from Non-Cell Sources to Identify Antigen-Specific B Cells

[0617] This example describes an embodiment of the invention based on predicted results rather than results actually achieved. In this example, exogenously introduced RNA is barcoded and used to identify antigen-specific B cells. Spike-In DNA is generated as in Example 21, except that SPIKEIN-FW has a 5′ NH2 modification. It is conjugated to an influenza hemagglutinin antigen using All-in-One Antibody-Oligonucleotide Conjugation Kit (Solulink). RNA generated from Spike-In DNA using in vitro transcription may also be conjugated instead to hemagglutinin.

[0618] B cells from influenza-vaccine immunized mice are prepared as in Example 8 and sequenced, with an additional step being the B cells are incubated with the Spike-In conjugated antigen before barcoding them. Reads obtained are binned based on index-ID and barcodes added by barcode adapters. Therefore, reads can be binned back to the original reaction container. Smith-Waterman alignment of the contig with the Spike-In sequence using a scoring matrix of 2 for a match, −1 for a mismatch, −1 for a gap open and −1 for a gap extension is done. Any contig with a score >800 is considered a match. We then count the reaction containers in which a match was observed. For reaction containers in which the Spike-In sequence is detected, the B cell is then identified as being hemagglutinin-specific (FIG. 14B). Multiple antigens coupled with different Spike-In sequences can be used, with the end result being different B cells specific for different antigens can be identified in the same experimental run.

### X. Example 24: Barcoding RNA from Non-Cell Sources to Identify Antigen-Specific T Cells

[0619] This example describes an embodiment of the invention based on predicted results rather than results actually achieved. In this example, exogenously introduced RNA is barcoded and used to identify antigen-specific B cells. Spike-In DNA is generated as in Example 21, except that SPIKEIN-FW has a 5′ NH2 modification. It is conjugated to a particular peptide-MHC antigen using All-in-One Antibody-Oligonucleotide Conjugation Kit (Solulink). RNA generated from Spike-In DNA using in vitro transcription may also be conjugated instead to peptide-MHC complex.

[0620] T cells are prepared and sequenced as in Example 15, with an additional step being the T cells are incubated with the Spike-In conjugated anti-CD4 antibody before running the T cells on a droplet generator and subsequently barcoding the RNA. Reads obtained are binned based on index-ID and barcodes added by barcode adapters. Therefore, reads can be binned back to the original reaction container. Smith-Waterman alignment of the contig with the Spike-In sequence using a scoring matrix of 2 for a match, −1 for a mismatch, −1 for a gap open and −1 for a gap extension is done. Any contig with a score >800 is considered a match. We then count the reaction containers in which a match was observed. For reaction containers in which the Spike-In sequence is detected, the T cell is then identified as antigen-specific (FIG. 14C). Multiple different peptide-MHCs coupled with different Spike-In sequences can be used, with the end result being different T cells recognizing different peptide-MHCs can be identified in the same experimental run.

TABLE 33
Most frequently observed genes.

| geneID | Description | cells |
|---|---|---|
| ENSG00000062716 | vacuole membrane protein 1 | 101 |
| ENSG00000137265 | interferon regulatory factor 4 | 59 |
| ENSG00000075624 | actin, beta | 47 |
| ENSG00000092820 | ezrin | 32 |
| ENSG00000026508 | CD44 molecule (Indian blood group) | 30 |
| ENSG00000111537 | interferon, gamma | 30 |
| ENSG00000177954 | ribosomal protein S27 | 30 |
| ENSG00000070756 | poly(A) binding protein, cytoplasmic 1 | 25 |
| ENSG00000132510 | lysine (K)-specific demethylase 6B | 25 |
| ENSG00000164924 | tyrosine 3-monooxygenase/tryptophan | 25 |
| | 5-monooxygenase activation protein, zeta | |

[0621] It is understood that the examples and embodiments described herein are for illustrative purposes only and that various modifications or changes in light thereof will be suggested to persons skilled in the art and are to be included within the spirit and purview of this application and scope of the appended claims. All publications, sequence accession numbers, patents, and patent applications cited herein are hereby incorporated by reference in their entirety for all purposes.

1. A composition comprising a plurality of beads, wherein each bead in the plurality is attached to a plurality of barcode adaptors, each barcode adaptor including a single-stranded DNA sequence with a barcode sequence, a universal priming sequence, a unique molecular identifier (UMI), and an RNA binding site.

2. The composition of claim 1, wherein the RNA binding site is a polyT tract.

3. The composition of claim 1, wherein the RNA binding site comprises a sequence complementary to at least one sequence region in one or more mRNAs.

4. The composition of claim 1, wherein the barcode adaptor is attached to the bead via the 5′ end of the barcode adaptor.

5. The composition of claim 1, wherein the barcode adaptor is attached to the bead via a thiol group.

6. The composition of claim 1, wherein each barcode adaptor attached to the same bead comprises the same barcode sequence.

7. The composition of claim 1, wherein each bead in the plurality of beads is attached to a plurality of barcode adaptors including a barcode sequence that is different from the barcode sequence included in the plurality of barcode adaptors attached to a different bead in the plurality of beads.

8. A method of producing a polynucleotide of interest, the method comprising:
a. providing a bead including a plurality of barcode adaptors, each barcode adaptor including a single-stranded DNA sequence with a barcode sequence, a universal priming sequence, a UMI, and an RNA binding site;
b. generating an aqueous droplet containing (i) the bead from step (a); (ii) a lysis reagent; (iii) a reverse transcriptase enzyme, and (iv) a single cell;
c. lysing the cell to release RNA molecules;
d. performing reverse transcription on the RNA molecules from the cells to generate cDNA molecules including the barcode sequence;
e. collecting the cDNA molecules including the barcode sequences, and
f. sequencing the cDNA molecules including the barcode sequences.

9. The method of claim 8, wherein the aqueous droplet is a water/oil emulsion.

10. The method of claim 8, wherein the RNA binding site is a polyT tract.

11. The method of claim 8, wherein the RNA binding site comprises a sequence complementary to at least one of the RNA molecules.

12. The method of claim 8, wherein the barcode adaptor is attached to the bead via the 5′ end of the barcode adaptor.

13. The method of claim 8, wherein the barcode adaptor is attached to the bead via avidin, streptavidin, biotin, gold, a thiol group, a carboxyl group, an epoxy group, a hydroxyl group or any combination thereof.

14. The method of claim 8, wherein the method further comprises: interrogating the cell for a phenotype prior to analyzing the nucleic acid, including contacting the cell with a nucleic acid marker, said nucleic acid marker including a nucleic acid linked to a binder, wherein the binder binds to a cell surface protein.

15. A method of analyzing nucleic acids associated with single cells, the method comprising:
a. providing a bead including a plurality of barcode adaptors, each barcode adaptor including: a barcode sequence, a universal priming sequence, a UMI, and an RNA binding site;
b. generating an aqueous droplet containing (i) the bead from step (a); (ii) a lysis reagent; (iii) a reverse transcriptase enzyme; and (iv) a single cell;
c. lysing the cell to release RNA molecules,
d. performing reverse transcription on the RNA molecules from the cells to generate cDNA molecules including the barcode sequence;
e. collecting the cDNA molecules including the barcode sequences, and
f. sequencing the cDNA molecules including the barcode sequences, wherein at least 10,000 RNA molecules are analyzed.

16. The method of claim 15, wherein the aqueous droplet is a water/oil emulsion.

17. The method of claim 15, wherein the RNA binding site is a polyT tract.

18. The method of claim 15, wherein the RNA binding site comprises a sequence complementary to at least one of the RNA molecules.

19. The method of claim 15, wherein the barcode adaptor is attached to the bead via the 5′ end of the barcode adaptor.

20. The method of claim 15, wherein the barcode adaptor is attached to the bead via avidin, streptavidin, biotin, gold, a thiol group, a carboxyl group, an epoxy group, a hydroxyl group or any combination thereof.

21. (canceled)

The application's sequence listing, which the Patent Office published only in electronic form, follows.

SEQUENCE LISTING (47719 sequences)

SEQ ID NO: 1 - DNA, 36 bp, synthetic construct
  misc_feature 1..36: note = synthetic oligo primer emB-T7bridge2 used to make barcode adapter template bead library
  modified_base 1: mod_base = OTHER; note = t modifierd by dual-biotin-C18spacer-C18 spacer
  source 1..36: mol_type = other DNA
taatacgactcactataggataaagcggccgcaaat

SEQ ID NO: 2 - DNA, 55 bp, synthetic construct
  misc_feature 1..55: note = synthetic oligo primer emB-BCbridge2 used to make barcode adapter template bead library
  modified_base 1..2: mod_base = cm
  source 1..55: mol_type = other DNA
ccccctgtttaaaccthhhthhhhthhhhthhhthhhhatttgcggccgctttat

SEQ ID NO: 3 - DNA, 22 bp, synthetic construct
  misc_feature 1..22: note = synthetic oligo primer emB-BCbridge2 random combination used to make barcode adapter template bead library
  source 1..22: mol_type = other DNA
hhhthhhhthhhhthhhthhhh

SEQ ID NO: 4 - DNA, 36 bp, synthetic construct; identical to SEQ ID NO: 1
  misc_feature 1..36: note = synthetic oligo primer emB-T7bridgefree used to make barcode adapter template bead library
  source 1..36: mol_type = other DNA

SEQ ID NO: 5 - DNA, 16 bp, synthetic construct
  misc_feature 1..16: note = synthetic oligo primer emB-Rv3 used to make barcode adapter template bead library
  modified_base 1: mod_base = OTHER; note = cm modified byAlexaFluor647-C18 spacer
  modified_base 2: mod_base = cm
  source 1..16: mol_type = other DNA
ccccctgtttaaacct

SEQ ID NO: 6 - DNA, 19 bp, synthetic construct
  misc_feature 1..19: note = synthetic T7 RNA polymerase (RNAP) promoter sequence
  source 1..19: mol_type = other DNA
taatacgactcactatagg

SEQ ID NO: 7 - DNA, 42 bp, synthetic construct
  misc_feature 1..42: note = synthetic oligo primer emB-T7bridgeIsceI used to make barcode adapter template bead library
  modified_base 1: mod_base = OTHER; note = t modified by dual-biotin-C18spacer-C18spacer
  source 1..42: mol_type = other DNA
taatacgactcactataggatagggataacagggtaatagga

SEQ ID NO: 8 - DNA, 60 bp, synthetic construct
  misc_feature 1..60: note = synthetic oligo primer emB-BCbridgeISceI_2 used to make barcode adapter template bead library
  modified_base 1..2: mod_base = cm
  source 1..60: mol_type = other DNA
cccccagtttaaactccthhhthhhhthhhhthhhthhhhtcctattaccctgttatccc

SEQ ID NO: 9 - DNA, 42 bp, synthetic construct; identical to SEQ ID NO: 7
  misc_feature 1..42: note = synthetic oligo primer emB-T7bridgefreeIsceI_2 used to make barcode adapter template bead library
  source 1..42: mol_type = other DNA

SEQ ID NO: 10 - DNA, 18 bp, synthetic construct
  misc_feature 1..18: note = synthetic oligo primer emB_IsceI_RV used to make barcode adapter template bead library
  modified_base 1: mod_base = OTHER; note = cm modified by AlexaFluor647-C18spacer
  modified_base 2: mod_base = cm
  source 1..18: mol_type = other DNA
cccccagtttaaactcct

SEQ ID NO: 11 - DNA, 54 bp, synthetic construct
  misc_feature 1..54: note = synthetic oligo primer S1-oligo used to make barcode adapter template bead library
  modified_base 1: mod_base = OTHER; note = a modified by desthiobiotin-C18spacer
  source 1..54: mol_type = other DNA
atattaatacgactcactataggcatagggataacagggtaatgagatggatag

SEQ ID NO: 12 - DNA, 60 bp, synthetic construct
  misc_feature 1..60: note = synthetic oligo primer W-oligo-a used to make barcode adapter template bead library
  modified_base 30..36: mod_base = OTHER; note = n = i
  source 1..60: mol_type = other DNA
cctcctcctcctcccagtgagctgcgtctnnnnnnntcattaccctgttatccctatgcc

SEQ ID NO: 13 - DNA, 56 bp, synthetic construct
  misc_feature 1..56: note = synthetic oligo primer W-oligo-b used to make barcode adapter template bead library
  modified_base 26..32: mod_base = OTHER; note = n = i
  source 1..56: mol_type = other DNA
ctcctcctcccagtgagctgcgtctnnnnnnntcattaccctgttatccctatgcc

SEQ ID NO: 14 - DNA, 28 bp, synthetic construct
  misc_feature 1..28: note = synthetic oligo primer S2-oligo-a used to make barcode adapter template bead library
  modified_base 1..2: mod_base = cm
  source 1..28: mol_type = other DNA
cccctcctaacctcctcctcctcctccc

SEQ ID NO: 15 - DNA, 23 bp, synthetic construct
  misc_feature 1..23: note = synthetic oligo primer S2-oligo-b used to make barcode adapter template bead library
  modified_base 1..2: mod_base = cm
  source 1..23: mol_type = other DNA
cccctcctaaccctcctcctccc

SEQ ID NO: 16 - DNA, 22 bp, synthetic construct
  misc_feature 1..22: note = synthetic oligo(dT)-20VN
  misc_difference 22: note = n = g, a, c or t
  source 1..22: mol_type = other DNA
ttttttttttttttttttttvn

SEQ ID NO: 17 - DNA, 21 bp, synthetic construct
  misc_feature 1..21: note = synthetic PCR1 and PCR2 primer L_GSP1, oligo primer DNA barcode adapter w24
  source 1..21: mol_type = other DNA
tytgtgggacttccactgctc

SEQ ID NO: 18 - DNA, 23 bp, synthetic construct
  misc_feature 1..23: note = synthetic PCR1 and PCR2 primer G_GSP1
  source 1..23: mol_type = other DNA
tcttgtccaccttggtgttgctg

SEQ ID NO: 19 - DNA, 21 bp, synthetic construct
  misc_feature 1..21: note = synthetic PCR1 and PCR2 primer K_GSP1
  source 1..21: mol_type = other DNA
cgattggagggcgttatccac

SEQ ID NO: 20 - DNA, 48 bp, synthetic construct
  misc_feature 1..48: note = synthetic PCR1 and PCR2 primer K_GS2, K_GSP2s
  source 1..48: mol_type = other DNA
ctatgcgccttgccagcccgctcagtcagatggcgggaagatgaagac

SEQ ID NO: 21 - DNA, 48 bp, synthetic construct
  misc_feature 1..48: note = synthetic PCR1 and PCR2 primer L_GSP2, L_GSP2s
  source 1..48: mol_type = other DNA
ctatgcgccttgccagcccgctcaggaggagggygggaacagagtgac

SEQ ID NO: 22 - DNA, 49 bp, synthetic construct
  misc_feature 1..49: note = synthetic PCR1 and PCR2 primer G_GSP2, G_GSP2s
  source 1..49: mol_type = other DNA
ctatgcgccttgccagcccgctcaggggaagtagtccttgaccaggcag

SEQ ID NO: 23 - DNA, 67 bp, synthetic construct
  misc_feature 1..67: note = synthetic PCR1 and PCR2 primer BC_Long
  source 1..67: mol_type = other DNA
gagagactgacagcgtatcgcctccctcgcgccatcagacgagtgcgtggataaagcggccgcaaat

SEQ ID NO: 24 - DNA, 24 bp, synthetic construct
  misc_feature 1..24: note = synthetic PCR1 and PCR2 primer FW_Ishort, FW_1short
  source 1..24: mol_type = other DNA
gagagactgacagcgtatcgcctc

SEQ ID NO: 25 - DNA, 18 bp, synthetic construct
  misc_feature 1..18: note = synthetic PCR1 and PCR2 primer 2FR mixed 1:1 with SEQ ID NO:26
  source 1..18: mol_type = other DNA
cgtatcgcctccctcgcg

SEQ ID NO: 26 - DNA, 19 bp, synthetic construct
  misc_feature 1..19: note = synthetic PCR1 and PCR2 primer 2FR mixed 1:1 with SEQ ID NO:25
  source 1..19: mol_type = other DNA
ctatgcgccttgccagccc

SEQ ID NO: 27 - DNA, 69 bp, synthetic construct
  misc_feature 1..69: note = synthetic oligo primer FW1_Long
  source 1..69: mol_type = other DNA
gagagactgacagcgtatcgcctccctcgcgccatcagacgagtgcgtcacgaccggtgctcgatttag

SEQ ID NO: 28 - DNA, 27 bp, synthetic construct
  misc_feature 1..27: note = synthetic primer L_GSP1_murine for PCR of murine immunoglobulin genes mixed 50:50 with SEQ ID NO:29
  source 1..27: mol_type = other DNA
actcttctccacagtgtccccttcatg

SEQ ID NO: 29 - DNA, 27 bp, synthetic construct
  misc_feature 1..27: note = synthetic primer L_GSP1_murine for PCR of murine immunoglobulin genes mixed 50:50 with SEQ ID NO:28
  source 1..27: mol_type = other DNA
actcttctccacagtgtgaccttcatg

SEQ ID NO: 30 - DNA, 22 bp, synthetic construct
  misc_feature 1..22: note = synthetic primer G_GSP1_murine for PCR of murine immunoglobulin genes mixed 50:50 with SEQ ID NO:31
  source 1..22: mol_type = other DNA
ctggacagggatccagagttcc

SEQ ID NO: 31 - DNA, 22 bp, synthetic construct
  misc_feature 1..22: note = synthetic primer G_GSP1_murine for PCR of murine immunoglobulin genes mixed 50:50 with SEQ ID NO:30
  source 1..22: mol_type = other DNA
ctggacagggctccatagttcc

SEQ ID NO: 32 - DNA, 23 bp, synthetic construct
  misc_feature 1..23: note = synthetic primer K_GSP1_murine for PCR of murine immunoglobulin genes
  source 1..23: mol_type = other DNA
ccattttgtcgttcactgccatc

SEQ ID NO: 33 - DNA, 21 bp, synthetic construct
  misc_feature 1..21: note = synthetic primer M_GSP1_murine for PCR of murine immunoglobulin genes
  source 1..21: mol_type = other DNA
ccagagaagccatcccgtggt

SEQ ID NO: 34 - DNA, 47 bp, synthetic construct
  misc_feature 1..47: note = synthetic primer K_GSP2_murine for PCR of murine immunoglobulin genes
  source 1..47: mol_type = other DNA
ctatgcgccttgccagcccgctcagcactggatggtgggaagatgga

SEQ ID NO: 35 - DNA, 49 bp, synthetic construct
  misc_feature 1..49: note = synthetic primer L_GSP2_murine for PCR of murine immunoglobulin genes mixed 50:50 with SEQ ID NO:36
  source 1..49: mol_type = other DNA
ctatgcgccttgccagcccgctcagggccttgttagtctcgagctcttc

SEQ ID NO: 36 - DNA, 49 bp, synthetic construct
  misc_feature 1..49: note = synthetic primer L_GSP2_murine for PCR of murine immunoglobulin genes mixed 50:50 with SEQ ID NO:35
  source 1..49: mol_type = other DNA
ctatgcgccttgccagcccgctcagggctttgttttcctkgagctcctc

SEQ ID NO: 37 - DNA, 47 bp, synthetic construct
  misc_feature 1..47: note = synthetic primer G_GSP2_murine for PCR of murine immunoglobulin genes mixed 50:50 with SEQ ID NO:38
  source 1..47: mol_type = other DNA
ctatgcgccttgccagcccgctcagggggccagtggatagachgatg

SEQ ID NO: 38 - DNA, 49 bp, synthetic construct
  misc_feature 1..49: note = synthetic primer L_GSP2_murine for PCR of murine immunoglobulin genes mixed 50:50 with SEQ ID NO:37
  source 1..49: mol_type = other DNA
ctatgcgccttgccagcccgctcagcagggaccaagggatagacagatg

SEQ ID NO: 39 - DNA, 51 bp, synthetic construct
  misc_feature 1..51: note = synthetic primer M_GSP2_murine for PCR of murine immunoglobulin genes
  source 1..51: mol_type = other DNA
ctatgcgccttgccagcccgctcaggraagacatttgggraggactgactc

SEQ ID NO: 40 - DNA, 25 bp, synthetic construct
  misc_feature 1..25: note = synthetic oligo(dT)-25
  source 1..25: mol_type = other DNA
ttttttttttttttttttttttttt

SEQ ID NO: 41 - DNA, 73 bp, synthetic construct
  misc_feature 1..73: note = synthetic PCR1 and PCR2 primer bc_fwlong_ISceI
  source 1..73: mol_type = other DNA
gagagactgacagcgtatcgcctccctcgcgccatcagacgagtgcgtggatagggataacagggtaatagga

SEQ ID NO: 42 - DNA, 56 bp, synthetic construct
  misc_feature 1..56: note = synthetic primer mix Lib1-FR mixed 1:1 with SEQ ID NO:43
  misc_difference 31..34: note = n = g, a, c or t
  source 1..56: mol_type = other DNA
ccatctcatccctgcgtgtctccgactcagnnnncgtatcgcctccctcgcgccat

SEQ ID NO: 43 - DNA, 58 bp, synthetic construct
  misc_feature 1..58: note = synthetic primer mix Lib1-FR mixed 1:1 with SEQ ID NO:42
  misc_difference 31..34: note = n = g, a, c or t
  source 1..58: mol_type = other DNA
cctatcccctgtgtgccttggcagtctcagnnnnctatgcgccttgccagcccgctca

SEQ ID NO: 44 - DNA, 56 bp, synthetic construct
  misc_feature 1..56: note = synthetic primer mix Lib2-FR mixed 1:1 with SEQ ID NO:45
  misc_difference 31..34: note = n = g, a, c or t
  source 1..56: mol_type = other DNA
cctatcccctgtgtgccttggcagtctcagnnnncgtatcgcctccctcgcgccat

SEQ ID NO: 45 - DNA, 58 bp, synthetic construct
  misc_feature 1..58: note = synthetic primer mix Lib2-FR mixed 1:1 with SEQ ID NO:44
  misc_difference 31..34: note = n = g, a, c or t
  source 1..58: mol_type = other DNA
ccatctcatccctgcgtgtctccgactcagnnnnctatgcgccttgccagcccgctca

SEQ ID NO: 46 - DNA, 20 bp, synthetic construct
  misc_feature 1..20: note = synthetic T2' sequence used to identify DNA barcodes
  source 1..20: mol_type = other DNA
gggataacagggtaatagga

SEQ ID NO: 47 - DNA, 18 bp, synthetic construct
  misc_feature 1..18: note = synthetic T1 sequence used to identify DNA barcodes
  source 1..18: mol_type = other DNA
aggagtttaaactggggg

SEQ ID NO: 48 - DNA, 60 bp, synthetic construct
  misc_feature 1..60: note = synthetic oligo primer emB_BCbridgeISceI_N used to make barcode adapter template bead library
  source 1..60: mol_type = other DNA
acccagtttaaacctccthhhthhhhthhhhthhhthhhhtcctattaccctgttatccc

SEQ ID NO: 49 - DNA, 29 bp, synthetic construct
  misc_feature 1..29: note = synthetic oligo primer emB_ISceI_RV_n used to make barcode adapter template bead library
  source 1..29: mol_type = other DNA
cccchhhhhhhhaccagtttaaacctcct

SEQ ID NO: 50 - DNA, 46 bp, synthetic construct
  misc_feature 1..46: note = synthetic oligodT_n
  source 1..46: mol_type = other DNA
cacgaccggtgctcgatttagttttttttttttttttttttttttt

SEQ ID NO: 51 - DNA, 21 bp, synthetic construct
  misc_feature 1..21: note = synthetic PCR primer RV_1
  source 1..21: mol_type = other DNA
cacgaccggtgctcgatttag

SEQ ID NO: 52 - DNA, 120 bp, synthetic construct
  misc_feature 1..120: note = synthetic combinatorially generated barcode adapter template
  modified_base 1: mod_base = OTHER; note = a modified by dual-biotin-C18spacer-C18spacer
  misc_difference 47..62: note = [barcode part1], nnnnnnnnnnnnnnnn = one of SEQ ID NOS:127-45126
  misc_difference 82..93: note = [barcode part2], nnnnnnnnnnnn = one of SEQ ID NOS:45127-47561
  source 1..120: mol_type = other DNA
atattaatacgactcactataggaagatagggataacagggtaatgnnnnnnnnnnnnnnnngctgagacatgtgaagaggnnnnnnnnnnnngctcttcggagggaddddddddgcggg

SEQ ID NO: 53 - DNA, 120 bp, synthetic construct
  misc_feature 1..120: note = synthetic combinatorially generated barcode adapter template
  modified_base 1: mod_base = OTHER; note = a modified by dual-biotin-C18spacer-C18spacer
  misc_difference 47..62: note = [barcode part1], nnnnnnnnnnnnnnnn = one of SEQ ID NOS:127-45126
  misc_difference 82..93: note = [barcode part2], nnnnnnnnnnnn = one of SEQ ID NOS:45127-47561
  source 1..120: mol_type = other DNA
atattaatacgactcactataggaagatagggataacagggtaatgnnnnnnnnnnnnnnnngctgagacatgtgaagaggnnnnnnnnnnnntcgtctcggagggaddddddddgcggg

SEQ ID NO: 54 - DNA, 120 bp, synthetic construct
  misc_feature 1..120: note = synthetic combinatorially generated barcode adapter template
  modified_base 1: mod_base = OTHER; note = a modified by dual-biotin-C18spacer-C18spacer
  misc_difference 47..62: note = [barcode part1], nnnnnnnnnnnnnnnn = one of SEQ ID NOS:127-45126
  misc_difference 82..93: note = [barcode part2], nnnnnnnnnnnn = one of SEQ ID NOS:45127-47561
  source 1..120: mol_type = other DNA
atattaatacgactcactataggaagatagggataacagggtaatgnnnnnnnnnnnnnnnngctgagacatgtgaagaggnnnnnnnnnnnnacctcagcgagggaddddddddgcggg

SEQ ID NO: 55 - DNA, 46 bp, synthetic construct
  misc_feature 1..46: note = synthetic SAV_bead_linker for combinatorially generated barcode adapter template sequence
  modified_base 1: mod_base = OTHER; note = a modified by dual-biotin-C18spacer-C18spacer
  source 1..46: mol_type = other DNA
atattaatacgactcactataggaagatagggataacagggtaatg

SEQ ID NO: 56 - DNA, 46 bp, synthetic construct; identical to SEQ ID NO: 55
  misc_feature 1..46: note = synthetic Linker_free for combinatorially generated barcode adapter template sequence
  source 1..46: mol_type = other DNA

SEQ ID NO: 57 - DNA, 107 bp, synthetic construct
  misc_feature 1..107: note = synthetic barcode-containing oligo for combinatorially generated barcode adapter template sequence
  misc_difference 47..62: note = [barcode part1], nnnnnnnnnnnnnnnn = one of SEQ ID NOS:127-45126
  misc_difference 82..93: note = [barcode part2], nnnnnnnnnnnn = one of SEQ ID NOS:45127-47561
  source 1..107: mol_type = other DNA
atattaatacgactcactataggaagatagggataacagggtaatgnnnnnnnnnnnnnnnngctgagacatgtgaagaggnnnnnnnnnnnngctcttcggaggga

SEQ ID NO: 58 - DNA, 107 bp, synthetic construct
  misc_feature 1..107: note = synthetic barcode-containing oligo for combinatorially generated barcode adapter template sequence
  misc_difference 47..62: note = [barcode part1], nnnnnnnnnnnnnnnn = one of SEQ ID NOS:127-45126
  misc_difference 82..93: note = [barcode part2], nnnnnnnnnnnn = one of SEQ ID NOS:45127-47561
  source 1..107: mol_type = other DNA
atattaatacgactcactataggaagatagggataacagggtaatgnnnnnnnnnnnnnnnngctgagacatgtgaagaggnnnnnnnnnnnntcgtctcggaggga

SEQ ID NO: 59 - DNA, 107 bp, synthetic construct
  misc_feature 1..107: note = synthetic barcode-containing oligo for combinatorially generated barcode adapter template sequence
  misc_difference 47..62: note = [barcode part1], nnnnnnnnnnnnnnnn = one of SEQ ID NOS:127-45126
  misc_difference 82..93: note = [barcode part2], nnnnnnnnnnnn = one of SEQ ID NOS:45127-47561
  source 1..107: mol_type = other DNA
atattaatacgactcactataggaagatagggataacagggtaatgnnnnnnnnnnnnnnnngctgagacatgtgaagaggnnnnnnnnnnnnacctcagcgaggga

SEQ ID NO: 60 - DNA, 27 bp, synthetic construct
  misc_feature 1..27: note = synthetic non-mispriming reverse primer Rv_type1 for combinatorially generated barcode adapter template sequence
  modified_base 1: mod_base = OTHER; note = cm modified by 6-FAM
  modified_base 2: mod_base = cm
  source 1..27: mol_type = other DNA
cccgchhhhhhhhtccctccgaagagc

SEQ ID NO: 61 - DNA, 27 bp, synthetic construct
  misc_feature 1..27: note = synthetic non-mispriming reverse primer Rv_type2 for combinatorially generated barcode adapter template sequence
  modified_base 1: mod_base = OTHER; note = cm modified by Cy3
  modified_base 2: mod_base = cm
  source 1..27: mol_type = other DNA
cccgchhhhhhhhtccctccgagacga

SEQ ID NO: 62 - DNA, 27 bp, synthetic construct
  misc_feature 1..27: note = synthetic non-mispriming reverse primer Rv_type3 for combinatorially generated barcode adapter template sequence
  modified_base 1: mod_base = OTHER; note = cm modified by AlexaFluor647
  modified_base 2: mod_base = cm
  source 1..27: mol_type = other DNA
cccgchhhhhhhhtccctcgctgaggt

SEQ ID NO: 63 - DNA, 21 bp, synthetic construct
  misc_feature 1..21: note = synthetic make_longbc_rv1 to generate barcode-containing oligo for combinatorially generated barcode adapter template sequence
  source 1..21: mol_type = other DNA
gatagggataacagggtaatg

SEQ ID NO: 64 - DNA, 56 bp, synthetic construct
  misc_feature 1..56: note = synthetic BC_part1_sense to generate barcode-containing oligo for combinatorially generated barcode adapter template sequence
  misc_difference 22..37: note = [barcode part1], nnnnnnnnnnnnnnnn = one of SEQ ID NOS:127-45126
  source 1..56: mol_type = other DNA
gatagggataacagggtaatgnnnnnnnnnnnnnnnngctgagacatgtgaagagg

SEQ ID NO: 65 - DNA, 45 bp, synthetic construct
  misc_feature 1..45: note = synthetic BC_part2_type1_antisense to generate barcode-containing oligo for combinatorially generated barcode adapter template sequence
  misc_difference 15..26: note = [barcode part2], nnnnnnnnnnnn = one of SEQ ID NOS:45127-47561
  source 1..45: mol_type = other DNA
tccctccgaagagcnnnnnnnnnnnncctcttcacatgtctcagc

SEQ ID NO: 66 - DNA, 14 bp, synthetic construct
  misc_feature 1..14: note = synthetic make_longbc_rv2 to generate barcode-containing oligo for combinatorially generated barcode adapter template sequence
  source 1..14: mol_type = other DNA
tccctccgaagagc

SEQ ID NO: 67 - DNA, 45 bp, synthetic construct
  misc_feature 1..45: note = synthetic BC_part2_type2_antisense to generate barcode-containing oligo for combinatorially generated barcode adapter template sequence
  misc_difference 15..26: note = [barcode part2], nnnnnnnnnnnn = one of SEQ ID NOS:45127-47561
  source 1..45: mol_type = other DNA
tccctccgagacgannnnnnnnnnnncctcttcacatgtctcagc

SEQ ID NO: 68 - DNA, 14 bp, synthetic construct
  misc_feature 1..14: note = synthetic make_longbc_rv2 to generate barcode-containing oligo for combinatorially generated barcode adapter template sequence
  source 1..14: mol_type = other DNA
tccctccgagacga

SEQ ID NO: 69 - DNA, 45 bp, synthetic construct
  misc_feature 1..45: note = synthetic BC_part2_type3_antisense to generate barcode-containing oligo for combinatorially generated barcode adapter template sequence
  misc_difference 15..26: note = [barcode part2], nnnnnnnnnnnn = one of SEQ ID NOS:45127-47561
  source 1..45: mol_type = other DNA
tccctcgctgaggtnnnnnnnnnnnncctcttcacatgtctcagc

SEQ ID NO: 70 - DNA, 14 bp, synthetic construct
  misc_feature 1..14: note = synthetic make_longbc_rv3 to generate barcode-containing oligo for combinatorially generated barcode adapter template sequence
  source 1..14: mol_type = other DNA
tccctcgctgaggt

SEQ ID NO: 71 - DNA, 44 bp, synthetic construct
  misc_feature 1..44: note = synthetic PCR1 and PCR2 primer FW2-N-V2
  source 1..44: mol_type = other DNA
ctatgcgccttgccagaatgatacggcgaccaccgagatctaca

SEQ ID NO: 72 - DNA, 65 bp, synthetic construct
  misc_feature 1..65: note = synthetic PCR1 and PCR2 primer Index_sID
  misc_difference 22..29: note = [i5 index primers], nnnnnnnn = one of SEQ ID NOS:47562-47605
  source 1..65: mol_type = other DNA
ggcgaccaccgagatctacacnnnnnnnntcgtcggcagcggaagatagggataacagggtaatg

SEQ ID NO: 73 - DNA, 20 bp, synthetic construct
  misc_feature 1..20: note = synthetic PCR1 and PCR2 primer PCR1_short_n_v2
  source 1..20: mol_type = other DNA
ggcgaccaccgagatctaca

SEQ ID NO: 74 - DNA, 24 bp, synthetic construct
  misc_feature 1..24: note = synthetic PCR1 and PCR2 primer PCR1-RV-N v2
  source 1..24: mol_type = other DNA
attaggagacacaatagggaggca

SEQ ID NO: 75 - DNA, 26 bp, synthetic construct
  misc_feature 1..26: note = synthetic PCR1 and PCR2 primer RV2-n
  source 1..26: mol_type = other DNA
gtgggctcggagatgtgtataagaga

SEQ ID NO: 76 - DNA, 26 bp, synthetic construct
  misc_feature 1..26: note = synthetic PCR1 and PCR2 primer TRAC 53-78
  source 1..26: mol_type = other DNA
ggtgaataggcagacagacttgtcac

SEQ ID NO: 77 - DNA, 49 bp, synthetic construct
  misc_feature 1..49: note = synthetic PCR1 and PCR2 primer TRAC GSP2 mixed 1:1:1:1 with SEQ ID NOS:79-81
  misc_difference 30: note = n = g, a, c or t
  source 1..49: mol_type = other DNA
gtgggctcggagatgtgtataagagacagntacacggcagggtcagggt

SEQ ID NO: 78 - DNA, 50 bp, synthetic construct
  misc_feature 1..50: note = synthetic PCR1 and PCR2 primer TRAC GSP2 mixed 1:1:1:1 with SEQ ID NOS:78, 80 and 81
  misc_difference 30..31: note = n = g, a, c or t
  source 1..50: mol_type = other DNA
gtgggctcggagatgtgtataagagacagnntacacggcagggtcagggt

SEQ ID NO: 79 - DNA, 51 bp, synthetic construct
  misc_feature 1..51: note = synthetic PCR1 and PCR2 primer TRAC GSP2 mixed 1:1:1:1 with SEQ ID NOS:78, 79 and 81
  misc_difference 30..32: note = n = g, a, c or t
  source 1..51: mol_type = other DNA
gtgggctcggagatgtgtataagagacagnnntacacggcagggtcagggt

SEQ ID NO: 80 - DNA, 52 bp, synthetic construct
  misc_feature 1..52: note = synthetic PCR1 and PCR2 primer TRAC GSP2 mixed 1:1:1:1 with SEQ ID NOS:78-80
  misc_difference 30..33: note = n = g, a, c or t
  source 1..52: mol_type = other DNA
gtgggctcggagatgtgtataagagacagnnnntacacggcagggtcagggt

SEQ ID NO: 81 - DNA, 24 bp, synthetic construct
  misc_feature 1..24: note = synthetic PCR1 and PCR2 primer TRBC 37-60
  source 1..24: mol_type = other DNA
ctctgcttctgatggctcaaacac

SEQ ID NO: 82 - DNA, 52 bp, synthetic construct
  misc_feature 1..52: note = synthetic PCR1 and PCR2 primer TRBC GSP2 mixed 1:1:1:1 with SEQ ID NOS:84-86
  misc_difference 30: note = n = g, a, c or t
  source 1..52: mol_type = other DNA
gtgggctcggagatgtgtataagagacagnatggctcaaacacagcgacctc

SEQ ID NO: 83 - DNA, 53 bp, synthetic construct
  misc_feature 1..53: note = synthetic PCR1 and PCR2 primer TRBC GSP2 mixed 1:1:1:1 with SEQ ID NOS:83, 85 and 86
  misc_difference 30..31: note = n = g, a, c or t
  source 1..53: mol_type = other DNA
gtgggctcggagatgtgtataagagacagnnatggctcaaacacagcgacctc

SEQ ID NO: 84 - DNA, 54 bp, synthetic construct
  misc_feature 1..54: note = synthetic PCR1 and PCR2 primer TRBC GSP2 mixed 1:1:1:1 with SEQ ID NOS:83, 84 and 86
  misc_difference 30..32: note = n = g, a, c or t
  source 1..54: mol_type = other DNA
gtgggctcggagatgtgtataagagacagnnnatggctcaaacacagcgacctc

SEQ ID NO: 85 - DNA, 55 bp, synthetic construct
  misc_feature 1..55: note = synthetic PCR1 and PCR2 primer TRBC GSP2 mixed 1:1:1:1 with SEQ ID NOS:83-85
  misc_difference 30..33: note = n = g, a, c or t
  source 1..55: mol_type = other DNA
gtgggctcggagatgtgtataagagacagnnnnatggctcaaacacagcgacctc

SEQ ID NO: 86 - DNA, 26 bp, synthetic construct
  misc_feature 1..26: note = synthetic primer Next_i5_n used in library PCR amplification
  source 1..26: mol_type = other DNA
aatgatacggcgaccaccgagatcta

SEQ ID NO: 87 - DNA, 60 bp, synthetic construct
  misc_feature 1..60: note = synthetic primer Next_i7_FULL_n used in library PCR amplification
  source 1..60: mol_type = other DNA
caagcagaagacggcatacgagattcgccttagtctcgtgggctcggagatgtgtataag

SEQ ID NO: 88 - DNA, 22 bp, synthetic construct
  misc_feature 1..22: note = synthetic T cells targeted gene reverse primer IFNgamma (PCR1) for PCR1
  source 1..22: mol_type = other DNA
gcttccctgttttagctgctgg

SEQ ID NO: 89 - DNA, 52 bp, synthetic construct
  misc_feature 1..52: note = synthetic T cells targeted gene reverse primer IFNgamma (PCR2) for PCR2 mixed 1:1:1:1 with SEQ ID NOS:91-93
  misc_difference 30: note = n = g, a, c or t
  source 1..52: mol_type = other DNA
gtgggctcggagatgtgtataagagacagncgacagttcagccatcacttgg

SEQ ID NO: 90 - DNA, 53 bp, synthetic construct
  misc_feature 1..53: note = synthetic T cells targeted gene reverse primer IFNgamma (PCR2) for PCR2 mixed 1:1:1:1 with SEQ ID NOS:90, 92 and 93
  misc_difference 30..31: note = n = g, a, c or t
  source 1..53: mol_type = other DNA
gtgggctcggagatgtgtataagagacagnncgacagttcagccatcacttgg

SEQ ID NO: 91 - DNA, 54 bp, synthetic construct
  misc_feature 1..54: note = synthetic T cells targeted gene reverse primer IFNgamma (PCR2) for PCR2 mixed 1:1:1:1 with SEQ ID NOS:90, 91 and 93
  misc_difference 30..32: note = n = g, a, c or t
  source 1..54: mol_type = other DNA
gtgggctcggagatgtgtataagagacagnnncgacagttcagccatcacttgg

SEQ ID NO: 92 - DNA, 55 bp, synthetic construct
  misc_feature 1..55: note = synthetic T cells targeted gene reverse primer IFNgamma (PCR2) for PCR2 mixed 1:1:1:1 with SEQ ID NOS:90-92
  misc_difference 30..33: note = n = g, a, c or t
  source 1..55: mol_type = other DNA
gtgggctcggagatgtgtataagagacagnnnncgacagttcagccatcacttgg

SEQ ID NO: 93 - DNA, 20 bp, synthetic construct
  misc_feature 1..20: note = synthetic T cells targeted gene reverse primer CD4 (PCR1) for PCR1
  source 1..20: mol_type = other DNA
gctgagacacggagagggtc

SEQ ID NO: 94 - DNA, 50 bp, synthetic construct
  misc_feature 1..50: note = synthetic T cells targeted gene reverse primer CD4 (PCR2) for PCR2 mixed 1:1:1:1 with SEQ ID NOS:96-98
  misc_difference 30: note = n = g, a, c or t
  source 1..50: mol_type = other DNA
gtgggctcggagatgtgtataagagacagnagcaggtgggtgtcagagtt

SEQ ID NO: 95 - DNA, 51 bp, synthetic construct
  misc_feature 1..51: note = synthetic T cells targeted gene reverse primer CD4 (PCR2) for PCR2 mixed 1:1:1:1 with SEQ ID NOS:95, 97 and 98
  misc_difference 30..31: note = n = g, a, c or t
  source 1..51: mol_type = other DNA
gtgggctcggagatgtgtataagagacagnnagcaggtgggtgtcagagtt

SEQ ID NO: 96 - DNA, 52 bp, synthetic construct
  misc_feature 1..52: note = synthetic T cells targeted gene reverse primer CD4 (PCR2) for PCR2 mixed 1:1:1:1 with SEQ ID NOS:95, 96 and 98
  misc_difference 30..32: note = n = g, a, c or t
  source 1..52: mol_type = other DNA
gtgggctcggagatgtgtataagagacagnnnagcaggtgggtgtcagagtt

SEQ ID NO: 97 - DNA, 53 bp, synthetic construct
  misc_feature 1..53: note = synthetic T cells targeted gene reverse primer CD4 (PCR2) for PCR2 mixed 1:1:1:1 with SEQ ID NOS:95-97
  misc_difference 30..33: note = n = g, a, c or t
  source 1..53: mol_type = other DNA
gtgggctcggagatgtgtataagagacagnnnnagcaggtgggtgtcagagtt

SEQ ID NO: 98 - DNA, 20 bp, synthetic construct
  misc_feature 1..20: note = synthetic T cells targeted gene reverse primer CD8 (PCR1) for PCR1
  source 1..20: mol_type = other DNA
gtgagggcgagagtaggcag

SEQ ID NO: 99 - DNA, 50 bp, synthetic construct
  misc_feature 1..50: note = synthetic T cells targeted gene reverse primer CD8 (PCR2) for PCR2 mixed 1:1:1:1 with SEQ ID NOS:101-103
  misc_difference 30: note = n = g, a, c or t
  source 1..50: mol_type = other DNA
gtgggctcggagatgtgtataagagacagntcaccgaggaaggaccctct

SEQ ID NO: 100 - DNA, 51 bp, synthetic construct
  misc_feature 1..51: note = synthetic T cells targeted gene reverse primer CD8 (PCR2) for PCR2 mixed 1:1:1:1 with SEQ I NOS:100, 102 and 103
  misc_difference 30..31: note = n = g, a, c or t
  source 1..51: mol_type = other DNA
gtgggctcggagatgtgtataagagacagnntcaccgaggaaggaccctct

SEQ ID NO: 101 - DNA, 52 bp, synthetic construct
  misc_feature 1..52: note = synthetic T cells targeted gene reverse primer CD8 (PCR2) for PCR2 mixed 1:1:1:1 with SEQ ID NOS:100, 101 and 103
  misc_difference 30..32: note = n = g, a, c or t
  source 1..52: mol_type = other DNA
gtgggctcggagatgtgtataagagacagnnntcaccgaggaaggaccctct

SEQ ID NO: 102 - DNA, 53 bp, synthetic construct
  misc_feature 1..53: note = synthetic T cells targeted gene reverse primer CD8 (PCR2) for PCR2 mixed 1:1:1:1 with SEQ ID NOS:100-102
  misc_difference 30..33: note = n = g, a, c or t
  source 1..53: mol_type = other DNA
gtgggctcggagatgtgtataagagacagnnnntcaccgaggaaggaccctct

SEQ ID NO: 103 - DNA, 24 bp, synthetic construct
  misc_feature 1..24: note = synthetic primer v2_PCR1_RV_n used for whole transcriptomic amplification and library prep
  source 1..24: mol_type = other DNA
attaggagacacaatagggaggca

SEQ ID NO: 104 - DNA, 24 bp, synthetic construct
  misc_feature 1..24: note = synthetic primer Next_i5_n_v2 used for whole transcriptomic amplification and library prep
  source 1..24: mol_type = other DNA
ctatgcgccttgccagaatgatac

SEQ ID NO: 105 - DNA, 47 bp, synthetic construct
  misc_feature 1..47: note = synthetic primer Next_i7_n used for whole transcriptomic amplification and library prep
  source 1..47: mol_type = other DNA
caagcagaagacggcatacgagattcgccttagtctcgtgggctcgg

SEQ ID NO: 106 - DNA, 38 bp, synthetic construct
  misc_feature 1..38: note = synthetic primer 5' adapter
  source 1..38: mol_type = other DNA
ggaagatagggataacagggtaatgddddddddgcggg

SEQ ID NO: 107 - DNA, 118 bp, synthetic construct
  misc_feature 1..118: note = synthetic primer barcode_adapter_5c_oligodT
  misc_difference 25..40: note = [barcode part1], nnnnnnnnnnnnnnnn = one of SEQ ID NOS:127-45126
  misc_difference 60..71: note = [barcode part2], nnnnnnnnnnnn = one of SEQ ID NOS:45127-47561
  source 1..118: mol_type = other DNA
attaggagacacaatagggaggcannnnnnnnnnnnnnnngctgagacatgtgaagaggnnnnnnnnnnnngctcttcggagggaddddddddttttttttttttttttttttttttt

SEQ ID NO: 108 - DNA, 118 bp, synthetic construct
  misc_feature 1..118: note = synthetic primer barcode_adapter_5c_oligodT
  misc_difference 25..40: note = [barcode part1], nnnnnnnnnnnnnnnn = one of SEQ ID NOS:127-45126
  misc_difference 60..71: note = [barcode part2], nnnnnnnnnnnn = one of SEQ ID NOS:45127-47561
  source 1..118: mol_type = other DNA
attaggagacacaatagggaggcannnnnnnnnnnnnnnngctgagacatgtgaagaggnnnnnnnnnnnntcgtctcggagggaddddddddttttttttttttttttttttttttt

SEQ ID NO: 109 - DNA, 118 bp, synthetic construct
  misc_feature 1..118: note = synthetic primer barcode_adapter_5c_oligodT
  misc_difference 25..40: note = [barcode part1], nnnnnnnnnnnnnnnn = one of SEQ ID NOS:127-45126
  misc_difference 60..71: note = [barcode part2], nnnnnnnnnnnn = one of SEQ ID NOS:45127-47561
  source 1..118: mol_type = other DNA
attaggagacacaatagggaggcannnnnnnnnnnnnnnngctgagacatgtgaagaggnnnnnnnnnnnnacctcagcgagggaddddddddttttttttttttttttttttttttt

SEQ ID NO: 110 - DNA, 109 bp, synthetic construct
  misc_feature 1..109: note = synthetic primer barcode_adapter_5c_randomer
  misc_difference 25..40: note = [barcode part1], nnnnnnnnnnnnnnnn = one of SEQ ID NOS:127-45126
  misc_difference 60..71: note = [barcode part2], nnnnnnnnnnnn = one of SEQ ID NOS:45127-47561
  misc_difference 94..99: note = n = g, a, c or t
  misc_difference 100..109: note = n = g, a, c or t, may be present or absent
  source 1..109: mol_type = other DNA
attaggagacacaatagggaggcannnnnnnnnnnnnnnngctgagacatgtgaagaggnnnnnnnnnnnngctcttcggagggaddddddddnnnnnnnnnnnnnnnn

SEQ ID NO: 111 - DNA, 109 bp, synthetic construct
  misc_feature 1..109: note = synthetic primer barcode_adapter_5c_randomer
  misc_difference 25..40: note = [barcode part1], nnnnnnnnnnnnnnnn = one of SEQ ID NOS:127-45126
  misc_difference 60..71: note = [barcode part2], nnnnnnnnnnnn = one of SEQ ID NOS:45127-47561
  misc_difference 94..99: note = n = g, a, c or t
  misc_difference 100..109: note = n = g, a, c or t, may be present or absent
  source 1..109: mol_type = other DNA
attaggagacacaatagggaggcannnnnnnnnnnnnnnngctgagacatgtgaagaggnnnnnnnnnnnntcgtctcggagggaddddddddnnnnnnnnnnnnnnnn

SEQ ID NO: 112 - DNA, 109 bp, synthetic construct
  misc_feature 1..109: note = synthetic primer barcode_adapter_5c_randomer
  misc_difference 25..40: note = [barcode part1], nnnnnnnnnnnnnnnn = one of SEQ ID NOS:127-45126
  misc_difference 60..71: note = [barcode part2], nnnnnnnnnnnn = one of SEQ ID NOS:45127-47561
  misc_difference 94..99: note = n = g, a, c or t
  misc_difference 100..109: note = n = g, a, c or t, may be present or absent
  source 1..109: mol_type = other DNA
attaggagacacaatagggaggcannnnnnnnnnnnnnnngctgagacatgtgaagaggnnnnnnnnnnnnacctcagcgagggaddddddddnnnnnnnnnnnnnnnn

SEQ ID NO: 113 - DNA, 57 bp, synthetic construct
  misc_feature 1..57: note = synthetic primer 3'_adapter_PCR_oligodT
  source 1..57: mol_type = other DNA
attaggagacacaatagggaggcaddddddddttttttttttttttttttttttttt

SEQ ID NO: 114 - DNA, 48 bp, synthetic construct
  misc_feature 1..48: note = synthetic primer 3'_adapter_PCR_randomer
  misc_difference 33..38: note = n = g, a, c or t
  misc_difference 39..48: note = n = g, a, c or t, may be present or absent
  source 1..48: mol_type = other DNA
attaggagacacaatagggaggcaddddddddnnnnnnnnnnnnnnnn

SEQ ID NO: 115 - DNA, 93 bp, synthetic construct
  misc_feature 1..93: note = synthetic primer 5'_PCR_barcode_adapter_primer
  misc_difference 22..37: note = [barcode part1], nnnnnnnnnnnnnnnn = one of SEQ ID NOS:127-45126
  misc_difference 57..68: note = [barcode part2], nnnnnnnnnnnn = one of SEQ ID NOS:45127-47561
  source 1..93: mol_type = other DNA
ggcgaccaccgagatctacacnnnnnnnnnnnnnnnngctgagacatgtgaagaggnnnnnnnnnnnnggaagatagggataacagggtaatg

SEQ ID NO: 116 - DNA, 24 bp, synthetic construct
  misc_feature 1..24: note = synthetic primer 3'_PCR_primer
  source 1..24: mol_type = other DNA
attaggagacacaatagggaggca

SEQ ID NO: 117 - DNA, 25 bp, synthetic construct
  misc_feature 1..25: note = synthetic forward primer 5'_PCR_primer
  source 1..25: mol_type = other DNA
ggaagatagggataacagggtaatg

SEQ ID NO: 118 - DNA, 97 bp, synthetic construct
  misc_feature 1..97: note = synthetic reverse primer 3'_PCR_barcode_adapter_primer
  misc_difference 27..42: note = [barcode part1], nnnnnnnnnnnnnnnn = one of SEQ ID NOS:127-45126
  misc_difference 62..73: note = [barcode part2], nnnnnnnnnnnn = one of SEQ ID NOS:45127-47561
  source 1..97: mol_type = other DNA
gtgggctcggagatgtgtataagagannnnnnnnnnnnnnnngctgagacatgtgaagaggnnnnnnnnnnnnattaggagacacaatagggaggca

SEQ ID NO: 119 - DNA, 545 bp, synthetic construct
  misc_feature 1..545: note = synthetic oligo Spike-In
  source 1..545: mol_type = other DNA
atcgtctaatacgactcactatagggtccctgagctgaacgggaaggaaggctggggctcatttgaggtgcagctgttggagatgacccagtctccagcctccctgcgtcatgggtgtgaaccattagctgtgctcgcgctactctctctttctggcctggaggctatccagcacagcgacacccactcctccgtactccaaagattcaggtttactcacgtcatccagcagagaatggaaagtcaaatttcctgaattgctatgtgtctgggtttcatccatccgacattgaagttgacttactgaagaatggagagagaattgaaaaagtggagcattcagacttgtctttcagcaaggactggtctttctatctcttgtactacactgaattcacccccactgaaaaagatgagtatgcctgccgtgtgaaccatgtgactttgtcacagcccaagatagttaagtgggcacaaagagcttcaacaggggagaatcgagacatgtaagcagcatcatggagctgggctgcctggtcaaggac

SEQ ID NO: 120 - DNA, 29 bp, synthetic construct
  misc_feature 1..29: note = synthetic primer SPIKEIN-FW
  source 1..29: mol_type = other DNA
atcgtctaatacgactcactatagggtcc

SEQ ID NO: 121 - DNA, 56 bp, synthetic construct
  misc_feature 1..56: note = synthetic primer SPIKEIN-RV
  source 1..56: mol_type = other DNA
tttttttttttttttttttttttttttttttttttgtccttgaccaggcagcccag

SEQ ID NO: 122 - DNA, 49 bp, synthetic construct
  misc_feature 1..49: note = synthetic oligo wellID-adapter
  misc_feature 1..49: note = Description of Combined DNA/RNA Molecule: synthetic oligo wellID-adapter
  misc_difference 22..42: note = [well-barcode], nnnnnnnnnnnnnnnnnnnnn = one of SE ID NOS:47606-47711
  source 1..49: mol_type = other DNA
cacgaccggtgctcgatttagnnnnnnnnnnnnnnnnnnnnnaggaggg

SEQ ID NO: 123 - DNA, 98 bp, synthetic construct
  misc_feature 1..98: note = synthetic oligo Plate-ID
  misc_difference 39..77: note = [plate-barcode],; nnnnnnnnnnnnnnnnnnnnnnnnnnnnnnnnnnnnnnn = one of SEQ ID NOS:47712-47719
  source 1..98: mol_type = other DNA
gagagactgacagcgtatcgcctccctcgcgccatcagnnnnnnnnnnnnnnnnnnnnnnnnnnnnnnnnnnnnnnncacgaccggtgctcgatttag

SEQ ID NO: 124 - DNA, 27 bp, synthetic construct
  misc_feature 1..27: note = synthetic shared barcode of paired heavy and light chain sequences
  source 1..27: mol_type = other DNA
gccgaccacggcacaagcgccgaaaat

SEQ ID NO: 125 - protein, 140 aa, synthetic construct
  REGION 1..140: note = synthetic paired heavy chain sequence produced from shared barcode
MEFGLSWLFLVAILKGVQCGVQLLESGGGLVQPGGSLRLSCAGSQFTFSTYAMNWVRQAPGKGLEWVSGISGDGYRIQYADSVEGRFSISRDNSNNMVYLQMTSLRAEDTAVYFCAKDLFPRTIGYFDYWGQGTRVTVSS

SEQ ID NO: 126 - protein, 126 aa, synthetic construct
  REGION 1..126: note = synthetic paired light chain sequence produced from shared barcode
MEAPAQLLFLLLLWLPDTTGKIVMTQSPATLSVSPGERATLSCRASQSISINLAWYQHKPGQAPRLLIYGASTRATAIPARFSGSVSGTEFTLTISSLQSEDFAVYYCQQYDDWPRTFGQGTKVEI

SEQ ID NO: 127 - DNA, 16 bp, synthetic construct
  misc_feature 1..16: note = synthetic [barcode part1]
  source 1..16: mol_type = other DNA
aatcctcagtcgtact

SEQ ID NO: 128 - DNA, 16 bp, synthetic construct
  misc_feature 1..16: note = synthetic [barcode part1]
  source 1..16: mol_type = other DNA
atacgcagtcgtaacc

SEQ ID NO: 129 - DNA, 16 bp, synthetic construct
  misc_feature 1..16: note = synthetic [barcode part1]
  source 1..16: mol_type = other DNA
ccttgtgcaacaattc

SEQ ID NO: 130 - DNA, 16 bp, synthetic construct
  misc_feature 1..16: note = synthetic [barcode part1]
  source 1..16: mol_type = other DNA
gaccagacctgtgaag

SEQ ID NO: 131 - DNA, 16 bp, synthetic construct
  misc_feature 1..16: note = synthetic [barcode part1]
  source 1..16: mol_type = other DNA
tctctcggaacacctg

SEQ ID NO: 132 - DNA, 16 bp, synthetic construct
  misc_feature 1..16: note = synthetic [barcode part1]
  source 1..16: mol_type = other DNA
cgtcacgtgattaacg

SEQ ID NO: 133 - DNA, 16 bp, synthetic construct
  misc_feature 1..16: note = synthetic [barcode part1]
  source 1..16: mol_type = other DNA
cctaccttgtctatcg

SEQ ID NO: 134 - DNA, 16 bp, synthetic construct
  misc_feature 1..16: note = synthetic [barcode part1]
  source 1..16: mol_type = other DNA
agatcggacgcgttag

SEQ ID NO: 135 - DNA, 16 bp, synthetic construct
  misc_feature 1..16: note = synthetic [barcode part1]
  source 1..16: mol_type = other DNA
agataaggacgccgtc

SEQ ID NO: 136 - DNA, 16 bp, synthetic construct
  misc_feature 1..16: note = synthetic [barcode part1]
  source 1..16: mol_type = other DNA
atccggacttgttact

SEQ ID NO: 137 - DNA, 16 bp, synthetic construct
  misc_feature 1..16: note = synthetic [barcode part1]
  source 1..16: mol_type = other DNA
cactgtactggaactg

SEQ ID NO: 138 - DNA, 16 bp, synthetic construct
  misc_feature 1..16: note = synthetic [barcode part1]
  source 1..16: mol_type = other DNA
tgacgcactctcggtt

SEQ ID NO: 139 - DNA, 16 bp, synthetic construct
  misc_feature 1..16: note = synthetic [barcode part1]
  source 1..16: mol_type = other DNA
gtgtcctatcaagttc

SEQ ID NO: 140 - DNA, 16 bp, synthetic construct
  misc_feature 1..16: note = synthetic [barcode part1]
  source 1..16: mol_type = other DNA
gaggtagtgttcggac

SEQ ID NO: 141 - DNA, 16 bp, synthetic construct
  misc_feature 1..16: note = synthetic [barcode part1]
  source 1..16: mol_type = other DNA
cgagatcaccagttgt

SEQ ID NO: 142 - DNA, 16 bp, synthetic construct
  misc_feature 1..16: note = synthetic [barcode part1]
  source 1..16: mol_type = other DNA
tgcgtcctgttggact

SEQ ID NO: 143 - DNA, 16 bp, synthetic construct
  misc_feature 1..16: note = synthetic [barcode part1]
  source 1..16: mol_type = other DNA
tgaggtcaaggttcct

SEQ ID NO: 144 - DNA, 16 bp, synthetic construct
  misc_feature 1..16: note = synthetic [barcode part1]
  source 1..16: mol_type = other DNA
aactaccacggttcag

SEQ ID NO: 145 - DNA, 16 bp, synthetic construct
  misc_feature 1..16: note = synthetic [barcode part1]
  source 1..16: mol_type = other DNA
caactaggttgcaacc

SEQ ID NO: 146 - DNA, 16 bp, synthetic construct
  misc_feature 1..16: note = synthetic [barcode part1]
  source 1..16: mol_type = other DNA
cctaagtcgccttgtg

SEQ ID NO: 147 - DNA, 16 bp, synthetic construct
  misc_feature 1..16: note = synthetic [barcode part1]
  source 1..16: mol_type = other DNA
acggtgtccaagactt

SEQ ID NO: 148 - DNA, 16 bp, synthetic construct
  misc_feature 1..16: note = synthetic [barcode part1]
  source 1..16: mol_type = other DNA
ttcgattcacgtggcc

SEQ ID NO: 149 - DNA, 16 bp, synthetic construct
  misc_feature 1..16: note = synthetic [barcode part1]
  source 1..16: mol_type = other DNA
cacaccgaactcttcg

SEQ ID NO: 150 - DNA, 16 bp, synthetic construct
  misc_feature 1..16: note = synthetic [barcode part1]
  source 1..16: mol_type = other DNA
tgcgtcttcgtatctc

SEQ ID NO: 151 - DNA, 16 bp, synthetic construct
  misc_feature 1..16: note = synthetic [barcode part1]
  source 1..16: mol_type = other DNA
caggttagattcgacc

SEQ ID NO: 152 - DNA, 16 bp, synthetic construct
  misc_feature 1..16: note = synthetic [barcode part1]
  source 1..16: mol_type = other DNA
tgtggaggttgccaag

SEQ ID NO: 153 - DNA, 16 bp, synthetic construct
  misc_feature 1..16: note = synthetic [barcode part1]
  source 1..16: mol_type = other DNA
tagaagaccaagaggc

SEQ ID NO: 154 - DNA, 16 bp, synthetic construct
  misc_feature 1..16: note = synthetic [barcode part1]
  source 1..16: mol_type = other DNA
tggtactagtgttgcg

SEQ ID NO: 155 - DNA, 16 bp, synthetic construct
  misc_feature 1..16: note = synthetic [barcode part1]
  source 1..16: mol_type = other DNA
aggtccacggagagtt

SEQ ID NO: 156 - DNA, 16 bp, synthetic construct
  misc_feature 1..16: note = synthetic [barcode part1]
  source 1..16: mol_type = other DNA
gagacgaattctgtcc

SEQ ID NO: 157 - DNA, 16 bp, synthetic construct
  misc_feature 1..16: note = synthetic [barcode part1]
  source 1..16: mol_type = other DNA
tacgatcctccgtcag

SEQ ID NO: 158 - DNA, 16 bp, synthetic construct
  misc_feature 1..16: note = synthetic [barcode part1]
  source 1..16: mol_type = other DNA
aacgtacaaccgaggc

SEQ ID NO: 159 - DNA, 16 bp, synthetic construct
  misc_feature 1..16: note = synthetic [barcode part1]
  source 1..16: mol_type = other DNA
tgtacacgtaccacag

SEQ ID NO: 160 - DNA, 16 bp, synthetic construct
  misc_feature 1..16: note = synthetic [barcode part1]
  source 1..16: mol_type = other DNA
tcggccttactctact

SEQ ID NO: 161 - DNA, 16 bp, synthetic construct
  misc_feature 1..16: note = synthetic [barcode part1]
  source 1..16: mol_type = other DNA
gtaacggatagtcgcg

SEQ ID NO: 162 - DNA, 16 bp, synthetic construct
  misc_feature 1..16: note = synthetic [barcode part1]
  source 1..16: mol_type = other DNA
ataatcacgaccacgc

SEQ ID NO: 163 - DNA, 16 bp, synthetic construct
  misc_feature 1..16: note = synthetic [barcode part1]
  source 1..16: mol_type = other DNA
tccgatctgtgcagtc

SEQ ID NO: 164 - DNA, 16 bp, synthetic construct
  misc_feature 1..16: note = synthetic [barcode part1]
  source 1..16: mol_type = other DNA
cctctagtcgattctc

SEQ ID NO: 165 - DNA, 16 bp, synthetic construct
  misc_feature 1..16: note = synthetic [barcode part1]
  source 1..16: mol_type = other DNA
gtccttatactggact

SEQ ID NO: 166 - DNA, 16 bp, synthetic construct
  misc_feature 1..16: note = synthetic [barcode part1]
  source 1..16: mol_type = other DNA
atctgactcttcacag

SEQ ID NO: 167 - DNA, 16 bp, synthetic construct
  misc_feature 1..16: note = synthetic [barcode part1]
  source 1..16: mol_type = other DNA
ccggtgttatacagtg

SEQ ID NO: 168 - DNA, 16 bp, synthetic construct
  misc_feature 1..16: note = synthetic [barcode part1]
  source 1..16: mol_type = other DNA
atactctactaccgac

SEQ ID NO: 169 - DNA, 16 bp, synthetic construct
  misc_feature 1..16: note = synthetic [barcode part1]
  source 1..16: mol_type = other DNA
tgtggttgaggcagtg

SEQ ID NO: 170 - DNA, 16 bp, synthetic construct
  misc_feature 1..16: note = synthetic [barcode part1]
  source 1..16: mol_type = other DNA
gacgtgattacactcg

SEQ ID NO: 171 - DNA, 16 bp, synthetic construct
  misc_feature 1..16: note = synthetic [barcode part1]
  source 1..16: mol_type = other DNA
ttccaaccagtggagt

SEQ ID NO: 172 - DNA, 16 bp, synthetic construct
  misc_feature 1..16: note = synthetic [barcode part1]
  source 1..16: mol_type = other DNA
gacaggatcggtacac

SEQ ID NO: 173 - DNA, 16 bp, synthetic construct
  misc_feature 1..16: note = synthetic [barcode part1]
  source 1..16: mol_type = other DNA
tacggttgtgtccaag

SEQ ID NO: 174 - DNA, 16 bp, synthetic construct
  misc_feature 1..16: note = synthetic [barcode part1]
  source 1..16: mol_type = other DNA
ccagtccagacgttct

SEQ ID NO: 175 - DNA, 16 bp, synthetic construct
  misc_feature 1..16: note = synthetic [barcode part1]
  source 1..16: mol_type = other DNA
tccgtacagtccaacc

SEQ ID NO: 176 - DNA, 16 bp, synthetic construct
  misc_feature 1..16: note = synthetic [barcode part1]
  source 1..16: mol_type = other DNA
taagtagaacgccgcg

SEQ ID NO: 177 - DNA, 16 bp, synthetic construct
  misc_feature 1..16: note = synthetic [barcode part1]
  source 1..16: mol_type = other DNA
actggtgatagagtgt

SEQ ID NO: 178 - DNA, 16 bp, synthetic construct
  misc_feature 1..16: note = synthetic [barcode part1]
  source 1..16: mol_type = other DNA
gtagactgccgaagac

SEQ ID NO: 179 - DNA, 16 bp, synthetic construct
  misc_feature 1..16: note = synthetic [barcode part1]
  source 1..16: mol_type = other DNA
acagagactctgcact

SEQ ID NO: 180 - DNA, 16 bp, synthetic construct
  misc_feature 1..16: note = synthetic [barcode part1]
  source 1..16: mol_type = other DNA
tccttcgagatatctg

SEQ ID NO: 181 - DNA, 16 bp, synthetic construct
  misc_feature 1..16: note = synthetic [barcode part1]
  source 1..16: mol_type = other DNA
gtcttcggataacttc

SEQ ID NO: 182 - DNA, 16 bp, synthetic construct
  misc_feature 1..16: note = synthetic [barcode part1]
  source 1..16: mol_type = other DNA
cacaacttggccttcg

SEQ ID NO: 183 - DNA, 16 bp, synthetic construct
  misc_feature 1..16: note = synthetic [barcode part1]
  source 1..16: mol_type = other DNA
gcctcacttgcacagt

SEQ ID NO: 184 - DNA, 16 bp, synthetic construct
  misc_feature 1..16: note = synthetic [barcode part1]
  source 1..16: mol_type = other DNA
gtgtggtacaccaact

SEQ ID NO: 185 - DNA, 16 bp, synthetic construct
  misc_feature 1..16: note = synthetic [barcode part1]
  source 1..16: mol_type = other DNA
gtacgcagttacggtt

SEQ ID NO: 186 - DNA, 16 bp, synthetic construct
  misc_feature 1..16: note = synthetic [barcode part1]
  source 1..16: mol_type = other DNA
gaacagaacgagtggt

SEQ ID NO: 187 - DNA, 16 bp, synthetic construct
  misc_feature 1..16: note = synthetic [barcode part1]
  source 1..16: mol_type = other DNA
caccaggtgaactatc

SEQ ID NO: 188 - DNA, 16 bp, synthetic construct
  misc_feature 1..16: note = synthetic [barcode part1]
  source 1..16: mol_type = other DNA
gtcctggaatcctaag

SEQ ID NO: 189 - DNA, 16 bp, synthetic construct
  misc_feature 1..16: note = synthetic [barcode part1]
  source 1..16: mol_type = other DNA
gcgtcgtacctattcg

SEQ ID NO: 190 - DNA, 16 bp, synthetic construct
  misc_feature 1..16: note = synthetic [barcode part1]
  source 1..16: mol_type = other DNA
tgcggatataacgagt

SEQ ID NO: 191 - DNA, 16 bp, synthetic construct
  misc_feature 1..16: note = synthetic [barcode part1]
  source 1..16: mol_type = other DNA
acgttccactactggc

SEQ ID NO: 192 - DNA, 16 bp, synthetic construct
  misc_feature 1..16: note = synthetic [barcode part1]
  source 1..16: mol_type = other DNA
tgcaactaggagttag

SEQ ID NO: 193 - DNA, 16 bp, synthetic construct
  misc_feature 1..16: note = synthetic [barcode part1]
  source 1..16: mol_type = other DNA
atcaacctgtgtgcag

SEQ ID NO: 194 - DNA, 16 bp, synthetic construct
  misc_feature 1..16: note = synthetic [barcode part1]
  source 1..16: mol_type = other DNA
gcaaccggttatacac

SEQ ID NO: 195 - DNA, 16 bp, synthetic construct
  misc_feature 1..16: note = synthetic [barcode part1]
  source 1..16: mol_type = other DNA
aagaggtgagtactct

SEQ ID NO: 196 - DNA, 16 bp, synthetic construct
  misc_feature 1..16: note = synthetic [barcode part1]
  source 1..16: mol_type = other DNA
aacctgaccaacagtc

SEQ ID NO: 197 - DNA, 16 bp, synthetic construct
  misc_feature 1..16: note = synthetic [barcode part1]
  source 1..16: mol_type = other DNA
aggtatccgtcgtctc

SEQ ID NO: 198 - DNA, 16 bp, synthetic construct
  misc_feature 1..16: note = synthetic [barcode part1]
  source 1..16: mol_type = other DNA
ataacacggcctcagt

SEQ ID NO: 199 - DNA, 16 bp, synthetic construct
  misc_feature 1..16: note = synthetic [barcode part1]
  source 1..16: mol_type = other DNA
cagttagatactgcgc

SEQ ID NO: 200 - DNA, 16 bp, synthetic construct
  misc_feature 1..16: note = synthetic [barcode part1]
  source 1..16: mol_type = other DNA
cgtgaccgttaccttg

SEQ ID NO: 201 - DNA, 16 bp, synthetic construct
  misc_feature 1..16: note = synthetic [barcode part1]
  source 1..16: mol_type = other DNA
cgtgtggtattagtgc

SEQ ID NO: 202 - DNA, 16 bp, synthetic construct
  misc_feature 1..16: note = synthetic [barcode part1]
  source 1..16: mol_type = other DNA
acgtaacggaatcggc

SEQ ID NO: 203 - DNA, 16 bp, synthetic construct
  misc_feature 1..16: note = synthetic [barcode part1]
  source 1..16: mol_type = other DNA
acttgtgtcttaccag

SEQ ID NO: 204 - DNA, 16 bp, synthetic construct
  misc_feature 1..16: note = synthetic [barcode part1]
  source 1..16: mol_type = other DNA
cgtacgcgttaatcag

SEQ ID NO: 205 - DNA, 16 bp, synthetic construct
  misc_feature 1..16: note = synthetic [barcode part1]
  source 1..16: mol_type = other DNA
gcaggtaagtggatag

SEQ ID NO: 206 - DNA, 16 bp, synthetic construct
  misc_feature 1..16: note = synthetic [barcode part1]
  source 1..16: mol_type = other DNA
gccagacaacgtagac

SEQ ID NO: 207 - DNA, 16 bp, synthetic construct
  misc_feature 1..16: note = synthetic [barcode part1]
  source 1..16: mol_type = other DNA
tgcgtaggtgatcgtt

SEQ ID NO: 208 - DNA, 16 bp, synthetic construct
  misc_feature 1..16: note = synthetic [barcode part1]
  source 1..16: mol_type = other DNA
agatattgtctgcggc

SEQ ID NO: 209 - DNA, 16 bp, synthetic construct
  misc_feature 1..16: note = synthetic [barcode part1]
  source 1..16: mol_type = other DNA
tggccttcttcttgac

SEQ ID NO: 210 - DNA, 16 bp, synthetic construct
  misc_feature 1..16: note = synthetic [barcode part1]
  source 1..16: mol_type = other DNA
agatcaaggaagaccg

SEQ ID NO: 211 - DNA, 16 bp, synthetic construct
  misc_feature 1..16: note = synthetic [barcode part1]
  source 1..16: mol_type = other DNA
tacgacggcagacagt

SEQ ID NO: 212 - DNA, 16 bp, synthetic construct
  misc_feature 1..16: note = synthetic [barcode part1]
  source 1..16: mol_type = other DNA
tgaattgtcctgcgtt

SEQ ID NO: 213 - DNA, 16 bp, synthetic construct
  misc_feature 1..16: note = synthetic [barcode part1]
  source 1..16: mol_type = other DNA
gacaaccttggtgact

SEQ ID NO: 214 - DNA, 16 bp, synthetic construct
  misc_feature 1..16: note = synthetic [barcode part1]
  source 1..16: mol_type = other DNA
ttggactatatcctcg

SEQ ID NO: 215 - DNA, 16 bp, synthetic construct
  misc_feature 1..16: note = synthetic [barcode part1]
  source 1..16: mol_type = other DNA
aagttgaacgcgccag

SEQ ID NO: 216 - DNA, 16 bp, synthetic construct
  misc_feature 1..16: note = synthetic [barcode part1]
  source 1..16: mol_type = other DNA
gtagtctgatacagag

SEQ ID NO: 217 - DNA, 16 bp, synthetic construct
  misc_feature 1..16: note = synthetic [barcode part1]
  source 1..16: mol_type = other DNA
ccggtctagatcaagt

SEQ ID NO: 218 - DNA, 16 bp, synthetic construct
  misc_feature 1..16: note = synthetic [barcode part1]
  source 1..16: mol_type = other DNA
tcttcagactggtact

SEQ ID NO: 219 - DNA, 16 bp, synthetic construct
  misc_feature 1..16: note = synthetic [barcode part1]
  source 1..16: mol_type = other DNA
cggacgcgttattcct

SEQ ID NO: 220 - DNA, 16 bp, synthetic construct
  misc_feature 1..16: note = synthetic [barcode part1]
  source 1..16: mol_type = other DNA
actgaggaattctccg

SEQ ID NO: 221 - DNA, 16 bp, synthetic construct
  misc_feature 1..16: note = synthetic [barcode part1]
  source 1..16: mol_type = other DNA
ccgccacttcagatac

SEQ ID NO: 222 - DNA, 16 bp, synthetic construct
  misc_feature 1..16: note = synthetic [barcode part1]
  source 1..16: mol_type = other DNA
ttggcaggtggagact

SEQ ID NO: 223 - DNA, 16 bp, synthetic construct
  misc_feature 1..16: note = synthetic [barcode part1]
  source 1..16: mol_type = other DNA
taggaagtcctctggt

SEQ ID NO: 224 - DNA, 16 bp, synthetic construct
  misc_feature 1..16: note = synthetic [barcode part1]
  source 1..16: mol_type = other DNA
attgttcgttcacgac

SEQ ID NO: 225 - DNA, 16 bp, synthetic construct
  misc_feature 1..16: note = synthetic [barcode part1]
  source 1..16: mol_type = other DNA
cgttgtaaggattccg

SEQ ID NO: 226 - DNA, 16 bp, synthetic construct
  misc_feature 1..16: note = synthetic [barcode part1]
  source 1..16: mol_type = other DNA
cgaccacacttcctag

SEQ ID NO: 227 - DNA, 16 bp, synthetic construct
  misc_feature 1..16: note = synthetic [barcode part1]
  source 1..16: mol_type = other DNA
tgcggacctgtcttac

SEQ ID NO: 228 - DNA, 16 bp, synthetic construct
  misc_feature 1..16: note = synthetic [barcode part1]
  source 1..16: mol_type = other DNA
taacagaggtaaggcg

SEQ ID NO: 229 - DNA, 16 bp, synthetic construct
  misc_feature 1..16: note = synthetic [barcode part1]
  source 1..16: mol_type = other DNA
ccagtgaattctcgtt

SEQ ID NO: 230 - DNA, 16 bp, synthetic construct
  misc_feature 1..16: note = synthetic [barcode part1]
  source 1..16: mol_type = other DNA
aacaccggattgacct

SEQ ID NO: 231 - DNA, 16 bp, synthetic construct
  misc_feature 1..16: note = synthetic [barcode part1]
  source 1..16: mol_type = other DNA
tcaacagataaggacc

SEQ ID NO: 232 - DNA, 16 bp, synthetic construct
  misc_feature 1..16: note = synthetic [barcode part1]
  source 1..16: mol_type = other DNA
acacacgaccgtagtt

SEQ ID NO: 233 - DNA, 16 bp, synthetic construct
  misc_feature 1..16: note = synthetic [barcode part1]
  source 1..16: mol_type = other DNA
gaagataccgccagac

SEQ ID NO: 234 - DNA, 16 bp, synthetic construct
  misc_feature 1..16: note = synthetic [barcode part1]
  source 1..16: mol_type = other DNA
ttgtgaggcctctcac

SEQ ID NO: 235 - DNA, 16 bp, synthetic construct
  misc_feature 1..16: note = synthetic [barcode part1]
  source 1..16: mol_type = other DNA
aatccggaagatacgt

SEQ ID NO: 236 - DNA, 16 bp, synthetic construct
  misc_feature 1..16: note = synthetic [barcode part1]
  source 1..16: mol_type = other DNA
agtagtctaatccggc

SEQ ID NO: 237 - DNA, 16 bp, synthetic construct
  misc_feature 1..16: note = synthetic [barcode part1]
  source 1..16: mol_type = other DNA
taagtgcaccgaggac

SEQ ID NO: 238 - DNA, 16 bp, synthetic construct
  misc_feature 1..16: note = synthetic [barcode part1]
  source 1..16: mol_type = other DNA
acgtctcttgagtcgc

SEQ ID NO: 239 - DNA, 16 bp, synthetic construct
  misc_feature 1..16: note = synthetic [barcode part1]
  source 1..16: mol_type = other DNA
aacgatcttggcgatc

SEQ ID NO: 240 - DNA, 16 bp, synthetic construct
  misc_feature 1..16: note = synthetic [barcode part1]
  source 1..16: mol_type = other DNA
aacgaggtaatcctcc

SEQ ID NO: 241 - DNA, 16 bp, synthetic construct
  misc_feature 1..16: note = synthetic [barcode part1]
  source 1..16: mol_type = other DNA
aatccgtgtagtagag

SEQ ID NO: 242 - DNA, 16 bp, synthetic construct
  misc_feature 1..16: note = synthetic [barcode part1]
  source 1..16: mol_type = other DNA
aagttgcaagtgtgac

SEQ ID NO: 243 - DNA, 16 bp, synthetic construct
  misc_feature 1..16: note = synthetic [barcode part1]
  source 1..16: mol_type = other DNA
gcctattaggcagact

SEQ ID NO: 244 - DNA, 16 bp, synthetic construct
  misc_feature 1..16: note = synthetic [barcode part1]
  source 1..16: mol_type = other DNA
aacactggttgactgc

SEQ ID NO: 245 - DNA, 16 bp, synthetic construct
  misc_feature 1..16: note = synthetic [barcode part1]
  source 1..16: mol_type = other DNA
tgcctcttcggtagtg

SEQ ID NO: 246 - DNA, 16 bp, synthetic construct
  misc_feature 1..16: note = synthetic [barcode part1]
  source 1..16: mol_type = other DNA
aattgagagaccggag

SEQ ID NO: 247 - DNA, 16 bp, synthetic construct
  misc_feature 1..16: note = synthetic [barcode part1]
  source 1..16: mol_type = other DNA
tagttcggatacgaag

SEQ ID NO: 248 - DNA, 16 bp, synthetic construct
  misc_feature 1..16: note = synthetic [barcode part1]
  source 1..16: mol_type = other DNA
ccgaggcgatactatt

SEQ ID NO: 249 - DNA, 16 bp, synthetic construct
  misc_feature 1..16: note = synthetic [barcode part1]
  source 1..16: mol_type = other DNA
tctgtataccgagttc

SEQ ID NO: 250 - DNA, 16 bp, synthetic construct
  misc_feature 1..16: note = synthetic [barcode part1]
  source 1..16: mol_type = other DNA
cactgccggtaatagt

SEQ ID NO: 251 - DNA, 16 bp, synthetic construct
  misc_feature 1..16: note = synthetic [barcode part1]
  source 1..16: mol_type = other DNA
tcggaattgtctgttc

SEQ ID NO: 252 - DNA, 16 bp, synthetic construct
  misc_feature 1..16: note = synthetic [barcode part1]
  source 1..16: mol_type = other DNA
aatcggttcggtcaac

SEQ ID NO: 253 - DNA, 16 bp, synthetic construct
  misc_feature 1..16: note = synthetic [barcode part1]
  source 1..16: mol_type = other DNA
gccttaccagattcgc

SEQ ID NO: 254 - DNA, 16 bp, synthetic construct
  misc_feature 1..16: note = synthetic [barcode part1]
  source 1..16: mol_type = other DNA
tacgtaccacagtacg

SEQ ID NO: 255 - DNA, 16 bp, synthetic construct
  misc_feature 1..16: note = synthetic [barcode part1]
  source 1..16: mol_type = other DNA
aggtctgtagaagact

SEQ ID NO: 256 - DNA, 16 bp, synthetic construct
  misc_feature 1..16: note = synthetic [barcode part1]
  source 1..16: mol_type = other DNA
cagatctgtagtgaag

SEQ ID NO: 257 - DNA, 16 bp, synthetic construct
  misc_feature 1..16: note = synthetic [barcode part1]
  source 1..16: mol_type = other DNA
tcacacaggaggatcg

SEQ ID NO: 258 - DNA, 16 bp, synthetic construct
  misc_feature 1..16: note = synthetic [barcode part1]
  source 1..16: mol_type = other DNA
gcaggtacagaatccg

SEQ ID NO: 259 - DNA, 16 bp, synthetic construct
  misc_feature 1..16: note = synthetic [barcode part1]
  source 1..16: mol_type = other DNA
attcaatccgacggtg

SEQ ID NO: 260 - DNA, 16 bp, synthetic construct
  misc_feature 1..16: note = synthetic [barcode part1]
  source 1..16: mol_type = other DNA
tcaacgagtgaagatc

SEQ ID NO: 261 - DNA, 16 bp, synthetic construct
  misc_feature 1..16: note = synthetic [barcode part1]
  source 1..16: mol_type = other DNA
ccactgtgaattcgcc

SEQ ID NO: 262 - DNA, 16 bp, synthetic construct
  misc_feature 1..16: note = synthetic [barcode part1]
  source 1..16: mol_type = other DNA
tcgccttgcgtgattg

SEQ ID NO: 263 - DNA, 16 bp, synthetic construct
  misc_feature 1..16: note = synthetic [barcode part1]
  source 1..16: mol_type = other DNA
gaggtagataagttcc

SEQ ID NO: 264 - DNA, 16 bp, synthetic construct
  misc_feature 1..16: note = synthetic [barcode part1]
  source 1..16: mol_type = other DNA
gttcctaacggtccgt

SEQ ID NO: 265 - DNA, 16 bp, synthetic construct
  misc_feature 1..16: note = synthetic [barcode part1]
  source 1..16: mol_type = other DNA
gcaatcgagaagactt

SEQ ID NO: 266 - DNA, 16 bp, synthetic construct
  misc_feature 1..16: note = synthetic [barcode part1]
  source 1..16: mol_type = other DNA
accttcacgaatcact

SEQ ID NO: 267 - DNA, 16 bp, synthetic construct
  misc_feature 1..16: note = synthetic [barcode part1]
  source 1..16: mol_type = other DNA
cgcgcagacaactatt

SEQ ID NO: 268 - DNA, 16 bp, synthetic construct
  misc_feature 1..16: note = synthetic [barcode part1]
  source 1..16: mol_type = other DNA
acgactgcgatacact

SEQ ID NO: 269 - DNA, 16 bp, synthetic construct
  misc_feature 1..16: note = synthetic [barcode part1]
  source 1..16: mol_type = other DNA
aatcaagtccggttcg

SEQ ID NO: 270 - DNA, 16 bp, synthetic construct
  misc_feature 1..16: note = synthetic [barcode part1]
  source 1..16: mol_type = other DNA
gcactaagaaggccac

SEQ ID NO: 271 - DNA, 16 bp, synthetic construct
  misc_feature 1..16: note = synthetic [barcode part1]
  source 1..16: mol_type = other DNA
tcaacttctcgtagac

SEQ ID NO: 272 - DNA, 16 bp, synthetic construct
  misc_feature 1..16: note = synthetic [barcode part1]
  source 1..16: mol_type = other DNA
cacgcggtatcttatt

SEQ ID NO: 273 - DNA, 16 bp, synthetic construct
  misc_feature 1..16: note = synthetic [barcode part1]
  source 1..16: mol_type = other DNA
tctcgtgttgaatcac

SEQ ID NO: 274 - DNA, 16 bp, synthetic construct
  misc_feature 1..16: note = synthetic [barcode part1]
  source 1..16: mol_type = other DNA
atactctccaggttac

SEQ ID NO: 275 - DNA, 16 bp, synthetic construct
  misc_feature 1..16: note = synthetic [barcode part1]
  source 1..16: mol_type = other DNA
tgcaacgtactcgcct

SEQ ID NO: 276 - DNA, 16 bp, synthetic construct
  misc_feature 1..16: note = synthetic [barcode part1]
  source 1..16: mol_type = other DNA
atcagtggtccaagtc

SEQ ID NO: 277 - DNA, 16 bp, synthetic construct
  misc_feature 1..16: note = synthetic [barcode part1]
  source 1..16: mol_type = other DNA
taacgtgcggtgagac

SEQ ID NO: 278 - DNA, 16 bp, synthetic construct
  misc_feature 1..16: note = synthetic [barcode part1]
  source 1..16: mol_type = other DNA
tagagtaatccaggtg

SEQ ID NO: 279 - DNA, 16 bp, synthetic construct
  misc_feature 1..16: note = synthetic [barcode part1]
  source 1..16: mol_type = other DNA
ataccttcgtgccttc

SEQ ID NO: 280 - DNA, 16 bp, synthetic construct
  misc_feature 1..16: note = synthetic [barcode part1]
  source 1..16: mol_type = other DNA
gagttcaccaccactc

SEQ ID NO: 281 - DNA, 16 bp, synthetic construct
  misc_feature 1..16: note = synthetic [barcode part1]
  source 1..16: mol_type = other DNA
gtctgtcctacggtac

SEQ ID NO: 282 - DNA, 16 bp, synthetic construct
  misc_feature 1..16: note = synthetic [barcode part1]
  source 1..16: mol_type = other DNA
cgattggtgactgact

SEQ ID NO: 283 - DNA, 16 bp, synthetic construct
  misc_feature 1..16: note = synthetic [barcode part1]
  source 1..16: mol_type = other DNA
actcctaatccggcgt

SEQ ID NO: 284 - DNA, 16 bp, synthetic construct
  misc_feature 1..16: note = synthetic [barcode part1]
  source 1..16: mol_type = other DNA
actgtgattactcacc

SEQ ID NO: 285 - DNA, 16 bp, synthetic construct
  misc_feature 1..16: note = synthetic [barcode part1]
  source 1..16: mol_type = other DNA
gtgcagaaggttgtcg

SEQ ID NO: 286 - DNA, 16 bp, synthetic construct
  misc_feature 1..16: note = synthetic [barcode part1]
  source 1..16: mol_type = other DNA
ttggaatcgagtgagt

SEQ ID NO: 287 - DNA, 16 bp, synthetic construct
  misc_feature 1..16: note = synthetic [barcode part1]
  source 1..16: mol_type = other DNA
tgaggacagattgttg

SEQ ID NO: 288 - DNA, 16 bp, synthetic construct
  misc_feature 1..16: note = synthetic [barcode part1]
  source 1..16: mol_type = other DNA
tatactatcctgaccg

SEQ ID NO: 289 - DNA, 16 bp, synthetic construct
  misc_feature 1..16: note = synthetic [barcode part1]
  source 1..16: mol_type = other DNA
cgttgcgtgatatcag

SEQ ID NO: 290 - DNA, 16 bp, synthetic construct
  misc_feature 1..16: note = synthetic [barcode part1]
  source 1..16: mol_type = other DNA
agtccagactagacct

SEQ ID NO: 291 - DNA, 16 bp, synthetic construct
  misc_feature 1..16: note = synthetic [barcode part1]
  source 1..16: mol_type = other DNA
gacttaagtgtggagt

SEQ ID NO: 292 - DNA, 16 bp, synthetic construct
  misc_feature 1..16: note = synthetic [barcode part1]
  source 1..16: mol_type = other DNA
cacgtaatagacctgc

SEQ ID NO: 293 - DNA, 16 bp, synthetic construct
  misc_feature 1..16: note = synthetic [barcode part1]
  source 1..16: mol_type = other DNA
acgaggaccagattgc

SEQ ID NO: 294 - DNA, 16 bp, synthetic construct
  misc_feature 1..16: note = synthetic [barcode part1]
  source 1..16: mol_type = other DNA
gatccttaggacggtt

SEQ ID NO: 295 - DNA, 16 bp, synthetic construct
  misc_feature 1..16: note = synthetic [barcode part1]
  source 1..16: mol_type = other DNA
caaggtgatccttcag

SEQ ID NO: 296 - DNA, 16 bp, synthetic construct
  misc_feature 1..16: note = synthetic [barcode part1]
  source 1..16: mol_type = other DNA
gtgcgaacctgtattg

SEQ ID NO: 297 - DNA, 16 bp, synthetic construct
  misc_feature 1..16: note = synthetic [barcode part1]
  source 1..16: mol_type = other DNA
tctcgcgcagtagtct

SEQ ID NO: 298 - DNA, 16 bp, synthetic construct
  misc_feature 1..16: note = synthetic [barcode part1]
  source 1..16: mol_type = other DNA
tcttctactcgtagag

SEQ ID NO: 299 - DNA, 16 bp, synthetic construct
  misc_feature 1..16: note = synthetic [barcode part1]
  source 1..16: mol_type = other DNA
gaatcgccttatacct

SEQ ID NO: 300 - DNA, 16 bp, synthetic construct
  misc_feature 1..16: note = synthetic [barcode part1]
  source 1..16: mol_type = other DNA
agagtgactcgtcgtt

SEQ ID NO: 301 - DNA, 16 bp, synthetic construct
  misc_feature 1..16: note = synthetic [barcode part1]
  source 1..16: mol_type = other DNA
aggtgagattccggac

SEQ ID NO: 302 - DNA, 16 bp, synthetic construct
  misc_feature 1..16: note = synthetic [barcode part1]
  source 1..16: mol_type = other DNA
aactcactcgtaggtg

SEQ ID NO: 303 - DNA, 16 bp, synthetic construct
  misc_feature 1..16: note = synthetic [barcode part1]
  source 1..16: mol_type = other DNA
tgagtgcgttactctt

SEQ ID NO: 304 - DNA, 16 bp, synthetic construct
  misc_feature 1..16: note = synthetic [barcode part1]
  source 1..16: mol_type = other DNA
tgtactgactggtacg

SEQ ID NO: 305 - DNA, 16 bp, synthetic construct
  misc_feature 1..16: note = synthetic [barcode part1]
  source 1..16: mol_type = other DNA
gtatcacttcggagtg

SEQ ID NO: 306 - DNA, 16 bp, synthetic construct
  misc_feature 1..16: note = synthetic [barcode part1]
  source 1..16: mol_type = other DNA
aacgacttcttcacac

SEQ ID NO: 307 - DNA, 16 bp, synthetic construct
  misc_feature 1..16: note = synthetic [barcode part1]
  source 1..16: mol_type = other DNA
tagatcggtcactgac

SEQ ID NO: 308 - DNA, 16 bp, synthetic construct
  misc_feature 1..16: note = synthetic [barcode part1]
  source 1..16: mol_type = other DNA
caggttaccttgcacc

SEQ ID NO: 309 - DNA, 16 bp, synthetic construct
  misc_feature 1..16: note = synthetic [barcode part1]
  source 1..16: mol_type = other DNA
acaaccgatacgtcgt

SEQ ID NO: 310 - DNA, 16 bp, synthetic construct
  misc_feature 1..16: note = synthetic [barcode part1]
  source 1..16: mol_type = other DNA
acgagtcgatcacact

SEQ ID NO: 311 - DNA, 16 bp, synthetic construct
  misc_feature 1..16: note = synthetic [barcode part1]
  source 1..16: mol_type = other DNA
taccactaacacacct

SEQ ID NO: 312 - DNA, 16 bp, synthetic construct
  misc_feature 1..16: note = synthetic [barcode part1]
  source 1..16: mol_type = other DNA
ccaagacttgtctgtt

SEQ ID NO: 313 - DNA, 16 bp, synthetic construct
  misc_feature 1..16: note = synthetic [barcode part1]
  source 1..16: mol_type = other DNA
tcacagtacgttgcag

SEQ ID NO: 314 - DNA, 16 bp, synthetic construct
  misc_feature 1..16: note = synthetic [barcode part1]
  source 1..16: mol_type = other DNA
tatcggtcaatcgcag

SEQ ID NO: 315 - DNA, 16 bp, synthetic construct
  misc_feature 1..16: note = synthetic [barcode part1]
  source 1..16: mol_type = other DNA
cgtctctatacaggag

SEQ ID NO: 316 - DNA, 16 bp, synthetic construct
  misc_feature 1..16: note = synthetic [barcode part1]
  source 1..16: mol_type = other DNA
cgagtagtgttcgttg

SEQ ID NO: 317 - DNA, 16 bp, synthetic construct
  misc_feature 1..16: note = synthetic [barcode part1]
  source 1..16: mol_type = other DNA
cgtgcgtattgtagtg

SEQ ID NO: 318 - DNA, 16 bp, synthetic construct
  misc_feature 1..16: note = synthetic [barcode part1]
  source 1..16: mol_type = other DNA
gtcacgacaagactct

SEQ ID NO: 319 - DNA, 16 bp, synthetic construct
  misc_feature 1..16: note = synthetic [barcode part1]
  source 1..16: mol_type = other DNA
gttgatcctaggatcg

SEQ ID NO: 320 - DNA, 16 bp, synthetic construct
  misc_feature 1..16: note = synthetic [barcode part1]
  source 1..16: mol_type = other DNA
ttcaccggattcacgc

SEQ ID NO: 321 - DNA, 16 bp, synthetic construct
  misc_feature 1..16: note = synthetic [barcode part1]
  source 1..16: mol_type = other DNA
tctaccgtagttcctc

SEQ ID NO: 322 - DNA, 16 bp, synthetic construct
  misc_feature 1..16: note = synthetic [barcode part1]
  source 1..16: mol_type = other DNA
aggtctgtctggtcct

SEQ ID NO: 323 - DNA, 16 bp, synthetic construct
  misc_feature 1..16: note = synthetic [barcode part1]
  source 1..16: mol_type = other DNA
taggaggagaactgac

SEQ ID NO: 324 - DNA, 16 bp, synthetic construct
  misc_feature 1..16: note = synthetic [barcode part1]
  source 1..16: mol_type = other DNA
tagtcgttaccggtag

SEQ ID NO: 325 - DNA, 16 bp, synthetic construct
  misc_feature 1..16: note = synthetic [barcode part1]
  source 1..16: mol_type = other DNA
gatatcactggtcggt

SEQ ID NO: 326 - DNA, 16 bp, synthetic construct
  misc_feature 1..16: note = synthetic [barcode part1]
  source 1..16: mol_type = other DNA
gacgtactcaggaggt

SEQ ID NO: 327 - DNA, 16 bp, synthetic construct
  misc_feature 1..16: note = synthetic [barcode part1]
  source 1..16: mol_type = other DNA
ttcgagtgtagtcgtg

SEQ ID NO: 328 - DNA, 16 bp, synthetic construct
  misc_feature 1..16: note = synthetic [barcode part1]
  source 1..16: mol_type = other DNA
agacctagtctctcgc

SEQ ID NO: 329 - DNA, 16 bp, synthetic construct
  misc_feature 1..16: note = synthetic [barcode part1]
  source 1..16: mol_type = other DNA
gactctcgagaatcac

SEQ ID NO: 330 - DNA, 16 bp, synthetic construct
  misc_feature 1..16: note = synthetic [barcode part1]
  source 1..16: mol_type = other DNA
ccaacttagtgacggt

SEQ ID NO: 331 - DNA, 16 bp, synthetic construct
  misc_feature 1..16: note = synthetic [barcode part1]
  source 1..16: mol_type = other DNA
tctcttcaggagagac

SEQ ID NO: 332 - DNA, 16 bp, synthetic construct
  misc_feature 1..16: note = synthetic [barcode part1]
  source 1..16: mol_type = other DNA
atccaccggcgttatc

SEQ ID NO: 333 - DNA, 16 bp, synthetic construct
  misc_feature 1..16: note = synthetic [barcode part1]
  source 1..16: mol_type = other DNA
cagactggatccaact

SEQ ID NO: 334 - DNA, 16 bp, synthetic construct
  misc_feature 1..16: note = synthetic [barcode part1]
  source 1..16: mol_type = other DNA
tcactaggatcgtcag

SEQ ID NO: 335 - DNA, 16 bp, synthetic construct
  misc_feature 1..16: note = synthetic [barcode part1]
  source 1..16: mol_type = other DNA
gaccggttagtattgc

SEQ ID NO: 336 - DNA, 16 bp, synthetic construct
  misc_feature 1..16: note = synthetic [barcode part1]
  source 1..16: mol_type = other DNA
gaatcctgagaaggag

SEQ ID NO: 337 - DNA, 16 bp, synthetic construct
  misc_feature 1..16: note = synthetic [barcode part1]
  source 1..16: mol_type = other DNA
ccgttcgtccagagtt

SEQ ID NO: 338 - DNA, 16 bp, synthetic construct
  misc_feature 1..16: note = synthetic [barcode part1]
  source 1..16: mol_type = other DNA
agtaccgcgtggtatt

SEQ ID NO: 339 - DNA, 16 bp, synthetic construct
  misc_feature 1..16: note = synthetic [barcode part1]
  source 1..16: mol_type = other DNA
tcctcctcttcagagt

SEQ ID NO: 340 - DNA, 16 bp, synthetic construct
  misc_feature 1..16: note = synthetic [barcode part1]
  source 1..16: mol_type = other DNA
tctctctagaggagac

SEQ ID NO: 341 - DNA, 16 bp, synthetic construct
  misc_feature 1..16: note = synthetic [barcode part1]
  source 1..16: mol_type = other DNA
agtgatctcgacagtc

SEQ ID NO: 342 - DNA, 16 bp, synthetic construct
  misc_feature 1..16: note = synthetic [barcode part1]
  source 1..16: mol_type = other DNA
gagagtggtaggaatc

SEQ ID NO: 343 - DNA, 16 bp, synthetic construct
  misc_feature 1..16: note = synthetic [barcode part1]
  source 1..16: mol_type = other DNA
cacgttcctactggac

SEQ ID NO: 344 - DNA, 16 bp, synthetic construct
  misc_feature 1..16: note = synthetic [barcode part1]
  source 1..16: mol_type = other DNA
gtggagaccagactac

SEQ ID NO: 345 - DNA, 16 bp, synthetic construct
  misc_feature 1..16: note = synthetic [barcode part1]
  source 1..16: mol_type = other DNA
gcggaagtcggcaatt

SEQ ID NO: 346 - DNA, 16 bp, synthetic construct
  misc_feature 1..16: note = synthetic [barcode part1]
  source 1..16: mol_type = other DNA
gccagtgatctctcac

SEQ ID NO: 347 - DNA, 16 bp, synthetic construct
  misc_feature 1..16: note = synthetic [barcode part1]
  source 1..16: mol_type = other DNA
gtggccagattcttcc

SEQ ID NO: 348 - DNA, 16 bp, synthetic construct
  misc_feature 1..16: note = synthetic [barcode part1]
  source 1..16: mol_type = other DNA
aagacagtgaggcagt

SEQ ID NO: 349 - DNA, 16 bp, synthetic construct
  misc_feature 1..16: note = synthetic [barcode part1]
  source 1..16: mol_type = other DNA
tgttgttagacactcc

SEQ ID NO: 350 - DNA, 16 bp, synthetic construct
  misc_feature 1..16: note = synthetic [barcode part1]
  source 1..16: mol_type = other DNA
tacagatacctcgtct

SEQ ID NO: 351 - DNA, 16 bp, synthetic construct
  misc_feature 1..16: note = synthetic [barcode part1]
  source 1..16: mol_type = other DNA
ccagatactcactgcc

SEQ ID NO: 352 - DNA, 16 bp, synthetic construct
  misc_feature 1..16: note = synthetic [barcode part1]
  source 1..16: mol_type = other DNA
gccgacaatctaagtc

SEQ ID NO: 353 - DNA, 16 bp, synthetic construct
  misc_feature 1..16: note = synthetic [barcode part1]
  source 1..16: mol_type = other DNA
aagttgcacaactcgc

SEQ ID NO: 354 - DNA, 16 bp, synthetic construct
  misc_feature 1..16: note = synthetic [barcode part1]
  source 1..16: mol_type = other DNA
gatagaggaccgcact

SEQ ID NO: 355 - DNA, 16 bp, synthetic construct
  misc_feature 1..16: note = synthetic [barcode part1]
  source 1..16: mol_type = other DNA
gtggaccgagacaatc

SEQ ID NO: 356 - DNA, 16 bp, synthetic construct
  misc_feature 1..16: note = synthetic [barcode part1]
  source 1..16: mol_type = other DNA
gtacggtccgattcct

SEQ ID NO: 357 - DNA, 16 bp, synthetic construct
  misc_feature 1..16: note = synthetic [barcode part1]
  source 1..16: mol_type = other DNA
ttcgaccgtcggtatc

SEQ ID NO: 358 - DNA, 16 bp, synthetic construct
  misc_feature 1..16: note = synthetic [barcode part1]
  source 1..16: mol_type = other DNA
cacaagtaacaagacc

SEQ ID NO: 359 - DNA, 16 bp, synthetic construct
  misc_feature 1..16: note = synthetic [barcode part1]
  source 1..16: mol_type = other DNA
tctaacctgtggttgt

SEQ ID NO: 360 - DNA, 16 bp, synthetic construct
  misc_feature 1..16: note = synthetic [barcode part1]
  source 1..16: mol_type = other DNA
gtgacgaagtggtaag

SEQ ID NO: 361 - DNA, 16 bp, synthetic construct
  misc_feature 1..16: note = synthetic [barcode part1]
  source 1..16: mol_type = other DNA
acgtacaattggtcgc

SEQ ID NO: 362 - DNA, 16 bp, synthetic construct
  misc_feature 1..16: note = synthetic [barcode part1]
  source 1..16: mol_type = other DNA
atcactgtacgcctcg

SEQ ID NO: 363 - DNA, 16 bp, synthetic construct
  misc_feature 1..16: note = synthetic [barcode part1]
  source 1..16: mol_type = other DNA
tggcgatcgatctagt

SEQ ID NO: 364 - DNA, 16 bp, synthetic construct
  misc_feature 1..16: note = synthetic [barcode part1]
  source 1..16: mol_type = other DNA
caggtcgtctctgtac

SEQ ID NO: 365 - DNA, 16 bp, synthetic construct
  misc_feature 1..16: note = synthetic [barcode part1]
  source 1..16: mol_type = other DNA
ccgtaatacacgtacg

SEQ ID NO: 366 - DNA, 16 bp, synthetic construct
  misc_feature 1..16: note = synthetic [barcode part1]
  source 1..16: mol_type = other DNA
tcgcctgtactgtggt

SEQ ID NO: 367 - DNA, 16 bp, synthetic construct
  misc_feature 1..16: note = synthetic [barcode part1]
  source 1..16: mol_type = other DNA
cctcttcaatctcggt

SEQ ID NO: 368 - DNA, 16 bp, synthetic construct
  misc_feature 1..16: note = synthetic [barcode part1]
  source 1..16: mol_type = other DNA
aagttccagttccgag

SEQ ID NO: 369 - DNA, 16 bp, synthetic construct
  misc_feature 1..16: note = synthetic [barcode part1]
  source 1..16: mol_type = other DNA
ttcgatctacgcaact

SEQ ID NO: 370 - DNA, 16 bp, synthetic construct
  misc_feature 1..16: note = synthetic [barcode part1]
  source 1..16: mol_type = other DNA
gcacaacacgtcaact

SEQ ID NO: 371 - DNA, 16 bp, synthetic construct
  misc_feature 1..16: note = synthetic [barcode part1]
  source 1..16: mol_type = other DNA
gagactgacacgactg

SEQ ID NO: 372 - DNA, 16 bp, synthetic construct
  misc_feature 1..16: note = synthetic [barcode part1]
  source 1..16: mol_type = other DNA
tagacgcacgcaactt

SEQ ID NO: 373 - DNA, 16 bp, synthetic construct
  misc_feature 1..16: note = synthetic [barcode part1]
  source 1..16: mol_type = other DNA
agtgccaatcacggtt

SEQ ID NO: 374 - DNA, 16 bp, synthetic construct
  misc_feature 1..16: note = synthetic [barcode part1]
  source 1..16: mol_type = other DNA
agtcctcttctatcgc

SEQ ID NO: 375 - DNA, 16 bp, synthetic construct
  misc_feature 1..16: note = synthetic [barcode part1]
  source 1..16: mol_type = other DNA
taggtgtgatcacgtc

SEQ ID NO: 376 - DNA, 16 bp, synthetic construct
  misc_feature 1..16: note = synthetic [barcode part1]
  source 1..16: mol_type = other DNA
cgaatcagaccgttac

SEQ ID NO: 377 - DNA, 16 bp, synthetic construct
  misc_feature 1..16: note = synthetic [barcode part1]
  source 1..16: mol_type = other DNA
tcaccgcgtcttatct

SEQ ID NO: 378 - DNA, 16 bp, synthetic construct
  misc_feature 1..16: note = synthetic [barcode part1]
  source 1..16: mol_type = other DNA
gcgatattgtggtgtc

SEQ ID NO: 379 - DNA, 16 bp, synthetic construct
  misc_feature 1..16: note = synthetic [barcode part1]
  source 1..16: mol_type = other DNA
cagtataaccactcct

SEQ ID NO: 380 - DNA, 16 bp, synthetic construct
  misc_feature 1..16: note = synthetic [barcode part1]
  source 1..16: mol_type = other DNA
tacgcaaggcggtaac

SEQ ID NO: 381 - DNA, 16 bp, synthetic construct
  misc_feature 1..16: note = synthetic [barcode part1]
  source 1..16: mol_type = other DNA
gatcgtacaactgtgc

SEQ ID NO: 382 - DNA, 16 bp, synthetic construct
  misc_feature 1..16: note = synthetic [barcode part1]
  source 1..16: mol_type = other DNA
atcgcgcaattcgtag

SEQ ID NO: 383 - DNA, 16 bp, synthetic construct
  misc_feature 1..16: note = synthetic [barcode part1]
  source 1..16: mol_type = other DNA
aagaccgcaattcctg

SEQ ID NO: 384 - DNA, 16 bp, synthetic construct
  misc_feature 1..16: note = synthetic [barcode part1]
  source 1..16: mol_type = other DNA
gacgaagtagttcctc

SEQ ID NO: 385 - DNA, 16 bp, synthetic construct
  misc_feature 1..16: note = synthetic [barcode part1]
  source 1..16: mol_type = other DNA
aatagttccttgcgtc

SEQ ID NO: 386 - DNA, 16 bp, synthetic construct
  misc_feature 1..16: note = synthetic [barcode part1]
  source 1..16: mol_type = other DNA
gtggaacagtgaagtg

SEQ ID NO: 387 - DNA, 16 bp, synthetic construct
  misc_feature 1..16: note = synthetic [barcode part1]
  source 1..16: mol_type = other DNA
ccaaggtcctgaagtt

SEQ ID NO: 388 - DNA, 16 bp, synthetic construct
  misc_feature 1..16: note = synthetic [barcode part1]
  source 1..16: mol_type = other DNA
gacgttatcaactggc

SEQ ID NO: 389 - DNA, 16 bp, synthetic construct
  misc_feature 1..16: note = synthetic [barcode part1]
  source 1..16: mol_type = other DNA
atattggcctcgttgt

SEQ ID NO: 390 - DNA, 16 bp, synthetic construct
  misc_feature 1..16: note = synthetic [barcode part1]
  source 1..16: mol_type = other DNA
cagaccaaccaagtct

SEQ ID NO: 391 - DNA, 16 bp, synthetic construct
  misc_feature 1..16: note = synthetic [barcode part1]
  source 1..16: mol_type = other DNA
gacttaagaggcgcgt

SEQ ID NO: 392 - DNA, 16 bp, synthetic construct
  misc_feature 1..16: note = synthetic [barcode part1]
  source 1..16: mol_type = other DNA
atccacctctattcgc

SEQ ID NO: 393 - DNA, 16 bp, synthetic construct
  misc_feature 1..16: note = synthetic [barcode part1]
  source 1..16: mol_type = other DNA
ttaactcaggcacttc

SEQ ID NO: 394 - DNA, 16 bp, synthetic construct
  misc_feature 1..16: note = synthetic [barcode part1]
  source 1..16: mol_type = other DNA
gcagacttgacctcct

SEQ ID NO: 395 - DNA, 16 bp, synthetic construct
  misc_feature 1..16: note = synthetic [barcode part1]
  source 1..16: mol_type = other DNA
gaacctaatcctctac

SEQ ID NO: 396 - DNA, 16 bp, synthetic construct
  misc_feature 1..16: note = synthetic [barcode part1]
  source 1..16: mol_type = other DNA
agtcgtgccgatcctt

SEQ ID NO: 397 - DNA, 16 bp, synthetic construct
  misc_feature 1..16: note = synthetic [barcode part1]
  source 1..16: mol_type = other DNA
tgatcgtcttgattcg

SEQ ID NO: 398 - DNA, 16 bp, synthetic construct
  misc_feature 1..16: note = synthetic [barcode part1]
  source 1..16: mol_type = other DNA
gattcaaccttcacgt

SEQ ID NO: 399 - DNA, 16 bp, synthetic construct
  misc_feature 1..16: note = synthetic [barcode part1]
  source 1..16: mol_type = other DNA
acaactctgaactgcg

SEQ ID NO: 400 - DNA, 16 bp, synthetic construct
  misc_feature 1..16: note = synthetic [barcode part1]
  source 1..16: mol_type = other DNA
gcactgagtgtgatct

SEQ ID NO: 401 - DNA, 16 bp, synthetic construct
  misc_feature 1..16: note = synthetic [barcode part1]
  source 1..16: mol_type = other DNA
tcagatatccaggcgt

SEQ ID NO: 402 - DNA, 16 bp, synthetic construct
  misc_feature 1..16: note = synthetic [barcode part1]
  source 1..16: mol_type = other DNA
gttggagatcggtgtg

SEQ ID NO: 403 - DNA, 16 bp, synthetic construct
  misc_feature 1..16: note = synthetic [barcode part1]
  source 1..16: mol_type = other DNA
ttcctgacaactgtgt

SEQ ID NO: 404 - DNA, 16 bp, synthetic construct
  misc_feature 1..16: note = synthetic [barcode part1]
  source 1..16: mol_type = other DNA
caacggcacacagaac

SEQ ID NO: 405 - DNA, 16 bp, synthetic construct
  misc_feature 1..16: note = synthetic [barcode part1]
  source 1..16: mol_type = other DNA
tggtgataactcgacc

SEQ ID NO: 406 - DNA, 16 bp, synthetic construct
  misc_feature 1..16: note = synthetic [barcode part1]
  source 1..16: mol_type = other DNA
cggtgacacactcttc

SEQ ID NO: 407 - DNA, 16 bp, synthetic construct
  misc_feature 1..16: note = synthetic [barcode part1]
  source 1..16: mol_type = other DNA
ttccagtccaacgcgt

SEQ ID NO: 408 - DNA, 16 bp, synthetic construct
  misc_feature 1..16: note = synthetic [barcode part1]
  source 1..16: mol_type = other DNA
taggatctgacgtcac

SEQ ID NO: 409 - DNA, 16 bp, synthetic construct
  misc_feature 1..16: note = synthetic [barcode part1]
  source 1..16: mol_type = other DNA
attgcgagataccgtc

SEQ ID NO: 410 - DNA, 16 bp, synthetic construct
  misc_feature 1..16: note = synthetic [barcode part1]
  source 1..16: mol_type = other DNA
cagtagtgtgcaggac

SEQ ID NO: 411 - DNA, 16 bp, synthetic construct
  misc_feature 1..16: note = synthetic [barcode part1]
  source 1..16: mol_type = other DNA
taagatcgaggcctct

SEQ ID NO: 412 - DNA, 16 bp, synthetic construct
  misc_feature 1..16: note = synthetic [barcode part1]
  source 1..16: mol_type = other DNA
gaactcaacctcttac

SEQ ID NO: 413 - DNA, 16 bp, synthetic construct
  misc_feature 1..16: note = synthetic [barcode part1]
  source 1..16: mol_type = other DNA
tcctcgtgaattgttg

SEQ ID NO: 414 - DNA, 16 bp, synthetic construct
  misc_feature 1..16: note = synthetic [barcode part1]
  source 1..16: mol_type = other DNA
aacgttgattacggcc

SEQ ID NO: 415 - DNA, 16 bp, synthetic construct
  misc_feature 1..16: note = synthetic [barcode part1]
  source 1..16: mol_type = other DNA
cggtatagatctgtgc

SEQ ID NO: 416 - DNA, 16 bp, synthetic construct
  misc_feature 1..16: note = synthetic [barcode part1]
  source 1..16: mol_type = other DNA
atccaggacggatctt

SEQ ID NO: 417 - DNA, 16 bp, synthetic construct
  misc_feature 1..16: note = synthetic [barcode part1]
  source 1..16: mol_type = other DNA
aggtcagtcgaagaag

SEQ ID NO: 418 - DNA, 16 bp, synthetic construct
  misc_feature 1..16: note = synthetic [barcode part1]
  source 1..16: mol_type = other DNA
ttctggccgtgaatcc

SEQ ID NO: 419 - DNA, 16 bp, synthetic construct
  misc_feature 1..16: note = synthetic [barcode part1]
  source 1..16: mol_type = other DNA
ttgaggccgttacagt

SEQ ID NO: 420 - DNA, 16 bp, synthetic construct
  misc_feature 1..16: note = synthetic [barcode part1]
  source 1..16: mol_type = other DNA
tatctcaaggcgacac

SEQ ID NO: 421 - DNA, 16 bp, synthetic construct
  misc_feature 1..16: note = synthetic [barcode part1]
  source 1..16: mol_type = other DNA
cacgaccactagagag

SEQ ID NO: 422 - DNA, 16 bp, synthetic construct
  misc_feature 1..16: note = synthetic [barcode part1]
  source 1..16: mol_type = other DNA
cgtgtccaggtcactt

SEQ ID NO: 423 - DNA, 16 bp, synthetic construct
  misc_feature 1..16: note = synthetic [barcode part1]
  source 1..16: mol_type = other DNA
caacacagtgttcgac

SEQ ID NO: 424 - DNA, 16 bp, synthetic construct
  misc_feature 1..16: note = synthetic [barcode part1]
  source 1..16: mol_type = other DNA
gtccggtagttatcag

SEQ ID NO: 425 - DNA, 16 bp, synthetic construct
  misc_feature 1..16: note = synthetic [barcode part1]
  source 1..16: mol_type = other DNA
tgttcttctgacggcg

SEQ ID NO: 426 - DNA, 16 bp, synthetic construct
  misc_feature 1..16: note = synthetic [barcode part1]
  source 1..16: mol_type = other DNA
ttctaactgtactggc

SEQ ID NO: 427 - DNA, 16 bp, synthetic construct
  misc_feature 1..16: note = synthetic [barcode part1]
  source 1..16: mol_type = other DNA
acctcacagatacttc

SEQ ID NO: 428 - DNA, 16 bp, synthetic construct
  misc_feature 1..16: note = synthetic [barcode part1]
  source 1..16: mol_type = other DNA
tccgccgtatagatcc

SEQ ID NO: 429 - DNA, 16 bp, synthetic construct
  misc_feature 1..16: note = synthetic [barcode part1]
  source 1..16: mol_type = other DNA
tctccttgagatctcc

SEQ ID NO: 430 - DNA, 16 bp, synthetic construct
  misc_feature 1..16: note = synthetic [barcode part1]
  source 1..16: mol_type = other DNA
gtcgtatacgcagttg

SEQ ID NO: 431 - DNA, 16 bp, synthetic construct
  misc_feature 1..16: note = synthetic [barcode part1]
  source 1..16: mol_type = other DNA
ttcgccagattcgtgc

SEQ ID NO: 432 - DNA, 16 bp, synthetic construct
  misc_feature 1..16: note = synthetic [barcode part1]
  source 1..16: mol_type = other DNA
actctcctgactgcag

SEQ ID NO: 433 - DNA, 16 bp, synthetic construct
  misc_feature 1..16: note = synthetic [barcode part1]
  source 1..16: mol_type = other DNA
agtgtgtcagtacgtc

SEQ ID NO: 434 - DNA, 16 bp, synthetic construct
  misc_feature 1..16: note = synthetic [barcode part1]
  source 1..16: mol_type = other DNA
tccaccggattgcact

SEQ ID NO: 435 - DNA, 16 bp, synthetic construct
  misc_feature 1..16: note = synthetic [barcode part1]
  source 1..16: mol_type = other DNA
taatcaggactggcct

SEQ ID NO: 436 - DNA, 16 bp, synthetic construct
  misc_feature 1..16: note = synthetic [barcode part1]
  source 1..16: mol_type = other DNA
gttcctgacgagaatc

SEQ ID NO: 437 - DNA, 16 bp, synthetic construct
  misc_feature 1..16: note = synthetic [barcode part1]
  source 1..16: mol_type = other DNA
tgtggcgtgttcgttc

SEQ ID NO: 438 - DNA, 16 bp, synthetic construct
  misc_feature 1..16: note = synthetic [barcode part1]
  source 1..16: mol_type = other DNA
ttgcagtgacttcgag

SEQ ID NO: 439 - DNA, 16 bp, synthetic construct
  misc_feature 1..16: note = synthetic [barcode part1]
  source 1..16: mol_type = other DNA
gtcaggtggatacggt

SEQ ID NO: 440 - DNA, 16 bp, synthetic construct
  misc_feature 1..16: note = synthetic [barcode part1]
  source 1..16: mol_type = other DNA
tcggatatctggacac

SEQ ID NO: 441 - DNA, 16 bp, synthetic construct
  misc_feature 1..16: note = synthetic [barcode part1]
  source 1..16: mol_type = other DNA
ttgtcgcaatatccac

SEQ ID NO: 442 - DNA, 16 bp, synthetic construct
  misc_feature 1..16: note = synthetic [barcode part1]
  source 1..16: mol_type = other DNA
atcacagtccgttcgc

SEQ ID NO: 443 - DNA, 16 bp, synthetic construct
  misc_feature 1..16: note = synthetic [barcode part1]
  source 1..16: mol_type = other DNA
acgacacgatcagtct

SEQ ID NO: 444 - DNA, 16 bp, synthetic construct
  misc_feature 1..16: note = synthetic [barcode part1]
  source 1..16: mol_type = other DNA
acgcaagttactagag

SEQ ID NO: 445 - DNA, 16 bp, synthetic construct
  misc_feature 1..16: note = synthetic [barcode part1]
  source 1..16: mol_type = other DNA
tagaccaggttatcgc

SEQ ID NO: 446 - DNA, 16 bp, synthetic construct
  misc_feature 1..16: note = synthetic [barcode part1]
  source 1..16: mol_type = other DNA
cgtacaggagtgtctt

SEQ ID NO: 447 - DNA, 16 bp, synthetic construct
  misc_feature 1..16: note = synthetic [barcode part1]
  source 1..16: mol_type = other DNA
gtggcgtgttaactac

SEQ ID NO: 448 - DNA, 16 bp, synthetic construct
  misc_feature 1..16: note = synthetic [barcode part1]
  source 1..16: mol_type = other DNA
aatacgcaatcaggac

SEQ ID NO: 449 - DNA, 16 bp, synthetic construct
  misc_feature 1..16: note = synthetic [barcode part1]
  source 1..16: mol_type = other DNA
cgtacgagaaccaggt

SEQ ID NO: 450 - DNA, 16 bp, synthetic construct
  misc_feature 1..16: note = synthetic [barcode part1]
  source 1..16: mol_type = other DNA
acgttgagattgcgtc

SEQ ID NO: 451 - DNA, 16 bp, synthetic construct
  misc_feature 1..16: note = synthetic [barcode part1]
  source 1..16: mol_type = other DNA
cgaatcaggaacgcac

SEQ ID NO: 452 - DNA, 16 bp, synthetic construct
  misc_feature 1..16: note = synthetic [barcode part1]
  source 1..16: mol_type = other DNA
attgcggcctgtctgt

SEQ ID NO: 453 - DNA, 16 bp, synthetic construct
  misc_feature 1..16: note = synthetic [barcode part1]
  source 1..16: mol_type = other DNA
gtgtaggtccggtaag

SEQ ID NO: 454 - DNA, 16 bp, synthetic construct
  misc_feature 1..16: note = synthetic [barcode part1]
  source 1..16: mol_type = other DNA
gagaaccggagaattg

SEQ ID NO: 455 - DNA, 16 bp, synthetic construct
  misc_feature 1..16: note = synthetic [barcode part1]
  source 1..16: mol_type = other DNA
ccgagatcttgagact

SEQ ID NO: 456 - DNA, 16 bp, synthetic construct
  misc_feature 1..16: note = synthetic [barcode part1]
  source 1..16: mol_type = other DNA
gaggacacaagttatc

SEQ ID NO: 457 - DNA, 16 bp, synthetic construct
  misc_feature 1..16: note = synthetic [barcode part1]
  source 1..16: mol_type = other DNA
gtataactctctcggt

SEQ ID NO: 458 - DNA, 16 bp, synthetic construct
  misc_feature 1..16: note = synthetic [barcode part1]
  source 1..16: mol_type = other DNA
tagactatcggaccgt

SEQ ID NO: 459 - DNA, 16 bp, synthetic construct
  misc_feature 1..16: note = synthetic [barcode part1]
  source 1..16: mol_type = other DNA
tctaccgcgtgaactc

SEQ ID NO: 460 - DNA, 16 bp, synthetic construct
  misc_feature 1..16: note = synthetic [barcode part1]
  source 1..16: mol_type = other DNA
cggatacagagtaact

SEQ ID NO: 461 - DNA, 16 bp, synthetic construct
  misc_feature 1..16: note = synthetic [barcode part1]
  source 1..16: mol_type = other DNA
acctcgcacgactact

SEQ ID NO: 462 - DNA, 16 bp, synthetic construct
  misc_feature 1..16: note = synthetic [barcode part1]
  source 1..16: mol_type = other DNA
acaggttgactcacac

SEQ ID NO: 463 - DNA, 16 bp, synthetic construct
  misc_feature 1..16: note = synthetic [barcode part1]
  source 1..16: mol_type = other DNA
caataactcggaccgt

SEQ ID NO: 464 - DNA, 16 bp, synthetic construct
  misc_feature 1..16: note = synthetic [barcode part1]
  source 1..16: mol_type = other DNA
gacaatatccgtcacg

SEQ ID NO: 465 - DNA, 16 bp, synthetic construct
  misc_feature 1..16: note = synthetic [barcode part1]
  source 1..16: mol_type = other DNA
gaacgtccgtcgttct

SEQ ID NO: 466 - DNA, 16 bp, synthetic construct
  misc_feature 1..16: note = synthetic [barcode part1]
  source 1..16: mol_type = other DNA
gtctaggtcgccttgt

SEQ ID NO: 467 - DNA, 16 bp, synthetic construct
  misc_feature 1..16: note = synthetic [barcode part1]
  source 1..16: mol_type = other DNA
tcttacgcaacgactt

SEQ ID NO: 468 - DNA, 16 bp, synthetic construct
  misc_feature 1..16: note = synthetic [barcode part1]
  source 1..16: mol_type = other DNA
gagtgacttggcacag

SEQ ID NO: 469 - DNA, 16 bp, synthetic construct
  misc_feature 1..16: note = synthetic [barcode part1]
  source 1..16: mol_type = other DNA
ccaatcctcacgcaac

SEQ ID NO: 470 - DNA, 16 bp, synthetic construct
  misc_feature 1..16: note = synthetic [barcode part1]
  source 1..16: mol_type = other DNA
cgagtgattgtagtag

SEQ ID NO: 471 - DNA, 16 bp, synthetic construct
  misc_feature 1..16: note = synthetic [barcode part1]
  source 1..16: mol_type = other DNA
gaccagttggtcaact

SEQ ID NO: 472 - DNA, 16 bp, synthetic construct
  misc_feature 1..16: note = synthetic [barcode part1]
  source 1..16: mol_type = other DNA
caatcacgaatcgaag

SEQ ID NO: 473 - DNA, 16 bp, synthetic construct
  misc_feature 1..16: note = synthetic [barcode part1]
  source 1..16: mol_type = other DNA
gtcttgagtcgactag

SEQ ID NO: 474 - DNA, 16 bp, synthetic construct
  misc_feature 1..16: note = synthetic [barcode part1]
  source 1..16: mol_type = other DNA
acggattgcgtgattc

SEQ ID NO: 475 - DNA, 16 bp, synthetic construct
  misc_feature 1..16: note = synthetic [barcode part1]
  source 1..16: mol_type = other DNA
ttgtactcacctctgc

SEQ ID NO: 476 - DNA, 16 bp, synthetic construct
  misc_feature 1..16: note = synthetic [barcode part1]
  source 1..16: mol_type = other DNA
gaatctaggcgtacct

SEQ ID NO: 477 - DNA, 16 bp, synthetic construct
  misc_feature 1..16: note = synthetic [barcode part1]
  source 1..16: mol_type = other DNA
ccaacgaagtggtctt

SEQ ID NO: 478 - DNA, 16 bp, synthetic construct
  misc_feature 1..16: note = synthetic [barcode part1]
  source 1..16: mol_type = other DNA
cgaacaggtcctagag

SEQ ID NO: 479 - DNA, 16 bp, synthetic construct
  misc_feature 1..16: note = synthetic [barcode part1]
  source 1..16: mol_type = other DNA
ttactcgtgttacggt

SEQ ID NO: 480 - DNA, 16 bp, synthetic construct
  misc_feature 1..16: note = synthetic [barcode part1]
  source 1..16: mol_type = other DNA
tccaccgactacttct

SEQ ID NO: 481 - DNA, 16 bp, synthetic construct
  misc_feature 1..16: note = synthetic [barcode part1]
  source 1..16: mol_type = other DNA
acgtgttaacgtgtcg

SEQ ID NO: 482 - DNA, 16 bp, synthetic construct
  misc_feature 1..16: note = synthetic [barcode part1]
  source 1..16: mol_type = other DNA
cgcggtgataggtagt

SEQ ID NO: 483 - DNA, 16 bp, synthetic construct
  misc_feature 1..16: note = synthetic [barcode part1]
  source 1..16: mol_type = other DNA
gtgacaccagtcagtt

SEQ ID NO: 484 - DNA, 16 bp, synthetic construct
  misc_feature 1..16: note = synthetic [barcode part1]
  source 1..16: mol_type = other DNA
gcctagattgcgaact

SEQ ID NO: 485 - DNA, 16 bp, synthetic construct
  misc_feature 1..16: note = synthetic [barcode part1]
  source 1..16: mol_type = other DNA
tcgagatactcacttc

SEQ ID NO: 486 - DNA, 16 bp, synthetic construct
  misc_feature 1..16: note = synthetic [barcode part1]
  source 1..16: mol_type = other DNA
acgtgtgtggtatcgt

SEQ ID NO: 487 - DNA, 16 bp, synthetic construct
  misc_feature 1..16: note = synthetic [barcode part1]
  source 1..16: mol_type = other DNA
gcgaactactattcct

SEQ ID NO: 488 - DNA, 16 bp, synthetic construct
  misc_feature 1..16: note = synthetic [barcode part1]
  source 1..16: mol_type = other DNA
gatccgagtgcaaggt

SEQ ID NO: 489 - DNA, 16 bp, synthetic construct
  misc_feature 1..16: note = synthetic [barcode part1]
  source 1..16: mol_type = other DNA
agtcaacgtgtacacc

SEQ ID NO: 490 - DNA, 16 bp, synthetic construct
  misc_feature 1..16: note = synthetic [barcode part1]
  source 1..16: mol_type = other DNA
tccttaactgacctcc

SEQ ID NO: 491 - DNA, 16 bp, synthetic construct
  misc_feature 1..16: note = synthetic [barcode part1]
  source 1..16: mol_type = other DNA
tatcgttgtcttccgc

SEQ ID NO: 492 - DNA, 16 bp, synthetic construct
  misc_feature 1..16: note = synthetic [barcode part1]
  source 1..16: mol_type = other DNA
ccaggacaagtgaacc

SEQ ID NO: 493 - DNA, 16 bp, synthetic construct
  misc_feature 1..16: note = synthetic [barcode part1]
  source 1..16: mol_type = other DNA
actgaatacctccact

SEQ ID NO: 494 - DNA, 16 bp, synthetic construct
  misc_feature 1..16: note = synthetic [barcode part1]
  source 1..16: mol_type = other DNA
aacgtgtgtgtgtcac

SEQ ID NO: 495 - DNA, 16 bp, synthetic construct
  misc_feature 1..16: note = synthetic [barcode part1]
  source 1..16: mol_type = other DNA
tctacttgagtggacg

SEQ ID NO: 496 - DNA, 16 bp, synthetic construct
  misc_feature 1..16: note = synthetic [barcode part1]
  source 1..16: mol_type = other DNA
cgacttcaaggagttc

SEQ ID NO: 497 - DNA, 16 bp, synthetic construct
  misc_feature 1..16: note = synthetic [barcode part1]
  source 1..16: mol_type = other DNA
ttccacggacctgatc

SEQ ID NO: 498 - DNA, 16 bp, synthetic construct
  misc_feature 1..16: note = synthetic [barcode part1]
  source 1..16: mol_type = other DNA
cggataccgacgaagt

SEQ ID NO: 499 - DNA, 16 bp, synthetic construct
  misc_feature 1..16: note = synthetic [barcode part1]
  source 1..16: mol_type = other DNA
accggaatcaattccg

SEQ ID NO: 500 - DNA, 16 bp, synthetic construct
  misc_feature 1..16: note = synthetic [barcode part1]
  source 1..16: mol_type = other DNA
agtgttctccaacttg

SEQ ID NO: 501 - DNA, 16 bp, synthetic construct
  misc_feature 1..16: note = synthetic [barcode part1]
  source 1..16: mol_type = other DNA
acaccaacagtaagac

SEQ ID NO: 502 - DNA, 16 bp, synthetic construct
  misc_feature 1..16: note = synthetic [barcode part1]
  source 1..16: mol_type = other DNA
ttaccttcggtccttg

SEQ ID NO: 503 - DNA, 16 bp, synthetic construct
  misc_feature 1..16: note = synthetic [barcode part1]
  source 1..16: mol_type = other DNA
cacttcctcggatcag

SEQ ID NO: 504 - DNA, 16 bp, synthetic construct
  misc_feature 1..16: note = synthetic [barcode part1]
  source 1..16: mol_type = other DNA
tcacagagagttgaac

SEQ ID NO: 505 - DNA, 16 bp, synthetic construct
  misc_feature 1..16: note = synthetic [barcode part1]
  source 1..16: mol_type = other DNA
tctcgtgtacaaggac

SEQ ID NO: 506 - DNA, 16 bp, synthetic construct
  misc_feature 1..16: note = synthetic [barcode part1]
  source 1..16: mol_type = other DNA
acgacacctagtcagt

SEQ ID NO: 507 - DNA, 16 bp, synthetic construct
  misc_feature 1..16: note = synthetic [barcode part1]
  source 1..16: mol_type = other DNA
acaggaccacttggag

SEQ ID NO: 508 - DNA, 16 bp, synthetic construct
  misc_feature 1..16: note = synthetic [barcode part1]
  source 1..16: mol_type = other DNA
tgaactctctgttacg

SEQ ID NO: 509 - DNA, 16 bp, synthetic construct
  misc_feature 1..16: note = synthetic [barcode part1]
  source 1..16: mol_type = other DNA
gcaaggtagtgtccag

SEQ ID NO: 510 - DNA, 16 bp, synthetic construct
  misc_feature 1..16: note = synthetic [barcode part1]
  source 1..16: mol_type = other DNA
tctccagatactagtc

SEQ ID NO: 511 - DNA, 16 bp, synthetic construct
  misc_feature 1..16: note = synthetic [barcode part1]
  source 1..16: mol_type = other DNA
gactctaatctactcg

SEQ ID NO: 512 - DNA, 16 bp, synthetic construct
  misc_feature 1..16: note = synthetic [barcode part1]
  source 1..16: mol_type = other DNA
ttcgattgaagtcggc

SEQ ID NO: 513 - DNA, 16 bp, synthetic construct
  misc_feature 1..16: note = synthetic [barcode part1]
  source 1..16: mol_type = other DNA
ccgtgaactactactt

SEQ ID NO: 514 - DNA, 16 bp, synthetic construct
  misc_feature 1..16: note = synthetic [barcode part1]
  source 1..16: mol_type = other DNA
ttgacgaaggtgtggc

SEQ ID NO: 515 - DNA, 16 bp, synthetic construct
  misc_feature 1..16: note = synthetic [barcode part1]
  source 1..16: mol_type = other DNA
tagtcctacgcgtcgt

SEQ ID NO: 516 - DNA, 16 bp, synthetic construct
  misc_feature 1..16: note = synthetic [barcode part1]
  source 1..16: mol_type = other DNA
gtcggataggtcactt

SEQ ID NO: 517 - DNA, 16 bp, synthetic construct
  misc_feature 1..16: note = synthetic [barcode part1]
  source 1..16: mol_type = other DNA
cgttcaccttggaacc

SEQ ID NO: 518 - DNA, 16 bp, synthetic construct
  misc_feature 1..16: note = synthetic [barcode part1]
  source 1..16: mol_type = other DNA
gacttggtcaggttgt

SEQ ID NO: 519 - DNA, 16 bp, synthetic construct
  misc_feature 1..16: note = synthetic [barcode part1]
  source 1..16: mol_type = other DNA
aggagtctatagtcag

SEQ ID NO: 520 - DNA, 16 bp, synthetic construct
  misc_feature 1..16: note = synthetic [barcode part1]
  source 1..16: mol_type = other DNA
aactcgtgaatctgcg

SEQ ID NO: 521 - DNA, 16 bp, synthetic construct
  misc_feature 1..16: note = synthetic [barcode part1]
  source 1..16: mol_type = other DNA
gtgttacctatccgcg

SEQ ID NO: 522 - DNA, 16 bp, synthetic construct
  misc_feature 1..16: note = synthetic [barcode part1]
  source 1..16: mol_type = other DNA
agtagaagtgttcgac

SEQ ID NO: 523 - DNA, 16 bp, synthetic construct
  misc_feature 1..16: note = synthetic [barcode part1]
  source 1..16: mol_type = other DNA
gtccgttgatactgcc

SEQ ID NO: 524 - DNA, 16 bp, synthetic construct
  misc_feature 1..16: note = synthetic [barcode part1]
  source 1..16: mol_type = other DNA
gaacgacgagaatcag

SEQ ID NO: 525 - DNA, 16 bp, synthetic construct
  misc_feature 1..16: note = synthetic [barcode part1]
  source 1..16: mol_type = other DNA
ccaagtagacgagacc

SEQ ID NO: 526 - DNA, 16 bp, synthetic construct
  misc_feature 1..16: note = synthetic [barcode part1]
  source 1..16: mol_type = other DNA
tgttgagttacactcc

SEQ ID NO: 527 - DNA, 16 bp, synthetic construct
  misc_feature 1..16: note = synthetic [barcode part1]
  source 1..16: mol_type = other DNA
tgtgtcagtacgtcag

SEQ ID NO: 528 - DNA, 16 bp, synthetic construct
  misc_feature 1..16: note = synthetic [barcode part1]
  source 1..16: mol_type = other DNA
cgtgtctagattatcc

SEQ ID NO: 529 - DNA, 16 bp, synthetic construct
  misc_feature 1..16: note = synthetic [barcode part1]
  source 1..16: mol_type = other DNA
cgtagaccaagacggt

SEQ ID NO: 530 - DNA, 16 bp, synthetic construct
  misc_feature 1..16: note = synthetic [barcode part1]
  source 1..16: mol_type = other DNA
gcacaccttgtcactg

SEQ ID NO: 531 - DNA, 16 bp, synthetic construct
  misc_feature 1..16: note = synthetic [barcode part1]
  source 1..16: mol_type = other DNA
tagacacgtcagaggc

SEQ ID NO: 532 - DNA, 16 bp, synthetic construct
  misc_feature 1..16: note = synthetic [barcode part1]
  source 1..16: mol_type = other DNA
agtcgaccggtattgt

SEQ ID NO: 533 - DNA, 16 bp, synthetic construct
  misc_feature 1..16: note = synthetic [barcode part1]
  source 1..16: mol_type = other DNA
cacctatcgaacaggt

SEQ ID NO: 534 - DNA, 16 bp, synthetic construct
  misc_feature 1..16: note = synthetic [barcode part1]
  source 1..16: mol_type = other DNA
gttacaccacaccaag

SEQ ID NO: 535 - DNA, 16 bp, synthetic construct
  misc_feature 1..16: note = synthetic [barcode part1]
  source 1..16: mol_type = other DNA
cagtcggtagtatcac

SEQ ID NO: 536 - DNA, 16 bp, synthetic construct
  misc_feature 1..16: note = synthetic [barcode part1]
  source 1..16: mol_type = other DNA
aaggcctaatagacgt

SEQ ID NO: 537 - DNA, 16 bp, synthetic construct
  misc_feature 1..16: note = synthetic [barcode part1]
  source 1..16: mol_type = other DNA
tctaccgatactcggc

SEQ ID NO: 538 - DNA, 16 bp, synthetic construct
  misc_feature 1..16: note = synthetic [barcode part1]
  source 1..16: mol_type = other DNA
acggtatagttggtcc

SEQ ID NO: 539 - DNA, 16 bp, synthetic construct
  misc_feature 1..16: note = synthetic [barcode part1]
  source 1..16: mol_type = other DNA
caagtcggagagtatt

SEQ ID NO: 540 - DNA, 16 bp, synthetic construct
  misc_feature 1..16: note = synthetic [barcode part1]
  source 1..16: mol_type = other DNA
ttaagaggattgcacg

SEQ ID NO: 541 - DNA, 16 bp, synthetic construct
  misc_feature 1..16: note = synthetic [barcode part1]
  source 1..16: mol_type = other DNA
gagtacctcacctcgt

SEQ ID NO: 542 - DNA, 16 bp, synthetic construct
  misc_feature 1..16: note = synthetic [barcode part1]
  source 1..16: mol_type = other DNA
cagttgatacaacgcc

SEQ ID NO: 543 - DNA, 16 bp, synthetic construct
  misc_feature 1..16: note = synthetic [barcode part1]
  source 1..16: mol_type = other DNA
ccggatctcgaattag

SEQ ID NO: 544 - DNA, 16 bp, synthetic construct
  misc_feature 1..16: note = synthetic [barcode part1]
  source 1..16: mol_type = other DNA
taggtgtgtgtgactc

SEQ ID NO: 545 - DNA, 16 bp, synthetic construct
  misc_feature 1..16: note = synthetic [barcode part1]
  source 1..16: mol_type = other DNA
cctgacttataaccac

SEQ ID NO: 546 - DNA, 16 bp, synthetic construct
  misc_feature 1..16: note = synthetic [barcode part1]
  source 1..16: mol_type = other DNA
gtacgataccaacgtc

SEQ ID NO: 547 - DNA, 16 bp, synthetic construct
  misc_feature 1..16: note = synthetic [barcode part1]
  source 1..16: mol_type = other DNA
taccactcgccttgtt

SEQ ID NO: 548 - DNA, 16 bp, synthetic construct
  misc_feature 1..16: note = synthetic [barcode part1]
  source 1..16: mol_type = other DNA
agatattggacaacgc

SEQ ID NO: 549 - DNA, 16 bp, synthetic construct
  misc_feature 1..16: note = synthetic [barcode part1]
  source 1..16: mol_type = other DNA
cactatcaacgacggt

SEQ ID NO: 550 - DNA, 16 bp, synthetic construct
  misc_feature 1..16: note = synthetic [barcode part1]
  source 1..16: mol_type = other DNA
atccaaggtgaactcc

SEQ ID NO: 551 - DNA, 16 bp, synthetic construct
  misc_feature 1..16: note = synthetic [barcode part1]
  source 1..16: mol_type = other DNA
ccgcaactaataccag

SEQ ID NO: 552 - DNA, 16 bp, synthetic construct
  misc_feature 1..16: note = synthetic [barcode part1]
  source 1..16: mol_type = other DNA
atccggataaggcggt

SEQ ID NO: 553 - DNA, 16 bp, synthetic construct
  misc_feature 1..16: note = synthetic [barcode part1]
  source 1..16: mol_type = other DNA
gttcaccacagtattc

SEQ ID NO: 554 - DNA, 16 bp, synthetic construct
  misc_feature 1..16: note = synthetic [barcode part1]
  source 1..16: mol_type = other DNA
tatcgcagtatcgcag

SEQ ID NO: 555 - DNA, 16 bp, synthetic construct
  misc_feature 1..16: note = synthetic [barcode part1]
  source 1..16: mol_type = other DNA
caaggtcgccacaatt

SEQ ID NO: 556 - DNA, 16 bp, synthetic construct
  misc_feature 1..16: note = synthetic [barcode part1]
  source 1..16: mol_type = other DNA
tagtacgtcgaacgtc

SEQ ID NO: 557 - DNA, 16 bp, synthetic construct
  misc_feature 1..16: note = synthetic [barcode part1]
  source 1..16: mol_type = other DNA
cacaacaggtgttgtc

SEQ ID NO: 558 - DNA, 16 bp, synthetic construct
  misc_feature 1..16: note = synthetic [barcode part1]
  source 1..16: mol_type = other DNA
cgaaggtctattagag

SEQ ID NO: 559 - DNA, 16 bp, synthetic construct
  misc_feature 1..16: note = synthetic [barcode part1]
  source 1..16: mol_type = other DNA
tgtcctccgatagtcg

SEQ ID NO: 560 - DNA, 16 bp, synthetic construct
  misc_feature 1..16: note = synthetic [barcode part1]
  source 1..16: mol_type = other DNA
agagattacgccgacg

SEQ ID NO: 561 - DNA, 16 bp, synthetic construct
  misc_feature 1..16: note = synthetic [barcode part1]
  source 1..16: mol_type = other DNA
agactactccacgtcc

SEQ ID NO: 562 - DNA, 16 bp, synthetic construct
  misc_feature 1..16: note = synthetic [barcode part1]
  source 1..16: mol_type = other DNA
gaactaacggtacgcg

SEQ ID NO: 563 - DNA, 16 bp, synthetic construct
  misc_feature 1..16: note = synthetic [barcode part1]
  source 1..16: mol_type = other DNA
caacgccacaagtgag

SEQ ID NO: 564 - DNA, 16 bp, synthetic construct
  misc_feature 1..16: note = synthetic [barcode part1]
  source 1..16: mol_type = other DNA
tcgttaggaaggcgtg

SEQ ID NO: 565 - DNA, 16 bp, synthetic construct
  misc_feature 1..16: note = synthetic [barcode part1]
  source 1..16: mol_type = other DNA
gcaagtgcgaatagag

SEQ ID NO: 566 - DNA, 16 bp, synthetic construct
  misc_feature 1..16: note = synthetic [barcode part1]
  source 1..16: mol_type = other DNA
ttcaccagaggatcgt

SEQ ID NO: 567 - DNA, 16 bp, synthetic construct
  misc_feature 1..16: note = synthetic [barcode part1]
  source 1..16: mol_type = other DNA
accagttgaaggagag

SEQ ID NO: 568 - DNA, 16 bp, synthetic construct
  misc_feature 1..16: note = synthetic [barcode part1]
  source 1..16: mol_type = other DNA
atcaacctcagagtcg

SEQ ID NO: 569 - DNA, 16 bp, synthetic construct
  misc_feature 1..16: note = synthetic [barcode part1]
  source 1..16: mol_type = other DNA
acgtcaggtcaggagt

SEQ ID NO: 570 - DNA, 16 bp, synthetic construct
  misc_feature 1..16: note = synthetic [barcode part1]
  source 1..16: mol_type = other DNA
ttacctgcaagatcct

SEQ ID NO: 571 - DNA, 16 bp, synthetic construct
  misc_feature 1..16: note = synthetic [barcode part1]
  source 1..16: mol_type = other DNA
gtgtaggtgccaagtg

SEQ ID NO: 572 - DNA, 16 bp, synthetic construct
  misc_feature 1..16: note = synthetic [barcode part1]
  source 1..16: mol_type = other DNA
agtaacacacttggag

SEQ ID NO: 573 - DNA, 16 bp, synthetic construct
  misc_feature 1..16: note = synthetic [barcode part1]
  source 1..16: mol_type = other DNA
aatcggtcgacactac

SEQ ID NO: 574 - DNA, 16 bp, synthetic construct
  misc_feature 1..16: note = synthetic [barcode part1]
  source 1..16: mol_type = other DNA
gtccgcaatacgattg

SEQ ID NO: 575 - DNA, 16 bp, synthetic construct
  misc_feature 1..16: note = synthetic [barcode part1]
  source 1..16: mol_type = other DNA
ttatctgtccactcgc

SEQ ID NO: 576 - DNA, 16 bp, synthetic construct
  misc_feature 1..16: note = synthetic [barcode part1]
  source 1..16: mol_type = other DNA
agattcggtaactgcc

SEQ ID NO: 577 - DNA, 16 bp, synthetic construct
  misc_feature 1..16: note = synthetic [barcode part1]
  source 1..16: mol_type = other DNA
atctacttccgtccac

SEQ ID NO: 578 - DNA, 16 bp, synthetic construct
  misc_feature 1..16: note = synthetic [barcode part1]
  source 1..16: mol_type = other DNA
gcgatcgcgatatatc

SEQ ID NO: 579 - DNA, 16 bp, synthetic construct
  misc_feature 1..16: note = synthetic [barcode part1]
  source 1..16: mol_type = other DNA
taacctgcacctccag

SEQ ID NO: 580 - DNA, 16 bp, synthetic construct
  misc_feature 1..16: note = synthetic [barcode part1]
  source 1..16: mol_type = other DNA
ccaacggttcgataac

SEQ ID NO: 581 - DNA, 16 bp, synthetic construct
  misc_feature 1..16: note = synthetic [barcode part1]
  source 1..16: mol_type = other DNA
tgcgcacctaactaag

SEQ ID NO: 582 - DNA, 16 bp, synthetic construct
  misc_feature 1..16: note = synthetic [barcode part1]
  source 1..16: mol_type = other DNA
tactggtagtctcttg

SEQ ID NO: 583 - DNA, 16 bp, synthetic construct
  misc_feature 1..16: note = synthetic [barcode part1]
  source 1..16: mol_type = other DNA
gaaccacgcaagaatt

SEQ ID NO: 584 - DNA, 16 bp, synthetic construct
  misc_feature 1..16: note = synthetic [barcode part1]
  source 1..16: mol_type = other DNA
taggtgtccaacacac

SEQ ID NO: 585 - DNA, 16 bp, synthetic construct
  misc_feature 1..16: note = synthetic [barcode part1]
  source 1..16: mol_type = other DNA
gacggaattgatacac

SEQ ID NO: 586 - DNA, 16 bp, synthetic construct
  misc_feature 1..16: note = synthetic [barcode part1]
  source 1..16: mol_type = other DNA
gtacttcgcgtctctt

SEQ ID NO: 587 - DNA, 16 bp, synthetic construct
  misc_feature 1..16: note = synthetic [barcode part1]
  source 1..16: mol_type = other DNA
gaccaactgaccaact

SEQ ID NO: 588 - DNA, 16 bp, synthetic construct
  misc_feature 1..16: note = synthetic [barcode part1]
  source 1..16: mol_type = other DNA
tctgcacgtattctcc

SEQ ID NO: 589 - DNA, 16 bp, synthetic construct
  misc_feature 1..16: note = synthetic [barcode part1]
  source 1..16: mol_type = other DNA
caactactagagagtg

SEQ ID NO: 590 - DNA, 16 bp, synthetic construct
  misc_feature 1..16: note = synthetic [barcode part1]
  source 1..16: mol_type = other DNA
ttccgtacacacctct

SEQ ID NO: 591 - DNA, 16 bp, synthetic construct
  misc_feature 1..16: note = synthetic [barcode part1]
  source 1..16: mol_type = other DNA
ttgcaggtgtcctatt

SEQ ID NO: 592 - DNA, 16 bp, synthetic construct
  misc_feature 1..16: note = synthetic [barcode part1]
  source 1..16: mol_type = other DNA
ttggtcttgtcaacgt

SEQ ID NO: 593 - DNA, 16 bp, synthetic construct
  misc_feature 1..16: note = synthetic [barcode part1]
  source 1..16: mol_type = other DNA
tattcctgagaacgcg

SEQ ID NO: 594 - DNA, 16 bp, synthetic construct
  misc_feature 1..16: note = synthetic [barcode part1]
  source 1..16: mol_type = other DNA
tcagagtaatagacgc

SEQ ID NO: 595 - DNA, 16 bp, synthetic construct
  misc_feature 1..16: note = synthetic [barcode part1]
  source 1..16: mol_type = other DNA
gtgaactggtcgtatc

SEQ ID NO: 596 - DNA, 16 bp, synthetic construct
  misc_feature 1..16: note = synthetic [barcode part1]
  source 1..16: mol_type = other DNA
tcagtcacaaccaacg

SEQ ID NO: 597 - DNA, 16 bp, synthetic construct
  misc_feature 1..16: note = synthetic [barcode part1]
  source 1..16: mol_type = other DNA
aggcgaaccgtgatac

SEQ ID NO: 598 - DNA, 16 bp, synthetic construct
  misc_feature 1..16: note = synthetic [barcode part1]
  source 1..16: mol_type = other DNA
gtacgagagattatcg

SEQ ID NO: 599 - DNA, 16 bp, synthetic construct
  misc_feature 1..16: note = synthetic [barcode part1]
  source 1..16: mol_type = other DNA
gcacaacgaggtcagt

SEQ ID NO: 600 - DNA, 16 bp, synthetic construct
  misc_feature 1..16: note = synthetic [barcode part1]
  source 1..16: mol_type = other DNA
gagatcggtgttcgag

SEQ ID NO: 601 - DNA, 16 bp, synthetic construct
  misc_feature 1..16: note = synthetic [barcode part1]
  source 1..16: mol_type = other DNA
tctgaacagaccggag

SEQ ID NO: 602 - DNA, 16 bp, synthetic construct
  misc_feature 1..16: note = synthetic [barcode part1]
  source 1..16: mol_type = other DNA
ttcctgcagtgacctg

SEQ ID NO: 603 - DNA, 16 bp, synthetic construct
  misc_feature 1..16: note = synthetic [barcode part1]
  source 1..16: mol_type = other DNA
ttaagatcaggtggac

SEQ ID NO: 604 - DNA, 16 bp, synthetic construct
  misc_feature 1..16: note = synthetic [barcode part1]
  source 1..16: mol_type = other DNA
cgcctacttcggaact

SEQ ID NO: 605 - DNA, 16 bp, synthetic construct
  misc_feature 1..16: note = synthetic [barcode part1]
  source 1..16: mol_type = other DNA
gccggttctagaattg

SEQ ID NO: 606 - DNA, 16 bp, synthetic construct
  misc_feature 1..16: note = synthetic [barcode part1]
  source 1..16: mol_type = other DNA
ttccgacctctcaatc

SEQ ID NO: 607 - DNA, 16 bp, synthetic construct
  misc_feature 1..16: note = synthetic [barcode part1]
  source 1..16: mol_type = other DNA
actgtcaacacctccg

SEQ ID NO: 608 - DNA, 16 bp, synthetic construct
  misc_feature 1..16: note = synthetic [barcode part1]
  source 1..16: mol_type = other DNA
acgttactacttgtcg

SEQ ID NO: 609 - DNA, 16 bp, synthetic construct
  misc_feature 1..16: note = synthetic [barcode part1]
  source 1..16: mol_type = other DNA
ccaactatacaacgcg

SEQ ID NO: 610 - DNA, 16 bp, synthetic construct
  misc_feature 1..16: note = synthetic [barcode part1]
  source 1..16: mol_type = other DNA
tccagtcaccaacgtc

SEQ ID NO: 611 - DNA, 16 bp, synthetic construct
  misc_feature 1..16: note = synthetic [barcode part1]
  source 1..16: mol_type = other DNA
tgacttcgccacgtgt

SEQ ID NO: 612 - DNA, 16 bp, synthetic construct
  misc_feature 1..16: note = synthetic [barcode part1]
  source 1..16: mol_type = other DNA
tgtagtggtagacaac

SEQ ID NO: 613 - DNA, 16 bp, synthetic construct
  misc_feature 1..16: note = synthetic [barcode part1]
  source 1..16: mol_type = other DNA
aagaggtagacactct

SEQ ID NO: 614 - DNA, 16 bp, synthetic construct
  misc_feature 1..16: note = synthetic [barcode part1]
  source 1..16: mol_type = other DNA
tagtccaccgcacttg

SEQ ID NO: 615 - DNA, 16 bp, synthetic construct
  misc_feature 1..16: note = synthetic [barcode part1]
  source 1..16: mol_type = other DNA
ccacagaacgagacgt

SEQ ID NO: 616 - DNA, 16 bp, synthetic construct
  misc_feature 1..16: note = synthetic [barcode part1]
  source 1..16: mol_type = other DNA
aagttcgtaaggagtc

SEQ ID NO: 617 - DNA, 16 bp, synthetic construct
  misc_feature 1..16: note = synthetic [barcode part1]
  source 1..16: mol_type = other DNA
cctgaggatatcacac

SEQ ID NO: 618 - DNA, 16 bp, synthetic construct
  misc_feature 1..16: note = synthetic [barcode part1]
  source 1..16: mol_type = other DNA
tcgtcgtctgttctac

SEQ ID NO: 619 - DNA, 16 bp, synthetic construct
  misc_feature 1..16: note = synthetic [barcode part1]
  source 1..16: mol_type = other DNA
atacttatccgccgcg

SEQ ID NO: 620 - DNA, 16 bp, synthetic construct
  misc_feature 1..16: note = synthetic [barcode part1]
  source 1..16: mol_type = other DNA
gcctactacttgtctc

SEQ ID NO: 621 - DNA, 16 bp, synthetic construct
  misc_feature 1..16: note = synthetic [barcode part1]
  source 1..16: mol_type = other DNA
gacaatacagataccg

SEQ ID NO: 622 - DNA, 16 bp, synthetic construct
  misc_feature 1..16: note = synthetic [barcode part1]
  source 1..16: mol_type = other DNA
aatcgtccgtcctcag

SEQ ID NO: 623 - DNA, 16 bp, synthetic construct
  misc_feature 1..16: note = synthetic [barcode part1]
  source 1..16: mol_type = other DNA
cggtgaagatagagtg

SEQ ID NO: 624 - DNA, 16 bp, synthetic construct
  misc_feature 1..16: note = synthetic [barcode part1]
  source 1..16: mol_type = other DNA
gttccgtgaacgtctc

SEQ ID NO: 625 - DNA, 16 bp, synthetic construct
  misc_feature 1..16: note = synthetic [barcode part1]
  source 1..16: mol_type = other DNA
gtaattaatcggcgcc

SEQ ID NO: 626 - DNA, 16 bp, synthetic construct
  misc_feature 1..16: note = synthetic [barcode part1]
  source 1..16: mol_type = other DNA
agtaagaagtcgtgtc

SEQ ID NO: 627 - DNA, 16 bp, synthetic construct
  misc_feature 1..16: note = synthetic [barcode part1]
  source 1..16: mol_type = other DNA
gccgcggtacttattc

SEQ ID NO: 628 - DNA, 16 bp, synthetic construct
  misc_feature 1..16: note = synthetic [barcode part1]
  source 1..16: mol_type = other DNA
gcgtccttacacttct

SEQ ID NO: 629 - DNA, 16 bp, synthetic construct
  misc_feature 1..16: note = synthetic [barcode part1]
  source 1..16: mol_type = other DNA
gtaacggaacacgtcg

SEQ ID NO: 630 - DNA, 16 bp, synthetic construct
  misc_feature 1..16: note = synthetic [barcode part1]
  source 1..16: mol_type = other DNA
acaccaggcacaactt

SEQ ID NO: 631 - DNA, 16 bp, synthetic construct
  misc_feature 1..16: note = synthetic [barcode part1]
  source 1..16: mol_type = other DNA
acgataaggatcggag

SEQ ID NO: 632 - DNA, 16 bp, synthetic construct
  misc_feature 1..16: note = synthetic [barcode part1]
  source 1..16: mol_type = other DNA
gtcgtagtatcgcagt

SEQ ID NO: 633 - DNA, 16 bp, synthetic construct
  misc_feature 1..16: note = synthetic [barcode part1]
  source 1..16: mol_type = other DNA
cagtaggtgttactcg

SEQ ID NO: 634 - DNA, 16 bp, synthetic construct
  misc_feature 1..16: note = synthetic [barcode part1]
  source 1..16: mol_type = other DNA
aagtattccgcaggtc

SEQ ID NO: 635 - DNA, 16 bp, synthetic construct
  misc_feature 1..16: note = synthetic [barcode part1]
  source 1..16: mol_type = other DNA
gaggtgtccaacaacg

SEQ ID NO: 636 - DNA, 16 bp, synthetic construct
  misc_feature 1..16: note = synthetic [barcode part1]
  source 1..16: mol_type = other DNA
tgaacgcctctgtcgt

SEQ ID NO: 637 - DNA, 16 bp, synthetic construct
  misc_feature 1..16: note = synthetic [barcode part1]
  source 1..16: mol_type = other DNA
gttcgtctactgcgac

SEQ ID NO: 638 - DNA, 16 bp, synthetic construct
  misc_feature 1..16: note = synthetic [barcode part1]
  source 1..16: mol_type = other DNA
atcgtacgtgtaaccg

SEQ ID NO: 639 - DNA, 16 bp, synthetic construct
  misc_feature 1..16: note = synthetic [barcode part1]
  source 1..16: mol_type = other DNA
aacaatcgtgcaaggt

SEQ ID NO: 640 - DNA, 16 bp, synthetic construct
  misc_feature 1..16: note = synthetic [barcode part1]
  source 1..16: mol_type = other DNA
cacacttcgtcaagtt

SEQ ID NO: 641 - DNA, 16 bp, synthetic construct
  misc_feature 1..16: note = synthetic [barcode part1]
  source 1..16: mol_type = other DNA
agaagatcctataggc

SEQ ID NO: 642 - DNA, 16 bp, synthetic construct
  misc_feature 1..16: note = synthetic [barcode part1]
  source 1..16: mol_type = other DNA
acacgcctaccaatag

SEQ ID NO: 643 - DNA, 16 bp, synthetic construct
  misc_feature 1..16: note = synthetic [barcode part1]
  source 1..16: mol_type = other DNA
gactggttgaccaact

SEQ ID NO: 644 - DNA, 16 bp, synthetic construct
  misc_feature 1..16: note = synthetic [barcode part1]
  source 1..16: mol_type = other DNA
agaggtctaacgcgtg

SEQ ID NO: 645 - DNA, 16 bp, synthetic construct
  misc_feature 1..16: note = synthetic [barcode part1]
  source 1..16: mol_type = other DNA
aacactggttgtgacc

SEQ ID NO: 646 - DNA, 16 bp, synthetic construct
  misc_feature 1..16: note = synthetic [barcode part1]
  source 1..16: mol_type = other DNA
attctcacctaacgac

SEQ ID NO: 647 - DNA, 16 bp, synthetic construct
  misc_feature 1..16: note = synthetic [barcode part1]
  source 1..16: mol_type = other DNA
actcacagtacggttg

SEQ ID NO: 648 - DNA, 16 bp, synthetic construct
  misc_feature 1..16: note = synthetic [barcode part1]
  source 1..16: mol_type = other DNA
tactaccaacacgtct

SEQ ID NO: 649 - DNA, 16 bp, synthetic construct
  misc_feature 1..16: note = synthetic [barcode part1]
  source 1..16: mol_type = other DNA
aggacgacttagacgc

SEQ ID NO: 650 - DNA, 16 bp, synthetic construct
  misc_feature 1..16: note = synthetic [barcode part1]
  source 1..16: mol_type = other DNA
tgcgcagtaagttcac

SEQ ID NO: 651 - DNA, 16 bp, synthetic construct
  misc_feature 1..16: note = synthetic [barcode part1]
  source 1..16: mol_type = other DNA
gtctgcggaaggttag

SEQ ID NO: 652 - DNA, 16 bp, synthetic construct
  misc_feature 1..16: note = synthetic [barcode part1]
  source 1..16: mol_type = other DNA
attagttcggttggcg

SEQ ID NO: 653 - DNA, 16 bp, synthetic construct
  misc_feature 1..16: note = synthetic [barcode part1]
  source 1..16: mol_type = other DNA
tcgaacttccttacag

SEQ ID NO: 654 - DNA, 16 bp, synthetic construct
  misc_feature 1..16: note = synthetic [barcode part1]
  source 1..16: mol_type = other DNA
tacagtgttactcgtc

SEQ ID NO: 655 - DNA, 16 bp, synthetic construct
  misc_feature 1..16: note = synthetic [barcode part1]
  source 1..16: mol_type = other DNA
ccttattggtgaggtg

SEQ ID NO: 656 - DNA, 16 bp, synthetic construct
  misc_feature 1..16: note = synthetic [barcode part1]
  source 1..16: mol_type = other DNA
gtctgtcttatagtgc

SEQ ID NO: 657 - DNA, 16 bp, synthetic construct
  misc_feature 1..16: note = synthetic [barcode part1]
  source 1..16: mol_type = other DNA
atcagactcgcactcc

SEQ ID NO: 658 - DNA, 16 bp, synthetic construct
  misc_feature 1..16: note = synthetic [barcode part1]
  source 1..16: mol_type = other DNA
actcggagtctgtagt

SEQ ID NO: 659 - DNA, 16 bp, synthetic construct
  misc_feature 1..16: note = synthetic [barcode part1]
  source 1..16: mol_type = other DNA
tatacaacgttggcgc

SEQ ID NO: 660 - DNA, 16 bp, synthetic construct
  misc_feature 1..16: note = synthetic [barcode part1]
  source 1..16: mol_type = other DNA
cgacaatccgaatcac

SEQ ID NO: 661 - DNA, 16 bp, synthetic construct
  misc_feature 1..16: note = synthetic [barcode part1]
  source 1..16: mol_type = other DNA
tcgtctaagtgtcact

SEQ ID NO: 662 - DNA, 16 bp, synthetic construct
  misc_feature 1..16: note = synthetic [barcode part1]
  source 1..16: mol_type = other DNA
tcggataacctgtgac

SEQ ID NO: 663 - DNA, 16 bp, synthetic construct
  misc_feature 1..16: note = synthetic [barcode part1]
  source 1..16: mol_type = other DNA
gactccgataacactg

SEQ ID NO: 664 - DNA, 16 bp, synthetic construct
  misc_feature 1..16: note = synthetic [barcode part1]
  source 1..16: mol_type = other DNA
acagttctaccgagtg

SEQ ID NO: 665 - DNA, 16 bp, synthetic construct
  misc_feature 1..16: note = synthetic [barcode part1]
  source 1..16: mol_type = other DNA
gactgatagaggagac

SEQ ID NO: 666 - DNA, 16 bp, synthetic construct
  misc_feature 1..16: note = synthetic [barcode part1]
  source 1..16: mol_type = other DNA
atagaggtcgacgatt

SEQ ID NO: 667 - DNA, 16 bp, synthetic construct
  misc_feature 1..16: note = synthetic [barcode part1]
  source 1..16: mol_type = other DNA
taagacaccgtcgttg

SEQ ID NO: 668 - DNA, 16 bp, synthetic construct
  misc_feature 1..16: note = synthetic [barcode part1]
  source 1..16: mol_type = other DNA
cggttcttacggttgc

SEQ ID NO: 669 - DNA, 16 bp, synthetic construct
  misc_feature 1..16: note = synthetic [barcode part1]
  source 1..16: mol_type = other DNA
agaatccacggtatcc

SEQ ID NO: 670 - DNA, 16 bp, synthetic construct
  misc_feature 1..16: note = synthetic [barcode part1]
  source 1..16: mol_type = other DNA
caaggaacgacgtatt

SEQ ID NO: 671 - DNA, 16 bp, synthetic construct
  misc_feature 1..16: note = synthetic [barcode part1]
  source 1..16: mol_type = other DNA
cagtgaccagtagtct

SEQ ID NO: 672 - DNA, 16 bp, synthetic construct
  misc_feature 1..16: note = synthetic [barcode part1]
  source 1..16: mol_type = other DNA
tacgtaacaggtccgt

SEQ ID NO: 673 - DNA, 16 bp, synthetic construct
  misc_feature 1..16: note = synthetic [barcode part1]
  source 1..16: mol_type = other DNA
gattagaccgcgcaag

SEQ ID NO: 674 - DNA, 16 bp, synthetic construct
  misc_feature 1..16: note = synthetic [barcode part1]
  source 1..16: mol_type = other DNA
gtcacttacgaacctt

SEQ ID NO: 675 - DNA, 16 bp, synthetic construct
  misc_feature 1..16: note = synthetic [barcode part1]
  source 1..16: mol_type = other DNA
acagtggcactaatag

SEQ ID NO: 676 - DNA, 16 bp, synthetic construct
  misc_feature 1..16: note = synthetic [barcode part1]
  source 1..16: mol_type = other DNA
gactgttgaactgtcg

SEQ ID NO: 677 - DNA, 16 bp, synthetic construct
  misc_feature 1..16: note = synthetic [barcode part1]
  source 1..16: mol_type = other DNA
tgacacgtgattctct

SEQ ID NO: 678 - DNA, 16 bp, synthetic construct
  misc_feature 1..16: note = synthetic [barcode part1]
  source 1..16: mol_type = other DNA
tcggaagtagtaggag

SEQ ID NO: 679 - DNA, 16 bp, synthetic construct
  misc_feature 1..16: note = synthetic [barcode part1]
  source 1..16: mol_type = other DNA
ttattgagtgcctctg

SEQ ID NO: 680 - DNA, 16 bp, synthetic construct
  misc_feature 1..16: note = synthetic [barcode part1]
  source 1..16: mol_type = other DNA
gcacacgtagttgatc

SEQ ID NO: 681 - DNA, 16 bp, synthetic construct
  misc_feature 1..16: note = synthetic [barcode part1]
  source 1..16: mol_type = other DNA
tacactggttggtacg

SEQ ID NO: 682 - DNA, 16 bp, synthetic construct
  misc_feature 1..16: note = synthetic [barcode part1]
  source 1..16: mol_type = other DNA
ttagtgcaaggttgag

SEQ ID NO: 683 - DNA, 16 bp, synthetic construct
  misc_feature 1..16: note = synthetic [barcode part1]
  source 1..16: mol_type = other DNA
gattgcacgatacgtc

SEQ ID NO: 684 - DNA, 16 bp, synthetic construct
  misc_feature 1..16: note = synthetic [barcode part1]
  source 1..16: mol_type = other DNA
cctgcgtaatccaatt

SEQ ID NO: 685 - DNA, 16 bp, synthetic construct
  misc_feature 1..16: note = synthetic [barcode part1]
  source 1..16: mol_type = other DNA
aataaggccaggtgcc

SEQ ID NO: 686 - DNA, 16 bp, synthetic construct
  misc_feature 1..16: note = synthetic [barcode part1]
  source 1..16: mol_type = other DNA
gttgtgactcgaagtc

SEQ ID NO: 687 - DNA, 16 bp, synthetic construct
  misc_feature 1..16: note = synthetic [barcode part1]
  source 1..16: mol_type = other DNA
tgtgatcagtccgtag

SEQ ID NO: 688 - DNA, 16 bp, synthetic construct
  misc_feature 1..16: note = synthetic [barcode part1]
  source 1..16: mol_type = other DNA
gattgatcgcacgtgt

SEQ ID NO: 689 - DNA, 16 bp, synthetic construct
  misc_feature 1..16: note = synthetic [barcode part1]
  source 1..16: mol_type = other DNA
gtggtacgtacgtact

SEQ ID NO: 690 - DNA, 16 bp, synthetic construct
  misc_feature 1..16: note = synthetic [barcode part1]
  source 1..16: mol_type = other DNA
tcgataggcagagacc

SEQ ID NO: 691 - DNA, 16 bp, synthetic construct
  misc_feature 1..16: note = synthetic [barcode part1]
  source 1..16: mol_type = other DNA
gactgtactctaatcc

SEQ ID NO: 692 - DNA, 16 bp, synthetic construct
  misc_feature 1..16: note = synthetic [barcode part1]
  source 1..16: mol_type = other DNA
tccttcgatccagacg

SEQ ID NO: 693 - DNA, 16 bp, synthetic construct
  misc_feature 1..16: note = synthetic [barcode part1]
  source 1..16: mol_type = other DNA
cactagtctaaccttg

SEQ ID NO: 694 - DNA, 16 bp, synthetic construct
  misc_feature 1..16: note = synthetic [barcode part1]
  source 1..16: mol_type = other DNA
tctgcgcagaagtgtt

SEQ ID NO: 695 - DNA, 16 bp, synthetic construct
  misc_feature 1..16: note = synthetic [barcode part1]
  source 1..16: mol_type = other DNA
cgaggtccaatactac

SEQ ID NO: 696 - DNA, 16 bp, synthetic construct
  misc_feature 1..16: note = synthetic [barcode part1]
  source 1..16: mol_type = other DNA
tctcgcaagttatcac

SEQ ID NO: 697 - DNA, 16 bp, synthetic construct
  misc_feature 1..16: note = synthetic [barcode part1]
  source 1..16: mol_type = other DNA
acggccgtcttagtct

SEQ ID NO: 698 - DNA, 16 bp, synthetic construct
  misc_feature 1..16: note = synthetic [barcode part1]
  source 1..16: mol_type = other DNA
atccagaggatagtac

SEQ ID NO: 699 - DNA, 16 bp, synthetic construct
  misc_feature 1..16: note = synthetic [barcode part1]
  source 1..16: mol_type = other DNA
cctaagatcgagactc

SEQ ID NO: 700 - DNA, 16 bp, synthetic construct
  misc_feature 1..16: note = synthetic [barcode part1]
  source 1..16: mol_type = other DNA
gcctgaactacgagtt

SEQ ID NO: 701 - DNA, 16 bp, synthetic construct
  misc_feature 1..16: note = synthetic [barcode part1]
  source 1..16: mol_type = other DNA
gaccgatatcgtgact

SEQ ID NO: 702 - DNA, 16 bp, synthetic construct
  misc_feature 1..16: note = synthetic [barcode part1]
  source 1..16: mol_type = other DNA
gttcgccgatattact

SEQ ID NO: 703 - DNA, 16 bp, synthetic construct
  misc_feature 1..16: note = synthetic [barcode part1]
  source 1..16: mol_type = other DNA
atcttctcgcgaccag

SEQ ID NO: 704 - DNA, 16 bp, synthetic construct
  misc_feature 1..16: note = synthetic [barcode part1]
  source 1..16: mol_type = other DNA
cctcgttactctgttg

SEQ ID NO: 705 - DNA, 16 bp, synthetic construct
  misc_feature 1..16: note = synthetic [barcode part1]
  source 1..16: mol_type = other DNA
tcaaggtcagaacctc

SEQ ID NO: 706 - DNA, 16 bp, synthetic construct
  misc_feature 1..16: note = synthetic [barcode part1]
  source 1..16: mol_type = other DNA
atcagactcgcgtctc

SEQ ID NO: 707 - DNA, 16 bp, synthetic construct
  misc_feature 1..16: note = synthetic [barcode part1]
  source 1..16: mol_type = other DNA
gcgacaattatcaccg

SEQ ID NO: 708 - DNA, 16 bp, synthetic construct
  misc_feature 1..16: note = synthetic [barcode part1]
  source 1..16: mol_type = other DNA
gtaccgacgacgaagt

SEQ ID NO: 709 - DNA, 16 bp, synthetic construct
  misc_feature 1..16: note = synthetic [barcode part1]
  source 1..16: mol_type = other DNA
gaatacaattgccgag

SEQ ID NO: 710 - DNA, 16 bp, synthetic construct
  misc_feature 1..16: note = synthetic [barcode part1]
  source 1..16: mol_type = other DNA
cagtacttatcgcgag

SEQ ID NO: 711 - DNA, 16 bp, synthetic construct
  misc_feature 1..16: note = synthetic [barcode part1]
  source 1..16: mol_type = other DNA
acgtcaacgacctctc

SEQ ID NO: 712 - DNA, 16 bp, synthetic construct
  misc_feature 1..16: note = synthetic [barcode part1]
  source 1..16: mol_type = other DNA
tgttgagattctcacc

SEQ ID NO: 713 - DNA, 16 bp, synthetic construct
  misc_feature 1..16: note = synthetic [barcode part1]
  source 1..16: mol_type = other DNA
gttgtagattcgtctc

SEQ ID NO: 714 - DNA, 16 bp, synthetic construct
  misc_feature 1..16: note = synthetic [barcode part1]
  source 1..16: mol_type = other DNA
cctcctagaatacttg

SEQ ID NO: 715 - DNA, 16 bp, synthetic construct
  misc_feature 1..16: note = synthetic [barcode part1]
  source 1..16: mol_type = other DNA
tatcactgtctgaacc

SEQ ID NO: 716 - DNA, 16 bp, synthetic construct
  misc_feature 1..16: note = synthetic [barcode part1]
  source 1..16: mol_type = other DNA
ttcggttctccgactt

SEQ ID NO: 717 - DNA, 16 bp, synthetic construct
  misc_feature 1..16: note = synthetic [barcode part1]
  source 1..16: mol_type = other DNA
tgcctgccaagactct

SEQ ID NO: 718 - DNA, 16 bp, synthetic construct
  misc_feature 1..16: note = synthetic [barcode part1]
  source 1..16: mol_type = other DNA
aataactggaacgtgc

SEQ ID NO: 719 - DNA, 16 bp, synthetic construct
  misc_feature 1..16: note = synthetic [barcode part1]
  source 1..16: mol_type = other DNA
ataggaaccttacgcc

SEQ ID NO: 720 - DNA, 16 bp, synthetic construct
  misc_feature 1..16: note = synthetic [barcode part1]
  source 1..16: mol_type = other DNA
aagtggaggcgtcgtt

SEQ ID NO: 721 - DNA, 16 bp, synthetic construct
  misc_feature 1..16: note = synthetic [barcode part1]
  source 1..16: mol_type = other DNA
ttacgtctcgccgagt

SEQ ID NO: 722 - DNA, 16 bp, synthetic construct
  misc_feature 1..16: note = synthetic [barcode part1]
  source 1..16: mol_type = other DNA
tctacgtcagtggcct

SEQ ID NO: 723 - DNA, 16 bp, synthetic construct
  misc_feature 1..16: note = synthetic [barcode part1]
  source 1..16: mol_type = other DNA
ccttcgtcttggtgag

SEQ ID NO: 724 - DNA, 16 bp, synthetic construct
  misc_feature 1..16: note = synthetic [barcode part1]
  source 1..16: mol_type = other DNA
gtctccaatccagtgc

SEQ ID NO: 725 - DNA, 16 bp, synthetic construct
  misc_feature 1..16: note = synthetic [barcode part1]
  source 1..16: mol_type = other DNA
cctctggtacacaatt

SEQ ID NO: 726 - DNA, 16 bp, synthetic construct
  misc_feature 1..16: note = synthetic [barcode part1]
  source 1..16: mol_type = other DNA
gtaaggaccgatagtt

SEQ ID NO: 727 - DNA, 16 bp, synthetic construct
  misc_feature 1..16: note = synthetic [barcode part1]
  source 1..16: mol_type = other DNA
cgaagactatcctcag

SEQ ID NO: 728 - DNA, 16 bp, synthetic construct
  misc_feature 1..16: note = synthetic [barcode part1]
  source 1..16: mol_type = other DNA
tcaaggtcaaggtctc

SEQ ID NO: 729 - DNA, 16 bp, synthetic construct
  misc_feature 1..16: note = synthetic [barcode part1]
  source 1..16: mol_type = other DNA
acaccgcaacaggtag

SEQ ID NO: 730 - DNA, 16 bp, synthetic construct
  misc_feature 1..16: note = synthetic [barcode part1]
  source 1..16: mol_type = other DNA
tcaactgcacagtgtg

SEQ ID NO: 731 - DNA, 16 bp, synthetic construct
  misc_feature 1..16: note = synthetic [barcode part1]
  source 1..16: mol_type = other DNA
aatccgtcttaggcag

SEQ ID NO: 732 - DNA, 16 bp, synthetic construct
  misc_feature 1..16: note = synthetic [barcode part1]
  source 1..16: mol_type = other DNA
gtccacctgttacggt

SEQ ID NO: 733 - DNA, 16 bp, synthetic construct
  misc_feature 1..16: note = synthetic [barcode part1]
  source 1..16: mol_type = other DNA
tccgtgtcaacttggc

SEQ ID NO: 734 - DNA, 16 bp, synthetic construct
  misc_feature 1..16: note = synthetic [barcode part1]
  source 1..16: mol_type = other DNA
tggttctacgtcgatt

SEQ ID NO: 735 - DNA, 16 bp, synthetic construct
  misc_feature 1..16: note = synthetic [barcode part1]
  source 1..16: mol_type = other DNA
tcagtcaccaatcgag

SEQ ID NO: 736 - DNA, 16 bp, synthetic construct
  misc_feature 1..16: note = synthetic [barcode part1]
  source 1..16: mol_type = other DNA
agtgactaacctggtc

SEQ ID NO: 737 - DNA, 16 bp, synthetic construct
  misc_feature 1..16: note = synthetic [barcode part1]
  source 1..16: mol_type = other DNA
cgagattgagaccttc

SEQ ID NO: 738 - DNA, 16 bp, synthetic construct
  misc_feature 1..16: note = synthetic [barcode part1]
  source 1..16: mol_type = other DNA
caacctctacgtgacc

SEQ ID NO: 739 - DNA, 16 bp, synthetic construct
  misc_feature 1..16: note = synthetic [barcode part1]
  source 1..16: mol_type = other DNA
ccgtactgaacacaac

SEQ ID NO: 740 - DNA, 16 bp, synthetic construct
  misc_feature 1..16: note = synthetic [barcode part1]
  source 1..16: mol_type = other DNA
gcgtcacacctatctg

SEQ ID NO: 741 - DNA, 16 bp, synthetic construct
  misc_feature 1..16: note = synthetic [barcode part1]
  source 1..16: mol_type = other DNA
gatccgattgacgact

SEQ ID NO: 742 - DNA, 16 bp, synthetic construct
  misc_feature 1..16: note = synthetic [barcode part1]
  source 1..16: mol_type = other DNA
aatctctcgcactggc

SEQ ID NO: 743 - DNA, 16 bp, synthetic construct
  misc_feature 1..16: note = synthetic [barcode part1]
  source 1..16: mol_type = other DNA
cgcactgtatacagtg

SEQ ID NO: 744 - DNA, 16 bp, synthetic construct
  misc_feature 1..16: note = synthetic [barcode part1]
  source 1..16: mol_type = other DNA
tactcgtgtggacagt

SEQ ID NO: 745 - DNA, 16 bp, synthetic construct
  misc_feature 1..16: note = synthetic [barcode part1]
  source 1..16: mol_type = other DNA
tggcgcaactacttcc

SEQ ID NO: 746 - DNA, 16 bp, synthetic construct
  misc_feature 1..16: note = synthetic [barcode part1]
  source 1..16: mol_type = other DNA
agtcgacaactccagt

SEQ ID NO: 747 - DNA, 16 bp, synthetic construct
  misc_feature 1..16: note = synthetic [barcode part1]
  source 1..16: mol_type = other DNA
gcacaagtatcctcag

SEQ ID NO: 748 - DNA, 16 bp, synthetic construct
  misc_feature 1..16: note = synthetic [barcode part1]
  source 1..16: mol_type = other DNA
gttcgatcaacggttg

SEQ ID NO: 749 - DNA, 16 bp, synthetic construct
  misc_feature 1..16: note = synthetic [barcode part1]
  source 1..16: mol_type = other DNA
tctggatcagacctag

SEQ ID NO: 750 - DNA, 16 bp, synthetic construct
  misc_feature 1..16: note = synthetic [barcode part1]
  source 1..16: mol_type = other DNA
ttagacaacgacgagt

SEQ ID NO: 751 - DNA, 16 bp, synthetic construct
  misc_feature 1..16: note = synthetic [barcode part1]
  source 1..16: mol_type = other DNA
tccacacgacttgacc

SEQ ID NO: 752 - DNA, 16 bp, synthetic construct
  misc_feature 1..16: note = synthetic [barcode part1]
  source 1..16: mol_type = other DNA
caagttccttgtcgcg

SEQ ID NO: 753 - DNA, 16 bp, synthetic construct
  misc_feature 1..16: note = synthetic [barcode part1]
  source 1..16: mol_type = other DNA
gtgtgccggtatattg

SEQ ID NO: 754 - DNA, 16 bp, synthetic construct
  misc_feature 1..16: note = synthetic [barcode part1]
  source 1..16: mol_type = other DNA
actgcggagacgaatc

SEQ ID NO: 755 - DNA, 16 bp, synthetic construct
  misc_feature 1..16: note = synthetic [barcode part1]
  source 1..16: mol_type = other DNA
aattccgaacgttgcg

SEQ ID NO: 756 - DNA, 16 bp, synthetic construct
  misc_feature 1..16: note = synthetic [barcode part1]
  source 1..16: mol_type = other DNA
gtacacgtacacgtgt

SEQ ID NO: 757 - DNA, 16 bp, synthetic construct
  misc_feature 1..16: note = synthetic [barcode part1]
  source 1..16: mol_type = other DNA
ttgcgataattggccg

SEQ ID NO: 758 - DNA, 16 bp, synthetic construct
  misc_feature 1..16: note = synthetic [barcode part1]
  source 1..16: mol_type = other DNA
cagattcaggttcgtg

SEQ ID NO: 759 - DNA, 16 bp, synthetic construct
  misc_feature 1..16: note = synthetic [barcode part1]
  source 1..16: mol_type = other DNA
gagagtgtatcctcac

SEQ ID NO: 760 - DNA, 16 bp, synthetic construct
  misc_feature 1..16: note = synthetic [barcode part1]
  source 1..16: mol_type = other DNA
gtatcgtcctagaacg

SEQ ID NO: 761 - DNA, 16 bp, synthetic construct
  misc_feature 1..16: note = synthetic [barcode part1]
  source 1..16: mol_type = other DNA
tccagtagttctcgcg

SEQ ID NO: 762 - DNA, 16 bp, synthetic construct
  misc_feature 1..16: note = synthetic [barcode part1]
  source 1..16: mol_type = other DNA
tactctgcctaggcgt

SEQ ID NO: 763 - DNA, 16 bp, synthetic construct
  misc_feature 1..16: note = synthetic [barcode part1]
  source 1..16: mol_type = other DNA
tgaccttgtcgcgtgt

SEQ ID NO: 764 - DNA, 16 bp, synthetic construct
  misc_feature 1..16: note = synthetic [barcode part1]
  source 1..16: mol_type = other DNA
ttcggaggtcagttgt

SEQ ID NO: 765 - DNA, 16 bp, synthetic construct
  misc_feature 1..16: note = synthetic [barcode part1]
  source 1..16: mol_type = other DNA
tacgtctctgttgagt

SEQ ID NO: 766 - DNA, 16 bp, synthetic construct
  misc_feature 1..16: note = synthetic [barcode part1]
  source 1..16: mol_type = other DNA
aacggagtcgaatatc

SEQ ID NO: 767 - DNA, 16 bp, synthetic construct
  misc_feature 1..16: note = synthetic [barcode part1]
  source 1..16: mol_type = other DNA
gaacagaacttcaggt

SEQ ID NO: 768 - DNA, 16 bp, synthetic construct
  misc_feature 1..16: note = synthetic [barcode part1]
  source 1..16: mol_type = other DNA
tgttaccttcgtgagt

SEQ ID NO: 769 - DNA, 16 bp, synthetic construct
  misc_feature 1..16: note = synthetic [barcode part1]
  source 1..16: mol_type = other DNA
aagtaacggaacgacg

SEQ ID NO: 770 - DNA, 16 bp, synthetic construct
  misc_feature 1..16: note = synthetic [barcode part1]
  source 1..16: mol_type = other DNA
cgattagttccaggac

SEQ ID NO: 771 - DNA, 16 bp, synthetic construct
  misc_feature 1..16: note = synthetic [barcode part1]
  source 1..16: mol_type = other DNA
tgattgagtcgcggtt

SEQ ID NO: 772 - DNA, 16 bp, synthetic construct
  misc_feature 1..16: note = synthetic [barcode part1]
  source 1..16: mol_type = other DNA
actaacgaggtgtctc

SEQ ID NO: 773 - DNA, 16 bp, synthetic construct
  misc_feature 1..16: note = synthetic [barcode part1]
  source 1..16: mol_type = other DNA
cgacgattgcactcct

SEQ ID NO: 774 - DNA, 16 bp, synthetic construct
  misc_feature 1..16: note = synthetic [barcode part1]
  source 1..16: mol_type = other DNA
aactgtggtgtgttgc

SEQ ID NO: 775 - DNA, 16 bp, synthetic construct
  misc_feature 1..16: note = synthetic [barcode part1]
  source 1..16: mol_type = other DNA
attgtcgaccgaatcg

SEQ ID NO: 776 - DNA, 16 bp, synthetic construct
  misc_feature 1..16: note = synthetic [barcode part1]
  source 1..16: mol_type = other DNA
gtaggcctcttactgc

SEQ ID NO: 777 - DNA, 16 bp, synthetic construct
  misc_feature 1..16: note = synthetic [barcode part1]
  source 1..16: mol_type = other DNA
tagaacacactccgtg

SEQ ID NO: 778 - DNA, 16 bp, synthetic construct
  misc_feature 1..16: note = synthetic [barcode part1]
  source 1..16: mol_type = other DNA
acttgacgtgtaagag

SEQ ID NO: 779 - DNA, 16 bp, synthetic construct
  misc_feature 1..16: note = synthetic [barcode part1]
  source 1..16: mol_type = other DNA
tccaatcacgcgtcgt

SEQ ID NO: 780 - DNA, 16 bp, synthetic construct
  misc_feature 1..16: note = synthetic [barcode part1]
  source 1..16: mol_type = other DNA
tcagtcaggccttaag

SEQ ID NO: 781 - DNA, 16 bp, synthetic construct
  misc_feature 1..16: note = synthetic [barcode part1]
  source 1..16: mol_type = other DNA
tctgttaggtcgcgtc

SEQ ID NO: 782 - DNA, 16 bp, synthetic construct
  misc_feature 1..16: note = synthetic [barcode part1]
  source 1..16: mol_type = other DNA
gtaagtcacgtgactc

SEQ ID NO: 783 - DNA, 16 bp, synthetic construct
  misc_feature 1..16: note = synthetic [barcode part1]
  source 1..16: mol_type = other DNA
tcttgcgttccgtatc

SEQ ID NO: 784 - DNA, 16 bp, synthetic construct
  misc_feature 1..16: note = synthetic [barcode part1]
  source 1..16: mol_type = other DNA
cactggacaaggacgt

SEQ ID NO: 785 - DNA, 16 bp, synthetic construct
  misc_feature 1..16: note = synthetic [barcode part1]
  source 1..16: mol_type = other DNA
tatccagaatcacgcg

SEQ ID NO: 786 - DNA, 16 bp, synthetic construct
  misc_feature 1..16: note = synthetic [barcode part1]
  source 1..16: mol_type = other DNA
tctcaccacgaacctg

SEQ ID NO: 787 - DNA, 16 bp, synthetic construct
  misc_feature 1..16: note = synthetic [barcode part1]
  source 1..16: mol_type = other DNA
gtggaaccagagtaag

SEQ ID NO: 788 - DNA, 16 bp, synthetic construct
  misc_feature 1..16: note = synthetic [barcode part1]
  source 1..16: mol_type = other DNA
tcaagtcgaggtatag

SEQ ID NO: 789 - DNA, 16 bp, synthetic construct
  misc_feature 1..16: note = synthetic [barcode part1]
  source 1..16: mol_type = other DNA
gagacttggcgaacac

SEQ ID NO: 790 - DNA, 16 bp, synthetic construct
  misc_feature 1..16: note = synthetic [barcode part1]
  source 1..16: mol_type = other DNA
tagtggcgtatctctt

SEQ ID NO: 791 - DNA, 16 bp, synthetic construct
  misc_feature 1..16: note = synthetic [barcode part1]
  source 1..16: mol_type = other DNA
cctagttccgatctct

SEQ ID NO: 792 - DNA, 16 bp, synthetic construct
  misc_feature 1..16: note = synthetic [barcode part1]
  source 1..16: mol_type = other DNA
gcactagtgacttctt

SEQ ID NO: 793 - DNA, 16 bp, synthetic construct
  misc_feature 1..16: note = synthetic [barcode part1]
  source 1..16: mol_type = other DNA
taacaataggagtgcc

SEQ ID NO: 794 - DNA, 16 bp, synthetic construct
  misc_feature 1..16: note = synthetic [barcode part1]
  source 1..16: mol_type = other DNA
cgatcttgtgtatcgt

SEQ ID NO: 795 - DNA, 16 bp, synthetic construct
  misc_feature 1..16: note = synthetic [barcode part1]
  source 1..16: mol_type = other DNA
gttataggacgagtgt

SEQ ID NO: 796 - DNA, 16 bp, synthetic construct
  misc_feature 1..16: note = synthetic [barcode part1]
  source 1..16: mol_type = other DNA
taggccgttctcgtac

SEQ ID NO: 797 - DNA, 16 bp, synthetic construct
  misc_feature 1..16: note = synthetic [barcode part1]
  source 1..16: mol_type = other DNA
aaccttccgacttcct

SEQ ID NO: 798 - DNA, 16 bp, synthetic construct
  misc_feature 1..16: note = synthetic [barcode part1]
  source 1..16: mol_type = other DNA
gattgacgatcagtcc

SEQ ID NO: 799 - DNA, 16 bp, synthetic construct
  misc_feature 1..16: note = synthetic [barcode part1]
  source 1..16: mol_type = other DNA
aatacgcagagtcggc

SEQ ID NO: 800 - DNA, 16 bp, synthetic construct
  misc_feature 1..16: note = synthetic [barcode part1]
  source 1..16: mol_type = other DNA
aagtaaggtcttaggc

SEQ ID NO: 801 - DNA, 16 bp, synthetic construct
  misc_feature 1..16: note = synthetic [barcode part1]
  source 1..16: mol_type = other DNA
gcaatcttgagtcgtg

SEQ ID NO: 802 - DNA, 16 bp, synthetic construct
  misc_feature 1..16: note = synthetic [barcode part1]
  source 1..16: mol_type = other DNA
gatctgatacgttctc

SEQ ID NO: 803 - DNA, 16 bp, synthetic construct
  misc_feature 1..16: note = synthetic [barcode part1]
  source 1..16: mol_type = other DNA
gtaccaagtacgatcc

SEQ ID NO: 804 - DNA, 16 bp, synthetic construct
  misc_feature 1..16: note = synthetic [barcode part1]
  source 1..16: mol_type = other DNA
gtcacctaagttcgcc

SEQ ID NO: 805 - DNA, 16 bp, synthetic construct
  misc_feature 1..16: note = synthetic [barcode part1]
  source 1..16: mol_type = other DNA
gagaattcgcgaccag

SEQ ID NO: 806 - DNA, 16 bp, synthetic construct
  misc_feature 1..16: note = synthetic [barcode part1]
  source 1..16: mol_type = other DNA
gtctactacgatacct

SEQ ID NO: 807 - DNA, 16 bp, synthetic construct
  misc_feature 1..16: note = synthetic [barcode part1]
  source 1..16: mol_type = other DNA
cgtcttctgtactctg

SEQ ID NO: 808 - DNA, 16 bp, synthetic construct
  misc_feature 1..16: note = synthetic [barcode part1]
  source 1..16: mol_type = other DNA
tacactcctaccaagt

SEQ ID NO: 809 - DNA, 16 bp, synthetic construct
  misc_feature 1..16: note = synthetic [barcode part1]
  source 1..16: mol_type = other DNA
taggcgaagtattacg

SEQ ID NO: 810 - DNA, 16 bp, synthetic construct
  misc_feature 1..16: note = synthetic [barcode part1]
  source 1..16: mol_type = other DNA
ttgaattcgcgaagag

SEQ ID NO: 811 - DNA, 16 bp, synthetic construct
  misc_feature 1..16: note = synthetic [barcode part1]
  source 1..16: mol_type = other DNA
actacgatactcgttc

SEQ ID NO: 812 - DNA, 16 bp, synthetic construct
  misc_feature 1..16: note = synthetic [barcode part1]
  source 1..16: mol_type = other DNA
tggacttaacgcctag

SEQ ID NO: 813 - DNA, 16 bp, synthetic construct
  misc_feature 1..16: note = synthetic [barcode part1]
  source 1..16: mol_type = other DNA
agtacggtagattgtg

SEQ ID NO: 814 - DNA, 16 bp, synthetic construct
  misc_feature 1..16: note = synthetic [barcode part1]
  source 1..16: mol_type = other DNA
aacgtgtctccttggc

SEQ ID NO: 815 - DNA, 16 bp, synthetic construct
  misc_feature 1..16: note = synthetic [barcode part1]
  source 1..16: mol_type = other DNA
agtgttcgcgagacag

SEQ ID NO: 816 - DNA, 16 bp, synthetic construct
  misc_feature 1..16: note = synthetic [barcode part1]
  source 1..16: mol_type = other DNA
ttcgcaccaataactc

SEQ ID NO: 817 - DNA, 16 bp, synthetic construct
  misc_feature 1..16: note = synthetic [barcode part1]
  source 1..16: mol_type = other DNA
tacttacgaacggacc

SEQ ID NO: 818 - DNA, 16 bp, synthetic construct
  misc_feature 1..16: note = synthetic [barcode part1]
  source 1..16: mol_type = other DNA
gcggaatagtacttag

SEQ ID NO: 819 - DNA, 16 bp, synthetic construct
  misc_feature 1..16: note = synthetic [barcode part1]
  source 1..16: mol_type = other DNA
tcctatagactcgatc

SEQ ID NO: 820 - DNA, 16 bp, synthetic construct
  misc_feature 1..16: note = synthetic [barcode part1]
  source 1..16: mol_type = other DNA
tacgtaatcactgcct

SEQ ID NO: 821 - DNA, 16 bp, synthetic construct
  misc_feature 1..16: note = synthetic [barcode part1]
  source 1..16: mol_type = other DNA
atctccgagtggttcc

SEQ ID NO: 822 - DNA, 16 bp, synthetic construct
  misc_feature 1..16: note = synthetic [barcode part1]
  source 1..16: mol_type = other DNA
gtagttactctgacct

SEQ ID NO: 823 - DNA, 16 bp, synthetic construct
  misc_feature 1..16: note = synthetic [barcode part1]
  source 1..16: mol_type = other DNA
tggatatcgatctcct

SEQ ID NO: 824 - DNA, 16 bp, synthetic construct
  misc_feature 1..16: note = synthetic [barcode part1]
  source 1..16: mol_type = other DNA
caccttccggtagttg

SEQ ID NO: 825 - DNA, 16 bp, synthetic construct
  misc_feature 1..16: note = synthetic [barcode part1]
  source 1..16: mol_type = other DNA
tgtcaggacaatccgt

SEQ ID NO: 826 - DNA, 16 bp, synthetic construct
  misc_feature 1..16: note = synthetic [barcode part1]
  source 1..16: mol_type = other DNA
tctctaaggaactggc

SEQ ID NO: 827 - DNA, 16 bp, synthetic construct
  misc_feature 1..16: note = synthetic [barcode part1]
  source 1..16: mol_type = other DNA
cggccgaattgtagtt

SEQ ID NO: 828 - DNA, 16 bp, synthetic construct
  misc_feature 1..16: note = synthetic [barcode part1]
  source 1..16: mol_type = other DNA
tgcactacttcttgag

SEQ ID NO: 829 - DNA, 16 bp, synthetic construct
  misc_feature 1..16: note = synthetic [barcode part1]
  source 1..16: mol_type = other DNA
cacttgccggaacttc

SEQ ID NO: 830 - DNA, 16 bp, synthetic construct
  misc_feature 1..16: note = synthetic [barcode part1]
  source 1..16: mol_type = other DNA
ttcgacacaagtcacg

SEQ ID NO: 831 - DNA, 16 bp, synthetic construct
  misc_feature 1..16: note = synthetic [barcode part1]
  source 1..16: mol_type = other DNA
tgcggcgaggtaagtt

SEQ ID NO: 832 - DNA, 16 bp, synthetic construct
  misc_feature 1..16: note = synthetic [barcode part1]
  source 1..16: mol_type = other DNA
agtacgtgtgtgtcac

SEQ ID NO: 833 - DNA, 16 bp, synthetic construct
  misc_feature 1..16: note = synthetic [barcode part1]
  source 1..16: mol_type = other DNA
cagtgtagattgcgtc

SEQ ID NO: 834 - DNA, 16 bp, synthetic construct
  misc_feature 1..16: note = synthetic [barcode part1]
  source 1..16: mol_type = other DNA
tcgtcaacggttcaag

SEQ ID NO: 835 - DNA, 16 bp, synthetic construct
  misc_feature 1..16: note = synthetic [barcode part1]
  source 1..16: mol_type = other DNA
gagtatctgccgttcc

SEQ ID NO: 836 - DNA, 16 bp, synthetic construct
  misc_feature 1..16: note = synthetic [barcode part1]
  source 1..16: mol_type = other DNA
ttgccggatatcctcg

SEQ ID NO: 837 - DNA, 16 bp, synthetic construct
  misc_feature 1..16: note = synthetic [barcode part1]
  source 1..16: mol_type = other DNA
tacgtcactgaagaag

SEQ ID NO: 838 - DNA, 16 bp, synthetic construct
  misc_feature 1..16: note = synthetic [barcode part1]
  source 1..16: mol_type = other DNA
ttctaggacgacgttg

SEQ ID NO: 839 - DNA, 16 bp, synthetic construct
  misc_feature 1..16: note = synthetic [barcode part1]
  source 1..16: mol_type = other DNA
cacactatcaacttcg

SEQ ID NO: 840 - DNA, 16 bp, synthetic construct
  misc_feature 1..16: note = synthetic [barcode part1]
  source 1..16: mol_type = other DNA
gatcgtggaaggacct

SEQ ID NO: 841 - DNA, 16 bp, synthetic construct
  misc_feature 1..16: note = synthetic [barcode part1]
  source 1..16: mol_type = other DNA
tgttgtggtcacagtg

SEQ ID NO: 842 - DNA, 16 bp, synthetic construct
  misc_feature 1..16: note = synthetic [barcode part1]
  source 1..16: mol_type = other DNA
tatcggagacgtaggc

SEQ ID NO: 843 - DNA, 16 bp, synthetic construct
  misc_feature 1..16: note = synthetic [barcode part1]
  source 1..16: mol_type = other DNA
gcagacaagacctcag

SEQ ID NO: 844 - DNA, 16 bp, synthetic construct
  misc_feature 1..16: note = synthetic [barcode part1]
  source 1..16: mol_type = other DNA
agacgtgtccttacag

SEQ ID NO: 845 - DNA, 16 bp, synthetic construct
  misc_feature 1..16: note = synthetic [barcode part1]
  source 1..16: mol_type = other DNA
acgactgccaattctt

SEQ ID NO: 846 - DNA, 16 bp, synthetic construct
  misc_feature 1..16: note = synthetic [barcode part1]
  source 1..16: mol_type = other DNA
taagtgccacggattc

SEQ ID NO: 847 - DNA, 16 bp, synthetic construct
  misc_feature 1..16: note = synthetic [barcode part1]
  source 1..16: mol_type = other DNA
tatcaggtccacgtcc

SEQ ID NO: 848 - DNA, 16 bp, synthetic construct
  misc_feature 1..16: note = synthetic [barcode part1]
  source 1..16: mol_type = other DNA
cgacgcaactagagac

SEQ ID NO: 849 - DNA, 16 bp, synthetic construct
  misc_feature 1..16: note = synthetic [barcode part1]
  source 1..16: mol_type = other DNA
cgaacaccgatctcct

SEQ ID NO: 850 - DNA, 16 bp, synthetic construct
  misc_feature 1..16: note = synthetic [barcode part1]
  source 1..16: mol_type = other DNA
cagtaatcgcgcctct

SEQ ID NO: 851 - DNA, 16 bp, synthetic construct
  misc_feature 1..16: note = synthetic [barcode part1]
  source 1..16: mol_type = other DNA
acagtactgtgtgtgc

SEQ ID NO: 852 - DNA, 16 bp, synthetic construct
  misc_feature 1..16: note = synthetic [barcode part1]
  source 1..16: mol_type = other DNA
tgtataagtccggacc

SEQ ID NO: 853 - DNA, 16 bp, synthetic construct
  misc_feature 1..16: note = synthetic [barcode part1]
  source 1..16: mol_type = other DNA
cacgagactctatacg

SEQ ID NO: 854 - DNA, 16 bp, synthetic construct
  misc_feature 1..16: note = synthetic [barcode part1]
  source 1..16: mol_type = other DNA
tgtcgaagtcctcgtc

SEQ ID NO: 855 - DNA, 16 bp, synthetic construct
  misc_feature 1..16: note = synthetic [barcode part1]
  source 1..16: mol_type = other DNA
atcggccttaatcgag

SEQ ID NO: 856 - DNA, 16 bp, synthetic construct
  misc_feature 1..16: note = synthetic [barcode part1]
  source 1..16: mol_type = other DNA
cctctaaggaaggtct

SEQ ID NO: 857 - DNA, 16 bp, synthetic construct
  misc_feature 1..16: note = synthetic [barcode part1]
  source 1..16: mol_type = other DNA
agatactgcaacgagt

SEQ ID NO: 858 - DNA, 16 bp, synthetic construct
  misc_feature 1..16: note = synthetic [barcode part1]
  source 1..16: mol_type = other DNA
tgagatctggtcagtc

SEQ ID NO: 859 - DNA, 16 bp, synthetic construct
  misc_feature 1..16: note = synthetic [barcode part1]
  source 1..16: mol_type = other DNA
acttgagttcaggcac

SEQ ID NO: 860 - DNA, 16 bp, synthetic construct
  misc_feature 1..16: note = synthetic [barcode part1]
  source 1..16: mol_type = other DNA
cctactgatatccggc

SEQ ID NO: 861 - DNA, 16 bp, synthetic construct
  misc_feature 1..16: note = synthetic [barcode part1]
  source 1..16: mol_type = other DNA
atctctgcaggaacgt

SEQ ID NO: 862 - DNA, 16 bp, synthetic construct
  misc_feature 1..16: note = synthetic [barcode part1]
  source 1..16: mol_type = other DNA
acagaaggcgtctctt

SEQ ID NO: 863 - DNA, 16 bp, synthetic construct
  misc_feature 1..16: note = synthetic [barcode part1]
  source 1..16: mol_type = other DNA
aacgtctgttctctag

SEQ ID NO: 864 - DNA, 16 bp, synthetic construct
  misc_feature 1..16: note = synthetic [barcode part1]
  source 1..16: mol_type = other DNA
ccagaagactattccg

SEQ ID NO: 865 - DNA, 16 bp, synthetic construct
  misc_feature 1..16: note = synthetic [barcode part1]
  source 1..16: mol_type = other DNA
aacctgttgtctggag

SEQ ID NO: 866 - DNA, 16 bp, synthetic construct
  misc_feature 1..16: note = synthetic [barcode part1]
  source 1..16: mol_type = other DNA
ttacaggtacctcgcc

SEQ ID NO: 867 - DNA, 16 bp, synthetic construct
  misc_feature 1..16: note = synthetic [barcode part1]
  source 1..16: mol_type = other DNA
ttctccgataaggcag

SEQ ID NO: 868 - DNA, 16 bp, synthetic construct
  misc_feature 1..16: note = synthetic [barcode part1]
  source 1..16: mol_type = other DNA
ttggcgacttgtatct

SEQ ID NO: 869 - DNA, 16 bp, synthetic construct
  misc_feature 1..16: note = synthetic [barcode part1]
  source 1..16: mol_type = other DNA
tcaactcaggcgcctt

SEQ ID NO: 870 - DNA, 16 bp, synthetic construct
  misc_feature 1..16: note = synthetic [barcode part1]
  source 1..16: mol_type = other DNA
cggcaggtaagtgttg

SEQ ID NO: 871 - DNA, 16 bp, synthetic construct
  misc_feature 1..16: note = synthetic [barcode part1]
  source 1..16: mol_type = other DNA
gccgtggtgaacaagt

SEQ ID NO: 872 - DNA, 16 bp, synthetic construct
  misc_feature 1..16: note = synthetic [barcode part1]
  source 1..16: mol_type = other DNA
tataggcagataacgc

SEQ ID NO: 873 - DNA, 16 bp, synthetic construct
  misc_feature 1..16: note = synthetic [barcode part1]
  source 1..16: mol_type = other DNA
tcgataaggcgatcct

SEQ ID NO: 874 - DNA, 16 bp, synthetic construct
  misc_feature 1..16: note = synthetic [barcode part1]
  source 1..16: mol_type = other DNA
gcacgatccggttctt

SEQ ID NO: 875 - DNA, 16 bp, synthetic construct
  misc_feature 1..16: note = synthetic [barcode part1]
  source 1..16: mol_type = other DNA
gaggcaattgttccac

SEQ ID NO: 876 - DNA, 16 bp, synthetic construct
  misc_feature 1..16: note = synthetic [barcode part1]
  source 1..16: mol_type = other DNA
ttgcagtctgaccaag

SEQ ID NO: 877 - DNA, 16 bp, synthetic construct
  misc_feature 1..16: note = synthetic [barcode part1]
  source 1..16: mol_type = other DNA
gtgcgtcttgttattg

SEQ ID NO: 878 - DNA, 16 bp, synthetic construct
  misc_feature 1..16: note = synthetic [barcode part1]
  source 1..16: mol_type = other DNA
tacagtcacgtggttg

SEQ ID NO: 879 - DNA, 16 bp, synthetic construct
  misc_feature 1..16: note = synthetic [barcode part1]
  source 1..16: mol_type = other DNA
cggagattcaccgaag

SEQ ID NO: 880 - DNA, 16 bp, synthetic construct
  misc_feature 1..16: note = synthetic [barcode part1]
  source 1..16: mol_type = other DNA
gtgtccggaacgatag

SEQ ID NO: 881 - DNA, 16 bp, synthetic construct
  misc_feature 1..16: note = synthetic [barcode part1]
  source 1..16: mol_type = other DNA
ttcttcaacgactacg

SEQ ID NO: 882 - DNA, 16 bp, synthetic construct
  misc_feature 1..16: note = synthetic [barcode part1]
  source 1..16: mol_type = other DNA
ttccagtacacggcct

SEQ ID NO: 883 - DNA, 16 bp, synthetic construct
  misc_feature 1..16: note = synthetic [barcode part1]
  source 1..16: mol_type = other DNA
tcctggccaatctctt

SEQ ID NO: 884 - DNA, 16 bp, synthetic construct
  misc_feature 1..16: note = synthetic [barcode part1]
  source 1..16: mol_type = other DNA
tgaggtcgaccaatct

SEQ ID NO: 885 - DNA, 16 bp, synthetic construct
  misc_feature 1..16: note = synthetic [barcode part1]
  source 1..16: mol_type = other DNA
acgatcttatcggacg

SEQ ID NO: 886 - DNA, 16 bp, synthetic construct
  misc_feature 1..16: note = synthetic [barcode part1]
  source 1..16: mol_type = other DNA
tgatcgaccaagactc

SEQ ID NO: 887 - DNA, 16 bp, synthetic construct
  misc_feature 1..16: note = synthetic [barcode part1]
  source 1..16: mol_type = other DNA
cggacgttcttgttgc

SEQ ID NO: 888 - DNA, 16 bp, synthetic construct
  misc_feature 1..16: note = synthetic [barcode part1]
  source 1..16: mol_type = other DNA
tagtcgatacggtacc

SEQ ID NO: 889 - DNA, 16 bp, synthetic construct
  misc_feature 1..16: note = synthetic [barcode part1]
  source 1..16: mol_type = other DNA
aatctgacgcgttctt

SEQ ID NO: 890 - DNA, 16 bp, synthetic construct
  misc_feature 1..16: note = synthetic [barcode part1]
  source 1..16: mol_type = other DNA
caccacctctacgagt

SEQ ID NO: 891 - DNA, 16 bp, synthetic construct
  misc_feature 1..16: note = synthetic [barcode part1]
  source 1..16: mol_type = other DNA
aattcggaggagtgcc

SEQ ID NO: 892 - DNA, 16 bp, synthetic construct
  misc_feature 1..16: note = synthetic [barcode part1]
  source 1..16: mol_type = other DNA
gagacaggcctacaac

SEQ ID NO: 893 - DNA, 16 bp, synthetic construct
  misc_feature 1..16: note = synthetic [barcode part1]
  source 1..16: mol_type = other DNA
taacagaacagactcg

SEQ ID NO: 894 - DNA, 16 bp, synthetic construct
  misc_feature 1..16: note = synthetic [barcode part1]
  source 1..16: mol_type = other DNA
tctaaccggagttggt

SEQ ID NO: 895 - DNA, 16 bp, synthetic construct
  misc_feature 1..16: note = synthetic [barcode part1]
  source 1..16: mol_type = other DNA
gtaatcgtgcaactgc

SEQ ID NO: 896 - DNA, 16 bp, synthetic construct
  misc_feature 1..16: note = synthetic [barcode part1]
  source 1..16: mol_type = other DNA
cggacctagtattcag

SEQ ID NO: 897 - DNA, 16 bp, synthetic construct
  misc_feature 1..16: note = synthetic [barcode part1]
  source 1..16: mol_type = other DNA
taatccggcaatccag

SEQ ID NO: 898 - DNA, 16 bp, synthetic construct
  misc_feature 1..16: note = synthetic [barcode part1]
  source 1..16: mol_type = other DNA
ccaacagtctacgcct

SEQ ID NO: 899 - DNA, 16 bp, synthetic construct
  misc_feature 1..16: note = synthetic [barcode part1]
  source 1..16: mol_type = other DNA
cacgcacaatcgattg

SEQ ID NO: 900 - DNA, 16 bp, synthetic construct
  misc_feature 1..16: note = synthetic [barcode part1]
  source 1..16: mol_type = other DNA
ttagtggtagaggcgc

SEQ ID NO: 901 - DNA, 16 bp, synthetic construct
  misc_feature 1..16: note = synthetic [barcode part1]
  source 1..16: mol_type = other DNA
gttaggtgtccttatc

SEQ ID NO: 902 - DNA, 16 bp, synthetic construct
  misc_feature 1..16: note = synthetic [barcode part1]
  source 1..16: mol_type = other DNA
gatagaaggttcgcgc

SEQ ID NO: 903 - DNA, 16 bp, synthetic construct
  misc_feature 1..16: note = synthetic [barcode part1]
  source 1..16: mol_type = other DNA
tgtgatctcgaacgtg

SEQ ID NO: 904 - DNA, 16 bp, synthetic construct
  misc_feature 1..16: note = synthetic [barcode part1]
  source 1..16: mol_type = other DNA
gtatacaacgccgtgt

SEQ ID NO: 905 - DNA, 16 bp, synthetic construct
  misc_feature 1..16: note = synthetic [barcode part1]
  source 1..16: mol_type = other DNA
gacggtctgtacttcc

SEQ ID NO: 906 - DNA, 16 bp, synthetic construct
  misc_feature 1..16: note = synthetic [barcode part1]
  source 1..16: mol_type = other DNA
gagtctggatagtagt

SEQ ID NO: 907 - DNA, 16 bp, synthetic construct
  misc_feature 1..16: note = synthetic [barcode part1]
  source 1..16: mol_type = other DNA
tccagtcacgttggtc

SEQ ID NO: 908 - DNA, 16 bp, synthetic construct
  misc_feature 1..16: note = synthetic [barcode part1]
  source 1..16: mol_type = other DNA
gcctcttcctcttaag

SEQ ID NO: 909 - DNA, 16 bp, synthetic construct
  misc_feature 1..16: note = synthetic [barcode part1]
  source 1..16: mol_type = other DNA
cgtaacgttacgacgt

SEQ ID NO: 910 - DNA, 16 bp, synthetic construct
  misc_feature 1..16: note = synthetic [barcode part1]
  source 1..16: mol_type = other DNA
gaggacttcagttctg

SEQ ID NO: 911 - DNA, 16 bp, synthetic construct
  misc_feature 1..16: note = synthetic [barcode part1]
  source 1..16: mol_type = other DNA
ttcagaggccaatcac

SEQ ID NO: 912 - DNA, 16 bp, synthetic construct
  misc_feature 1..16: note = synthetic [barcode part1]
  source 1..16: mol_type = other DNA
gccacggaagtgagtt

SEQ ID NO: 913 - DNA, 16 bp, synthetic construct
  misc_feature 1..16: note = synthetic [barcode part1]
  source 1..16: mol_type = other DNA
tcgcctagaatcttac

SEQ ID NO: 914 - DNA, 16 bp, synthetic construct
  misc_feature 1..16: note = synthetic [barcode part1]
  source 1..16: mol_type = other DNA
gtcctaaggtcaactg

SEQ ID NO: 915 - DNA, 16 bp, synthetic construct
  misc_feature 1..16: note = synthetic [barcode part1]
  source 1..16: mol_type = other DNA
gttgtacaagacggcg

SEQ ID NO: 916 - DNA, 16 bp, synthetic construct
  misc_feature 1..16: note = synthetic [barcode part1]
  source 1..16: mol_type = other DNA
acttccacgttgagtt

SEQ ID NO: 917 - DNA, 16 bp, synthetic construct
  misc_feature 1..16: note = synthetic [barcode part1]
  source 1..16: mol_type = other DNA
caagtcaggttactgc

SEQ ID NO: 918 - DNA, 16 bp, synthetic construct
  misc_feature 1..16: note = synthetic [barcode part1]
  source 1..16: mol_type = other DNA
aataggatcaacacgc

SEQ ID NO: 919 - DNA, 16 bp, synthetic construct
  misc_feature 1..16: note = synthetic [barcode part1]
  source 1..16: mol_type = other DNA
atctattacggcacct

SEQ ID NO: 920 - DNA, 16 bp, synthetic construct
  misc_feature 1..16: note = synthetic [barcode part1]
  source 1..16: mol_type = other DNA
ttgtgcacctcctgag

SEQ ID NO: 921 - DNA, 16 bp, synthetic construct
  misc_feature 1..16: note = synthetic [barcode part1]
  source 1..16: mol_type = other DNA
acactgagatcgtacc

SEQ ID NO: 922 - DNA, 16 bp, synthetic construct
  misc_feature 1..16: note = synthetic [barcode part1]
  source 1..16: mol_type = other DNA
tacgagttgaggtggc

SEQ ID NO: 923 - DNA, 16 bp, synthetic construct
  misc_feature 1..16: note = synthetic [barcode part1]
  source 1..16: mol_type = other DNA
cgagttaccagattgc

SEQ ID NO: 924 - DNA, 16 bp, synthetic construct
  misc_feature 1..16: note = synthetic [barcode part1]
  source 1..16: mol_type = other DNA
tctagacacttggacg

SEQ ID NO: 925 - DNA, 16 bp, synthetic construct
  misc_feature 1..16: note = synthetic [barcode part1]
  source 1..16: mol_type = other DNA
taatcctattggtgcc

SEQ ID NO: 926 - DNA, 16 bp, synthetic construct
  misc_feature 1..16: note = synthetic [barcode part1]
  source 1..16: mol_type = other DNA
agtaactagaggcact

SEQ ID NO: 927 - DNA, 16 bp, synthetic construct
  misc_feature 1..16: note = synthetic [barcode part1]
  source 1..16: mol_type = other DNA
gttgagtcttacgttc

SEQ ID NO: 928 - DNA, 16 bp, synthetic construct
  misc_feature 1..16: note = synthetic [barcode part1]
  source 1..16: mol_type = other DNA
agatactgccttacct

SEQ ID NO: 929 - DNA, 16 bp, synthetic construct
  misc_feature 1..16: note = synthetic [barcode part1]
  source 1..16: mol_type = other DNA
tatcaattcggttccg

SEQ ID NO: 930 - DNA, 16 bp, synthetic construct
  misc_feature 1..16: note = synthetic [barcode part1]
  source 1..16: mol_type = other DNA
tacacttcaccgaatc

SEQ ID NO: 931 - DNA, 16 bp, synthetic construct
  misc_feature 1..16: note = synthetic [barcode part1]
  source 1..16: mol_type = other DNA
gcaacacgatctcagt

SEQ ID NO: 932 - DNA, 16 bp, synthetic construct
  misc_feature 1..16: note = synthetic [barcode part1]
  source 1..16: mol_type = other DNA
gcacaacctccgatct

SEQ ID NO: 933 - DNA, 16 bp, synthetic construct
  misc_feature 1..16: note = synthetic [barcode part1]
  source 1..16: mol_type = other DNA
ttgtagaacggccgtt

SEQ ID NO: 934 - DNA, 16 bp, synthetic construct
  misc_feature 1..16: note = synthetic [barcode part1]
  source 1..16: mol_type = other DNA
cctccgaatcaatact

SEQ ID NO: 935 - DNA, 16 bp, synthetic construct
  misc_feature 1..16: note = synthetic [barcode part1]
  source 1..16: mol_type = other DNA
tcttggtgtacaacct

SEQ ID NO: 936 - DNA, 16 bp, synthetic construct
  misc_feature 1..16: note = synthetic [barcode part1]
  source 1..16: mol_type = other DNA
tattagagtctggcgc

SEQ ID NO: 937 - DNA, 16 bp, synthetic construct
  misc_feature 1..16: note = synthetic [barcode part1]
  source 1..16: mol_type = other DNA
aatctaaccttcacgc

SEQ ID NO: 938 - DNA, 16 bp, synthetic construct
  misc_feature 1..16: note = synthetic [barcode part1]
  source 1..16: mol_type = other DNA
atcttctctccggttg

SEQ ID NO: 939 - DNA, 16 bp, synthetic construct
  misc_feature 1..16: note = synthetic [barcode part1]
  source 1..16: mol_type = other DNA
tagagtcgttggtcac

SEQ ID NO: 940 - DNA, 16 bp, synthetic construct
  misc_feature 1..16: note = synthetic [barcode part1]
  source 1..16: mol_type = other DNA
taaccagagttctggc

SEQ ID NO: 941 - DNA, 16 bp, synthetic construct
  misc_feature 1..16: note = synthetic [barcode part1]
  source 1..16: mol_type = other DNA
gtaactacgtgcggtt

SEQ ID NO: 942 - DNA, 16 bp, synthetic construct
  misc_feature 1..16: note = synthetic [barcode part1]
  source 1..16: mol_type = other DNA
aggcctattattgcct

SEQ ID NO: 943 - DNA, 16 bp, synthetic construct
  misc_feature 1..16: note = synthetic [barcode part1]
  source 1..16: mol_type = other DNA
caggaggtggtgtgtt

SEQ ID NO: 944 - DNA, 16 bp, synthetic construct
  misc_feature 1..16: note = synthetic [barcode part1]
  source 1..16: mol_type = other DNA
tagacacttctactgc

SEQ ID NO: 945 - DNA, 16 bp, synthetic construct
  misc_feature 1..16: note = synthetic [barcode part1]
  source 1..16: mol_type = other DNA
gttggacggtgattct

SEQ ID NO: 946 - DNA, 16 bp, synthetic construct
  misc_feature 1..16: note = synthetic [barcode part1]
  source 1..16: mol_type = other DNA
cgagaagtcaatcctc

SEQ ID NO: 947 - DNA, 16 bp, synthetic construct
  misc_feature 1..16: note = synthetic [barcode part1]
  source 1..16: mol_type = other DNA
tggtggttcttgtgtt

SEQ ID NO: 948 - DNA, 16 bp, synthetic construct
  misc_feature 1..16: note = synthetic [barcode part1]
  source 1..16: mol_type = other DNA
ttacggaacaaggtac

SEQ ID NO: 949 - DNA, 16 bp, synthetic construct
  misc_feature 1..16: note = synthetic [barcode part1]
  source 1..16: mol_type = other DNA
gccggataataacctc

SEQ ID NO: 950 - DNA, 16 bp, synthetic construct
  misc_feature 1..16: note = synthetic [barcode part1]
  source 1..16: mol_type = other DNA
cactgagtgccgaatt

SEQ ID NO: 951 - DNA, 16 bp, synthetic construct
  misc_feature 1..16: note = synthetic [barcode part1]
  source 1..16: mol_type = other DNA
acgttacggtactacg

SEQ ID NO: 952 - DNA, 16 bp, synthetic construct
  misc_feature 1..16: note = synthetic [barcode part1]
  source 1..16: mol_type = other DNA
caggagatcaacttcc

SEQ ID NO: 953 - DNA, 16 bp, synthetic construct
  misc_feature 1..16: note = synthetic [barcode part1]
  source 1..16: mol_type = other DNA
cgtctcttacaaggag

SEQ ID NO: 954 - DNA, 16 bp, synthetic construct
  misc_feature 1..16: note = synthetic [barcode part1]
  source 1..16: mol_type = other DNA
cctaagttgtcggtag

SEQ ID NO: 955 - DNA, 16 bp, synthetic construct
  misc_feature 1..16: note = synthetic [barcode part1]
  source 1..16: mol_type = other DNA
tactggtgtcaacgtg

SEQ ID NO: 956 - DNA, 16 bp, synthetic construct
  misc_feature 1..16: note = synthetic [barcode part1]
  source 1..16: mol_type = other DNA
agatactccacggact

SEQ ID NO: 957 - DNA, 16 bp, synthetic construct
  misc_feature 1..16: note = synthetic [barcode part1]
  source 1..16: mol_type = other DNA
gtgtgcaatcgcgatt

SEQ ID NO: 958 - DNA, 16 bp, synthetic construct
  misc_feature 1..16: note = synthetic [barcode part1]
  source 1..16: mol_type = other DNA
acctctaggtaacctt

SEQ ID NO: 959 - DNA, 16 bp, synthetic construct
  misc_feature 1..16: note = synthetic [barcode part1]
  source 1..16: mol_type = other DNA
atcggtactcgtagac

SEQ ID NO: 960 - DNA, 16 bp, synthetic construct
  misc_feature 1..16: note = synthetic [barcode part1]
  source 1..16: mol_type = other DNA
gccaacaaggccaagt

SEQ ID NO: 961 - DNA, 16 bp, synthetic construct
  misc_feature 1..16: note = synthetic [barcode part1]
  source 1..16: mol_type = other DNA
tgcaactgcgtaatcg

SEQ ID NO: 962 - DNA, 16 bp, synthetic construct
  misc_feature 1..16: note = synthetic [barcode part1]
  source 1..16: mol_type = other DNA
cgtgcaaggtagtggt

SEQ ID NO: 963 - DNA, 16 bp, synthetic construct
  misc_feature 1..16: note = synthetic [barcode part1]
  source 1..16: mol_type = other DNA
gtccacctccgagatt

SEQ ID NO: 964 - DNA, 16 bp, synthetic construct
  misc_feature 1..16: note = synthetic [barcode part1]
  source 1..16: mol_type = other DNA
tagactcaggcggtag

SEQ ID NO: 965 - DNA, 16 bp, synthetic construct
  misc_feature 1..16: note = synthetic [barcode part1]
  source 1..16: mol_type = other DNA
gatcagtatcgcagtc

SEQ ID NO: 966 - DNA, 16 bp, synthetic construct
  misc_feature 1..16: note = synthetic [barcode part1]
  source 1..16: mol_type = other DNA
acttgcaggttgtgtg

SEQ ID NO: 967 - DNA, 16 bp, synthetic construct
  misc_feature 1..16: note = synthetic [barcode part1]
  source 1..16: mol_type = other DNA
gtgcagtgtaccaact

SEQ ID NO: 968 - DNA, 16 bp, synthetic construct
  misc_feature 1..16: note = synthetic [barcode part1]
  source 1..16: mol_type = other DNA
cactgcgtaacactag

SEQ ID NO: 969 - DNA, 16 bp, synthetic construct
  misc_feature 1..16: note = synthetic [barcode part1]
  source 1..16: mol_type = other DNA
ccaattctgagtctgt

SEQ ID NO: 970 - DNA, 16 bp, synthetic construct
  misc_feature 1..16: note = synthetic [barcode part1]
  source 1..16: mol_type = other DNA
tcgaagttctgtctac

SEQ ID NO: 971 - DNA, 16 bp, synthetic construct
  misc_feature 1..16: note = synthetic [barcode part1]
  source 1..16: mol_type = other DNA
gattcgacgcgttctc

SEQ ID NO: 972 - DNA, 16 bp, synthetic construct
  misc_feature 1..16: note = synthetic [barcode part1]
  source 1..16: mol_type = other DNA
ttggtctaacacacct

SEQ ID NO: 973 - DNA, 16 bp, synthetic construct
  misc_feature 1..16: note = synthetic [barcode part1]
  source 1..16: mol_type = other DNA
gtgtcctattgttgac

SEQ ID NO: 974 - DNA, 16 bp, synthetic construct
  misc_feature 1..16: note = synthetic [barcode part1]
  source 1..16: mol_type = other DNA
attctgtctaccgtcc

SEQ ID NO: 975 - DNA, 16 bp, synthetic construct
  misc_feature 1..16: note = synthetic [barcode part1]
  source 1..16: mol_type = other DNA
acactgacacagatcc

SEQ ID NO: 976 - DNA, 16 bp, synthetic construct
  misc_feature 1..16: note = synthetic [barcode part1]
  source 1..16: mol_type = other DNA
accttcctgtacggtg

SEQ ID NO: 977 - DNA, 16 bp, synthetic construct
  misc_feature 1..16: note = synthetic [barcode part1]
  source 1..16: mol_type = other DNA
taccgccgtctagact

SEQ ID NO: 978 - DNA, 16 bp, synthetic construct
  misc_feature 1..16: note = synthetic [barcode part1]
  source 1..16: mol_type = other DNA
gtggcaccaatcaatc

SEQ ID NO: 979 - DNA, 16 bp, synthetic construct
  misc_feature 1..16: note = synthetic [barcode part1]
  source 1..16: mol_type = other DNA
gacttagagttaccgc

SEQ ID NO: 980 - DNA, 16 bp, synthetic construct
  misc_feature 1..16: note = synthetic [barcode part1]
  source 1..16: mol_type = other DNA
aatcagacgtcagtag

SEQ ID NO: 981 - DNA, 16 bp, synthetic construct
  misc_feature 1..16: note = synthetic [barcode part1]
  source 1..16: mol_type = other DNA
taggacgcctaattcg

SEQ ID NO: 982 - DNA, 16 bp, synthetic construct
  misc_feature 1..16: note = synthetic [barcode part1]
  source 1..16: mol_type = other DNA
accttgttccgtaagt

SEQ ID NO: 983 - DNA, 16 bp, synthetic construct
  misc_feature 1..16: note = synthetic [barcode part1]
  source 1..16: mol_type = other DNA
taagtgtcagtggagt

SEQ ID NO: 984 - DNA, 16 bp, synthetic construct
  misc_feature 1..16: note = synthetic [barcode part1]
  source 1..16: mol_type = other DNA
ttcgagacgtgatacc

SEQ ID NO: 985 - DNA, 16 bp, synthetic construct
  misc_feature 1..16: note = synthetic [barcode part1]
  source 1..16: mol_type = other DNA
ttacgaatccgatcct

SEQ ID NO: 986 - DNA, 16 bp, synthetic construct
  misc_feature 1..16: note = synthetic [barcode part1]
  source 1..16: mol_type = other DNA
tgcgagatcggactag

SEQ ID NO: 987 - DNA, 16 bp, synthetic construct
  misc_feature 1..16: note = synthetic [barcode part1]
  source 1..16: mol_type = other DNA
tatcactctaccgtcc

SEQ ID NO: 988 - DNA, 16 bp, synthetic construct
  misc_feature 1..16: note = synthetic [barcode part1]
  source 1..16: mol_type = other DNA
ccgcagacttagtctc

SEQ ID NO: 989 - DNA, 16 bp, synthetic construct
  misc_feature 1..16: note = synthetic [barcode part1]
  source 1..16: mol_type = other DNA
tcgtccagtggtatcc

SEQ ID NO: 990 - DNA, 16 bp, synthetic construct
  misc_feature 1..16: note = synthetic [barcode part1]
  source 1..16: mol_type = other DNA
tagacggacctcagag

SEQ ID NO: 991 - DNA, 16 bp, synthetic construct
  misc_feature 1..16: note = synthetic [barcode part1]
  source 1..16: mol_type = other DNA
tcgcgagtattgacac

SEQ ID NO: 992 - DNA, 16 bp, synthetic construct
  misc_feature 1..16: note = synthetic [barcode part1]
  source 1..16: mol_type = other DNA
ttccgcactggtgatc

SEQ ID NO: 993 - DNA, 16 bp, synthetic construct
  misc_feature 1..16: note = synthetic [barcode part1]
  source 1..16: mol_type = other DNA
gaacactagtaaggtc

SEQ ID NO: 994 - DNA, 16 bp, synthetic construct
  misc_feature 1..16: note = synthetic [barcode part1]
  source 1..16: mol_type = other DNA
agaccgtgtaggaatt

SEQ ID NO: 995 - DNA, 16 bp, synthetic construct
  misc_feature 1..16: note = synthetic [barcode part1]
  source 1..16: mol_type = other DNA
gacgtagtgaggatag

SEQ ID NO: 996 - DNA, 16 bp, synthetic construct
  misc_feature 1..16: note = synthetic [barcode part1]
  source 1..16: mol_type = other DNA
accggatcagactgtt

SEQ ID NO: 997 - DNA, 16 bp, synthetic construct
  misc_feature 1..16: note = synthetic [barcode part1]
  source 1..16: mol_type = other DNA
aggtccaggtggtagt

SEQ ID NO: 998 - DNA, 16 bp, synthetic construct
  misc_feature 1..16: note = synthetic [barcode part1]
  source 1..16: mol_type = other DNA
tgcagttgttatcctg

SEQ ID NO: 999 - DNA, 16 bp, synthetic construct
  misc_feature 1..16: note = synthetic [barcode part1]
  source 1..16: mol_type = other DNA
atcctgtcgccttgtt

SEQ ID NO: 1000 - DNA, 16 bp, synthetic construct
  misc_feature 1..16: note = synthetic [barcode part1]
  source 1..16: mol_type = other DNA
tgtgtaacgaggagtt

SEQ ID NO: 1001 - DNA, 16 bp, synthetic construct
  misc_feature 1..16: note = synthetic [barcode part1]
  source 1..16: mol_type = other DNA
ttgaagacgcgaattg

SEQ ID NO: 1002 - DNA, 16 bp, synthetic construct
  misc_feature 1..16: note = synthetic [barcode part1]
  source 1..16: mol_type = other DNA
attccgaccgattgag

SEQ ID NO: 1003 - DNA, 16 bp, synthetic construct
  misc_feature 1..16: note = synthetic [barcode part1]
  source 1..16: mol_type = other DNA
tgacaggtctgttacg

SEQ ID NO: 1004 - DNA, 16 bp, synthetic construct
  misc_feature 1..16: note = synthetic [barcode part1]
  source 1..16: mol_type = other DNA
agacgttcactattcc

SEQ ID NO: 1005 - DNA, 16 bp, synthetic construct
  misc_feature 1..16: note = synthetic [barcode part1]
  source 1..16: mol_type = other DNA
tgacctcaccagtgtc

SEQ ID NO: 1006 - DNA, 16 bp, synthetic construct
  misc_feature 1..16: note = synthetic [barcode part1]
  source 1..16: mol_type = other DNA
tggcgaacagacgttg

SEQ ID NO: 1007 - DNA, 16 bp, synthetic construct
  misc_feature 1..16: note = synthetic [barcode part1]
  source 1..16: mol_type = other DNA
tcctaagacctcgaag

SEQ ID NO: 1008 - DNA, 16 bp, synthetic construct
  misc_feature 1..16: note = synthetic [barcode part1]
  source 1..16: mol_type = other DNA
ttatccgcaaggttct

SEQ ID NO: 1009 - DNA, 16 bp, synthetic construct
  misc_feature 1..16: note = synthetic [barcode part1]
  source 1..16: mol_type = other DNA
atataacgtgccgacc

SEQ ID NO: 1010 - DNA, 16 bp, synthetic construct
  misc_feature 1..16: note = synthetic [barcode part1]
  source 1..16: mol_type = other DNA
gcacctcttcttacgt

SEQ ID NO: 1011 - DNA, 16 bp, synthetic construct
  misc_feature 1..16: note = synthetic [barcode part1]
  source 1..16: mol_type = other DNA
tctcggtaggaatcac

SEQ ID NO: 1012 - DNA, 16 bp, synthetic construct
  misc_feature 1..16: note = synthetic [barcode part1]
  source 1..16: mol_type = other DNA
caacaatctggcgact

SEQ ID NO: 1013 - DNA, 16 bp, synthetic construct
  misc_feature 1..16: note = synthetic [barcode part1]
  source 1..16: mol_type = other DNA
tcgcaggcctaacttc

SEQ ID NO: 1014 - DNA, 16 bp, synthetic construct
  misc_feature 1..16: note = synthetic [barcode part1]
  source 1..16: mol_type = other DNA
cgccgagtattgagtt

SEQ ID NO: 1015 - DNA, 16 bp, synthetic construct
  misc_feature 1..16: note = synthetic [barcode part1]
  source 1..16: mol_type = other DNA
tacgacgcctaaggtt

SEQ ID NO: 1016 - DNA, 16 bp, synthetic construct
  misc_feature 1..16: note = synthetic [barcode part1]
  source 1..16: mol_type = other DNA
cgactatctatcactg

SEQ ID NO: 1017 - DNA, 16 bp, synthetic construct
  misc_feature 1..16: note = synthetic [barcode part1]
  source 1..16: mol_type = other DNA
gagttggtggtacacg

SEQ ID NO: 1018 - DNA, 16 bp, synthetic construct
  misc_feature 1..16: note = synthetic [barcode part1]
  source 1..16: mol_type = other DNA
ccgccactgagtattc

SEQ ID NO: 1019 - DNA, 16 bp, synthetic construct
  misc_feature 1..16: note = synthetic [barcode part1]
  source 1..16: mol_type = other DNA
taaggtccaatcgacc

SEQ ID NO: 1020 - DNA, 16 bp, synthetic construct
  misc_feature 1..16: note = synthetic [barcode part1]
  source 1..16: mol_type = other DNA
tcttccgccacacaag

SEQ ID NO: 1021 - DNA, 16 bp, synthetic construct
  misc_feature 1..16: note = synthetic [barcode part1]
  source 1..16: mol_type = other DNA
taataggcctgttgcg

SEQ ID NO: 1022 - DNA, 16 bp, synthetic construct
  misc_feature 1..16: note = synthetic [barcode part1]
  source 1..16: mol_type = other DNA
tctaaccgtgttgact

SEQ ID NO: 1023 - DNA, 16 bp, synthetic construct
  misc_feature 1..16: note = synthetic [barcode part1]
  source 1..16: mol_type = other DNA
ccgtaccgaattatct

SEQ ID NO: 1024 - DNA, 16 bp, synthetic construct
  misc_feature 1..16: note = synthetic [barcode part1]
  source 1..16: mol_type = other DNA
tacttgtctcgttcgc

SEQ ID NO: 1025 - DNA, 16 bp, synthetic construct
  misc_feature 1..16: note = synthetic [barcode part1]
  source 1..16: mol_type = other DNA
tacggatccgtgaatc

SEQ ID NO: 1026 - DNA, 16 bp, synthetic construct
  misc_feature 1..16: note = synthetic [barcode part1]
  source 1..16: mol_type = other DNA
caagttgaagaacacc

SEQ ID NO: 1027 - DNA, 16 bp, synthetic construct
  misc_feature 1..16: note = synthetic [barcode part1]
  source 1..16: mol_type = other DNA
gacctattctatcacg

SEQ ID NO: 1028 - DNA, 16 bp, synthetic construct
  misc_feature 1..16: note = synthetic [barcode part1]
  source 1..16: mol_type = other DNA
ccaccactggacactt

SEQ ID NO: 1029 - DNA, 16 bp, synthetic construct
  misc_feature 1..16: note = synthetic [barcode part1]
  source 1..16: mol_type = other DNA
gacactacgcagtatc

SEQ ID NO: 1030 - DNA, 16 bp, synthetic construct
  misc_feature 1..16: note = synthetic [barcode part1]
  source 1..16: mol_type = other DNA
gaataacgcgtgaccg

SEQ ID NO: 1031 - DNA, 16 bp, synthetic construct
  misc_feature 1..16: note = synthetic [barcode part1]
  source 1..16: mol_type = other DNA
tgcctcgagactcgtt

SEQ ID NO: 1032 - DNA, 16 bp, synthetic construct
  misc_feature 1..16: note = synthetic [barcode part1]
  source 1..16: mol_type = other DNA
tcttgacctcctgact

SEQ ID NO: 1033 - DNA, 16 bp, synthetic construct
  misc_feature 1..16: note = synthetic [barcode part1]
  source 1..16: mol_type = other DNA
ccgacaatctgtatct

SEQ ID NO: 1034 - DNA, 16 bp, synthetic construct
  misc_feature 1..16: note = synthetic [barcode part1]
  source 1..16: mol_type = other DNA
cgtgcacttgactaag

SEQ ID NO: 1035 - DNA, 16 bp, synthetic construct
  misc_feature 1..16: note = synthetic [barcode part1]
  source 1..16: mol_type = other DNA
aactcggccagtaact

SEQ ID NO: 1036 - DNA, 16 bp, synthetic construct
  misc_feature 1..16: note = synthetic [barcode part1]
  source 1..16: mol_type = other DNA
gaccaagtgttagtag

SEQ ID NO: 1037 - DNA, 16 bp, synthetic construct
  misc_feature 1..16: note = synthetic [barcode part1]
  source 1..16: mol_type = other DNA
cctatattggtccaac

SEQ ID NO: 1038 - DNA, 16 bp, synthetic construct
  misc_feature 1..16: note = synthetic [barcode part1]
  source 1..16: mol_type = other DNA
ttgtcgcggtatctgc

SEQ ID NO: 1039 - DNA, 16 bp, synthetic construct
  misc_feature 1..16: note = synthetic [barcode part1]
  source 1..16: mol_type = other DNA
tggttcctagtatacc

SEQ ID NO: 1040 - DNA, 16 bp, synthetic construct
  misc_feature 1..16: note = synthetic [barcode part1]
  source 1..16: mol_type = other DNA
aacctagtgacgactc

SEQ ID NO: 1041 - DNA, 16 bp, synthetic construct
  misc_feature 1..16: note = synthetic [barcode part1]
  source 1..16: mol_type = other DNA
atacagactcgcactg

SEQ ID NO: 1042 - DNA, 16 bp, synthetic construct
  misc_feature 1..16: note = synthetic [barcode part1]
  source 1..16: mol_type = other DNA
gacaaccacacttctt

SEQ ID NO: 1043 - DNA, 16 bp, synthetic construct
  misc_feature 1..16: note = synthetic [barcode part1]
  source 1..16: mol_type = other DNA
tcgtgcgtagtatacg

SEQ ID NO: 1044 - DNA, 16 bp, synthetic construct
  misc_feature 1..16: note = synthetic [barcode part1]
  source 1..16: mol_type = other DNA
gcgagatctgtgaacg

SEQ ID NO: 1045 - DNA, 16 bp, synthetic construct
  misc_feature 1..16: note = synthetic [barcode part1]
  source 1..16: mol_type = other DNA
cgtaacgtgagtaagt

SEQ ID NO: 1046 - DNA, 16 bp, synthetic construct
  misc_feature 1..16: note = synthetic [barcode part1]
  source 1..16: mol_type = other DNA
cctgtgcaactcggtt

SEQ ID NO: 1047 - DNA, 16 bp, synthetic construct
  misc_feature 1..16: note = synthetic [barcode part1]
  source 1..16: mol_type = other DNA
aattagtgtcggccac

SEQ ID NO: 1048 - DNA, 16 bp, synthetic construct
  misc_feature 1..16: note = synthetic [barcode part1]
  source 1..16: mol_type = other DNA
tcaactggtgtcacag

SEQ ID NO: 1049 - DNA, 16 bp, synthetic construct
  misc_feature 1..16: note = synthetic [barcode part1]
  source 1..16: mol_type = other DNA
cactacacttcaggag

SEQ ID NO: 1050 - DNA, 16 bp, synthetic construct
  misc_feature 1..16: note = synthetic [barcode part1]
  source 1..16: mol_type = other DNA
tcttaggacttatccg

SEQ ID NO: 1051 - DNA, 16 bp, synthetic construct
  misc_feature 1..16: note = synthetic [barcode part1]
  source 1..16: mol_type = other DNA
acagacttcagacacc

SEQ ID NO: 1052 - DNA, 16 bp, synthetic construct
  misc_feature 1..16: note = synthetic [barcode part1]
  source 1..16: mol_type = other DNA
tcgtccttaacctctg

SEQ ID NO: 1053 - DNA, 16 bp, synthetic construct
  misc_feature 1..16: note = synthetic [barcode part1]
  source 1..16: mol_type = other DNA
tgcacagtggatctgt

SEQ ID NO: 1054 - DNA, 16 bp, synthetic construct
  misc_feature 1..16: note = synthetic [barcode part1]
  source 1..16: mol_type = other DNA
tatacgacaccggtgt

SEQ ID NO: 1055 - DNA, 16 bp, synthetic construct
  misc_feature 1..16: note = synthetic [barcode part1]
  source 1..16: mol_type = other DNA
ccgcaaggcaattatc

SEQ ID NO: 1056 - DNA, 16 bp, synthetic construct
  misc_feature 1..16: note = synthetic [barcode part1]
  source 1..16: mol_type = other DNA
gtggaggttggatcgt

SEQ ID NO: 1057 - DNA, 16 bp, synthetic construct
  misc_feature 1..16: note = synthetic [barcode part1]
  source 1..16: mol_type = other DNA
cgtggacacaacagac

SEQ ID NO: 1058 - DNA, 16 bp, synthetic construct
  misc_feature 1..16: note = synthetic [barcode part1]
  source 1..16: mol_type = other DNA
ttgtctattacgacgc

SEQ ID NO: 1059 - DNA, 16 bp, synthetic construct
  misc_feature 1..16: note = synthetic [barcode part1]
  source 1..16: mol_type = other DNA
ccacacctaggtcgtt

SEQ ID NO: 1060 - DNA, 16 bp, synthetic construct
  misc_feature 1..16: note = synthetic [barcode part1]
  source 1..16: mol_type = other DNA
gaataccacaacagac

SEQ ID NO: 1061 - DNA, 16 bp, synthetic construct
  misc_feature 1..16: note = synthetic [barcode part1]
  source 1..16: mol_type = other DNA
gcgattacaaccacac

SEQ ID NO: 1062 - DNA, 16 bp, synthetic construct
  misc_feature 1..16: note = synthetic [barcode part1]
  source 1..16: mol_type = other DNA
tctcaccgtccacaag

SEQ ID NO: 1063 - DNA, 16 bp, synthetic construct
  misc_feature 1..16: note = synthetic [barcode part1]
  source 1..16: mol_type = other DNA
tctcagaccacctacg

SEQ ID NO: 1064 - DNA, 16 bp, synthetic construct
  misc_feature 1..16: note = synthetic [barcode part1]
  source 1..16: mol_type = other DNA
tggcgatagtcactgt

SEQ ID NO: 1065 - DNA, 16 bp, synthetic construct
  misc_feature 1..16: note = synthetic [barcode part1]
  source 1..16: mol_type = other DNA
aagattggcacctaag

SEQ ID NO: 1066 - DNA, 16 bp, synthetic construct
  misc_feature 1..16: note = synthetic [barcode part1]
  source 1..16: mol_type = other DNA
ttctgtatctccgtgc

SEQ ID NO: 1067 - DNA, 16 bp, synthetic construct
  misc_feature 1..16: note = synthetic [barcode part1]
  source 1..16: mol_type = other DNA
cgaagaaggagttggt

SEQ ID NO: 1068 - DNA, 16 bp, synthetic construct
  misc_feature 1..16: note = synthetic [barcode part1]
  source 1..16: mol_type = other DNA
taaggtagaacgtctg

SEQ ID NO: 1069 - DNA, 16 bp, synthetic construct
  misc_feature 1..16: note = synthetic [barcode part1]
  source 1..16: mol_type = other DNA
ccagagaagaggttag

SEQ ID NO: 1070 - DNA, 16 bp, synthetic construct
  misc_feature 1..16: note = synthetic [barcode part1]
  source 1..16: mol_type = other DNA
gtggaggaccactagt

SEQ ID NO: 1071 - DNA, 16 bp, synthetic construct
  misc_feature 1..16: note = synthetic [barcode part1]
  source 1..16: mol_type = other DNA
gcctactagacaagtc

SEQ ID NO: 1072 - DNA, 16 bp, synthetic construct
  misc_feature 1..16: note = synthetic [barcode part1]
  source 1..16: mol_type = other DNA
aactaagacggttgtg

SEQ ID NO: 1073 - DNA, 16 bp, synthetic construct
  misc_feature 1..16: note = synthetic [barcode part1]
  source 1..16: mol_type = other DNA
gtgattgaatcaggac

SEQ ID NO: 1074 - DNA, 16 bp, synthetic construct
  misc_feature 1..16: note = synthetic [barcode part1]
  source 1..16: mol_type = other DNA
gcaaggtgaacaacag

SEQ ID NO: 1075 - DNA, 16 bp, synthetic construct
  misc_feature 1..16: note = synthetic [barcode part1]
  source 1..16: mol_type = other DNA
cgtagtgccacctgtt

SEQ ID NO: 1076 - DNA, 16 bp, synthetic construct
  misc_feature 1..16: note = synthetic [barcode part1]
  source 1..16: mol_type = other DNA
gaatctgtctgacttc

SEQ ID NO: 1077 - DNA, 16 bp, synthetic construct
  misc_feature 1..16: note = synthetic [barcode part1]
  source 1..16: mol_type = other DNA
tcgcacgagagaatcg

SEQ ID NO: 1078 - DNA, 16 bp, synthetic construct
  misc_feature 1..16: note = synthetic [barcode part1]
  source 1..16: mol_type = other DNA
gagaccaagtcgtacg

SEQ ID NO: 1079 - DNA, 16 bp, synthetic construct
  misc_feature 1..16: note = synthetic [barcode part1]
  source 1..16: mol_type = other DNA
gcacgaatctagtaag

SEQ ID NO: 1080 - DNA, 16 bp, synthetic construct
  misc_feature 1..16: note = synthetic [barcode part1]
  source 1..16: mol_type = other DNA
caattccgcgttagtt

SEQ ID NO: 1081 - DNA, 16 bp, synthetic construct
  misc_feature 1..16: note = synthetic [barcode part1]
  source 1..16: mol_type = other DNA
gttagtgtgagaggcc

SEQ ID NO: 1082 - DNA, 16 bp, synthetic construct
  misc_feature 1..16: note = synthetic [barcode part1]
  source 1..16: mol_type = other DNA
cgaacttgcaagtctg

SEQ ID NO: 1083 - DNA, 16 bp, synthetic construct
  misc_feature 1..16: note = synthetic [barcode part1]
  source 1..16: mol_type = other DNA
acttgtggaggattag

SEQ ID NO: 1084 - DNA, 16 bp, synthetic construct
  misc_feature 1..16: note = synthetic [barcode part1]
  source 1..16: mol_type = other DNA
tccacaccaacgatcc

SEQ ID NO: 1085 - DNA, 16 bp, synthetic construct
  misc_feature 1..16: note = synthetic [barcode part1]
  source 1..16: mol_type = other DNA
acgttccaactaccgc

SEQ ID NO: 1086 - DNA, 16 bp, synthetic construct
  misc_feature 1..16: note = synthetic [barcode part1]
  source 1..16: mol_type = other DNA
tagtgtgagaagttgc

SEQ ID NO: 1087 - DNA, 16 bp, synthetic construct
  misc_feature 1..16: note = synthetic [barcode part1]
  source 1..16: mol_type = other DNA
actacctgtggattct

SEQ ID NO: 1088 - DNA, 16 bp, synthetic construct
  misc_feature 1..16: note = synthetic [barcode part1]
  source 1..16: mol_type = other DNA
tccggttattacacac

SEQ ID NO: 1089 - DNA, 16 bp, synthetic construct
  misc_feature 1..16: note = synthetic [barcode part1]
  source 1..16: mol_type = other DNA
tgattaggtgccgtgt

SEQ ID NO: 1090 - DNA, 16 bp, synthetic construct
  misc_feature 1..16: note = synthetic [barcode part1]
  source 1..16: mol_type = other DNA
tccgatccacagtcac

SEQ ID NO: 1091 - DNA, 16 bp, synthetic construct
  misc_feature 1..16: note = synthetic [barcode part1]
  source 1..16: mol_type = other DNA
cgtcagattgtgtctt

SEQ ID NO: 1092 - DNA, 16 bp, synthetic construct
  misc_feature 1..16: note = synthetic [barcode part1]
  source 1..16: mol_type = other DNA
taccgaatccgtgtcc

SEQ ID NO: 1093 - DNA, 16 bp, synthetic construct
  misc_feature 1..16: note = synthetic [barcode part1]
  source 1..16: mol_type = other DNA
gtccacctgaggttct

SEQ ID NO: 1094 - DNA, 16 bp, synthetic construct
  misc_feature 1..16: note = synthetic [barcode part1]
  source 1..16: mol_type = other DNA
attcgcacggtctctg

SEQ ID NO: 1095 - DNA, 16 bp, synthetic construct
  misc_feature 1..16: note = synthetic [barcode part1]
  source 1..16: mol_type = other DNA
gattctctgcgttagt

SEQ ID NO: 1096 - DNA, 16 bp, synthetic construct
  misc_feature 1..16: note = synthetic [barcode part1]
  source 1..16: mol_type = other DNA
tggtacaatcaccttc

SEQ ID NO: 1097 - DNA, 16 bp, synthetic construct
  misc_feature 1..16: note = synthetic [barcode part1]
  source 1..16: mol_type = other DNA
agaatcagtgcgaccg

SEQ ID NO: 1098 - DNA, 16 bp, synthetic construct
  misc_feature 1..16: note = synthetic [barcode part1]
  source 1..16: mol_type = other DNA
tccgaccttaggaagt

SEQ ID NO: 1099 - DNA, 16 bp, synthetic construct
  misc_feature 1..16: note = synthetic [barcode part1]
  source 1..16: mol_type = other DNA
tgacaggaggcaatag

SEQ ID NO: 1100 - DNA, 16 bp, synthetic construct
  misc_feature 1..16: note = synthetic [barcode part1]
  source 1..16: mol_type = other DNA
cctgatactgtatctg

SEQ ID NO: 1101 - DNA, 16 bp, synthetic construct
  misc_feature 1..16: note = synthetic [barcode part1]
  source 1..16: mol_type = other DNA
acagtgtgtcaactgc

SEQ ID NO: 1102 - DNA, 16 bp, synthetic construct
  misc_feature 1..16: note = synthetic [barcode part1]
  source 1..16: mol_type = other DNA
gcaggtctcctgttac

SEQ ID NO: 1103 - DNA, 16 bp, synthetic construct
  misc_feature 1..16: note = synthetic [barcode part1]
  source 1..16: mol_type = other DNA
attctgtcactagtgc

SEQ ID NO: 1104 - DNA, 16 bp, synthetic construct
  misc_feature 1..16: note = synthetic [barcode part1]
  source 1..16: mol_type = other DNA
caccactagatatctc

SEQ ID NO: 1105 - DNA, 16 bp, synthetic construct
  misc_feature 1..16: note = synthetic [barcode part1]
  source 1..16: mol_type = other DNA
aagtcacaggcacgac

SEQ ID NO: 1106 - DNA, 16 bp, synthetic construct
  misc_feature 1..16: note = synthetic [barcode part1]
  source 1..16: mol_type = other DNA
atagtatcgcacgtgc

SEQ ID NO: 1107 - DNA, 16 bp, synthetic construct
  misc_feature 1..16: note = synthetic [barcode part1]
  source 1..16: mol_type = other DNA
gcctccgattcagtac

SEQ ID NO: 1108 - DNA, 16 bp, synthetic construct
  misc_feature 1..16: note = synthetic [barcode part1]
  source 1..16: mol_type = other DNA
gtaggcctgtgaattc

SEQ ID NO: 1109 - DNA, 16 bp, synthetic construct
  misc_feature 1..16: note = synthetic [barcode part1]
  source 1..16: mol_type = other DNA
caatcttaaccgaggc

SEQ ID NO: 1110 - DNA, 16 bp, synthetic construct
  misc_feature 1..16: note = synthetic [barcode part1]
  source 1..16: mol_type = other DNA
taccacaactgtggtg

SEQ ID NO: 1111 - DNA, 16 bp, synthetic construct
  misc_feature 1..16: note = synthetic [barcode part1]
  source 1..16: mol_type = other DNA
agtatcaccagtcggt

SEQ ID NO: 1112 - DNA, 16 bp, synthetic construct
  misc_feature 1..16: note = synthetic [barcode part1]
  source 1..16: mol_type = other DNA
gcacctgacttcactg

SEQ ID NO: 1113 - DNA, 16 bp, synthetic construct
  misc_feature 1..16: note = synthetic [barcode part1]
  source 1..16: mol_type = other DNA
tggatcgcaacgatct

SEQ ID NO: 1114 - DNA, 16 bp, synthetic construct
  misc_feature 1..16: note = synthetic [barcode part1]
  source 1..16: mol_type = other DNA
tcctacaaccgttagt

SEQ ID NO: 1115 - DNA, 16 bp, synthetic construct
  misc_feature 1..16: note = synthetic [barcode part1]
  source 1..16: mol_type = other DNA
aaggtagtggacgcct

SEQ ID NO: 1116 - DNA, 16 bp, synthetic construct
  misc_feature 1..16: note = synthetic [barcode part1]
  source 1..16: mol_type = other DNA
attctacgttcgaacc

SEQ ID NO: 1117 - DNA, 16 bp, synthetic construct
  misc_feature 1..16: note = synthetic [barcode part1]
  source 1..16: mol_type = other DNA
actacagtccggaatc

SEQ ID NO: 1118 - DNA, 16 bp, synthetic construct
  misc_feature 1..16: note = synthetic [barcode part1]
  source 1..16: mol_type = other DNA
aaccagttggtcagtc

SEQ ID NO: 1119 - DNA, 16 bp, synthetic construct
  misc_feature 1..16: note = synthetic [barcode part1]
  source 1..16: mol_type = other DNA
cgcgtctctgttaggt

SEQ ID NO: 1120 - DNA, 16 bp, synthetic construct
  misc_feature 1..16: note = synthetic [barcode part1]
  source 1..16: mol_type = other DNA
actcaacgtacaagag

SEQ ID NO: 1121 - DNA, 16 bp, synthetic construct
  misc_feature 1..16: note = synthetic [barcode part1]
  source 1..16: mol_type = other DNA
actggttacgtacgtg

SEQ ID NO: 1122 - DNA, 16 bp, synthetic construct
  misc_feature 1..16: note = synthetic [barcode part1]
  source 1..16: mol_type = other DNA
tacctgttgtctgcct

SEQ ID NO: 1123 - DNA, 16 bp, synthetic construct
  misc_feature 1..16: note = synthetic [barcode part1]
  source 1..16: mol_type = other DNA
aggcggactacagtgt

SEQ ID NO: 1124 - DNA, 16 bp, synthetic construct
  misc_feature 1..16: note = synthetic [barcode part1]
  source 1..16: mol_type = other DNA
cgtacagtctaatcct

SEQ ID NO: 1125 - DNA, 16 bp, synthetic construct
  misc_feature 1..16: note = synthetic [barcode part1]
  source 1..16: mol_type = other DNA
ataaccgtctcttgac

SEQ ID NO: 1126 - DNA, 16 bp, synthetic construct
  misc_feature 1..16: note = synthetic [barcode part1]
  source 1..16: mol_type = other DNA
acacaacgtgtcaacc

SEQ ID NO: 1127 - DNA, 16 bp, synthetic construct
  misc_feature 1..16: note = synthetic [barcode part1]
  source 1..16: mol_type = other DNA
cgacagataggacaag

SEQ ID NO: 1128 - DNA, 16 bp, synthetic construct
  misc_feature 1..16: note = synthetic [barcode part1]
  source 1..16: mol_type = other DNA
cggatcctattatctg

SEQ ID NO: 1129 - DNA, 16 bp, synthetic construct
  misc_feature 1..16: note = synthetic [barcode part1]
  source 1..16: mol_type = other DNA
ttccacagtcactagt

SEQ ID NO: 1130 - DNA, 16 bp, synthetic construct
  misc_feature 1..16: note = synthetic [barcode part1]
  source 1..16: mol_type = other DNA
agtcgtgagagaatct

SEQ ID NO: 1131 - DNA, 16 bp, synthetic construct
  misc_feature 1..16: note = synthetic [barcode part1]
  source 1..16: mol_type = other DNA
taccgcgccaattaag

SEQ ID NO: 1132 - DNA, 16 bp, synthetic construct
  misc_feature 1..16: note = synthetic [barcode part1]
  source 1..16: mol_type = other DNA
agaattggtcgaggag

SEQ ID NO: 1133 - DNA, 16 bp, synthetic construct
  misc_feature 1..16: note = synthetic [barcode part1]
  source 1..16: mol_type = other DNA
aactggcagttccagt

SEQ ID NO: 1134 - DNA, 16 bp, synthetic construct
  misc_feature 1..16: note = synthetic [barcode part1]
  source 1..16: mol_type = other DNA
tcctcaccactgagtg

SEQ ID NO: 1135 - DNA, 16 bp, synthetic construct
  misc_feature 1..16: note = synthetic [barcode part1]
  source 1..16: mol_type = other DNA
ccgacttctattgtcc

SEQ ID NO: 1136 - DNA, 16 bp, synthetic construct
  misc_feature 1..16: note = synthetic [barcode part1]
  source 1..16: mol_type = other DNA
tccggttctccaattc

SEQ ID NO: 1137 - DNA, 16 bp, synthetic construct
  misc_feature 1..16: note = synthetic [barcode part1]
  source 1..16: mol_type = other DNA
ttacgagacctctcgc

SEQ ID NO: 1138 - DNA, 16 bp, synthetic construct
  misc_feature 1..16: note = synthetic [barcode part1]
  source 1..16: mol_type = other DNA
cctctcagaatatctg

SEQ ID NO: 1139 - DNA, 16 bp, synthetic construct
  misc_feature 1..16: note = synthetic [barcode part1]
  source 1..16: mol_type = other DNA
taggatcgtcaactgc

SEQ ID NO: 1140 - DNA, 16 bp, synthetic construct
  misc_feature 1..16: note = synthetic [barcode part1]
  source 1..16: mol_type = other DNA
acactcagtctgtgag

SEQ ID NO: 1141 - DNA, 16 bp, synthetic construct
  misc_feature 1..16: note = synthetic [barcode part1]
  source 1..16: mol_type = other DNA
gaagattcgacgcgtg

SEQ ID NO: 1142 - DNA, 16 bp, synthetic construct
  misc_feature 1..16: note = synthetic [barcode part1]
  source 1..16: mol_type = other DNA
tacgtagtcgccgttc

SEQ ID NO: 1143 - DNA, 16 bp, synthetic construct
  misc_feature 1..16: note = synthetic [barcode part1]
  source 1..16: mol_type = other DNA
taagatccacacgcgt

SEQ ID NO: 1144 - DNA, 16 bp, synthetic construct
  misc_feature 1..16: note = synthetic [barcode part1]
  source 1..16: mol_type = other DNA
tactgagtatctctgc

SEQ ID NO: 1145 - DNA, 16 bp, synthetic construct
  misc_feature 1..16: note = synthetic [barcode part1]
  source 1..16: mol_type = other DNA
ttcaccggcacctaac

SEQ ID NO: 1146 - DNA, 16 bp, synthetic construct
  misc_feature 1..16: note = synthetic [barcode part1]
  source 1..16: mol_type = other DNA
ccagttcctcaacttc

SEQ ID NO: 1147 - DNA, 16 bp, synthetic construct
  misc_feature 1..16: note = synthetic [barcode part1]
  source 1..16: mol_type = other DNA
acggcctattcctgtg

SEQ ID NO: 1148 - DNA, 16 bp, synthetic construct
  misc_feature 1..16: note = synthetic [barcode part1]
  source 1..16: mol_type = other DNA
gtatccagacggagtg

SEQ ID NO: 1149 - DNA, 16 bp, synthetic construct
  misc_feature 1..16: note = synthetic [barcode part1]
  source 1..16: mol_type = other DNA
accgcctgagttcgtt

SEQ ID NO: 1150 - DNA, 16 bp, synthetic construct
  misc_feature 1..16: note = synthetic [barcode part1]
  source 1..16: mol_type = other DNA
gaaggatcgaatctgt

SEQ ID NO: 1151 - DNA, 16 bp, synthetic construct
  misc_feature 1..16: note = synthetic [barcode part1]
  source 1..16: mol_type = other DNA
acgtgtaccgactaac

SEQ ID NO: 1152 - DNA, 16 bp, synthetic construct
  misc_feature 1..16: note = synthetic [barcode part1]
  source 1..16: mol_type = other DNA
aattcaacgcaggaac

SEQ ID NO: 1153 - DNA, 16 bp, synthetic construct
  misc_feature 1..16: note = synthetic [barcode part1]
  source 1..16: mol_type = other DNA
cgccgagacctctatt

SEQ ID NO: 1154 - DNA, 16 bp, synthetic construct
  misc_feature 1..16: note = synthetic [barcode part1]
  source 1..16: mol_type = other DNA
ccggcaggaattactt

SEQ ID NO: 1155 - DNA, 16 bp, synthetic construct
  misc_feature 1..16: note = synthetic [barcode part1]
  source 1..16: mol_type = other DNA
gcgtcgttattcaccg

SEQ ID NO: 1156 - DNA, 16 bp, synthetic construct
  misc_feature 1..16: note = synthetic [barcode part1]
  source 1..16: mol_type = other DNA
cgccagttcttctgag

SEQ ID NO: 1157 - DNA, 16 bp, synthetic construct
  misc_feature 1..16: note = synthetic [barcode part1]
  source 1..16: mol_type = other DNA
gttctccaccacgtag

SEQ ID NO: 1158 - DNA, 16 bp, synthetic construct
  misc_feature 1..16: note = synthetic [barcode part1]
  source 1..16: mol_type = other DNA
gtctacctctgaggtc

SEQ ID NO: 1159 - DNA, 16 bp, synthetic construct
  misc_feature 1..16: note = synthetic [barcode part1]
  source 1..16: mol_type = other DNA
tggtcttggaggactt

SEQ ID NO: 1160 - DNA, 16 bp, synthetic construct
  misc_feature 1..16: note = synthetic [barcode part1]
  source 1..16: mol_type = other DNA
ccaattcagtggcagt

SEQ ID NO: 1161 - DNA, 16 bp, synthetic construct
  misc_feature 1..16: note = synthetic [barcode part1]
  source 1..16: mol_type = other DNA
accaccgattgttgag

SEQ ID NO: 1162 - DNA, 16 bp, synthetic construct
  misc_feature 1..16: note = synthetic [barcode part1]
  source 1..16: mol_type = other DNA
agttcttggttcgcgc

SEQ ID NO: 1163 - DNA, 16 bp, synthetic construct
  misc_feature 1..16: note = synthetic [barcode part1]
  source 1..16: mol_type = other DNA
gatctagtcttacacc

SEQ ID NO: 1164 - DNA, 16 bp, synthetic construct
  misc_feature 1..16: note = synthetic [barcode part1]
  source 1..16: mol_type = other DNA
gattgcgtcaagaagt

SEQ ID NO: 1165 - DNA, 16 bp, synthetic construct
  misc_feature 1..16: note = synthetic [barcode part1]
  source 1..16: mol_type = other DNA
gaattgcactcgacac

SEQ ID NO: 1166 - DNA, 16 bp, synthetic construct
  misc_feature 1..16: note = synthetic [barcode part1]
  source 1..16: mol_type = other DNA
ccactgtgttctgttc

SEQ ID NO: 1167 - DNA, 16 bp, synthetic construct
  misc_feature 1..16: note = synthetic [barcode part1]
  source 1..16: mol_type = other DNA
ccactaattgacggtg

SEQ ID NO: 1168 - DNA, 16 bp, synthetic construct
  misc_feature 1..16: note = synthetic [barcode part1]
  source 1..16: mol_type = other DNA
acaccgataacaaggt

SEQ ID NO: 1169 - DNA, 16 bp, synthetic construct
  misc_feature 1..16: note = synthetic [barcode part1]
  source 1..16: mol_type = other DNA
aaccgagttatacgag

SEQ ID NO: 1170 - DNA, 16 bp, synthetic construct
  misc_feature 1..16: note = synthetic [barcode part1]
  source 1..16: mol_type = other DNA
taactctcgcagtcgc

SEQ ID NO: 1171 - DNA, 16 bp, synthetic construct
  misc_feature 1..16: note = synthetic [barcode part1]
  source 1..16: mol_type = other DNA
aagactaacgcaactg

SEQ ID NO: 1172 - DNA, 16 bp, synthetic construct
  misc_feature 1..16: note = synthetic [barcode part1]
  source 1..16: mol_type = other DNA
acactccttaacaacc

SEQ ID NO: 1173 - DNA, 16 bp, synthetic construct
  misc_feature 1..16: note = synthetic [barcode part1]
  source 1..16: mol_type = other DNA
gacacactggtacact

SEQ ID NO: 1174 - DNA, 16 bp, synthetic construct
  misc_feature 1..16: note = synthetic [barcode part1]
  source 1..16: mol_type = other DNA
cagaatctctcaggac

SEQ ID NO: 1175 - DNA, 16 bp, synthetic construct
  misc_feature 1..16: note = synthetic [barcode part1]
  source 1..16: mol_type = other DNA
ccttgtctaagtgccg

SEQ ID NO: 1176 - DNA, 16 bp, synthetic construct
  misc_feature 1..16: note = synthetic [barcode part1]
  source 1..16: mol_type = other DNA
agttgcgtcaacttct

SEQ ID NO: 1177 - DNA, 16 bp, synthetic construct
  misc_feature 1..16: note = synthetic [barcode part1]
  source 1..16: mol_type = other DNA
gtgttgagaagaccgc

SEQ ID NO: 1178 - DNA, 16 bp, synthetic construct
  misc_feature 1..16: note = synthetic [barcode part1]
  source 1..16: mol_type = other DNA
tccgttgtcgatacgc

SEQ ID NO: 1179 - DNA, 16 bp, synthetic construct
  misc_feature 1..16: note = synthetic [barcode part1]
  source 1..16: mol_type = other DNA
tccgcagatagacttg

SEQ ID NO: 1180 - DNA, 16 bp, synthetic construct
  misc_feature 1..16: note = synthetic [barcode part1]
  source 1..16: mol_type = other DNA
atactaactggcgtgc

SEQ ID NO: 1181 - DNA, 16 bp, synthetic construct
  misc_feature 1..16: note = synthetic [barcode part1]
  source 1..16: mol_type = other DNA
gaacaagtggacaggt

SEQ ID NO: 1182 - DNA, 16 bp, synthetic construct
  misc_feature 1..16: note = synthetic [barcode part1]
  source 1..16: mol_type = other DNA
cgttggacgaaggtgt

SEQ ID NO: 1183 - DNA, 16 bp, synthetic construct
  misc_feature 1..16: note = synthetic [barcode part1]
  source 1..16: mol_type = other DNA
ccggtctagtagtagt

SEQ ID NO: 1184 - DNA, 16 bp, synthetic construct
  misc_feature 1..16: note = synthetic [barcode part1]
  source 1..16: mol_type = other DNA
aacactggtactgtgc

SEQ ID NO: 1185 - DNA, 16 bp, synthetic construct
  misc_feature 1..16: note = synthetic [barcode part1]
  source 1..16: mol_type = other DNA
gtcagtactactactc

SEQ ID NO: 1186 - DNA, 16 bp, synthetic construct
  misc_feature 1..16: note = synthetic [barcode part1]
  source 1..16: mol_type = other DNA
gcaataaccaccgttg

SEQ ID NO: 1187 - DNA, 16 bp, synthetic construct
  misc_feature 1..16: note = synthetic [barcode part1]
  source 1..16: mol_type = other DNA
tactatccacctcacc

SEQ ID NO: 1188 - DNA, 16 bp, synthetic construct
  misc_feature 1..16: note = synthetic [barcode part1]
  source 1..16: mol_type = other DNA
agattatcacttccgc

SEQ ID NO: 1189 - DNA, 16 bp, synthetic construct
  misc_feature 1..16: note = synthetic [barcode part1]
  source 1..16: mol_type = other DNA
gtaacaatctgcgaag

SEQ ID NO: 1190 - DNA, 16 bp, synthetic construct
  misc_feature 1..16: note = synthetic [barcode part1]
  source 1..16: mol_type = other DNA
tggaataccgtgtaag

SEQ ID NO: 1191 - DNA, 16 bp, synthetic construct
  misc_feature 1..16: note = synthetic [barcode part1]
  source 1..16: mol_type = other DNA
ttcaacgataaggacg

SEQ ID NO: 1192 - DNA, 16 bp, synthetic construct
  misc_feature 1..16: note = synthetic [barcode part1]
  source 1..16: mol_type = other DNA
aattcgccgtctagag

SEQ ID NO: 1193 - DNA, 16 bp, synthetic construct
  misc_feature 1..16: note = synthetic [barcode part1]
  source 1..16: mol_type = other DNA
cctgttagtcgttcct

SEQ ID NO: 1194 - DNA, 16 bp, synthetic construct
  misc_feature 1..16: note = synthetic [barcode part1]
  source 1..16: mol_type = other DNA
cgaggagtaattgtgt

SEQ ID NO: 1195 - DNA, 16 bp, synthetic construct
  misc_feature 1..16: note = synthetic [barcode part1]
  source 1..16: mol_type = other DNA
cctgtatcgtgtctct

SEQ ID NO: 1196 - DNA, 16 bp, synthetic construct
  misc_feature 1..16: note = synthetic [barcode part1]
  source 1..16: mol_type = other DNA
gtgattgcacgactac

SEQ ID NO: 1197 - DNA, 16 bp, synthetic construct
  misc_feature 1..16: note = synthetic [barcode part1]
  source 1..16: mol_type = other DNA
gtcacgaccgtctact

SEQ ID NO: 1198 - DNA, 16 bp, synthetic construct
  misc_feature 1..16: note = synthetic [barcode part1]
  source 1..16: mol_type = other DNA
ttaacgaagtgcgagt

SEQ ID NO: 1199 - DNA, 16 bp, synthetic construct
  misc_feature 1..16: note = synthetic [barcode part1]
  source 1..16: mol_type = other DNA
aagtcgtcaggagtgc

SEQ ID NO: 1200 - DNA, 16 bp, synthetic construct
  misc_feature 1..16: note = synthetic [barcode part1]
  source 1..16: mol_type = other DNA
tcgtcacgtaataggc

SEQ ID NO: 1201 - DNA, 16 bp, synthetic construct
  misc_feature 1..16: note = synthetic [barcode part1]
  source 1..16: mol_type = other DNA
tgttcaggtacagtcg

SEQ ID NO: 1202 - DNA, 16 bp, synthetic construct
  misc_feature 1..16: note = synthetic [barcode part1]
  source 1..16: mol_type = other DNA
gccggtgtgaagagtt

SEQ ID NO: 1203 - DNA, 16 bp, synthetic construct
  misc_feature 1..16: note = synthetic [barcode part1]
  source 1..16: mol_type = other DNA
tggtagtcaatctggc

SEQ ID NO: 1204 - DNA, 16 bp, synthetic construct
  misc_feature 1..16: note = synthetic [barcode part1]
  source 1..16: mol_type = other DNA
tcacgttggtggcctt

SEQ ID NO: 1205 - DNA, 16 bp, synthetic construct
  misc_feature 1..16: note = synthetic [barcode part1]
  source 1..16: mol_type = other DNA
aagtaaccacgttgag

SEQ ID NO: 1206 - DNA, 16 bp, synthetic construct
  misc_feature 1..16: note = synthetic [barcode part1]
  source 1..16: mol_type = other DNA
tcagtacgtactggtg

SEQ ID NO: 1207 - DNA, 16 bp, synthetic construct
  misc_feature 1..16: note = synthetic [barcode part1]
  source 1..16: mol_type = other DNA
gagtggttgtgagtcg

SEQ ID NO: 1208 - DNA, 16 bp, synthetic construct
  misc_feature 1..16: note = synthetic [barcode part1]
  source 1..16: mol_type = other DNA
gtgacgattacgtaag

SEQ ID NO: 1209 - DNA, 16 bp, synthetic construct
  misc_feature 1..16: note = synthetic [barcode part1]
  source 1..16: mol_type = other DNA
gcagattcgtgaactc

SEQ ID NO: 1210 - DNA, 16 bp, synthetic construct
  misc_feature 1..16: note = synthetic [barcode part1]
  source 1..16: mol_type = other DNA
gaggtacgatccagtg

SEQ ID NO: 1211 - DNA, 16 bp, synthetic construct
  misc_feature 1..16: note = synthetic [barcode part1]
  source 1..16: mol_type = other DNA
aacgccgttggttaac

SEQ ID NO: 1212 - DNA, 16 bp, synthetic construct
  misc_feature 1..16: note = synthetic [barcode part1]
  source 1..16: mol_type = other DNA
cgttagacttgtactc

SEQ ID NO: 1213 - DNA, 16 bp, synthetic construct
  misc_feature 1..16: note = synthetic [barcode part1]
  source 1..16: mol_type = other DNA
tacgacttcagtgcag

SEQ ID NO: 1214 - DNA, 16 bp, synthetic construct
  misc_feature 1..16: note = synthetic [barcode part1]
  source 1..16: mol_type = other DNA
gcgtgtaaggacttct

SEQ ID NO: 1215 - DNA, 16 bp, synthetic construct
  misc_feature 1..16: note = synthetic [barcode part1]
  source 1..16: mol_type = other DNA
atcgttcaagtggcgt

SEQ ID NO: 1216 - DNA, 16 bp, synthetic construct
  misc_feature 1..16: note = synthetic [barcode part1]
  source 1..16: mol_type = other DNA
aacacacgtgtgtcac

SEQ ID NO: 1217 - DNA, 16 bp, synthetic construct
  misc_feature 1..16: note = synthetic [barcode part1]
  source 1..16: mol_type = other DNA
tcgtaagtccaacttc

SEQ ID NO: 1218 - DNA, 16 bp, synthetic construct
  misc_feature 1..16: note = synthetic [barcode part1]
  source 1..16: mol_type = other DNA
ttgtcgcggatctacc

SEQ ID NO: 1219 - DNA, 16 bp, synthetic construct
  misc_feature 1..16: note = synthetic [barcode part1]
  source 1..16: mol_type = other DNA
tgtatctgagtgcgac

SEQ ID NO: 1220 - DNA, 16 bp, synthetic construct
  misc_feature 1..16: note = synthetic [barcode part1]
  source 1..16: mol_type = other DNA
tcctacagaccaccgt

SEQ ID NO: 1221 - DNA, 16 bp, synthetic construct
  misc_feature 1..16: note = synthetic [barcode part1]
  source 1..16: mol_type = other DNA
atacggttcaactctc

SEQ ID NO: 1222 - DNA, 16 bp, synthetic construct
  misc_feature 1..16: note = synthetic [barcode part1]
  source 1..16: mol_type = other DNA
ttagttcgcagtcgcc

SEQ ID NO: 1223 - DNA, 16 bp, synthetic construct
  misc_feature 1..16: note = synthetic [barcode part1]
  source 1..16: mol_type = other DNA
gcctgtcctcagagtt

SEQ ID NO: 1224 - DNA, 16 bp, synthetic construct
  misc_feature 1..16: note = synthetic [barcode part1]
  source 1..16: mol_type = other DNA
atccagtaagacacag

SEQ ID NO: 1225 - DNA, 16 bp, synthetic construct
  misc_feature 1..16: note = synthetic [barcode part1]
  source 1..16: mol_type = other DNA
tctaaggaaggaaggc

SEQ ID NO: 1226 - DNA, 16 bp, synthetic construct
  misc_feature 1..16: note = synthetic [barcode part1]
  source 1..16: mol_type = other DNA
ttggtggtaccgaact

SEQ ID NO: 1227 - DNA, 16 bp, synthetic construct
  misc_feature 1..16: note = synthetic [barcode part1]
  source 1..16: mol_type = other DNA
agatctcttcctctcg

SEQ ID NO: 1228 - DNA, 16 bp, synthetic construct
  misc_feature 1..16: note = synthetic [barcode part1]
  source 1..16: mol_type = other DNA
tatcctgtcgccttgt

SEQ ID NO: 1229 - DNA, 16 bp, synthetic construct
  misc_feature 1..16: note = synthetic [barcode part1]
  source 1..16: mol_type = other DNA
cgcgacgatagtactt

SEQ ID NO: 1230 - DNA, 16 bp, synthetic construct
  misc_feature 1..16: note = synthetic [barcode part1]
  source 1..16: mol_type = other DNA
caggttagttaggtcc

SEQ ID NO: 1231 - DNA, 16 bp, synthetic construct
  misc_feature 1..16: note = synthetic [barcode part1]
  source 1..16: mol_type = other DNA
gtattccaatcgtcgt

SEQ ID NO: 1232 - DNA, 16 bp, synthetic construct
  misc_feature 1..16: note = synthetic [barcode part1]
  source 1..16: mol_type = other DNA
ttcagacttcacggag

SEQ ID NO: 1233 - DNA, 16 bp, synthetic construct
  misc_feature 1..16: note = synthetic [barcode part1]
  source 1..16: mol_type = other DNA
tcttctccggtgttac

SEQ ID NO: 1234 - DNA, 16 bp, synthetic construct
  misc_feature 1..16: note = synthetic [barcode part1]
  source 1..16: mol_type = other DNA
accagacgaactgtct

SEQ ID NO: 1235 - DNA, 16 bp, synthetic construct
  misc_feature 1..16: note = synthetic [barcode part1]
  source 1..16: mol_type = other DNA
tgacctccaacacacc

SEQ ID NO: 1236 - DNA, 16 bp, synthetic construct
  misc_feature 1..16: note = synthetic [barcode part1]
  source 1..16: mol_type = other DNA
attaggaacgcgccag

SEQ ID NO: 1237 - DNA, 16 bp, synthetic construct
  misc_feature 1..16: note = synthetic [barcode part1]
  source 1..16: mol_type = other DNA
gcgcgagttcgataag

SEQ ID NO: 1238 - DNA, 16 bp, synthetic construct
  misc_feature 1..16: note = synthetic [barcode part1]
  source 1..16: mol_type = other DNA
tcgcggattattactc

SEQ ID NO: 1239 - DNA, 16 bp, synthetic construct
  misc_feature 1..16: note = synthetic [barcode part1]
  source 1..16: mol_type = other DNA
cgtgaactactcgagt

SEQ ID NO: 1240 - DNA, 16 bp, synthetic construct
  misc_feature 1..16: note = synthetic [barcode part1]
  source 1..16: mol_type = other DNA
acgaccgttagtctcc

SEQ ID NO: 1241 - DNA, 16 bp, synthetic construct
  misc_feature 1..16: note = synthetic [barcode part1]
  source 1..16: mol_type = other DNA
tgttgtgtgtggtgtg

SEQ ID NO: 1242 - DNA, 16 bp, synthetic construct
  misc_feature 1..16: note = synthetic [barcode part1]
  source 1..16: mol_type = other DNA
ttcacactcgagttgt

SEQ ID NO: 1243 - DNA, 16 bp, synthetic construct
  misc_feature 1..16: note = synthetic [barcode part1]
  source 1..16: mol_type = other DNA
ccagaaggattacgcg

SEQ ID NO: 1244 - DNA, 16 bp, synthetic construct
  misc_feature 1..16: note = synthetic [barcode part1]
  source 1..16: mol_type = other DNA
gtgcaatctaatctcc

SEQ ID NO: 1245 - DNA, 16 bp, synthetic construct
  misc_feature 1..16: note = synthetic [barcode part1]
  source 1..16: mol_type = other DNA
aagtgcctcgccttgt

SEQ ID NO: 1246 - DNA, 16 bp, synthetic construct
  misc_feature 1..16: note = synthetic [barcode part1]
  source 1..16: mol_type = other DNA
gataggcctcagaacg

SEQ ID NO: 1247 - DNA, 16 bp, synthetic construct
  misc_feature 1..16: note = synthetic [barcode part1]
  source 1..16: mol_type = other DNA
ttggatcggttcaacg

SEQ ID NO: 1248 - DNA, 16 bp, synthetic construct
  misc_feature 1..16: note = synthetic [barcode part1]
  source 1..16: mol_type = other DNA
tcagacaccacctcac

SEQ ID NO: 1249 - DNA, 16 bp, synthetic construct
  misc_feature 1..16: note = synthetic [barcode part1]
  source 1..16: mol_type = other DNA
tcgaggatcctactag

SEQ ID NO: 1250 - DNA, 16 bp, synthetic construct
  misc_feature 1..16: note = synthetic [barcode part1]
  source 1..16: mol_type = other DNA
cacggtgatagtatcc

SEQ ID NO: 1251 - DNA, 16 bp, synthetic construct
  misc_feature 1..16: note = synthetic [barcode part1]
  source 1..16: mol_type = other DNA
ttggttctgtcggcgt

SEQ ID NO: 1252 - DNA, 16 bp, synthetic construct
  misc_feature 1..16: note = synthetic [barcode part1]
  source 1..16: mol_type = other DNA
agttctgccgcaatag

SEQ ID NO: 1253 - DNA, 16 bp, synthetic construct
  misc_feature 1..16: note = synthetic [barcode part1]
  source 1..16: mol_type = other DNA
gacaatccgcaaggac

SEQ ID NO: 1254 - DNA, 16 bp, synthetic construct
  misc_feature 1..16: note = synthetic [barcode part1]
  source 1..16: mol_type = other DNA
tcctaccaccttactg

SEQ ID NO: 1255 - DNA, 16 bp, synthetic construct
  misc_feature 1..16: note = synthetic [barcode part1]
  source 1..16: mol_type = other DNA
tcgaggacaatctctg

SEQ ID NO: 1256 - DNA, 16 bp, synthetic construct
  misc_feature 1..16: note = synthetic [barcode part1]
  source 1..16: mol_type = other DNA
tgttgaggagtacggc

SEQ ID NO: 1257 - DNA, 16 bp, synthetic construct
  misc_feature 1..16: note = synthetic [barcode part1]
  source 1..16: mol_type = other DNA
gttggcctatacacag

SEQ ID NO: 1258 - DNA, 16 bp, synthetic construct
  misc_feature 1..16: note = synthetic [barcode part1]
  source 1..16: mol_type = other DNA
attgtctcttgccacc

SEQ ID NO: 1259 - DNA, 16 bp, synthetic construct
  misc_feature 1..16: note = synthetic [barcode part1]
  source 1..16: mol_type = other DNA
actacgaacttacctc

SEQ ID NO: 1260 - DNA, 16 bp, synthetic construct
  misc_feature 1..16: note = synthetic [barcode part1]
  source 1..16: mol_type = other DNA
gtagtggttgcacgag

SEQ ID NO: 1261 - DNA, 16 bp, synthetic construct
  misc_feature 1..16: note = synthetic [barcode part1]
  source 1..16: mol_type = other DNA
tgcaacttgatccttg

SEQ ID NO: 1262 - DNA, 16 bp, synthetic construct
  misc_feature 1..16: note = synthetic [barcode part1]
  source 1..16: mol_type = other DNA
tcgccttgattatacg

SEQ ID NO: 1263 - DNA, 16 bp, synthetic construct
  misc_feature 1..16: note = synthetic [barcode part1]
  source 1..16: mol_type = other DNA
acttccgataaggacc

SEQ ID NO: 1264 - DNA, 16 bp, synthetic construct
  misc_feature 1..16: note = synthetic [barcode part1]
  source 1..16: mol_type = other DNA
agagacgcaggaatac

SEQ ID NO: 1265 - DNA, 16 bp, synthetic construct
  misc_feature 1..16: note = synthetic [barcode part1]
  source 1..16: mol_type = other DNA
agttcgtggcaagacg

SEQ ID NO: 1266 - DNA, 16 bp, synthetic construct
  misc_feature 1..16: note = synthetic [barcode part1]
  source 1..16: mol_type = other DNA
tcctattcctagacag

SEQ ID NO: 1267 - DNA, 16 bp, synthetic construct
  misc_feature 1..16: note = synthetic [barcode part1]
  source 1..16: mol_type = other DNA
aatcttaccacctacg

SEQ ID NO: 1268 - DNA, 16 bp, synthetic construct
  misc_feature 1..16: note = synthetic [barcode part1]
  source 1..16: mol_type = other DNA
agtctccttctgtcac

SEQ ID NO: 1269 - DNA, 16 bp, synthetic construct
  misc_feature 1..16: note = synthetic [barcode part1]
  source 1..16: mol_type = other DNA
ttacaggtaccaacgc

SEQ ID NO: 1270 - DNA, 16 bp, synthetic construct
  misc_feature 1..16: note = synthetic [barcode part1]
  source 1..16: mol_type = other DNA
ccgttcgtgaacaagt

SEQ ID NO: 1271 - DNA, 16 bp, synthetic construct
  misc_feature 1..16: note = synthetic [barcode part1]
  source 1..16: mol_type = other DNA
tcgaggcgaattctac

SEQ ID NO: 1272 - DNA, 16 bp, synthetic construct
  misc_feature 1..16: note = synthetic [barcode part1]
  source 1..16: mol_type = other DNA
gtatcttcaactcgac

SEQ ID NO: 1273 - DNA, 16 bp, synthetic construct
  misc_feature 1..16: note = synthetic [barcode part1]
  source 1..16: mol_type = other DNA
acacagtgtaccaacc

SEQ ID NO: 1274 - DNA, 16 bp, synthetic construct
  misc_feature 1..16: note = synthetic [barcode part1]
  source 1..16: mol_type = other DNA
atcgcctctattccac

SEQ ID NO: 1275 - DNA, 16 bp, synthetic construct
  misc_feature 1..16: note = synthetic [barcode part1]
  source 1..16: mol_type = other DNA
ttacttacgtcgcagt

SEQ ID NO: 1276 - DNA, 16 bp, synthetic construct
  misc_feature 1..16: note = synthetic [barcode part1]
  source 1..16: mol_type = other DNA
acgtggaaggttattg

SEQ ID NO: 1277 - DNA, 16 bp, synthetic construct
  misc_feature 1..16: note = synthetic [barcode part1]
  source 1..16: mol_type = other DNA
acaagaggcacaaggt

SEQ ID NO: 1278 - DNA, 16 bp, synthetic construct
  misc_feature 1..16: note = synthetic [barcode part1]
  source 1..16: mol_type = other DNA
cgaaccgtagtagttc

SEQ ID NO: 1279 - DNA, 16 bp, synthetic construct
  misc_feature 1..16: note = synthetic [barcode part1]
  source 1..16: mol_type = other DNA
tcctgtcgatatctag

SEQ ID NO: 1280 - DNA, 16 bp, synthetic construct
  misc_feature 1..16: note = synthetic [barcode part1]
  source 1..16: mol_type = other DNA
tcgtctaacagacggt

SEQ ID NO: 1281 - DNA, 16 bp, synthetic construct
  misc_feature 1..16: note = synthetic [barcode part1]
  source 1..16: mol_type = other DNA
gattgcgagagaactt

SEQ ID NO: 1282 - DNA, 16 bp, synthetic construct
  misc_feature 1..16: note = synthetic [barcode part1]
  source 1..16: mol_type = other DNA
ttcgacctctcagttc

SEQ ID NO: 1283 - DNA, 16 bp, synthetic construct
  misc_feature 1..16: note = synthetic [barcode part1]
  source 1..16: mol_type = other DNA
accgtaaggtgagtgc

SEQ ID NO: 1284 - DNA, 16 bp, synthetic construct
  misc_feature 1..16: note = synthetic [barcode part1]
  source 1..16: mol_type = other DNA
cagttaggaccgattc

SEQ ID NO: 1285 - DNA, 16 bp, synthetic construct
  misc_feature 1..16: note = synthetic [barcode part1]
  source 1..16: mol_type = other DNA
tcctcaggtaccgatc

SEQ ID NO: 1286 - DNA, 16 bp, synthetic construct
  misc_feature 1..16: note = synthetic [barcode part1]
  source 1..16: mol_type = other DNA
tcaggacctcaagact

SEQ ID NO: 1287 - DNA, 16 bp, synthetic construct
  misc_feature 1..16: note = synthetic [barcode part1]
  source 1..16: mol_type = other DNA
gtgagtcaagagttgt

SEQ ID NO: 1288 - DNA, 16 bp, synthetic construct
  misc_feature 1..16: note = synthetic [barcode part1]
  source 1..16: mol_type = other DNA
cgcggttccaatatag

SEQ ID NO: 1289 - DNA, 16 bp, synthetic construct
  misc_feature 1..16: note = synthetic [barcode part1]
  source 1..16: mol_type = other DNA
agttcacgacgtctag

SEQ ID NO: 1290 - DNA, 16 bp, synthetic construct
  misc_feature 1..16: note = synthetic [barcode part1]
  source 1..16: mol_type = other DNA
gttgttcgtctgtagt

SEQ ID NO: 1291 - DNA, 16 bp, synthetic construct
  misc_feature 1..16: note = synthetic [barcode part1]
  source 1..16: mol_type = other DNA
gaatctccttccttcg

SEQ ID NO: 1292 - DNA, 16 bp, synthetic construct
  misc_feature 1..16: note = synthetic [barcode part1]
  source 1..16: mol_type = other DNA
agttgaccaaccaacc

SEQ ID NO: 1293 - DNA, 16 bp, synthetic construct
  misc_feature 1..16: note = synthetic [barcode part1]
  source 1..16: mol_type = other DNA
atcagtgtgcctcgtc

SEQ ID NO: 1294 - DNA, 16 bp, synthetic construct
  misc_feature 1..16: note = synthetic [barcode part1]
  source 1..16: mol_type = other DNA
tacgtcagtaccaacg

SEQ ID NO: 1295 - DNA, 16 bp, synthetic construct
  misc_feature 1..16: note = synthetic [barcode part1]
  source 1..16: mol_type = other DNA
tgaggactgaattacg

SEQ ID NO: 1296 - DNA, 16 bp, synthetic construct
  misc_feature 1..16: note = synthetic [barcode part1]
  source 1..16: mol_type = other DNA
aataacctggtggcct

SEQ ID NO: 1297 - DNA, 16 bp, synthetic construct
  misc_feature 1..16: note = synthetic [barcode part1]
  source 1..16: mol_type = other DNA
acgcgacaatcctctc

SEQ ID NO: 1298 - DNA, 16 bp, synthetic construct
  misc_feature 1..16: note = synthetic [barcode part1]
  source 1..16: mol_type = other DNA
gcgcacggattaactt

SEQ ID NO: 1299 - DNA, 16 bp, synthetic construct
  misc_feature 1..16: note = synthetic [barcode part1]
  source 1..16: mol_type = other DNA
tggtagtctaagtcgc

SEQ ID NO: 1300 - DNA, 16 bp, synthetic construct
  misc_feature 1..16: note = synthetic [barcode part1]
  source 1..16: mol_type = other DNA
gttagaccaccgaatc

SEQ ID NO: 1301 - DNA, 16 bp, synthetic construct
  misc_feature 1..16: note = synthetic [barcode part1]
  source 1..16: mol_type = other DNA
aggatcttactgtggc

SEQ ID NO: 1302 - DNA, 16 bp, synthetic construct
  misc_feature 1..16: note = synthetic [barcode part1]
  source 1..16: mol_type = other DNA
gtctagttcctacgcg

SEQ ID NO: 1303 - DNA, 16 bp, synthetic construct
  misc_feature 1..16: note = synthetic [barcode part1]
  source 1..16: mol_type = other DNA
gtaacgcggaagaagt

SEQ ID NO: 1304 - DNA, 16 bp, synthetic construct
  misc_feature 1..16: note = synthetic [barcode part1]
  source 1..16: mol_type = other DNA
gccactgtgtgttctg

SEQ ID NO: 1305 - DNA, 16 bp, synthetic construct
  misc_feature 1..16: note = synthetic [barcode part1]
  source 1..16: mol_type = other DNA
ttgcgttgtctccgtt

SEQ ID NO: 1306 - DNA, 16 bp, synthetic construct
  misc_feature 1..16: note = synthetic [barcode part1]
  source 1..16: mol_type = other DNA
tgaaccacctcacacc

SEQ ID NO: 1307 - DNA, 16 bp, synthetic construct
  misc_feature 1..16: note = synthetic [barcode part1]
  source 1..16: mol_type = other DNA
aataccgccgatcaac

SEQ ID NO: 1308 - DNA, 16 bp, synthetic construct
  misc_feature 1..16: note = synthetic [barcode part1]
  source 1..16: mol_type = other DNA
cagttaggagagagac

SEQ ID NO: 1309 - DNA, 16 bp, synthetic construct
  misc_feature 1..16: note = synthetic [barcode part1]
  source 1..16: mol_type = other DNA
gaggaacagtgtgtcc

SEQ ID NO: 1310 - DNA, 16 bp, synthetic construct
  misc_feature 1..16: note = synthetic [barcode part1]
  source 1..16: mol_type = other DNA
tctcgactcaagtatc

SEQ ID NO: 1311 - DNA, 16 bp, synthetic construct
  misc_feature 1..16: note = synthetic [barcode part1]
  source 1..16: mol_type = other DNA
aatcacgttcctcggc

SEQ ID NO: 1312 - DNA, 16 bp, synthetic construct
  misc_feature 1..16: note = synthetic [barcode part1]
  source 1..16: mol_type = other DNA
aacgaccttgaaccgt

SEQ ID NO: 1313 - DNA, 16 bp, synthetic construct
  misc_feature 1..16: note = synthetic [barcode part1]
  source 1..16: mol_type = other DNA
ccactcgtactcactt

SEQ ID NO: 1314 - DNA, 16 bp, synthetic construct
  misc_feature 1..16: note = synthetic [barcode part1]
  source 1..16: mol_type = other DNA
cggagagattggcgtt

SEQ ID NO: 1315 - DNA, 16 bp, synthetic construct
  misc_feature 1..16: note = synthetic [barcode part1]
  source 1..16: mol_type = other DNA
tgccttcctaacggtg

SEQ ID NO: 1316 - DNA, 16 bp, synthetic construct
  misc_feature 1..16: note = synthetic [barcode part1]
  source 1..16: mol_type = other DNA
aatcacgccgatctcc

SEQ ID NO: 1317 - DNA, 16 bp, synthetic construct
  misc_feature 1..16: note = synthetic [barcode part1]
  source 1..16: mol_type = other DNA
gaagtggcctattacc

SEQ ID NO: 1318 - DNA, 16 bp, synthetic construct
  misc_feature 1..16: note = synthetic [barcode part1]
  source 1..16: mol_type = other DNA
tgtcaccagacgtctc

SEQ ID NO: 1319 - DNA, 16 bp, synthetic construct
  misc_feature 1..16: note = synthetic [barcode part1]
  source 1..16: mol_type = other DNA
accagtatagagaacc

SEQ ID NO: 1320 - DNA, 16 bp, synthetic construct
  misc_feature 1..16: note = synthetic [barcode part1]
  source 1..16: mol_type = other DNA
gactcctcacgaactc

SEQ ID NO: 1321 - DNA, 16 bp, synthetic construct
  misc_feature 1..16: note = synthetic [barcode part1]
  source 1..16: mol_type = other DNA
tggaccaactgtcagt

SEQ ID NO: 1322 - DNA, 16 bp, synthetic construct
  misc_feature 1..16: note = synthetic [barcode part1]
  source 1..16: mol_type = other DNA
cggtcaacaatcggtt

SEQ ID NO: 1323 - DNA, 16 bp, synthetic construct
  misc_feature 1..16: note = synthetic [barcode part1]
  source 1..16: mol_type = other DNA
tgcaatcaccgccttg

SEQ ID NO: 1324 - DNA, 16 bp, synthetic construct
  misc_feature 1..16: note = synthetic [barcode part1]
  source 1..16: mol_type = other DNA
ttgaggtgtccgtctc

SEQ ID NO: 1325 - DNA, 16 bp, synthetic construct
  misc_feature 1..16: note = synthetic [barcode part1]
  source 1..16: mol_type = other DNA
attcgcacaatccttg

SEQ ID NO: 1326 - DNA, 16 bp, synthetic construct
  misc_feature 1..16: note = synthetic [barcode part1]
  source 1..16: mol_type = other DNA
cggattaagtcgtcac

SEQ ID NO: 1327 - DNA, 16 bp, synthetic construct
  misc_feature 1..16: note = synthetic [barcode part1]
  source 1..16: mol_type = other DNA
tgatcttgtaccgatc

SEQ ID NO: 1328 - DNA, 16 bp, synthetic construct
  misc_feature 1..16: note = synthetic [barcode part1]
  source 1..16: mol_type = other DNA
caggtagtctaggacg

SEQ ID NO: 1329 - DNA, 16 bp, synthetic construct
  misc_feature 1..16: note = synthetic [barcode part1]
  source 1..16: mol_type = other DNA
atcagtcctccaagag

SEQ ID NO: 1330 - DNA, 16 bp, synthetic construct
  misc_feature 1..16: note = synthetic [barcode part1]
  source 1..16: mol_type = other DNA
gttctgcacagaacac

SEQ ID NO: 1331 - DNA, 16 bp, synthetic construct
  misc_feature 1..16: note = synthetic [barcode part1]
  source 1..16: mol_type = other DNA
gcgccgaattggaagt

SEQ ID NO: 1332 - DNA, 16 bp, synthetic construct
  misc_feature 1..16: note = synthetic [barcode part1]
  source 1..16: mol_type = other DNA
cgtggtgcgttataac

SEQ ID NO: 1333 - DNA, 16 bp, synthetic construct
  misc_feature 1..16: note = synthetic [barcode part1]
  source 1..16: mol_type = other DNA
tactggtggttagaag

SEQ ID NO: 1334 - DNA, 16 bp, synthetic construct
  misc_feature 1..16: note = synthetic [barcode part1]
  source 1..16: mol_type = other DNA
tataactcacgccgag

SEQ ID NO: 1335 - DNA, 16 bp, synthetic construct
  misc_feature 1..16: note = synthetic [barcode part1]
  source 1..16: mol_type = other DNA
gagactgcagtagaag

SEQ ID NO: 1336 - DNA, 16 bp, synthetic construct
  misc_feature 1..16: note = synthetic [barcode part1]
  source 1..16: mol_type = other DNA
gacgaacacagacaag

SEQ ID NO: 1337 - DNA, 16 bp, synthetic construct
  misc_feature 1..16: note = synthetic [barcode part1]
  source 1..16: mol_type = other DNA
ttctcaggtacgttgt

SEQ ID NO: 1338 - DNA, 16 bp, synthetic construct
  misc_feature 1..16: note = synthetic [barcode part1]
  source 1..16: mol_type = other DNA
accaccttctgagtgc

SEQ ID NO: 1339 - DNA, 16 bp, synthetic construct
  misc_feature 1..16: note = synthetic [barcode part1]
  source 1..16: mol_type = other DNA
gtacacagtactacgc

SEQ ID NO: 1340 - DNA, 16 bp, synthetic construct
  misc_feature 1..16: note = synthetic [barcode part1]
  source 1..16: mol_type = other DNA
cctccaatataactgc

SEQ ID NO: 1341 - DNA, 16 bp, synthetic construct
  misc_feature 1..16: note = synthetic [barcode part1]
  source 1..16: mol_type = other DNA
acgaagacagtggcct

SEQ ID NO: 1342 - DNA, 16 bp, synthetic construct
  misc_feature 1..16: note = synthetic [barcode part1]
  source 1..16: mol_type = other DNA
cctcgagtgtctgttg

SEQ ID NO: 1343 - DNA, 16 bp, synthetic construct
  misc_feature 1..16: note = synthetic [barcode part1]
  source 1..16: mol_type = other DNA
tgttggaaggtgtaac

SEQ ID NO: 1344 - DNA, 16 bp, synthetic construct
  misc_feature 1..16: note = synthetic [barcode part1]
  source 1..16: mol_type = other DNA
acgtctcctggatcac

SEQ ID NO: 1345 - DNA, 16 bp, synthetic construct
  misc_feature 1..16: note = synthetic [barcode part1]
  source 1..16: mol_type = other DNA
tggtgcaatatccggt

SEQ ID NO: 1346 - DNA, 16 bp, synthetic construct
  misc_feature 1..16: note = synthetic [barcode part1]
  source 1..16: mol_type = other DNA
agttgacacacacgtc

SEQ ID NO: 1347 - DNA, 16 bp, synthetic construct
  misc_feature 1..16: note = synthetic [barcode part1]
  source 1..16: mol_type = other DNA
aggttctgaggttctg

SEQ ID NO: 1348 - DNA, 16 bp, synthetic construct
  misc_feature 1..16: note = synthetic [barcode part1]
  source 1..16: mol_type = other DNA
gacaatccgacagttc

SEQ ID NO: 1349 - DNA, 16 bp, synthetic construct
  misc_feature 1..16: note = synthetic [barcode part1]
  source 1..16: mol_type = other DNA
agttattccgcacttg

SEQ ID NO: 1350 - DNA, 16 bp, synthetic construct
  misc_feature 1..16: note = synthetic [barcode part1]
  source 1..16: mol_type = other DNA
cagtgataccgaatcc

SEQ ID NO: 1351 - DNA, 16 bp, synthetic construct
  misc_feature 1..16: note = synthetic [barcode part1]
  source 1..16: mol_type = other DNA
acgtactcgaatccag

SEQ ID NO: 1352 - DNA, 16 bp, synthetic construct
  misc_feature 1..16: note = synthetic [barcode part1]
  source 1..16: mol_type = other DNA
actaccaggaggtacg

SEQ ID NO: 1353 - DNA, 16 bp, synthetic construct
  misc_feature 1..16: note = synthetic [barcode part1]
  source 1..16: mol_type = other DNA
tgcacgcagttaatcg

SEQ ID NO: 1354 - DNA, 16 bp, synthetic construct
  misc_feature 1..16: note = synthetic [barcode part1]
  source 1..16: mol_type = other DNA
aattgacactggccgt

SEQ ID NO: 1355 - DNA, 16 bp, synthetic construct
  misc_feature 1..16: note = synthetic [barcode part1]
  source 1..16: mol_type = other DNA
cactgaacactctcgc

SEQ ID NO: 1356 - DNA, 16 bp, synthetic construct
  misc_feature 1..16: note = synthetic [barcode part1]
  source 1..16: mol_type = other DNA
ccgactggtgttatag

SEQ ID NO: 1357 - DNA, 16 bp, synthetic construct
  misc_feature 1..16: note = synthetic [barcode part1]
  source 1..16: mol_type = other DNA
attgcggttgtctact

SEQ ID NO: 1358 - DNA, 16 bp, synthetic construct
  misc_feature 1..16: note = synthetic [barcode part1]
  source 1..16: mol_type = other DNA
cgtgaagaatccggtg

SEQ ID NO: 1359 - DNA, 16 bp, synthetic construct
  misc_feature 1..16: note = synthetic [barcode part1]
  source 1..16: mol_type = other DNA
tagtacggactcgtac

SEQ ID NO: 1360 - DNA, 16 bp, synthetic construct
  misc_feature 1..16: note = synthetic [barcode part1]
  source 1..16: mol_type = other DNA
gtggttgacgtactgt

SEQ ID NO: 1361 - DNA, 16 bp, synthetic construct
  misc_feature 1..16: note = synthetic [barcode part1]
  source 1..16: mol_type = other DNA
gttgttcgcaggcctt

SEQ ID NO: 1362 - DNA, 16 bp, synthetic construct
  misc_feature 1..16: note = synthetic [barcode part1]
  source 1..16: mol_type = other DNA
gttgcaagacaggcac

SEQ ID NO: 1363 - DNA, 16 bp, synthetic construct
  misc_feature 1..16: note = synthetic [barcode part1]
  source 1..16: mol_type = other DNA
tacgtaggtgattgcc

SEQ ID NO: 1364 - DNA, 16 bp, synthetic construct
  misc_feature 1..16: note = synthetic [barcode part1]
  source 1..16: mol_type = other DNA
gactgttcgaactgtg

SEQ ID NO: 1365 - DNA, 16 bp, synthetic construct
  misc_feature 1..16: note = synthetic [barcode part1]
  source 1..16: mol_type = other DNA
ataaccgaggaggtcc

SEQ ID NO: 1366 - DNA, 16 bp, synthetic construct
  misc_feature 1..16: note = synthetic [barcode part1]
  source 1..16: mol_type = other DNA
aatcgactctctcctc

SEQ ID NO: 1367 - DNA, 16 bp, synthetic construct
  misc_feature 1..16: note = synthetic [barcode part1]
  source 1..16: mol_type = other DNA
tattccgttcaggtgt

SEQ ID NO: 1368 - DNA, 16 bp, synthetic construct
  misc_feature 1..16: note = synthetic [barcode part1]
  source 1..16: mol_type = other DNA
ttggtcagttgtgacg

SEQ ID NO: 1369 - DNA, 16 bp, synthetic construct
  misc_feature 1..16: note = synthetic [barcode part1]
  source 1..16: mol_type = other DNA
tgtcggcctgatcttg

SEQ ID NO: 1370 - DNA, 16 bp, synthetic construct
  misc_feature 1..16: note = synthetic [barcode part1]
  source 1..16: mol_type = other DNA
gactgttggcgtagag

SEQ ID NO: 1371 - DNA, 16 bp, synthetic construct
  misc_feature 1..16: note = synthetic [barcode part1]
  source 1..16: mol_type = other DNA
tcgtatcgagtcactt

SEQ ID NO: 1372 - DNA, 16 bp, synthetic construct
  misc_feature 1..16: note = synthetic [barcode part1]
  source 1..16: mol_type = other DNA
ccaataagacacgagt

SEQ ID NO: 1373 - DNA, 16 bp, synthetic construct
  misc_feature 1..16: note = synthetic [barcode part1]
  source 1..16: mol_type = other DNA
caatacgccaacacac

SEQ ID NO: 1374 - DNA, 16 bp, synthetic construct
  misc_feature 1..16: note = synthetic [barcode part1]
  source 1..16: mol_type = other DNA
gaagtgcaatctaacg

SEQ ID NO: 1375 - DNA, 16 bp, synthetic construct
  misc_feature 1..16: note = synthetic [barcode part1]
  source 1..16: mol_type = other DNA
agaactcgcagataac

SEQ ID NO: 1376 - DNA, 16 bp, synthetic construct
  misc_feature 1..16: note = synthetic [barcode part1]
  source 1..16: mol_type = other DNA
cagtgtaccagtacac

SEQ ID NO: 1377 - DNA, 16 bp, synthetic construct
  misc_feature 1..16: note = synthetic [barcode part1]
  source 1..16: mol_type = other DNA
gatcggatccaacttg

SEQ ID NO: 1378 - DNA, 16 bp, synthetic construct
  misc_feature 1..16: note = synthetic [barcode part1]
  source 1..16: mol_type = other DNA
gtacgagatccttgtg

SEQ ID NO: 1379 - DNA, 16 bp, synthetic construct
  misc_feature 1..16: note = synthetic [barcode part1]
  source 1..16: mol_type = other DNA
aggttcggatacacct

SEQ ID NO: 1380 - DNA, 16 bp, synthetic construct
  misc_feature 1..16: note = synthetic [barcode part1]
  source 1..16: mol_type = other DNA
tccaggataacgtcgt

SEQ ID NO: 1381 - DNA, 16 bp, synthetic construct
  misc_feature 1..16: note = synthetic [barcode part1]
  source 1..16: mol_type = other DNA
cagttctactgtgtgt

SEQ ID NO: 1382 - DNA, 16 bp, synthetic construct
  misc_feature 1..16: note = synthetic [barcode part1]
  source 1..16: mol_type = other DNA
tattcgtgacgttacc

SEQ ID NO: 1383 - DNA, 16 bp, synthetic construct
  misc_feature 1..16: note = synthetic [barcode part1]
  source 1..16: mol_type = other DNA
gaacactctgttctac

SEQ ID NO: 1384 - DNA, 16 bp, synthetic construct
  misc_feature 1..16: note = synthetic [barcode part1]
  source 1..16: mol_type = other DNA
gtgcgtggtattgtac

SEQ ID NO: 1385 - DNA, 16 bp, synthetic construct
  misc_feature 1..16: note = synthetic [barcode part1]
  source 1..16: mol_type = other DNA
attgacctcctcttcg

SEQ ID NO: 1386 - DNA, 16 bp, synthetic construct
  misc_feature 1..16: note = synthetic [barcode part1]
  source 1..16: mol_type = other DNA
acagttgatcgtacgc

SEQ ID NO: 1387 - DNA, 16 bp, synthetic construct
  misc_feature 1..16: note = synthetic [barcode part1]
  source 1..16: mol_type = other DNA
gccgtctagtactcgt

SEQ ID NO: 1388 - DNA, 16 bp, synthetic construct
  misc_feature 1..16: note = synthetic [barcode part1]
  source 1..16: mol_type = other DNA
accttcggacgattcc

SEQ ID NO: 1389 - DNA, 16 bp, synthetic construct
  misc_feature 1..16: note = synthetic [barcode part1]
  source 1..16: mol_type = other DNA
cgtacgcctaactaag

SEQ ID NO: 1390 - DNA, 16 bp, synthetic construct
  misc_feature 1..16: note = synthetic [barcode part1]
  source 1..16: mol_type = other DNA
gtcgtgcgagaactag

SEQ ID NO: 1391 - DNA, 16 bp, synthetic construct
  misc_feature 1..16: note = synthetic [barcode part1]
  source 1..16: mol_type = other DNA
gagacagagtgcctac

SEQ ID NO: 1392 - DNA, 16 bp, synthetic construct
  misc_feature 1..16: note = synthetic [barcode part1]
  source 1..16: mol_type = other DNA
acttacctccacctgt

SEQ ID NO: 1393 - DNA, 16 bp, synthetic construct
  misc_feature 1..16: note = synthetic [barcode part1]
  source 1..16: mol_type = other DNA
tcctcttgaggttctc

SEQ ID NO: 1394 - DNA, 16 bp, synthetic construct
  misc_feature 1..16: note = synthetic [barcode part1]
  source 1..16: mol_type = other DNA
aacagtaacggcgaag

SEQ ID NO: 1395 - DNA, 16 bp, synthetic construct
  misc_feature 1..16: note = synthetic [barcode part1]
  source 1..16: mol_type = other DNA
actgtccgaactcgtc

SEQ ID NO: 1396 - DNA, 16 bp, synthetic construct
  misc_feature 1..16: note = synthetic [barcode part1]
  source 1..16: mol_type = other DNA
cctgaatcttggcctg

SEQ ID NO: 1397 - DNA, 16 bp, synthetic construct
  misc_feature 1..16: note = synthetic [barcode part1]
  source 1..16: mol_type = other DNA
tgtaggtcagaacaac

SEQ ID NO: 1398 - DNA, 16 bp, synthetic construct
  misc_feature 1..16: note = synthetic [barcode part1]
  source 1..16: mol_type = other DNA
gtcttacctcggttct

SEQ ID NO: 1399 - DNA, 16 bp, synthetic construct
  misc_feature 1..16: note = synthetic [barcode part1]
  source 1..16: mol_type = other DNA
agatcctaactgaccg

SEQ ID NO: 1400 - DNA, 16 bp, synthetic construct
  misc_feature 1..16: note = synthetic [barcode part1]
  source 1..16: mol_type = other DNA
acacgttaggccagag

SEQ ID NO: 1401 - DNA, 16 bp, synthetic construct
  misc_feature 1..16: note = synthetic [barcode part1]
  source 1..16: mol_type = other DNA
cctccttacgcgtatt

SEQ ID NO: 1402 - DNA, 16 bp, synthetic construct
  misc_feature 1..16: note = synthetic [barcode part1]
  source 1..16: mol_type = other DNA
tcctcctactaaccgt

SEQ ID NO: 1403 - DNA, 16 bp, synthetic construct
  misc_feature 1..16: note = synthetic [barcode part1]
  source 1..16: mol_type = other DNA
attagatcgagagtgc

SEQ ID NO: 1404 - DNA, 16 bp, synthetic construct
  misc_feature 1..16: note = synthetic [barcode part1]
  source 1..16: mol_type = other DNA
ttcgacttgtgcgatt

SEQ ID NO: 1405 - DNA, 16 bp, synthetic construct
  misc_feature 1..16: note = synthetic [barcode part1]
  source 1..16: mol_type = other DNA
aaggatataccaggtc

SEQ ID NO: 1406 - DNA, 16 bp, synthetic construct
  misc_feature 1..16: note = synthetic [barcode part1]
  source 1..16: mol_type = other DNA
gtcgcgtctctgttag

SEQ ID NO: 1407 - DNA, 16 bp, synthetic construct
  misc_feature 1..16: note = synthetic [barcode part1]
  source 1..16: mol_type = other DNA
actcagtccggattag

SEQ ID NO: 1408 - DNA, 16 bp, synthetic construct
  misc_feature 1..16: note = synthetic [barcode part1]
  source 1..16: mol_type = other DNA
cgacttagtagaagtg

SEQ ID NO: 1409 - DNA, 16 bp, synthetic construct
  misc_feature 1..16: note = synthetic [barcode part1]
  source 1..16: mol_type = other DNA
gatctctaactgcact

SEQ ID NO: 1410 - DNA, 16 bp, synthetic construct
  misc_feature 1..16: note = synthetic [barcode part1]
  source 1..16: mol_type = other DNA
tgcctgcagtgtcgtt

SEQ ID NO: 1411 - DNA, 16 bp, synthetic construct
  misc_feature 1..16: note = synthetic [barcode part1]
  source 1..16: mol_type = other DNA
atccggagttcgtagt

SEQ ID NO: 1412 - DNA, 16 bp, synthetic construct
  misc_feature 1..16: note = synthetic [barcode part1]
  source 1..16: mol_type = other DNA
gaggacttacgattag

SEQ ID NO: 1413 - DNA, 16 bp, synthetic construct
  misc_feature 1..16: note = synthetic [barcode part1]
  source 1..16: mol_type = other DNA
ccagattccagactag

SEQ ID NO: 1414 - DNA, 16 bp, synthetic construct
  misc_feature 1..16: note = synthetic [barcode part1]
  source 1..16: mol_type = other DNA
tgatcctaggatcggt

SEQ ID NO: 1415 - DNA, 16 bp, synthetic construct
  misc_feature 1..16: note = synthetic [barcode part1]
  source 1..16: mol_type = other DNA
ccgttggtcgaattag

SEQ ID NO: 1416 - DNA, 16 bp, synthetic construct
  misc_feature 1..16: note = synthetic [barcode part1]
  source 1..16: mol_type = other DNA
ataagtggagtcctag

SEQ ID NO: 1417 - DNA, 16 bp, synthetic construct
  misc_feature 1..16: note = synthetic [barcode part1]
  source 1..16: mol_type = other DNA
tacgtcttccacacct

SEQ ID NO: 1418 - DNA, 16 bp, synthetic construct
  misc_feature 1..16: note = synthetic [barcode part1]
  source 1..16: mol_type = other DNA
cactcactctggaacc

SEQ ID NO: 1419 - DNA, 16 bp, synthetic construct
  misc_feature 1..16: note = synthetic [barcode part1]
  source 1..16: mol_type = other DNA
gtaattggtgccggtt

SEQ ID NO: 1420 - DNA, 16 bp, synthetic construct
  misc_feature 1..16: note = synthetic [barcode part1]
  source 1..16: mol_type = other DNA
atctcttgtcagtacg

SEQ ID NO: 1421 - DNA, 16 bp, synthetic construct
  misc_feature 1..16: note = synthetic [barcode part1]
  source 1..16: mol_type = other DNA
tgtggtatatccactc

SEQ ID NO: 1422 - DNA, 16 bp, synthetic construct
  misc_feature 1..16: note = synthetic [barcode part1]
  source 1..16: mol_type = other DNA
aggttggagtcttctg

SEQ ID NO: 1423 - DNA, 16 bp, synthetic construct
  misc_feature 1..16: note = synthetic [barcode part1]
  source 1..16: mol_type = other DNA
taacacgccttgttac

SEQ ID NO: 1424 - DNA, 16 bp, synthetic construct
  misc_feature 1..16: note = synthetic [barcode part1]
  source 1..16: mol_type = other DNA
gaacttactgcgcagt

SEQ ID NO: 1425 - DNA, 16 bp, synthetic construct
  misc_feature 1..16: note = synthetic [barcode part1]
  source 1..16: mol_type = other DNA
taagtgaggatcctag

SEQ ID NO: 1426 - DNA, 16 bp, synthetic construct
  misc_feature 1..16: note = synthetic [barcode part1]
  source 1..16: mol_type = other DNA
gcggacgtattataag

SEQ ID NO: 1427 - DNA, 16 bp, synthetic construct
  misc_feature 1..16: note = synthetic [barcode part1]
  source 1..16: mol_type = other DNA
gtctaagacctgtgac

SEQ ID NO: 1428 - DNA, 16 bp, synthetic construct
  misc_feature 1..16: note = synthetic [barcode part1]
  source 1..16: mol_type = other DNA
cgtctcgtatcgtctt

SEQ ID NO: 1429 - DNA, 16 bp, synthetic construct
  misc_feature 1..16: note = synthetic [barcode part1]
  source 1..16: mol_type = other DNA
tctcaacaaccgtact

SEQ ID NO: 1430 - DNA, 16 bp, synthetic construct
  misc_feature 1..16: note = synthetic [barcode part1]
  source 1..16: mol_type = other DNA
ccgactctaccaacgt

SEQ ID NO: 1431 - DNA, 16 bp, synthetic construct
  misc_feature 1..16: note = synthetic [barcode part1]
  source 1..16: mol_type = other DNA
cggatcgtgcaagaac

SEQ ID NO: 1432 - DNA, 16 bp, synthetic construct
  misc_feature 1..16: note = synthetic [barcode part1]
  source 1..16: mol_type = other DNA
gcgtataggttagtcc

SEQ ID NO: 1433 - DNA, 16 bp, synthetic construct
  misc_feature 1..16: note = synthetic [barcode part1]
  source 1..16: mol_type = other DNA
agttcgtcgagtatcg

SEQ ID NO: 1434 - DNA, 16 bp, synthetic construct
  misc_feature 1..16: note = synthetic [barcode part1]
  source 1..16: mol_type = other DNA
agtacggactcaatag

SEQ ID NO: 1435 - DNA, 16 bp, synthetic construct
  misc_feature 1..16: note = synthetic [barcode part1]
  source 1..16: mol_type = other DNA
agagaagaggagagag

SEQ ID NO: 1436 - DNA, 16 bp, synthetic construct
  misc_feature 1..16: note = synthetic [barcode part1]
  source 1..16: mol_type = other DNA
tgccttgacaataggc

SEQ ID NO: 1437 - DNA, 16 bp, synthetic construct
  misc_feature 1..16: note = synthetic [barcode part1]
  source 1..16: mol_type = other DNA
ccttggcaactgcact

SEQ ID NO: 1438 - DNA, 16 bp, synthetic construct
  misc_feature 1..16: note = synthetic [barcode part1]
  source 1..16: mol_type = other DNA
gaatcaatagtacgcg

SEQ ID NO: 1439 - DNA, 16 bp, synthetic construct
  misc_feature 1..16: note = synthetic [barcode part1]
  source 1..16: mol_type = other DNA
tggtctatccgtattg

SEQ ID NO: 1440 - DNA, 16 bp, synthetic construct
  misc_feature 1..16: note = synthetic [barcode part1]
  source 1..16: mol_type = other DNA
tgaccgatctcctctt

SEQ ID NO: 1441 - DNA, 16 bp, synthetic construct
  misc_feature 1..16: note = synthetic [barcode part1]
  source 1..16: mol_type = other DNA
tgccgaaggtacgagt

SEQ ID NO: 1442 - DNA, 16 bp, synthetic construct
  misc_feature 1..16: note = synthetic [barcode part1]
  source 1..16: mol_type = other DNA
gtagttcggtgcgaag

SEQ ID NO: 1443 - DNA, 16 bp, synthetic construct
  misc_feature 1..16: note = synthetic [barcode part1]
  source 1..16: mol_type = other DNA
ccttgacctagacgtc

SEQ ID NO: 1444 - DNA, 16 bp, synthetic construct
  misc_feature 1..16: note = synthetic [barcode part1]
  source 1..16: mol_type = other DNA
aatcgtgtctcggtcc

SEQ ID NO: 1445 - DNA, 16 bp, synthetic construct
  misc_feature 1..16: note = synthetic [barcode part1]
  source 1..16: mol_type = other DNA
tagtcggaggactctt

SEQ ID NO: 1446 - DNA, 16 bp, synthetic construct
  misc_feature 1..16: note = synthetic [barcode part1]
  source 1..16: mol_type = other DNA
aggactgcgatagaag

SEQ ID NO: 1447 - DNA, 16 bp, synthetic construct
  misc_feature 1..16: note = synthetic [barcode part1]
  source 1..16: mol_type = other DNA
gcacctctcgacagtt

SEQ ID NO: 1448 - DNA, 16 bp, synthetic construct
  misc_feature 1..16: note = synthetic [barcode part1]
  source 1..16: mol_type = other DNA
gcgtattaagttggag

SEQ ID NO: 1449 - DNA, 16 bp, synthetic construct
  misc_feature 1..16: note = synthetic [barcode part1]
  source 1..16: mol_type = other DNA
gacgttaagttccgac

SEQ ID NO: 1450 - DNA, 16 bp, synthetic construct
  misc_feature 1..16: note = synthetic [barcode part1]
  source 1..16: mol_type = other DNA
gtataatccggtcttc

SEQ ID NO: 1451 - DNA, 16 bp, synthetic construct
  misc_feature 1..16: note = synthetic [barcode part1]
  source 1..16: mol_type = other DNA
gaggtggaacagagtt

SEQ ID NO: 1452 - DNA, 16 bp, synthetic construct
  misc_feature 1..16: note = synthetic [barcode part1]
  source 1..16: mol_type = other DNA
ccttcttgtacgtacc

SEQ ID NO: 1453 - DNA, 16 bp, synthetic construct
  misc_feature 1..16: note = synthetic [barcode part1]
  source 1..16: mol_type = other DNA
attgcgaggcaggtac

SEQ ID NO: 1454 - DNA, 16 bp, synthetic construct
  misc_feature 1..16: note = synthetic [barcode part1]
  source 1..16: mol_type = other DNA
accggtgttatacgac

SEQ ID NO: 1455 - DNA, 16 bp, synthetic construct
  misc_feature 1..16: note = synthetic [barcode part1]
  source 1..16: mol_type = other DNA
gttggacttcgtgcct

SEQ ID NO: 1456 - DNA, 16 bp, synthetic construct
  misc_feature 1..16: note = synthetic [barcode part1]
  source 1..16: mol_type = other DNA
agacctaactcctcgc

SEQ ID NO: 1457 - DNA, 16 bp, synthetic construct
  misc_feature 1..16: note = synthetic [barcode part1]
  source 1..16: mol_type = other DNA
tctcggtacgcctaac

SEQ ID NO: 1458 - DNA, 16 bp, synthetic construct
  misc_feature 1..16: note = synthetic [barcode part1]
  source 1..16: mol_type = other DNA
caggaacttgtgtctg

SEQ ID NO: 1459 - DNA, 16 bp, synthetic construct
  misc_feature 1..16: note = synthetic [barcode part1]
  source 1..16: mol_type = other DNA
gccaagacgatcacag

SEQ ID NO: 1460 - DNA, 16 bp, synthetic construct
  misc_feature 1..16: note = synthetic [barcode part1]
  source 1..16: mol_type = other DNA
atacacggttaaccgc

SEQ ID NO: 1461 - DNA, 16 bp, synthetic construct
  misc_feature 1..16: note = synthetic [barcode part1]
  source 1..16: mol_type = other DNA
ttctacgtcgaatcgt

SEQ ID NO: 1462 - DNA, 16 bp, synthetic construct
  misc_feature 1..16: note = synthetic [barcode part1]
  source 1..16: mol_type = other DNA
gaccttaggtactacg

SEQ ID NO: 1463 - DNA, 16 bp, synthetic construct
  misc_feature 1..16: note = synthetic [barcode part1]
  source 1..16: mol_type = other DNA
gaagtctcctaagacc

SEQ ID NO: 1464 - DNA, 16 bp, synthetic construct
  misc_feature 1..16: note = synthetic [barcode part1]
  source 1..16: mol_type = other DNA
tccttggacactggtc

SEQ ID NO: 1465 - DNA, 16 bp, synthetic construct
  misc_feature 1..16: note = synthetic [barcode part1]
  source 1..16: mol_type = other DNA
acctcgttaccaacgc

SEQ ID NO: 1466 - DNA, 16 bp, synthetic construct
  misc_feature 1..16: note = synthetic [barcode part1]
  source 1..16: mol_type = other DNA
tgagactcagtactgc

SEQ ID NO: 1467 - DNA, 16 bp, synthetic construct
  misc_feature 1..16: note = synthetic [barcode part1]
  source 1..16: mol_type = other DNA
cctgtctgaatagacg

SEQ ID NO: 1468 - DNA, 16 bp, synthetic construct
  misc_feature 1..16: note = synthetic [barcode part1]
  source 1..16: mol_type = other DNA
tacggagtgcaagaag

SEQ ID NO: 1469 - DNA, 16 bp, synthetic construct
  misc_feature 1..16: note = synthetic [barcode part1]
  source 1..16: mol_type = other DNA
tccagttattgcacgt

SEQ ID NO: 1470 - DNA, 16 bp, synthetic construct
  misc_feature 1..16: note = synthetic [barcode part1]
  source 1..16: mol_type = other DNA
cgttatctgccggtgt

SEQ ID NO: 1471 - DNA, 16 bp, synthetic construct
  misc_feature 1..16: note = synthetic [barcode part1]
  source 1..16: mol_type = other DNA
tactcgcaacgtcgtc

SEQ ID NO: 1472 - DNA, 16 bp, synthetic construct
  misc_feature 1..16: note = synthetic [barcode part1]
  source 1..16: mol_type = other DNA
aatacgaagaccgttg

SEQ ID NO: 1473 - DNA, 16 bp, synthetic construct
  misc_feature 1..16: note = synthetic [barcode part1]
  source 1..16: mol_type = other DNA
gaagacctcaattccg

SEQ ID NO: 1474 - DNA, 16 bp, synthetic construct
  misc_feature 1..16: note = synthetic [barcode part1]
  source 1..16: mol_type = other DNA
aagagtgccacgttct

SEQ ID NO: 1475 - DNA, 16 bp, synthetic construct
  misc_feature 1..16: note = synthetic [barcode part1]
  source 1..16: mol_type = other DNA
atacacggacctcaac

SEQ ID NO: 1476 - DNA, 16 bp, synthetic construct
  misc_feature 1..16: note = synthetic [barcode part1]
  source 1..16: mol_type = other DNA
ttgacgtactggtacg

SEQ ID NO: 1477 - DNA, 16 bp, synthetic construct
  misc_feature 1..16: note = synthetic [barcode part1]
  source 1..16: mol_type = other DNA
acctgattaacgaccg

SEQ ID NO: 1478 - DNA, 16 bp, synthetic construct
  misc_feature 1..16: note = synthetic [barcode part1]
  source 1..16: mol_type = other DNA
gaccaatactacggtc

SEQ ID NO: 1479 - DNA, 16 bp, synthetic construct
  misc_feature 1..16: note = synthetic [barcode part1]
  source 1..16: mol_type = other DNA
gcgatcggactaagac

SEQ ID NO: 1480 - DNA, 16 bp, synthetic construct
  misc_feature 1..16: note = synthetic [barcode part1]
  source 1..16: mol_type = other DNA
accagtagtaatcgcc

SEQ ID NO: 1481 - DNA, 16 bp, synthetic construct
  misc_feature 1..16: note = synthetic [barcode part1]
  source 1..16: mol_type = other DNA
tcgcctgtatcacggt

SEQ ID NO: 1482 - DNA, 16 bp, synthetic construct
  misc_feature 1..16: note = synthetic [barcode part1]
  source 1..16: mol_type = other DNA
attgcacggaacggtg

SEQ ID NO: 1483 - DNA, 16 bp, synthetic construct
  misc_feature 1..16: note = synthetic [barcode part1]
  source 1..16: mol_type = other DNA
gttccaaggttgatcg

SEQ ID NO: 1484 - DNA, 16 bp, synthetic construct
  misc_feature 1..16: note = synthetic [barcode part1]
  source 1..16: mol_type = other DNA
accggtagtgactgtt

SEQ ID NO: 1485 - DNA, 16 bp, synthetic construct
  misc_feature 1..16: note = synthetic [barcode part1]
  source 1..16: mol_type = other DNA
acgaattatcgcctct

SEQ ID NO: 1486 - DNA, 16 bp, synthetic construct
  misc_feature 1..16: note = synthetic [barcode part1]
  source 1..16: mol_type = other DNA
cacgcgattcgacttc

SEQ ID NO: 1487 - DNA, 16 bp, synthetic construct
  misc_feature 1..16: note = synthetic [barcode part1]
  source 1..16: mol_type = other DNA
cgtataccttcttccg

SEQ ID NO: 1488 - DNA, 16 bp, synthetic construct
  misc_feature 1..16: note = synthetic [barcode part1]
  source 1..16: mol_type = other DNA
tatacgacacctcgtt

SEQ ID NO: 1489 - DNA, 16 bp, synthetic construct
  misc_feature 1..16: note = synthetic [barcode part1]
  source 1..16: mol_type = other DNA
tatatacggtcggtcg

SEQ ID NO: 1490 - DNA, 16 bp, synthetic construct
  misc_feature 1..16: note = synthetic [barcode part1]
  source 1..16: mol_type = other DNA
tgaaccgttccgcact

SEQ ID NO: 1491 - DNA, 16 bp, synthetic construct
  misc_feature 1..16: note = synthetic [barcode part1]
  source 1..16: mol_type = other DNA
cctggtcctaactctt

SEQ ID NO: 1492 - DNA, 16 bp, synthetic construct
  misc_feature 1..16: note = synthetic [barcode part1]
  source 1..16: mol_type = other DNA
tgcaacaacaacgtcc

SEQ ID NO: 1493 - DNA, 16 bp, synthetic construct
  misc_feature 1..16: note = synthetic [barcode part1]
  source 1..16: mol_type = other DNA
tctacttaacgttgcg

SEQ ID NO: 1494 - DNA, 16 bp, synthetic construct
  misc_feature 1..16: note = synthetic [barcode part1]
  source 1..16: mol_type = other DNA
gtaaccggcgttagtt

SEQ ID NO: 1495 - DNA, 16 bp, synthetic construct
  misc_feature 1..16: note = synthetic [barcode part1]
  source 1..16: mol_type = other DNA
ttcaactgaccgagac

SEQ ID NO: 1496 - DNA, 16 bp, synthetic construct
  misc_feature 1..16: note = synthetic [barcode part1]
  source 1..16: mol_type = other DNA
accacagtgttcgcct

SEQ ID NO: 1497 - DNA, 16 bp, synthetic construct
  misc_feature 1..16: note = synthetic [barcode part1]
  source 1..16: mol_type = other DNA
gtcactactggatcag

SEQ ID NO: 1498 - DNA, 16 bp, synthetic construct
  misc_feature 1..16: note = synthetic [barcode part1]
  source 1..16: mol_type = other DNA
gaagtcgaactgcacg

SEQ ID NO: 1499 - DNA, 16 bp, synthetic construct
  misc_feature 1..16: note = synthetic [barcode part1]
  source 1..16: mol_type = other DNA
aggacacggttcagtg

SEQ ID NO: 1500 - DNA, 16 bp, synthetic construct
  misc_feature 1..16: note = synthetic [barcode part1]
  source 1..16: mol_type = other DNA
gacaggatccttagtc

SEQ ID NO: 1501 - DNA, 16 bp, synthetic construct
  misc_feature 1..16: note = synthetic [barcode part1]
  source 1..16: mol_type = other DNA
tctgcgtgtcgtcaac

SEQ ID NO: 1502 - DNA, 16 bp, synthetic construct
  misc_feature 1..16: note = synthetic [barcode part1]
  source 1..16: mol_type = other DNA
atagaccgtcgaaggc

SEQ ID NO: 1503 - DNA, 16 bp, synthetic construct
  misc_feature 1..16: note = synthetic [barcode part1]
  source 1..16: mol_type = other DNA
gtgtgtaatacacgcc

SEQ ID NO: 1504 - DNA, 16 bp, synthetic construct
  misc_feature 1..16: note = synthetic [barcode part1]
  source 1..16: mol_type = other DNA
gcgaacttgatagagt

SEQ ID NO: 1505 - DNA, 16 bp, synthetic construct
  misc_feature 1..16: note = synthetic [barcode part1]
  source 1..16: mol_type = other DNA
agaggcacactgagtc

SEQ ID NO: 1506 - DNA, 16 bp, synthetic construct
  misc_feature 1..16: note = synthetic [barcode part1]
  source 1..16: mol_type = other DNA
cagacgttacgtcagt

SEQ ID NO: 1507 - DNA, 16 bp, synthetic construct
  misc_feature 1..16: note = synthetic [barcode part1]
  source 1..16: mol_type = other DNA
ccggtctcttgatctt

SEQ ID NO: 1508 - DNA, 16 bp, synthetic construct
  misc_feature 1..16: note = synthetic [barcode part1]
  source 1..16: mol_type = other DNA
aacagaaccggcgtac

SEQ ID NO: 1509 - DNA, 16 bp, synthetic construct
  misc_feature 1..16: note = synthetic [barcode part1]
  source 1..16: mol_type = other DNA
ccttgtccttgaatag

SEQ ID NO: 1510 - DNA, 16 bp, synthetic construct
  misc_feature 1..16: note = synthetic [barcode part1]
  source 1..16: mol_type = other DNA
cacttaggaaggttag

SEQ ID NO: 1511 - DNA, 16 bp, synthetic construct
  misc_feature 1..16: note = synthetic [barcode part1]
  source 1..16: mol_type = other DNA
gtaactcagattgccg

SEQ ID NO: 1512 - DNA, 16 bp, synthetic construct
  misc_feature 1..16: note = synthetic [barcode part1]
  source 1..16: mol_type = other DNA
tggattgagttgccac

SEQ ID NO: 1513 - DNA, 16 bp, synthetic construct
  misc_feature 1..16: note = synthetic [barcode part1]
  source 1..16: mol_type = other DNA
cagttagaccgattgc

SEQ ID NO: 1514 - DNA, 16 bp, synthetic construct
  misc_feature 1..16: note = synthetic [barcode part1]
  source 1..16: mol_type = other DNA
attcgcagtgcgattg

SEQ ID NO: 1515 - DNA, 16 bp, synthetic construct
  misc_feature 1..16: note = synthetic [barcode part1]
  source 1..16: mol_type = other DNA
caggaacctatcggag

SEQ ID NO: 1516 - DNA, 16 bp, synthetic construct
  misc_feature 1..16: note = synthetic [barcode part1]
  source 1..16: mol_type = other DNA
tacctagtacgaaccg

SEQ ID NO: 1517 - DNA, 16 bp, synthetic construct
  misc_feature 1..16: note = synthetic [barcode part1]
  source 1..16: mol_type = other DNA
gagttgcgtctctatt

SEQ ID NO: 1518 - DNA, 16 bp, synthetic construct
  misc_feature 1..16: note = synthetic [barcode part1]
  source 1..16: mol_type = other DNA
agagaattaccagtgc

SEQ ID NO: 1519 - DNA, 16 bp, synthetic construct
  misc_feature 1..16: note = synthetic [barcode part1]
  source 1..16: mol_type = other DNA
tattaccgcgaccgtc

SEQ ID NO: 1520 - DNA, 16 bp, synthetic construct
  misc_feature 1..16: note = synthetic [barcode part1]
  source 1..16: mol_type = other DNA
ataggaagaagtgcgc

SEQ ID NO: 1521 - DNA, 16 bp, synthetic construct
  misc_feature 1..16: note = synthetic [barcode part1]
  source 1..16: mol_type = other DNA
accaatctcaaccgag

SEQ ID NO: 1522 - DNA, 16 bp, synthetic construct
  misc_feature 1..16: note = synthetic [barcode part1]
  source 1..16: mol_type = other DNA
gtacgtagtcagttgc

SEQ ID NO: 1523 - DNA, 16 bp, synthetic construct
  misc_feature 1..16: note = synthetic [barcode part1]
  source 1..16: mol_type = other DNA
tacagacgagttcacc

SEQ ID NO: 1524 - DNA, 16 bp, synthetic construct
  misc_feature 1..16: note = synthetic [barcode part1]
  source 1..16: mol_type = other DNA
cgtgtccacgagaatt

SEQ ID NO: 1525 - DNA, 16 bp, synthetic construct
  misc_feature 1..16: note = synthetic [barcode part1]
  source 1..16: mol_type = other DNA
aacaactgcacgaagt

SEQ ID NO: 1526 - DNA, 16 bp, synthetic construct
  misc_feature 1..16: note = synthetic [barcode part1]
  source 1..16: mol_type = other DNA
cagacgcaatctgtac

SEQ ID NO: 1527 - DNA, 16 bp, synthetic construct
  misc_feature 1..16: note = synthetic [barcode part1]
  source 1..16: mol_type = other DNA
caggacactcgtagag

SEQ ID NO: 1528 - DNA, 16 bp, synthetic construct
  misc_feature 1..16: note = synthetic [barcode part1]
  source 1..16: mol_type = other DNA
cacgaccggaatagtg

SEQ ID NO: 1529 - DNA, 16 bp, synthetic construct
  misc_feature 1..16: note = synthetic [barcode part1]
  source 1..16: mol_type = other DNA
atcctccaccagtgtg

SEQ ID NO: 1530 - DNA, 16 bp, synthetic construct
  misc_feature 1..16: note = synthetic [barcode part1]
  source 1..16: mol_type = other DNA
taacctgcagactgtg

SEQ ID NO: 1531 - DNA, 16 bp, synthetic construct
  misc_feature 1..16: note = synthetic [barcode part1]
  source 1..16: mol_type = other DNA
acgtacgtcgaagtct

SEQ ID NO: 1532 - DNA, 16 bp, synthetic construct
  misc_feature 1..16: note = synthetic [barcode part1]
  source 1..16: mol_type = other DNA
atcggtattcaactcc

SEQ ID NO: 1533 - DNA, 16 bp, synthetic construct
  misc_feature 1..16: note = synthetic [barcode part1]
  source 1..16: mol_type = other DNA
gttcttatcgcgtctc

SEQ ID NO: 1534 - DNA, 16 bp, synthetic construct
  misc_feature 1..16: note = synthetic [barcode part1]
  source 1..16: mol_type = other DNA
aatcagaagaccggag

SEQ ID NO: 1535 - DNA, 16 bp, synthetic construct
  misc_feature 1..16: note = synthetic [barcode part1]
  source 1..16: mol_type = other DNA
tgcggaatcaacggtg

SEQ ID NO: 1536 - DNA, 16 bp, synthetic construct
  misc_feature 1..16: note = synthetic [barcode part1]
  source 1..16: mol_type = other DNA
gaagtagaggtctact

SEQ ID NO: 1537 - DNA, 16 bp, synthetic construct
  misc_feature 1..16: note = synthetic [barcode part1]
  source 1..16: mol_type = other DNA
taggaagtgatcgtgt

SEQ ID NO: 1538 - DNA, 16 bp, synthetic construct
  misc_feature 1..16: note = synthetic [barcode part1]
  source 1..16: mol_type = other DNA
cctagttcgtgtagtt

SEQ ID NO: 1539 - DNA, 16 bp, synthetic construct
  misc_feature 1..16: note = synthetic [barcode part1]
  source 1..16: mol_type = other DNA
gattggtcgataccac

SEQ ID NO: 1540 - DNA, 16 bp, synthetic construct
  misc_feature 1..16: note = synthetic [barcode part1]
  source 1..16: mol_type = other DNA
gttacttaggtccgcc

SEQ ID NO: 1541 - DNA, 16 bp, synthetic construct
  misc_feature 1..16: note = synthetic [barcode part1]
  source 1..16: mol_type = other DNA
tcaacggtaagagtgt

SEQ ID NO: 1542 - DNA, 16 bp, synthetic construct
  misc_feature 1..16: note = synthetic [barcode part1]
  source 1..16: mol_type = other DNA
agtggtgagatctgcg

SEQ ID NO: 1543 - DNA, 16 bp, synthetic construct
  misc_feature 1..16: note = synthetic [barcode part1]
  source 1..16: mol_type = other DNA
gcagttgtggttgtgt

SEQ ID NO: 1544 - DNA, 16 bp, synthetic construct
  misc_feature 1..16: note = synthetic [barcode part1]
  source 1..16: mol_type = other DNA
accactatctcgtgcg

SEQ ID NO: 1545 - DNA, 16 bp, synthetic construct
  misc_feature 1..16: note = synthetic [barcode part1]
  source 1..16: mol_type = other DNA
atccgccactccaagt

SEQ ID NO: 1546 - DNA, 16 bp, synthetic construct
  misc_feature 1..16: note = synthetic [barcode part1]
  source 1..16: mol_type = other DNA
gtgcaaggacagtctg

SEQ ID NO: 1547 - DNA, 16 bp, synthetic construct
  misc_feature 1..16: note = synthetic [barcode part1]
  source 1..16: mol_type = other DNA
ttgcaacactggtcag

SEQ ID NO: 1548 - DNA, 16 bp, synthetic construct
  misc_feature 1..16: note = synthetic [barcode part1]
  source 1..16: mol_type = other DNA
acaatccgaatacgag

SEQ ID NO: 1549 - DNA, 16 bp, synthetic construct
  misc_feature 1..16: note = synthetic [barcode part1]
  source 1..16: mol_type = other DNA
attcgcacggttctcg

SEQ ID NO: 1550 - DNA, 16 bp, synthetic construct
  misc_feature 1..16: note = synthetic [barcode part1]
  source 1..16: mol_type = other DNA
accagactccgtacct

SEQ ID NO: 1551 - DNA, 16 bp, synthetic construct
  misc_feature 1..16: note = synthetic [barcode part1]
  source 1..16: mol_type = other DNA
ccaggcggacagaatt

SEQ ID NO: 1552 - DNA, 16 bp, synthetic construct
  misc_feature 1..16: note = synthetic [barcode part1]
  source 1..16: mol_type = other DNA
taatccggcggaagtg

SEQ ID NO: 1553 - DNA, 16 bp, synthetic construct
  misc_feature 1..16: note = synthetic [barcode part1]
  source 1..16: mol_type = other DNA
ccgtgtcttgccaagt

SEQ ID NO: 1554 - DNA, 16 bp, synthetic construct
  misc_feature 1..16: note = synthetic [barcode part1]
  source 1..16: mol_type = other DNA
aagtatccaccacctt

SEQ ID NO: 1555 - DNA, 16 bp, synthetic construct
  misc_feature 1..16: note = synthetic [barcode part1]
  source 1..16: mol_type = other DNA
agattgccgagttacc

SEQ ID NO: 1556 - DNA, 16 bp, synthetic construct
  misc_feature 1..16: note = synthetic [barcode part1]
  source 1..16: mol_type = other DNA
tcaaggtctgcgatac

SEQ ID NO: 1557 - DNA, 16 bp, synthetic construct
  misc_feature 1..16: note = synthetic [barcode part1]
  source 1..16: mol_type = other DNA
ttcaccaggttgtgtt

SEQ ID NO: 1558 - DNA, 16 bp, synthetic construct
  misc_feature 1..16: note = synthetic [barcode part1]
  source 1..16: mol_type = other DNA
ttgcgtaatcgacgtg

SEQ ID NO: 1559 - DNA, 16 bp, synthetic construct
  misc_feature 1..16: note = synthetic [barcode part1]
  source 1..16: mol_type = other DNA
ttcgtgagtgagtctg

SEQ ID NO: 1560 - DNA, 16 bp, synthetic construct
  misc_feature 1..16: note = synthetic [barcode part1]
  source 1..16: mol_type = other DNA
cgtgtcttattagacc

SEQ ID NO: 1561 - DNA, 16 bp, synthetic construct
  misc_feature 1..16: note = synthetic [barcode part1]
  source 1..16: mol_type = other DNA
tctcagaacttgtctg

SEQ ID NO: 1562 - DNA, 16 bp, synthetic construct
  misc_feature 1..16: note = synthetic [barcode part1]
  source 1..16: mol_type = other DNA
agttcttcctctgacc

SEQ ID NO: 1563 - DNA, 16 bp, synthetic construct
  misc_feature 1..16: note = synthetic [barcode part1]
  source 1..16: mol_type = other DNA
cacaagtaacagagtc

SEQ ID NO: 1564 - DNA, 16 bp, synthetic construct
  misc_feature 1..16: note = synthetic [barcode part1]
  source 1..16: mol_type = other DNA
ttctggttcgaacact

SEQ ID NO: 1565 - DNA, 16 bp, synthetic construct
  misc_feature 1..16: note = synthetic [barcode part1]
  source 1..16: mol_type = other DNA
aggtcgttccacacct

SEQ ID NO: 1566 - DNA, 16 bp, synthetic construct
  misc_feature 1..16: note = synthetic [barcode part1]
  source 1..16: mol_type = other DNA
agaagtgagtgacctt

SEQ ID NO: 1567 - DNA, 16 bp, synthetic construct
  misc_feature 1..16: note = synthetic [barcode part1]
  source 1..16: mol_type = other DNA
accgtatcaatctctg

SEQ ID NO: 1568 - DNA, 16 bp, synthetic construct
  misc_feature 1..16: note = synthetic [barcode part1]
  source 1..16: mol_type = other DNA
tgcaggaatcagattg

SEQ ID NO: 1569 - DNA, 16 bp, synthetic construct
  misc_feature 1..16: note = synthetic [barcode part1]
  source 1..16: mol_type = other DNA
atactcggacactcag

SEQ ID NO: 1570 - DNA, 16 bp, synthetic construct
  misc_feature 1..16: note = synthetic [barcode part1]
  source 1..16: mol_type = other DNA
tgacgagaagtggtag

SEQ ID NO: 1571 - DNA, 16 bp, synthetic construct
  misc_feature 1..16: note = synthetic [barcode part1]
  source 1..16: mol_type = other DNA
atctggagaacctacc

SEQ ID NO: 1572 - DNA, 16 bp, synthetic construct
  misc_feature 1..16: note = synthetic [barcode part1]
  source 1..16: mol_type = other DNA
agagagagaccgattg

SEQ ID NO: 1573 - DNA, 16 bp, synthetic construct
  misc_feature 1..16: note = synthetic [barcode part1]
  source 1..16: mol_type = other DNA
atcgacaaggtcggac

SEQ ID NO: 1574 - DNA, 16 bp, synthetic construct
  misc_feature 1..16: note = synthetic [barcode part1]
  source 1..16: mol_type = other DNA
agagtagtatccaggt

SEQ ID NO: 1575 - DNA, 16 bp, synthetic construct
  misc_feature 1..16: note = synthetic [barcode part1]
  source 1..16: mol_type = other DNA
gtcgtggtagaacttc

SEQ ID NO: 1576 - DNA, 16 bp, synthetic construct
  misc_feature 1..16: note = synthetic [barcode part1]
  source 1..16: mol_type = other DNA
ataacagtcgcgtaag

SEQ ID NO: 1577 - DNA, 16 bp, synthetic construct
  misc_feature 1..16: note = synthetic [barcode part1]
  source 1..16: mol_type = other DNA
tcaataggacgcaagt

SEQ ID NO: 1578 - DNA, 16 bp, synthetic construct
  misc_feature 1..16: note = synthetic [barcode part1]
  source 1..16: mol_type = other DNA
tcgttaggtgcggaag

SEQ ID NO: 1579 - DNA, 16 bp, synthetic construct
  misc_feature 1..16: note = synthetic [barcode part1]
  source 1..16: mol_type = other DNA
tgtctcggcctacaac

SEQ ID NO: 1580 - DNA, 16 bp, synthetic construct
  misc_feature 1..16: note = synthetic [barcode part1]
  source 1..16: mol_type = other DNA
cagagacggatcgttg

SEQ ID NO: 1581 - DNA, 16 bp, synthetic construct
  misc_feature 1..16: note = synthetic [barcode part1]
  source 1..16: mol_type = other DNA
gacgaacaacgagtag

SEQ ID NO: 1582 - DNA, 16 bp, synthetic construct
  misc_feature 1..16: note = synthetic [barcode part1]
  source 1..16: mol_type = other DNA
ttaagagtgtaggtcg

SEQ ID NO: 1583 - DNA, 16 bp, synthetic construct
  misc_feature 1..16: note = synthetic [barcode part1]
  source 1..16: mol_type = other DNA
gtgttccgttaccgac

SEQ ID NO: 1584 - DNA, 16 bp, synthetic construct
  misc_feature 1..16: note = synthetic [barcode part1]
  source 1..16: mol_type = other DNA
caacgtagtcaagaac

SEQ ID NO: 1585 - DNA, 16 bp, synthetic construct
  misc_feature 1..16: note = synthetic [barcode part1]
  source 1..16: mol_type = other DNA
cgaccagactaatcac

SEQ ID NO: 1586 - DNA, 16 bp, synthetic construct
  misc_feature 1..16: note = synthetic [barcode part1]
  source 1..16: mol_type = other DNA
tgagatctgtgacgtc

SEQ ID NO: 1587 - DNA, 16 bp, synthetic construct
  misc_feature 1..16: note = synthetic [barcode part1]
  source 1..16: mol_type = other DNA
gtgacagtacttcacg

SEQ ID NO: 1588 - DNA, 16 bp, synthetic construct
  misc_feature 1..16: note = synthetic [barcode part1]
  source 1..16: mol_type = other DNA
gtagaccaccgaaggt

SEQ ID NO: 1589 - DNA, 16 bp, synthetic construct
  misc_feature 1..16: note = synthetic [barcode part1]
  source 1..16: mol_type = other DNA
cggtataacgtgatcc

SEQ ID NO: 1590 - DNA, 16 bp, synthetic construct
  misc_feature 1..16: note = synthetic [barcode part1]
  source 1..16: mol_type = other DNA
ttcacaccagttcagt

SEQ ID NO: 1591 - DNA, 16 bp, synthetic construct
  misc_feature 1..16: note = synthetic [barcode part1]
  source 1..16: mol_type = other DNA
gtcagttatcacggtg

SEQ ID NO: 1592 - DNA, 16 bp, synthetic construct
  misc_feature 1..16: note = synthetic [barcode part1]
  source 1..16: mol_type = other DNA
gtgttaaggagtggtt

SEQ ID NO: 1593 - DNA, 16 bp, synthetic construct
  misc_feature 1..16: note = synthetic [barcode part1]
  source 1..16: mol_type = other DNA
ccaatacagttggaag

SEQ ID NO: 1594 - DNA, 16 bp, synthetic construct
  misc_feature 1..16: note = synthetic [barcode part1]
  source 1..16: mol_type = other DNA
acgcgaacctgacaag

SEQ ID NO: 1595 - DNA, 16 bp, synthetic construct
  misc_feature 1..16: note = synthetic [barcode part1]
  source 1..16: mol_type = other DNA
gcaagagtagtctaac

SEQ ID NO: 1596 - DNA, 16 bp, synthetic construct
  misc_feature 1..16: note = synthetic [barcode part1]
  source 1..16: mol_type = other DNA
tacggaccttgccgtt

SEQ ID NO: 1597 - DNA, 16 bp, synthetic construct
  misc_feature 1..16: note = synthetic [barcode part1]
  source 1..16: mol_type = other DNA
cgtgaagtgtattccg

SEQ ID NO: 1598 - DNA, 16 bp, synthetic construct
  misc_feature 1..16: note = synthetic [barcode part1]
  source 1..16: mol_type = other DNA
gtgttgacgtgaatcc

SEQ ID NO: 1599 - DNA, 16 bp, synthetic construct
  misc_feature 1..16: note = synthetic [barcode part1]
  source 1..16: mol_type = other DNA
gtgagagagttcaatc

SEQ ID NO: 1600 - DNA, 16 bp, synthetic construct
  misc_feature 1..16: note = synthetic [barcode part1]
  source 1..16: mol_type = other DNA
agtgtcggagattcct

SEQ ID NO: 1601 - DNA, 16 bp, synthetic construct
  misc_feature 1..16: note = synthetic [barcode part1]
  source 1..16: mol_type = other DNA
agacggaacggataac

SEQ ID NO: 1602 - DNA, 16 bp, synthetic construct
  misc_feature 1..16: note = synthetic [barcode part1]
  source 1..16: mol_type = other DNA
tgttactgcctaggcc

SEQ ID NO: 1603 - DNA, 16 bp, synthetic construct
  misc_feature 1..16: note = synthetic [barcode part1]
  source 1..16: mol_type = other DNA
gaagtatagaggtgcg

SEQ ID NO: 1604 - DNA, 16 bp, synthetic construct
  misc_feature 1..16: note = synthetic [barcode part1]
  source 1..16: mol_type = other DNA
agtacacgtgtcaacc

SEQ ID NO: 1605 - DNA, 16 bp, synthetic construct
  misc_feature 1..16: note = synthetic [barcode part1]
  source 1..16: mol_type = other DNA
acgcgtgtaacactac

SEQ ID NO: 1606 - DNA, 16 bp, synthetic construct
  misc_feature 1..16: note = synthetic [barcode part1]
  source 1..16: mol_type = other DNA
tcgaccgattgtagtg

SEQ ID NO: 1607 - DNA, 16 bp, synthetic construct
  misc_feature 1..16: note = synthetic [barcode part1]
  source 1..16: mol_type = other DNA
cactactggtagtggt

SEQ ID NO: 1608 - DNA, 16 bp, synthetic construct
  misc_feature 1..16: note = synthetic [barcode part1]
  source 1..16: mol_type = other DNA
aatatacacgccgacc

SEQ ID NO: 1609 - DNA, 16 bp, synthetic construct
  misc_feature 1..16: note = synthetic [barcode part1]
  source 1..16: mol_type = other DNA
accgagactaacttcg

SEQ ID NO: 1610 - DNA, 16 bp, synthetic construct
  misc_feature 1..16: note = synthetic [barcode part1]
  source 1..16: mol_type = other DNA
cagtagtctaacgacc

SEQ ID NO: 1611 - DNA, 16 bp, synthetic construct
  misc_feature 1..16: note = synthetic [barcode part1]
  source 1..16: mol_type = other DNA
tccgcgcaattcagtc

SEQ ID NO: 1612 - DNA, 16 bp, synthetic construct
  misc_feature 1..16: note = synthetic [barcode part1]
  source 1..16: mol_type = other DNA
agaacaacggatatcc

SEQ ID NO: 1613 - DNA, 16 bp, synthetic construct
  misc_feature 1..16: note = synthetic [barcode part1]
  source 1..16: mol_type = other DNA
acaactgcaactgtgc

SEQ ID NO: 1614 - DNA, 16 bp, synthetic construct
  misc_feature 1..16: note = synthetic [barcode part1]
  source 1..16: mol_type = other DNA
tcgacctcttgatctc

SEQ ID NO: 1615 - DNA, 16 bp, synthetic construct
  misc_feature 1..16: note = synthetic [barcode part1]
  source 1..16: mol_type = other DNA
ttaggcaaccttactc

SEQ ID NO: 1616 - DNA, 16 bp, synthetic construct
  misc_feature 1..16: note = synthetic [barcode part1]
  source 1..16: mol_type = other DNA
tctgcgcgatcactgt

SEQ ID NO: 1617 - DNA, 16 bp, synthetic construct
  misc_feature 1..16: note = synthetic [barcode part1]
  source 1..16: mol_type = other DNA
atcacggcaggatctt

SEQ ID NO: 1618 - DNA, 16 bp, synthetic construct
  misc_feature 1..16: note = synthetic [barcode part1]
  source 1..16: mol_type = other DNA
gccggtaagactagac

SEQ ID NO: 1619 - DNA, 16 bp, synthetic construct
  misc_feature 1..16: note = synthetic [barcode part1]
  source 1..16: mol_type = other DNA
gttgcaatcgcgatac

SEQ ID NO: 1620 - DNA, 16 bp, synthetic construct
  misc_feature 1..16: note = synthetic [barcode part1]
  source 1..16: mol_type = other DNA
gacacacactgtgtgt

SEQ ID NO: 1621 - DNA, 16 bp, synthetic construct
  misc_feature 1..16: note = synthetic [barcode part1]
  source 1..16: mol_type = other DNA
tgaggtgcctaacttg

SEQ ID NO: 1622 - DNA, 16 bp, synthetic construct
  misc_feature 1..16: note = synthetic [barcode part1]
  source 1..16: mol_type = other DNA
cagttaccagacctag

SEQ ID NO: 1623 - DNA, 16 bp, synthetic construct
  misc_feature 1..16: note = synthetic [barcode part1]
  source 1..16: mol_type = other DNA
ttggtgaattctcgtc

SEQ ID NO: 1624 - DNA, 16 bp, synthetic construct
  misc_feature 1..16: note = synthetic [barcode part1]
  source 1..16: mol_type = other DNA
gaggtctagtaggcgt

SEQ ID NO: 1625 - DNA, 16 bp, synthetic construct
  misc_feature 1..16: note = synthetic [barcode part1]
  source 1..16: mol_type = other DNA
gcgatcactaactctt

SEQ ID NO: 1626 - DNA, 16 bp, synthetic construct
  misc_feature 1..16: note = synthetic [barcode part1]
  source 1..16: mol_type = other DNA
agacgacgattacgcg

SEQ ID NO: 1627 - DNA, 16 bp, synthetic construct
  misc_feature 1..16: note = synthetic [barcode part1]
  source 1..16: mol_type = other DNA
atatcggaggaaccgc

SEQ ID NO: 1628 - DNA, 16 bp, synthetic construct
  misc_feature 1..16: note = synthetic [barcode part1]
  source 1..16: mol_type = other DNA
ttccttcgagaccttc

SEQ ID NO: 1629 - DNA, 16 bp, synthetic construct
  misc_feature 1..16: note = synthetic [barcode part1]
  source 1..16: mol_type = other DNA
atataaccggtacgcc

SEQ ID NO: 1630 - DNA, 16 bp, synthetic construct
  misc_feature 1..16: note = synthetic [barcode part1]
  source 1..16: mol_type = other DNA
actcaggcgagacagt

SEQ ID NO: 1631 - DNA, 16 bp, synthetic construct
  misc_feature 1..16: note = synthetic [barcode part1]
  source 1..16: mol_type = other DNA
gagtaatagtccgtag

SEQ ID NO: 1632 - DNA, 16 bp, synthetic construct
  misc_feature 1..16: note = synthetic [barcode part1]
  source 1..16: mol_type = other DNA
tgttccgagtggaatc

SEQ ID NO: 1633 - DNA, 16 bp, synthetic construct
  misc_feature 1..16: note = synthetic [barcode part1]
  source 1..16: mol_type = other DNA
tagacaataaggcctg

SEQ ID NO: 1634 - DNA, 16 bp, synthetic construct
  misc_feature 1..16: note = synthetic [barcode part1]
  source 1..16: mol_type = other DNA
ccgactctattggcgt

SEQ ID NO: 1635 - DNA, 16 bp, synthetic construct
  misc_feature 1..16: note = synthetic [barcode part1]
  source 1..16: mol_type = other DNA
tgattcgcgaggacag

SEQ ID NO: 1636 - DNA, 16 bp, synthetic construct
  misc_feature 1..16: note = synthetic [barcode part1]
  source 1..16: mol_type = other DNA
aggacctaggcgagtt

SEQ ID NO: 1637 - DNA, 16 bp, synthetic construct
  misc_feature 1..16: note = synthetic [barcode part1]
  source 1..16: mol_type = other DNA
gcactctgtatctctc

SEQ ID NO: 1638 - DNA, 16 bp, synthetic construct
  misc_feature 1..16: note = synthetic [barcode part1]
  source 1..16: mol_type = other DNA
cgaacacgaggtgact

SEQ ID NO: 1639 - DNA, 16 bp, synthetic construct
  misc_feature 1..16: note = synthetic [barcode part1]
  source 1..16: mol_type = other DNA
tatcctatcgtgaacc

SEQ ID NO: 1640 - DNA, 16 bp, synthetic construct
  misc_feature 1..16: note = synthetic [barcode part1]
  source 1..16: mol_type = other DNA
caggagatagtacgcc

SEQ ID NO: 1641 - DNA, 16 bp, synthetic construct
  misc_feature 1..16: note = synthetic [barcode part1]
  source 1..16: mol_type = other DNA
gtcgaatctgtgcctc

SEQ ID NO: 1642 - DNA, 16 bp, synthetic construct
  misc_feature 1..16: note = synthetic [barcode part1]
  source 1..16: mol_type = other DNA
cgcgtcaactgtatag

SEQ ID NO: 1643 - DNA, 16 bp, synthetic construct
  misc_feature 1..16: note = synthetic [barcode part1]
  source 1..16: mol_type = other DNA
ccggttctagaggatt

SEQ ID NO: 1644 - DNA, 16 bp, synthetic construct
  misc_feature 1..16: note = synthetic [barcode part1]
  source 1..16: mol_type = other DNA
gattaccggcaacttg

SEQ ID NO: 1645 - DNA, 16 bp, synthetic construct
  misc_feature 1..16: note = synthetic [barcode part1]
  source 1..16: mol_type = other DNA
gcgtggtacgtattac

SEQ ID NO: 1646 - DNA, 16 bp, synthetic construct
  misc_feature 1..16: note = synthetic [barcode part1]
  source 1..16: mol_type = other DNA
accgttaatacttccg

SEQ ID NO: 1647 - DNA, 16 bp, synthetic construct
  misc_feature 1..16: note = synthetic [barcode part1]
  source 1..16: mol_type = other DNA
caacgacggtctgatt

SEQ ID NO: 1648 - DNA, 16 bp, synthetic construct
  misc_feature 1..16: note = synthetic [barcode part1]
  source 1..16: mol_type = other DNA
gaccgtcagactattg

SEQ ID NO: 1649 - DNA, 16 bp, synthetic construct
  misc_feature 1..16: note = synthetic [barcode part1]
  source 1..16: mol_type = other DNA
tgtcgaggtaagagtt

SEQ ID NO: 1650 - DNA, 16 bp, synthetic construct
  misc_feature 1..16: note = synthetic [barcode part1]
  source 1..16: mol_type = other DNA
taacgtccgtcgtaag

SEQ ID NO: 1651 - DNA, 16 bp, synthetic construct
  misc_feature 1..16: note = synthetic [barcode part1]
  source 1..16: mol_type = other DNA
tgacgatacgttcttc

SEQ ID NO: 1652 - DNA, 16 bp, synthetic construct
  misc_feature 1..16: note = synthetic [barcode part1]
  source 1..16: mol_type = other DNA
tgtggacgtaagtcct

SEQ ID NO: 1653 - DNA, 16 bp, synthetic construct
  misc_feature 1..16: note = synthetic [barcode part1]
  source 1..16: mol_type = other DNA
aacggaagtgcctggt

SEQ ID NO: 1654 - DNA, 16 bp, synthetic construct
  misc_feature 1..16: note = synthetic [barcode part1]
  source 1..16: mol_type = other DNA
tcaagtgttaccttgc

SEQ ID NO: 1655 - DNA, 16 bp, synthetic construct
  misc_feature 1..16: note = synthetic [barcode part1]
  source 1..16: mol_type = other DNA
ccactctcaattctcg

SEQ ID NO: 1656 - DNA, 16 bp, synthetic construct
  misc_feature 1..16: note = synthetic [barcode part1]
  source 1..16: mol_type = other DNA
atctggagaactcgtc

SEQ ID NO: 1657 - DNA, 16 bp, synthetic construct
  misc_feature 1..16: note = synthetic [barcode part1]
  source 1..16: mol_type = other DNA
ccgataacaccttcgc

SEQ ID NO: 1658 - DNA, 16 bp, synthetic construct
  misc_feature 1..16: note = synthetic [barcode part1]
  source 1..16: mol_type = other DNA
gcaagaccttagatag

SEQ ID NO: 1659 - DNA, 16 bp, synthetic construct
  misc_feature 1..16: note = synthetic [barcode part1]
  source 1..16: mol_type = other DNA
acttacctctgaggtt

SEQ ID NO: 1660 - DNA, 16 bp, synthetic construct
  misc_feature 1..16: note = synthetic [barcode part1]
  source 1..16: mol_type = other DNA
ccttagaggacaggtg

SEQ ID NO: 1661 - DNA, 16 bp, synthetic construct
  misc_feature 1..16: note = synthetic [barcode part1]
  source 1..16: mol_type = other DNA
ccttagacggaatctg

SEQ ID NO: 1662 - DNA, 16 bp, synthetic construct
  misc_feature 1..16: note = synthetic [barcode part1]
  source 1..16: mol_type = other DNA
taggcgagtaacgtcg

SEQ ID NO: 1663 - DNA, 16 bp, synthetic construct
  misc_feature 1..16: note = synthetic [barcode part1]
  source 1..16: mol_type = other DNA
gcctatcgacactacc

SEQ ID NO: 1664 - DNA, 16 bp, synthetic construct
  misc_feature 1..16: note = synthetic [barcode part1]
  source 1..16: mol_type = other DNA
tctgcgcaattcgatt

SEQ ID NO: 1665 - DNA, 16 bp, synthetic construct
  misc_feature 1..16: note = synthetic [barcode part1]
  source 1..16: mol_type = other DNA
tcttcagacactggtt

SEQ ID NO: 1666 - DNA, 16 bp, synthetic construct
  misc_feature 1..16: note = synthetic [barcode part1]
  source 1..16: mol_type = other DNA
tacacagtacttcacc

SEQ ID NO: 1667 - DNA, 16 bp, synthetic construct
  misc_feature 1..16: note = synthetic [barcode part1]
  source 1..16: mol_type = other DNA
tcaggatcttatccac

SEQ ID NO: 1668 - DNA, 16 bp, synthetic construct
  misc_feature 1..16: note = synthetic [barcode part1]
  source 1..16: mol_type = other DNA
tccaaccacaccgatc

SEQ ID NO: 1669 - DNA, 16 bp, synthetic construct
  misc_feature 1..16: note = synthetic [barcode part1]
  source 1..16: mol_type = other DNA
cggtatagtacttggc

SEQ ID NO: 1670 - DNA, 16 bp, synthetic construct
  misc_feature 1..16: note = synthetic [barcode part1]
  source 1..16: mol_type = other DNA
gataggccactacgag

SEQ ID NO: 1671 - DNA, 16 bp, synthetic construct
  misc_feature 1..16: note = synthetic [barcode part1]
  source 1..16: mol_type = other DNA
tgatcttcagtcgtac

SEQ ID NO: 1672 - DNA, 16 bp, synthetic construct
  misc_feature 1..16: note = synthetic [barcode part1]
  source 1..16: mol_type = other DNA
tccagtattgccgaag

SEQ ID NO: 1673 - DNA, 16 bp, synthetic construct
  misc_feature 1..16: note = synthetic [barcode part1]
  source 1..16: mol_type = other DNA
atagtactgtgcgcgt

SEQ ID NO: 1674 - DNA, 16 bp, synthetic construct
  misc_feature 1..16: note = synthetic [barcode part1]
  source 1..16: mol_type = other DNA
ttcgccactcttgatc

SEQ ID NO: 1675 - DNA, 16 bp, synthetic construct
  misc_feature 1..16: note = synthetic [barcode part1]
  source 1..16: mol_type = other DNA
aacttcgatcctggag

SEQ ID NO: 1676 - DNA, 16 bp, synthetic construct
  misc_feature 1..16: note = synthetic [barcode part1]
  source 1..16: mol_type = other DNA
gtagtaccgataccac

SEQ ID NO: 1677 - DNA, 16 bp, synthetic construct
  misc_feature 1..16: note = synthetic [barcode part1]
  source 1..16: mol_type = other DNA
attactctctgccgtc

SEQ ID NO: 1678 - DNA, 16 bp, synthetic construct
  misc_feature 1..16: note = synthetic [barcode part1]
  source 1..16: mol_type = other DNA
cctatcctgtcacgag

SEQ ID NO: 1679 - DNA, 16 bp, synthetic construct
  misc_feature 1..16: note = synthetic [barcode part1]
  source 1..16: mol_type = other DNA
tacgtcacaacgtacg

SEQ ID NO: 1680 - DNA, 16 bp, synthetic construct
  misc_feature 1..16: note = synthetic [barcode part1]
  source 1..16: mol_type = other DNA
ttctacgcagtccggt

SEQ ID NO: 1681 - DNA, 16 bp, synthetic construct
  misc_feature 1..16: note = synthetic [barcode part1]
  source 1..16: mol_type = other DNA
cagaggttatcaagtg

SEQ ID NO: 1682 - DNA, 16 bp, synthetic construct
  misc_feature 1..16: note = synthetic [barcode part1]
  source 1..16: mol_type = other DNA
cgataggagactcacg

SEQ ID NO: 1683 - DNA, 16 bp, synthetic construct
  misc_feature 1..16: note = synthetic [barcode part1]
  source 1..16: mol_type = other DNA
gagattcgtccacctc

SEQ ID NO: 1684 - DNA, 16 bp, synthetic construct
  misc_feature 1..16: note = synthetic [barcode part1]
  source 1..16: mol_type = other DNA
gtgtaactagtcgtgc

SEQ ID NO: 1685 - DNA, 16 bp, synthetic construct
  misc_feature 1..16: note = synthetic [barcode part1]
  source 1..16: mol_type = other DNA
gattacgacgttggtc

SEQ ID NO: 1686 - DNA, 16 bp, synthetic construct
  misc_feature 1..16: note = synthetic [barcode part1]
  source 1..16: mol_type = other DNA
taagaagtgcggttac

SEQ ID NO: 1687 - DNA, 16 bp, synthetic construct
  misc_feature 1..16: note = synthetic [barcode part1]
  source 1..16: mol_type = other DNA
caagatacttgcgaag

SEQ ID NO: 1688 - DNA, 16 bp, synthetic construct
  misc_feature 1..16: note = synthetic [barcode part1]
  source 1..16: mol_type = other DNA
gaatcgcgtgattcgt

SEQ ID NO: 1689 - DNA, 16 bp, synthetic construct
  misc_feature 1..16: note = synthetic [barcode part1]
  source 1..16: mol_type = other DNA
taggcagttcgttcag

SEQ ID NO: 1690 - DNA, 16 bp, synthetic construct
  misc_feature 1..16: note = synthetic [barcode part1]
  source 1..16: mol_type = other DNA
acggtagttactaccg

SEQ ID NO: 1691 - DNA, 16 bp, synthetic construct
  misc_feature 1..16: note = synthetic [barcode part1]
  source 1..16: mol_type = other DNA
gtctcggagttagttg

SEQ ID NO: 1692 - DNA, 16 bp, synthetic construct
  misc_feature 1..16: note = synthetic [barcode part1]
  source 1..16: mol_type = other DNA
gatctcacacttatcg

SEQ ID NO: 1693 - DNA, 16 bp, synthetic construct
  misc_feature 1..16: note = synthetic [barcode part1]
  source 1..16: mol_type = other DNA
gcaacttaacgtagag

SEQ ID NO: 1694 - DNA, 16 bp, synthetic construct
  misc_feature 1..16: note = synthetic [barcode part1]
  source 1..16: mol_type = other DNA
gtacctacttgccgtg

SEQ ID NO: 1695 - DNA, 16 bp, synthetic construct
  misc_feature 1..16: note = synthetic [barcode part1]
  source 1..16: mol_type = other DNA
aacacgtggagagtcc

SEQ ID NO: 1696 - DNA, 16 bp, synthetic construct
  misc_feature 1..16: note = synthetic [barcode part1]
  source 1..16: mol_type = other DNA
gcctgcaatataaccg

SEQ ID NO: 1697 - DNA, 16 bp, synthetic construct
  misc_feature 1..16: note = synthetic [barcode part1]
  source 1..16: mol_type = other DNA
atcctgcacgaagtac

SEQ ID NO: 1698 - DNA, 16 bp, synthetic construct
  misc_feature 1..16: note = synthetic [barcode part1]
  source 1..16: mol_type = other DNA
ataccactgttcgttg

SEQ ID NO: 1699 - DNA, 16 bp, synthetic construct
  misc_feature 1..16: note = synthetic [barcode part1]
  source 1..16: mol_type = other DNA
cgtaactcttcactag

SEQ ID NO: 1700 - DNA, 16 bp, synthetic construct
  misc_feature 1..16: note = synthetic [barcode part1]
  source 1..16: mol_type = other DNA
ttgtagaccgccacct

SEQ ID NO: 1701 - DNA, 16 bp, synthetic construct
  misc_feature 1..16: note = synthetic [barcode part1]
  source 1..16: mol_type = other DNA
gttcaaccgattcgag

SEQ ID NO: 1702 - DNA, 16 bp, synthetic construct
  misc_feature 1..16: note = synthetic [barcode part1]
  source 1..16: mol_type = other DNA
ccttaagaacaccacg

SEQ ID NO: 1703 - DNA, 16 bp, synthetic construct
  misc_feature 1..16: note = synthetic [barcode part1]
  source 1..16: mol_type = other DNA
acggtcgcaattgtac

SEQ ID NO: 1704 - DNA, 16 bp, synthetic construct
  misc_feature 1..16: note = synthetic [barcode part1]
  source 1..16: mol_type = other DNA
tacagacacagactcc

SEQ ID NO: 1705 - DNA, 16 bp, synthetic construct
  misc_feature 1..16: note = synthetic [barcode part1]
  source 1..16: mol_type = other DNA
cgcgcagagatatctt

SEQ ID NO: 1706 - DNA, 16 bp, synthetic construct
  misc_feature 1..16: note = synthetic [barcode part1]
  source 1..16: mol_type = other DNA
tatagtagataggcgc

SEQ ID NO: 1707 - DNA, 16 bp, synthetic construct
  misc_feature 1..16: note = synthetic [barcode part1]
  source 1..16: mol_type = other DNA
cacactagaaggattg

SEQ ID NO: 1708 - DNA, 16 bp, synthetic construct
  misc_feature 1..16: note = synthetic [barcode part1]
  source 1..16: mol_type = other DNA
attggcgtgcctcact

SEQ ID NO: 1709 - DNA, 16 bp, synthetic construct
  misc_feature 1..16: note = synthetic [barcode part1]
  source 1..16: mol_type = other DNA
aagtagatcgtaacgc

SEQ ID NO: 1710 - DNA, 16 bp, synthetic construct
  misc_feature 1..16: note = synthetic [barcode part1]
  source 1..16: mol_type = other DNA
ataggaggttgtcagt

SEQ ID NO: 1711 - DNA, 16 bp, synthetic construct
  misc_feature 1..16: note = synthetic [barcode part1]
  source 1..16: mol_type = other DNA
aggtatcggatctacc

SEQ ID NO: 1712 - DNA, 16 bp, synthetic construct
  misc_feature 1..16: note = synthetic [barcode part1]
  source 1..16: mol_type = other DNA
ccaacggcctaataac

SEQ ID NO: 1713 - DNA, 16 bp, synthetic construct
  misc_feature 1..16: note = synthetic [barcode part1]
  source 1..16: mol_type = other DNA
gaggttgacgtgactg

SEQ ID NO: 1714 - DNA, 16 bp, synthetic construct
  misc_feature 1..16: note = synthetic [barcode part1]
  source 1..16: mol_type = other DNA
tagtcttccaacctcc

SEQ ID NO: 1715 - DNA, 16 bp, synthetic construct
  misc_feature 1..16: note = synthetic [barcode part1]
  source 1..16: mol_type = other DNA
agtaactcgtggaagt

SEQ ID NO: 1716 - DNA, 16 bp, synthetic construct
  misc_feature 1..16: note = synthetic [barcode part1]
  source 1..16: mol_type = other DNA
tgtgtggtattccact

SEQ ID NO: 1717 - DNA, 16 bp, synthetic construct
  misc_feature 1..16: note = synthetic [barcode part1]
  source 1..16: mol_type = other DNA
atccagttggtctgag

SEQ ID NO: 1718 - DNA, 16 bp, synthetic construct
  misc_feature 1..16: note = synthetic [barcode part1]
  source 1..16: mol_type = other DNA
gcgaaggcgacaactt

SEQ ID NO: 1719 - DNA, 16 bp, synthetic construct
  misc_feature 1..16: note = synthetic [barcode part1]
  source 1..16: mol_type = other DNA
tgtagtgtgagtgaac

SEQ ID NO: 1720 - DNA, 16 bp, synthetic construct
  misc_feature 1..16: note = synthetic [barcode part1]
  source 1..16: mol_type = other DNA
agacaccgaacgacgt

SEQ ID NO: 1721 - DNA, 16 bp, synthetic construct
  misc_feature 1..16: note = synthetic [barcode part1]
  source 1..16: mol_type = other DNA
acgttgattaggcacc

SEQ ID NO: 1722 - DNA, 16 bp, synthetic construct
  misc_feature 1..16: note = synthetic [barcode part1]
  source 1..16: mol_type = other DNA
ataaggtggcgaagtg

SEQ ID NO: 1723 - DNA, 16 bp, synthetic construct
  misc_feature 1..16: note = synthetic [barcode part1]
  source 1..16: mol_type = other DNA
gatcctaacaacaccg

SEQ ID NO: 1724 - DNA, 16 bp, synthetic construct
  misc_feature 1..16: note = synthetic [barcode part1]
  source 1..16: mol_type = other DNA
gtgtctaaggtagtag

SEQ ID NO: 1725 - DNA, 16 bp, synthetic construct
  misc_feature 1..16: note = synthetic [barcode part1]
  source 1..16: mol_type = other DNA
tccggacttattgccg

SEQ ID NO: 1726 - DNA, 16 bp, synthetic construct
  misc_feature 1..16: note = synthetic [barcode part1]
  source 1..16: mol_type = other DNA
cacgacacaagacctt

SEQ ID NO: 1727 - DNA, 16 bp, synthetic construct
  misc_feature 1..16: note = synthetic [barcode part1]
  source 1..16: mol_type = other DNA
agaataggttcgcggc

SEQ ID NO: 1728 - DNA, 16 bp, synthetic construct
  misc_feature 1..16: note = synthetic [barcode part1]
  source 1..16: mol_type = other DNA
tagtcgttcacgcaag

SEQ ID NO: 1729 - DNA, 16 bp, synthetic construct
  misc_feature 1..16: note = synthetic [barcode part1]
  source 1..16: mol_type = other DNA
ataaccgatcacgcac

SEQ ID NO: 1730 - DNA, 16 bp, synthetic construct
  misc_feature 1..16: note = synthetic [barcode part1]
  source 1..16: mol_type = other DNA
tgcgcaggtggaatac

SEQ ID NO: 1731 - DNA, 16 bp, synthetic construct
  misc_feature 1..16: note = synthetic [barcode part1]
  source 1..16: mol_type = other DNA
aactgtgcgatcgtac

SEQ ID NO: 1732 - DNA, 16 bp, synthetic construct
  misc_feature 1..16: note = synthetic [barcode part1]
  source 1..16: mol_type = other DNA
ttcaccagactcgcgt

SEQ ID NO: 1733 - DNA, 16 bp, synthetic construct
  misc_feature 1..16: note = synthetic [barcode part1]
  source 1..16: mol_type = other DNA
tgtgacgtattcacct

SEQ ID NO: 1734 - DNA, 16 bp, synthetic construct
  misc_feature 1..16: note = synthetic [barcode part1]
  source 1..16: mol_type = other DNA
gacagtccgcgttctt

SEQ ID NO: 1735 - DNA, 16 bp, synthetic construct
  misc_feature 1..16: note = synthetic [barcode part1]
  source 1..16: mol_type = other DNA
ccgataacaaggatac

SEQ ID NO: 1736 - DNA, 16 bp, synthetic construct
  misc_feature 1..16: note = synthetic [barcode part1]
  source 1..16: mol_type = other DNA
taggtataggacgact

SEQ ID NO: 1737 - DNA, 16 bp, synthetic construct
  misc_feature 1..16: note = synthetic [barcode part1]
  source 1..16: mol_type = other DNA
aagtccagttcgaacc

SEQ ID NO: 1738 - DNA, 16 bp, synthetic construct
  misc_feature 1..16: note = synthetic [barcode part1]
  source 1..16: mol_type = other DNA
actgtccagacctgtc

SEQ ID NO: 1739 - DNA, 16 bp, synthetic construct
  misc_feature 1..16: note = synthetic [barcode part1]
  source 1..16: mol_type = other DNA
tctctagagaaggcct

SEQ ID NO: 1740 - DNA, 16 bp, synthetic construct
  misc_feature 1..16: note = synthetic [barcode part1]
  source 1..16: mol_type = other DNA
ccaacttaatacgcct

SEQ ID NO: 1741 - DNA, 16 bp, synthetic construct
  misc_feature 1..16: note = synthetic [barcode part1]
  source 1..16: mol_type = other DNA
ttatcacgatacctgc

SEQ ID NO: 1742 - DNA, 16 bp, synthetic construct
  misc_feature 1..16: note = synthetic [barcode part1]
  source 1..16: mol_type = other DNA
aacactggtacacgtc

SEQ ID NO: 1743 - DNA, 16 bp, synthetic construct
  misc_feature 1..16: note = synthetic [barcode part1]
  source 1..16: mol_type = other DNA
taggttaccttgcgtt

SEQ ID NO: 1744 - DNA, 16 bp, synthetic construct
  misc_feature 1..16: note = synthetic [barcode part1]
  source 1..16: mol_type = other DNA
cgagtcacctcacact

SEQ ID NO: 1745 - DNA, 16 bp, synthetic construct
  misc_feature 1..16: note = synthetic [barcode part1]
  source 1..16: mol_type = other DNA
tcacggacggaggatt

SEQ ID NO: 1746 - DNA, 16 bp, synthetic construct
  misc_feature 1..16: note = synthetic [barcode part1]
  source 1..16: mol_type = other DNA
gtggattcacggattc

SEQ ID NO: 1747 - DNA, 16 bp, synthetic construct
  misc_feature 1..16: note = synthetic [barcode part1]
  source 1..16: mol_type = other DNA
ttgtccgttgtagtac

SEQ ID NO: 1748 - DNA, 16 bp, synthetic construct
  misc_feature 1..16: note = synthetic [barcode part1]
  source 1..16: mol_type = other DNA
tacaattccggtgcag

SEQ ID NO: 1749 - DNA, 16 bp, synthetic construct
  misc_feature 1..16: note = synthetic [barcode part1]
  source 1..16: mol_type = other DNA
agatctgcactccacc

SEQ ID NO: 1750 - DNA, 16 bp, synthetic construct
  misc_feature 1..16: note = synthetic [barcode part1]
  source 1..16: mol_type = other DNA
tggcaatcggtaactc

SEQ ID NO: 1751 - DNA, 16 bp, synthetic construct
  misc_feature 1..16: note = synthetic [barcode part1]
  source 1..16: mol_type = other DNA
gacacagacttagtag

SEQ ID NO: 1752 - DNA, 16 bp, synthetic construct
  misc_feature 1..16: note = synthetic [barcode part1]
  source 1..16: mol_type = other DNA
ttctaacgagacgacc

SEQ ID NO: 1753 - DNA, 16 bp, synthetic construct
  misc_feature 1..16: note = synthetic [barcode part1]
  source 1..16: mol_type = other DNA
gactgtggttgtgtgt

SEQ ID NO: 1754 - DNA, 16 bp, synthetic construct
  misc_feature 1..16: note = synthetic [barcode part1]
  source 1..16: mol_type = other DNA
ccgtcgacgtattctg

SEQ ID NO: 1755 - DNA, 16 bp, synthetic construct
  misc_feature 1..16: note = synthetic [barcode part1]
  source 1..16: mol_type = other DNA
atattaggtgcggtcc

SEQ ID NO: 1756 - DNA, 16 bp, synthetic construct
  misc_feature 1..16: note = synthetic [barcode part1]
  source 1..16: mol_type = other DNA
aactcttcgtaggttc

SEQ ID NO: 1757 - DNA, 16 bp, synthetic construct
  misc_feature 1..16: note = synthetic [barcode part1]
  source 1..16: mol_type = other DNA
cgaaggaggaactaac

SEQ ID NO: 1758 - DNA, 16 bp, synthetic construct
  misc_feature 1..16: note = synthetic [barcode part1]
  source 1..16: mol_type = other DNA
agatcctctctaggag

SEQ ID NO: 1759 - DNA, 16 bp, synthetic construct
  misc_feature 1..16: note = synthetic [barcode part1]
  source 1..16: mol_type = other DNA
gttacagattcacctc

SEQ ID NO: 1760 - DNA, 16 bp, synthetic construct
  misc_feature 1..16: note = synthetic [barcode part1]
  source 1..16: mol_type = other DNA
gtgcagaataatccag

SEQ ID NO: 1761 - DNA, 16 bp, synthetic construct
  misc_feature 1..16: note = synthetic [barcode part1]
  source 1..16: mol_type = other DNA
acctcctattgcgcag

SEQ ID NO: 1762 - DNA, 16 bp, synthetic construct
  misc_feature 1..16: note = synthetic [barcode part1]
  source 1..16: mol_type = other DNA
acctgagtatcactct

SEQ ID NO: 1763 - DNA, 16 bp, synthetic construct
  misc_feature 1..16: note = synthetic [barcode part1]
  source 1..16: mol_type = other DNA
aatagttgcacaggac

SEQ ID NO: 1764 - DNA, 16 bp, synthetic construct
  misc_feature 1..16: note = synthetic [barcode part1]
  source 1..16: mol_type = other DNA
ttctgtacgtgtctcc

SEQ ID NO: 1765 - DNA, 16 bp, synthetic construct
  misc_feature 1..16: note = synthetic [barcode part1]
  source 1..16: mol_type = other DNA
tcttctcgaccttgac

SEQ ID NO: 1766 - DNA, 16 bp, synthetic construct
  misc_feature 1..16: note = synthetic [barcode part1]
  source 1..16: mol_type = other DNA
ttcgcgtggaagtatc

SEQ ID NO: 1767 - DNA, 16 bp, synthetic construct
  misc_feature 1..16: note = synthetic [barcode part1]
  source 1..16: mol_type = other DNA
tccgtcgaatccacgt

SEQ ID NO: 1768 - DNA, 16 bp, synthetic construct
  misc_feature 1..16: note = synthetic [barcode part1]
  source 1..16: mol_type = other DNA
gatcgtagatctcttc

SEQ ID NO: 1769 - DNA, 16 bp, synthetic construct
  misc_feature 1..16: note = synthetic [barcode part1]
  source 1..16: mol_type = other DNA
actcagaacagactcc

SEQ ID NO: 1770 - DNA, 16 bp, synthetic construct
  misc_feature 1..16: note = synthetic [barcode part1]
  source 1..16: mol_type = other DNA
atcagtgcagatctgc

SEQ ID NO: 1771 - DNA, 16 bp, synthetic construct
  misc_feature 1..16: note = synthetic [barcode part1]
  source 1..16: mol_type = other DNA
gatacacagaagactc

SEQ ID NO: 1772 - DNA, 16 bp, synthetic construct
  misc_feature 1..16: note = synthetic [barcode part1]
  source 1..16: mol_type = other DNA
cagagttgaccttgac

SEQ ID NO: 1773 - DNA, 16 bp, synthetic construct
  misc_feature 1..16: note = synthetic [barcode part1]
  source 1..16: mol_type = other DNA
aaggagagttacgacg

SEQ ID NO: 1774 - DNA, 16 bp, synthetic construct
  misc_feature 1..16: note = synthetic [barcode part1]
  source 1..16: mol_type = other DNA
gaatcgtctcagtgac

SEQ ID NO: 1775 - DNA, 16 bp, synthetic construct
  misc_feature 1..16: note = synthetic [barcode part1]
  source 1..16: mol_type = other DNA
agttgactgcacacac

SEQ ID NO: 1776 - DNA, 16 bp, synthetic construct
  misc_feature 1..16: note = synthetic [barcode part1]
  source 1..16: mol_type = other DNA
aggttgcgtggaggtt

SEQ ID NO: 1777 - DNA, 16 bp, synthetic construct
  misc_feature 1..16: note = synthetic [barcode part1]
  source 1..16: mol_type = other DNA
tgtgaggtacgagaag

SEQ ID NO: 1778 - DNA, 16 bp, synthetic construct
  misc_feature 1..16: note = synthetic [barcode part1]
  source 1..16: mol_type = other DNA
ccaactatccttctcg

SEQ ID NO: 1779 - DNA, 16 bp, synthetic construct
  misc_feature 1..16: note = synthetic [barcode part1]
  source 1..16: mol_type = other DNA
ttgcaggtgtcaacgt

SEQ ID NO: 1780 - DNA, 16 bp, synthetic construct
  misc_feature 1..16: note = synthetic [barcode part1]
  source 1..16: mol_type = other DNA
tgcaacggtccactct

SEQ ID NO: 1781 - DNA, 16 bp, synthetic construct
  misc_feature 1..16: note = synthetic [barcode part1]
  source 1..16: mol_type = other DNA
caggatccaacactgt

SEQ ID NO: 1782 - DNA, 16 bp, synthetic construct
  misc_feature 1..16: note = synthetic [barcode part1]
  source 1..16: mol_type = other DNA
gttacgatccgtctgc

SEQ ID NO: 1783 - DNA, 16 bp, synthetic construct
  misc_feature 1..16: note = synthetic [barcode part1]
  source 1..16: mol_type = other DNA
gcacttacctgttgcg

SEQ ID NO: 1784 - DNA, 16 bp, synthetic construct
  misc_feature 1..16: note = synthetic [barcode part1]
  source 1..16: mol_type = other DNA
tgacagtgatccaacc

SEQ ID NO: 1785 - DNA, 16 bp, synthetic construct
  misc_feature 1..16: note = synthetic [barcode part1]
  source 1..16: mol_type = other DNA
cgcgatataaggcctt

SEQ ID NO: 1786 - DNA, 16 bp, synthetic construct
  misc_feature 1..16: note = synthetic [barcode part1]
  source 1..16: mol_type = other DNA
cctctctaaggtcctt

SEQ ID NO: 1787 - DNA, 16 bp, synthetic construct
  misc_feature 1..16: note = synthetic [barcode part1]
  source 1..16: mol_type = other DNA
ataacgacaagtccag

SEQ ID NO: 1788 - DNA, 16 bp, synthetic construct
  misc_feature 1..16: note = synthetic [barcode part1]
  source 1..16: mol_type = other DNA
ccaacgaattcctgtt

SEQ ID NO: 1789 - DNA, 16 bp, synthetic construct
  misc_feature 1..16: note = synthetic [barcode part1]
  source 1..16: mol_type = other DNA
aaggacaaggtgtggt

SEQ ID NO: 1790 - DNA, 16 bp, synthetic construct
  misc_feature 1..16: note = synthetic [barcode part1]
  source 1..16: mol_type = other DNA
tcctacaccgaaccgt

SEQ ID NO: 1791 - DNA, 16 bp, synthetic construct
  misc_feature 1..16: note = synthetic [barcode part1]
  source 1..16: mol_type = other DNA
cgttctctgtacttcg

SEQ ID NO: 1792 - DNA, 16 bp, synthetic construct
  misc_feature 1..16: note = synthetic [barcode part1]
  source 1..16: mol_type = other DNA
cgatacacgaccttcc

SEQ ID NO: 1793 - DNA, 16 bp, synthetic construct
  misc_feature 1..16: note = synthetic [barcode part1]
  source 1..16: mol_type = other DNA
ttacacgaaggagttg

SEQ ID NO: 1794 - DNA, 16 bp, synthetic construct
  misc_feature 1..16: note = synthetic [barcode part1]
  source 1..16: mol_type = other DNA
ccttattacctcaccg

SEQ ID NO: 1795 - DNA, 16 bp, synthetic construct
  misc_feature 1..16: note = synthetic [barcode part1]
  source 1..16: mol_type = other DNA
gtctctcttgagagag

SEQ ID NO: 1796 - DNA, 16 bp, synthetic construct
  misc_feature 1..16: note = synthetic [barcode part1]
  source 1..16: mol_type = other DNA
gacttcttacggatct

SEQ ID NO: 1797 - DNA, 16 bp, synthetic construct
  misc_feature 1..16: note = synthetic [barcode part1]
  source 1..16: mol_type = other DNA
agtagtcacactcttc

SEQ ID NO: 1798 - DNA, 16 bp, synthetic construct
  misc_feature 1..16: note = synthetic [barcode part1]
  source 1..16: mol_type = other DNA
gatccaagttgttggc

SEQ ID NO: 1799 - DNA, 16 bp, synthetic construct
  misc_feature 1..16: note = synthetic [barcode part1]
  source 1..16: mol_type = other DNA
ttgagactctaaggcc

SEQ ID NO: 1800 - DNA, 16 bp, synthetic construct
  misc_feature 1..16: note = synthetic [barcode part1]
  source 1..16: mol_type = other DNA
gcacacactagttggt

SEQ ID NO: 1801 - DNA, 16 bp, synthetic construct
  misc_feature 1..16: note = synthetic [barcode part1]
  source 1..16: mol_type = other DNA
ccgatatacgtgtcag

SEQ ID NO: 1802 - DNA, 16 bp, synthetic construct
  misc_feature 1..16: note = synthetic [barcode part1]
  source 1..16: mol_type = other DNA
gtgcacacgtatacgt

SEQ ID NO: 1803 - DNA, 16 bp, synthetic construct
  misc_feature 1..16: note = synthetic [barcode part1]
  source 1..16: mol_type = other DNA
caagtacgaggatcgc

SEQ ID NO: 1804 - DNA, 16 bp, synthetic construct
  misc_feature 1..16: note = synthetic [barcode part1]
  source 1..16: mol_type = other DNA
attataggacgccacc

SEQ ID NO: 1805 - DNA, 16 bp, synthetic construct
  misc_feature 1..16: note = synthetic [barcode part1]
  source 1..16: mol_type = other DNA
ccgtaattgaccagtg

SEQ ID NO: 1806 - DNA, 16 bp, synthetic construct
  misc_feature 1..16: note = synthetic [barcode part1]
  source 1..16: mol_type = other DNA
tgaagaatacgcgatc

SEQ ID NO: 1807 - DNA, 16 bp, synthetic construct
  misc_feature 1..16: note = synthetic [barcode part1]
  source 1..16: mol_type = other DNA
cgcaatagtcctgaac

SEQ ID NO: 1808 - DNA, 16 bp, synthetic construct
  misc_feature 1..16: note = synthetic [barcode part1]
  source 1..16: mol_type = other DNA
cagttagtacagtgcc

SEQ ID NO: 1809 - DNA, 16 bp, synthetic construct
  misc_feature 1..16: note = synthetic [barcode part1]
  source 1..16: mol_type = other DNA
agttcctaccgaaggt

SEQ ID NO: 1810 - DNA, 16 bp, synthetic construct
  misc_feature 1..16: note = synthetic [barcode part1]
  source 1..16: mol_type = other DNA
tattcctctaacgacg

SEQ ID NO: 1811 - DNA, 16 bp, synthetic construct
  misc_feature 1..16: note = synthetic [barcode part1]
  source 1..16: mol_type = other DNA
ttcgaccgtgccaatc

SEQ ID NO: 1812 - DNA, 16 bp, synthetic construct
  misc_feature 1..16: note = synthetic [barcode part1]
  source 1..16: mol_type = other DNA
taacttctaacgtgcc

SEQ ID NO: 1813 - DNA, 16 bp, synthetic construct
  misc_feature 1..16: note = synthetic [barcode part1]
  source 1..16: mol_type = other DNA
accagtgtatcctgtt

SEQ ID NO: 1814 - DNA, 16 bp, synthetic construct
  misc_feature 1..16: note = synthetic [barcode part1]
  source 1..16: mol_type = other DNA
ttagtgcctggttccg

SEQ ID NO: 1815 - DNA, 16 bp, synthetic construct
  misc_feature 1..16: note = synthetic [barcode part1]
  source 1..16: mol_type = other DNA
gtatacctcgttgttg

SEQ ID NO: 1816 - DNA, 16 bp, synthetic construct
  misc_feature 1..16: note = synthetic [barcode part1]
  source 1..16: mol_type = other DNA
gcacgtgtgattgatc

SEQ ID NO: 1817 - DNA, 16 bp, synthetic construct
  misc_feature 1..16: note = synthetic [barcode part1]
  source 1..16: mol_type = other DNA
caccactaagtcagac

SEQ ID NO: 1818 - DNA, 16 bp, synthetic construct
  misc_feature 1..16: note = synthetic [barcode part1]
  source 1..16: mol_type = other DNA
cagttgttaggtccag

SEQ ID NO: 1819 - DNA, 16 bp, synthetic construct
  misc_feature 1..16: note = synthetic [barcode part1]
  source 1..16: mol_type = other DNA
tgccgcctgaacttac

SEQ ID NO: 1820 - DNA, 16 bp, synthetic construct
  misc_feature 1..16: note = synthetic [barcode part1]
  source 1..16: mol_type = other DNA
ataactgcgcgtggtt

SEQ ID NO: 1821 - DNA, 16 bp, synthetic construct
  misc_feature 1..16: note = synthetic [barcode part1]
  source 1..16: mol_type = other DNA
gaagataacggttcac

SEQ ID NO: 1822 - DNA, 16 bp, synthetic construct
  misc_feature 1..16: note = synthetic [barcode part1]
  source 1..16: mol_type = other DNA
caacagtggagtgtgc

SEQ ID NO: 1823 - DNA, 16 bp, synthetic construct
  misc_feature 1..16: note = synthetic [barcode part1]
  source 1..16: mol_type = other DNA
tggtaactccttgtac

SEQ ID NO: 1824 - DNA, 16 bp, synthetic construct
  misc_feature 1..16: note = synthetic [barcode part1]
  source 1..16: mol_type = other DNA
cggcagtattaagtcc

SEQ ID NO: 1825 - DNA, 16 bp, synthetic construct
  misc_feature 1..16: note = synthetic [barcode part1]
  source 1..16: mol_type = other DNA
gccgagttctacgttc

SEQ ID NO: 1826 - DNA, 16 bp, synthetic construct
  misc_feature 1..16: note = synthetic [barcode part1]
  source 1..16: mol_type = other DNA
gcctccaacaacctgt

SEQ ID NO: 1827 - DNA, 16 bp, synthetic construct
  misc_feature 1..16: note = synthetic [barcode part1]
  source 1..16: mol_type = other DNA
tcggtgagtcctcgtt

SEQ ID NO: 1828 - DNA, 16 bp, synthetic construct
  misc_feature 1..16: note = synthetic [barcode part1]
  source 1..16: mol_type = other DNA
aactataggccaagac

SEQ ID NO: 1829 - DNA, 16 bp, synthetic construct
  misc_feature 1..16: note = synthetic [barcode part1]
  source 1..16: mol_type = other DNA
ccttggtccggtatac

SEQ ID NO: 1830 - DNA, 16 bp, synthetic construct
  misc_feature 1..16: note = synthetic [barcode part1]
  source 1..16: mol_type = other DNA
tcgagtgacgataagt

SEQ ID NO: 1831 - DNA, 16 bp, synthetic construct
  misc_feature 1..16: note = synthetic [barcode part1]
  source 1..16: mol_type = other DNA
tctactgcgtagatct

SEQ ID NO: 1832 - DNA, 16 bp, synthetic construct
  misc_feature 1..16: note = synthetic [barcode part1]
  source 1..16: mol_type = other DNA
cgacgataccactagt

SEQ ID NO: 1833 - DNA, 16 bp, synthetic construct
  misc_feature 1..16: note = synthetic [barcode part1]
  source 1..16: mol_type = other DNA
attctctgccacgcag

SEQ ID NO: 1834 - DNA, 16 bp, synthetic construct
  misc_feature 1..16: note = synthetic [barcode part1]
  source 1..16: mol_type = other DNA
ttcctaggtgttggtt

SEQ ID NO: 1835 - DNA, 16 bp, synthetic construct
  misc_feature 1..16: note = synthetic [barcode part1]
  source 1..16: mol_type = other DNA
actcttactcgcgttc

SEQ ID NO: 1836 - DNA, 16 bp, synthetic construct
  misc_feature 1..16: note = synthetic [barcode part1]
  source 1..16: mol_type = other DNA
ttcagtgtaggagtag

SEQ ID NO: 1837 - DNA, 16 bp, synthetic construct
  misc_feature 1..16: note = synthetic [barcode part1]
  source 1..16: mol_type = other DNA
aagaacgcagaggtgt

SEQ ID NO: 1838 - DNA, 16 bp, synthetic construct
  misc_feature 1..16: note = synthetic [barcode part1]
  source 1..16: mol_type = other DNA
actctgagtcagtcag

SEQ ID NO: 1839 - DNA, 16 bp, synthetic construct
  misc_feature 1..16: note = synthetic [barcode part1]
  source 1..16: mol_type = other DNA
ccgacgtagaagactg

SEQ ID NO: 1840 - DNA, 16 bp, synthetic construct
  misc_feature 1..16: note = synthetic [barcode part1]
  source 1..16: mol_type = other DNA
tcgtattgtggtccgc

SEQ ID NO: 1841 - DNA, 16 bp, synthetic construct
  misc_feature 1..16: note = synthetic [barcode part1]
  source 1..16: mol_type = other DNA
agattataggcgcggc

SEQ ID NO: 1842 - DNA, 16 bp, synthetic construct
  misc_feature 1..16: note = synthetic [barcode part1]
  source 1..16: mol_type = other DNA
taatccgtggattgcg

SEQ ID NO: 1843 - DNA, 16 bp, synthetic construct
  misc_feature 1..16: note = synthetic [barcode part1]
  source 1..16: mol_type = other DNA
aatcctgccacttgcg

SEQ ID NO: 1844 - DNA, 16 bp, synthetic construct
  misc_feature 1..16: note = synthetic [barcode part1]
  source 1..16: mol_type = other DNA
cctcaataatcgcgtt

SEQ ID NO: 1845 - DNA, 16 bp, synthetic construct
  misc_feature 1..16: note = synthetic [barcode part1]
  source 1..16: mol_type = other DNA
cagttcaccgtgtctg

SEQ ID NO: 1846 - DNA, 16 bp, synthetic construct
  misc_feature 1..16: note = synthetic [barcode part1]
  source 1..16: mol_type = other DNA
ttgaggtgtgaacggc

SEQ ID NO: 1847 - DNA, 16 bp, synthetic construct
  misc_feature 1..16: note = synthetic [barcode part1]
  source 1..16: mol_type = other DNA
gcctgaatattgcctt

SEQ ID NO: 1848 - DNA, 16 bp, synthetic construct
  misc_feature 1..16: note = synthetic [barcode part1]
  source 1..16: mol_type = other DNA
tgcctattgttgtggt

SEQ ID NO: 1849 - DNA, 16 bp, synthetic construct
  misc_feature 1..16: note = synthetic [barcode part1]
  source 1..16: mol_type = other DNA
gaccagttgactgact

SEQ ID NO: 1850 - DNA, 16 bp, synthetic construct
  misc_feature 1..16: note = synthetic [barcode part1]
  source 1..16: mol_type = other DNA
actcgtcacgacgttc

SEQ ID NO: 1851 - DNA, 16 bp, synthetic construct
  misc_feature 1..16: note = synthetic [barcode part1]
  source 1..16: mol_type = other DNA
caccggaacaagagtc

SEQ ID NO: 1852 - DNA, 16 bp, synthetic construct
  misc_feature 1..16: note = synthetic [barcode part1]
  source 1..16: mol_type = other DNA
cggattgccttatact

SEQ ID NO: 1853 - DNA, 16 bp, synthetic construct
  misc_feature 1..16: note = synthetic [barcode part1]
  source 1..16: mol_type = other DNA
tgccgaatctatacct

SEQ ID NO: 1854 - DNA, 16 bp, synthetic construct
  misc_feature 1..16: note = synthetic [barcode part1]
  source 1..16: mol_type = other DNA
tgcggtgagatagacc

SEQ ID NO: 1855 - DNA, 16 bp, synthetic construct
  misc_feature 1..16: note = synthetic [barcode part1]
  source 1..16: mol_type = other DNA
gtaggtggtctattcg

SEQ ID NO: 1856 - DNA, 16 bp, synthetic construct
  misc_feature 1..16: note = synthetic [barcode part1]
  source 1..16: mol_type = other DNA
tcttgacgactcgcgt

SEQ ID NO: 1857 - DNA, 16 bp, synthetic construct
  misc_feature 1..16: note = synthetic [barcode part1]
  source 1..16: mol_type = other DNA
cgagtatcttctgatc

SEQ ID NO: 1858 - DNA, 16 bp, synthetic construct
  misc_feature 1..16: note = synthetic [barcode part1]
  source 1..16: mol_type = other DNA
tgacctcacgtactgc

SEQ ID NO: 1859 - DNA, 16 bp, synthetic construct
  misc_feature 1..16: note = synthetic [barcode part1]
  source 1..16: mol_type = other DNA
agttaaggttcagacg

SEQ ID NO: 1860 - DNA, 16 bp, synthetic construct
  misc_feature 1..16: note = synthetic [barcode part1]
  source 1..16: mol_type = other DNA
gactacggatcgaggt

SEQ ID NO: 1861 - DNA, 16 bp, synthetic construct
  misc_feature 1..16: note = synthetic [barcode part1]
  source 1..16: mol_type = other DNA
tagataggttccgaag

SEQ ID NO: 1862 - DNA, 16 bp, synthetic construct
  misc_feature 1..16: note = synthetic [barcode part1]
  source 1..16: mol_type = other DNA
aattcttgtgtggcct

SEQ ID NO: 1863 - DNA, 16 bp, synthetic construct
  misc_feature 1..16: note = synthetic [barcode part1]
  source 1..16: mol_type = other DNA
caatctgtagaccgtg

SEQ ID NO: 1864 - DNA, 16 bp, synthetic construct
  misc_feature 1..16: note = synthetic [barcode part1]
  source 1..16: mol_type = other DNA
cgtggcactacttgtc

SEQ ID NO: 1865 - DNA, 16 bp, synthetic construct
  misc_feature 1..16: note = synthetic [barcode part1]
  source 1..16: mol_type = other DNA
acaccttgtcgccagt

SEQ ID NO: 1866 - DNA, 16 bp, synthetic construct
  misc_feature 1..16: note = synthetic [barcode part1]
  source 1..16: mol_type = other DNA
agtaccttccacagag

SEQ ID NO: 1867 - DNA, 16 bp, synthetic construct
  misc_feature 1..16: note = synthetic [barcode part1]
  source 1..16: mol_type = other DNA
gacaccacgtatacgt

SEQ ID NO: 1868 - DNA, 16 bp, synthetic construct
  misc_feature 1..16: note = synthetic [barcode part1]
  source 1..16: mol_type = other DNA
agataggcagagtctt

SEQ ID NO: 1869 - DNA, 16 bp, synthetic construct
  misc_feature 1..16: note = synthetic [barcode part1]
  source 1..16: mol_type = other DNA
caatctccgcacaatt

SEQ ID NO: 1870 - DNA, 16 bp, synthetic construct
  misc_feature 1..16: note = synthetic [barcode part1]
  source 1..16: mol_type = other DNA
gttacctccgcggatt

SEQ ID NO: 1871 - DNA, 16 bp, synthetic construct
  misc_feature 1..16: note = synthetic [barcode part1]
  source 1..16: mol_type = other DNA
tagaagatacgtggtc

SEQ ID NO: 1872 - DNA, 16 bp, synthetic construct
  misc_feature 1..16: note = synthetic [barcode part1]
  source 1..16: mol_type = other DNA
tgcgagttactcaggt

SEQ ID NO: 1873 - DNA, 16 bp, synthetic construct
  misc_feature 1..16: note = synthetic [barcode part1]
  source 1..16: mol_type = other DNA
ataataccgtgtgcgc

SEQ ID NO: 1874 - DNA, 16 bp, synthetic construct
  misc_feature 1..16: note = synthetic [barcode part1]
  source 1..16: mol_type = other DNA
tctacgtcaacctagt

SEQ ID NO: 1875 - DNA, 16 bp, synthetic construct
  misc_feature 1..16: note = synthetic [barcode part1]
  source 1..16: mol_type = other DNA
aggtgcaatcgttaag

SEQ ID NO: 1876 - DNA, 16 bp, synthetic construct
  misc_feature 1..16: note = synthetic [barcode part1]
  source 1..16: mol_type = other DNA
tacaccacagtgtacg

SEQ ID NO: 1877 - DNA, 16 bp, synthetic construct
  misc_feature 1..16: note = synthetic [barcode part1]
  source 1..16: mol_type = other DNA
cgtcgtcagtgtacct

SEQ ID NO: 1878 - DNA, 16 bp, synthetic construct
  misc_feature 1..16: note = synthetic [barcode part1]
  source 1..16: mol_type = other DNA
gtgtggtagaactagt

SEQ ID NO: 1879 - DNA, 16 bp, synthetic construct
  misc_feature 1..16: note = synthetic [barcode part1]
  source 1..16: mol_type = other DNA
cacggcaagtaggtac

SEQ ID NO: 1880 - DNA, 16 bp, synthetic construct
  misc_feature 1..16: note = synthetic [barcode part1]
  source 1..16: mol_type = other DNA
gagttcaatcttctgc

SEQ ID NO: 1881 - DNA, 16 bp, synthetic construct
  misc_feature 1..16: note = synthetic [barcode part1]
  source 1..16: mol_type = other DNA
taatcgcaacgtaccg

SEQ ID NO: 1882 - DNA, 16 bp, synthetic construct
  misc_feature 1..16: note = synthetic [barcode part1]
  source 1..16: mol_type = other DNA
cgtagataggcagtgc

SEQ ID NO: 1883 - DNA, 16 bp, synthetic construct
  misc_feature 1..16: note = synthetic [barcode part1]
  source 1..16: mol_type = other DNA
agaccaccaccagatt

SEQ ID NO: 1884 - DNA, 16 bp, synthetic construct
  misc_feature 1..16: note = synthetic [barcode part1]
  source 1..16: mol_type = other DNA
attccacagtgcactt

SEQ ID NO: 1885 - DNA, 16 bp, synthetic construct
  misc_feature 1..16: note = synthetic [barcode part1]
  source 1..16: mol_type = other DNA
gtccaatctggtaacg

SEQ ID NO: 1886 - DNA, 16 bp, synthetic construct
  misc_feature 1..16: note = synthetic [barcode part1]
  source 1..16: mol_type = other DNA
gagagacaacgtattc

SEQ ID NO: 1887 - DNA, 16 bp, synthetic construct
  misc_feature 1..16: note = synthetic [barcode part1]
  source 1..16: mol_type = other DNA
tcacgaggttcaggtt

SEQ ID NO: 1888 - DNA, 16 bp, synthetic construct
  misc_feature 1..16: note = synthetic [barcode part1]
  source 1..16: mol_type = other DNA
tggtaacgtatcttcc

SEQ ID NO: 1889 - DNA, 16 bp, synthetic construct
  misc_feature 1..16: note = synthetic [barcode part1]
  source 1..16: mol_type = other DNA
gttcctgtgttgaatc

SEQ ID NO: 1890 - DNA, 16 bp, synthetic construct
  misc_feature 1..16: note = synthetic [barcode part1]
  source 1..16: mol_type = other DNA
actatcttctaggcac

SEQ ID NO: 1891 - DNA, 16 bp, synthetic construct
  misc_feature 1..16: note = synthetic [barcode part1]
  source 1..16: mol_type = other DNA
tcgtagactgttgttc

SEQ ID NO: 1892 - DNA, 16 bp, synthetic construct
  misc_feature 1..16: note = synthetic [barcode part1]
  source 1..16: mol_type = other DNA
cgatctacgaagatag

SEQ ID NO: 1893 - DNA, 16 bp, synthetic construct
  misc_feature 1..16: note = synthetic [barcode part1]
  source 1..16: mol_type = other DNA
tacagtccacaggttg

SEQ ID NO: 1894 - DNA, 16 bp, synthetic construct
  misc_feature 1..16: note = synthetic [barcode part1]
  source 1..16: mol_type = other DNA
tgaagattaccgagtg

SEQ ID NO: 1895 - DNA, 16 bp, synthetic construct
  misc_feature 1..16: note = synthetic [barcode part1]
  source 1..16: mol_type = other DNA
ccttattcttggacag

SEQ ID NO: 1896 - DNA, 16 bp, synthetic construct
  misc_feature 1..16: note = synthetic [barcode part1]
  source 1..16: mol_type = other DNA
cgcacttggtagttcc

SEQ ID NO: 1897 - DNA, 16 bp, synthetic construct
  misc_feature 1..16: note = synthetic [barcode part1]
  source 1..16: mol_type = other DNA
gtaattatcttccggc

SEQ ID NO: 1898 - DNA, 16 bp, synthetic construct
  misc_feature 1..16: note = synthetic [barcode part1]
  source 1..16: mol_type = other DNA
gaacagaacagacggt

SEQ ID NO: 1899 - DNA, 16 bp, synthetic construct
  misc_feature 1..16: note = synthetic [barcode part1]
  source 1..16: mol_type = other DNA
agattagtgcgtagtg

SEQ ID NO: 1900 - DNA, 16 bp, synthetic construct
  misc_feature 1..16: note = synthetic [barcode part1]
  source 1..16: mol_type = other DNA
actcggactcaagtgt

SEQ ID NO: 1901 - DNA, 16 bp, synthetic construct
  misc_feature 1..16: note = synthetic [barcode part1]
  source 1..16: mol_type = other DNA
gtggtacctgagatct

SEQ ID NO: 1902 - DNA, 16 bp, synthetic construct
  misc_feature 1..16: note = synthetic [barcode part1]
  source 1..16: mol_type = other DNA
cctcacacaacaattc

SEQ ID NO: 1903 - DNA, 16 bp, synthetic construct
  misc_feature 1..16: note = synthetic [barcode part1]
  source 1..16: mol_type = other DNA
agatcggtcctagttg

SEQ ID NO: 1904 - DNA, 16 bp, synthetic construct
  misc_feature 1..16: note = synthetic [barcode part1]
  source 1..16: mol_type = other DNA
taattgtggcgtgtcg

SEQ ID NO: 1905 - DNA, 16 bp, synthetic construct
  misc_feature 1..16: note = synthetic [barcode part1]
  source 1..16: mol_type = other DNA
gtaagatcgagtatcg

SEQ ID NO: 1906 - DNA, 16 bp, synthetic construct
  misc_feature 1..16: note = synthetic [barcode part1]
  source 1..16: mol_type = other DNA
cctgtgccgacaatct

SEQ ID NO: 1907 - DNA, 16 bp, synthetic construct
  misc_feature 1..16: note = synthetic [barcode part1]
  source 1..16: mol_type = other DNA
aactcgagactgtcac

SEQ ID NO: 1908 - DNA, 16 bp, synthetic construct
  misc_feature 1..16: note = synthetic [barcode part1]
  source 1..16: mol_type = other DNA
gttcgtcggtaagtac

SEQ ID NO: 1909 - DNA, 16 bp, synthetic construct
  misc_feature 1..16: note = synthetic [barcode part1]
  source 1..16: mol_type = other DNA
agtggcacgttcgaag

SEQ ID NO: 1910 - DNA, 16 bp, synthetic construct
  misc_feature 1..16: note = synthetic [barcode part1]
  source 1..16: mol_type = other DNA
taccacttgtcaacgt

SEQ ID NO: 1911 - DNA, 16 bp, synthetic construct
  misc_feature 1..16: note = synthetic [barcode part1]
  source 1..16: mol_type = other DNA
cgattagaccgtagtc

SEQ ID NO: 1912 - DNA, 16 bp, synthetic construct
  misc_feature 1..16: note = synthetic [barcode part1]
  source 1..16: mol_type = other DNA
actgcgaccgcctatt

SEQ ID NO: 1913 - DNA, 16 bp, synthetic construct
  misc_feature 1..16: note = synthetic [barcode part1]
  source 1..16: mol_type = other DNA
tctgtccgaactccag

SEQ ID NO: 1914 - DNA, 16 bp, synthetic construct
  misc_feature 1..16: note = synthetic [barcode part1]
  source 1..16: mol_type = other DNA
tgacgcaatactcggt

SEQ ID NO: 1915 - DNA, 16 bp, synthetic construct
  misc_feature 1..16: note = synthetic [barcode part1]
  source 1..16: mol_type = other DNA
tgtgtcagaggtcgag

SEQ ID NO: 1916 - DNA, 16 bp, synthetic construct
  misc_feature 1..16: note = synthetic [barcode part1]
  source 1..16: mol_type = other DNA
ccttcggtgcgtaact

SEQ ID NO: 1917 - DNA, 16 bp, synthetic construct
  misc_feature 1..16: note = synthetic [barcode part1]
  source 1..16: mol_type = other DNA
tctaacgttgtgtctg

SEQ ID NO: 1918 - DNA, 16 bp, synthetic construct
  misc_feature 1..16: note = synthetic [barcode part1]
  source 1..16: mol_type = other DNA
tgagtatcgcagacct

SEQ ID NO: 1919 - DNA, 16 bp, synthetic construct
  misc_feature 1..16: note = synthetic [barcode part1]
  source 1..16: mol_type = other DNA
gtcctcagtggtctac

SEQ ID NO: 1920 - DNA, 16 bp, synthetic construct
  misc_feature 1..16: note = synthetic [barcode part1]
  source 1..16: mol_type = other DNA
accgtattaacgagag

SEQ ID NO: 1921 - DNA, 16 bp, synthetic construct
  misc_feature 1..16: note = synthetic [barcode part1]
  source 1..16: mol_type = other DNA
ttgcgcctgaaccact

SEQ ID NO: 1922 - DNA, 16 bp, synthetic construct
  misc_feature 1..16: note = synthetic [barcode part1]
  source 1..16: mol_type = other DNA
aagtaagaacactgcc

SEQ ID NO: 1923 - DNA, 16 bp, synthetic construct
  misc_feature 1..16: note = synthetic [barcode part1]
  source 1..16: mol_type = other DNA
gagtattgacggagtt

SEQ ID NO: 1924 - DNA, 16 bp, synthetic construct
  misc_feature 1..16: note = synthetic [barcode part1]
  source 1..16: mol_type = other DNA
gaagatagtaacctgc

SEQ ID NO: 1925 - DNA, 16 bp, synthetic construct
  misc_feature 1..16: note = synthetic [barcode part1]
  source 1..16: mol_type = other DNA
ccggagttactcactc

SEQ ID NO: 1926 - DNA, 16 bp, synthetic construct
  misc_feature 1..16: note = synthetic [barcode part1]
  source 1..16: mol_type = other DNA
atagacactgcaacag

SEQ ID NO: 1927 - DNA, 16 bp, synthetic construct
  misc_feature 1..16: note = synthetic [barcode part1]
  source 1..16: mol_type = other DNA
actctagacgtcacag

SEQ ID NO: 1928 - DNA, 16 bp, synthetic construct
  misc_feature 1..16: note = synthetic [barcode part1]
  source 1..16: mol_type = other DNA
aatccaggcacgagac

SEQ ID NO: 1929 - DNA, 16 bp, synthetic construct
  misc_feature 1..16: note = synthetic [barcode part1]
  source 1..16: mol_type = other DNA
ccaatcctccaatctc

SEQ ID NO: 1930 - DNA, 16 bp, synthetic construct
  misc_feature 1..16: note = synthetic [barcode part1]
  source 1..16: mol_type = other DNA
cgtaggtagacctact

SEQ ID NO: 1931 - DNA, 16 bp, synthetic construct
  misc_feature 1..16: note = synthetic [barcode part1]
  source 1..16: mol_type = other DNA
cctcttgtagagagtg

SEQ ID NO: 1932 - DNA, 16 bp, synthetic construct
  misc_feature 1..16: note = synthetic [barcode part1]
  source 1..16: mol_type = other DNA
ccagaaggcgtaatcg

SEQ ID NO: 1933 - DNA, 16 bp, synthetic construct
  misc_feature 1..16: note = synthetic [barcode part1]
  source 1..16: mol_type = other DNA
acgttaggagacggtc

SEQ ID NO: 1934 - DNA, 16 bp, synthetic construct
  misc_feature 1..16: note = synthetic [barcode part1]
  source 1..16: mol_type = other DNA
aatctcgtgaggttcg

SEQ ID NO: 1935 - DNA, 16 bp, synthetic construct
  misc_feature 1..16: note = synthetic [barcode part1]
  source 1..16: mol_type = other DNA
aaggtcggcacttgag

SEQ ID NO: 1936 - DNA, 16 bp, synthetic construct
  misc_feature 1..16: note = synthetic [barcode part1]
  source 1..16: mol_type = other DNA
gcgaacctcttgtcac

SEQ ID NO: 1937 - DNA, 16 bp, synthetic construct
  misc_feature 1..16: note = synthetic [barcode part1]
  source 1..16: mol_type = other DNA
acgactacaatcacgc

SEQ ID NO: 1938 - DNA, 16 bp, synthetic construct
  misc_feature 1..16: note = synthetic [barcode part1]
  source 1..16: mol_type = other DNA
tgatcgagaggttctc

SEQ ID NO: 1939 - DNA, 16 bp, synthetic construct
  misc_feature 1..16: note = synthetic [barcode part1]
  source 1..16: mol_type = other DNA
ttattgcctacgaacc

SEQ ID NO: 1940 - DNA, 16 bp, synthetic construct
  misc_feature 1..16: note = synthetic [barcode part1]
  source 1..16: mol_type = other DNA
cgacttactatactcg

SEQ ID NO: 1941 - DNA, 16 bp, synthetic construct
  misc_feature 1..16: note = synthetic [barcode part1]
  source 1..16: mol_type = other DNA
ataagtctgcaccggt

SEQ ID NO: 1942 - DNA, 16 bp, synthetic construct
  misc_feature 1..16: note = synthetic [barcode part1]
  source 1..16: mol_type = other DNA
ttggtaccaactgcag

SEQ ID NO: 1943 - DNA, 16 bp, synthetic construct
  misc_feature 1..16: note = synthetic [barcode part1]
  source 1..16: mol_type = other DNA
atctgtgcagtaagag

SEQ ID NO: 1944 - DNA, 16 bp, synthetic construct
  misc_feature 1..16: note = synthetic [barcode part1]
  source 1..16: mol_type = other DNA
gccacctgatactcgt

SEQ ID NO: 1945 - DNA, 16 bp, synthetic construct
  misc_feature 1..16: note = synthetic [barcode part1]
  source 1..16: mol_type = other DNA
ccaatctaacgcactt

SEQ ID NO: 1946 - DNA, 16 bp, synthetic construct
  misc_feature 1..16: note = synthetic [barcode part1]
  source 1..16: mol_type = other DNA
tgagattccgagacct

SEQ ID NO: 1947 - DNA, 16 bp, synthetic construct
  misc_feature 1..16: note = synthetic [barcode part1]
  source 1..16: mol_type = other DNA
acacaggtaaggacag

SEQ ID NO: 1948 - DNA, 16 bp, synthetic construct
  misc_feature 1..16: note = synthetic [barcode part1]
  source 1..16: mol_type = other DNA
taagtcgaactcggtc

SEQ ID NO: 1949 - DNA, 16 bp, synthetic construct
  misc_feature 1..16: note = synthetic [barcode part1]
  source 1..16: mol_type = other DNA
caccactacctcttac

SEQ ID NO: 1950 - DNA, 16 bp, synthetic construct
  misc_feature 1..16: note = synthetic [barcode part1]
  source 1..16: mol_type = other DNA
actattcgtccgcgac

SEQ ID NO: 1951 - DNA, 16 bp, synthetic construct
  misc_feature 1..16: note = synthetic [barcode part1]
  source 1..16: mol_type = other DNA
tagatccggacaatag

SEQ ID NO: 1952 - DNA, 16 bp, synthetic construct
  misc_feature 1..16: note = synthetic [barcode part1]
  source 1..16: mol_type = other DNA
cggttagttgactggt

SEQ ID NO: 1953 - DNA, 16 bp, synthetic construct
  misc_feature 1..16: note = synthetic [barcode part1]
  source 1..16: mol_type = other DNA
atctacgcctctgacg

SEQ ID NO: 1954 - DNA, 16 bp, synthetic construct
  misc_feature 1..16: note = synthetic [barcode part1]
  source 1..16: mol_type = other DNA
agttaactggcgtcgt

SEQ ID NO: 1955 - DNA, 16 bp, synthetic construct
  misc_feature 1..16: note = synthetic [barcode part1]
  source 1..16: mol_type = other DNA
aagacgataggtgtct

SEQ ID NO: 1956 - DNA, 16 bp, synthetic construct
  misc_feature 1..16: note = synthetic [barcode part1]
  source 1..16: mol_type = other DNA
tctcctcaagaggagt

SEQ ID NO: 1957 - DNA, 16 bp, synthetic construct
  misc_feature 1..16: note = synthetic [barcode part1]
  source 1..16: mol_type = other DNA
atacaagtccgcactg

SEQ ID NO: 1958 - DNA, 16 bp, synthetic construct
  misc_feature 1..16: note = synthetic [barcode part1]
  source 1..16: mol_type = other DNA
tgcgagattagtagtg

SEQ ID NO: 1959 - DNA, 16 bp, synthetic construct
  misc_feature 1..16: note = synthetic [barcode part1]
  source 1..16: mol_type = other DNA
cgcaataccgttcacc

SEQ ID NO: 1960 - DNA, 16 bp, synthetic construct
  misc_feature 1..16: note = synthetic [barcode part1]
  source 1..16: mol_type = other DNA
acagttaacgccgact

SEQ ID NO: 1961 - DNA, 16 bp, synthetic construct
  misc_feature 1..16: note = synthetic [barcode part1]
  source 1..16: mol_type = other DNA
gttgccggtactcttg

SEQ ID NO: 1962 - DNA, 16 bp, synthetic construct
  misc_feature 1..16: note = synthetic [barcode part1]
  source 1..16: mol_type = other DNA
aaggaacaggtacctt

SEQ ID NO: 1963 - DNA, 16 bp, synthetic construct
  misc_feature 1..16: note = synthetic [barcode part1]
  source 1..16: mol_type = other DNA
gtctgcgatcactctg

SEQ ID NO: 1964 - DNA, 16 bp, synthetic construct
  misc_feature 1..16: note = synthetic [barcode part1]
  source 1..16: mol_type = other DNA
tgaacgtcctctgacc

SEQ ID NO: 1965 - DNA, 16 bp, synthetic construct
  misc_feature 1..16: note = synthetic [barcode part1]
  source 1..16: mol_type = other DNA
cgaagtggcaactgtg

SEQ ID NO: 1966 - DNA, 16 bp, synthetic construct
  misc_feature 1..16: note = synthetic [barcode part1]
  source 1..16: mol_type = other DNA
tctgtcgaggagttac

SEQ ID NO: 1967 - DNA, 16 bp, synthetic construct
  misc_feature 1..16: note = synthetic [barcode part1]
  source 1..16: mol_type = other DNA
gaaggacgatatactc

SEQ ID NO: 1968 - DNA, 16 bp, synthetic construct
  misc_feature 1..16: note = synthetic [barcode part1]
  source 1..16: mol_type = other DNA
atcgatctacgcacag

SEQ ID NO: 1969 - DNA, 16 bp, synthetic construct
  misc_feature 1..16: note = synthetic [barcode part1]
  source 1..16: mol_type = other DNA
gtgccgtgtaggtaag

SEQ ID NO: 1970 - DNA, 16 bp, synthetic construct
  misc_feature 1..16: note = synthetic [barcode part1]
  source 1..16: mol_type = other DNA
gcaagttcaataggac

SEQ ID NO: 1971 - DNA, 16 bp, synthetic construct
  misc_feature 1..16: note = synthetic [barcode part1]
  source 1..16: mol_type = other DNA
aatcctgcacctaccg

SEQ ID NO: 1972 - DNA, 16 bp, synthetic construct
  misc_feature 1..16: note = synthetic [barcode part1]
  source 1..16: mol_type = other DNA
atcggattatctccac

SEQ ID NO: 1973 - DNA, 16 bp, synthetic construct
  misc_feature 1..16: note = synthetic [barcode part1]
  source 1..16: mol_type = other DNA
ttccagatactgcgag

SEQ ID NO: 1974 - DNA, 16 bp, synthetic construct
  misc_feature 1..16: note = synthetic [barcode part1]
  source 1..16: mol_type = other DNA
taacggcggcctaatt

SEQ ID NO: 1975 - DNA, 16 bp, synthetic construct
  misc_feature 1..16: note = synthetic [barcode part1]
  source 1..16: mol_type = other DNA
gtctggatactcgagt

SEQ ID NO: 1976 - DNA, 16 bp, synthetic construct
  misc_feature 1..16: note = synthetic [barcode part1]
  source 1..16: mol_type = other DNA
tggagttcggttaacc

SEQ ID NO: 1977 - DNA, 16 bp, synthetic construct
  misc_feature 1..16: note = synthetic [barcode part1]
  source 1..16: mol_type = other DNA
tatccgcggtgttacc

SEQ ID NO: 1978 - DNA, 16 bp, synthetic construct
  misc_feature 1..16: note = synthetic [barcode part1]
  source 1..16: mol_type = other DNA
ttgtatcacagtctgc

SEQ ID NO: 1979 - DNA, 16 bp, synthetic construct
  misc_feature 1..16: note = synthetic [barcode part1]
  source 1..16: mol_type = other DNA
gttggagatattggtg

SEQ ID NO: 1980 - DNA, 16 bp, synthetic construct
  misc_feature 1..16: note = synthetic [barcode part1]
  source 1..16: mol_type = other DNA
actgtctccgcgaact

SEQ ID NO: 1981 - DNA, 16 bp, synthetic construct
  misc_feature 1..16: note = synthetic [barcode part1]
  source 1..16: mol_type = other DNA
cgtatcaatcacgcag

SEQ ID NO: 1982 - DNA, 16 bp, synthetic construct
  misc_feature 1..16: note = synthetic [barcode part1]
  source 1..16: mol_type = other DNA
ccaggcagatatctac

SEQ ID NO: 1983 - DNA, 16 bp, synthetic construct
  misc_feature 1..16: note = synthetic [barcode part1]
  source 1..16: mol_type = other DNA
aagtgtacgacgaccg

SEQ ID NO: 1984 - DNA, 16 bp, synthetic construct
  misc_feature 1..16: note = synthetic [barcode part1]
  source 1..16: mol_type = other DNA
tctacgccaatccgac

SEQ ID NO: 1985 - DNA, 16 bp, synthetic construct
  misc_feature 1..16: note = synthetic [barcode part1]
  source 1..16: mol_type = other DNA
cagttaggccacaatc

SEQ ID NO: 1986 - DNA, 16 bp, synthetic construct
  misc_feature 1..16: note = synthetic [barcode part1]
  source 1..16: mol_type = other DNA
tgacagtcaacttggc

SEQ ID NO: 1987 - DNA, 16 bp, synthetic construct
  misc_feature 1..16: note = synthetic [barcode part1]
  source 1..16: mol_type = other DNA
attccttccttccgag

SEQ ID NO: 1988 - DNA, 16 bp, synthetic construct
  misc_feature 1..16: note = synthetic [barcode part1]
  source 1..16: mol_type = other DNA
caactgagttgtgacc

SEQ ID NO: 1989 - DNA, 16 bp, synthetic construct
  misc_feature 1..16: note = synthetic [barcode part1]
  source 1..16: mol_type = other DNA
tctacgccgactcaac

SEQ ID NO: 1990 - DNA, 16 bp, synthetic construct
  misc_feature 1..16: note = synthetic [barcode part1]
  source 1..16: mol_type = other DNA
gtcctaattccaggag

SEQ ID NO: 1991 - DNA, 16 bp, synthetic construct
  misc_feature 1..16: note = synthetic [barcode part1]
  source 1..16: mol_type = other DNA
gtacaatccgatctct

SEQ ID NO: 1992 - DNA, 16 bp, synthetic construct
  misc_feature 1..16: note = synthetic [barcode part1]
  source 1..16: mol_type = other DNA
cggtaagaagtccgtg

SEQ ID NO: 1993 - DNA, 16 bp, synthetic construct
  misc_feature 1..16: note = synthetic [barcode part1]
  source 1..16: mol_type = other DNA
tgtagtctgacaagag

SEQ ID NO: 1994 - DNA, 16 bp, synthetic construct
  misc_feature 1..16: note = synthetic [barcode part1]
  source 1..16: mol_type = other DNA
acgtcagttaacgcgt

SEQ ID NO: 1995 - DNA, 16 bp, synthetic construct
  misc_feature 1..16: note = synthetic [barcode part1]
  source 1..16: mol_type = other DNA
gtctcgcagacacctt

SEQ ID NO: 1996 - DNA, 16 bp, synthetic construct
  misc_feature 1..16: note = synthetic [barcode part1]
  source 1..16: mol_type = other DNA
tggtcgacagtactgt

SEQ ID NO: 1997 - DNA, 16 bp, synthetic construct
  misc_feature 1..16: note = synthetic [barcode part1]
  source 1..16: mol_type = other DNA
gtccttccgtgactag

SEQ ID NO: 1998 - DNA, 16 bp, synthetic construct
  misc_feature 1..16: note = synthetic [barcode part1]
  source 1..16: mol_type = other DNA
tcgtcacactctactc

SEQ ID NO: 1999 - DNA, 16 bp, synthetic construct
  misc_feature 1..16: note = synthetic [barcode part1]
  source 1..16: mol_type = other DNA
tgtgaaccaagtgtcc

SEQ ID NO: 2000 - DNA, 16 bp, synthetic construct
  misc_feature 1..16: note = synthetic [barcode part1]
  source 1..16: mol_type = other DNA
gtacacgattgcgact

SEQ ID NO: 2001 - DNA, 16 bp, synthetic construct
  misc_feature 1..16: note = synthetic [barcode part1]
  source 1..16: mol_type = other DNA
ttctgcctggacactg

SEQ ID NO: 2002 - DNA, 16 bp, synthetic construct
  misc_feature 1..16: note = synthetic [barcode part1]
  source 1..16: mol_type = other DNA
ttctggtgcgcgatct

SEQ ID NO: 2003 - DNA, 16 bp, synthetic construct
  misc_feature 1..16: note = synthetic [barcode part1]
  source 1..16: mol_type = other DNA
actaacgccgttgtcc

SEQ ID NO: 2004 - DNA, 16 bp, synthetic construct
  misc_feature 1..16: note = synthetic [barcode part1]
  source 1..16: mol_type = other DNA
cgacgactagtaatcc

SEQ ID NO: 2005 - DNA, 16 bp, synthetic construct
  misc_feature 1..16: note = synthetic [barcode part1]
  source 1..16: mol_type = other DNA
ttggtgacgtctccac

SEQ ID NO: 2006 - DNA, 16 bp, synthetic construct
  misc_feature 1..16: note = synthetic [barcode part1]
  source 1..16: mol_type = other DNA
tctcttatccgatccg

SEQ ID NO: 2007 - DNA, 16 bp, synthetic construct
  misc_feature 1..16: note = synthetic [barcode part1]
  source 1..16: mol_type = other DNA
tccgacctaacgtatt

SEQ ID NO: 2008 - DNA, 16 bp, synthetic construct
  misc_feature 1..16: note = synthetic [barcode part1]
  source 1..16: mol_type = other DNA
acaaccagtcacacac

SEQ ID NO: 2009 - DNA, 16 bp, synthetic construct
  misc_feature 1..16: note = synthetic [barcode part1]
  source 1..16: mol_type = other DNA
tcaacggacaactcgt

SEQ ID NO: 2010 - DNA, 16 bp, synthetic construct
  misc_feature 1..16: note = synthetic [barcode part1]
  source 1..16: mol_type = other DNA
gttattaggcctggtg

SEQ ID NO: 2011 - DNA, 16 bp, synthetic construct
  misc_feature 1..16: note = synthetic [barcode part1]
  source 1..16: mol_type = other DNA
ttagttcgtctcctgc

SEQ ID NO: 2012 - DNA, 16 bp, synthetic construct
  misc_feature 1..16: note = synthetic [barcode part1]
  source 1..16: mol_type = other DNA
tgacaactgacgatcc

SEQ ID NO: 2013 - DNA, 16 bp, synthetic construct
  misc_feature 1..16: note = synthetic [barcode part1]
  source 1..16: mol_type = other DNA
accacagacttatcct

SEQ ID NO: 2014 - DNA, 16 bp, synthetic construct
  misc_feature 1..16: note = synthetic [barcode part1]
  source 1..16: mol_type = other DNA
gcacgacgattcttcc

SEQ ID NO: 2015 - DNA, 16 bp, synthetic construct
  misc_feature 1..16: note = synthetic [barcode part1]
  source 1..16: mol_type = other DNA
gtgactggccgatatt

SEQ ID NO: 2016 - DNA, 16 bp, synthetic construct
  misc_feature 1..16: note = synthetic [barcode part1]
  source 1..16: mol_type = other DNA
tcgagttccagatcag

SEQ ID NO: 2017 - DNA, 16 bp, synthetic construct
  misc_feature 1..16: note = synthetic [barcode part1]
  source 1..16: mol_type = other DNA
attggaatcggttccg

SEQ ID NO: 2018 - DNA, 16 bp, synthetic construct
  misc_feature 1..16: note = synthetic [barcode part1]
  source 1..16: mol_type = other DNA
atctgccacagacaac

SEQ ID NO: 2019 - DNA, 16 bp, synthetic construct
  misc_feature 1..16: note = synthetic [barcode part1]
  source 1..16: mol_type = other DNA
ttggtccagtgcactc

SEQ ID NO: 2020 - DNA, 16 bp, synthetic construct
  misc_feature 1..16: note = synthetic [barcode part1]
  source 1..16: mol_type = other DNA
ccttgtcaagtggtag

SEQ ID NO: 2021 - DNA, 16 bp, synthetic construct
  misc_feature 1..16: note = synthetic [barcode part1]
  source 1..16: mol_type = other DNA
tggaagacctcaacct

SEQ ID NO: 2022 - DNA, 16 bp, synthetic construct
  misc_feature 1..16: note = synthetic [barcode part1]
  source 1..16: mol_type = other DNA
gcacttaggatctgtg

SEQ ID NO: 2023 - DNA, 16 bp, synthetic construct
  misc_feature 1..16: note = synthetic [barcode part1]
  source 1..16: mol_type = other DNA
ttactcacctagaacc

SEQ ID NO: 2024 - DNA, 16 bp, synthetic construct
  misc_feature 1..16: note = synthetic [barcode part1]
  source 1..16: mol_type = other DNA
atactctcttccgcac

SEQ ID NO: 2025 - DNA, 16 bp, synthetic construct
  misc_feature 1..16: note = synthetic [barcode part1]
  source 1..16: mol_type = other DNA
tctgcaagtagatccg

SEQ ID NO: 2026 - DNA, 16 bp, synthetic construct
  misc_feature 1..16: note = synthetic [barcode part1]
  source 1..16: mol_type = other DNA
tgtacgtaccaaccag

SEQ ID NO: 2027 - DNA, 16 bp, synthetic construct
  misc_feature 1..16: note = synthetic [barcode part1]
  source 1..16: mol_type = other DNA
caacggtagaggcact

SEQ ID NO: 2028 - DNA, 16 bp, synthetic construct
  misc_feature 1..16: note = synthetic [barcode part1]
  source 1..16: mol_type = other DNA
gaccggtgattaatcc

SEQ ID NO: 2029 - DNA, 16 bp, synthetic construct
  misc_feature 1..16: note = synthetic [barcode part1]
  source 1..16: mol_type = other DNA
tgtccacctgcgatac

SEQ ID NO: 2030 - DNA, 16 bp, synthetic construct
  misc_feature 1..16: note = synthetic [barcode part1]
  source 1..16: mol_type = other DNA
aactggttcgaccaac

SEQ ID NO: 2031 - DNA, 16 bp, synthetic construct
  misc_feature 1..16: note = synthetic [barcode part1]
  source 1..16: mol_type = other DNA
cgccaaggaactattc

SEQ ID NO: 2032 - DNA, 16 bp, synthetic construct
  misc_feature 1..16: note = synthetic [barcode part1]
  source 1..16: mol_type = other DNA
cacggaaccgaatcag

SEQ ID NO: 2033 - DNA, 16 bp, synthetic construct
  misc_feature 1..16: note = synthetic [barcode part1]
  source 1..16: mol_type = other DNA
tccaatctgtagtcgt

SEQ ID NO: 2034 - DNA, 16 bp, synthetic construct
  misc_feature 1..16: note = synthetic [barcode part1]
  source 1..16: mol_type = other DNA
aaccgtgttagaaggt

SEQ ID NO: 2035 - DNA, 16 bp, synthetic construct
  misc_feature 1..16: note = synthetic [barcode part1]
  source 1..16: mol_type = other DNA
ccacgttaagttactc

SEQ ID NO: 2036 - DNA, 16 bp, synthetic construct
  misc_feature 1..16: note = synthetic [barcode part1]
  source 1..16: mol_type = other DNA
attgacgtgaaggatc

SEQ ID NO: 2037 - DNA, 16 bp, synthetic construct
  misc_feature 1..16: note = synthetic [barcode part1]
  source 1..16: mol_type = other DNA
taggtgtcagtgaggc

SEQ ID NO: 2038 - DNA, 16 bp, synthetic construct
  misc_feature 1..16: note = synthetic [barcode part1]
  source 1..16: mol_type = other DNA
gcgagagaatcaccgt

SEQ ID NO: 2039 - DNA, 16 bp, synthetic construct
  misc_feature 1..16: note = synthetic [barcode part1]
  source 1..16: mol_type = other DNA
agacactatccgcaac

SEQ ID NO: 2040 - DNA, 16 bp, synthetic construct
  misc_feature 1..16: note = synthetic [barcode part1]
  source 1..16: mol_type = other DNA
ttaactccggatctac

SEQ ID NO: 2041 - DNA, 16 bp, synthetic construct
  misc_feature 1..16: note = synthetic [barcode part1]
  source 1..16: mol_type = other DNA
aaccgtggagaggtct

SEQ ID NO: 2042 - DNA, 16 bp, synthetic construct
  misc_feature 1..16: note = synthetic [barcode part1]
  source 1..16: mol_type = other DNA
tgtgagtgcggtagac

SEQ ID NO: 2043 - DNA, 16 bp, synthetic construct
  misc_feature 1..16: note = synthetic [barcode part1]
  source 1..16: mol_type = other DNA
aaccacacagtacgtc

SEQ ID NO: 2044 - DNA, 16 bp, synthetic construct
  misc_feature 1..16: note = synthetic [barcode part1]
  source 1..16: mol_type = other DNA
gtgccggaattgtgtt

SEQ ID NO: 2045 - DNA, 16 bp, synthetic construct
  misc_feature 1..16: note = synthetic [barcode part1]
  source 1..16: mol_type = other DNA
aacctgtatcctatcg

SEQ ID NO: 2046 - DNA, 16 bp, synthetic construct
  misc_feature 1..16: note = synthetic [barcode part1]
  source 1..16: mol_type = other DNA
aaccgataaccggttc

SEQ ID NO: 2047 - DNA, 16 bp, synthetic construct
  misc_feature 1..16: note = synthetic [barcode part1]
  source 1..16: mol_type = other DNA
caggtcgaactactac

SEQ ID NO: 2048 - DNA, 16 bp, synthetic construct
  misc_feature 1..16: note = synthetic [barcode part1]
  source 1..16: mol_type = other DNA
tcctagattgcgacag

SEQ ID NO: 2049 - DNA, 16 bp, synthetic construct
  misc_feature 1..16: note = synthetic [barcode part1]
  source 1..16: mol_type = other DNA
acggtagagtgcgttg

SEQ ID NO: 2050 - DNA, 16 bp, synthetic construct
  misc_feature 1..16: note = synthetic [barcode part1]
  source 1..16: mol_type = other DNA
tgtcagtcctctcgag

SEQ ID NO: 2051 - DNA, 16 bp, synthetic construct
  misc_feature 1..16: note = synthetic [barcode part1]
  source 1..16: mol_type = other DNA
cacggataacgtctgt

SEQ ID NO: 2052 - DNA, 16 bp, synthetic construct
  misc_feature 1..16: note = synthetic [barcode part1]
  source 1..16: mol_type = other DNA
atccgtacctcgtcag

SEQ ID NO: 2053 - DNA, 16 bp, synthetic construct
  misc_feature 1..16: note = synthetic [barcode part1]
  source 1..16: mol_type = other DNA
caccgaagagtatagt

SEQ ID NO: 2054 - DNA, 16 bp, synthetic construct
  misc_feature 1..16: note = synthetic [barcode part1]
  source 1..16: mol_type = other DNA
attgacactcgatcct

SEQ ID NO: 2055 - DNA, 16 bp, synthetic construct
  misc_feature 1..16: note = synthetic [barcode part1]
  source 1..16: mol_type = other DNA
gtggttacttcctggc

SEQ ID NO: 2056 - DNA, 16 bp, synthetic construct
  misc_feature 1..16: note = synthetic [barcode part1]
  source 1..16: mol_type = other DNA
ttcgcctattcgttcg

SEQ ID NO: 2057 - DNA, 16 bp, synthetic construct
  misc_feature 1..16: note = synthetic [barcode part1]
  source 1..16: mol_type = other DNA
ccagacctgtattccg

SEQ ID NO: 2058 - DNA, 16 bp, synthetic construct
  misc_feature 1..16: note = synthetic [barcode part1]
  source 1..16: mol_type = other DNA
caaggttagtcctgac

SEQ ID NO: 2059 - DNA, 16 bp, synthetic construct
  misc_feature 1..16: note = synthetic [barcode part1]
  source 1..16: mol_type = other DNA
aacggagtgtggactc

SEQ ID NO: 2060 - DNA, 16 bp, synthetic construct
  misc_feature 1..16: note = synthetic [barcode part1]
  source 1..16: mol_type = other DNA
agttgcactagagaac

SEQ ID NO: 2061 - DNA, 16 bp, synthetic construct
  misc_feature 1..16: note = synthetic [barcode part1]
  source 1..16: mol_type = other DNA
acgactgttggcctct

SEQ ID NO: 2062 - DNA, 16 bp, synthetic construct
  misc_feature 1..16: note = synthetic [barcode part1]
  source 1..16: mol_type = other DNA
ttatcaccaggtatcc

SEQ ID NO: 2063 - DNA, 16 bp, synthetic construct
  misc_feature 1..16: note = synthetic [barcode part1]
  source 1..16: mol_type = other DNA
aagtggacgaacaggt

SEQ ID NO: 2064 - DNA, 16 bp, synthetic construct
  misc_feature 1..16: note = synthetic [barcode part1]
  source 1..16: mol_type = other DNA
tgccgactcaatcctg

SEQ ID NO: 2065 - DNA, 16 bp, synthetic construct
  misc_feature 1..16: note = synthetic [barcode part1]
  source 1..16: mol_type = other DNA
acttatctggacggac

SEQ ID NO: 2066 - DNA, 16 bp, synthetic construct
  misc_feature 1..16: note = synthetic [barcode part1]
  source 1..16: mol_type = other DNA
gttgcgagataccact

SEQ ID NO: 2067 - DNA, 16 bp, synthetic construct
  misc_feature 1..16: note = synthetic [barcode part1]
  source 1..16: mol_type = other DNA
tgacgataagagtacc

SEQ ID NO: 2068 - DNA, 16 bp, synthetic construct
  misc_feature 1..16: note = synthetic [barcode part1]
  source 1..16: mol_type = other DNA
gtagaatcgagtactg

SEQ ID NO: 2069 - DNA, 16 bp, synthetic construct
  misc_feature 1..16: note = synthetic [barcode part1]
  source 1..16: mol_type = other DNA
gtcggactaagagtgc

SEQ ID NO: 2070 - DNA, 16 bp, synthetic construct
  misc_feature 1..16: note = synthetic [barcode part1]
  source 1..16: mol_type = other DNA
gtgtaggttgttagag

SEQ ID NO: 2071 - DNA, 16 bp, synthetic construct
  misc_feature 1..16: note = synthetic [barcode part1]
  source 1..16: mol_type = other DNA
tgatacgtcaggtacc

SEQ ID NO: 2072 - DNA, 16 bp, synthetic construct
  misc_feature 1..16: note = synthetic [barcode part1]
  source 1..16: mol_type = other DNA
ttaaggcctgtccgtc

SEQ ID NO: 2073 - DNA, 16 bp, synthetic construct
  misc_feature 1..16: note = synthetic [barcode part1]
  source 1..16: mol_type = other DNA
cgagtgtcacagatct

SEQ ID NO: 2074 - DNA, 16 bp, synthetic construct
  misc_feature 1..16: note = synthetic [barcode part1]
  source 1..16: mol_type = other DNA
caactacttgccgtcg

SEQ ID NO: 2075 - DNA, 16 bp, synthetic construct
  misc_feature 1..16: note = synthetic [barcode part1]
  source 1..16: mol_type = other DNA
ttcgagtctattgtcg

SEQ ID NO: 2076 - DNA, 16 bp, synthetic construct
  misc_feature 1..16: note = synthetic [barcode part1]
  source 1..16: mol_type = other DNA
tcgcctaggtgttgtc

SEQ ID NO: 2077 - DNA, 16 bp, synthetic construct
  misc_feature 1..16: note = synthetic [barcode part1]
  source 1..16: mol_type = other DNA
atagaccgagacgacc

SEQ ID NO: 2078 - DNA, 16 bp, synthetic construct
  misc_feature 1..16: note = synthetic [barcode part1]
  source 1..16: mol_type = other DNA
tgtacgaacttcctac

SEQ ID NO: 2079 - DNA, 16 bp, synthetic construct
  misc_feature 1..16: note = synthetic [barcode part1]
  source 1..16: mol_type = other DNA
tactctggtcttgcct

SEQ ID NO: 2080 - DNA, 16 bp, synthetic construct
  misc_feature 1..16: note = synthetic [barcode part1]
  source 1..16: mol_type = other DNA
aagtcctaaggttccg

SEQ ID NO: 2081 - DNA, 16 bp, synthetic construct
  misc_feature 1..16: note = synthetic [barcode part1]
  source 1..16: mol_type = other DNA
caatcggagttccagt

SEQ ID NO: 2082 - DNA, 16 bp, synthetic construct
  misc_feature 1..16: note = synthetic [barcode part1]
  source 1..16: mol_type = other DNA
gattgcacgattgtgc

SEQ ID NO: 2083 - DNA, 16 bp, synthetic construct
  misc_feature 1..16: note = synthetic [barcode part1]
  source 1..16: mol_type = other DNA
ttgagtgagacaacac

SEQ ID NO: 2084 - DNA, 16 bp, synthetic construct
  misc_feature 1..16: note = synthetic [barcode part1]
  source 1..16: mol_type = other DNA
gtcctacacaactgcc

SEQ ID NO: 2085 - DNA, 16 bp, synthetic construct
  misc_feature 1..16: note = synthetic [barcode part1]
  source 1..16: mol_type = other DNA
tggaaccacacgtact

SEQ ID NO: 2086 - DNA, 16 bp, synthetic construct
  misc_feature 1..16: note = synthetic [barcode part1]
  source 1..16: mol_type = other DNA
acgagtccaacgaggt

SEQ ID NO: 2087 - DNA, 16 bp, synthetic construct
  misc_feature 1..16: note = synthetic [barcode part1]
  source 1..16: mol_type = other DNA
tggttcactgcgttcg

SEQ ID NO: 2088 - DNA, 16 bp, synthetic construct
  misc_feature 1..16: note = synthetic [barcode part1]
  source 1..16: mol_type = other DNA
tcttctcctctggaac

SEQ ID NO: 2089 - DNA, 16 bp, synthetic construct
  misc_feature 1..16: note = synthetic [barcode part1]
  source 1..16: mol_type = other DNA
cggtaatcacagaggc

SEQ ID NO: 2090 - DNA, 16 bp, synthetic construct
  misc_feature 1..16: note = synthetic [barcode part1]
  source 1..16: mol_type = other DNA
gtggtattcctaaggc

SEQ ID NO: 2091 - DNA, 16 bp, synthetic construct
  misc_feature 1..16: note = synthetic [barcode part1]
  source 1..16: mol_type = other DNA
tggaccgactattgac

SEQ ID NO: 2092 - DNA, 16 bp, synthetic construct
  misc_feature 1..16: note = synthetic [barcode part1]
  source 1..16: mol_type = other DNA
tactgtgcagttggtg

SEQ ID NO: 2093 - DNA, 16 bp, synthetic construct
  misc_feature 1..16: note = synthetic [barcode part1]
  source 1..16: mol_type = other DNA
agaactctcacttacc

SEQ ID NO: 2094 - DNA, 16 bp, synthetic construct
  misc_feature 1..16: note = synthetic [barcode part1]
  source 1..16: mol_type = other DNA
tgtaagtcaggcacct

SEQ ID NO: 2095 - DNA, 16 bp, synthetic construct
  misc_feature 1..16: note = synthetic [barcode part1]
  source 1..16: mol_type = other DNA
gacctcgtctactcag

SEQ ID NO: 2096 - DNA, 16 bp, synthetic construct
  misc_feature 1..16: note = synthetic [barcode part1]
  source 1..16: mol_type = other DNA
cgtacggaccttctac

SEQ ID NO: 2097 - DNA, 16 bp, synthetic construct
  misc_feature 1..16: note = synthetic [barcode part1]
  source 1..16: mol_type = other DNA
attgcactctctaacg

SEQ ID NO: 2098 - DNA, 16 bp, synthetic construct
  misc_feature 1..16: note = synthetic [barcode part1]
  source 1..16: mol_type = other DNA
gaaggacctcacagac

SEQ ID NO: 2099 - DNA, 16 bp, synthetic construct
  misc_feature 1..16: note = synthetic [barcode part1]
  source 1..16: mol_type = other DNA
actcaactcgacagtg

SEQ ID NO: 2100 - DNA, 16 bp, synthetic construct
  misc_feature 1..16: note = synthetic [barcode part1]
  source 1..16: mol_type = other DNA
tccgtcgttgacgtgt

SEQ ID NO: 2101 - DNA, 16 bp, synthetic construct
  misc_feature 1..16: note = synthetic [barcode part1]
  source 1..16: mol_type = other DNA
tctcggtccttattgc

SEQ ID NO: 2102 - DNA, 16 bp, synthetic construct
  misc_feature 1..16: note = synthetic [barcode part1]
  source 1..16: mol_type = other DNA
aatactacgtgcgtgc

SEQ ID NO: 2103 - DNA, 16 bp, synthetic construct
  misc_feature 1..16: note = synthetic [barcode part1]
  source 1..16: mol_type = other DNA
cgtacttggatcgcct

SEQ ID NO: 2104 - DNA, 16 bp, synthetic construct
  misc_feature 1..16: note = synthetic [barcode part1]
  source 1..16: mol_type = other DNA
ttgcggatcgttatct

SEQ ID NO: 2105 - DNA, 16 bp, synthetic construct
  misc_feature 1..16: note = synthetic [barcode part1]
  source 1..16: mol_type = other DNA
gagacgacttactacc

SEQ ID NO: 2106 - DNA, 16 bp, synthetic construct
  misc_feature 1..16: note = synthetic [barcode part1]
  source 1..16: mol_type = other DNA
acgtccgttgttccag

SEQ ID NO: 2107 - DNA, 16 bp, synthetic construct
  misc_feature 1..16: note = synthetic [barcode part1]
  source 1..16: mol_type = other DNA
cgtctctgaagatacg

SEQ ID NO: 2108 - DNA, 16 bp, synthetic construct
  misc_feature 1..16: note = synthetic [barcode part1]
  source 1..16: mol_type = other DNA
cgtgattgtcgccttg

SEQ ID NO: 2109 - DNA, 16 bp, synthetic construct
  misc_feature 1..16: note = synthetic [barcode part1]
  source 1..16: mol_type = other DNA
ttattgcacggtggac

SEQ ID NO: 2110 - DNA, 16 bp, synthetic construct
  misc_feature 1..16: note = synthetic [barcode part1]
  source 1..16: mol_type = other DNA
gtgactgtgtgtggtt

SEQ ID NO: 2111 - DNA, 16 bp, synthetic construct
  misc_feature 1..16: note = synthetic [barcode part1]
  source 1..16: mol_type = other DNA
cagttggtcgagactt

SEQ ID NO: 2112 - DNA, 16 bp, synthetic construct
  misc_feature 1..16: note = synthetic [barcode part1]
  source 1..16: mol_type = other DNA
cgtatcaggaattgag

SEQ ID NO: 2113 - DNA, 16 bp, synthetic construct
  misc_feature 1..16: note = synthetic [barcode part1]
  source 1..16: mol_type = other DNA
gtaacgtccggttaac

SEQ ID NO: 2114 - DNA, 16 bp, synthetic construct
  misc_feature 1..16: note = synthetic [barcode part1]
  source 1..16: mol_type = other DNA
tgttctgtgaacacct

SEQ ID NO: 2115 - DNA, 16 bp, synthetic construct
  misc_feature 1..16: note = synthetic [barcode part1]
  source 1..16: mol_type = other DNA
cggtgtccacttactg

SEQ ID NO: 2116 - DNA, 16 bp, synthetic construct
  misc_feature 1..16: note = synthetic [barcode part1]
  source 1..16: mol_type = other DNA
atcaacgccacgtaac

SEQ ID NO: 2117 - DNA, 16 bp, synthetic construct
  misc_feature 1..16: note = synthetic [barcode part1]
  source 1..16: mol_type = other DNA
tccaattatcggtacc

SEQ ID NO: 2118 - DNA, 16 bp, synthetic construct
  misc_feature 1..16: note = synthetic [barcode part1]
  source 1..16: mol_type = other DNA
tggccttcgcaattgc

SEQ ID NO: 2119 - DNA, 16 bp, synthetic construct
  misc_feature 1..16: note = synthetic [barcode part1]
  source 1..16: mol_type = other DNA
cagtgttaggtaggcg

SEQ ID NO: 2120 - DNA, 16 bp, synthetic construct
  misc_feature 1..16: note = synthetic [barcode part1]
  source 1..16: mol_type = other DNA
taacggcgatccaact

SEQ ID NO: 2121 - DNA, 16 bp, synthetic construct
  misc_feature 1..16: note = synthetic [barcode part1]
  source 1..16: mol_type = other DNA
tccttccagttccagt

SEQ ID NO: 2122 - DNA, 16 bp, synthetic construct
  misc_feature 1..16: note = synthetic [barcode part1]
  source 1..16: mol_type = other DNA
tgcggacgtaataggc

SEQ ID NO: 2123 - DNA, 16 bp, synthetic construct
  misc_feature 1..16: note = synthetic [barcode part1]
  source 1..16: mol_type = other DNA
gtcggtacgaacttgt

SEQ ID NO: 2124 - DNA, 16 bp, synthetic construct
  misc_feature 1..16: note = synthetic [barcode part1]
  source 1..16: mol_type = other DNA
caattcgtgtcagacg

SEQ ID NO: 2125 - DNA, 16 bp, synthetic construct
  misc_feature 1..16: note = synthetic [barcode part1]
  source 1..16: mol_type = other DNA
gtacgtgaactggtct

SEQ ID NO: 2126 - DNA, 16 bp, synthetic construct
  misc_feature 1..16: note = synthetic [barcode part1]
  source 1..16: mol_type = other DNA
agtaagagtcagaggc

SEQ ID NO: 2127 - DNA, 16 bp, synthetic construct
  misc_feature 1..16: note = synthetic [barcode part1]
  source 1..16: mol_type = other DNA
accgtaagatactgcc

SEQ ID NO: 2128 - DNA, 16 bp, synthetic construct
  misc_feature 1..16: note = synthetic [barcode part1]
  source 1..16: mol_type = other DNA
ccaaggtgagtaagtt

SEQ ID NO: 2129 - DNA, 16 bp, synthetic construct
  misc_feature 1..16: note = synthetic [barcode part1]
  source 1..16: mol_type = other DNA
gtcaactctaaggtcg

SEQ ID NO: 2130 - DNA, 16 bp, synthetic construct
  misc_feature 1..16: note = synthetic [barcode part1]
  source 1..16: mol_type = other DNA
cactccagtctgtgac

SEQ ID NO: 2131 - DNA, 16 bp, synthetic construct
  misc_feature 1..16: note = synthetic [barcode part1]
  source 1..16: mol_type = other DNA
caattcggacgacttg

SEQ ID NO: 2132 - DNA, 16 bp, synthetic construct
  misc_feature 1..16: note = synthetic [barcode part1]
  source 1..16: mol_type = other DNA
tcaacgaattcctacc

SEQ ID NO: 2133 - DNA, 16 bp, synthetic construct
  misc_feature 1..16: note = synthetic [barcode part1]
  source 1..16: mol_type = other DNA
acgaattcagtctcct

SEQ ID NO: 2134 - DNA, 16 bp, synthetic construct
  misc_feature 1..16: note = synthetic [barcode part1]
  source 1..16: mol_type = other DNA
cacggtacttacttgt

SEQ ID NO: 2135 - DNA, 16 bp, synthetic construct
  misc_feature 1..16: note = synthetic [barcode part1]
  source 1..16: mol_type = other DNA
tcttcctaggaccttc

SEQ ID NO: 2136 - DNA, 16 bp, synthetic construct
  misc_feature 1..16: note = synthetic [barcode part1]
  source 1..16: mol_type = other DNA
gtggacacagaacctg

SEQ ID NO: 2137 - DNA, 16 bp, synthetic construct
  misc_feature 1..16: note = synthetic [barcode part1]
  source 1..16: mol_type = other DNA
gcgttagaggaattgt

SEQ ID NO: 2138 - DNA, 16 bp, synthetic construct
  misc_feature 1..16: note = synthetic [barcode part1]
  source 1..16: mol_type = other DNA
taccagaatctctgtc

SEQ ID NO: 2139 - DNA, 16 bp, synthetic construct
  misc_feature 1..16: note = synthetic [barcode part1]
  source 1..16: mol_type = other DNA
tcgtagatctgcagac

SEQ ID NO: 2140 - DNA, 16 bp, synthetic construct
  misc_feature 1..16: note = synthetic [barcode part1]
  source 1..16: mol_type = other DNA
attgacctcggaatcg

SEQ ID NO: 2141 - DNA, 16 bp, synthetic construct
  misc_feature 1..16: note = synthetic [barcode part1]
  source 1..16: mol_type = other DNA
tcaggacaagtcctgt

SEQ ID NO: 2142 - DNA, 16 bp, synthetic construct
  misc_feature 1..16: note = synthetic [barcode part1]
  source 1..16: mol_type = other DNA
acggtaggacacgttg

SEQ ID NO: 2143 - DNA, 16 bp, synthetic construct
  misc_feature 1..16: note = synthetic [barcode part1]
  source 1..16: mol_type = other DNA
tcctcggcgtgtaact

SEQ ID NO: 2144 - DNA, 16 bp, synthetic construct
  misc_feature 1..16: note = synthetic [barcode part1]
  source 1..16: mol_type = other DNA
atctcgcggattagac

SEQ ID NO: 2145 - DNA, 16 bp, synthetic construct
  misc_feature 1..16: note = synthetic [barcode part1]
  source 1..16: mol_type = other DNA
agtgtggatagagacg

SEQ ID NO: 2146 - DNA, 16 bp, synthetic construct
  misc_feature 1..16: note = synthetic [barcode part1]
  source 1..16: mol_type = other DNA
agttggtacactgcac

SEQ ID NO: 2147 - DNA, 16 bp, synthetic construct
  misc_feature 1..16: note = synthetic [barcode part1]
  source 1..16: mol_type = other DNA
gcaattggagatcaac

SEQ ID NO: 2148 - DNA, 16 bp, synthetic construct
  misc_feature 1..16: note = synthetic [barcode part1]
  source 1..16: mol_type = other DNA
gtaactgatcgacacc

SEQ ID NO: 2149 - DNA, 16 bp, synthetic construct
  misc_feature 1..16: note = synthetic [barcode part1]
  source 1..16: mol_type = other DNA
actacgaaggtggacc

SEQ ID NO: 2150 - DNA, 16 bp, synthetic construct
  misc_feature 1..16: note = synthetic [barcode part1]
  source 1..16: mol_type = other DNA
gagacggaacagaact

SEQ ID NO: 2151 - DNA, 16 bp, synthetic construct
  misc_feature 1..16: note = synthetic [barcode part1]
  source 1..16: mol_type = other DNA
gaggtgacacctagac

SEQ ID NO: 2152 - DNA, 16 bp, synthetic construct
  misc_feature 1..16: note = synthetic [barcode part1]
  source 1..16: mol_type = other DNA
gccagtcaagaagaag

SEQ ID NO: 2153 - DNA, 16 bp, synthetic construct
  misc_feature 1..16: note = synthetic [barcode part1]
  source 1..16: mol_type = other DNA
tggatcacgtgccttc

SEQ ID NO: 2154 - DNA, 16 bp, synthetic construct
  misc_feature 1..16: note = synthetic [barcode part1]
  source 1..16: mol_type = other DNA
gtgatctcagatcacg

SEQ ID NO: 2155 - DNA, 16 bp, synthetic construct
  misc_feature 1..16: note = synthetic [barcode part1]
  source 1..16: mol_type = other DNA
gtgtgacgttgacgtt

SEQ ID NO: 2156 - DNA, 16 bp, synthetic construct
  misc_feature 1..16: note = synthetic [barcode part1]
  source 1..16: mol_type = other DNA
tattcctccgaactag

SEQ ID NO: 2157 - DNA, 16 bp, synthetic construct
  misc_feature 1..16: note = synthetic [barcode part1]
  source 1..16: mol_type = other DNA
aagtacctcgttctac

SEQ ID NO: 2158 - DNA, 16 bp, synthetic construct
  misc_feature 1..16: note = synthetic [barcode part1]
  source 1..16: mol_type = other DNA
cagatctatctcgttg

SEQ ID NO: 2159 - DNA, 16 bp, synthetic construct
  misc_feature 1..16: note = synthetic [barcode part1]
  source 1..16: mol_type = other DNA
actccactgccaacac

SEQ ID NO: 2160 - DNA, 16 bp, synthetic construct
  misc_feature 1..16: note = synthetic [barcode part1]
  source 1..16: mol_type = other DNA
gttagtcgttgcagtg

SEQ ID NO: 2161 - DNA, 16 bp, synthetic construct
  misc_feature 1..16: note = synthetic [barcode part1]
  source 1..16: mol_type = other DNA
tcttggcgttaccttc

SEQ ID NO: 2162 - DNA, 16 bp, synthetic construct
  misc_feature 1..16: note = synthetic [barcode part1]
  source 1..16: mol_type = other DNA
taaccttcgaccgcac

SEQ ID NO: 2163 - DNA, 16 bp, synthetic construct
  misc_feature 1..16: note = synthetic [barcode part1]
  source 1..16: mol_type = other DNA
ccagacaacgacaggt

SEQ ID NO: 2164 - DNA, 16 bp, synthetic construct
  misc_feature 1..16: note = synthetic [barcode part1]
  source 1..16: mol_type = other DNA
ttgtgcaacactgacg

SEQ ID NO: 2165 - DNA, 16 bp, synthetic construct
  misc_feature 1..16: note = synthetic [barcode part1]
  source 1..16: mol_type = other DNA
gtaacgcaccgtgatt

SEQ ID NO: 2166 - DNA, 16 bp, synthetic construct
  misc_feature 1..16: note = synthetic [barcode part1]
  source 1..16: mol_type = other DNA
tctacgcgttaccgac

SEQ ID NO: 2167 - DNA, 16 bp, synthetic construct
  misc_feature 1..16: note = synthetic [barcode part1]
  source 1..16: mol_type = other DNA
gttcagaacgacggac

SEQ ID NO: 2168 - DNA, 16 bp, synthetic construct
  misc_feature 1..16: note = synthetic [barcode part1]
  source 1..16: mol_type = other DNA
agtgcgacctagtgag

SEQ ID NO: 2169 - DNA, 16 bp, synthetic construct
  misc_feature 1..16: note = synthetic [barcode part1]
  source 1..16: mol_type = other DNA
gattaagttcggcctg

SEQ ID NO: 2170 - DNA, 16 bp, synthetic construct
  misc_feature 1..16: note = synthetic [barcode part1]
  source 1..16: mol_type = other DNA
aaccgcaccagaaggt

SEQ ID NO: 2171 - DNA, 16 bp, synthetic construct
  misc_feature 1..16: note = synthetic [barcode part1]
  source 1..16: mol_type = other DNA
tgtatctgtcctcgtc

SEQ ID NO: 2172 - DNA, 16 bp, synthetic construct
  misc_feature 1..16: note = synthetic [barcode part1]
  source 1..16: mol_type = other DNA
tggacttagacctacg

SEQ ID NO: 2173 - DNA, 16 bp, synthetic construct
  misc_feature 1..16: note = synthetic [barcode part1]
  source 1..16: mol_type = other DNA
cggaattgactctgac

SEQ ID NO: 2174 - DNA, 16 bp, synthetic construct
  misc_feature 1..16: note = synthetic [barcode part1]
  source 1..16: mol_type = other DNA
acacggaggcaattcg

SEQ ID NO: 2175 - DNA, 16 bp, synthetic construct
  misc_feature 1..16: note = synthetic [barcode part1]
  source 1..16: mol_type = other DNA
gacgtacaattgaggt

SEQ ID NO: 2176 - DNA, 16 bp, synthetic construct
  misc_feature 1..16: note = synthetic [barcode part1]
  source 1..16: mol_type = other DNA
agttggttcgagactc

SEQ ID NO: 2177 - DNA, 16 bp, synthetic construct
  misc_feature 1..16: note = synthetic [barcode part1]
  source 1..16: mol_type = other DNA
acaggaattgacgact

SEQ ID NO: 2178 - DNA, 16 bp, synthetic construct
  misc_feature 1..16: note = synthetic [barcode part1]
  source 1..16: mol_type = other DNA
cacactctcactggac

SEQ ID NO: 2179 - DNA, 16 bp, synthetic construct
  misc_feature 1..16: note = synthetic [barcode part1]
  source 1..16: mol_type = other DNA
atccggacggatactt

SEQ ID NO: 2180 - DNA, 16 bp, synthetic construct
  misc_feature 1..16: note = synthetic [barcode part1]
  source 1..16: mol_type = other DNA
gtcgttcttgcgaacc

SEQ ID NO: 2181 - DNA, 16 bp, synthetic construct
  misc_feature 1..16: note = synthetic [barcode part1]
  source 1..16: mol_type = other DNA
accagtacactaacgc

SEQ ID NO: 2182 - DNA, 16 bp, synthetic construct
  misc_feature 1..16: note = synthetic [barcode part1]
  source 1..16: mol_type = other DNA
cctacctcctaagacg

SEQ ID NO: 2183 - DNA, 16 bp, synthetic construct
  misc_feature 1..16: note = synthetic [barcode part1]
  source 1..16: mol_type = other DNA
ataggaactaacgacc

SEQ ID NO: 2184 - DNA, 16 bp, synthetic construct
  misc_feature 1..16: note = synthetic [barcode part1]
  source 1..16: mol_type = other DNA
gtggactcaacggagt

SEQ ID NO: 2185 - DNA, 16 bp, synthetic construct
  misc_feature 1..16: note = synthetic [barcode part1]
  source 1..16: mol_type = other DNA
acggtcgtacaattgc

SEQ ID NO: 2186 - DNA, 16 bp, synthetic construct
  misc_feature 1..16: note = synthetic [barcode part1]
  source 1..16: mol_type = other DNA
acacacacacagtacc

SEQ ID NO: 2187 - DNA, 16 bp, synthetic construct
  misc_feature 1..16: note = synthetic [barcode part1]
  source 1..16: mol_type = other DNA
ttctcctggaatctcc

SEQ ID NO: 2188 - DNA, 16 bp, synthetic construct
  misc_feature 1..16: note = synthetic [barcode part1]
  source 1..16: mol_type = other DNA
actggagtgtgcaacg

SEQ ID NO: 2189 - DNA, 16 bp, synthetic construct
  misc_feature 1..16: note = synthetic [barcode part1]
  source 1..16: mol_type = other DNA
tgaaggagtgccgact

SEQ ID NO: 2190 - DNA, 16 bp, synthetic construct
  misc_feature 1..16: note = synthetic [barcode part1]
  source 1..16: mol_type = other DNA
acgagtgccgtagtag

SEQ ID NO: 2191 - DNA, 16 bp, synthetic construct
  misc_feature 1..16: note = synthetic [barcode part1]
  source 1..16: mol_type = other DNA
accgttcgaatctgcc

SEQ ID NO: 2192 - DNA, 16 bp, synthetic construct
  misc_feature 1..16: note = synthetic [barcode part1]
  source 1..16: mol_type = other DNA
ttcgtccggtaagtag

SEQ ID NO: 2193 - DNA, 16 bp, synthetic construct
  misc_feature 1..16: note = synthetic [barcode part1]
  source 1..16: mol_type = other DNA
aaccgccgaatacgag

SEQ ID NO: 2194 - DNA, 16 bp, synthetic construct
  misc_feature 1..16: note = synthetic [barcode part1]
  source 1..16: mol_type = other DNA
tacaagaaccaagtcg

SEQ ID NO: 2195 - DNA, 16 bp, synthetic construct
  misc_feature 1..16: note = synthetic [barcode part1]
  source 1..16: mol_type = other DNA
gtgagtctcttgttgt

SEQ ID NO: 2196 - DNA, 16 bp, synthetic construct
  misc_feature 1..16: note = synthetic [barcode part1]
  source 1..16: mol_type = other DNA
atacgacggaaggtcc

SEQ ID NO: 2197 - DNA, 16 bp, synthetic construct
  misc_feature 1..16: note = synthetic [barcode part1]
  source 1..16: mol_type = other DNA
gtgtatcggtaacaag

SEQ ID NO: 2198 - DNA, 16 bp, synthetic construct
  misc_feature 1..16: note = synthetic [barcode part1]
  source 1..16: mol_type = other DNA
tggagacacttctacg

SEQ ID NO: 2199 - DNA, 16 bp, synthetic construct
  misc_feature 1..16: note = synthetic [barcode part1]
  source 1..16: mol_type = other DNA
ttaggcggtagacctt

SEQ ID NO: 2200 - DNA, 16 bp, synthetic construct
  misc_feature 1..16: note = synthetic [barcode part1]
  source 1..16: mol_type = other DNA
tcggttcagtaacgac

SEQ ID NO: 2201 - DNA, 16 bp, synthetic construct
  misc_feature 1..16: note = synthetic [barcode part1]
  source 1..16: mol_type = other DNA
attgcctgccttacct

SEQ ID NO: 2202 - DNA, 16 bp, synthetic construct
  misc_feature 1..16: note = synthetic [barcode part1]
  source 1..16: mol_type = other DNA
gcgtgatataccgact

SEQ ID NO: 2203 - DNA, 16 bp, synthetic construct
  misc_feature 1..16: note = synthetic [barcode part1]
  source 1..16: mol_type = other DNA
gagagaatcgaccaag

SEQ ID NO: 2204 - DNA, 16 bp, synthetic construct
  misc_feature 1..16: note = synthetic [barcode part1]
  source 1..16: mol_type = other DNA
cagactaggtcactac

SEQ ID NO: 2205 - DNA, 16 bp, synthetic construct
  misc_feature 1..16: note = synthetic [barcode part1]
  source 1..16: mol_type = other DNA
atcgtaattcgcctgt

SEQ ID NO: 2206 - DNA, 16 bp, synthetic construct
  misc_feature 1..16: note = synthetic [barcode part1]
  source 1..16: mol_type = other DNA
tccggactgaagagtg

SEQ ID NO: 2207 - DNA, 16 bp, synthetic construct
  misc_feature 1..16: note = synthetic [barcode part1]
  source 1..16: mol_type = other DNA
tacaacgaacgaacac

SEQ ID NO: 2208 - DNA, 16 bp, synthetic construct
  misc_feature 1..16: note = synthetic [barcode part1]
  source 1..16: mol_type = other DNA
gaattgcaagtgcggc

SEQ ID NO: 2209 - DNA, 16 bp, synthetic construct
  misc_feature 1..16: note = synthetic [barcode part1]
  source 1..16: mol_type = other DNA
cagtgcaattactcct

SEQ ID NO: 2210 - DNA, 16 bp, synthetic construct
  misc_feature 1..16: note = synthetic [barcode part1]
  source 1..16: mol_type = other DNA
tcgagtggcaagtctt

SEQ ID NO: 2211 - DNA, 16 bp, synthetic construct
  misc_feature 1..16: note = synthetic [barcode part1]
  source 1..16: mol_type = other DNA
ttgtgccgagtacaac

SEQ ID NO: 2212 - DNA, 16 bp, synthetic construct
  misc_feature 1..16: note = synthetic [barcode part1]
  source 1..16: mol_type = other DNA
ttaggcaatccgtgac

SEQ ID NO: 2213 - DNA, 16 bp, synthetic construct
  misc_feature 1..16: note = synthetic [barcode part1]
  source 1..16: mol_type = other DNA
ttgtctatactacggc

SEQ ID NO: 2214 - DNA, 16 bp, synthetic construct
  misc_feature 1..16: note = synthetic [barcode part1]
  source 1..16: mol_type = other DNA
cgtggtcgaagatcag

SEQ ID NO: 2215 - DNA, 16 bp, synthetic construct
  misc_feature 1..16: note = synthetic [barcode part1]
  source 1..16: mol_type = other DNA
cacggaataacttgag

SEQ ID NO: 2216 - DNA, 16 bp, synthetic construct
  misc_feature 1..16: note = synthetic [barcode part1]
  source 1..16: mol_type = other DNA
aagtccttcaagaccg

SEQ ID NO: 2217 - DNA, 16 bp, synthetic construct
  misc_feature 1..16: note = synthetic [barcode part1]
  source 1..16: mol_type = other DNA
ccaaggaatactcaag

SEQ ID NO: 2218 - DNA, 16 bp, synthetic construct
  misc_feature 1..16: note = synthetic [barcode part1]
  source 1..16: mol_type = other DNA
tggaatcctggaatcc

SEQ ID NO: 2219 - DNA, 16 bp, synthetic construct
  misc_feature 1..16: note = synthetic [barcode part1]
  source 1..16: mol_type = other DNA
ttgcctgcagaacctc

SEQ ID NO: 2220 - DNA, 16 bp, synthetic construct
  misc_feature 1..16: note = synthetic [barcode part1]
  source 1..16: mol_type = other DNA
tgttcaccactcacct

SEQ ID NO: 2221 - DNA, 16 bp, synthetic construct
  misc_feature 1..16: note = synthetic [barcode part1]
  source 1..16: mol_type = other DNA
gattcctgaccgtatt

SEQ ID NO: 2222 - DNA, 16 bp, synthetic construct
  misc_feature 1..16: note = synthetic [barcode part1]
  source 1..16: mol_type = other DNA
acctagatcgttccgc

SEQ ID NO: 2223 - DNA, 16 bp, synthetic construct
  misc_feature 1..16: note = synthetic [barcode part1]
  source 1..16: mol_type = other DNA
cacaacttagtccttg

SEQ ID NO: 2224 - DNA, 16 bp, synthetic construct
  misc_feature 1..16: note = synthetic [barcode part1]
  source 1..16: mol_type = other DNA
agttgacacactgtgc

SEQ ID NO: 2225 - DNA, 16 bp, synthetic construct
  misc_feature 1..16: note = synthetic [barcode part1]
  source 1..16: mol_type = other DNA
caagttactctgcact

SEQ ID NO: 2226 - DNA, 16 bp, synthetic construct
  misc_feature 1..16: note = synthetic [barcode part1]
  source 1..16: mol_type = other DNA
caacaactcaggtcac

SEQ ID NO: 2227 - DNA, 16 bp, synthetic construct
  misc_feature 1..16: note = synthetic [barcode part1]
  source 1..16: mol_type = other DNA
tggatctagtgcctag

SEQ ID NO: 2228 - DNA, 16 bp, synthetic construct
  misc_feature 1..16: note = synthetic [barcode part1]
  source 1..16: mol_type = other DNA
gcctcaccgttaacgt

SEQ ID NO: 2229 - DNA, 16 bp, synthetic construct
  misc_feature 1..16: note = synthetic [barcode part1]
  source 1..16: mol_type = other DNA
tccgattatcacacgt

SEQ ID NO: 2230 - DNA, 16 bp, synthetic construct
  misc_feature 1..16: note = synthetic [barcode part1]
  source 1..16: mol_type = other DNA
tgacgtattggtacgc

SEQ ID NO: 2231 - DNA, 16 bp, synthetic construct
  misc_feature 1..16: note = synthetic [barcode part1]
  source 1..16: mol_type = other DNA
ttactacggactcgcc

SEQ ID NO: 2232 - DNA, 16 bp, synthetic construct
  misc_feature 1..16: note = synthetic [barcode part1]
  source 1..16: mol_type = other DNA
ccagttaggaatctcg

SEQ ID NO: 2233 - DNA, 16 bp, synthetic construct
  misc_feature 1..16: note = synthetic [barcode part1]
  source 1..16: mol_type = other DNA
gactcctctctcaatc

SEQ ID NO: 2234 - DNA, 16 bp, synthetic construct
  misc_feature 1..16: note = synthetic [barcode part1]
  source 1..16: mol_type = other DNA
gtgcagaatctctgtg

SEQ ID NO: 2235 - DNA, 16 bp, synthetic construct
  misc_feature 1..16: note = synthetic [barcode part1]
  source 1..16: mol_type = other DNA
ttgacacacactgacg

SEQ ID NO: 2236 - DNA, 16 bp, synthetic construct
  misc_feature 1..16: note = synthetic [barcode part1]
  source 1..16: mol_type = other DNA
agagtatcacgtcctg

SEQ ID NO: 2237 - DNA, 16 bp, synthetic construct
  misc_feature 1..16: note = synthetic [barcode part1]
  source 1..16: mol_type = other DNA
tagtggtaattgccgc

SEQ ID NO: 2238 - DNA, 16 bp, synthetic construct
  misc_feature 1..16: note = synthetic [barcode part1]
  source 1..16: mol_type = other DNA
gatacgtagaattggc

SEQ ID NO: 2239 - DNA, 16 bp, synthetic construct
  misc_feature 1..16: note = synthetic [barcode part1]
  source 1..16: mol_type = other DNA
gcctattcgccacagt

SEQ ID NO: 2240 - DNA, 16 bp, synthetic construct
  misc_feature 1..16: note = synthetic [barcode part1]
  source 1..16: mol_type = other DNA
gcgaggatcggcaatt

SEQ ID NO: 2241 - DNA, 16 bp, synthetic construct
  misc_feature 1..16: note = synthetic [barcode part1]
  source 1..16: mol_type = other DNA
cctattaggttcgcgc

SEQ ID NO: 2242 - DNA, 16 bp, synthetic construct
  misc_feature 1..16: note = synthetic [barcode part1]
  source 1..16: mol_type = other DNA
tccgtattcggaccgt

SEQ ID NO: 2243 - DNA, 16 bp, synthetic construct
  misc_feature 1..16: note = synthetic [barcode part1]
  source 1..16: mol_type = other DNA
gaccgaactgcgtaag

SEQ ID NO: 2244 - DNA, 16 bp, synthetic construct
  misc_feature 1..16: note = synthetic [barcode part1]
  source 1..16: mol_type = other DNA
gtcgtcgaatctagtg

SEQ ID NO: 2245 - DNA, 16 bp, synthetic construct
  misc_feature 1..16: note = synthetic [barcode part1]
  source 1..16: mol_type = other DNA
agattagaccggcgtg

SEQ ID NO: 2246 - DNA, 16 bp, synthetic construct
  misc_feature 1..16: note = synthetic [barcode part1]
  source 1..16: mol_type = other DNA
aggatcttgagtagac

SEQ ID NO: 2247 - DNA, 16 bp, synthetic construct
  misc_feature 1..16: note = synthetic [barcode part1]
  source 1..16: mol_type = other DNA
gttccactatcggtgc

SEQ ID NO: 2248 - DNA, 16 bp, synthetic construct
  misc_feature 1..16: note = synthetic [barcode part1]
  source 1..16: mol_type = other DNA
gtggtgaacagagtag

SEQ ID NO: 2249 - DNA, 16 bp, synthetic construct
  misc_feature 1..16: note = synthetic [barcode part1]
  source 1..16: mol_type = other DNA
tcgcgaatacttcact

SEQ ID NO: 2250 - DNA, 16 bp, synthetic construct
  misc_feature 1..16: note = synthetic [barcode part1]
  source 1..16: mol_type = other DNA
tcgacagtcgcactct

SEQ ID NO: 2251 - DNA, 16 bp, synthetic construct
  misc_feature 1..16: note = synthetic [barcode part1]
  source 1..16: mol_type = other DNA
acagagaccaggtcgt

SEQ ID NO: 2252 - DNA, 16 bp, synthetic construct
  misc_feature 1..16: note = synthetic [barcode part1]
  source 1..16: mol_type = other DNA
caggccaataccttcc

SEQ ID NO: 2253 - DNA, 16 bp, synthetic construct
  misc_feature 1..16: note = synthetic [barcode part1]
  source 1..16: mol_type = other DNA
gtagtggtagatctag

SEQ ID NO: 2254 - DNA, 16 bp, synthetic construct
  misc_feature 1..16: note = synthetic [barcode part1]
  source 1..16: mol_type = other DNA
tgaatccacggcgaag

SEQ ID NO: 2255 - DNA, 16 bp, synthetic construct
  misc_feature 1..16: note = synthetic [barcode part1]
  source 1..16: mol_type = other DNA
tgtacaactaccacct

SEQ ID NO: 2256 - DNA, 16 bp, synthetic construct
  misc_feature 1..16: note = synthetic [barcode part1]
  source 1..16: mol_type = other DNA
cagactagagacgtgc

SEQ ID NO: 2257 - DNA, 16 bp, synthetic construct
  misc_feature 1..16: note = synthetic [barcode part1]
  source 1..16: mol_type = other DNA
acactctaggacgtgt

SEQ ID NO: 2258 - DNA, 16 bp, synthetic construct
  misc_feature 1..16: note = synthetic [barcode part1]
  source 1..16: mol_type = other DNA
atcagtataccggcgt

SEQ ID NO: 2259 - DNA, 16 bp, synthetic construct
  misc_feature 1..16: note = synthetic [barcode part1]
  source 1..16: mol_type = other DNA
acgtctccggtctaac

SEQ ID NO: 2260 - DNA, 16 bp, synthetic construct
  misc_feature 1..16: note = synthetic [barcode part1]
  source 1..16: mol_type = other DNA
agattgcgtaaggatc

SEQ ID NO: 2261 - DNA, 16 bp, synthetic construct
  misc_feature 1..16: note = synthetic [barcode part1]
  source 1..16: mol_type = other DNA
tcacgatagaacctcg

SEQ ID NO: 2262 - DNA, 16 bp, synthetic construct
  misc_feature 1..16: note = synthetic [barcode part1]
  source 1..16: mol_type = other DNA
tgcgtctcctaacgac

SEQ ID NO: 2263 - DNA, 16 bp, synthetic construct
  misc_feature 1..16: note = synthetic [barcode part1]
  source 1..16: mol_type = other DNA
accagactgccagatt

SEQ ID NO: 2264 - DNA, 16 bp, synthetic construct
  misc_feature 1..16: note = synthetic [barcode part1]
  source 1..16: mol_type = other DNA
cggcggagaataatag

SEQ ID NO: 2265 - DNA, 16 bp, synthetic construct
  misc_feature 1..16: note = synthetic [barcode part1]
  source 1..16: mol_type = other DNA
gccgagtattcctgtc

SEQ ID NO: 2266 - DNA, 16 bp, synthetic construct
  misc_feature 1..16: note = synthetic [barcode part1]
  source 1..16: mol_type = other DNA
cacaccgtcaactctg

SEQ ID NO: 2267 - DNA, 16 bp, synthetic construct
  misc_feature 1..16: note = synthetic [barcode part1]
  source 1..16: mol_type = other DNA
atcttgttcgccactc

SEQ ID NO: 2268 - DNA, 16 bp, synthetic construct
  misc_feature 1..16: note = synthetic [barcode part1]
  source 1..16: mol_type = other DNA
gccaatacgtcttatc

SEQ ID NO: 2269 - DNA, 16 bp, synthetic construct
  misc_feature 1..16: note = synthetic [barcode part1]
  source 1..16: mol_type = other DNA
cggtattactcgtccg

SEQ ID NO: 2270 - DNA, 16 bp, synthetic construct
  misc_feature 1..16: note = synthetic [barcode part1]
  source 1..16: mol_type = other DNA
attgacggttccttac

SEQ ID NO: 2271 - DNA, 16 bp, synthetic construct
  misc_feature 1..16: note = synthetic [barcode part1]
  source 1..16: mol_type = other DNA
ttggttcgcagttact

SEQ ID NO: 2272 - DNA, 16 bp, synthetic construct
  misc_feature 1..16: note = synthetic [barcode part1]
  source 1..16: mol_type = other DNA
tctggttcgcgcgatt

SEQ ID NO: 2273 - DNA, 16 bp, synthetic construct
  misc_feature 1..16: note = synthetic [barcode part1]
  source 1..16: mol_type = other DNA
cgtagatctaccttac

SEQ ID NO: 2274 - DNA, 16 bp, synthetic construct
  misc_feature 1..16: note = synthetic [barcode part1]
  source 1..16: mol_type = other DNA
gcaacttggatcgttg

SEQ ID NO: 2275 - DNA, 16 bp, synthetic construct
  misc_feature 1..16: note = synthetic [barcode part1]
  source 1..16: mol_type = other DNA
atcctattccgcggac

SEQ ID NO: 2276 - DNA, 16 bp, synthetic construct
  misc_feature 1..16: note = synthetic [barcode part1]
  source 1..16: mol_type = other DNA
tcctgtattccgcact

SEQ ID NO: 2277 - DNA, 16 bp, synthetic construct
  misc_feature 1..16: note = synthetic [barcode part1]
  source 1..16: mol_type = other DNA
agtacacagaaggttc

SEQ ID NO: 2278 - DNA, 16 bp, synthetic construct
  misc_feature 1..16: note = synthetic [barcode part1]
  source 1..16: mol_type = other DNA
tgttgttggcgcgttc

SEQ ID NO: 2279 - DNA, 16 bp, synthetic construct
  misc_feature 1..16: note = synthetic [barcode part1]
  source 1..16: mol_type = other DNA
tatccttgattcgacg

SEQ ID NO: 2280 - DNA, 16 bp, synthetic construct
  misc_feature 1..16: note = synthetic [barcode part1]
  source 1..16: mol_type = other DNA
taggcgtcacgttagt

SEQ ID NO: 2281 - DNA, 16 bp, synthetic construct
  misc_feature 1..16: note = synthetic [barcode part1]
  source 1..16: mol_type = other DNA
tactaggccactagac

SEQ ID NO: 2282 - DNA, 16 bp, synthetic construct
  misc_feature 1..16: note = synthetic [barcode part1]
  source 1..16: mol_type = other DNA
gcactgatataggcct

SEQ ID NO: 2283 - DNA, 16 bp, synthetic construct
  misc_feature 1..16: note = synthetic [barcode part1]
  source 1..16: mol_type = other DNA
cagttctgtgtgttgt

SEQ ID NO: 2284 - DNA, 16 bp, synthetic construct
  misc_feature 1..16: note = synthetic [barcode part1]
  source 1..16: mol_type = other DNA
tgcgcaagagtgttct

SEQ ID NO: 2285 - DNA, 16 bp, synthetic construct
  misc_feature 1..16: note = synthetic [barcode part1]
  source 1..16: mol_type = other DNA
cctggcctaatatatc

SEQ ID NO: 2286 - DNA, 16 bp, synthetic construct
  misc_feature 1..16: note = synthetic [barcode part1]
  source 1..16: mol_type = other DNA
aaccgcgattacacac

SEQ ID NO: 2287 - DNA, 16 bp, synthetic construct
  misc_feature 1..16: note = synthetic [barcode part1]
  source 1..16: mol_type = other DNA
acactgttctgagacg

SEQ ID NO: 2288 - DNA, 16 bp, synthetic construct
  misc_feature 1..16: note = synthetic [barcode part1]
  source 1..16: mol_type = other DNA
accagagaactcttcg

SEQ ID NO: 2289 - DNA, 16 bp, synthetic construct
  misc_feature 1..16: note = synthetic [barcode part1]
  source 1..16: mol_type = other DNA
tcgagttattgccgag

SEQ ID NO: 2290 - DNA, 16 bp, synthetic construct
  misc_feature 1..16: note = synthetic [barcode part1]
  source 1..16: mol_type = other DNA
cagtatctggagtctg

SEQ ID NO: 2291 - DNA, 16 bp, synthetic construct
  misc_feature 1..16: note = synthetic [barcode part1]
  source 1..16: mol_type = other DNA
agtgtcacaaccaacc

SEQ ID NO: 2292 - DNA, 16 bp, synthetic construct
  misc_feature 1..16: note = synthetic [barcode part1]
  source 1..16: mol_type = other DNA
agtcggagttcttcag

SEQ ID NO: 2293 - DNA, 16 bp, synthetic construct
  misc_feature 1..16: note = synthetic [barcode part1]
  source 1..16: mol_type = other DNA
ttctgtatagttcggc

SEQ ID NO: 2294 - DNA, 16 bp, synthetic construct
  misc_feature 1..16: note = synthetic [barcode part1]
  source 1..16: mol_type = other DNA
tgacagtcctcgtacc

SEQ ID NO: 2295 - DNA, 16 bp, synthetic construct
  misc_feature 1..16: note = synthetic [barcode part1]
  source 1..16: mol_type = other DNA
caattattcaccgtcg

SEQ ID NO: 2296 - DNA, 16 bp, synthetic construct
  misc_feature 1..16: note = synthetic [barcode part1]
  source 1..16: mol_type = other DNA
tactctagaacgacgc

SEQ ID NO: 2297 - DNA, 16 bp, synthetic construct
  misc_feature 1..16: note = synthetic [barcode part1]
  source 1..16: mol_type = other DNA
aacacctggaccagag

SEQ ID NO: 2298 - DNA, 16 bp, synthetic construct
  misc_feature 1..16: note = synthetic [barcode part1]
  source 1..16: mol_type = other DNA
gcctggactattccac

SEQ ID NO: 2299 - DNA, 16 bp, synthetic construct
  misc_feature 1..16: note = synthetic [barcode part1]
  source 1..16: mol_type = other DNA
tacttctcaacaaccg

SEQ ID NO: 2300 - DNA, 16 bp, synthetic construct
  misc_feature 1..16: note = synthetic [barcode part1]
  source 1..16: mol_type = other DNA
caccagaacgattcgt

SEQ ID NO: 2301 - DNA, 16 bp, synthetic construct
  misc_feature 1..16: note = synthetic [barcode part1]
  source 1..16: mol_type = other DNA
gtagaggtaattcgac

SEQ ID NO: 2302 - DNA, 16 bp, synthetic construct
  misc_feature 1..16: note = synthetic [barcode part1]
  source 1..16: mol_type = other DNA
ttgatcgcacacgtag

SEQ ID NO: 2303 - DNA, 16 bp, synthetic construct
  misc_feature 1..16: note = synthetic [barcode part1]
  source 1..16: mol_type = other DNA
tagagagtagttgcgt

SEQ ID NO: 2304 - DNA, 16 bp, synthetic construct
  misc_feature 1..16: note = synthetic [barcode part1]
  source 1..16: mol_type = other DNA
atctctaattcggcac

SEQ ID NO: 2305 - DNA, 16 bp, synthetic construct
  misc_feature 1..16: note = synthetic [barcode part1]
  source 1..16: mol_type = other DNA
gtcttcctacacggtg

SEQ ID NO: 2306 - DNA, 16 bp, synthetic construct
  misc_feature 1..16: note = synthetic [barcode part1]
  source 1..16: mol_type = other DNA
taattgacggtcggtc

SEQ ID NO: 2307 - DNA, 16 bp, synthetic construct
  misc_feature 1..16: note = synthetic [barcode part1]
  source 1..16: mol_type = other DNA
aggttggattagtgtg

SEQ ID NO: 2308 - DNA, 16 bp, synthetic construct
  misc_feature 1..16: note = synthetic [barcode part1]
  source 1..16: mol_type = other DNA
ttcgtgtggcctgact

SEQ ID NO: 2309 - DNA, 16 bp, synthetic construct
  misc_feature 1..16: note = synthetic [barcode part1]
  source 1..16: mol_type = other DNA
aagactatctctggcg

SEQ ID NO: 2310 - DNA, 16 bp, synthetic construct
  misc_feature 1..16: note = synthetic [barcode part1]
  source 1..16: mol_type = other DNA
gcgttctccaacaacc

SEQ ID NO: 2311 - DNA, 16 bp, synthetic construct
  misc_feature 1..16: note = synthetic [barcode part1]
  source 1..16: mol_type = other DNA
gaactactcaccagac

SEQ ID NO: 2312 - DNA, 16 bp, synthetic construct
  misc_feature 1..16: note = synthetic [barcode part1]
  source 1..16: mol_type = other DNA
cacacggtcactgttc

SEQ ID NO: 2313 - DNA, 16 bp, synthetic construct
  misc_feature 1..16: note = synthetic [barcode part1]
  source 1..16: mol_type = other DNA
ttggtctctgttgcct

SEQ ID NO: 2314 - DNA, 16 bp, synthetic construct
  misc_feature 1..16: note = synthetic [barcode part1]
  source 1..16: mol_type = other DNA
ccaatcttcgccactt

SEQ ID NO: 2315 - DNA, 16 bp, synthetic construct
  misc_feature 1..16: note = synthetic [barcode part1]
  source 1..16: mol_type = other DNA
tcgagagtagtgagag

SEQ ID NO: 2316 - DNA, 16 bp, synthetic construct
  misc_feature 1..16: note = synthetic [barcode part1]
  source 1..16: mol_type = other DNA
cgaatcactaacggtc

SEQ ID NO: 2317 - DNA, 16 bp, synthetic construct
  misc_feature 1..16: note = synthetic [barcode part1]
  source 1..16: mol_type = other DNA
gttaattgttgcggcg

SEQ ID NO: 2318 - DNA, 16 bp, synthetic construct
  misc_feature 1..16: note = synthetic [barcode part1]
  source 1..16: mol_type = other DNA
ccgagtcttctacgtg

SEQ ID NO: 2319 - DNA, 16 bp, synthetic construct
  misc_feature 1..16: note = synthetic [barcode part1]
  source 1..16: mol_type = other DNA
ccagtccagtgtgtct

SEQ ID NO: 2320 - DNA, 16 bp, synthetic construct
  misc_feature 1..16: note = synthetic [barcode part1]
  source 1..16: mol_type = other DNA
cagtgcacctctggtt

SEQ ID NO: 2321 - DNA, 16 bp, synthetic construct
  misc_feature 1..16: note = synthetic [barcode part1]
  source 1..16: mol_type = other DNA
ttactctcttccgacg

SEQ ID NO: 2322 - DNA, 16 bp, synthetic construct
  misc_feature 1..16: note = synthetic [barcode part1]
  source 1..16: mol_type = other DNA
ccgccaacaacttaag

SEQ ID NO: 2323 - DNA, 16 bp, synthetic construct
  misc_feature 1..16: note = synthetic [barcode part1]
  source 1..16: mol_type = other DNA
gataactcttcgcgtt

SEQ ID NO: 2324 - DNA, 16 bp, synthetic construct
  misc_feature 1..16: note = synthetic [barcode part1]
  source 1..16: mol_type = other DNA
tgattggtgcaacacc

SEQ ID NO: 2325 - DNA, 16 bp, synthetic construct
  misc_feature 1..16: note = synthetic [barcode part1]
  source 1..16: mol_type = other DNA
acacgttaagtgcctg

SEQ ID NO: 2326 - DNA, 16 bp, synthetic construct
  misc_feature 1..16: note = synthetic [barcode part1]
  source 1..16: mol_type = other DNA
gtctctcaaggaatcg

SEQ ID NO: 2327 - DNA, 16 bp, synthetic construct
  misc_feature 1..16: note = synthetic [barcode part1]
  source 1..16: mol_type = other DNA
tccgtgtcgtatcttc

SEQ ID NO: 2328 - DNA, 16 bp, synthetic construct
  misc_feature 1..16: note = synthetic [barcode part1]
  source 1..16: mol_type = other DNA
cagaccagatcactgt

SEQ ID NO: 2329 - DNA, 16 bp, synthetic construct
  misc_feature 1..16: note = synthetic [barcode part1]
  source 1..16: mol_type = other DNA
aattgccggcgtgaag

SEQ ID NO: 2330 - DNA, 16 bp, synthetic construct
  misc_feature 1..16: note = synthetic [barcode part1]
  source 1..16: mol_type = other DNA
aacctgacctcgtgtc

SEQ ID NO: 2331 - DNA, 16 bp, synthetic construct
  misc_feature 1..16: note = synthetic [barcode part1]
  source 1..16: mol_type = other DNA
ttcgactagaaccggt

SEQ ID NO: 2332 - DNA, 16 bp, synthetic construct
  misc_feature 1..16: note = synthetic [barcode part1]
  source 1..16: mol_type = other DNA
acctggaatctcactt

SEQ ID NO: 2333 - DNA, 16 bp, synthetic construct
  misc_feature 1..16: note = synthetic [barcode part1]
  source 1..16: mol_type = other DNA
agtcgtgccgacttct

SEQ ID NO: 2334 - DNA, 16 bp, synthetic construct
  misc_feature 1..16: note = synthetic [barcode part1]
  source 1..16: mol_type = other DNA
attgacgtctgcagac

SEQ ID NO: 2335 - DNA, 16 bp, synthetic construct
  misc_feature 1..16: note = synthetic [barcode part1]
  source 1..16: mol_type = other DNA
tactgtggtacacgtg

SEQ ID NO: 2336 - DNA, 16 bp, synthetic construct
  misc_feature 1..16: note = synthetic [barcode part1]
  source 1..16: mol_type = other DNA
gtgaattactgcctct

SEQ ID NO: 2337 - DNA, 16 bp, synthetic construct
  misc_feature 1..16: note = synthetic [barcode part1]
  source 1..16: mol_type = other DNA
cgcaagaacactcttg

SEQ ID NO: 2338 - DNA, 16 bp, synthetic construct
  misc_feature 1..16: note = synthetic [barcode part1]
  source 1..16: mol_type = other DNA
gcgattaaccagtacc

SEQ ID NO: 2339 - DNA, 16 bp, synthetic construct
  misc_feature 1..16: note = synthetic [barcode part1]
  source 1..16: mol_type = other DNA
cgaatcgaaccgttgt

SEQ ID NO: 2340 - DNA, 16 bp, synthetic construct
  misc_feature 1..16: note = synthetic [barcode part1]
  source 1..16: mol_type = other DNA
tagaggagtcggcgtt

SEQ ID NO: 2341 - DNA, 16 bp, synthetic construct
  misc_feature 1..16: note = synthetic [barcode part1]
  source 1..16: mol_type = other DNA
tgaacctgcgaattcg

SEQ ID NO: 2342 - DNA, 16 bp, synthetic construct
  misc_feature 1..16: note = synthetic [barcode part1]
  source 1..16: mol_type = other DNA
actcgagtctgttgtt

SEQ ID NO: 2343 - DNA, 16 bp, synthetic construct
  misc_feature 1..16: note = synthetic [barcode part1]
  source 1..16: mol_type = other DNA
ttacgtggattaggag

SEQ ID NO: 2344 - DNA, 16 bp, synthetic construct
  misc_feature 1..16: note = synthetic [barcode part1]
  source 1..16: mol_type = other DNA
atcgtgagaacaagtc

SEQ ID NO: 2345 - DNA, 16 bp, synthetic construct
  misc_feature 1..16: note = synthetic [barcode part1]
  source 1..16: mol_type = other DNA
tggagagtacaatcac

SEQ ID NO: 2346 - DNA, 16 bp, synthetic construct
  misc_feature 1..16: note = synthetic [barcode part1]
  source 1..16: mol_type = other DNA
gattattgcaggaacg

SEQ ID NO: 2347 - DNA, 16 bp, synthetic construct
  misc_feature 1..16: note = synthetic [barcode part1]
  source 1..16: mol_type = other DNA
caacacaatcgagaac

SEQ ID NO: 2348 - DNA, 16 bp, synthetic construct
  misc_feature 1..16: note = synthetic [barcode part1]
  source 1..16: mol_type = other DNA
cagaggtatctggcag

SEQ ID NO: 2349 - DNA, 16 bp, synthetic construct
  misc_feature 1..16: note = synthetic [barcode part1]
  source 1..16: mol_type = other DNA
ttcgactaccacgcgt

SEQ ID NO: 2350 - DNA, 16 bp, synthetic construct
  misc_feature 1..16: note = synthetic [barcode part1]
  source 1..16: mol_type = other DNA
tagatccagatccacg

SEQ ID NO: 2351 - DNA, 16 bp, synthetic construct
  misc_feature 1..16: note = synthetic [barcode part1]
  source 1..16: mol_type = other DNA
gttggtgttcgcaagt

SEQ ID NO: 2352 - DNA, 16 bp, synthetic construct
  misc_feature 1..16: note = synthetic [barcode part1]
  source 1..16: mol_type = other DNA
gatcagtctccaagac

SEQ ID NO: 2353 - DNA, 16 bp, synthetic construct
  misc_feature 1..16: note = synthetic [barcode part1]
  source 1..16: mol_type = other DNA
ttgtaatcaaccggcg

SEQ ID NO: 2354 - DNA, 16 bp, synthetic construct
  misc_feature 1..16: note = synthetic [barcode part1]
  source 1..16: mol_type = other DNA
acaaccaagaaggttc

SEQ ID NO: 2355 - DNA, 16 bp, synthetic construct
  misc_feature 1..16: note = synthetic [barcode part1]
  source 1..16: mol_type = other DNA
cacttcaaggttcact

SEQ ID NO: 2356 - DNA, 16 bp, synthetic construct
  misc_feature 1..16: note = synthetic [barcode part1]
  source 1..16: mol_type = other DNA
tgcagtaaccttggac

SEQ ID NO: 2357 - DNA, 16 bp, synthetic construct
  misc_feature 1..16: note = synthetic [barcode part1]
  source 1..16: mol_type = other DNA
gtctggcaactatcag

SEQ ID NO: 2358 - DNA, 16 bp, synthetic construct
  misc_feature 1..16: note = synthetic [barcode part1]
  source 1..16: mol_type = other DNA
tgactctgtcggtatt

SEQ ID NO: 2359 - DNA, 16 bp, synthetic construct
  misc_feature 1..16: note = synthetic [barcode part1]
  source 1..16: mol_type = other DNA
gcggagaccgatagtt

SEQ ID NO: 2360 - DNA, 16 bp, synthetic construct
  misc_feature 1..16: note = synthetic [barcode part1]
  source 1..16: mol_type = other DNA
gtgttgaaccgaggac

SEQ ID NO: 2361 - DNA, 16 bp, synthetic construct
  misc_feature 1..16: note = synthetic [barcode part1]
  source 1..16: mol_type = other DNA
atctgtcctacggcgt

SEQ ID NO: 2362 - DNA, 16 bp, synthetic construct
  misc_feature 1..16: note = synthetic [barcode part1]
  source 1..16: mol_type = other DNA
cctgtcagttgaagac

SEQ ID NO: 2363 - DNA, 16 bp, synthetic construct
  misc_feature 1..16: note = synthetic [barcode part1]
  source 1..16: mol_type = other DNA
acctctcttagtcctg

SEQ ID NO: 2364 - DNA, 16 bp, synthetic construct
  misc_feature 1..16: note = synthetic [barcode part1]
  source 1..16: mol_type = other DNA
acttactgtaggcgac

SEQ ID NO: 2365 - DNA, 16 bp, synthetic construct
  misc_feature 1..16: note = synthetic [barcode part1]
  source 1..16: mol_type = other DNA
ttgttcacgtccgttc

SEQ ID NO: 2366 - DNA, 16 bp, synthetic construct
  misc_feature 1..16: note = synthetic [barcode part1]
  source 1..16: mol_type = other DNA
cgcacttgaaccgttc

SEQ ID NO: 2367 - DNA, 16 bp, synthetic construct
  misc_feature 1..16: note = synthetic [barcode part1]
  source 1..16: mol_type = other DNA
actactgtggttcgag

SEQ ID NO: 2368 - DNA, 16 bp, synthetic construct
  misc_feature 1..16: note = synthetic [barcode part1]
  source 1..16: mol_type = other DNA
gaggaatcactaacgt

SEQ ID NO: 2369 - DNA, 16 bp, synthetic construct
  misc_feature 1..16: note = synthetic [barcode part1]
  source 1..16: mol_type = other DNA
acacctcgtgtaagac

SEQ ID NO: 2370 - DNA, 16 bp, synthetic construct
  misc_feature 1..16: note = synthetic [barcode part1]
  source 1..16: mol_type = other DNA
tggcgtggttacttcc

SEQ ID NO: 2371 - DNA, 16 bp, synthetic construct
  misc_feature 1..16: note = synthetic [barcode part1]
  source 1..16: mol_type = other DNA
ttaatacggaaggtcg

SEQ ID NO: 2372 - DNA, 16 bp, synthetic construct
  misc_feature 1..16: note = synthetic [barcode part1]
  source 1..16: mol_type = other DNA
attcgtggttaaggag

SEQ ID NO: 2373 - DNA, 16 bp, synthetic construct
  misc_feature 1..16: note = synthetic [barcode part1]
  source 1..16: mol_type = other DNA
aaggaccaactggaag

SEQ ID NO: 2374 - DNA, 16 bp, synthetic construct
  misc_feature 1..16: note = synthetic [barcode part1]
  source 1..16: mol_type = other DNA
aacgtgtcaacgtacc

SEQ ID NO: 2375 - DNA, 16 bp, synthetic construct
  misc_feature 1..16: note = synthetic [barcode part1]
  source 1..16: mol_type = other DNA
taccgttacaaccact

SEQ ID NO: 2376 - DNA, 16 bp, synthetic construct
  misc_feature 1..16: note = synthetic [barcode part1]
  source 1..16: mol_type = other DNA
acaacctggtgcagag

SEQ ID NO: 2377 - DNA, 16 bp, synthetic construct
  misc_feature 1..16: note = synthetic [barcode part1]
  source 1..16: mol_type = other DNA
cggaagagtcaacacc

SEQ ID NO: 2378 - DNA, 16 bp, synthetic construct
  misc_feature 1..16: note = synthetic [barcode part1]
  source 1..16: mol_type = other DNA
agttaagacggttacg

SEQ ID NO: 2379 - DNA, 16 bp, synthetic construct
  misc_feature 1..16: note = synthetic [barcode part1]
  source 1..16: mol_type = other DNA
tgatcggaggatcctt

SEQ ID NO: 2380 - DNA, 16 bp, synthetic construct
  misc_feature 1..16: note = synthetic [barcode part1]
  source 1..16: mol_type = other DNA
tcgacgagtcctcact

SEQ ID NO: 2381 - DNA, 16 bp, synthetic construct
  misc_feature 1..16: note = synthetic [barcode part1]
  source 1..16: mol_type = other DNA
gcgaccagttgatatc

SEQ ID NO: 2382 - DNA, 16 bp, synthetic construct
  misc_feature 1..16: note = synthetic [barcode part1]
  source 1..16: mol_type = other DNA
atccttacctgacaac

SEQ ID NO: 2383 - DNA, 16 bp, synthetic construct
  misc_feature 1..16: note = synthetic [barcode part1]
  source 1..16: mol_type = other DNA
tatacaagtggccgtc

SEQ ID NO: 2384 - DNA, 16 bp, synthetic construct
  misc_feature 1..16: note = synthetic [barcode part1]
  source 1..16: mol_type = other DNA
acgtctattcaggcag

SEQ ID NO: 2385 - DNA, 16 bp, synthetic construct
  misc_feature 1..16: note = synthetic [barcode part1]
  source 1..16: mol_type = other DNA
agacttccgtgtacag

SEQ ID NO: 2386 - DNA, 16 bp, synthetic construct
  misc_feature 1..16: note = synthetic [barcode part1]
  source 1..16: mol_type = other DNA
ttggagtacttacctc

SEQ ID NO: 2387 - DNA, 16 bp, synthetic construct
  misc_feature 1..16: note = synthetic [barcode part1]
  source 1..16: mol_type = other DNA
gccgtacactgagaag

SEQ ID NO: 2388 - DNA, 16 bp, synthetic construct
  misc_feature 1..16: note = synthetic [barcode part1]
  source 1..16: mol_type = other DNA
agaggaactctgagag

SEQ ID NO: 2389 - DNA, 16 bp, synthetic construct
  misc_feature 1..16: note = synthetic [barcode part1]
  source 1..16: mol_type = other DNA
caggttaacgccttcc

SEQ ID NO: 2390 - DNA, 16 bp, synthetic construct
  misc_feature 1..16: note = synthetic [barcode part1]
  source 1..16: mol_type = other DNA
agtaacttcggaccgt

SEQ ID NO: 2391 - DNA, 16 bp, synthetic construct
  misc_feature 1..16: note = synthetic [barcode part1]
  source 1..16: mol_type = other DNA
atcttatctgtgcggt

SEQ ID NO: 2392 - DNA, 16 bp, synthetic construct
  misc_feature 1..16: note = synthetic [barcode part1]
  source 1..16: mol_type = other DNA
agttggtaaccgactc

SEQ ID NO: 2393 - DNA, 16 bp, synthetic construct
  misc_feature 1..16: note = synthetic [barcode part1]
  source 1..16: mol_type = other DNA
caactccttctggttc

SEQ ID NO: 2394 - DNA, 16 bp, synthetic construct
  misc_feature 1..16: note = synthetic [barcode part1]
  source 1..16: mol_type = other DNA
caaggactaccagacg

SEQ ID NO: 2395 - DNA, 16 bp, synthetic construct
  misc_feature 1..16: note = synthetic [barcode part1]
  source 1..16: mol_type = other DNA
ccaccacgtagacctt

SEQ ID NO: 2396 - DNA, 16 bp, synthetic construct
  misc_feature 1..16: note = synthetic [barcode part1]
  source 1..16: mol_type = other DNA
cgaagtctgcaacact

SEQ ID NO: 2397 - DNA, 16 bp, synthetic construct
  misc_feature 1..16: note = synthetic [barcode part1]
  source 1..16: mol_type = other DNA
gtgtctaagacttgcg

SEQ ID NO: 2398 - DNA, 16 bp, synthetic construct
  misc_feature 1..16: note = synthetic [barcode part1]
  source 1..16: mol_type = other DNA
ttcgtatctggcggtc

SEQ ID NO: 2399 - DNA, 16 bp, synthetic construct
  misc_feature 1..16: note = synthetic [barcode part1]
  source 1..16: mol_type = other DNA
cgttccactacagacc

SEQ ID NO: 2400 - DNA, 16 bp, synthetic construct
  misc_feature 1..16: note = synthetic [barcode part1]
  source 1..16: mol_type = other DNA
gaatcctctaaggtcg

SEQ ID NO: 2401 - DNA, 16 bp, synthetic construct
  misc_feature 1..16: note = synthetic [barcode part1]
  source 1..16: mol_type = other DNA
tcagtctcgagagact

SEQ ID NO: 2402 - DNA, 16 bp, synthetic construct
  misc_feature 1..16: note = synthetic [barcode part1]
  source 1..16: mol_type = other DNA
agaccacgtagttcgt

SEQ ID NO: 2403 - DNA, 16 bp, synthetic construct
  misc_feature 1..16: note = synthetic [barcode part1]
  source 1..16: mol_type = other DNA
ttggtggtcactgagt

SEQ ID NO: 2404 - DNA, 16 bp, synthetic construct
  misc_feature 1..16: note = synthetic [barcode part1]
  source 1..16: mol_type = other DNA
ttccggttcaacacgc

SEQ ID NO: 2405 - DNA, 16 bp, synthetic construct
  misc_feature 1..16: note = synthetic [barcode part1]
  source 1..16: mol_type = other DNA
ataggaacttccgcac

SEQ ID NO: 2406 - DNA, 16 bp, synthetic construct
  misc_feature 1..16: note = synthetic [barcode part1]
  source 1..16: mol_type = other DNA
agacgactgatccttg

SEQ ID NO: 2407 - DNA, 16 bp, synthetic construct
  misc_feature 1..16: note = synthetic [barcode part1]
  source 1..16: mol_type = other DNA
cgacggtctctatacc

SEQ ID NO: 2408 - DNA, 16 bp, synthetic construct
  misc_feature 1..16: note = synthetic [barcode part1]
  source 1..16: mol_type = other DNA
tccaaccagaagatcc

SEQ ID NO: 2409 - DNA, 16 bp, synthetic construct
  misc_feature 1..16: note = synthetic [barcode part1]
  source 1..16: mol_type = other DNA
gttgcctgagtaacac

SEQ ID NO: 2410 - DNA, 16 bp, synthetic construct
  misc_feature 1..16: note = synthetic [barcode part1]
  source 1..16: mol_type = other DNA
agaggcgacgatctgt

SEQ ID NO: 2411 - DNA, 16 bp, synthetic construct
  misc_feature 1..16: note = synthetic [barcode part1]
  source 1..16: mol_type = other DNA
agtgttatcggtcggt

SEQ ID NO: 2412 - DNA, 16 bp, synthetic construct
  misc_feature 1..16: note = synthetic [barcode part1]
  source 1..16: mol_type = other DNA
cctcggagtctacttg

SEQ ID NO: 2413 - DNA, 16 bp, synthetic construct
  misc_feature 1..16: note = synthetic [barcode part1]
  source 1..16: mol_type = other DNA
tcgtcaactaacgacg

SEQ ID NO: 2414 - DNA, 16 bp, synthetic construct
  misc_feature 1..16: note = synthetic [barcode part1]
  source 1..16: mol_type = other DNA
cgcacactaataccag

SEQ ID NO: 2415 - DNA, 16 bp, synthetic construct
  misc_feature 1..16: note = synthetic [barcode part1]
  source 1..16: mol_type = other DNA
ttatacaggtcctctg

SEQ ID NO: 2416 - DNA, 16 bp, synthetic construct
  misc_feature 1..16: note = synthetic [barcode part1]
  source 1..16: mol_type = other DNA
gccactctacctaggt

SEQ ID NO: 2417 - DNA, 16 bp, synthetic construct
  misc_feature 1..16: note = synthetic [barcode part1]
  source 1..16: mol_type = other DNA
ccttataacacgaggc

SEQ ID NO: 2418 - DNA, 16 bp, synthetic construct
  misc_feature 1..16: note = synthetic [barcode part1]
  source 1..16: mol_type = other DNA
tgcgtgacacctcgtt

SEQ ID NO: 2419 - DNA, 16 bp, synthetic construct
  misc_feature 1..16: note = synthetic [barcode part1]
  source 1..16: mol_type = other DNA
taggtctcacttggag

SEQ ID NO: 2420 - DNA, 16 bp, synthetic construct
  misc_feature 1..16: note = synthetic [barcode part1]
  source 1..16: mol_type = other DNA
cgacgtctactcgttg

SEQ ID NO: 2421 - DNA, 16 bp, synthetic construct
  misc_feature 1..16: note = synthetic [barcode part1]
  source 1..16: mol_type = other DNA
attgcacgattgtgcg

SEQ ID NO: 2422 - DNA, 16 bp, synthetic construct
  misc_feature 1..16: note = synthetic [barcode part1]
  source 1..16: mol_type = other DNA
tgcgagttaggcactt

SEQ ID NO: 2423 - DNA, 16 bp, synthetic construct
  misc_feature 1..16: note = synthetic [barcode part1]
  source 1..16: mol_type = other DNA
tcctaatccggcgtac

SEQ ID NO: 2424 - DNA, 16 bp, synthetic construct
  misc_feature 1..16: note = synthetic [barcode part1]
  source 1..16: mol_type = other DNA
gttgtcttaccgcctt

SEQ ID NO: 2425 - DNA, 16 bp, synthetic construct
  misc_feature 1..16: note = synthetic [barcode part1]
  source 1..16: mol_type = other DNA
agaactacgacttccg

SEQ ID NO: 2426 - DNA, 16 bp, synthetic construct
  misc_feature 1..16: note = synthetic [barcode part1]
  source 1..16: mol_type = other DNA
tgtacgtgttgcaacg

SEQ ID NO: 2427 - DNA, 16 bp, synthetic construct
  misc_feature 1..16: note = synthetic [barcode part1]
  source 1..16: mol_type = other DNA
tgccttctagtaatcg

SEQ ID NO: 2428 - DNA, 16 bp, synthetic construct
  misc_feature 1..16: note = synthetic [barcode part1]
  source 1..16: mol_type = other DNA
cgttcaccaggacttc

SEQ ID NO: 2429 - DNA, 16 bp, synthetic construct
  misc_feature 1..16: note = synthetic [barcode part1]
  source 1..16: mol_type = other DNA
aacagtaacggatctg

SEQ ID NO: 2430 - DNA, 16 bp, synthetic construct
  misc_feature 1..16: note = synthetic [barcode part1]
  source 1..16: mol_type = other DNA
gaattcacacctcact

SEQ ID NO: 2431 - DNA, 16 bp, synthetic construct
  misc_feature 1..16: note = synthetic [barcode part1]
  source 1..16: mol_type = other DNA
tcaccgtaggtctacc

SEQ ID NO: 2432 - DNA, 16 bp, synthetic construct
  misc_feature 1..16: note = synthetic [barcode part1]
  source 1..16: mol_type = other DNA
tatagtattcgtccgc

SEQ ID NO: 2433 - DNA, 16 bp, synthetic construct
  misc_feature 1..16: note = synthetic [barcode part1]
  source 1..16: mol_type = other DNA
ttcctggttccttgac

SEQ ID NO: 2434 - DNA, 16 bp, synthetic construct
  misc_feature 1..16: note = synthetic [barcode part1]
  source 1..16: mol_type = other DNA
ccggtaggaactattc

SEQ ID NO: 2435 - DNA, 16 bp, synthetic construct
  misc_feature 1..16: note = synthetic [barcode part1]
  source 1..16: mol_type = other DNA
tgattcgtgaatcgcg

SEQ ID NO: 2436 - DNA, 16 bp, synthetic construct
  misc_feature 1..16: note = synthetic [barcode part1]
  source 1..16: mol_type = other DNA
cgattccgattccttc

SEQ ID NO: 2437 - DNA, 16 bp, synthetic construct
  misc_feature 1..16: note = synthetic [barcode part1]
  source 1..16: mol_type = other DNA
tccaccgtacagacct

SEQ ID NO: 2438 - DNA, 16 bp, synthetic construct
  misc_feature 1..16: note = synthetic [barcode part1]
  source 1..16: mol_type = other DNA
cgtgacaacgaacggt

SEQ ID NO: 2439 - DNA, 16 bp, synthetic construct
  misc_feature 1..16: note = synthetic [barcode part1]
  source 1..16: mol_type = other DNA
tcgtcactaaggtgac

SEQ ID NO: 2440 - DNA, 16 bp, synthetic construct
  misc_feature 1..16: note = synthetic [barcode part1]
  source 1..16: mol_type = other DNA
tcgtattcggattgtc

SEQ ID NO: 2441 - DNA, 16 bp, synthetic construct
  misc_feature 1..16: note = synthetic [barcode part1]
  source 1..16: mol_type = other DNA
tccgaagtcaactggt

SEQ ID NO: 2442 - DNA, 16 bp, synthetic construct
  misc_feature 1..16: note = synthetic [barcode part1]
  source 1..16: mol_type = other DNA
gtctcgcgtccgaatt

SEQ ID NO: 2443 - DNA, 16 bp, synthetic construct
  misc_feature 1..16: note = synthetic [barcode part1]
  source 1..16: mol_type = other DNA
tgtgccgtcagaagag

SEQ ID NO: 2444 - DNA, 16 bp, synthetic construct
  misc_feature 1..16: note = synthetic [barcode part1]
  source 1..16: mol_type = other DNA
acttacgtcgacgtag

SEQ ID NO: 2445 - DNA, 16 bp, synthetic construct
  misc_feature 1..16: note = synthetic [barcode part1]
  source 1..16: mol_type = other DNA
tggaacctcgagatct

SEQ ID NO: 2446 - DNA, 16 bp, synthetic construct
  misc_feature 1..16: note = synthetic [barcode part1]
  source 1..16: mol_type = other DNA
taggaatcaggtcgcg

SEQ ID NO: 2447 - DNA, 16 bp, synthetic construct
  misc_feature 1..16: note = synthetic [barcode part1]
  source 1..16: mol_type = other DNA
cgaagaacacacaact

SEQ ID NO: 2448 - DNA, 16 bp, synthetic construct
  misc_feature 1..16: note = synthetic [barcode part1]
  source 1..16: mol_type = other DNA
caacgccgttcacttg

SEQ ID NO: 2449 - DNA, 16 bp, synthetic construct
  misc_feature 1..16: note = synthetic [barcode part1]
  source 1..16: mol_type = other DNA
gtgttccagttcaatc

SEQ ID NO: 2450 - DNA, 16 bp, synthetic construct
  misc_feature 1..16: note = synthetic [barcode part1]
  source 1..16: mol_type = other DNA
caagtcgcacgttcct

SEQ ID NO: 2451 - DNA, 16 bp, synthetic construct
  misc_feature 1..16: note = synthetic [barcode part1]
  source 1..16: mol_type = other DNA
gcgcgtattaactgac

SEQ ID NO: 2452 - DNA, 16 bp, synthetic construct
  misc_feature 1..16: note = synthetic [barcode part1]
  source 1..16: mol_type = other DNA
caacggaaccttgttg

SEQ ID NO: 2453 - DNA, 16 bp, synthetic construct
  misc_feature 1..16: note = synthetic [barcode part1]
  source 1..16: mol_type = other DNA
aattgcgaccggtatc

SEQ ID NO: 2454 - DNA, 16 bp, synthetic construct
  misc_feature 1..16: note = synthetic [barcode part1]
  source 1..16: mol_type = other DNA
caacaacttctcgcgc

SEQ ID NO: 2455 - DNA, 16 bp, synthetic construct
  misc_feature 1..16: note = synthetic [barcode part1]
  source 1..16: mol_type = other DNA
cggaagaacgtgttgc

SEQ ID NO: 2456 - DNA, 16 bp, synthetic construct
  misc_feature 1..16: note = synthetic [barcode part1]
  source 1..16: mol_type = other DNA
caactcaataggagtg

SEQ ID NO: 2457 - DNA, 16 bp, synthetic construct
  misc_feature 1..16: note = synthetic [barcode part1]
  source 1..16: mol_type = other DNA
tcggtctctacgcaac

SEQ ID NO: 2458 - DNA, 16 bp, synthetic construct
  misc_feature 1..16: note = synthetic [barcode part1]
  source 1..16: mol_type = other DNA
attctcttaacgcacg

SEQ ID NO: 2459 - DNA, 16 bp, synthetic construct
  misc_feature 1..16: note = synthetic [barcode part1]
  source 1..16: mol_type = other DNA
ccggtcttattggcgt

SEQ ID NO: 2460 - DNA, 16 bp, synthetic construct
  misc_feature 1..16: note = synthetic [barcode part1]
  source 1..16: mol_type = other DNA
caacggtacgccttct

SEQ ID NO: 2461 - DNA, 16 bp, synthetic construct
  misc_feature 1..16: note = synthetic [barcode part1]
  source 1..16: mol_type = other DNA
gatatcggatcggttc

SEQ ID NO: 2462 - DNA, 16 bp, synthetic construct
  misc_feature 1..16: note = synthetic [barcode part1]
  source 1..16: mol_type = other DNA
cggagaggttagtatt

SEQ ID NO: 2463 - DNA, 16 bp, synthetic construct
  misc_feature 1..16: note = synthetic [barcode part1]
  source 1..16: mol_type = other DNA
agtcaggcctacgaag

SEQ ID NO: 2464 - DNA, 16 bp, synthetic construct
  misc_feature 1..16: note = synthetic [barcode part1]
  source 1..16: mol_type = other DNA
cgcgagtataagttcc

SEQ ID NO: 2465 - DNA, 16 bp, synthetic construct
  misc_feature 1..16: note = synthetic [barcode part1]
  source 1..16: mol_type = other DNA
aaccaacggccttaac

SEQ ID NO: 2466 - DNA, 16 bp, synthetic construct
  misc_feature 1..16: note = synthetic [barcode part1]
  source 1..16: mol_type = other DNA
tactggaccgtactcc

SEQ ID NO: 2467 - DNA, 16 bp, synthetic construct
  misc_feature 1..16: note = synthetic [barcode part1]
  source 1..16: mol_type = other DNA
ccgacttcttacaggc

SEQ ID NO: 2468 - DNA, 16 bp, synthetic construct
  misc_feature 1..16: note = synthetic [barcode part1]
  source 1..16: mol_type = other DNA
aacggaccgagattcg

SEQ ID NO: 2469 - DNA, 16 bp, synthetic construct
  misc_feature 1..16: note = synthetic [barcode part1]
  source 1..16: mol_type = other DNA
tcgtaagacctggatc

SEQ ID NO: 2470 - DNA, 16 bp, synthetic construct
  misc_feature 1..16: note = synthetic [barcode part1]
  source 1..16: mol_type = other DNA
agtgagattgacacgt

SEQ ID NO: 2471 - DNA, 16 bp, synthetic construct
  misc_feature 1..16: note = synthetic [barcode part1]
  source 1..16: mol_type = other DNA
tctcaacacactcagt

SEQ ID NO: 2472 - DNA, 16 bp, synthetic construct
  misc_feature 1..16: note = synthetic [barcode part1]
  source 1..16: mol_type = other DNA
gtatattggaccagag

SEQ ID NO: 2473 - DNA, 16 bp, synthetic construct
  misc_feature 1..16: note = synthetic [barcode part1]
  source 1..16: mol_type = other DNA
atagtagacttggacg

SEQ ID NO: 2474 - DNA, 16 bp, synthetic construct
  misc_feature 1..16: note = synthetic [barcode part1]
  source 1..16: mol_type = other DNA
cgattcaattctcgtg

SEQ ID NO: 2475 - DNA, 16 bp, synthetic construct
  misc_feature 1..16: note = synthetic [barcode part1]
  source 1..16: mol_type = other DNA
tcgccagaatcgttag

SEQ ID NO: 2476 - DNA, 16 bp, synthetic construct
  misc_feature 1..16: note = synthetic [barcode part1]
  source 1..16: mol_type = other DNA
taccaacaagaagtcg

SEQ ID NO: 2477 - DNA, 16 bp, synthetic construct
  misc_feature 1..16: note = synthetic [barcode part1]
  source 1..16: mol_type = other DNA
accgacgtaagttcac

SEQ ID NO: 2478 - DNA, 16 bp, synthetic construct
  misc_feature 1..16: note = synthetic [barcode part1]
  source 1..16: mol_type = other DNA
agtggaggtgtagtcc

SEQ ID NO: 2479 - DNA, 16 bp, synthetic construct
  misc_feature 1..16: note = synthetic [barcode part1]
  source 1..16: mol_type = other DNA
caagtgttggtaagac

SEQ ID NO: 2480 - DNA, 16 bp, synthetic construct
  misc_feature 1..16: note = synthetic [barcode part1]
  source 1..16: mol_type = other DNA
aggatcctagataggt

SEQ ID NO: 2481 - DNA, 16 bp, synthetic construct
  misc_feature 1..16: note = synthetic [barcode part1]
  source 1..16: mol_type = other DNA
cgtcgaattcacgcct

SEQ ID NO: 2482 - DNA, 16 bp, synthetic construct
  misc_feature 1..16: note = synthetic [barcode part1]
  source 1..16: mol_type = other DNA
cggatcgttctgtgtc

SEQ ID NO: 2483 - DNA, 16 bp, synthetic construct
  misc_feature 1..16: note = synthetic [barcode part1]
  source 1..16: mol_type = other DNA
caccaaggacagttct

SEQ ID NO: 2484 - DNA, 16 bp, synthetic construct
  misc_feature 1..16: note = synthetic [barcode part1]
  source 1..16: mol_type = other DNA
tagataccgcactggt

SEQ ID NO: 2485 - DNA, 16 bp, synthetic construct
  misc_feature 1..16: note = synthetic [barcode part1]
  source 1..16: mol_type = other DNA
aattacagaccgagac

SEQ ID NO: 2486 - DNA, 16 bp, synthetic construct
  misc_feature 1..16: note = synthetic [barcode part1]
  source 1..16: mol_type = other DNA
actagacgtgatctgc

SEQ ID NO: 2487 - DNA, 16 bp, synthetic construct
  misc_feature 1..16: note = synthetic [barcode part1]
  source 1..16: mol_type = other DNA
tcacactggtgcaagt

SEQ ID NO: 2488 - DNA, 16 bp, synthetic construct
  misc_feature 1..16: note = synthetic [barcode part1]
  source 1..16: mol_type = other DNA
tggcaataatccgacc

SEQ ID NO: 2489 - DNA, 16 bp, synthetic construct
  misc_feature 1..16: note = synthetic [barcode part1]
  source 1..16: mol_type = other DNA
ccgaattacacctccg

SEQ ID NO: 2490 - DNA, 16 bp, synthetic construct
  misc_feature 1..16: note = synthetic [barcode part1]
  source 1..16: mol_type = other DNA
agaccgagattccttg

SEQ ID NO: 2491 - DNA, 16 bp, synthetic construct
  misc_feature 1..16: note = synthetic [barcode part1]
  source 1..16: mol_type = other DNA
gaccttcactacttcc

SEQ ID NO: 2492 - DNA, 16 bp, synthetic construct
  misc_feature 1..16: note = synthetic [barcode part1]
  source 1..16: mol_type = other DNA
agtctccaagacgatc

SEQ ID NO: 2493 - DNA, 16 bp, synthetic construct
  misc_feature 1..16: note = synthetic [barcode part1]
  source 1..16: mol_type = other DNA
cgtcaggttatattcc

SEQ ID NO: 2494 - DNA, 16 bp, synthetic construct
  misc_feature 1..16: note = synthetic [barcode part1]
  source 1..16: mol_type = other DNA
aactctcagttcgtgt

SEQ ID NO: 2495 - DNA, 16 bp, synthetic construct
  misc_feature 1..16: note = synthetic [barcode part1]
  source 1..16: mol_type = other DNA
gtactaccgttacgag

SEQ ID NO: 2496 - DNA, 16 bp, synthetic construct
  misc_feature 1..16: note = synthetic [barcode part1]
  source 1..16: mol_type = other DNA
tgtgagtcctgaacac

SEQ ID NO: 2497 - DNA, 16 bp, synthetic construct
  misc_feature 1..16: note = synthetic [barcode part1]
  source 1..16: mol_type = other DNA
agtgattgcgttctct

SEQ ID NO: 2498 - DNA, 16 bp, synthetic construct
  misc_feature 1..16: note = synthetic [barcode part1]
  source 1..16: mol_type = other DNA
aatcgatccggaacct

SEQ ID NO: 2499 - DNA, 16 bp, synthetic construct
  misc_feature 1..16: note = synthetic [barcode part1]
  source 1..16: mol_type = other DNA
tcggtcggattctaag

SEQ ID NO: 2500 - DNA, 16 bp, synthetic construct
  misc_feature 1..16: note = synthetic [barcode part1]
  source 1..16: mol_type = other DNA
gcagtgccaattagtc

SEQ ID NO: 2501 - DNA, 16 bp, synthetic construct
  misc_feature 1..16: note = synthetic [barcode part1]
  source 1..16: mol_type = other DNA
tactggaggtatagac

SEQ ID NO: 2502 - DNA, 16 bp, synthetic construct
  misc_feature 1..16: note = synthetic [barcode part1]
  source 1..16: mol_type = other DNA
taacttctagtcacgc

SEQ ID NO: 2503 - DNA, 16 bp, synthetic construct
  misc_feature 1..16: note = synthetic [barcode part1]
  source 1..16: mol_type = other DNA
gttaatacagaggacc

SEQ ID NO: 2504 - DNA, 16 bp, synthetic construct
  misc_feature 1..16: note = synthetic [barcode part1]
  source 1..16: mol_type = other DNA
agtgaagtcggatact

SEQ ID NO: 2505 - DNA, 16 bp, synthetic construct
  misc_feature 1..16: note = synthetic [barcode part1]
  source 1..16: mol_type = other DNA
caggttgaagacgcgt

SEQ ID NO: 2506 - DNA, 16 bp, synthetic construct
  misc_feature 1..16: note = synthetic [barcode part1]
  source 1..16: mol_type = other DNA
tgtccactggagtctc

SEQ ID NO: 2507 - DNA, 16 bp, synthetic construct
  misc_feature 1..16: note = synthetic [barcode part1]
  source 1..16: mol_type = other DNA
tcagtcaactgcagtg

SEQ ID NO: 2508 - DNA, 16 bp, synthetic construct
  misc_feature 1..16: note = synthetic [barcode part1]
  source 1..16: mol_type = other DNA
acaggagttctgtgtc

SEQ ID NO: 2509 - DNA, 16 bp, synthetic construct
  misc_feature 1..16: note = synthetic [barcode part1]
  source 1..16: mol_type = other DNA
taacgacgcgtaggac

SEQ ID NO: 2510 - DNA, 16 bp, synthetic construct
  misc_feature 1..16: note = synthetic [barcode part1]
  source 1..16: mol_type = other DNA
caggattaatcctggc

SEQ ID NO: 2511 - DNA, 16 bp, synthetic construct
  misc_feature 1..16: note = synthetic [barcode part1]
  source 1..16: mol_type = other DNA
gtcttgcgttcgaacc

SEQ ID NO: 2512 - DNA, 16 bp, synthetic construct
  misc_feature 1..16: note = synthetic [barcode part1]
  source 1..16: mol_type = other DNA
ttcgtataatccggtc

SEQ ID NO: 2513 - DNA, 16 bp, synthetic construct
  misc_feature 1..16: note = synthetic [barcode part1]
  source 1..16: mol_type = other DNA
acaagttcgaccttct

SEQ ID NO: 2514 - DNA, 16 bp, synthetic construct
  misc_feature 1..16: note = synthetic [barcode part1]
  source 1..16: mol_type = other DNA
caacaacttggcgatc

SEQ ID NO: 2515 - DNA, 16 bp, synthetic construct
  misc_feature 1..16: note = synthetic [barcode part1]
  source 1..16: mol_type = other DNA
ttagttcggtggcaac

SEQ ID NO: 2516 - DNA, 16 bp, synthetic construct
  misc_feature 1..16: note = synthetic [barcode part1]
  source 1..16: mol_type = other DNA
cacttaccaccgtggt

SEQ ID NO: 2517 - DNA, 16 bp, synthetic construct
  misc_feature 1..16: note = synthetic [barcode part1]
  source 1..16: mol_type = other DNA
cgtactcacaactcgc

SEQ ID NO: 2518 - DNA, 16 bp, synthetic construct
  misc_feature 1..16: note = synthetic [barcode part1]
  source 1..16: mol_type = other DNA
tacgtgaacgattgcc

SEQ ID NO: 2519 - DNA, 16 bp, synthetic construct
  misc_feature 1..16: note = synthetic [barcode part1]
  source 1..16: mol_type = other DNA
aacttcgcggacagag

SEQ ID NO: 2520 - DNA, 16 bp, synthetic construct
  misc_feature 1..16: note = synthetic [barcode part1]
  source 1..16: mol_type = other DNA
cctcctacttgatctg

SEQ ID NO: 2521 - DNA, 16 bp, synthetic construct
  misc_feature 1..16: note = synthetic [barcode part1]
  source 1..16: mol_type = other DNA
tcaaggtctatccgcc

SEQ ID NO: 2522 - DNA, 16 bp, synthetic construct
  misc_feature 1..16: note = synthetic [barcode part1]
  source 1..16: mol_type = other DNA
agtacgcaatctctct

SEQ ID NO: 2523 - DNA, 16 bp, synthetic construct
  misc_feature 1..16: note = synthetic [barcode part1]
  source 1..16: mol_type = other DNA
actggtgcgttagtgt

SEQ ID NO: 2524 - DNA, 16 bp, synthetic construct
  misc_feature 1..16: note = synthetic [barcode part1]
  source 1..16: mol_type = other DNA
atccaacacactcttg

SEQ ID NO: 2525 - DNA, 16 bp, synthetic construct
  misc_feature 1..16: note = synthetic [barcode part1]
  source 1..16: mol_type = other DNA
tatagagtctcgtgcg

SEQ ID NO: 2526 - DNA, 16 bp, synthetic construct
  misc_feature 1..16: note = synthetic [barcode part1]
  source 1..16: mol_type = other DNA
atagtagtccggttcg

SEQ ID NO: 2527 - DNA, 16 bp, synthetic construct
  misc_feature 1..16: note = synthetic [barcode part1]
  source 1..16: mol_type = other DNA
ttccaccacttgtaag

SEQ ID NO: 2528 - DNA, 16 bp, synthetic construct
  misc_feature 1..16: note = synthetic [barcode part1]
  source 1..16: mol_type = other DNA
tacgcggatctgaatc

SEQ ID NO: 2529 - DNA, 16 bp, synthetic construct
  misc_feature 1..16: note = synthetic [barcode part1]
  source 1..16: mol_type = other DNA
actactggtgtaagag

SEQ ID NO: 2530 - DNA, 16 bp, synthetic construct
  misc_feature 1..16: note = synthetic [barcode part1]
  source 1..16: mol_type = other DNA
ttctagtgccaccttc

SEQ ID NO: 2531 - DNA, 16 bp, synthetic construct
  misc_feature 1..16: note = synthetic [barcode part1]
  source 1..16: mol_type = other DNA
ccgacaagtaagaact

SEQ ID NO: 2532 - DNA, 16 bp, synthetic construct
  misc_feature 1..16: note = synthetic [barcode part1]
  source 1..16: mol_type = other DNA
cgccaagttcacgttc

SEQ ID NO: 2533 - DNA, 16 bp, synthetic construct
  misc_feature 1..16: note = synthetic [barcode part1]
  source 1..16: mol_type = other DNA
tcgaggttactacggt

SEQ ID NO: 2534 - DNA, 16 bp, synthetic construct
  misc_feature 1..16: note = synthetic [barcode part1]
  source 1..16: mol_type = other DNA
gcggatcttcttggtc

SEQ ID NO: 2535 - DNA, 16 bp, synthetic construct
  misc_feature 1..16: note = synthetic [barcode part1]
  source 1..16: mol_type = other DNA
tccactagaccgcact

SEQ ID NO: 2536 - DNA, 16 bp, synthetic construct
  misc_feature 1..16: note = synthetic [barcode part1]
  source 1..16: mol_type = other DNA
cgttcggaggaatcag

SEQ ID NO: 2537 - DNA, 16 bp, synthetic construct
  misc_feature 1..16: note = synthetic [barcode part1]
  source 1..16: mol_type = other DNA
gaagtagtgaggtggt

SEQ ID NO: 2538 - DNA, 16 bp, synthetic construct
  misc_feature 1..16: note = synthetic [barcode part1]
  source 1..16: mol_type = other DNA
aataccaacgtcgcgt

SEQ ID NO: 2539 - DNA, 16 bp, synthetic construct
  misc_feature 1..16: note = synthetic [barcode part1]
  source 1..16: mol_type = other DNA
gtgcgcgtatagtact

SEQ ID NO: 2540 - DNA, 16 bp, synthetic construct
  misc_feature 1..16: note = synthetic [barcode part1]
  source 1..16: mol_type = other DNA
tcaaggttggaactcc

SEQ ID NO: 2541 - DNA, 16 bp, synthetic construct
  misc_feature 1..16: note = synthetic [barcode part1]
  source 1..16: mol_type = other DNA
tggaataacgaccgcg

SEQ ID NO: 2542 - DNA, 16 bp, synthetic construct
  misc_feature 1..16: note = synthetic [barcode part1]
  source 1..16: mol_type = other DNA
tctagacctcgtgaag

SEQ ID NO: 2543 - DNA, 16 bp, synthetic construct
  misc_feature 1..16: note = synthetic [barcode part1]
  source 1..16: mol_type = other DNA
cgtgtccaataatcct

SEQ ID NO: 2544 - DNA, 16 bp, synthetic construct
  misc_feature 1..16: note = synthetic [barcode part1]
  source 1..16: mol_type = other DNA
tcttgcgcggtaatcc

SEQ ID NO: 2545 - DNA, 16 bp, synthetic construct
  misc_feature 1..16: note = synthetic [barcode part1]
  source 1..16: mol_type = other DNA
ccgtataagaactgag

SEQ ID NO: 2546 - DNA, 16 bp, synthetic construct
  misc_feature 1..16: note = synthetic [barcode part1]
  source 1..16: mol_type = other DNA
atctatcggtactacc

SEQ ID NO: 2547 - DNA, 16 bp, synthetic construct
  misc_feature 1..16: note = synthetic [barcode part1]
  source 1..16: mol_type = other DNA
gtaaggcgcgaatctg

SEQ ID NO: 2548 - DNA, 16 bp, synthetic construct
  misc_feature 1..16: note = synthetic [barcode part1]
  source 1..16: mol_type = other DNA
tctgtatcggtaactc

SEQ ID NO: 2549 - DNA, 16 bp, synthetic construct
  misc_feature 1..16: note = synthetic [barcode part1]
  source 1..16: mol_type = other DNA
tctatctctcgaagtg

SEQ ID NO: 2550 - DNA, 16 bp, synthetic construct
  misc_feature 1..16: note = synthetic [barcode part1]
  source 1..16: mol_type = other DNA
ttcaaggtcctggaac

SEQ ID NO: 2551 - DNA, 16 bp, synthetic construct
  misc_feature 1..16: note = synthetic [barcode part1]
  source 1..16: mol_type = other DNA
cacagtggacactgtt

SEQ ID NO: 2552 - DNA, 16 bp, synthetic construct
  misc_feature 1..16: note = synthetic [barcode part1]
  source 1..16: mol_type = other DNA
cgattcctctcaatcc

SEQ ID NO: 2553 - DNA, 16 bp, synthetic construct
  misc_feature 1..16: note = synthetic [barcode part1]
  source 1..16: mol_type = other DNA
tgaactgatcgtcgac

SEQ ID NO: 2554 - DNA, 16 bp, synthetic construct
  misc_feature 1..16: note = synthetic [barcode part1]
  source 1..16: mol_type = other DNA
gttcctgattcggtgc

SEQ ID NO: 2555 - DNA, 16 bp, synthetic construct
  misc_feature 1..16: note = synthetic [barcode part1]
  source 1..16: mol_type = other DNA
aaggtcgtaacttccg

SEQ ID NO: 2556 - DNA, 16 bp, synthetic construct
  misc_feature 1..16: note = synthetic [barcode part1]
  source 1..16: mol_type = other DNA
gcactagtgtgttggt

SEQ ID NO: 2557 - DNA, 16 bp, synthetic construct
  misc_feature 1..16: note = synthetic [barcode part1]
  source 1..16: mol_type = other DNA
cgcacgtattacagtg

SEQ ID NO: 2558 - DNA, 16 bp, synthetic construct
  misc_feature 1..16: note = synthetic [barcode part1]
  source 1..16: mol_type = other DNA
gttcaggtcacagact

SEQ ID NO: 2559 - DNA, 16 bp, synthetic construct
  misc_feature 1..16: note = synthetic [barcode part1]
  source 1..16: mol_type = other DNA
acgagacgcctgtaag

SEQ ID NO: 2560 - DNA, 16 bp, synthetic construct
  misc_feature 1..16: note = synthetic [barcode part1]
  source 1..16: mol_type = other DNA
gtgacgaccacacaag

SEQ ID NO: 2561 - DNA, 16 bp, synthetic construct
  misc_feature 1..16: note = synthetic [barcode part1]
  source 1..16: mol_type = other DNA
ttcggtcaactctctc

SEQ ID NO: 2562 - DNA, 16 bp, synthetic construct
  misc_feature 1..16: note = synthetic [barcode part1]
  source 1..16: mol_type = other DNA
cggcgttgttcacttg

SEQ ID NO: 2563 - DNA, 16 bp, synthetic construct
  misc_feature 1..16: note = synthetic [barcode part1]
  source 1..16: mol_type = other DNA
tgtatcttaggccgcc

SEQ ID NO: 2564 - DNA, 16 bp, synthetic construct
  misc_feature 1..16: note = synthetic [barcode part1]
  source 1..16: mol_type = other DNA
gtgaggtagacaacag

SEQ ID NO: 2565 - DNA, 16 bp, synthetic construct
  misc_feature 1..16: note = synthetic [barcode part1]
  source 1..16: mol_type = other DNA
gtgaccgtctcaactc

SEQ ID NO: 2566 - DNA, 16 bp, synthetic construct
  misc_feature 1..16: note = synthetic [barcode part1]
  source 1..16: mol_type = other DNA
gtacctcgactgttgc

SEQ ID NO: 2567 - DNA, 16 bp, synthetic construct
  misc_feature 1..16: note = synthetic [barcode part1]
  source 1..16: mol_type = other DNA
tcctcgtgaatacgag

SEQ ID NO: 2568 - DNA, 16 bp, synthetic construct
  misc_feature 1..16: note = synthetic [barcode part1]
  source 1..16: mol_type = other DNA
cctcggatctgttcag

SEQ ID NO: 2569 - DNA, 16 bp, synthetic construct
  misc_feature 1..16: note = synthetic [barcode part1]
  source 1..16: mol_type = other DNA
tcagacttggtggttg

SEQ ID NO: 2570 - DNA, 16 bp, synthetic construct
  misc_feature 1..16: note = synthetic [barcode part1]
  source 1..16: mol_type = other DNA
ttcgaagattgcggtc

SEQ ID NO: 2571 - DNA, 16 bp, synthetic construct
  misc_feature 1..16: note = synthetic [barcode part1]
  source 1..16: mol_type = other DNA
agaatacaggaacgcg

SEQ ID NO: 2572 - DNA, 16 bp, synthetic construct
  misc_feature 1..16: note = synthetic [barcode part1]
  source 1..16: mol_type = other DNA
ttggtgtcctcaattg

SEQ ID NO: 2573 - DNA, 16 bp, synthetic construct
  misc_feature 1..16: note = synthetic [barcode part1]
  source 1..16: mol_type = other DNA
tcttacgactggatct

SEQ ID NO: 2574 - DNA, 16 bp, synthetic construct
  misc_feature 1..16: note = synthetic [barcode part1]
  source 1..16: mol_type = other DNA
aagtaccaagttcgcc

SEQ ID NO: 2575 - DNA, 16 bp, synthetic construct
  misc_feature 1..16: note = synthetic [barcode part1]
  source 1..16: mol_type = other DNA
accgaaccgtctctgt

SEQ ID NO: 2576 - DNA, 16 bp, synthetic construct
  misc_feature 1..16: note = synthetic [barcode part1]
  source 1..16: mol_type = other DNA
acaccagtgcgttagt

SEQ ID NO: 2577 - DNA, 16 bp, synthetic construct
  misc_feature 1..16: note = synthetic [barcode part1]
  source 1..16: mol_type = other DNA
acttcgtactctccgt

SEQ ID NO: 2578 - DNA, 16 bp, synthetic construct
  misc_feature 1..16: note = synthetic [barcode part1]
  source 1..16: mol_type = other DNA
gtcgacgtaagtctac

SEQ ID NO: 2579 - DNA, 16 bp, synthetic construct
  misc_feature 1..16: note = synthetic [barcode part1]
  source 1..16: mol_type = other DNA
gaggatccaactgcag

SEQ ID NO: 2580 - DNA, 16 bp, synthetic construct
  misc_feature 1..16: note = synthetic [barcode part1]
  source 1..16: mol_type = other DNA
ttggttgcacaacacg

SEQ ID NO: 2581 - DNA, 16 bp, synthetic construct
  misc_feature 1..16: note = synthetic [barcode part1]
  source 1..16: mol_type = other DNA
cagacaggtagtaccg

SEQ ID NO: 2582 - DNA, 16 bp, synthetic construct
  misc_feature 1..16: note = synthetic [barcode part1]
  source 1..16: mol_type = other DNA
cgtgtctacctggtac

SEQ ID NO: 2583 - DNA, 16 bp, synthetic construct
  misc_feature 1..16: note = synthetic [barcode part1]
  source 1..16: mol_type = other DNA
tactcaggactacacg

SEQ ID NO: 2584 - DNA, 16 bp, synthetic construct
  misc_feature 1..16: note = synthetic [barcode part1]
  source 1..16: mol_type = other DNA
tatacctgcgatctac

SEQ ID NO: 2585 - DNA, 16 bp, synthetic construct
  misc_feature 1..16: note = synthetic [barcode part1]
  source 1..16: mol_type = other DNA
tgcacgacctgatcct

SEQ ID NO: 2586 - DNA, 16 bp, synthetic construct
  misc_feature 1..16: note = synthetic [barcode part1]
  source 1..16: mol_type = other DNA
atagtacacgtcgcgt

SEQ ID NO: 2587 - DNA, 16 bp, synthetic construct
  misc_feature 1..16: note = synthetic [barcode part1]
  source 1..16: mol_type = other DNA
gcgatcgttctggttc

SEQ ID NO: 2588 - DNA, 16 bp, synthetic construct
  misc_feature 1..16: note = synthetic [barcode part1]
  source 1..16: mol_type = other DNA
acaactgaattcctcc

SEQ ID NO: 2589 - DNA, 16 bp, synthetic construct
  misc_feature 1..16: note = synthetic [barcode part1]
  source 1..16: mol_type = other DNA
attccacgcggtcgtt

SEQ ID NO: 2590 - DNA, 16 bp, synthetic construct
  misc_feature 1..16: note = synthetic [barcode part1]
  source 1..16: mol_type = other DNA
ataactattccggtcc

SEQ ID NO: 2591 - DNA, 16 bp, synthetic construct
  misc_feature 1..16: note = synthetic [barcode part1]
  source 1..16: mol_type = other DNA
cagacgcactaggaac

SEQ ID NO: 2592 - DNA, 16 bp, synthetic construct
  misc_feature 1..16: note = synthetic [barcode part1]
  source 1..16: mol_type = other DNA
gccaatacgaagaatc

SEQ ID NO: 2593 - DNA, 16 bp, synthetic construct
  misc_feature 1..16: note = synthetic [barcode part1]
  source 1..16: mol_type = other DNA
ccggtgttaatcacag

SEQ ID NO: 2594 - DNA, 16 bp, synthetic construct
  misc_feature 1..16: note = synthetic [barcode part1]
  source 1..16: mol_type = other DNA
ttcaacgagacgtaag

SEQ ID NO: 2595 - DNA, 16 bp, synthetic construct
  misc_feature 1..16: note = synthetic [barcode part1]
  source 1..16: mol_type = other DNA
tcgcggataagttcac

SEQ ID NO: 2596 - DNA, 16 bp, synthetic construct
  misc_feature 1..16: note = synthetic [barcode part1]
  source 1..16: mol_type = other DNA
atagtgtgtgtcgcgt

SEQ ID NO: 2597 - DNA, 16 bp, synthetic construct
  misc_feature 1..16: note = synthetic [barcode part1]
  source 1..16: mol_type = other DNA
tatctgtaacactgcc

SEQ ID NO: 2598 - DNA, 16 bp, synthetic construct
  misc_feature 1..16: note = synthetic [barcode part1]
  source 1..16: mol_type = other DNA
aggcagattgtaacac

SEQ ID NO: 2599 - DNA, 16 bp, synthetic construct
  misc_feature 1..16: note = synthetic [barcode part1]
  source 1..16: mol_type = other DNA
agacaaggcctgtctt

SEQ ID NO: 2600 - DNA, 16 bp, synthetic construct
  misc_feature 1..16: note = synthetic [barcode part1]
  source 1..16: mol_type = other DNA
cagatctcagagtaag

SEQ ID NO: 2601 - DNA, 16 bp, synthetic construct
  misc_feature 1..16: note = synthetic [barcode part1]
  source 1..16: mol_type = other DNA
agtactggttgtggtc

SEQ ID NO: 2602 - DNA, 16 bp, synthetic construct
  misc_feature 1..16: note = synthetic [barcode part1]
  source 1..16: mol_type = other DNA
accgtctaagtccacc

SEQ ID NO: 2603 - DNA, 16 bp, synthetic construct
  misc_feature 1..16: note = synthetic [barcode part1]
  source 1..16: mol_type = other DNA
tgatcagatcggttgc

SEQ ID NO: 2604 - DNA, 16 bp, synthetic construct
  misc_feature 1..16: note = synthetic [barcode part1]
  source 1..16: mol_type = other DNA
ccgttctatataaccg

SEQ ID NO: 2605 - DNA, 16 bp, synthetic construct
  misc_feature 1..16: note = synthetic [barcode part1]
  source 1..16: mol_type = other DNA
gcgtctctcaacggtt

SEQ ID NO: 2606 - DNA, 16 bp, synthetic construct
  misc_feature 1..16: note = synthetic [barcode part1]
  source 1..16: mol_type = other DNA
gatcgatctgaagtcc

SEQ ID NO: 2607 - DNA, 16 bp, synthetic construct
  misc_feature 1..16: note = synthetic [barcode part1]
  source 1..16: mol_type = other DNA
ttgttcacctgtccac

SEQ ID NO: 2608 - DNA, 16 bp, synthetic construct
  misc_feature 1..16: note = synthetic [barcode part1]
  source 1..16: mol_type = other DNA
cgaatctctcggatag

SEQ ID NO: 2609 - DNA, 16 bp, synthetic construct
  misc_feature 1..16: note = synthetic [barcode part1]
  source 1..16: mol_type = other DNA
gttgtagaacgaacac

SEQ ID NO: 2610 - DNA, 16 bp, synthetic construct
  misc_feature 1..16: note = synthetic [barcode part1]
  source 1..16: mol_type = other DNA
accgtatagagtaacg

SEQ ID NO: 2611 - DNA, 16 bp, synthetic construct
  misc_feature 1..16: note = synthetic [barcode part1]
  source 1..16: mol_type = other DNA
tccgtacacacagaac

SEQ ID NO: 2612 - DNA, 16 bp, synthetic construct
  misc_feature 1..16: note = synthetic [barcode part1]
  source 1..16: mol_type = other DNA
cctgaagttgatcggt

SEQ ID NO: 2613 - DNA, 16 bp, synthetic construct
  misc_feature 1..16: note = synthetic [barcode part1]
  source 1..16: mol_type = other DNA
tcacaaggagtacctc

SEQ ID NO: 2614 - DNA, 16 bp, synthetic construct
  misc_feature 1..16: note = synthetic [barcode part1]
  source 1..16: mol_type = other DNA
aggcacttgtcgcctt

SEQ ID NO: 2615 - DNA, 16 bp, synthetic construct
  misc_feature 1..16: note = synthetic [barcode part1]
  source 1..16: mol_type = other DNA
tgcacttgacacgagt

SEQ ID NO: 2616 - DNA, 16 bp, synthetic construct
  misc_feature 1..16: note = synthetic [barcode part1]
  source 1..16: mol_type = other DNA
taatcggttccaggac

SEQ ID NO: 2617 - DNA, 16 bp, synthetic construct
  misc_feature 1..16: note = synthetic [barcode part1]
  source 1..16: mol_type = other DNA
aaccagtgtcacaacc

SEQ ID NO: 2618 - DNA, 16 bp, synthetic construct
  misc_feature 1..16: note = synthetic [barcode part1]
  source 1..16: mol_type = other DNA
cagtgatctcttgtac

SEQ ID NO: 2619 - DNA, 16 bp, synthetic construct
  misc_feature 1..16: note = synthetic [barcode part1]
  source 1..16: mol_type = other DNA
tgccaattcctccgag

SEQ ID NO: 2620 - DNA, 16 bp, synthetic construct
  misc_feature 1..16: note = synthetic [barcode part1]
  source 1..16: mol_type = other DNA
tcgaccttattctgcc

SEQ ID NO: 2621 - DNA, 16 bp, synthetic construct
  misc_feature 1..16: note = synthetic [barcode part1]
  source 1..16: mol_type = other DNA
ttatcgcacagacctt

SEQ ID NO: 2622 - DNA, 16 bp, synthetic construct
  misc_feature 1..16: note = synthetic [barcode part1]
  source 1..16: mol_type = other DNA
agaactcaagtagacc

SEQ ID NO: 2623 - DNA, 16 bp, synthetic construct
  misc_feature 1..16: note = synthetic [barcode part1]
  source 1..16: mol_type = other DNA
gagtgttgacaaggcc

SEQ ID NO: 2624 - DNA, 16 bp, synthetic construct
  misc_feature 1..16: note = synthetic [barcode part1]
  source 1..16: mol_type = other DNA
tcaagtaaggcagtgt

SEQ ID NO: 2625 - DNA, 16 bp, synthetic construct
  misc_feature 1..16: note = synthetic [barcode part1]
  source 1..16: mol_type = other DNA
ccaagtatcgtggatc

SEQ ID NO: 2626 - DNA, 16 bp, synthetic construct
  misc_feature 1..16: note = synthetic [barcode part1]
  source 1..16: mol_type = other DNA
cggccaacaactaatc

SEQ ID NO: 2627 - DNA, 16 bp, synthetic construct
  misc_feature 1..16: note = synthetic [barcode part1]
  source 1..16: mol_type = other DNA
accaacagtaaccgtc

SEQ ID NO: 2628 - DNA, 16 bp, synthetic construct
  misc_feature 1..16: note = synthetic [barcode part1]
  source 1..16: mol_type = other DNA
actgcgacgcctatct

SEQ ID NO: 2629 - DNA, 16 bp, synthetic construct
  misc_feature 1..16: note = synthetic [barcode part1]
  source 1..16: mol_type = other DNA
taagaccgcgtatacc

SEQ ID NO: 2630 - DNA, 16 bp, synthetic construct
  misc_feature 1..16: note = synthetic [barcode part1]
  source 1..16: mol_type = other DNA
tgccgaacctgcactt

SEQ ID NO: 2631 - DNA, 16 bp, synthetic construct
  misc_feature 1..16: note = synthetic [barcode part1]
  source 1..16: mol_type = other DNA
gcacggtgttagtatc

SEQ ID NO: 2632 - DNA, 16 bp, synthetic construct
  misc_feature 1..16: note = synthetic [barcode part1]
  source 1..16: mol_type = other DNA
acgtccttagtctaac

SEQ ID NO: 2633 - DNA, 16 bp, synthetic construct
  misc_feature 1..16: note = synthetic [barcode part1]
  source 1..16: mol_type = other DNA
atacctgttgtaggcg

SEQ ID NO: 2634 - DNA, 16 bp, synthetic construct
  misc_feature 1..16: note = synthetic [barcode part1]
  source 1..16: mol_type = other DNA
tcagtgttgacacgtg

SEQ ID NO: 2635 - DNA, 16 bp, synthetic construct
  misc_feature 1..16: note = synthetic [barcode part1]
  source 1..16: mol_type = other DNA
acctggaggtatctgt

SEQ ID NO: 2636 - DNA, 16 bp, synthetic construct
  misc_feature 1..16: note = synthetic [barcode part1]
  source 1..16: mol_type = other DNA
agtggacaagtgagtg

SEQ ID NO: 2637 - DNA, 16 bp, synthetic construct
  misc_feature 1..16: note = synthetic [barcode part1]
  source 1..16: mol_type = other DNA
tggtctaatctctacg

SEQ ID NO: 2638 - DNA, 16 bp, synthetic construct
  misc_feature 1..16: note = synthetic [barcode part1]
  source 1..16: mol_type = other DNA
acaggttccaagtgtc

SEQ ID NO: 2639 - DNA, 16 bp, synthetic construct
  misc_feature 1..16: note = synthetic [barcode part1]
  source 1..16: mol_type = other DNA
aggaagacagtgtcag

SEQ ID NO: 2640 - DNA, 16 bp, synthetic construct
  misc_feature 1..16: note = synthetic [barcode part1]
  source 1..16: mol_type = other DNA
tcagaacgtccacctc

SEQ ID NO: 2641 - DNA, 16 bp, synthetic construct
  misc_feature 1..16: note = synthetic [barcode part1]
  source 1..16: mol_type = other DNA
acctaactgatccgag

SEQ ID NO: 2642 - DNA, 16 bp, synthetic construct
  misc_feature 1..16: note = synthetic [barcode part1]
  source 1..16: mol_type = other DNA
gacacacactgacgtt

SEQ ID NO: 2643 - DNA, 16 bp, synthetic construct
  misc_feature 1..16: note = synthetic [barcode part1]
  source 1..16: mol_type = other DNA
tgtgatagtctgcctt

SEQ ID NO: 2644 - DNA, 16 bp, synthetic construct
  misc_feature 1..16: note = synthetic [barcode part1]
  source 1..16: mol_type = other DNA
gcacgatcgattgtgt

SEQ ID NO: 2645 - DNA, 16 bp, synthetic construct
  misc_feature 1..16: note = synthetic [barcode part1]
  source 1..16: mol_type = other DNA
cagagtgtatcctacg

SEQ ID NO: 2646 - DNA, 16 bp, synthetic construct
  misc_feature 1..16: note = synthetic [barcode part1]
  source 1..16: mol_type = other DNA
ccaccttgagagttag

SEQ ID NO: 2647 - DNA, 16 bp, synthetic construct
  misc_feature 1..16: note = synthetic [barcode part1]
  source 1..16: mol_type = other DNA
cggcggtagagatact

SEQ ID NO: 2648 - DNA, 16 bp, synthetic construct
  misc_feature 1..16: note = synthetic [barcode part1]
  source 1..16: mol_type = other DNA
cgataacaatccggtc

SEQ ID NO: 2649 - DNA, 16 bp, synthetic construct
  misc_feature 1..16: note = synthetic [barcode part1]
  source 1..16: mol_type = other DNA
ttggcctacttaagtc

SEQ ID NO: 2650 - DNA, 16 bp, synthetic construct
  misc_feature 1..16: note = synthetic [barcode part1]
  source 1..16: mol_type = other DNA
gtgtgccaacgtattg

SEQ ID NO: 2651 - DNA, 16 bp, synthetic construct
  misc_feature 1..16: note = synthetic [barcode part1]
  source 1..16: mol_type = other DNA
tgttggtgttgcacag

SEQ ID NO: 2652 - DNA, 16 bp, synthetic construct
  misc_feature 1..16: note = synthetic [barcode part1]
  source 1..16: mol_type = other DNA
aagttagatcaacgcg

SEQ ID NO: 2653 - DNA, 16 bp, synthetic construct
  misc_feature 1..16: note = synthetic [barcode part1]
  source 1..16: mol_type = other DNA
taggtcaagtcgttgc

SEQ ID NO: 2654 - DNA, 16 bp, synthetic construct
  misc_feature 1..16: note = synthetic [barcode part1]
  source 1..16: mol_type = other DNA
cgcagaaggttattag

SEQ ID NO: 2655 - DNA, 16 bp, synthetic construct
  misc_feature 1..16: note = synthetic [barcode part1]
  source 1..16: mol_type = other DNA
tgtccgccaggatctt

SEQ ID NO: 2656 - DNA, 16 bp, synthetic construct
  misc_feature 1..16: note = synthetic [barcode part1]
  source 1..16: mol_type = other DNA
tgtccacaatattgcc

SEQ ID NO: 2657 - DNA, 16 bp, synthetic construct
  misc_feature 1..16: note = synthetic [barcode part1]
  source 1..16: mol_type = other DNA
tgccgcagattgattg

SEQ ID NO: 2658 - DNA, 16 bp, synthetic construct
  misc_feature 1..16: note = synthetic [barcode part1]
  source 1..16: mol_type = other DNA
aagagtgtccggcagt

SEQ ID NO: 2659 - DNA, 16 bp, synthetic construct
  misc_feature 1..16: note = synthetic [barcode part1]
  source 1..16: mol_type = other DNA
actattctaggacggc

SEQ ID NO: 2660 - DNA, 16 bp, synthetic construct
  misc_feature 1..16: note = synthetic [barcode part1]
  source 1..16: mol_type = other DNA
tctaatccgcaaccgc

SEQ ID NO: 2661 - DNA, 16 bp, synthetic construct
  misc_feature 1..16: note = synthetic [barcode part1]
  source 1..16: mol_type = other DNA
cgacctcgtcaacact

SEQ ID NO: 2662 - DNA, 16 bp, synthetic construct
  misc_feature 1..16: note = synthetic [barcode part1]
  source 1..16: mol_type = other DNA
tcaacgtcaaccacag

SEQ ID NO: 2663 - DNA, 16 bp, synthetic construct
  misc_feature 1..16: note = synthetic [barcode part1]
  source 1..16: mol_type = other DNA
ttcggtctgtatagtc

SEQ ID NO: 2664 - DNA, 16 bp, synthetic construct
  misc_feature 1..16: note = synthetic [barcode part1]
  source 1..16: mol_type = other DNA
cgaataactgcgatag

SEQ ID NO: 2665 - DNA, 16 bp, synthetic construct
  misc_feature 1..16: note = synthetic [barcode part1]
  source 1..16: mol_type = other DNA
tctagttaccgtgtac

SEQ ID NO: 2666 - DNA, 16 bp, synthetic construct
  misc_feature 1..16: note = synthetic [barcode part1]
  source 1..16: mol_type = other DNA
ttgaacctcttgcgcg

SEQ ID NO: 2667 - DNA, 16 bp, synthetic construct
  misc_feature 1..16: note = synthetic [barcode part1]
  source 1..16: mol_type = other DNA
tgtggtattacttgcc

SEQ ID NO: 2668 - DNA, 16 bp, synthetic construct
  misc_feature 1..16: note = synthetic [barcode part1]
  source 1..16: mol_type = other DNA
agttagtgccacggtt

SEQ ID NO: 2669 - DNA, 16 bp, synthetic construct
  misc_feature 1..16: note = synthetic [barcode part1]
  source 1..16: mol_type = other DNA
cctccagacgccaatt

SEQ ID NO: 2670 - DNA, 16 bp, synthetic construct
  misc_feature 1..16: note = synthetic [barcode part1]
  source 1..16: mol_type = other DNA
agtgataccgcgagtg

SEQ ID NO: 2671 - DNA, 16 bp, synthetic construct
  misc_feature 1..16: note = synthetic [barcode part1]
  source 1..16: mol_type = other DNA
gttctgtacggttgtt

SEQ ID NO: 2672 - DNA, 16 bp, synthetic construct
  misc_feature 1..16: note = synthetic [barcode part1]
  source 1..16: mol_type = other DNA
tggaccaggttcaact

SEQ ID NO: 2673 - DNA, 16 bp, synthetic construct
  misc_feature 1..16: note = synthetic [barcode part1]
  source 1..16: mol_type = other DNA
tcgcctaaggccttac

SEQ ID NO: 2674 - DNA, 16 bp, synthetic construct
  misc_feature 1..16: note = synthetic [barcode part1]
  source 1..16: mol_type = other DNA
cacgtctataggagtc

SEQ ID NO: 2675 - DNA, 16 bp, synthetic construct
  misc_feature 1..16: note = synthetic [barcode part1]
  source 1..16: mol_type = other DNA
acgtacggtcacaact

SEQ ID NO: 2676 - DNA, 16 bp, synthetic construct
  misc_feature 1..16: note = synthetic [barcode part1]
  source 1..16: mol_type = other DNA
gtgtcggagttatacc

SEQ ID NO: 2677 - DNA, 16 bp, synthetic construct
  misc_feature 1..16: note = synthetic [barcode part1]
  source 1..16: mol_type = other DNA
taggcgtagagaccgt

SEQ ID NO: 2678 - DNA, 16 bp, synthetic construct
  misc_feature 1..16: note = synthetic [barcode part1]
  source 1..16: mol_type = other DNA
gtcctaccttgacttc

SEQ ID NO: 2679 - DNA, 16 bp, synthetic construct
  misc_feature 1..16: note = synthetic [barcode part1]
  source 1..16: mol_type = other DNA
gcacgacaactgagac

SEQ ID NO: 2680 - DNA, 16 bp, synthetic construct
  misc_feature 1..16: note = synthetic [barcode part1]
  source 1..16: mol_type = other DNA
cctgttacgacaaggt

SEQ ID NO: 2681 - DNA, 16 bp, synthetic construct
  misc_feature 1..16: note = synthetic [barcode part1]
  source 1..16: mol_type = other DNA
agtgtaagttcggtag

SEQ ID NO: 2682 - DNA, 16 bp, synthetic construct
  misc_feature 1..16: note = synthetic [barcode part1]
  source 1..16: mol_type = other DNA
cgacgcactctatcac

SEQ ID NO: 2683 - DNA, 16 bp, synthetic construct
  misc_feature 1..16: note = synthetic [barcode part1]
  source 1..16: mol_type = other DNA
agtccagaactcgact

SEQ ID NO: 2684 - DNA, 16 bp, synthetic construct
  misc_feature 1..16: note = synthetic [barcode part1]
  source 1..16: mol_type = other DNA
atctagacgaggcggt

SEQ ID NO: 2685 - DNA, 16 bp, synthetic construct
  misc_feature 1..16: note = synthetic [barcode part1]
  source 1..16: mol_type = other DNA
aggtctaacaggacgc

SEQ ID NO: 2686 - DNA, 16 bp, synthetic construct
  misc_feature 1..16: note = synthetic [barcode part1]
  source 1..16: mol_type = other DNA
tggatctcctgagtag

SEQ ID NO: 2687 - DNA, 16 bp, synthetic construct
  misc_feature 1..16: note = synthetic [barcode part1]
  source 1..16: mol_type = other DNA
tctgacttacggttgt

SEQ ID NO: 2688 - DNA, 16 bp, synthetic construct
  misc_feature 1..16: note = synthetic [barcode part1]
  source 1..16: mol_type = other DNA
ttacgccgttcggtac

SEQ ID NO: 2689 - DNA, 16 bp, synthetic construct
  misc_feature 1..16: note = synthetic [barcode part1]
  source 1..16: mol_type = other DNA
agacactagtatccgc

SEQ ID NO: 2690 - DNA, 16 bp, synthetic construct
  misc_feature 1..16: note = synthetic [barcode part1]
  source 1..16: mol_type = other DNA
ataggaatagttcggc

SEQ ID NO: 2691 - DNA, 16 bp, synthetic construct
  misc_feature 1..16: note = synthetic [barcode part1]
  source 1..16: mol_type = other DNA
agtcggaacaattgtg

SEQ ID NO: 2692 - DNA, 16 bp, synthetic construct
  misc_feature 1..16: note = synthetic [barcode part1]
  source 1..16: mol_type = other DNA
aacgatctcgaaccac

SEQ ID NO: 2693 - DNA, 16 bp, synthetic construct
  misc_feature 1..16: note = synthetic [barcode part1]
  source 1..16: mol_type = other DNA
aatcgtgattggtgcc

SEQ ID NO: 2694 - DNA, 16 bp, synthetic construct
  misc_feature 1..16: note = synthetic [barcode part1]
  source 1..16: mol_type = other DNA
gaccagtaaccgatct

SEQ ID NO: 2695 - DNA, 16 bp, synthetic construct
  misc_feature 1..16: note = synthetic [barcode part1]
  source 1..16: mol_type = other DNA
taaccggtacggtact

SEQ ID NO: 2696 - DNA, 16 bp, synthetic construct
  misc_feature 1..16: note = synthetic [barcode part1]
  source 1..16: mol_type = other DNA
aagaagtctacgcggc

SEQ ID NO: 2697 - DNA, 16 bp, synthetic construct
  misc_feature 1..16: note = synthetic [barcode part1]
  source 1..16: mol_type = other DNA
caaccgcgtaattgtg

SEQ ID NO: 2698 - DNA, 16 bp, synthetic construct
  misc_feature 1..16: note = synthetic [barcode part1]
  source 1..16: mol_type = other DNA
gtaatcgacacactgc

SEQ ID NO: 2699 - DNA, 16 bp, synthetic construct
  misc_feature 1..16: note = synthetic [barcode part1]
  source 1..16: mol_type = other DNA
gcaagacgtagactcg

SEQ ID NO: 2700 - DNA, 16 bp, synthetic construct
  misc_feature 1..16: note = synthetic [barcode part1]
  source 1..16: mol_type = other DNA
gttagtgacttaggcc

SEQ ID NO: 2701 - DNA, 16 bp, synthetic construct
  misc_feature 1..16: note = synthetic [barcode part1]
  source 1..16: mol_type = other DNA
gacagtcctgacagtt

SEQ ID NO: 2702 - DNA, 16 bp, synthetic construct
  misc_feature 1..16: note = synthetic [barcode part1]
  source 1..16: mol_type = other DNA
gtgactagagattgac

SEQ ID NO: 2703 - DNA, 16 bp, synthetic construct
  misc_feature 1..16: note = synthetic [barcode part1]
  source 1..16: mol_type = other DNA
agactgttcgtatctc

SEQ ID NO: 2704 - DNA, 16 bp, synthetic construct
  misc_feature 1..16: note = synthetic [barcode part1]
  source 1..16: mol_type = other DNA
tatcggaggactgttc

SEQ ID NO: 2705 - DNA, 16 bp, synthetic construct
  misc_feature 1..16: note = synthetic [barcode part1]
  source 1..16: mol_type = other DNA
cgttggaccacacctt

SEQ ID NO: 2706 - DNA, 16 bp, synthetic construct
  misc_feature 1..16: note = synthetic [barcode part1]
  source 1..16: mol_type = other DNA
tccgtacggagtatac

SEQ ID NO: 2707 - DNA, 16 bp, synthetic construct
  misc_feature 1..16: note = synthetic [barcode part1]
  source 1..16: mol_type = other DNA
agaacaattcgtcgcc

SEQ ID NO: 2708 - DNA, 16 bp, synthetic construct
  misc_feature 1..16: note = synthetic [barcode part1]
  source 1..16: mol_type = other DNA
atcagtgttgtgcgac

SEQ ID NO: 2709 - DNA, 16 bp, synthetic construct
  misc_feature 1..16: note = synthetic [barcode part1]
  source 1..16: mol_type = other DNA
tgttgcactgagatcg

SEQ ID NO: 2710 - DNA, 16 bp, synthetic construct
  misc_feature 1..16: note = synthetic [barcode part1]
  source 1..16: mol_type = other DNA
gtatcttatcggatcc

SEQ ID NO: 2711 - DNA, 16 bp, synthetic construct
  misc_feature 1..16: note = synthetic [barcode part1]
  source 1..16: mol_type = other DNA
actagatcaggccact

SEQ ID NO: 2712 - DNA, 16 bp, synthetic construct
  misc_feature 1..16: note = synthetic [barcode part1]
  source 1..16: mol_type = other DNA
cactctaacgaatcct

SEQ ID NO: 2713 - DNA, 16 bp, synthetic construct
  misc_feature 1..16: note = synthetic [barcode part1]
  source 1..16: mol_type = other DNA
cgtattgccagtcctg

SEQ ID NO: 2714 - DNA, 16 bp, synthetic construct
  misc_feature 1..16: note = synthetic [barcode part1]
  source 1..16: mol_type = other DNA
gatagtatccaccgtg

SEQ ID NO: 2715 - DNA, 16 bp, synthetic construct
  misc_feature 1..16: note = synthetic [barcode part1]
  source 1..16: mol_type = other DNA
ccagagaactaaggag

SEQ ID NO: 2716 - DNA, 16 bp, synthetic construct
  misc_feature 1..16: note = synthetic [barcode part1]
  source 1..16: mol_type = other DNA
tcacgtcggatacaac

SEQ ID NO: 2717 - DNA, 16 bp, synthetic construct
  misc_feature 1..16: note = synthetic [barcode part1]
  source 1..16: mol_type = other DNA
gagaagacgtagtgtg

SEQ ID NO: 2718 - DNA, 16 bp, synthetic construct
  misc_feature 1..16: note = synthetic [barcode part1]
  source 1..16: mol_type = other DNA
tagatatctcctggtc

SEQ ID NO: 2719 - DNA, 16 bp, synthetic construct
  misc_feature 1..16: note = synthetic [barcode part1]
  source 1..16: mol_type = other DNA
tggttaccagactcag

SEQ ID NO: 2720 - DNA, 16 bp, synthetic construct
  misc_feature 1..16: note = synthetic [barcode part1]
  source 1..16: mol_type = other DNA
caatcttacgtcagtc

SEQ ID NO: 2721 - DNA, 16 bp, synthetic construct
  misc_feature 1..16: note = synthetic [barcode part1]
  source 1..16: mol_type = other DNA
tgtgacaagactctgc

SEQ ID NO: 2722 - DNA, 16 bp, synthetic construct
  misc_feature 1..16: note = synthetic [barcode part1]
  source 1..16: mol_type = other DNA
gaagtggaacactcgc

SEQ ID NO: 2723 - DNA, 16 bp, synthetic construct
  misc_feature 1..16: note = synthetic [barcode part1]
  source 1..16: mol_type = other DNA
tctaatcgtcgatacc

SEQ ID NO: 2724 - DNA, 16 bp, synthetic construct
  misc_feature 1..16: note = synthetic [barcode part1]
  source 1..16: mol_type = other DNA
tactccgttgtgaatc

SEQ ID NO: 2725 - DNA, 16 bp, synthetic construct
  misc_feature 1..16: note = synthetic [barcode part1]
  source 1..16: mol_type = other DNA
ttgcgagactcaggtt

SEQ ID NO: 2726 - DNA, 16 bp, synthetic construct
  misc_feature 1..16: note = synthetic [barcode part1]
  source 1..16: mol_type = other DNA
ccagtcttgtcaacgc

SEQ ID NO: 2727 - DNA, 16 bp, synthetic construct
  misc_feature 1..16: note = synthetic [barcode part1]
  source 1..16: mol_type = other DNA
atccacctgccgtaac

SEQ ID NO: 2728 - DNA, 16 bp, synthetic construct
  misc_feature 1..16: note = synthetic [barcode part1]
  source 1..16: mol_type = other DNA
tcgcgccttatatctc

SEQ ID NO: 2729 - DNA, 16 bp, synthetic construct
  misc_feature 1..16: note = synthetic [barcode part1]
  source 1..16: mol_type = other DNA
agtaaccttggactgc

SEQ ID NO: 2730 - DNA, 16 bp, synthetic construct
  misc_feature 1..16: note = synthetic [barcode part1]
  source 1..16: mol_type = other DNA
ataacgcggtcttgac

SEQ ID NO: 2731 - DNA, 16 bp, synthetic construct
  misc_feature 1..16: note = synthetic [barcode part1]
  source 1..16: mol_type = other DNA
cgtaaggcgacttgag

SEQ ID NO: 2732 - DNA, 16 bp, synthetic construct
  misc_feature 1..16: note = synthetic [barcode part1]
  source 1..16: mol_type = other DNA
tcgtcgcgtaggttct

SEQ ID NO: 2733 - DNA, 16 bp, synthetic construct
  misc_feature 1..16: note = synthetic [barcode part1]
  source 1..16: mol_type = other DNA
tgtccacacgagtaac

SEQ ID NO: 2734 - DNA, 16 bp, synthetic construct
  misc_feature 1..16: note = synthetic [barcode part1]
  source 1..16: mol_type = other DNA
cgcagtaaccttgagt

SEQ ID NO: 2735 - DNA, 16 bp, synthetic construct
  misc_feature 1..16: note = synthetic [barcode part1]
  source 1..16: mol_type = other DNA
gaactctgaccttgag

SEQ ID NO: 2736 - DNA, 16 bp, synthetic construct
  misc_feature 1..16: note = synthetic [barcode part1]
  source 1..16: mol_type = other DNA
aatatctccgtcactg

SEQ ID NO: 2737 - DNA, 16 bp, synthetic construct
  misc_feature 1..16: note = synthetic [barcode part1]
  source 1..16: mol_type = other DNA
cgttattcgccggtac

SEQ ID NO: 2738 - DNA, 16 bp, synthetic construct
  misc_feature 1..16: note = synthetic [barcode part1]
  source 1..16: mol_type = other DNA
gcaggtctcaagtatc

SEQ ID NO: 2739 - DNA, 16 bp, synthetic construct
  misc_feature 1..16: note = synthetic [barcode part1]
  source 1..16: mol_type = other DNA
cgtagtatcgtctatc

SEQ ID NO: 2740 - DNA, 16 bp, synthetic construct
  misc_feature 1..16: note = synthetic [barcode part1]
  source 1..16: mol_type = other DNA
aagacgcgtattctcg

SEQ ID NO: 2741 - DNA, 16 bp, synthetic construct
  misc_feature 1..16: note = synthetic [barcode part1]
  source 1..16: mol_type = other DNA
tgtacactgtggtacg

SEQ ID NO: 2742 - DNA, 16 bp, synthetic construct
  misc_feature 1..16: note = synthetic [barcode part1]
  source 1..16: mol_type = other DNA
ccgcctaagtactatt

SEQ ID NO: 2743 - DNA, 16 bp, synthetic construct
  misc_feature 1..16: note = synthetic [barcode part1]
  source 1..16: mol_type = other DNA
ccttcgtcgagttacg

SEQ ID NO: 2744 - DNA, 16 bp, synthetic construct
  misc_feature 1..16: note = synthetic [barcode part1]
  source 1..16: mol_type = other DNA
acgcgaataggtcacg

SEQ ID NO: 2745 - DNA, 16 bp, synthetic construct
  misc_feature 1..16: note = synthetic [barcode part1]
  source 1..16: mol_type = other DNA
gtaacacgtcaatcgc

SEQ ID NO: 2746 - DNA, 16 bp, synthetic construct
  misc_feature 1..16: note = synthetic [barcode part1]
  source 1..16: mol_type = other DNA
actacgtacgtaaccg

SEQ ID NO: 2747 - DNA, 16 bp, synthetic construct
  misc_feature 1..16: note = synthetic [barcode part1]
  source 1..16: mol_type = other DNA
acgagagtgataatcc

SEQ ID NO: 2748 - DNA, 16 bp, synthetic construct
  misc_feature 1..16: note = synthetic [barcode part1]
  source 1..16: mol_type = other DNA
agtaccttcacgtgag

SEQ ID NO: 2749 - DNA, 16 bp, synthetic construct
  misc_feature 1..16: note = synthetic [barcode part1]
  source 1..16: mol_type = other DNA
tctagttgtcggtgcc

SEQ ID NO: 2750 - DNA, 16 bp, synthetic construct
  misc_feature 1..16: note = synthetic [barcode part1]
  source 1..16: mol_type = other DNA
gtcgccttaggtgtct

SEQ ID NO: 2751 - DNA, 16 bp, synthetic construct
  misc_feature 1..16: note = synthetic [barcode part1]
  source 1..16: mol_type = other DNA
tatcaggttcggtgac

SEQ ID NO: 2752 - DNA, 16 bp, synthetic construct
  misc_feature 1..16: note = synthetic [barcode part1]
  source 1..16: mol_type = other DNA
tgtcgaacgtcttcgc

SEQ ID NO: 2753 - DNA, 16 bp, synthetic construct
  misc_feature 1..16: note = synthetic [barcode part1]
  source 1..16: mol_type = other DNA
gcgtcggaaggtagtt

SEQ ID NO: 2754 - DNA, 16 bp, synthetic construct
  misc_feature 1..16: note = synthetic [barcode part1]
  source 1..16: mol_type = other DNA
tctcaacacacggcct

SEQ ID NO: 2755 - DNA, 16 bp, synthetic construct
  misc_feature 1..16: note = synthetic [barcode part1]
  source 1..16: mol_type = other DNA
cagtaacgaaggtatc

SEQ ID NO: 2756 - DNA, 16 bp, synthetic construct
  misc_feature 1..16: note = synthetic [barcode part1]
  source 1..16: mol_type = other DNA
aacgccgtataacgtc

SEQ ID NO: 2757 - DNA, 16 bp, synthetic construct
  misc_feature 1..16: note = synthetic [barcode part1]
  source 1..16: mol_type = other DNA
gtatcgatcttaccac

SEQ ID NO: 2758 - DNA, 16 bp, synthetic construct
  misc_feature 1..16: note = synthetic [barcode part1]
  source 1..16: mol_type = other DNA
cggtcgtcctaattcg

SEQ ID NO: 2759 - DNA, 16 bp, synthetic construct
  misc_feature 1..16: note = synthetic [barcode part1]
  source 1..16: mol_type = other DNA
acgtataggaggaggt

SEQ ID NO: 2760 - DNA, 16 bp, synthetic construct
  misc_feature 1..16: note = synthetic [barcode part1]
  source 1..16: mol_type = other DNA
tgaactggacttgacc

SEQ ID NO: 2761 - DNA, 16 bp, synthetic construct
  misc_feature 1..16: note = synthetic [barcode part1]
  source 1..16: mol_type = other DNA
ccgttctcacaagtcg

SEQ ID NO: 2762 - DNA, 16 bp, synthetic construct
  misc_feature 1..16: note = synthetic [barcode part1]
  source 1..16: mol_type = other DNA
gcgcgacaatctcctt

SEQ ID NO: 2763 - DNA, 16 bp, synthetic construct
  misc_feature 1..16: note = synthetic [barcode part1]
  source 1..16: mol_type = other DNA
ttaagtggcctgtggt

SEQ ID NO: 2764 - DNA, 16 bp, synthetic construct
  misc_feature 1..16: note = synthetic [barcode part1]
  source 1..16: mol_type = other DNA
actctcgccactgaac

SEQ ID NO: 2765 - DNA, 16 bp, synthetic construct
  misc_feature 1..16: note = synthetic [barcode part1]
  source 1..16: mol_type = other DNA
tattaggccgtgttct

SEQ ID NO: 2766 - DNA, 16 bp, synthetic construct
  misc_feature 1..16: note = synthetic [barcode part1]
  source 1..16: mol_type = other DNA
actggaggttgacgtg

SEQ ID NO: 2767 - DNA, 16 bp, synthetic construct
  misc_feature 1..16: note = synthetic [barcode part1]
  source 1..16: mol_type = other DNA
gtcaggtatctgacgt

SEQ ID NO: 2768 - DNA, 16 bp, synthetic construct
  misc_feature 1..16: note = synthetic [barcode part1]
  source 1..16: mol_type = other DNA
cgttgtccttgcagac

SEQ ID NO: 2769 - DNA, 16 bp, synthetic construct
  misc_feature 1..16: note = synthetic [barcode part1]
  source 1..16: mol_type = other DNA
accagttccttaggag

SEQ ID NO: 2770 - DNA, 16 bp, synthetic construct
  misc_feature 1..16: note = synthetic [barcode part1]
  source 1..16: mol_type = other DNA
gaggttcacctgtcct

SEQ ID NO: 2771 - DNA, 16 bp, synthetic construct
  misc_feature 1..16: note = synthetic [barcode part1]
  source 1..16: mol_type = other DNA
caccgtcgcaattatt

SEQ ID NO: 2772 - DNA, 16 bp, synthetic construct
  misc_feature 1..16: note = synthetic [barcode part1]
  source 1..16: mol_type = other DNA
cacaactaatcacgcg

SEQ ID NO: 2773 - DNA, 16 bp, synthetic construct
  misc_feature 1..16: note = synthetic [barcode part1]
  source 1..16: mol_type = other DNA
atacgacgttacgcac

SEQ ID NO: 2774 - DNA, 16 bp, synthetic construct
  misc_feature 1..16: note = synthetic [barcode part1]
  source 1..16: mol_type = other DNA
gcggttgagaaccaac

SEQ ID NO: 2775 - DNA, 16 bp, synthetic construct
  misc_feature 1..16: note = synthetic [barcode part1]
  source 1..16: mol_type = other DNA
cgacgtatcagacact

SEQ ID NO: 2776 - DNA, 16 bp, synthetic construct
  misc_feature 1..16: note = synthetic [barcode part1]
  source 1..16: mol_type = other DNA
actcctaagattgcct

SEQ ID NO: 2777 - DNA, 16 bp, synthetic construct
  misc_feature 1..16: note = synthetic [barcode part1]
  source 1..16: mol_type = other DNA
tataactcttccgacg

SEQ ID NO: 2778 - DNA, 16 bp, synthetic construct
  misc_feature 1..16: note = synthetic [barcode part1]
  source 1..16: mol_type = other DNA
aggcgttaggcaacgt

SEQ ID NO: 2779 - DNA, 16 bp, synthetic construct
  misc_feature 1..16: note = synthetic [barcode part1]
  source 1..16: mol_type = other DNA
gtaagtcgacttgtgc

SEQ ID NO: 2780 - DNA, 16 bp, synthetic construct
  misc_feature 1..16: note = synthetic [barcode part1]
  source 1..16: mol_type = other DNA
tcaccgttccgagtac

SEQ ID NO: 2781 - DNA, 16 bp, synthetic construct
  misc_feature 1..16: note = synthetic [barcode part1]
  source 1..16: mol_type = other DNA
tcacctgtgttgtggc

SEQ ID NO: 2782 - DNA, 16 bp, synthetic construct
  misc_feature 1..16: note = synthetic [barcode part1]
  source 1..16: mol_type = other DNA
taatcctgagaccgac

SEQ ID NO: 2783 - DNA, 16 bp, synthetic construct
  misc_feature 1..16: note = synthetic [barcode part1]
  source 1..16: mol_type = other DNA
agtcagtccaatcgac

SEQ ID NO: 2784 - DNA, 16 bp, synthetic construct
  misc_feature 1..16: note = synthetic [barcode part1]
  source 1..16: mol_type = other DNA
aggtccggaactgaac

SEQ ID NO: 2785 - DNA, 16 bp, synthetic construct
  misc_feature 1..16: note = synthetic [barcode part1]
  source 1..16: mol_type = other DNA
acgtcgataatcctct

SEQ ID NO: 2786 - DNA, 16 bp, synthetic construct
  misc_feature 1..16: note = synthetic [barcode part1]
  source 1..16: mol_type = other DNA
ttgatcgccaagatcg

SEQ ID NO: 2787 - DNA, 16 bp, synthetic construct
  misc_feature 1..16: note = synthetic [barcode part1]
  source 1..16: mol_type = other DNA
gaacttcttccaggag

SEQ ID NO: 2788 - DNA, 16 bp, synthetic construct
  misc_feature 1..16: note = synthetic [barcode part1]
  source 1..16: mol_type = other DNA
tatcctacgagtatcc

SEQ ID NO: 2789 - DNA, 16 bp, synthetic construct
  misc_feature 1..16: note = synthetic [barcode part1]
  source 1..16: mol_type = other DNA
cgtcacttctgtggac

SEQ ID NO: 2790 - DNA, 16 bp, synthetic construct
  misc_feature 1..16: note = synthetic [barcode part1]
  source 1..16: mol_type = other DNA
tacagtcacacctgag

SEQ ID NO: 2791 - DNA, 16 bp, synthetic construct
  misc_feature 1..16: note = synthetic [barcode part1]
  source 1..16: mol_type = other DNA
caactggcggttgatt

SEQ ID NO: 2792 - DNA, 16 bp, synthetic construct
  misc_feature 1..16: note = synthetic [barcode part1]
  source 1..16: mol_type = other DNA
agacggtcttctagtg

SEQ ID NO: 2793 - DNA, 16 bp, synthetic construct
  misc_feature 1..16: note = synthetic [barcode part1]
  source 1..16: mol_type = other DNA
aggtattatccgcggt

SEQ ID NO: 2794 - DNA, 16 bp, synthetic construct
  misc_feature 1..16: note = synthetic [barcode part1]
  source 1..16: mol_type = other DNA
atctgacggttgtcag

SEQ ID NO: 2795 - DNA, 16 bp, synthetic construct
  misc_feature 1..16: note = synthetic [barcode part1]
  source 1..16: mol_type = other DNA
gtgattaccggttctt

SEQ ID NO: 2796 - DNA, 16 bp, synthetic construct
  misc_feature 1..16: note = synthetic [barcode part1]
  source 1..16: mol_type = other DNA
tcgcgactagtactag

SEQ ID NO: 2797 - DNA, 16 bp, synthetic construct
  misc_feature 1..16: note = synthetic [barcode part1]
  source 1..16: mol_type = other DNA
atctcgaggccttaag

SEQ ID NO: 2798 - DNA, 16 bp, synthetic construct
  misc_feature 1..16: note = synthetic [barcode part1]
  source 1..16: mol_type = other DNA
atacagtggttggagt

SEQ ID NO: 2799 - DNA, 16 bp, synthetic construct
  misc_feature 1..16: note = synthetic [barcode part1]
  source 1..16: mol_type = other DNA
gcaaccagtgttgact

SEQ ID NO: 2800 - DNA, 16 bp, synthetic construct
  misc_feature 1..16: note = synthetic [barcode part1]
  source 1..16: mol_type = other DNA
accggcggaactaagt

SEQ ID NO: 2801 - DNA, 16 bp, synthetic construct
  misc_feature 1..16: note = synthetic [barcode part1]
  source 1..16: mol_type = other DNA
tacagtgttgttcacc

SEQ ID NO: 2802 - DNA, 16 bp, synthetic construct
  misc_feature 1..16: note = synthetic [barcode part1]
  source 1..16: mol_type = other DNA
gcctcgatataacgtg

SEQ ID NO: 2803 - DNA, 16 bp, synthetic construct
  misc_feature 1..16: note = synthetic [barcode part1]
  source 1..16: mol_type = other DNA
tcgccttgattgcgtg

SEQ ID NO: 2804 - DNA, 16 bp, synthetic construct
  misc_feature 1..16: note = synthetic [barcode part1]
  source 1..16: mol_type = other DNA
cacaactagagatcag

SEQ ID NO: 2805 - DNA, 16 bp, synthetic construct
  misc_feature 1..16: note = synthetic [barcode part1]
  source 1..16: mol_type = other DNA
caggaagtcaaggaac

SEQ ID NO: 2806 - DNA, 16 bp, synthetic construct
  misc_feature 1..16: note = synthetic [barcode part1]
  source 1..16: mol_type = other DNA
aaggttcaggccttac

SEQ ID NO: 2807 - DNA, 16 bp, synthetic construct
  misc_feature 1..16: note = synthetic [barcode part1]
  source 1..16: mol_type = other DNA
acgtacactggtcaac

SEQ ID NO: 2808 - DNA, 16 bp, synthetic construct
  misc_feature 1..16: note = synthetic [barcode part1]
  source 1..16: mol_type = other DNA
gcgtcgaatcgttctc

SEQ ID NO: 2809 - DNA, 16 bp, synthetic construct
  misc_feature 1..16: note = synthetic [barcode part1]
  source 1..16: mol_type = other DNA
cctatacgtgccttct

SEQ ID NO: 2810 - DNA, 16 bp, synthetic construct
  misc_feature 1..16: note = synthetic [barcode part1]
  source 1..16: mol_type = other DNA
ttaaggccaggcagac

SEQ ID NO: 2811 - DNA, 16 bp, synthetic construct
  misc_feature 1..16: note = synthetic [barcode part1]
  source 1..16: mol_type = other DNA
aagaagttcacgcaac

SEQ ID NO: 2812 - DNA, 16 bp, synthetic construct
  misc_feature 1..16: note = synthetic [barcode part1]
  source 1..16: mol_type = other DNA
actctaccgagaggtt

SEQ ID NO: 2813 - DNA, 16 bp, synthetic construct
  misc_feature 1..16: note = synthetic [barcode part1]
  source 1..16: mol_type = other DNA
ccaactcaagttggac

SEQ ID NO: 2814 - DNA, 16 bp, synthetic construct
  misc_feature 1..16: note = synthetic [barcode part1]
  source 1..16: mol_type = other DNA
agaacgaggattcact

SEQ ID NO: 2815 - DNA, 16 bp, synthetic construct
  misc_feature 1..16: note = synthetic [barcode part1]
  source 1..16: mol_type = other DNA
actgtgacgtctattc

SEQ ID NO: 2816 - DNA, 16 bp, synthetic construct
  misc_feature 1..16: note = synthetic [barcode part1]
  source 1..16: mol_type = other DNA
tgtcctctggtaattg

SEQ ID NO: 2817 - DNA, 16 bp, synthetic construct
  misc_feature 1..16: note = synthetic [barcode part1]
  source 1..16: mol_type = other DNA
gacgttatcctaaggc

SEQ ID NO: 2818 - DNA, 16 bp, synthetic construct
  misc_feature 1..16: note = synthetic [barcode part1]
  source 1..16: mol_type = other DNA
aacgtgttggttgtgc

SEQ ID NO: 2819 - DNA, 16 bp, synthetic construct
  misc_feature 1..16: note = synthetic [barcode part1]
  source 1..16: mol_type = other DNA
acgtgatattggcgtc

SEQ ID NO: 2820 - DNA, 16 bp, synthetic construct
  misc_feature 1..16: note = synthetic [barcode part1]
  source 1..16: mol_type = other DNA
tcgtcgtagtagaacc

SEQ ID NO: 2821 - DNA, 16 bp, synthetic construct
  misc_feature 1..16: note = synthetic [barcode part1]
  source 1..16: mol_type = other DNA
atcacctgacggaact

SEQ ID NO: 2822 - DNA, 16 bp, synthetic construct
  misc_feature 1..16: note = synthetic [barcode part1]
  source 1..16: mol_type = other DNA
tcctaccgtcttatcg

SEQ ID NO: 2823 - DNA, 16 bp, synthetic construct
  misc_feature 1..16: note = synthetic [barcode part1]
  source 1..16: mol_type = other DNA
gacgcgtctctgattc

SEQ ID NO: 2824 - DNA, 16 bp, synthetic construct
  misc_feature 1..16: note = synthetic [barcode part1]
  source 1..16: mol_type = other DNA
agtgtacgaggaattc

SEQ ID NO: 2825 - DNA, 16 bp, synthetic construct
  misc_feature 1..16: note = synthetic [barcode part1]
  source 1..16: mol_type = other DNA
caccaccgtgattatt

SEQ ID NO: 2826 - DNA, 16 bp, synthetic construct
  misc_feature 1..16: note = synthetic [barcode part1]
  source 1..16: mol_type = other DNA
gacaaggtcaagtatc

SEQ ID NO: 2827 - DNA, 16 bp, synthetic construct
  misc_feature 1..16: note = synthetic [barcode part1]
  source 1..16: mol_type = other DNA
tgtacaaggtgcacct

SEQ ID NO: 2828 - DNA, 16 bp, synthetic construct
  misc_feature 1..16: note = synthetic [barcode part1]
  source 1..16: mol_type = other DNA
caactactctggtccg

SEQ ID NO: 2829 - DNA, 16 bp, synthetic construct
  misc_feature 1..16: note = synthetic [barcode part1]
  source 1..16: mol_type = other DNA
gttgatcactggtcag

SEQ ID NO: 2830 - DNA, 16 bp, synthetic construct
  misc_feature 1..16: note = synthetic [barcode part1]
  source 1..16: mol_type = other DNA
tactgcacacagtgtg

SEQ ID NO: 2831 - DNA, 16 bp, synthetic construct
  misc_feature 1..16: note = synthetic [barcode part1]
  source 1..16: mol_type = other DNA
ttccgacttagtacac

SEQ ID NO: 2832 - DNA, 16 bp, synthetic construct
  misc_feature 1..16: note = synthetic [barcode part1]
  source 1..16: mol_type = other DNA
ttgtacgatcggtacg

SEQ ID NO: 2833 - DNA, 16 bp, synthetic construct
  misc_feature 1..16: note = synthetic [barcode part1]
  source 1..16: mol_type = other DNA
agtatcgcagtatcgc

SEQ ID NO: 2834 - DNA, 16 bp, synthetic construct
  misc_feature 1..16: note = synthetic [barcode part1]
  source 1..16: mol_type = other DNA
tgtattaggcctcttg

SEQ ID NO: 2835 - DNA, 16 bp, synthetic construct
  misc_feature 1..16: note = synthetic [barcode part1]
  source 1..16: mol_type = other DNA
tcaacgacgtccttgc

SEQ ID NO: 2836 - DNA, 16 bp, synthetic construct
  misc_feature 1..16: note = synthetic [barcode part1]
  source 1..16: mol_type = other DNA
tctgtagttcactgtg

SEQ ID NO: 2837 - DNA, 16 bp, synthetic construct
  misc_feature 1..16: note = synthetic [barcode part1]
  source 1..16: mol_type = other DNA
ttcacagaggtctacg

SEQ ID NO: 2838 - DNA, 16 bp, synthetic construct
  misc_feature 1..16: note = synthetic [barcode part1]
  source 1..16: mol_type = other DNA
acacacacacacacac

SEQ ID NO: 2839 - DNA, 16 bp, synthetic construct
  misc_feature 1..16: note = synthetic [barcode part1]
  source 1..16: mol_type = other DNA
acagtgtgtgttgtgc

SEQ ID NO: 2840 - DNA, 16 bp, synthetic construct
  misc_feature 1..16: note = synthetic [barcode part1]
  source 1..16: mol_type = other DNA
ttagttcgtctagacc

SEQ ID NO: 2841 - DNA, 16 bp, synthetic construct
  misc_feature 1..16: note = synthetic [barcode part1]
  source 1..16: mol_type = other DNA
gaccgcaccttctaac

SEQ ID NO: 2842 - DNA, 16 bp, synthetic construct
  misc_feature 1..16: note = synthetic [barcode part1]
  source 1..16: mol_type = other DNA
acgccgtaataggcag

SEQ ID NO: 2843 - DNA, 16 bp, synthetic construct
  misc_feature 1..16: note = synthetic [barcode part1]
  source 1..16: mol_type = other DNA
ccttaagttcgtctag

SEQ ID NO: 2844 - DNA, 16 bp, synthetic construct
  misc_feature 1..16: note = synthetic [barcode part1]
  source 1..16: mol_type = other DNA
gaagttcagataggtc

SEQ ID NO: 2845 - DNA, 16 bp, synthetic construct
  misc_feature 1..16: note = synthetic [barcode part1]
  source 1..16: mol_type = other DNA
cagtgcactagtacgt

SEQ ID NO: 2846 - DNA, 16 bp, synthetic construct
  misc_feature 1..16: note = synthetic [barcode part1]
  source 1..16: mol_type = other DNA
cggattagaggcacac

SEQ ID NO: 2847 - DNA, 16 bp, synthetic construct
  misc_feature 1..16: note = synthetic [barcode part1]
  source 1..16: mol_type = other DNA
agtccgccactattcg

SEQ ID NO: 2848 - DNA, 16 bp, synthetic construct
  misc_feature 1..16: note = synthetic [barcode part1]
  source 1..16: mol_type = other DNA
tctaggactggttgac

SEQ ID NO: 2849 - DNA, 16 bp, synthetic construct
  misc_feature 1..16: note = synthetic [barcode part1]
  source 1..16: mol_type = other DNA
cctcttgacaaggtag

SEQ ID NO: 2850 - DNA, 16 bp, synthetic construct
  misc_feature 1..16: note = synthetic [barcode part1]
  source 1..16: mol_type = other DNA
cggaattcaacaccac

SEQ ID NO: 2851 - DNA, 16 bp, synthetic construct
  misc_feature 1..16: note = synthetic [barcode part1]
  source 1..16: mol_type = other DNA
cctgatctaatacgtc

SEQ ID NO: 2852 - DNA, 16 bp, synthetic construct
  misc_feature 1..16: note = synthetic [barcode part1]
  source 1..16: mol_type = other DNA
tggttgtaacgcactg

SEQ ID NO: 2853 - DNA, 16 bp, synthetic construct
  misc_feature 1..16: note = synthetic [barcode part1]
  source 1..16: mol_type = other DNA
tccgtgtaccaccaac

SEQ ID NO: 2854 - DNA, 16 bp, synthetic construct
  misc_feature 1..16: note = synthetic [barcode part1]
  source 1..16: mol_type = other DNA
gttaccacgtatcttg

SEQ ID NO: 2855 - DNA, 16 bp, synthetic construct
  misc_feature 1..16: note = synthetic [barcode part1]
  source 1..16: mol_type = other DNA
gtaggtctcctcgact

SEQ ID NO: 2856 - DNA, 16 bp, synthetic construct
  misc_feature 1..16: note = synthetic [barcode part1]
  source 1..16: mol_type = other DNA
cagatcttgagtgtcg

SEQ ID NO: 2857 - DNA, 16 bp, synthetic construct
  misc_feature 1..16: note = synthetic [barcode part1]
  source 1..16: mol_type = other DNA
gaatcacgtctctatc

SEQ ID NO: 2858 - DNA, 16 bp, synthetic construct
  misc_feature 1..16: note = synthetic [barcode part1]
  source 1..16: mol_type = other DNA
attctgttaccaacgc

SEQ ID NO: 2859 - DNA, 16 bp, synthetic construct
  misc_feature 1..16: note = synthetic [barcode part1]
  source 1..16: mol_type = other DNA
caacgtgactactctt

SEQ ID NO: 2860 - DNA, 16 bp, synthetic construct
  misc_feature 1..16: note = synthetic [barcode part1]
  source 1..16: mol_type = other DNA
tgaggactgtcttcag

SEQ ID NO: 2861 - DNA, 16 bp, synthetic construct
  misc_feature 1..16: note = synthetic [barcode part1]
  source 1..16: mol_type = other DNA
attgttctcgtgaacc

SEQ ID NO: 2862 - DNA, 16 bp, synthetic construct
  misc_feature 1..16: note = synthetic [barcode part1]
  source 1..16: mol_type = other DNA
tctggccaagaagtct

SEQ ID NO: 2863 - DNA, 16 bp, synthetic construct
  misc_feature 1..16: note = synthetic [barcode part1]
  source 1..16: mol_type = other DNA
agatcaccactagacc

SEQ ID NO: 2864 - DNA, 16 bp, synthetic construct
  misc_feature 1..16: note = synthetic [barcode part1]
  source 1..16: mol_type = other DNA
taccagtgaggaattg

SEQ ID NO: 2865 - DNA, 16 bp, synthetic construct
  misc_feature 1..16: note = synthetic [barcode part1]
  source 1..16: mol_type = other DNA
ttactgtcactgcctc

SEQ ID NO: 2866 - DNA, 16 bp, synthetic construct
  misc_feature 1..16: note = synthetic [barcode part1]
  source 1..16: mol_type = other DNA
gattgaaccgcgtgag

SEQ ID NO: 2867 - DNA, 16 bp, synthetic construct
  misc_feature 1..16: note = synthetic [barcode part1]
  source 1..16: mol_type = other DNA
acgttgactggtgtac

SEQ ID NO: 2868 - DNA, 16 bp, synthetic construct
  misc_feature 1..16: note = synthetic [barcode part1]
  source 1..16: mol_type = other DNA
atcgagtctatactcc

SEQ ID NO: 2869 - DNA, 16 bp, synthetic construct
  misc_feature 1..16: note = synthetic [barcode part1]
  source 1..16: mol_type = other DNA
gaataccgatactcgc

SEQ ID NO: 2870 - DNA, 16 bp, synthetic construct
  misc_feature 1..16: note = synthetic [barcode part1]
  source 1..16: mol_type = other DNA
tgactcaggactactg

SEQ ID NO: 2871 - DNA, 16 bp, synthetic construct
  misc_feature 1..16: note = synthetic [barcode part1]
  source 1..16: mol_type = other DNA
tcgactcggcaataac

SEQ ID NO: 2872 - DNA, 16 bp, synthetic construct
  misc_feature 1..16: note = synthetic [barcode part1]
  source 1..16: mol_type = other DNA
ttaatcacgactggcg

SEQ ID NO: 2873 - DNA, 16 bp, synthetic construct
  misc_feature 1..16: note = synthetic [barcode part1]
  source 1..16: mol_type = other DNA
atcagaagtgtcggcg

SEQ ID NO: 2874 - DNA, 16 bp, synthetic construct
  misc_feature 1..16: note = synthetic [barcode part1]
  source 1..16: mol_type = other DNA
gcgtgtggtgtatatc

SEQ ID NO: 2875 - DNA, 16 bp, synthetic construct
  misc_feature 1..16: note = synthetic [barcode part1]
  source 1..16: mol_type = other DNA
gacggtcaatctgatc

SEQ ID NO: 2876 - DNA, 16 bp, synthetic construct
  misc_feature 1..16: note = synthetic [barcode part1]
  source 1..16: mol_type = other DNA
gtcgttcctacggatc

SEQ ID NO: 2877 - DNA, 16 bp, synthetic construct
  misc_feature 1..16: note = synthetic [barcode part1]
  source 1..16: mol_type = other DNA
agagaacgagtacctt

SEQ ID NO: 2878 - DNA, 16 bp, synthetic construct
  misc_feature 1..16: note = synthetic [barcode part1]
  source 1..16: mol_type = other DNA
gcaacgataggaagtg

SEQ ID NO: 2879 - DNA, 16 bp, synthetic construct
  misc_feature 1..16: note = synthetic [barcode part1]
  source 1..16: mol_type = other DNA
acctgtacttcactag

SEQ ID NO: 2880 - DNA, 16 bp, synthetic construct
  misc_feature 1..16: note = synthetic [barcode part1]
  source 1..16: mol_type = other DNA
tcgcgcagaaggattg

SEQ ID NO: 2881 - DNA, 16 bp, synthetic construct
  misc_feature 1..16: note = synthetic [barcode part1]
  source 1..16: mol_type = other DNA
cgtgacgttatccgtc

SEQ ID NO: 2882 - DNA, 16 bp, synthetic construct
  misc_feature 1..16: note = synthetic [barcode part1]
  source 1..16: mol_type = other DNA
tggtgtaagagtgatc

SEQ ID NO: 2883 - DNA, 16 bp, synthetic construct
  misc_feature 1..16: note = synthetic [barcode part1]
  source 1..16: mol_type = other DNA
ttccgcgagtccaact

SEQ ID NO: 2884 - DNA, 16 bp, synthetic construct
  misc_feature 1..16: note = synthetic [barcode part1]
  source 1..16: mol_type = other DNA
cgcagaataataaccg

SEQ ID NO: 2885 - DNA, 16 bp, synthetic construct
  misc_feature 1..16: note = synthetic [barcode part1]
  source 1..16: mol_type = other DNA
ccagtcttcacgtgac

SEQ ID NO: 2886 - DNA, 16 bp, synthetic construct
  misc_feature 1..16: note = synthetic [barcode part1]
  source 1..16: mol_type = other DNA
gagaatactcgtgtcc

SEQ ID NO: 2887 - DNA, 16 bp, synthetic construct
  misc_feature 1..16: note = synthetic [barcode part1]
  source 1..16: mol_type = other DNA
aagactccggacgaac

SEQ ID NO: 2888 - DNA, 16 bp, synthetic construct
  misc_feature 1..16: note = synthetic [barcode part1]
  source 1..16: mol_type = other DNA
tcactgaatcgtcgag

SEQ ID NO: 2889 - DNA, 16 bp, synthetic construct
  misc_feature 1..16: note = synthetic [barcode part1]
  source 1..16: mol_type = other DNA
tgaggaggtaccgatc

SEQ ID NO: 2890 - DNA, 16 bp, synthetic construct
  misc_feature 1..16: note = synthetic [barcode part1]
  source 1..16: mol_type = other DNA
gttccaacctctcttg

SEQ ID NO: 2891 - DNA, 16 bp, synthetic construct
  misc_feature 1..16: note = synthetic [barcode part1]
  source 1..16: mol_type = other DNA
actaacggccttctgc

SEQ ID NO: 2892 - DNA, 16 bp, synthetic construct
  misc_feature 1..16: note = synthetic [barcode part1]
  source 1..16: mol_type = other DNA
acgacgttcagtcagt

SEQ ID NO: 2893 - DNA, 16 bp, synthetic construct
  misc_feature 1..16: note = synthetic [barcode part1]
  source 1..16: mol_type = other DNA
tccttggacgtactgc

SEQ ID NO: 2894 - DNA, 16 bp, synthetic construct
  misc_feature 1..16: note = synthetic [barcode part1]
  source 1..16: mol_type = other DNA
gtgtcgataatctcct

SEQ ID NO: 2895 - DNA, 16 bp, synthetic construct
  misc_feature 1..16: note = synthetic [barcode part1]
  source 1..16: mol_type = other DNA
ccagttctcacacgac

SEQ ID NO: 2896 - DNA, 16 bp, synthetic construct
  misc_feature 1..16: note = synthetic [barcode part1]
  source 1..16: mol_type = other DNA
gattgtgtcagtcttc

SEQ ID NO: 2897 - DNA, 16 bp, synthetic construct
  misc_feature 1..16: note = synthetic [barcode part1]
  source 1..16: mol_type = other DNA
actagtcttggccaag

SEQ ID NO: 2898 - DNA, 16 bp, synthetic construct
  misc_feature 1..16: note = synthetic [barcode part1]
  source 1..16: mol_type = other DNA
tggaactcgcagtatc

SEQ ID NO: 2899 - DNA, 16 bp, synthetic construct
  misc_feature 1..16: note = synthetic [barcode part1]
  source 1..16: mol_type = other DNA
ttctacggtcagactt

SEQ ID NO: 2900 - DNA, 16 bp, synthetic construct
  misc_feature 1..16: note = synthetic [barcode part1]
  source 1..16: mol_type = other DNA
gcgaaccttctcgatc

SEQ ID NO: 2901 - DNA, 16 bp, synthetic construct
  misc_feature 1..16: note = synthetic [barcode part1]
  source 1..16: mol_type = other DNA
gagagtgtatctctgc

SEQ ID NO: 2902 - DNA, 16 bp, synthetic construct
  misc_feature 1..16: note = synthetic [barcode part1]
  source 1..16: mol_type = other DNA
ttgtcttgactcacag

SEQ ID NO: 2903 - DNA, 16 bp, synthetic construct
  misc_feature 1..16: note = synthetic [barcode part1]
  source 1..16: mol_type = other DNA
tacgcagtgtcttgtt

SEQ ID NO: 2904 - DNA, 16 bp, synthetic construct
  misc_feature 1..16: note = synthetic [barcode part1]
  source 1..16: mol_type = other DNA
tgttgagatctggtgc

SEQ ID NO: 2905 - DNA, 16 bp, synthetic construct
  misc_feature 1..16: note = synthetic [barcode part1]
  source 1..16: mol_type = other DNA
cgactcttaaccgtgc

SEQ ID NO: 2906 - DNA, 16 bp, synthetic construct
  misc_feature 1..16: note = synthetic [barcode part1]
  source 1..16: mol_type = other DNA
acgttgacttcaccgc

SEQ ID NO: 2907 - DNA, 16 bp, synthetic construct
  misc_feature 1..16: note = synthetic [barcode part1]
  source 1..16: mol_type = other DNA
aacaggcgtctcgaag

SEQ ID NO: 2908 - DNA, 16 bp, synthetic construct
  misc_feature 1..16: note = synthetic [barcode part1]
  source 1..16: mol_type = other DNA
caagtacaagaactgc

SEQ ID NO: 2909 - DNA, 16 bp, synthetic construct
  misc_feature 1..16: note = synthetic [barcode part1]
  source 1..16: mol_type = other DNA
atacttcgcgttcctc

SEQ ID NO: 2910 - DNA, 16 bp, synthetic construct
  misc_feature 1..16: note = synthetic [barcode part1]
  source 1..16: mol_type = other DNA
atcagaagactcctcg

SEQ ID NO: 2911 - DNA, 16 bp, synthetic construct
  misc_feature 1..16: note = synthetic [barcode part1]
  source 1..16: mol_type = other DNA
ttcctcgaacgcgttg

SEQ ID NO: 2912 - DNA, 16 bp, synthetic construct
  misc_feature 1..16: note = synthetic [barcode part1]
  source 1..16: mol_type = other DNA
tagaccgtagtgacct

SEQ ID NO: 2913 - DNA, 16 bp, synthetic construct
  misc_feature 1..16: note = synthetic [barcode part1]
  source 1..16: mol_type = other DNA
tcttctcactacgacc

SEQ ID NO: 2914 - DNA, 16 bp, synthetic construct
  misc_feature 1..16: note = synthetic [barcode part1]
  source 1..16: mol_type = other DNA
gtctattcgttgcaac

SEQ ID NO: 2915 - DNA, 16 bp, synthetic construct
  misc_feature 1..16: note = synthetic [barcode part1]
  source 1..16: mol_type = other DNA
gtacttggaatccacg

SEQ ID NO: 2916 - DNA, 16 bp, synthetic construct
  misc_feature 1..16: note = synthetic [barcode part1]
  source 1..16: mol_type = other DNA
tggcacactaggtgtt

SEQ ID NO: 2917 - DNA, 16 bp, synthetic construct
  misc_feature 1..16: note = synthetic [barcode part1]
  source 1..16: mol_type = other DNA
cgccttgttatcctgt

SEQ ID NO: 2918 - DNA, 16 bp, synthetic construct
  misc_feature 1..16: note = synthetic [barcode part1]
  source 1..16: mol_type = other DNA
ttaggcgttgtggact

SEQ ID NO: 2919 - DNA, 16 bp, synthetic construct
  misc_feature 1..16: note = synthetic [barcode part1]
  source 1..16: mol_type = other DNA
tctctggatactgatc

SEQ ID NO: 2920 - DNA, 16 bp, synthetic construct
  misc_feature 1..16: note = synthetic [barcode part1]
  source 1..16: mol_type = other DNA
actcaacggttgtcag

SEQ ID NO: 2921 - DNA, 16 bp, synthetic construct
  misc_feature 1..16: note = synthetic [barcode part1]
  source 1..16: mol_type = other DNA
gcctatcttgttcacc

SEQ ID NO: 2922 - DNA, 16 bp, synthetic construct
  misc_feature 1..16: note = synthetic [barcode part1]
  source 1..16: mol_type = other DNA
gattgcgtaacgcact

SEQ ID NO: 2923 - DNA, 16 bp, synthetic construct
  misc_feature 1..16: note = synthetic [barcode part1]
  source 1..16: mol_type = other DNA
acctactcacctgtct

SEQ ID NO: 2924 - DNA, 16 bp, synthetic construct
  misc_feature 1..16: note = synthetic [barcode part1]
  source 1..16: mol_type = other DNA
agagagtcgaaggact

SEQ ID NO: 2925 - DNA, 16 bp, synthetic construct
  misc_feature 1..16: note = synthetic [barcode part1]
  source 1..16: mol_type = other DNA
ataggaaccgaactac

SEQ ID NO: 2926 - DNA, 16 bp, synthetic construct
  misc_feature 1..16: note = synthetic [barcode part1]
  source 1..16: mol_type = other DNA
attgtcgttcctacag

SEQ ID NO: 2927 - DNA, 16 bp, synthetic construct
  misc_feature 1..16: note = synthetic [barcode part1]
  source 1..16: mol_type = other DNA
gtgattgcacgtgatc

SEQ ID NO: 2928 - DNA, 16 bp, synthetic construct
  misc_feature 1..16: note = synthetic [barcode part1]
  source 1..16: mol_type = other DNA
gaactcaggcaacgac

SEQ ID NO: 2929 - DNA, 16 bp, synthetic construct
  misc_feature 1..16: note = synthetic [barcode part1]
  source 1..16: mol_type = other DNA
cagattaggccactgt

SEQ ID NO: 2930 - DNA, 16 bp, synthetic construct
  misc_feature 1..16: note = synthetic [barcode part1]
  source 1..16: mol_type = other DNA
accgaagtaacgtgcg

SEQ ID NO: 2931 - DNA, 16 bp, synthetic construct
  misc_feature 1..16: note = synthetic [barcode part1]
  source 1..16: mol_type = other DNA
aagtggactgcggtgt

SEQ ID NO: 2932 - DNA, 16 bp, synthetic construct
  misc_feature 1..16: note = synthetic [barcode part1]
  source 1..16: mol_type = other DNA
aaccacaggagagtcc

SEQ ID NO: 2933 - DNA, 16 bp, synthetic construct
  misc_feature 1..16: note = synthetic [barcode part1]
  source 1..16: mol_type = other DNA
cctcagtggttcacac

SEQ ID NO: 2934 - DNA, 16 bp, synthetic construct
  misc_feature 1..16: note = synthetic [barcode part1]
  source 1..16: mol_type = other DNA
tagaaggtggccacgt

SEQ ID NO: 2935 - DNA, 16 bp, synthetic construct
  misc_feature 1..16: note = synthetic [barcode part1]
  source 1..16: mol_type = other DNA
cggagaagtactaatc

SEQ ID NO: 2936 - DNA, 16 bp, synthetic construct
  misc_feature 1..16: note = synthetic [barcode part1]
  source 1..16: mol_type = other DNA
gatcttggtctgcctg

SEQ ID NO: 2937 - DNA, 16 bp, synthetic construct
  misc_feature 1..16: note = synthetic [barcode part1]
  source 1..16: mol_type = other DNA
tacttaacctccggcg

SEQ ID NO: 2938 - DNA, 16 bp, synthetic construct
  misc_feature 1..16: note = synthetic [barcode part1]
  source 1..16: mol_type = other DNA
gccagacagtgtgaac

SEQ ID NO: 2939 - DNA, 16 bp, synthetic construct
  misc_feature 1..16: note = synthetic [barcode part1]
  source 1..16: mol_type = other DNA
actgcgatcgtagtgt

SEQ ID NO: 2940 - DNA, 16 bp, synthetic construct
  misc_feature 1..16: note = synthetic [barcode part1]
  source 1..16: mol_type = other DNA
aacgttcgtcttctag

SEQ ID NO: 2941 - DNA, 16 bp, synthetic construct
  misc_feature 1..16: note = synthetic [barcode part1]
  source 1..16: mol_type = other DNA
agatagacgcctgttc

SEQ ID NO: 2942 - DNA, 16 bp, synthetic construct
  misc_feature 1..16: note = synthetic [barcode part1]
  source 1..16: mol_type = other DNA
atcgccgaagatatag

SEQ ID NO: 2943 - DNA, 16 bp, synthetic construct
  misc_feature 1..16: note = synthetic [barcode part1]
  source 1..16: mol_type = other DNA
gttaagacaaccgtag

SEQ ID NO: 2944 - DNA, 16 bp, synthetic construct
  misc_feature 1..16: note = synthetic [barcode part1]
  source 1..16: mol_type = other DNA
gccgacaacttcctac

SEQ ID NO: 2945 - DNA, 16 bp, synthetic construct
  misc_feature 1..16: note = synthetic [barcode part1]
  source 1..16: mol_type = other DNA
cgtgaacttgtcttgt

SEQ ID NO: 2946 - DNA, 16 bp, synthetic construct
  misc_feature 1..16: note = synthetic [barcode part1]
  source 1..16: mol_type = other DNA
aggacggagtaaggtt

SEQ ID NO: 2947 - DNA, 16 bp, synthetic construct
  misc_feature 1..16: note = synthetic [barcode part1]
  source 1..16: mol_type = other DNA
acgcagaacagaagtg

SEQ ID NO: 2948 - DNA, 16 bp, synthetic construct
  misc_feature 1..16: note = synthetic [barcode part1]
  source 1..16: mol_type = other DNA
actgactgatcgatcg

SEQ ID NO: 2949 - DNA, 16 bp, synthetic construct
  misc_feature 1..16: note = synthetic [barcode part1]
  source 1..16: mol_type = other DNA
agtcgcctctgtactg

SEQ ID NO: 2950 - DNA, 16 bp, synthetic construct
  misc_feature 1..16: note = synthetic [barcode part1]
  source 1..16: mol_type = other DNA
gttcggccgtattctg

SEQ ID NO: 2951 - DNA, 16 bp, synthetic construct
  misc_feature 1..16: note = synthetic [barcode part1]
  source 1..16: mol_type = other DNA
gcctcgatatagtacg

SEQ ID NO: 2952 - DNA, 16 bp, synthetic construct
  misc_feature 1..16: note = synthetic [barcode part1]
  source 1..16: mol_type = other DNA
tgattcctctcggtct

SEQ ID NO: 2953 - DNA, 16 bp, synthetic construct
  misc_feature 1..16: note = synthetic [barcode part1]
  source 1..16: mol_type = other DNA
gcgaccaagaagatcc

SEQ ID NO: 2954 - DNA, 16 bp, synthetic construct
  misc_feature 1..16: note = synthetic [barcode part1]
  source 1..16: mol_type = other DNA
cgaggtcgtattgtac

SEQ ID NO: 2955 - DNA, 16 bp, synthetic construct
  misc_feature 1..16: note = synthetic [barcode part1]
  source 1..16: mol_type = other DNA
tgtaacctgcagactg

SEQ ID NO: 2956 - DNA, 16 bp, synthetic construct
  misc_feature 1..16: note = synthetic [barcode part1]
  source 1..16: mol_type = other DNA
cgatctactgcgtctg

SEQ ID NO: 2957 - DNA, 16 bp, synthetic construct
  misc_feature 1..16: note = synthetic [barcode part1]
  source 1..16: mol_type = other DNA
gtgcagtaccaacgtt

SEQ ID NO: 2958 - DNA, 16 bp, synthetic construct
  misc_feature 1..16: note = synthetic [barcode part1]
  source 1..16: mol_type = other DNA
caccagactcgtacct

SEQ ID NO: 2959 - DNA, 16 bp, synthetic construct
  misc_feature 1..16: note = synthetic [barcode part1]
  source 1..16: mol_type = other DNA
gagttgcgtaactcgt

SEQ ID NO: 2960 - DNA, 16 bp, synthetic construct
  misc_feature 1..16: note = synthetic [barcode part1]
  source 1..16: mol_type = other DNA
cctggttagaatcgac

SEQ ID NO: 2961 - DNA, 16 bp, synthetic construct
  misc_feature 1..16: note = synthetic [barcode part1]
  source 1..16: mol_type = other DNA
tctccacaggttattg

SEQ ID NO: 2962 - DNA, 16 bp, synthetic construct
  misc_feature 1..16: note = synthetic [barcode part1]
  source 1..16: mol_type = other DNA
accacaacaggacttc

SEQ ID NO: 2963 - DNA, 16 bp, synthetic construct
  misc_feature 1..16: note = synthetic [barcode part1]
  source 1..16: mol_type = other DNA
aacgcgacttgtatcg

SEQ ID NO: 2964 - DNA, 16 bp, synthetic construct
  misc_feature 1..16: note = synthetic [barcode part1]
  source 1..16: mol_type = other DNA
ttggacgtacctgagt

SEQ ID NO: 2965 - DNA, 16 bp, synthetic construct
  misc_feature 1..16: note = synthetic [barcode part1]
  source 1..16: mol_type = other DNA
gagtacttctattgcc

SEQ ID NO: 2966 - DNA, 16 bp, synthetic construct
  misc_feature 1..16: note = synthetic [barcode part1]
  source 1..16: mol_type = other DNA
tacagacttcaggcac

SEQ ID NO: 2967 - DNA, 16 bp, synthetic construct
  misc_feature 1..16: note = synthetic [barcode part1]
  source 1..16: mol_type = other DNA
gtagatcaattgcgcc

SEQ ID NO: 2968 - DNA, 16 bp, synthetic construct
  misc_feature 1..16: note = synthetic [barcode part1]
  source 1..16: mol_type = other DNA
tgtaaccgtacgatcg

SEQ ID NO: 2969 - DNA, 16 bp, synthetic construct
  misc_feature 1..16: note = synthetic [barcode part1]
  source 1..16: mol_type = other DNA
tgcagacgtagatcct

SEQ ID NO: 2970 - DNA, 16 bp, synthetic construct
  misc_feature 1..16: note = synthetic [barcode part1]
  source 1..16: mol_type = other DNA
acgtctccaatccgac

SEQ ID NO: 2971 - DNA, 16 bp, synthetic construct
  misc_feature 1..16: note = synthetic [barcode part1]
  source 1..16: mol_type = other DNA
aaggcgaggacctatc

SEQ ID NO: 2972 - DNA, 16 bp, synthetic construct
  misc_feature 1..16: note = synthetic [barcode part1]
  source 1..16: mol_type = other DNA
aattgccagtgcggag

SEQ ID NO: 2973 - DNA, 16 bp, synthetic construct
  misc_feature 1..16: note = synthetic [barcode part1]
  source 1..16: mol_type = other DNA
gttcgtatcgacacag

SEQ ID NO: 2974 - DNA, 16 bp, synthetic construct
  misc_feature 1..16: note = synthetic [barcode part1]
  source 1..16: mol_type = other DNA
tagtagaggacctgcg

SEQ ID NO: 2975 - DNA, 16 bp, synthetic construct
  misc_feature 1..16: note = synthetic [barcode part1]
  source 1..16: mol_type = other DNA
taggaggcacacaacc

SEQ ID NO: 2976 - DNA, 16 bp, synthetic construct
  misc_feature 1..16: note = synthetic [barcode part1]
  source 1..16: mol_type = other DNA
tgtcagagaacgtggc

SEQ ID NO: 2977 - DNA, 16 bp, synthetic construct
  misc_feature 1..16: note = synthetic [barcode part1]
  source 1..16: mol_type = other DNA
aggtctacctggtctc

SEQ ID NO: 2978 - DNA, 16 bp, synthetic construct
  misc_feature 1..16: note = synthetic [barcode part1]
  source 1..16: mol_type = other DNA
caggcgttcaatacac

SEQ ID NO: 2979 - DNA, 16 bp, synthetic construct
  misc_feature 1..16: note = synthetic [barcode part1]
  source 1..16: mol_type = other DNA
acaccttcgacaatct

SEQ ID NO: 2980 - DNA, 16 bp, synthetic construct
  misc_feature 1..16: note = synthetic [barcode part1]
  source 1..16: mol_type = other DNA
agtgaggaaccgtgtc

SEQ ID NO: 2981 - DNA, 16 bp, synthetic construct
  misc_feature 1..16: note = synthetic [barcode part1]
  source 1..16: mol_type = other DNA
tcagaacaggtaagtc

SEQ ID NO: 2982 - DNA, 16 bp, synthetic construct
  misc_feature 1..16: note = synthetic [barcode part1]
  source 1..16: mol_type = other DNA
tggcgcagagaattgc

SEQ ID NO: 2983 - DNA, 16 bp, synthetic construct
  misc_feature 1..16: note = synthetic [barcode part1]
  source 1..16: mol_type = other DNA
aattgccgtcctcacg

SEQ ID NO: 2984 - DNA, 16 bp, synthetic construct
  misc_feature 1..16: note = synthetic [barcode part1]
  source 1..16: mol_type = other DNA
gccttctgtcaacgtg

SEQ ID NO: 2985 - DNA, 16 bp, synthetic construct
  misc_feature 1..16: note = synthetic [barcode part1]
  source 1..16: mol_type = other DNA
aacgtcttctgtggag

SEQ ID NO: 2986 - DNA, 16 bp, synthetic construct
  misc_feature 1..16: note = synthetic [barcode part1]
  source 1..16: mol_type = other DNA
tatccttaccgaactg

SEQ ID NO: 2987 - DNA, 16 bp, synthetic construct
  misc_feature 1..16: note = synthetic [barcode part1]
  source 1..16: mol_type = other DNA
gtgcggttacaatcac

SEQ ID NO: 2988 - DNA, 16 bp, synthetic construct
  misc_feature 1..16: note = synthetic [barcode part1]
  source 1..16: mol_type = other DNA
acggccaagttgagac

SEQ ID NO: 2989 - DNA, 16 bp, synthetic construct
  misc_feature 1..16: note = synthetic [barcode part1]
  source 1..16: mol_type = other DNA
cgtaccggagaagttg

SEQ ID NO: 2990 - DNA, 16 bp, synthetic construct
  misc_feature 1..16: note = synthetic [barcode part1]
  source 1..16: mol_type = other DNA
agaacgcctggactag

SEQ ID NO: 2991 - DNA, 16 bp, synthetic construct
  misc_feature 1..16: note = synthetic [barcode part1]
  source 1..16: mol_type = other DNA
cggaattctgaagtcc

SEQ ID NO: 2992 - DNA, 16 bp, synthetic construct
  misc_feature 1..16: note = synthetic [barcode part1]
  source 1..16: mol_type = other DNA
aacaccactccttctc

SEQ ID NO: 2993 - DNA, 16 bp, synthetic construct
  misc_feature 1..16: note = synthetic [barcode part1]
  source 1..16: mol_type = other DNA
taagtcgtggcagttc

SEQ ID NO: 2994 - DNA, 16 bp, synthetic construct
  misc_feature 1..16: note = synthetic [barcode part1]
  source 1..16: mol_type = other DNA
actagtaacggccgtt

SEQ ID NO: 2995 - DNA, 16 bp, synthetic construct
  misc_feature 1..16: note = synthetic [barcode part1]
  source 1..16: mol_type = other DNA
cgagtgtcgatctcct

SEQ ID NO: 2996 - DNA, 16 bp, synthetic construct
  misc_feature 1..16: note = synthetic [barcode part1]
  source 1..16: mol_type = other DNA
gattagatctgcagag

SEQ ID NO: 2997 - DNA, 16 bp, synthetic construct
  misc_feature 1..16: note = synthetic [barcode part1]
  source 1..16: mol_type = other DNA
acgttgaccagtacac

SEQ ID NO: 2998 - DNA, 16 bp, synthetic construct
  misc_feature 1..16: note = synthetic [barcode part1]
  source 1..16: mol_type = other DNA
gatcggtactacggtt

SEQ ID NO: 2999 - DNA, 16 bp, synthetic construct
  misc_feature 1..16: note = synthetic [barcode part1]
  source 1..16: mol_type = other DNA
gttgatctgactgacg

SEQ ID NO: 3000 - DNA, 16 bp, synthetic construct
  misc_feature 1..16: note = synthetic [barcode part1]
  source 1..16: mol_type = other DNA
tgcaacgttgtggtgt

SEQ ID NO: 3001 - DNA, 16 bp, synthetic construct
  misc_feature 1..16: note = synthetic [barcode part1]
  source 1..16: mol_type = other DNA
cactaaggacgtggac

SEQ ID NO: 3002 - DNA, 16 bp, synthetic construct
  misc_feature 1..16: note = synthetic [barcode part1]
  source 1..16: mol_type = other DNA
agtctgaggcctaatc

SEQ ID NO: 3003 - DNA, 16 bp, synthetic construct
  misc_feature 1..16: note = synthetic [barcode part1]
  source 1..16: mol_type = other DNA
cgtactccaggaatac

SEQ ID NO: 3004 - DNA, 16 bp, synthetic construct
  misc_feature 1..16: note = synthetic [barcode part1]
  source 1..16: mol_type = other DNA
cacgccagagatcaag

SEQ ID NO: 3005 - DNA, 16 bp, synthetic construct
  misc_feature 1..16: note = synthetic [barcode part1]
  source 1..16: mol_type = other DNA
tcagtgacgtctctgc

SEQ ID NO: 3006 - DNA, 16 bp, synthetic construct
  misc_feature 1..16: note = synthetic [barcode part1]
  source 1..16: mol_type = other DNA
actcttagacaactcc

SEQ ID NO: 3007 - DNA, 16 bp, synthetic construct
  misc_feature 1..16: note = synthetic [barcode part1]
  source 1..16: mol_type = other DNA
gcctgcctactgtaac

SEQ ID NO: 3008 - DNA, 16 bp, synthetic construct
  misc_feature 1..16: note = synthetic [barcode part1]
  source 1..16: mol_type = other DNA
acaatatcagtgccgc

SEQ ID NO: 3009 - DNA, 16 bp, synthetic construct
  misc_feature 1..16: note = synthetic [barcode part1]
  source 1..16: mol_type = other DNA
cgttccgattcgtggt

SEQ ID NO: 3010 - DNA, 16 bp, synthetic construct
  misc_feature 1..16: note = synthetic [barcode part1]
  source 1..16: mol_type = other DNA
cgtgaaccgaatacct

SEQ ID NO: 3011 - DNA, 16 bp, synthetic construct
  misc_feature 1..16: note = synthetic [barcode part1]
  source 1..16: mol_type = other DNA
ccttcggaatccttct

SEQ ID NO: 3012 - DNA, 16 bp, synthetic construct
  misc_feature 1..16: note = synthetic [barcode part1]
  source 1..16: mol_type = other DNA
tgtacttgagtcactc

SEQ ID NO: 3013 - DNA, 16 bp, synthetic construct
  misc_feature 1..16: note = synthetic [barcode part1]
  source 1..16: mol_type = other DNA
aaccggatctgcgaag

SEQ ID NO: 3014 - DNA, 16 bp, synthetic construct
  misc_feature 1..16: note = synthetic [barcode part1]
  source 1..16: mol_type = other DNA
atcacggcaggtaggt

SEQ ID NO: 3015 - DNA, 16 bp, synthetic construct
  misc_feature 1..16: note = synthetic [barcode part1]
  source 1..16: mol_type = other DNA
actccgtattcagatc

SEQ ID NO: 3016 - DNA, 16 bp, synthetic construct
  misc_feature 1..16: note = synthetic [barcode part1]
  source 1..16: mol_type = other DNA
tccaacctcagtcttc

SEQ ID NO: 3017 - DNA, 16 bp, synthetic construct
  misc_feature 1..16: note = synthetic [barcode part1]
  source 1..16: mol_type = other DNA
gttctatcttacaggc

SEQ ID NO: 3018 - DNA, 16 bp, synthetic construct
  misc_feature 1..16: note = synthetic [barcode part1]
  source 1..16: mol_type = other DNA
ccagtcttaaggagtc

SEQ ID NO: 3019 - DNA, 16 bp, synthetic construct
  misc_feature 1..16: note = synthetic [barcode part1]
  source 1..16: mol_type = other DNA
gcgtagtaggaccagt

SEQ ID NO: 3020 - DNA, 16 bp, synthetic construct
  misc_feature 1..16: note = synthetic [barcode part1]
  source 1..16: mol_type = other DNA
acaatcaaggaggtct

SEQ ID NO: 3021 - DNA, 16 bp, synthetic construct
  misc_feature 1..16: note = synthetic [barcode part1]
  source 1..16: mol_type = other DNA
attgtggtccagagtc

SEQ ID NO: 3022 - DNA, 16 bp, synthetic construct
  misc_feature 1..16: note = synthetic [barcode part1]
  source 1..16: mol_type = other DNA
atacgacaaggaactc

SEQ ID NO: 3023 - DNA, 16 bp, synthetic construct
  misc_feature 1..16: note = synthetic [barcode part1]
  source 1..16: mol_type = other DNA
aaggagacgtgtgtag

SEQ ID NO: 3024 - DNA, 16 bp, synthetic construct
  misc_feature 1..16: note = synthetic [barcode part1]
  source 1..16: mol_type = other DNA
gttgccgatatagaag

SEQ ID NO: 3025 - DNA, 16 bp, synthetic construct
  misc_feature 1..16: note = synthetic [barcode part1]
  source 1..16: mol_type = other DNA
gataaggcggttcctt

SEQ ID NO: 3026 - DNA, 16 bp, synthetic construct
  misc_feature 1..16: note = synthetic [barcode part1]
  source 1..16: mol_type = other DNA
gcaagtgaacggatag

SEQ ID NO: 3027 - DNA, 16 bp, synthetic construct
  misc_feature 1..16: note = synthetic [barcode part1]
  source 1..16: mol_type = other DNA
aggatcgacgtgatcg

SEQ ID NO: 3028 - DNA, 16 bp, synthetic construct
  misc_feature 1..16: note = synthetic [barcode part1]
  source 1..16: mol_type = other DNA
tagagtacgccttgtg

SEQ ID NO: 3029 - DNA, 16 bp, synthetic construct
  misc_feature 1..16: note = synthetic [barcode part1]
  source 1..16: mol_type = other DNA
ataataccggttggcc

SEQ ID NO: 3030 - DNA, 16 bp, synthetic construct
  misc_feature 1..16: note = synthetic [barcode part1]
  source 1..16: mol_type = other DNA
atacctgcgtctgaag

SEQ ID NO: 3031 - DNA, 16 bp, synthetic construct
  misc_feature 1..16: note = synthetic [barcode part1]
  source 1..16: mol_type = other DNA
agactaacggtatacg

SEQ ID NO: 3032 - DNA, 16 bp, synthetic construct
  misc_feature 1..16: note = synthetic [barcode part1]
  source 1..16: mol_type = other DNA
taccgaattaccggac

SEQ ID NO: 3033 - DNA, 16 bp, synthetic construct
  misc_feature 1..16: note = synthetic [barcode part1]
  source 1..16: mol_type = other DNA
actcgatagaagtgtg

SEQ ID NO: 3034 - DNA, 16 bp, synthetic construct
  misc_feature 1..16: note = synthetic [barcode part1]
  source 1..16: mol_type = other DNA
acggactagtctgtgt

SEQ ID NO: 3035 - DNA, 16 bp, synthetic construct
  misc_feature 1..16: note = synthetic [barcode part1]
  source 1..16: mol_type = other DNA
ttcacgaatctgcgag

SEQ ID NO: 3036 - DNA, 16 bp, synthetic construct
  misc_feature 1..16: note = synthetic [barcode part1]
  source 1..16: mol_type = other DNA
caaccgcctgttactg

SEQ ID NO: 3037 - DNA, 16 bp, synthetic construct
  misc_feature 1..16: note = synthetic [barcode part1]
  source 1..16: mol_type = other DNA
agtcggatccacgaag

SEQ ID NO: 3038 - DNA, 16 bp, synthetic construct
  misc_feature 1..16: note = synthetic [barcode part1]
  source 1..16: mol_type = other DNA
gattctcgccacttct

SEQ ID NO: 3039 - DNA, 16 bp, synthetic construct
  misc_feature 1..16: note = synthetic [barcode part1]
  source 1..16: mol_type = other DNA
cgactagaccaatcgt

SEQ ID NO: 3040 - DNA, 16 bp, synthetic construct
  misc_feature 1..16: note = synthetic [barcode part1]
  source 1..16: mol_type = other DNA
gtgaagacagtgatct

SEQ ID NO: 3041 - DNA, 16 bp, synthetic construct
  misc_feature 1..16: note = synthetic [barcode part1]
  source 1..16: mol_type = other DNA
cagttaggtatcgcac

SEQ ID NO: 3042 - DNA, 16 bp, synthetic construct
  misc_feature 1..16: note = synthetic [barcode part1]
  source 1..16: mol_type = other DNA
ttagataccgccttac

SEQ ID NO: 3043 - DNA, 16 bp, synthetic construct
  misc_feature 1..16: note = synthetic [barcode part1]
  source 1..16: mol_type = other DNA
aacctcaagtaggtag

SEQ ID NO: 3044 - DNA, 16 bp, synthetic construct
  misc_feature 1..16: note = synthetic [barcode part1]
  source 1..16: mol_type = other DNA
tgcggacagtattcac

SEQ ID NO: 3045 - DNA, 16 bp, synthetic construct
  misc_feature 1..16: note = synthetic [barcode part1]
  source 1..16: mol_type = other DNA
ttgcgatatcgcaacg

SEQ ID NO: 3046 - DNA, 16 bp, synthetic construct
  misc_feature 1..16: note = synthetic [barcode part1]
  source 1..16: mol_type = other DNA
cgtaacacgagattcc

SEQ ID NO: 3047 - DNA, 16 bp, synthetic construct
  misc_feature 1..16: note = synthetic [barcode part1]
  source 1..16: mol_type = other DNA
tattccgccaccttgt

SEQ ID NO: 3048 - DNA, 16 bp, synthetic construct
  misc_feature 1..16: note = synthetic [barcode part1]
  source 1..16: mol_type = other DNA
accactaggtcgttag

SEQ ID NO: 3049 - DNA, 16 bp, synthetic construct
  misc_feature 1..16: note = synthetic [barcode part1]
  source 1..16: mol_type = other DNA
tctcgattgcaagtct

SEQ ID NO: 3050 - DNA, 16 bp, synthetic construct
  misc_feature 1..16: note = synthetic [barcode part1]
  source 1..16: mol_type = other DNA
agagtggttatctcgc

SEQ ID NO: 3051 - DNA, 16 bp, synthetic construct
  misc_feature 1..16: note = synthetic [barcode part1]
  source 1..16: mol_type = other DNA
cctggcagtaacttag

SEQ ID NO: 3052 - DNA, 16 bp, synthetic construct
  misc_feature 1..16: note = synthetic [barcode part1]
  source 1..16: mol_type = other DNA
atagaggacgtgaggt

SEQ ID NO: 3053 - DNA, 16 bp, synthetic construct
  misc_feature 1..16: note = synthetic [barcode part1]
  source 1..16: mol_type = other DNA
aagaagttcgtcgtcc

SEQ ID NO: 3054 - DNA, 16 bp, synthetic construct
  misc_feature 1..16: note = synthetic [barcode part1]
  source 1..16: mol_type = other DNA
agaccacagtgactct

SEQ ID NO: 3055 - DNA, 16 bp, synthetic construct
  misc_feature 1..16: note = synthetic [barcode part1]
  source 1..16: mol_type = other DNA
gagaggtaggtgtctc

SEQ ID NO: 3056 - DNA, 16 bp, synthetic construct
  misc_feature 1..16: note = synthetic [barcode part1]
  source 1..16: mol_type = other DNA
caaggtcagttccagt

SEQ ID NO: 3057 - DNA, 16 bp, synthetic construct
  misc_feature 1..16: note = synthetic [barcode part1]
  source 1..16: mol_type = other DNA
cagacagaacgaacag

SEQ ID NO: 3058 - DNA, 16 bp, synthetic construct
  misc_feature 1..16: note = synthetic [barcode part1]
  source 1..16: mol_type = other DNA
tgattggcaactgacc

SEQ ID NO: 3059 - DNA, 16 bp, synthetic construct
  misc_feature 1..16: note = synthetic [barcode part1]
  source 1..16: mol_type = other DNA
ataggtcttagtgcgc

SEQ ID NO: 3060 - DNA, 16 bp, synthetic construct
  misc_feature 1..16: note = synthetic [barcode part1]
  source 1..16: mol_type = other DNA
agtaatcgagacgtgt

SEQ ID NO: 3061 - DNA, 16 bp, synthetic construct
  misc_feature 1..16: note = synthetic [barcode part1]
  source 1..16: mol_type = other DNA
gtgattggaccggaac

SEQ ID NO: 3062 - DNA, 16 bp, synthetic construct
  misc_feature 1..16: note = synthetic [barcode part1]
  source 1..16: mol_type = other DNA
tacacgaacaggatac

SEQ ID NO: 3063 - DNA, 16 bp, synthetic construct
  misc_feature 1..16: note = synthetic [barcode part1]
  source 1..16: mol_type = other DNA
ccgatagtcgtgtcct

SEQ ID NO: 3064 - DNA, 16 bp, synthetic construct
  misc_feature 1..16: note = synthetic [barcode part1]
  source 1..16: mol_type = other DNA
gccgacaatctctcac

SEQ ID NO: 3065 - DNA, 16 bp, synthetic construct
  misc_feature 1..16: note = synthetic [barcode part1]
  source 1..16: mol_type = other DNA
gttccaatcgagatcg

SEQ ID NO: 3066 - DNA, 16 bp, synthetic construct
  misc_feature 1..16: note = synthetic [barcode part1]
  source 1..16: mol_type = other DNA
tgtgcaatatcttgcc

SEQ ID NO: 3067 - DNA, 16 bp, synthetic construct
  misc_feature 1..16: note = synthetic [barcode part1]
  source 1..16: mol_type = other DNA
tcaatctccaccgttc

SEQ ID NO: 3068 - DNA, 16 bp, synthetic construct
  misc_feature 1..16: note = synthetic [barcode part1]
  source 1..16: mol_type = other DNA
actaacgtgagaggcc

SEQ ID NO: 3069 - DNA, 16 bp, synthetic construct
  misc_feature 1..16: note = synthetic [barcode part1]
  source 1..16: mol_type = other DNA
tcgcgagaagtcagac

SEQ ID NO: 3070 - DNA, 16 bp, synthetic construct
  misc_feature 1..16: note = synthetic [barcode part1]
  source 1..16: mol_type = other DNA
gagacacgttggatcg

SEQ ID NO: 3071 - DNA, 16 bp, synthetic construct
  misc_feature 1..16: note = synthetic [barcode part1]
  source 1..16: mol_type = other DNA
cggcaattcggtagtt

SEQ ID NO: 3072 - DNA, 16 bp, synthetic construct
  misc_feature 1..16: note = synthetic [barcode part1]
  source 1..16: mol_type = other DNA
cgtcctaatccgtgac

SEQ ID NO: 3073 - DNA, 16 bp, synthetic construct
  misc_feature 1..16: note = synthetic [barcode part1]
  source 1..16: mol_type = other DNA
gtgacagattctccag

SEQ ID NO: 3074 - DNA, 16 bp, synthetic construct
  misc_feature 1..16: note = synthetic [barcode part1]
  source 1..16: mol_type = other DNA
tgtggacctcaccgtt

SEQ ID NO: 3075 - DNA, 16 bp, synthetic construct
  misc_feature 1..16: note = synthetic [barcode part1]
  source 1..16: mol_type = other DNA
cgaggttccaagatct

SEQ ID NO: 3076 - DNA, 16 bp, synthetic construct
  misc_feature 1..16: note = synthetic [barcode part1]
  source 1..16: mol_type = other DNA
accgcctataacgagt

SEQ ID NO: 3077 - DNA, 16 bp, synthetic construct
  misc_feature 1..16: note = synthetic [barcode part1]
  source 1..16: mol_type = other DNA
aggcaaggagtcttgc

SEQ ID NO: 3078 - DNA, 16 bp, synthetic construct
  misc_feature 1..16: note = synthetic [barcode part1]
  source 1..16: mol_type = other DNA
gtactaccacttactg

SEQ ID NO: 3079 - DNA, 16 bp, synthetic construct
  misc_feature 1..16: note = synthetic [barcode part1]
  source 1..16: mol_type = other DNA
tcttgataccgaggac

SEQ ID NO: 3080 - DNA, 16 bp, synthetic construct
  misc_feature 1..16: note = synthetic [barcode part1]
  source 1..16: mol_type = other DNA
ataggtccgacctctc

SEQ ID NO: 3081 - DNA, 16 bp, synthetic construct
  misc_feature 1..16: note = synthetic [barcode part1]
  source 1..16: mol_type = other DNA
ttgcctgttacctacc

SEQ ID NO: 3082 - DNA, 16 bp, synthetic construct
  misc_feature 1..16: note = synthetic [barcode part1]
  source 1..16: mol_type = other DNA
aagtgattggcctctg

SEQ ID NO: 3083 - DNA, 16 bp, synthetic construct
  misc_feature 1..16: note = synthetic [barcode part1]
  source 1..16: mol_type = other DNA
tgcaggaatacaggag

SEQ ID NO: 3084 - DNA, 16 bp, synthetic construct
  misc_feature 1..16: note = synthetic [barcode part1]
  source 1..16: mol_type = other DNA
gcctatcaggtaagtc

SEQ ID NO: 3085 - DNA, 16 bp, synthetic construct
  misc_feature 1..16: note = synthetic [barcode part1]
  source 1..16: mol_type = other DNA
tcttccgagtgtgtcg

SEQ ID NO: 3086 - DNA, 16 bp, synthetic construct
  misc_feature 1..16: note = synthetic [barcode part1]
  source 1..16: mol_type = other DNA
cagaactccttggaac

SEQ ID NO: 3087 - DNA, 16 bp, synthetic construct
  misc_feature 1..16: note = synthetic [barcode part1]
  source 1..16: mol_type = other DNA
tgtagactccggatac

SEQ ID NO: 3088 - DNA, 16 bp, synthetic construct
  misc_feature 1..16: note = synthetic [barcode part1]
  source 1..16: mol_type = other DNA
cggatatcggcaagac

SEQ ID NO: 3089 - DNA, 16 bp, synthetic construct
  misc_feature 1..16: note = synthetic [barcode part1]
  source 1..16: mol_type = other DNA
acgattcttgtgttcg

SEQ ID NO: 3090 - DNA, 16 bp, synthetic construct
  misc_feature 1..16: note = synthetic [barcode part1]
  source 1..16: mol_type = other DNA
tcgacaataccggatc

SEQ ID NO: 3091 - DNA, 16 bp, synthetic construct
  misc_feature 1..16: note = synthetic [barcode part1]
  source 1..16: mol_type = other DNA
gaatcctccaggattg

SEQ ID NO: 3092 - DNA, 16 bp, synthetic construct
  misc_feature 1..16: note = synthetic [barcode part1]
  source 1..16: mol_type = other DNA
tctggccgtaccagtt

SEQ ID NO: 3093 - DNA, 16 bp, synthetic construct
  misc_feature 1..16: note = synthetic [barcode part1]
  source 1..16: mol_type = other DNA
atccagactcgttatc

SEQ ID NO: 3094 - DNA, 16 bp, synthetic construct
  misc_feature 1..16: note = synthetic [barcode part1]
  source 1..16: mol_type = other DNA
gtaacaagatacaccg

SEQ ID NO: 3095 - DNA, 16 bp, synthetic construct
  misc_feature 1..16: note = synthetic [barcode part1]
  source 1..16: mol_type = other DNA
tgactacaagtcgaag

SEQ ID NO: 3096 - DNA, 16 bp, synthetic construct
  misc_feature 1..16: note = synthetic [barcode part1]
  source 1..16: mol_type = other DNA
tgagtcttagacgtcg

SEQ ID NO: 3097 - DNA, 16 bp, synthetic construct
  misc_feature 1..16: note = synthetic [barcode part1]
  source 1..16: mol_type = other DNA
gacacacaagaccggt

SEQ ID NO: 3098 - DNA, 16 bp, synthetic construct
  misc_feature 1..16: note = synthetic [barcode part1]
  source 1..16: mol_type = other DNA
taatcgaatcggccgt

SEQ ID NO: 3099 - DNA, 16 bp, synthetic construct
  misc_feature 1..16: note = synthetic [barcode part1]
  source 1..16: mol_type = other DNA
gagacctaacaccgtt

SEQ ID NO: 3100 - DNA, 16 bp, synthetic construct
  misc_feature 1..16: note = synthetic [barcode part1]
  source 1..16: mol_type = other DNA
gcaaccgcaattacac

SEQ ID NO: 3101 - DNA, 16 bp, synthetic construct
  misc_feature 1..16: note = synthetic [barcode part1]
  source 1..16: mol_type = other DNA
tctgactccaacctct

SEQ ID NO: 3102 - DNA, 16 bp, synthetic construct
  misc_feature 1..16: note = synthetic [barcode part1]
  source 1..16: mol_type = other DNA
gtgtgtatacacacgc

SEQ ID NO: 3103 - DNA, 16 bp, synthetic construct
  misc_feature 1..16: note = synthetic [barcode part1]
  source 1..16: mol_type = other DNA
cagaacgaacgacaag

SEQ ID NO: 3104 - DNA, 16 bp, synthetic construct
  misc_feature 1..16: note = synthetic [barcode part1]
  source 1..16: mol_type = other DNA
tgcaccgcaattgtag

SEQ ID NO: 3105 - DNA, 16 bp, synthetic construct
  misc_feature 1..16: note = synthetic [barcode part1]
  source 1..16: mol_type = other DNA
gaggagttactctgtc

SEQ ID NO: 3106 - DNA, 16 bp, synthetic construct
  misc_feature 1..16: note = synthetic [barcode part1]
  source 1..16: mol_type = other DNA
agatatccaccgtctt

SEQ ID NO: 3107 - DNA, 16 bp, synthetic construct
  misc_feature 1..16: note = synthetic [barcode part1]
  source 1..16: mol_type = other DNA
cggttctcgtagttgc

SEQ ID NO: 3108 - DNA, 16 bp, synthetic construct
  misc_feature 1..16: note = synthetic [barcode part1]
  source 1..16: mol_type = other DNA
cgaactaccttgcacc

SEQ ID NO: 3109 - DNA, 16 bp, synthetic construct
  misc_feature 1..16: note = synthetic [barcode part1]
  source 1..16: mol_type = other DNA
aacttggaacctggtc

SEQ ID NO: 3110 - DNA, 16 bp, synthetic construct
  misc_feature 1..16: note = synthetic [barcode part1]
  source 1..16: mol_type = other DNA
gcagatcctagtgtgt

SEQ ID NO: 3111 - DNA, 16 bp, synthetic construct
  misc_feature 1..16: note = synthetic [barcode part1]
  source 1..16: mol_type = other DNA
acactgtgtctgtccg

SEQ ID NO: 3112 - DNA, 16 bp, synthetic construct
  misc_feature 1..16: note = synthetic [barcode part1]
  source 1..16: mol_type = other DNA
gcgtcaagaagtgatt

SEQ ID NO: 3113 - DNA, 16 bp, synthetic construct
  misc_feature 1..16: note = synthetic [barcode part1]
  source 1..16: mol_type = other DNA
gtcaactagagaggag

SEQ ID NO: 3114 - DNA, 16 bp, synthetic construct
  misc_feature 1..16: note = synthetic [barcode part1]
  source 1..16: mol_type = other DNA
cctggaagaccttagt

SEQ ID NO: 3115 - DNA, 16 bp, synthetic construct
  misc_feature 1..16: note = synthetic [barcode part1]
  source 1..16: mol_type = other DNA
acgcgatcagtacact

SEQ ID NO: 3116 - DNA, 16 bp, synthetic construct
  misc_feature 1..16: note = synthetic [barcode part1]
  source 1..16: mol_type = other DNA
attagatactctcgcc

SEQ ID NO: 3117 - DNA, 16 bp, synthetic construct
  misc_feature 1..16: note = synthetic [barcode part1]
  source 1..16: mol_type = other DNA
tagagaagttgacgtc

SEQ ID NO: 3118 - DNA, 16 bp, synthetic construct
  misc_feature 1..16: note = synthetic [barcode part1]
  source 1..16: mol_type = other DNA
gtgccacagacaagtg

SEQ ID NO: 3119 - DNA, 16 bp, synthetic construct
  misc_feature 1..16: note = synthetic [barcode part1]
  source 1..16: mol_type = other DNA
ttcagtccgcgtggtt

SEQ ID NO: 3120 - DNA, 16 bp, synthetic construct
  misc_feature 1..16: note = synthetic [barcode part1]
  source 1..16: mol_type = other DNA
gcgaagacgtaagaac

SEQ ID NO: 3121 - DNA, 16 bp, synthetic construct
  misc_feature 1..16: note = synthetic [barcode part1]
  source 1..16: mol_type = other DNA
tggagaagactcctct

SEQ ID NO: 3122 - DNA, 16 bp, synthetic construct
  misc_feature 1..16: note = synthetic [barcode part1]
  source 1..16: mol_type = other DNA
cggaatcagagttcct

SEQ ID NO: 3123 - DNA, 16 bp, synthetic construct
  misc_feature 1..16: note = synthetic [barcode part1]
  source 1..16: mol_type = other DNA
ccgtggttaatcaacg

SEQ ID NO: 3124 - DNA, 16 bp, synthetic construct
  misc_feature 1..16: note = synthetic [barcode part1]
  source 1..16: mol_type = other DNA
ccacgttgtctagtgc

SEQ ID NO: 3125 - DNA, 16 bp, synthetic construct
  misc_feature 1..16: note = synthetic [barcode part1]
  source 1..16: mol_type = other DNA
tgcaactctctcgacg

SEQ ID NO: 3126 - DNA, 16 bp, synthetic construct
  misc_feature 1..16: note = synthetic [barcode part1]
  source 1..16: mol_type = other DNA
tcttacactcttgcgc

SEQ ID NO: 3127 - DNA, 16 bp, synthetic construct
  misc_feature 1..16: note = synthetic [barcode part1]
  source 1..16: mol_type = other DNA
atccgtacgataagag

SEQ ID NO: 3128 - DNA, 16 bp, synthetic construct
  misc_feature 1..16: note = synthetic [barcode part1]
  source 1..16: mol_type = other DNA
tatcggatctgtgttc

SEQ ID NO: 3129 - DNA, 16 bp, synthetic construct
  misc_feature 1..16: note = synthetic [barcode part1]
  source 1..16: mol_type = other DNA
ccagtatcacgatcag

SEQ ID NO: 3130 - DNA, 16 bp, synthetic construct
  misc_feature 1..16: note = synthetic [barcode part1]
  source 1..16: mol_type = other DNA
aggtgaggtcctgaac

SEQ ID NO: 3131 - DNA, 16 bp, synthetic construct
  misc_feature 1..16: note = synthetic [barcode part1]
  source 1..16: mol_type = other DNA
agacgcaccgaactag

SEQ ID NO: 3132 - DNA, 16 bp, synthetic construct
  misc_feature 1..16: note = synthetic [barcode part1]
  source 1..16: mol_type = other DNA
tgacctctgacgtacc

SEQ ID NO: 3133 - DNA, 16 bp, synthetic construct
  misc_feature 1..16: note = synthetic [barcode part1]
  source 1..16: mol_type = other DNA
aaccttggacgaatag

SEQ ID NO: 3134 - DNA, 16 bp, synthetic construct
  misc_feature 1..16: note = synthetic [barcode part1]
  source 1..16: mol_type = other DNA
gtgcaagaatacggag

SEQ ID NO: 3135 - DNA, 16 bp, synthetic construct
  misc_feature 1..16: note = synthetic [barcode part1]
  source 1..16: mol_type = other DNA
cggcgagtagatatcg

SEQ ID NO: 3136 - DNA, 16 bp, synthetic construct
  misc_feature 1..16: note = synthetic [barcode part1]
  source 1..16: mol_type = other DNA
atccgttaagtcctgt

SEQ ID NO: 3137 - DNA, 16 bp, synthetic construct
  misc_feature 1..16: note = synthetic [barcode part1]
  source 1..16: mol_type = other DNA
gcaattattggcctct

SEQ ID NO: 3138 - DNA, 16 bp, synthetic construct
  misc_feature 1..16: note = synthetic [barcode part1]
  source 1..16: mol_type = other DNA
ttcgattgtgcgtcgc

SEQ ID NO: 3139 - DNA, 16 bp, synthetic construct
  misc_feature 1..16: note = synthetic [barcode part1]
  source 1..16: mol_type = other DNA
ttcgccaaggaattgc

SEQ ID NO: 3140 - DNA, 16 bp, synthetic construct
  misc_feature 1..16: note = synthetic [barcode part1]
  source 1..16: mol_type = other DNA
tccttccgagaagagt

SEQ ID NO: 3141 - DNA, 16 bp, synthetic construct
  misc_feature 1..16: note = synthetic [barcode part1]
  source 1..16: mol_type = other DNA
aatacaggaacgcgag

SEQ ID NO: 3142 - DNA, 16 bp, synthetic construct
  misc_feature 1..16: note = synthetic [barcode part1]
  source 1..16: mol_type = other DNA
gatactcactcgagtg

SEQ ID NO: 3143 - DNA, 16 bp, synthetic construct
  misc_feature 1..16: note = synthetic [barcode part1]
  source 1..16: mol_type = other DNA
tctcgacaactgtgcc

SEQ ID NO: 3144 - DNA, 16 bp, synthetic construct
  misc_feature 1..16: note = synthetic [barcode part1]
  source 1..16: mol_type = other DNA
atcacctgcgacaagt

SEQ ID NO: 3145 - DNA, 16 bp, synthetic construct
  misc_feature 1..16: note = synthetic [barcode part1]
  source 1..16: mol_type = other DNA
cgcgttgtatacaacg

SEQ ID NO: 3146 - DNA, 16 bp, synthetic construct
  misc_feature 1..16: note = synthetic [barcode part1]
  source 1..16: mol_type = other DNA
tcacgtcacgatccac

SEQ ID NO: 3147 - DNA, 16 bp, synthetic construct
  misc_feature 1..16: note = synthetic [barcode part1]
  source 1..16: mol_type = other DNA
atcgcctcctggatac

SEQ ID NO: 3148 - DNA, 16 bp, synthetic construct
  misc_feature 1..16: note = synthetic [barcode part1]
  source 1..16: mol_type = other DNA
tgccttagacacttgt

SEQ ID NO: 3149 - DNA, 16 bp, synthetic construct
  misc_feature 1..16: note = synthetic [barcode part1]
  source 1..16: mol_type = other DNA
tgatacctcgtctgcg

SEQ ID NO: 3150 - DNA, 16 bp, synthetic construct
  misc_feature 1..16: note = synthetic [barcode part1]
  source 1..16: mol_type = other DNA
ttgcgtctccgacaac

SEQ ID NO: 3151 - DNA, 16 bp, synthetic construct
  misc_feature 1..16: note = synthetic [barcode part1]
  source 1..16: mol_type = other DNA
tcagagtcagacaggc

SEQ ID NO: 3152 - DNA, 16 bp, synthetic construct
  misc_feature 1..16: note = synthetic [barcode part1]
  source 1..16: mol_type = other DNA
cggcgtattctaccac

SEQ ID NO: 3153 - DNA, 16 bp, synthetic construct
  misc_feature 1..16: note = synthetic [barcode part1]
  source 1..16: mol_type = other DNA
tgtagaactccacgtg

SEQ ID NO: 3154 - DNA, 16 bp, synthetic construct
  misc_feature 1..16: note = synthetic [barcode part1]
  source 1..16: mol_type = other DNA
acggcaatctatagag

SEQ ID NO: 3155 - DNA, 16 bp, synthetic construct
  misc_feature 1..16: note = synthetic [barcode part1]
  source 1..16: mol_type = other DNA
atcagtctcgactgag

SEQ ID NO: 3156 - DNA, 16 bp, synthetic construct
  misc_feature 1..16: note = synthetic [barcode part1]
  source 1..16: mol_type = other DNA
gccttctacgttgacg

SEQ ID NO: 3157 - DNA, 16 bp, synthetic construct
  misc_feature 1..16: note = synthetic [barcode part1]
  source 1..16: mol_type = other DNA
cctactaatacggtct

SEQ ID NO: 3158 - DNA, 16 bp, synthetic construct
  misc_feature 1..16: note = synthetic [barcode part1]
  source 1..16: mol_type = other DNA
aagtcggattggcacg

SEQ ID NO: 3159 - DNA, 16 bp, synthetic construct
  misc_feature 1..16: note = synthetic [barcode part1]
  source 1..16: mol_type = other DNA
tacggcacctaggatt

SEQ ID NO: 3160 - DNA, 16 bp, synthetic construct
  misc_feature 1..16: note = synthetic [barcode part1]
  source 1..16: mol_type = other DNA
tcacgcctgtcgagtt

SEQ ID NO: 3161 - DNA, 16 bp, synthetic construct
  misc_feature 1..16: note = synthetic [barcode part1]
  source 1..16: mol_type = other DNA
gataggaggtccacgt

SEQ ID NO: 3162 - DNA, 16 bp, synthetic construct
  misc_feature 1..16: note = synthetic [barcode part1]
  source 1..16: mol_type = other DNA
acgccaagaggtgact

SEQ ID NO: 3163 - DNA, 16 bp, synthetic construct
  misc_feature 1..16: note = synthetic [barcode part1]
  source 1..16: mol_type = other DNA
tgatcactgaagaacg

SEQ ID NO: 3164 - DNA, 16 bp, synthetic construct
  misc_feature 1..16: note = synthetic [barcode part1]
  source 1..16: mol_type = other DNA
taggagaaccgatact

SEQ ID NO: 3165 - DNA, 16 bp, synthetic construct
  misc_feature 1..16: note = synthetic [barcode part1]
  source 1..16: mol_type = other DNA
gacgccaactagttac

SEQ ID NO: 3166 - DNA, 16 bp, synthetic construct
  misc_feature 1..16: note = synthetic [barcode part1]
  source 1..16: mol_type = other DNA
agtagatcaggatctg

SEQ ID NO: 3167 - DNA, 16 bp, synthetic construct
  misc_feature 1..16: note = synthetic [barcode part1]
  source 1..16: mol_type = other DNA
aacgttccggaaggtg

SEQ ID NO: 3168 - DNA, 16 bp, synthetic construct
  misc_feature 1..16: note = synthetic [barcode part1]
  source 1..16: mol_type = other DNA
gtgtcctgtatctctc

SEQ ID NO: 3169 - DNA, 16 bp, synthetic construct
  misc_feature 1..16: note = synthetic [barcode part1]
  source 1..16: mol_type = other DNA
cgagtatcttcactac

SEQ ID NO: 3170 - DNA, 16 bp, synthetic construct
  misc_feature 1..16: note = synthetic [barcode part1]
  source 1..16: mol_type = other DNA
ttaacgcctaattccg

SEQ ID NO: 3171 - DNA, 16 bp, synthetic construct
  misc_feature 1..16: note = synthetic [barcode part1]
  source 1..16: mol_type = other DNA
ttactactgtccgaac

SEQ ID NO: 3172 - DNA, 16 bp, synthetic construct
  misc_feature 1..16: note = synthetic [barcode part1]
  source 1..16: mol_type = other DNA
tacgaacgaacggcac

SEQ ID NO: 3173 - DNA, 16 bp, synthetic construct
  misc_feature 1..16: note = synthetic [barcode part1]
  source 1..16: mol_type = other DNA
tattacctccacagac

SEQ ID NO: 3174 - DNA, 16 bp, synthetic construct
  misc_feature 1..16: note = synthetic [barcode part1]
  source 1..16: mol_type = other DNA
tctagtgtaggttgcg

SEQ ID NO: 3175 - DNA, 16 bp, synthetic construct
  misc_feature 1..16: note = synthetic [barcode part1]
  source 1..16: mol_type = other DNA
gcgccaaggagtaatc

SEQ ID NO: 3176 - DNA, 16 bp, synthetic construct
  misc_feature 1..16: note = synthetic [barcode part1]
  source 1..16: mol_type = other DNA
aaccgcagtataccgt

SEQ ID NO: 3177 - DNA, 16 bp, synthetic construct
  misc_feature 1..16: note = synthetic [barcode part1]
  source 1..16: mol_type = other DNA
cgttgttattcggact

SEQ ID NO: 3178 - DNA, 16 bp, synthetic construct
  misc_feature 1..16: note = synthetic [barcode part1]
  source 1..16: mol_type = other DNA
ttcttacagacgcgag

SEQ ID NO: 3179 - DNA, 16 bp, synthetic construct
  misc_feature 1..16: note = synthetic [barcode part1]
  source 1..16: mol_type = other DNA
ttgacctgttctccgt

SEQ ID NO: 3180 - DNA, 16 bp, synthetic construct
  misc_feature 1..16: note = synthetic [barcode part1]
  source 1..16: mol_type = other DNA
tgatacgatcgttctc

SEQ ID NO: 3181 - DNA, 16 bp, synthetic construct
  misc_feature 1..16: note = synthetic [barcode part1]
  source 1..16: mol_type = other DNA
accgtatcgtgagttg

SEQ ID NO: 3182 - DNA, 16 bp, synthetic construct
  misc_feature 1..16: note = synthetic [barcode part1]
  source 1..16: mol_type = other DNA
tcggtaacgcctctac

SEQ ID NO: 3183 - DNA, 16 bp, synthetic construct
  misc_feature 1..16: note = synthetic [barcode part1]
  source 1..16: mol_type = other DNA
agaaggattaggaccg

SEQ ID NO: 3184 - DNA, 16 bp, synthetic construct
  misc_feature 1..16: note = synthetic [barcode part1]
  source 1..16: mol_type = other DNA
gcctgaatagacgtct

SEQ ID NO: 3185 - DNA, 16 bp, synthetic construct
  misc_feature 1..16: note = synthetic [barcode part1]
  source 1..16: mol_type = other DNA
tcaagactcgcgatac

SEQ ID NO: 3186 - DNA, 16 bp, synthetic construct
  misc_feature 1..16: note = synthetic [barcode part1]
  source 1..16: mol_type = other DNA
accgagatcctaactg

SEQ ID NO: 3187 - DNA, 16 bp, synthetic construct
  misc_feature 1..16: note = synthetic [barcode part1]
  source 1..16: mol_type = other DNA
accgcgactgtaatac

SEQ ID NO: 3188 - DNA, 16 bp, synthetic construct
  misc_feature 1..16: note = synthetic [barcode part1]
  source 1..16: mol_type = other DNA
cgccaacagaattaag

SEQ ID NO: 3189 - DNA, 16 bp, synthetic construct
  misc_feature 1..16: note = synthetic [barcode part1]
  source 1..16: mol_type = other DNA
taaccgaccagaatcc

SEQ ID NO: 3190 - DNA, 16 bp, synthetic construct
  misc_feature 1..16: note = synthetic [barcode part1]
  source 1..16: mol_type = other DNA
ttggtgttggtgtacg

SEQ ID NO: 3191 - DNA, 16 bp, synthetic construct
  misc_feature 1..16: note = synthetic [barcode part1]
  source 1..16: mol_type = other DNA
gatacctctgtgcaag

SEQ ID NO: 3192 - DNA, 16 bp, synthetic construct
  misc_feature 1..16: note = synthetic [barcode part1]
  source 1..16: mol_type = other DNA
tctaggaaggaggaac

SEQ ID NO: 3193 - DNA, 16 bp, synthetic construct
  misc_feature 1..16: note = synthetic [barcode part1]
  source 1..16: mol_type = other DNA
cctgatccgtacaacc

SEQ ID NO: 3194 - DNA, 16 bp, synthetic construct
  misc_feature 1..16: note = synthetic [barcode part1]
  source 1..16: mol_type = other DNA
gcgtgatccttaactt

SEQ ID NO: 3195 - DNA, 16 bp, synthetic construct
  misc_feature 1..16: note = synthetic [barcode part1]
  source 1..16: mol_type = other DNA
tgtcctcaagaacgtg

SEQ ID NO: 3196 - DNA, 16 bp, synthetic construct
  misc_feature 1..16: note = synthetic [barcode part1]
  source 1..16: mol_type = other DNA
tatctcggtgaactct

SEQ ID NO: 3197 - DNA, 16 bp, synthetic construct
  misc_feature 1..16: note = synthetic [barcode part1]
  source 1..16: mol_type = other DNA
tcaatctcgtcgatac

SEQ ID NO: 3198 - DNA, 16 bp, synthetic construct
  misc_feature 1..16: note = synthetic [barcode part1]
  source 1..16: mol_type = other DNA
gtgccgtgtgaacaag

SEQ ID NO: 3199 - DNA, 16 bp, synthetic construct
  misc_feature 1..16: note = synthetic [barcode part1]
  source 1..16: mol_type = other DNA
aggcctactcaatctt

SEQ ID NO: 3200 - DNA, 16 bp, synthetic construct
  misc_feature 1..16: note = synthetic [barcode part1]
  source 1..16: mol_type = other DNA
cgactcctgcaatcgt

SEQ ID NO: 3201 - DNA, 16 bp, synthetic construct
  misc_feature 1..16: note = synthetic [barcode part1]
  source 1..16: mol_type = other DNA
gtcaactggaacttcg

SEQ ID NO: 3202 - DNA, 16 bp, synthetic construct
  misc_feature 1..16: note = synthetic [barcode part1]
  source 1..16: mol_type = other DNA
gacctctcacgtcaac

SEQ ID NO: 3203 - DNA, 16 bp, synthetic construct
  misc_feature 1..16: note = synthetic [barcode part1]
  source 1..16: mol_type = other DNA
tccggttcgtaaccac

SEQ ID NO: 3204 - DNA, 16 bp, synthetic construct
  misc_feature 1..16: note = synthetic [barcode part1]
  source 1..16: mol_type = other DNA
tcactgaagtcgtcag

SEQ ID NO: 3205 - DNA, 16 bp, synthetic construct
  misc_feature 1..16: note = synthetic [barcode part1]
  source 1..16: mol_type = other DNA
tccaattcggcacacc

SEQ ID NO: 3206 - DNA, 16 bp, synthetic construct
  misc_feature 1..16: note = synthetic [barcode part1]
  source 1..16: mol_type = other DNA
caatagtgtcgtcggt

SEQ ID NO: 3207 - DNA, 16 bp, synthetic construct
  misc_feature 1..16: note = synthetic [barcode part1]
  source 1..16: mol_type = other DNA
ccgataaccgtactcc

SEQ ID NO: 3208 - DNA, 16 bp, synthetic construct
  misc_feature 1..16: note = synthetic [barcode part1]
  source 1..16: mol_type = other DNA
ttagtgcggaattgag

SEQ ID NO: 3209 - DNA, 16 bp, synthetic construct
  misc_feature 1..16: note = synthetic [barcode part1]
  source 1..16: mol_type = other DNA
ttgacgtggttcctcg

SEQ ID NO: 3210 - DNA, 16 bp, synthetic construct
  misc_feature 1..16: note = synthetic [barcode part1]
  source 1..16: mol_type = other DNA
taggtgcgcacttagt

SEQ ID NO: 3211 - DNA, 16 bp, synthetic construct
  misc_feature 1..16: note = synthetic [barcode part1]
  source 1..16: mol_type = other DNA
caagaaggagactggt

SEQ ID NO: 3212 - DNA, 16 bp, synthetic construct
  misc_feature 1..16: note = synthetic [barcode part1]
  source 1..16: mol_type = other DNA
gtatcgactgagtgtc

SEQ ID NO: 3213 - DNA, 16 bp, synthetic construct
  misc_feature 1..16: note = synthetic [barcode part1]
  source 1..16: mol_type = other DNA
aggagtgacgacttgc

SEQ ID NO: 3214 - DNA, 16 bp, synthetic construct
  misc_feature 1..16: note = synthetic [barcode part1]
  source 1..16: mol_type = other DNA
tcgatcaggtctcaag

SEQ ID NO: 3215 - DNA, 16 bp, synthetic construct
  misc_feature 1..16: note = synthetic [barcode part1]
  source 1..16: mol_type = other DNA
tcggaaccaagatcct

SEQ ID NO: 3216 - DNA, 16 bp, synthetic construct
  misc_feature 1..16: note = synthetic [barcode part1]
  source 1..16: mol_type = other DNA
attgttcggcacctgc

SEQ ID NO: 3217 - DNA, 16 bp, synthetic construct
  misc_feature 1..16: note = synthetic [barcode part1]
  source 1..16: mol_type = other DNA
ttcgcaagtgatagag

SEQ ID NO: 3218 - DNA, 16 bp, synthetic construct
  misc_feature 1..16: note = synthetic [barcode part1]
  source 1..16: mol_type = other DNA
tctgccgcacagactt

SEQ ID NO: 3219 - DNA, 16 bp, synthetic construct
  misc_feature 1..16: note = synthetic [barcode part1]
  source 1..16: mol_type = other DNA
ttctgcaggaggtgtt

SEQ ID NO: 3220 - DNA, 16 bp, synthetic construct
  misc_feature 1..16: note = synthetic [barcode part1]
  source 1..16: mol_type = other DNA
actaagagtacaccag

SEQ ID NO: 3221 - DNA, 16 bp, synthetic construct
  misc_feature 1..16: note = synthetic [barcode part1]
  source 1..16: mol_type = other DNA
cagtatcacgacactg

SEQ ID NO: 3222 - DNA, 16 bp, synthetic construct
  misc_feature 1..16: note = synthetic [barcode part1]
  source 1..16: mol_type = other DNA
tcagagtgagtggacc

SEQ ID NO: 3223 - DNA, 16 bp, synthetic construct
  misc_feature 1..16: note = synthetic [barcode part1]
  source 1..16: mol_type = other DNA
gatagtctgcacctcc

SEQ ID NO: 3224 - DNA, 16 bp, synthetic construct
  misc_feature 1..16: note = synthetic [barcode part1]
  source 1..16: mol_type = other DNA
tgcggtatatctacct

SEQ ID NO: 3225 - DNA, 16 bp, synthetic construct
  misc_feature 1..16: note = synthetic [barcode part1]
  source 1..16: mol_type = other DNA
agttgtagaaggacct

SEQ ID NO: 3226 - DNA, 16 bp, synthetic construct
  misc_feature 1..16: note = synthetic [barcode part1]
  source 1..16: mol_type = other DNA
gcgcgttaacagtgag

SEQ ID NO: 3227 - DNA, 16 bp, synthetic construct
  misc_feature 1..16: note = synthetic [barcode part1]
  source 1..16: mol_type = other DNA
ttacacgataccgacg

SEQ ID NO: 3228 - DNA, 16 bp, synthetic construct
  misc_feature 1..16: note = synthetic [barcode part1]
  source 1..16: mol_type = other DNA
caattcctgtagtcgt

SEQ ID NO: 3229 - DNA, 16 bp, synthetic construct
  misc_feature 1..16: note = synthetic [barcode part1]
  source 1..16: mol_type = other DNA
agttcggttgacgact

SEQ ID NO: 3230 - DNA, 16 bp, synthetic construct
  misc_feature 1..16: note = synthetic [barcode part1]
  source 1..16: mol_type = other DNA
ccgcagattaccgttc

SEQ ID NO: 3231 - DNA, 16 bp, synthetic construct
  misc_feature 1..16: note = synthetic [barcode part1]
  source 1..16: mol_type = other DNA
tagaatctggcaccgt

SEQ ID NO: 3232 - DNA, 16 bp, synthetic construct
  misc_feature 1..16: note = synthetic [barcode part1]
  source 1..16: mol_type = other DNA
cagttccttccagttc

SEQ ID NO: 3233 - DNA, 16 bp, synthetic construct
  misc_feature 1..16: note = synthetic [barcode part1]
  source 1..16: mol_type = other DNA
tcactatcgaagtggc

SEQ ID NO: 3234 - DNA, 16 bp, synthetic construct
  misc_feature 1..16: note = synthetic [barcode part1]
  source 1..16: mol_type = other DNA
gcgagttccagatact

SEQ ID NO: 3235 - DNA, 16 bp, synthetic construct
  misc_feature 1..16: note = synthetic [barcode part1]
  source 1..16: mol_type = other DNA
gaagttacggtctctg

SEQ ID NO: 3236 - DNA, 16 bp, synthetic construct
  misc_feature 1..16: note = synthetic [barcode part1]
  source 1..16: mol_type = other DNA
gcggtcaggttaagac

SEQ ID NO: 3237 - DNA, 16 bp, synthetic construct
  misc_feature 1..16: note = synthetic [barcode part1]
  source 1..16: mol_type = other DNA
cgtagttctctgccag

SEQ ID NO: 3238 - DNA, 16 bp, synthetic construct
  misc_feature 1..16: note = synthetic [barcode part1]
  source 1..16: mol_type = other DNA
actcctgtggactacc

SEQ ID NO: 3239 - DNA, 16 bp, synthetic construct
  misc_feature 1..16: note = synthetic [barcode part1]
  source 1..16: mol_type = other DNA
tggatactgataaggc

SEQ ID NO: 3240 - DNA, 16 bp, synthetic construct
  misc_feature 1..16: note = synthetic [barcode part1]
  source 1..16: mol_type = other DNA
gacgaacgagttccag

SEQ ID NO: 3241 - DNA, 16 bp, synthetic construct
  misc_feature 1..16: note = synthetic [barcode part1]
  source 1..16: mol_type = other DNA
tcgaagtactctaggc

SEQ ID NO: 3242 - DNA, 16 bp, synthetic construct
  misc_feature 1..16: note = synthetic [barcode part1]
  source 1..16: mol_type = other DNA
ccgagtgacgatagac

SEQ ID NO: 3243 - DNA, 16 bp, synthetic construct
  misc_feature 1..16: note = synthetic [barcode part1]
  source 1..16: mol_type = other DNA
cgatcggtcaattgac

SEQ ID NO: 3244 - DNA, 16 bp, synthetic construct
  misc_feature 1..16: note = synthetic [barcode part1]
  source 1..16: mol_type = other DNA
aaccacttaccgagtg

SEQ ID NO: 3245 - DNA, 16 bp, synthetic construct
  misc_feature 1..16: note = synthetic [barcode part1]
  source 1..16: mol_type = other DNA
cctacgcagttgtcgt

SEQ ID NO: 3246 - DNA, 16 bp, synthetic construct
  misc_feature 1..16: note = synthetic [barcode part1]
  source 1..16: mol_type = other DNA
gcgtatacacacacac

SEQ ID NO: 3247 - DNA, 16 bp, synthetic construct
  misc_feature 1..16: note = synthetic [barcode part1]
  source 1..16: mol_type = other DNA
caatcgtctcaacttg

SEQ ID NO: 3248 - DNA, 16 bp, synthetic construct
  misc_feature 1..16: note = synthetic [barcode part1]
  source 1..16: mol_type = other DNA
actgcggataagtaac

SEQ ID NO: 3249 - DNA, 16 bp, synthetic construct
  misc_feature 1..16: note = synthetic [barcode part1]
  source 1..16: mol_type = other DNA
gacctattactacctg

SEQ ID NO: 3250 - DNA, 16 bp, synthetic construct
  misc_feature 1..16: note = synthetic [barcode part1]
  source 1..16: mol_type = other DNA
cacaacttccttggcg

SEQ ID NO: 3251 - DNA, 16 bp, synthetic construct
  misc_feature 1..16: note = synthetic [barcode part1]
  source 1..16: mol_type = other DNA
gtgtcaggtacgatct

SEQ ID NO: 3252 - DNA, 16 bp, synthetic construct
  misc_feature 1..16: note = synthetic [barcode part1]
  source 1..16: mol_type = other DNA
aggtggaacgacactc

SEQ ID NO: 3253 - DNA, 16 bp, synthetic construct
  misc_feature 1..16: note = synthetic [barcode part1]
  source 1..16: mol_type = other DNA
gacttcttcaggtact

SEQ ID NO: 3254 - DNA, 16 bp, synthetic construct
  misc_feature 1..16: note = synthetic [barcode part1]
  source 1..16: mol_type = other DNA
cgaccgatacagtatc

SEQ ID NO: 3255 - DNA, 16 bp, synthetic construct
  misc_feature 1..16: note = synthetic [barcode part1]
  source 1..16: mol_type = other DNA
tcgactcaagtatctc

SEQ ID NO: 3256 - DNA, 16 bp, synthetic construct
  misc_feature 1..16: note = synthetic [barcode part1]
  source 1..16: mol_type = other DNA
gttgccgtggtaattg

SEQ ID NO: 3257 - DNA, 16 bp, synthetic construct
  misc_feature 1..16: note = synthetic [barcode part1]
  source 1..16: mol_type = other DNA
aggtatagttggatcg

SEQ ID NO: 3258 - DNA, 16 bp, synthetic construct
  misc_feature 1..16: note = synthetic [barcode part1]
  source 1..16: mol_type = other DNA
gtcactatccttacag

SEQ ID NO: 3259 - DNA, 16 bp, synthetic construct
  misc_feature 1..16: note = synthetic [barcode part1]
  source 1..16: mol_type = other DNA
gtgtagtccttaatcc

SEQ ID NO: 3260 - DNA, 16 bp, synthetic construct
  misc_feature 1..16: note = synthetic [barcode part1]
  source 1..16: mol_type = other DNA
cgattaccttaatccg

SEQ ID NO: 3261 - DNA, 16 bp, synthetic construct
  misc_feature 1..16: note = synthetic [barcode part1]
  source 1..16: mol_type = other DNA
attccgtacaggacgt

SEQ ID NO: 3262 - DNA, 16 bp, synthetic construct
  misc_feature 1..16: note = synthetic [barcode part1]
  source 1..16: mol_type = other DNA
tgtaggtgaacggtgc

SEQ ID NO: 3263 - DNA, 16 bp, synthetic construct
  misc_feature 1..16: note = synthetic [barcode part1]
  source 1..16: mol_type = other DNA
gtatcgtcgagtggag

SEQ ID NO: 3264 - DNA, 16 bp, synthetic construct
  misc_feature 1..16: note = synthetic [barcode part1]
  source 1..16: mol_type = other DNA
acacgccaagtcgaag

SEQ ID NO: 3265 - DNA, 16 bp, synthetic construct
  misc_feature 1..16: note = synthetic [barcode part1]
  source 1..16: mol_type = other DNA
aagtagtgcacaatcg

SEQ ID NO: 3266 - DNA, 16 bp, synthetic construct
  misc_feature 1..16: note = synthetic [barcode part1]
  source 1..16: mol_type = other DNA
ttatagattcggcctc

SEQ ID NO: 3267 - DNA, 16 bp, synthetic construct
  misc_feature 1..16: note = synthetic [barcode part1]
  source 1..16: mol_type = other DNA
aatctcggaacggacg

SEQ ID NO: 3268 - DNA, 16 bp, synthetic construct
  misc_feature 1..16: note = synthetic [barcode part1]
  source 1..16: mol_type = other DNA
gatagagagttgcact

SEQ ID NO: 3269 - DNA, 16 bp, synthetic construct
  misc_feature 1..16: note = synthetic [barcode part1]
  source 1..16: mol_type = other DNA
tggtacacttcaccgc

SEQ ID NO: 3270 - DNA, 16 bp, synthetic construct
  misc_feature 1..16: note = synthetic [barcode part1]
  source 1..16: mol_type = other DNA
aacgttcttcgatctg

SEQ ID NO: 3271 - DNA, 16 bp, synthetic construct
  misc_feature 1..16: note = synthetic [barcode part1]
  source 1..16: mol_type = other DNA
agacttatcgcacggt

SEQ ID NO: 3272 - DNA, 16 bp, synthetic construct
  misc_feature 1..16: note = synthetic [barcode part1]
  source 1..16: mol_type = other DNA
gtgtcaatctcactac

SEQ ID NO: 3273 - DNA, 16 bp, synthetic construct
  misc_feature 1..16: note = synthetic [barcode part1]
  source 1..16: mol_type = other DNA
gagtggattcaaggcc

SEQ ID NO: 3274 - DNA, 16 bp, synthetic construct
  misc_feature 1..16: note = synthetic [barcode part1]
  source 1..16: mol_type = other DNA
caggttactggactac

SEQ ID NO: 3275 - DNA, 16 bp, synthetic construct
  misc_feature 1..16: note = synthetic [barcode part1]
  source 1..16: mol_type = other DNA
attcgactcaacggtg

SEQ ID NO: 3276 - DNA, 16 bp, synthetic construct
  misc_feature 1..16: note = synthetic [barcode part1]
  source 1..16: mol_type = other DNA
tgagaggcagtacgtc

SEQ ID NO: 3277 - DNA, 16 bp, synthetic construct
  misc_feature 1..16: note = synthetic [barcode part1]
  source 1..16: mol_type = other DNA
aggttaccaagtcgtc

SEQ ID NO: 3278 - DNA, 16 bp, synthetic construct
  misc_feature 1..16: note = synthetic [barcode part1]
  source 1..16: mol_type = other DNA
tgactgtgttcagacg

SEQ ID NO: 3279 - DNA, 16 bp, synthetic construct
  misc_feature 1..16: note = synthetic [barcode part1]
  source 1..16: mol_type = other DNA
ccacgtcaatagttct

SEQ ID NO: 3280 - DNA, 16 bp, synthetic construct
  misc_feature 1..16: note = synthetic [barcode part1]
  source 1..16: mol_type = other DNA
acgtgcaatcgactgt

SEQ ID NO: 3281 - DNA, 16 bp, synthetic construct
  misc_feature 1..16: note = synthetic [barcode part1]
  source 1..16: mol_type = other DNA
tgactcaacctccacg

SEQ ID NO: 3282 - DNA, 16 bp, synthetic construct
  misc_feature 1..16: note = synthetic [barcode part1]
  source 1..16: mol_type = other DNA
atcctgttcacacagt

SEQ ID NO: 3283 - DNA, 16 bp, synthetic construct
  misc_feature 1..16: note = synthetic [barcode part1]
  source 1..16: mol_type = other DNA
tacacacgttgcaacg

SEQ ID NO: 3284 - DNA, 16 bp, synthetic construct
  misc_feature 1..16: note = synthetic [barcode part1]
  source 1..16: mol_type = other DNA
cggactctattacttg

SEQ ID NO: 3285 - DNA, 16 bp, synthetic construct
  misc_feature 1..16: note = synthetic [barcode part1]
  source 1..16: mol_type = other DNA
tatctcgacgagttct

SEQ ID NO: 3286 - DNA, 16 bp, synthetic construct
  misc_feature 1..16: note = synthetic [barcode part1]
  source 1..16: mol_type = other DNA
gttaggcactcctatt

SEQ ID NO: 3287 - DNA, 16 bp, synthetic construct
  misc_feature 1..16: note = synthetic [barcode part1]
  source 1..16: mol_type = other DNA
gagtctaccaccgttc

SEQ ID NO: 3288 - DNA, 16 bp, synthetic construct
  misc_feature 1..16: note = synthetic [barcode part1]
  source 1..16: mol_type = other DNA
cactaggcctgatagt

SEQ ID NO: 3289 - DNA, 16 bp, synthetic construct
  misc_feature 1..16: note = synthetic [barcode part1]
  source 1..16: mol_type = other DNA
tccgtgtatcgtcgac

SEQ ID NO: 3290 - DNA, 16 bp, synthetic construct
  misc_feature 1..16: note = synthetic [barcode part1]
  source 1..16: mol_type = other DNA
tgtcgagtctgcgtct

SEQ ID NO: 3291 - DNA, 16 bp, synthetic construct
  misc_feature 1..16: note = synthetic [barcode part1]
  source 1..16: mol_type = other DNA
cgttacctagacttac

SEQ ID NO: 3292 - DNA, 16 bp, synthetic construct
  misc_feature 1..16: note = synthetic [barcode part1]
  source 1..16: mol_type = other DNA
aaccgattgtgcgtac

SEQ ID NO: 3293 - DNA, 16 bp, synthetic construct
  misc_feature 1..16: note = synthetic [barcode part1]
  source 1..16: mol_type = other DNA
tcgagtacttgagtgc

SEQ ID NO: 3294 - DNA, 16 bp, synthetic construct
  misc_feature 1..16: note = synthetic [barcode part1]
  source 1..16: mol_type = other DNA
ataagacggcgtccag

SEQ ID NO: 3295 - DNA, 16 bp, synthetic construct
  misc_feature 1..16: note = synthetic [barcode part1]
  source 1..16: mol_type = other DNA
aactcgtcaggacgag

SEQ ID NO: 3296 - DNA, 16 bp, synthetic construct
  misc_feature 1..16: note = synthetic [barcode part1]
  source 1..16: mol_type = other DNA
tctgtcaatcgcctct

SEQ ID NO: 3297 - DNA, 16 bp, synthetic construct
  misc_feature 1..16: note = synthetic [barcode part1]
  source 1..16: mol_type = other DNA
tgagaggcaactgcac

SEQ ID NO: 3298 - DNA, 16 bp, synthetic construct
  misc_feature 1..16: note = synthetic [barcode part1]
  source 1..16: mol_type = other DNA
tagagtcctgagatcc

SEQ ID NO: 3299 - DNA, 16 bp, synthetic construct
  misc_feature 1..16: note = synthetic [barcode part1]
  source 1..16: mol_type = other DNA
gactgtggccgatatt

SEQ ID NO: 3300 - DNA, 16 bp, synthetic construct
  misc_feature 1..16: note = synthetic [barcode part1]
  source 1..16: mol_type = other DNA
ttcaacctgcacaact

SEQ ID NO: 3301 - DNA, 16 bp, synthetic construct
  misc_feature 1..16: note = synthetic [barcode part1]
  source 1..16: mol_type = other DNA
attcgccgaatagacc

SEQ ID NO: 3302 - DNA, 16 bp, synthetic construct
  misc_feature 1..16: note = synthetic [barcode part1]
  source 1..16: mol_type = other DNA
cagaggacacgtaacc

SEQ ID NO: 3303 - DNA, 16 bp, synthetic construct
  misc_feature 1..16: note = synthetic [barcode part1]
  source 1..16: mol_type = other DNA
ccgttcagtgatattc

SEQ ID NO: 3304 - DNA, 16 bp, synthetic construct
  misc_feature 1..16: note = synthetic [barcode part1]
  source 1..16: mol_type = other DNA
acaaggagagacacgt

SEQ ID NO: 3305 - DNA, 16 bp, synthetic construct
  misc_feature 1..16: note = synthetic [barcode part1]
  source 1..16: mol_type = other DNA
cagattcttgtggacg

SEQ ID NO: 3306 - DNA, 16 bp, synthetic construct
  misc_feature 1..16: note = synthetic [barcode part1]
  source 1..16: mol_type = other DNA
gaacaggagatcctgc

SEQ ID NO: 3307 - DNA, 16 bp, synthetic construct
  misc_feature 1..16: note = synthetic [barcode part1]
  source 1..16: mol_type = other DNA
cgtagagtcaacgacg

SEQ ID NO: 3308 - DNA, 16 bp, synthetic construct
  misc_feature 1..16: note = synthetic [barcode part1]
  source 1..16: mol_type = other DNA
tgaaggatctcctggt

SEQ ID NO: 3309 - DNA, 16 bp, synthetic construct
  misc_feature 1..16: note = synthetic [barcode part1]
  source 1..16: mol_type = other DNA
gcggatcggttatatc

SEQ ID NO: 3310 - DNA, 16 bp, synthetic construct
  misc_feature 1..16: note = synthetic [barcode part1]
  source 1..16: mol_type = other DNA
ttgtatcaacggttcc

SEQ ID NO: 3311 - DNA, 16 bp, synthetic construct
  misc_feature 1..16: note = synthetic [barcode part1]
  source 1..16: mol_type = other DNA
agtggtcaccgaactt

SEQ ID NO: 3312 - DNA, 16 bp, synthetic construct
  misc_feature 1..16: note = synthetic [barcode part1]
  source 1..16: mol_type = other DNA
acttactggtaggtgc

SEQ ID NO: 3313 - DNA, 16 bp, synthetic construct
  misc_feature 1..16: note = synthetic [barcode part1]
  source 1..16: mol_type = other DNA
cgtcgttgacgtgttc

SEQ ID NO: 3314 - DNA, 16 bp, synthetic construct
  misc_feature 1..16: note = synthetic [barcode part1]
  source 1..16: mol_type = other DNA
acgcctcgttgagtct

SEQ ID NO: 3315 - DNA, 16 bp, synthetic construct
  misc_feature 1..16: note = synthetic [barcode part1]
  source 1..16: mol_type = other DNA
cagattgttcctgcgc

SEQ ID NO: 3316 - DNA, 16 bp, synthetic construct
  misc_feature 1..16: note = synthetic [barcode part1]
  source 1..16: mol_type = other DNA
ccgaagtcgttgtagt

SEQ ID NO: 3317 - DNA, 16 bp, synthetic construct
  misc_feature 1..16: note = synthetic [barcode part1]
  source 1..16: mol_type = other DNA
attagagatcaacgcg

SEQ ID NO: 3318 - DNA, 16 bp, synthetic construct
  misc_feature 1..16: note = synthetic [barcode part1]
  source 1..16: mol_type = other DNA
gcgttaagtgtagtcc

SEQ ID NO: 3319 - DNA, 16 bp, synthetic construct
  misc_feature 1..16: note = synthetic [barcode part1]
  source 1..16: mol_type = other DNA
caaggaccttggtgag

SEQ ID NO: 3320 - DNA, 16 bp, synthetic construct
  misc_feature 1..16: note = synthetic [barcode part1]
  source 1..16: mol_type = other DNA
attcttgatagtccgc

SEQ ID NO: 3321 - DNA, 16 bp, synthetic construct
  misc_feature 1..16: note = synthetic [barcode part1]
  source 1..16: mol_type = other DNA
aatactacggtcgacc

SEQ ID NO: 3322 - DNA, 16 bp, synthetic construct
  misc_feature 1..16: note = synthetic [barcode part1]
  source 1..16: mol_type = other DNA
aagacggaacacctgc

SEQ ID NO: 3323 - DNA, 16 bp, synthetic construct
  misc_feature 1..16: note = synthetic [barcode part1]
  source 1..16: mol_type = other DNA
tggtacgacgtgatct

SEQ ID NO: 3324 - DNA, 16 bp, synthetic construct
  misc_feature 1..16: note = synthetic [barcode part1]
  source 1..16: mol_type = other DNA
attccacacgagacgt

SEQ ID NO: 3325 - DNA, 16 bp, synthetic construct
  misc_feature 1..16: note = synthetic [barcode part1]
  source 1..16: mol_type = other DNA
tccggttatatcaacc

SEQ ID NO: 3326 - DNA, 16 bp, synthetic construct
  misc_feature 1..16: note = synthetic [barcode part1]
  source 1..16: mol_type = other DNA
cagttgtgagtacctg

SEQ ID NO: 3327 - DNA, 16 bp, synthetic construct
  misc_feature 1..16: note = synthetic [barcode part1]
  source 1..16: mol_type = other DNA
tccttctgttggttgc

SEQ ID NO: 3328 - DNA, 16 bp, synthetic construct
  misc_feature 1..16: note = synthetic [barcode part1]
  source 1..16: mol_type = other DNA
tcgtgttccaccgagt

SEQ ID NO: 3329 - DNA, 16 bp, synthetic construct
  misc_feature 1..16: note = synthetic [barcode part1]
  source 1..16: mol_type = other DNA
acgtcggtgtaagttc

SEQ ID NO: 3330 - DNA, 16 bp, synthetic construct
  misc_feature 1..16: note = synthetic [barcode part1]
  source 1..16: mol_type = other DNA
gtccgtcgtcctaagt

SEQ ID NO: 3331 - DNA, 16 bp, synthetic construct
  misc_feature 1..16: note = synthetic [barcode part1]
  source 1..16: mol_type = other DNA
caccacgactatagtg

SEQ ID NO: 3332 - DNA, 16 bp, synthetic construct
  misc_feature 1..16: note = synthetic [barcode part1]
  source 1..16: mol_type = other DNA
atatctctcggatcac

SEQ ID NO: 3333 - DNA, 16 bp, synthetic construct
  misc_feature 1..16: note = synthetic [barcode part1]
  source 1..16: mol_type = other DNA
gcactgcgtgatattg

SEQ ID NO: 3334 - DNA, 16 bp, synthetic construct
  misc_feature 1..16: note = synthetic [barcode part1]
  source 1..16: mol_type = other DNA
cggcacagatctatac

SEQ ID NO: 3335 - DNA, 16 bp, synthetic construct
  misc_feature 1..16: note = synthetic [barcode part1]
  source 1..16: mol_type = other DNA
tctggcgcagaagtag

SEQ ID NO: 3336 - DNA, 16 bp, synthetic construct
  misc_feature 1..16: note = synthetic [barcode part1]
  source 1..16: mol_type = other DNA
cgcaggcagtaggatt

SEQ ID NO: 3337 - DNA, 16 bp, synthetic construct
  misc_feature 1..16: note = synthetic [barcode part1]
  source 1..16: mol_type = other DNA
acaaggactggcggtt

SEQ ID NO: 3338 - DNA, 16 bp, synthetic construct
  misc_feature 1..16: note = synthetic [barcode part1]
  source 1..16: mol_type = other DNA
gtgtgttgcggaacag

SEQ ID NO: 3339 - DNA, 16 bp, synthetic construct
  misc_feature 1..16: note = synthetic [barcode part1]
  source 1..16: mol_type = other DNA
gaccttcgtgcaatcc

SEQ ID NO: 3340 - DNA, 16 bp, synthetic construct
  misc_feature 1..16: note = synthetic [barcode part1]
  source 1..16: mol_type = other DNA
gtgtatcctcggtctg

SEQ ID NO: 3341 - DNA, 16 bp, synthetic construct
  misc_feature 1..16: note = synthetic [barcode part1]
  source 1..16: mol_type = other DNA
gacggataacgtcacg

SEQ ID NO: 3342 - DNA, 16 bp, synthetic construct
  misc_feature 1..16: note = synthetic [barcode part1]
  source 1..16: mol_type = other DNA
aattcctgcgtctggc

SEQ ID NO: 3343 - DNA, 16 bp, synthetic construct
  misc_feature 1..16: note = synthetic [barcode part1]
  source 1..16: mol_type = other DNA
acgaggatctctgtac

SEQ ID NO: 3344 - DNA, 16 bp, synthetic construct
  misc_feature 1..16: note = synthetic [barcode part1]
  source 1..16: mol_type = other DNA
cctatcaccgaatact

SEQ ID NO: 3345 - DNA, 16 bp, synthetic construct
  misc_feature 1..16: note = synthetic [barcode part1]
  source 1..16: mol_type = other DNA
gagacaaggacttact

SEQ ID NO: 3346 - DNA, 16 bp, synthetic construct
  misc_feature 1..16: note = synthetic [barcode part1]
  source 1..16: mol_type = other DNA
cagagtcttggaacct

SEQ ID NO: 3347 - DNA, 16 bp, synthetic construct
  misc_feature 1..16: note = synthetic [barcode part1]
  source 1..16: mol_type = other DNA
caatccttccttcggt

SEQ ID NO: 3348 - DNA, 16 bp, synthetic construct
  misc_feature 1..16: note = synthetic [barcode part1]
  source 1..16: mol_type = other DNA
gacttgttggaacaag

SEQ ID NO: 3349 - DNA, 16 bp, synthetic construct
  misc_feature 1..16: note = synthetic [barcode part1]
  source 1..16: mol_type = other DNA
tccgtaatcgtgaacg

SEQ ID NO: 3350 - DNA, 16 bp, synthetic construct
  misc_feature 1..16: note = synthetic [barcode part1]
  source 1..16: mol_type = other DNA
aggattctcgcaacac

SEQ ID NO: 3351 - DNA, 16 bp, synthetic construct
  misc_feature 1..16: note = synthetic [barcode part1]
  source 1..16: mol_type = other DNA
cgacttctaaccgcac

SEQ ID NO: 3352 - DNA, 16 bp, synthetic construct
  misc_feature 1..16: note = synthetic [barcode part1]
  source 1..16: mol_type = other DNA
aagaaggccagtcaag

SEQ ID NO: 3353 - DNA, 16 bp, synthetic construct
  misc_feature 1..16: note = synthetic [barcode part1]
  source 1..16: mol_type = other DNA
agtctgactagatcgc

SEQ ID NO: 3354 - DNA, 16 bp, synthetic construct
  misc_feature 1..16: note = synthetic [barcode part1]
  source 1..16: mol_type = other DNA
actacgaaggttctgc

SEQ ID NO: 3355 - DNA, 16 bp, synthetic construct
  misc_feature 1..16: note = synthetic [barcode part1]
  source 1..16: mol_type = other DNA
cagaacttgcggtatc

SEQ ID NO: 3356 - DNA, 16 bp, synthetic construct
  misc_feature 1..16: note = synthetic [barcode part1]
  source 1..16: mol_type = other DNA
tcttgcgttgacaatc

SEQ ID NO: 3357 - DNA, 16 bp, synthetic construct
  misc_feature 1..16: note = synthetic [barcode part1]
  source 1..16: mol_type = other DNA
taatagtgtgcaaggc

SEQ ID NO: 3358 - DNA, 16 bp, synthetic construct
  misc_feature 1..16: note = synthetic [barcode part1]
  source 1..16: mol_type = other DNA
tgttggagtccttgcc

SEQ ID NO: 3359 - DNA, 16 bp, synthetic construct
  misc_feature 1..16: note = synthetic [barcode part1]
  source 1..16: mol_type = other DNA
accgtcggattatcag

SEQ ID NO: 3360 - DNA, 16 bp, synthetic construct
  misc_feature 1..16: note = synthetic [barcode part1]
  source 1..16: mol_type = other DNA
acgaccaggagaacct

SEQ ID NO: 3361 - DNA, 16 bp, synthetic construct
  misc_feature 1..16: note = synthetic [barcode part1]
  source 1..16: mol_type = other DNA
gttccaatcttcctcg

SEQ ID NO: 3362 - DNA, 16 bp, synthetic construct
  misc_feature 1..16: note = synthetic [barcode part1]
  source 1..16: mol_type = other DNA
tgaagtacactctgcg

SEQ ID NO: 3363 - DNA, 16 bp, synthetic construct
  misc_feature 1..16: note = synthetic [barcode part1]
  source 1..16: mol_type = other DNA
accttgatctcctctg

SEQ ID NO: 3364 - DNA, 16 bp, synthetic construct
  misc_feature 1..16: note = synthetic [barcode part1]
  source 1..16: mol_type = other DNA
gttcaggcactcaagt

SEQ ID NO: 3365 - DNA, 16 bp, synthetic construct
  misc_feature 1..16: note = synthetic [barcode part1]
  source 1..16: mol_type = other DNA
aatctggcgcaggaac

SEQ ID NO: 3366 - DNA, 16 bp, synthetic construct
  misc_feature 1..16: note = synthetic [barcode part1]
  source 1..16: mol_type = other DNA
aattggactcggtctg

SEQ ID NO: 3367 - DNA, 16 bp, synthetic construct
  misc_feature 1..16: note = synthetic [barcode part1]
  source 1..16: mol_type = other DNA
cgcaagactagaccag

SEQ ID NO: 3368 - DNA, 16 bp, synthetic construct
  misc_feature 1..16: note = synthetic [barcode part1]
  source 1..16: mol_type = other DNA
ttgaacaggcagaact

SEQ ID NO: 3369 - DNA, 16 bp, synthetic construct
  misc_feature 1..16: note = synthetic [barcode part1]
  source 1..16: mol_type = other DNA
aggcctctggtattag

SEQ ID NO: 3370 - DNA, 16 bp, synthetic construct
  misc_feature 1..16: note = synthetic [barcode part1]
  source 1..16: mol_type = other DNA
ttggaacacagtgtcc

SEQ ID NO: 3371 - DNA, 16 bp, synthetic construct
  misc_feature 1..16: note = synthetic [barcode part1]
  source 1..16: mol_type = other DNA
tcacctcctaggtgtg

SEQ ID NO: 3372 - DNA, 16 bp, synthetic construct
  misc_feature 1..16: note = synthetic [barcode part1]
  source 1..16: mol_type = other DNA
tgccggttaactgtag

SEQ ID NO: 3373 - DNA, 16 bp, synthetic construct
  misc_feature 1..16: note = synthetic [barcode part1]
  source 1..16: mol_type = other DNA
gtgacgagtgattgcg

SEQ ID NO: 3374 - DNA, 16 bp, synthetic construct
  misc_feature 1..16: note = synthetic [barcode part1]
  source 1..16: mol_type = other DNA
gtgttctattaccggt

SEQ ID NO: 3375 - DNA, 16 bp, synthetic construct
  misc_feature 1..16: note = synthetic [barcode part1]
  source 1..16: mol_type = other DNA
gtcgtagaggtaagtt

SEQ ID NO: 3376 - DNA, 16 bp, synthetic construct
  misc_feature 1..16: note = synthetic [barcode part1]
  source 1..16: mol_type = other DNA
gcctacgtatagactg

SEQ ID NO: 3377 - DNA, 16 bp, synthetic construct
  misc_feature 1..16: note = synthetic [barcode part1]
  source 1..16: mol_type = other DNA
taacggtagaggcgtc

SEQ ID NO: 3378 - DNA, 16 bp, synthetic construct
  misc_feature 1..16: note = synthetic [barcode part1]
  source 1..16: mol_type = other DNA
gacgagattcctgatc

SEQ ID NO: 3379 - DNA, 16 bp, synthetic construct
  misc_feature 1..16: note = synthetic [barcode part1]
  source 1..16: mol_type = other DNA
ttatattcgccagacc

SEQ ID NO: 3380 - DNA, 16 bp, synthetic construct
  misc_feature 1..16: note = synthetic [barcode part1]
  source 1..16: mol_type = other DNA
caagtctaagttcgcg

SEQ ID NO: 3381 - DNA, 16 bp, synthetic construct
  misc_feature 1..16: note = synthetic [barcode part1]
  source 1..16: mol_type = other DNA
cagagttaatctcggc

SEQ ID NO: 3382 - DNA, 16 bp, synthetic construct
  misc_feature 1..16: note = synthetic [barcode part1]
  source 1..16: mol_type = other DNA
gtcacgagtagacggt

SEQ ID NO: 3383 - DNA, 16 bp, synthetic construct
  misc_feature 1..16: note = synthetic [barcode part1]
  source 1..16: mol_type = other DNA
atcagtagtggccgtt

SEQ ID NO: 3384 - DNA, 16 bp, synthetic construct
  misc_feature 1..16: note = synthetic [barcode part1]
  source 1..16: mol_type = other DNA
acaccgcacaatatcg

SEQ ID NO: 3385 - DNA, 16 bp, synthetic construct
  misc_feature 1..16: note = synthetic [barcode part1]
  source 1..16: mol_type = other DNA
tcaacagtgccgaatc

SEQ ID NO: 3386 - DNA, 16 bp, synthetic construct
  misc_feature 1..16: note = synthetic [barcode part1]
  source 1..16: mol_type = other DNA
ttcgaggtcagtcagt

SEQ ID NO: 3387 - DNA, 16 bp, synthetic construct
  misc_feature 1..16: note = synthetic [barcode part1]
  source 1..16: mol_type = other DNA
atcttcagtccaacac

SEQ ID NO: 3388 - DNA, 16 bp, synthetic construct
  misc_feature 1..16: note = synthetic [barcode part1]
  source 1..16: mol_type = other DNA
tctctaatctcctggc

SEQ ID NO: 3389 - DNA, 16 bp, synthetic construct
  misc_feature 1..16: note = synthetic [barcode part1]
  source 1..16: mol_type = other DNA
gagataacagagtggc

SEQ ID NO: 3390 - DNA, 16 bp, synthetic construct
  misc_feature 1..16: note = synthetic [barcode part1]
  source 1..16: mol_type = other DNA
tggtccttgtaattgc

SEQ ID NO: 3391 - DNA, 16 bp, synthetic construct
  misc_feature 1..16: note = synthetic [barcode part1]
  source 1..16: mol_type = other DNA
aatcttcgtcggagac

SEQ ID NO: 3392 - DNA, 16 bp, synthetic construct
  misc_feature 1..16: note = synthetic [barcode part1]
  source 1..16: mol_type = other DNA
atcagtccgtagtgtg

SEQ ID NO: 3393 - DNA, 16 bp, synthetic construct
  misc_feature 1..16: note = synthetic [barcode part1]
  source 1..16: mol_type = other DNA
ttactacgcagtggac

SEQ ID NO: 3394 - DNA, 16 bp, synthetic construct
  misc_feature 1..16: note = synthetic [barcode part1]
  source 1..16: mol_type = other DNA
gtcgtgagacactgtt

SEQ ID NO: 3395 - DNA, 16 bp, synthetic construct
  misc_feature 1..16: note = synthetic [barcode part1]
  source 1..16: mol_type = other DNA
actggagagaactgag

SEQ ID NO: 3396 - DNA, 16 bp, synthetic construct
  misc_feature 1..16: note = synthetic [barcode part1]
  source 1..16: mol_type = other DNA
tgtacgtaccacaacg

SEQ ID NO: 3397 - DNA, 16 bp, synthetic construct
  misc_feature 1..16: note = synthetic [barcode part1]
  source 1..16: mol_type = other DNA
caccgagatagtctac

SEQ ID NO: 3398 - DNA, 16 bp, synthetic construct
  misc_feature 1..16: note = synthetic [barcode part1]
  source 1..16: mol_type = other DNA
tcagtgtggttcctcg

SEQ ID NO: 3399 - DNA, 16 bp, synthetic construct
  misc_feature 1..16: note = synthetic [barcode part1]
  source 1..16: mol_type = other DNA
taagtcaggcctgact

SEQ ID NO: 3400 - DNA, 16 bp, synthetic construct
  misc_feature 1..16: note = synthetic [barcode part1]
  source 1..16: mol_type = other DNA
aagaccgcgcaagttg

SEQ ID NO: 3401 - DNA, 16 bp, synthetic construct
  misc_feature 1..16: note = synthetic [barcode part1]
  source 1..16: mol_type = other DNA
tgagttccttggacag

SEQ ID NO: 3402 - DNA, 16 bp, synthetic construct
  misc_feature 1..16: note = synthetic [barcode part1]
  source 1..16: mol_type = other DNA
cctctgttcaccagag

SEQ ID NO: 3403 - DNA, 16 bp, synthetic construct
  misc_feature 1..16: note = synthetic [barcode part1]
  source 1..16: mol_type = other DNA
tgtgtcttccaacagt

SEQ ID NO: 3404 - DNA, 16 bp, synthetic construct
  misc_feature 1..16: note = synthetic [barcode part1]
  source 1..16: mol_type = other DNA
gagacactacgtcttg

SEQ ID NO: 3405 - DNA, 16 bp, synthetic construct
  misc_feature 1..16: note = synthetic [barcode part1]
  source 1..16: mol_type = other DNA
gagagaactaggatcg

SEQ ID NO: 3406 - DNA, 16 bp, synthetic construct
  misc_feature 1..16: note = synthetic [barcode part1]
  source 1..16: mol_type = other DNA
ttcgagatagtcggtc

SEQ ID NO: 3407 - DNA, 16 bp, synthetic construct
  misc_feature 1..16: note = synthetic [barcode part1]
  source 1..16: mol_type = other DNA
taggcgtctctattgt

SEQ ID NO: 3408 - DNA, 16 bp, synthetic construct
  misc_feature 1..16: note = synthetic [barcode part1]
  source 1..16: mol_type = other DNA
tctcctgagactagag

SEQ ID NO: 3409 - DNA, 16 bp, synthetic construct
  misc_feature 1..16: note = synthetic [barcode part1]
  source 1..16: mol_type = other DNA
cgaccaattggaacct

SEQ ID NO: 3410 - DNA, 16 bp, synthetic construct
  misc_feature 1..16: note = synthetic [barcode part1]
  source 1..16: mol_type = other DNA
gaattgtgtccggtgt

SEQ ID NO: 3411 - DNA, 16 bp, synthetic construct
  misc_feature 1..16: note = synthetic [barcode part1]
  source 1..16: mol_type = other DNA
aggtcttctccagaag

SEQ ID NO: 3412 - DNA, 16 bp, synthetic construct
  misc_feature 1..16: note = synthetic [barcode part1]
  source 1..16: mol_type = other DNA
gcgaaggactattagt

SEQ ID NO: 3413 - DNA, 16 bp, synthetic construct
  misc_feature 1..16: note = synthetic [barcode part1]
  source 1..16: mol_type = other DNA
gttgtcaccaagtcag

SEQ ID NO: 3414 - DNA, 16 bp, synthetic construct
  misc_feature 1..16: note = synthetic [barcode part1]
  source 1..16: mol_type = other DNA
gaactacacctaacgc

SEQ ID NO: 3415 - DNA, 16 bp, synthetic construct
  misc_feature 1..16: note = synthetic [barcode part1]
  source 1..16: mol_type = other DNA
attctgtacaaccacc

SEQ ID NO: 3416 - DNA, 16 bp, synthetic construct
  misc_feature 1..16: note = synthetic [barcode part1]
  source 1..16: mol_type = other DNA
tctcctcttggagtct

SEQ ID NO: 3417 - DNA, 16 bp, synthetic construct
  misc_feature 1..16: note = synthetic [barcode part1]
  source 1..16: mol_type = other DNA
aggtactaacgtccac

SEQ ID NO: 3418 - DNA, 16 bp, synthetic construct
  misc_feature 1..16: note = synthetic [barcode part1]
  source 1..16: mol_type = other DNA
ttccacaccggcgatt

SEQ ID NO: 3419 - DNA, 16 bp, synthetic construct
  misc_feature 1..16: note = synthetic [barcode part1]
  source 1..16: mol_type = other DNA
aacaccaacacacgtc

SEQ ID NO: 3420 - DNA, 16 bp, synthetic construct
  misc_feature 1..16: note = synthetic [barcode part1]
  source 1..16: mol_type = other DNA
cctaacttcggaaggt

SEQ ID NO: 3421 - DNA, 16 bp, synthetic construct
  misc_feature 1..16: note = synthetic [barcode part1]
  source 1..16: mol_type = other DNA
actcagtggttaccag

SEQ ID NO: 3422 - DNA, 16 bp, synthetic construct
  misc_feature 1..16: note = synthetic [barcode part1]
  source 1..16: mol_type = other DNA
gaattgttccggtggt

SEQ ID NO: 3423 - DNA, 16 bp, synthetic construct
  misc_feature 1..16: note = synthetic [barcode part1]
  source 1..16: mol_type = other DNA
caaccaatcgatcgac

SEQ ID NO: 3424 - DNA, 16 bp, synthetic construct
  misc_feature 1..16: note = synthetic [barcode part1]
  source 1..16: mol_type = other DNA
gtcgtaacaggattcc

SEQ ID NO: 3425 - DNA, 16 bp, synthetic construct
  misc_feature 1..16: note = synthetic [barcode part1]
  source 1..16: mol_type = other DNA
cactctccgacagttg

SEQ ID NO: 3426 - DNA, 16 bp, synthetic construct
  misc_feature 1..16: note = synthetic [barcode part1]
  source 1..16: mol_type = other DNA
acggagagtattcctc

SEQ ID NO: 3427 - DNA, 16 bp, synthetic construct
  misc_feature 1..16: note = synthetic [barcode part1]
  source 1..16: mol_type = other DNA
tacgcgacactagtgt

SEQ ID NO: 3428 - DNA, 16 bp, synthetic construct
  misc_feature 1..16: note = synthetic [barcode part1]
  source 1..16: mol_type = other DNA
accgttatagtgaccg

SEQ ID NO: 3429 - DNA, 16 bp, synthetic construct
  misc_feature 1..16: note = synthetic [barcode part1]
  source 1..16: mol_type = other DNA
atcgcggttacttgcc

SEQ ID NO: 3430 - DNA, 16 bp, synthetic construct
  misc_feature 1..16: note = synthetic [barcode part1]
  source 1..16: mol_type = other DNA
tgtacttgagtacggc

SEQ ID NO: 3431 - DNA, 16 bp, synthetic construct
  misc_feature 1..16: note = synthetic [barcode part1]
  source 1..16: mol_type = other DNA
cgttaccgtaagacac

SEQ ID NO: 3432 - DNA, 16 bp, synthetic construct
  misc_feature 1..16: note = synthetic [barcode part1]
  source 1..16: mol_type = other DNA
accaccgagttatcag

SEQ ID NO: 3433 - DNA, 16 bp, synthetic construct
  misc_feature 1..16: note = synthetic [barcode part1]
  source 1..16: mol_type = other DNA
accgaacggtacgagt

SEQ ID NO: 3434 - DNA, 16 bp, synthetic construct
  misc_feature 1..16: note = synthetic [barcode part1]
  source 1..16: mol_type = other DNA
aactctgcgttcgtcg

SEQ ID NO: 3435 - DNA, 16 bp, synthetic construct
  misc_feature 1..16: note = synthetic [barcode part1]
  source 1..16: mol_type = other DNA
attgcagacctatctc

SEQ ID NO: 3436 - DNA, 16 bp, synthetic construct
  misc_feature 1..16: note = synthetic [barcode part1]
  source 1..16: mol_type = other DNA
aatcttcaatccgtgc

SEQ ID NO: 3437 - DNA, 16 bp, synthetic construct
  misc_feature 1..16: note = synthetic [barcode part1]
  source 1..16: mol_type = other DNA
agaggcaacaagaacc

SEQ ID NO: 3438 - DNA, 16 bp, synthetic construct
  misc_feature 1..16: note = synthetic [barcode part1]
  source 1..16: mol_type = other DNA
tacaggtctatcctac

SEQ ID NO: 3439 - DNA, 16 bp, synthetic construct
  misc_feature 1..16: note = synthetic [barcode part1]
  source 1..16: mol_type = other DNA
gaacgtgccagatcag

SEQ ID NO: 3440 - DNA, 16 bp, synthetic construct
  misc_feature 1..16: note = synthetic [barcode part1]
  source 1..16: mol_type = other DNA
gcgtagaggactgttg

SEQ ID NO: 3441 - DNA, 16 bp, synthetic construct
  misc_feature 1..16: note = synthetic [barcode part1]
  source 1..16: mol_type = other DNA
tccgattaccggcact

SEQ ID NO: 3442 - DNA, 16 bp, synthetic construct
  misc_feature 1..16: note = synthetic [barcode part1]
  source 1..16: mol_type = other DNA
ttcagttactacacgc

SEQ ID NO: 3443 - DNA, 16 bp, synthetic construct
  misc_feature 1..16: note = synthetic [barcode part1]
  source 1..16: mol_type = other DNA
tctgcgcgactgttgt

SEQ ID NO: 3444 - DNA, 16 bp, synthetic construct
  misc_feature 1..16: note = synthetic [barcode part1]
  source 1..16: mol_type = other DNA
cgtatcctcgtattcc

SEQ ID NO: 3445 - DNA, 16 bp, synthetic construct
  misc_feature 1..16: note = synthetic [barcode part1]
  source 1..16: mol_type = other DNA
acttcttgtgtcagtg

SEQ ID NO: 3446 - DNA, 16 bp, synthetic construct
  misc_feature 1..16: note = synthetic [barcode part1]
  source 1..16: mol_type = other DNA
tatcacgtgtaacgcg

SEQ ID NO: 3447 - DNA, 16 bp, synthetic construct
  misc_feature 1..16: note = synthetic [barcode part1]
  source 1..16: mol_type = other DNA
taggatatctgcagag

SEQ ID NO: 3448 - DNA, 16 bp, synthetic construct
  misc_feature 1..16: note = synthetic [barcode part1]
  source 1..16: mol_type = other DNA
cagatacactaccttc

SEQ ID NO: 3449 - DNA, 16 bp, synthetic construct
  misc_feature 1..16: note = synthetic [barcode part1]
  source 1..16: mol_type = other DNA
gacttgtacttcactg

SEQ ID NO: 3450 - DNA, 16 bp, synthetic construct
  misc_feature 1..16: note = synthetic [barcode part1]
  source 1..16: mol_type = other DNA
gtccaatccgaactag

SEQ ID NO: 3451 - DNA, 16 bp, synthetic construct
  misc_feature 1..16: note = synthetic [barcode part1]
  source 1..16: mol_type = other DNA
acgattggagaccgac

SEQ ID NO: 3452 - DNA, 16 bp, synthetic construct
  misc_feature 1..16: note = synthetic [barcode part1]
  source 1..16: mol_type = other DNA
ttccgtgtagtagttc

SEQ ID NO: 3453 - DNA, 16 bp, synthetic construct
  misc_feature 1..16: note = synthetic [barcode part1]
  source 1..16: mol_type = other DNA
tccactcgttctggag

SEQ ID NO: 3454 - DNA, 16 bp, synthetic construct
  misc_feature 1..16: note = synthetic [barcode part1]
  source 1..16: mol_type = other DNA
agaaccttctggaacc

SEQ ID NO: 3455 - DNA, 16 bp, synthetic construct
  misc_feature 1..16: note = synthetic [barcode part1]
  source 1..16: mol_type = other DNA
gccaacaacctaggtt

SEQ ID NO: 3456 - DNA, 16 bp, synthetic construct
  misc_feature 1..16: note = synthetic [barcode part1]
  source 1..16: mol_type = other DNA
tagagaacgtacggcc

SEQ ID NO: 3457 - DNA, 16 bp, synthetic construct
  misc_feature 1..16: note = synthetic [barcode part1]
  source 1..16: mol_type = other DNA
cggatacaccgtctct

SEQ ID NO: 3458 - DNA, 16 bp, synthetic construct
  misc_feature 1..16: note = synthetic [barcode part1]
  source 1..16: mol_type = other DNA
tcttgttagacggcag

SEQ ID NO: 3459 - DNA, 16 bp, synthetic construct
  misc_feature 1..16: note = synthetic [barcode part1]
  source 1..16: mol_type = other DNA
atacgaacgtcaagtg

SEQ ID NO: 3460 - DNA, 16 bp, synthetic construct
  misc_feature 1..16: note = synthetic [barcode part1]
  source 1..16: mol_type = other DNA
cggcacacgtattaac

SEQ ID NO: 3461 - DNA, 16 bp, synthetic construct
  misc_feature 1..16: note = synthetic [barcode part1]
  source 1..16: mol_type = other DNA
agtagagaggaaccgt

SEQ ID NO: 3462 - DNA, 16 bp, synthetic construct
  misc_feature 1..16: note = synthetic [barcode part1]
  source 1..16: mol_type = other DNA
actgtacctaggtacg

SEQ ID NO: 3463 - DNA, 16 bp, synthetic construct
  misc_feature 1..16: note = synthetic [barcode part1]
  source 1..16: mol_type = other DNA
cacaatcaaggtggcg

SEQ ID NO: 3464 - DNA, 16 bp, synthetic construct
  misc_feature 1..16: note = synthetic [barcode part1]
  source 1..16: mol_type = other DNA
gtatcgagactcgtac

SEQ ID NO: 3465 - DNA, 16 bp, synthetic construct
  misc_feature 1..16: note = synthetic [barcode part1]
  source 1..16: mol_type = other DNA
agacactgttctgttc

SEQ ID NO: 3466 - DNA, 16 bp, synthetic construct
  misc_feature 1..16: note = synthetic [barcode part1]
  source 1..16: mol_type = other DNA
tcgtcgcacttgtggt

SEQ ID NO: 3467 - DNA, 16 bp, synthetic construct
  misc_feature 1..16: note = synthetic [barcode part1]
  source 1..16: mol_type = other DNA
attgacgttgccgtcc

SEQ ID NO: 3468 - DNA, 16 bp, synthetic construct
  misc_feature 1..16: note = synthetic [barcode part1]
  source 1..16: mol_type = other DNA
actcttaacttgacgc

SEQ ID NO: 3469 - DNA, 16 bp, synthetic construct
  misc_feature 1..16: note = synthetic [barcode part1]
  source 1..16: mol_type = other DNA
ttctaactctcgtcgc

SEQ ID NO: 3470 - DNA, 16 bp, synthetic construct
  misc_feature 1..16: note = synthetic [barcode part1]
  source 1..16: mol_type = other DNA
ccgattcgtgattatc

SEQ ID NO: 3471 - DNA, 16 bp, synthetic construct
  misc_feature 1..16: note = synthetic [barcode part1]
  source 1..16: mol_type = other DNA
tattgagtggaggtgt

SEQ ID NO: 3472 - DNA, 16 bp, synthetic construct
  misc_feature 1..16: note = synthetic [barcode part1]
  source 1..16: mol_type = other DNA
tcggttagagacttcg

SEQ ID NO: 3473 - DNA, 16 bp, synthetic construct
  misc_feature 1..16: note = synthetic [barcode part1]
  source 1..16: mol_type = other DNA
gacgtatcacgtaacc

SEQ ID NO: 3474 - DNA, 16 bp, synthetic construct
  misc_feature 1..16: note = synthetic [barcode part1]
  source 1..16: mol_type = other DNA
tagactggatcactgc

SEQ ID NO: 3475 - DNA, 16 bp, synthetic construct
  misc_feature 1..16: note = synthetic [barcode part1]
  source 1..16: mol_type = other DNA
cgcgatatccagaact

SEQ ID NO: 3476 - DNA, 16 bp, synthetic construct
  misc_feature 1..16: note = synthetic [barcode part1]
  source 1..16: mol_type = other DNA
gtaccggttctaccac

SEQ ID NO: 3477 - DNA, 16 bp, synthetic construct
  misc_feature 1..16: note = synthetic [barcode part1]
  source 1..16: mol_type = other DNA
gcaaggatacacttcc

SEQ ID NO: 3478 - DNA, 16 bp, synthetic construct
  misc_feature 1..16: note = synthetic [barcode part1]
  source 1..16: mol_type = other DNA
tactgttacgaccgcc

SEQ ID NO: 3479 - DNA, 16 bp, synthetic construct
  misc_feature 1..16: note = synthetic [barcode part1]
  source 1..16: mol_type = other DNA
cgtattcagtgcgagt

SEQ ID NO: 3480 - DNA, 16 bp, synthetic construct
  misc_feature 1..16: note = synthetic [barcode part1]
  source 1..16: mol_type = other DNA
agtaaggtggccttct

SEQ ID NO: 3481 - DNA, 16 bp, synthetic construct
  misc_feature 1..16: note = synthetic [barcode part1]
  source 1..16: mol_type = other DNA
actgtcctccgagtac

SEQ ID NO: 3482 - DNA, 16 bp, synthetic construct
  misc_feature 1..16: note = synthetic [barcode part1]
  source 1..16: mol_type = other DNA
cgaggtaagtgtaccg

SEQ ID NO: 3483 - DNA, 16 bp, synthetic construct
  misc_feature 1..16: note = synthetic [barcode part1]
  source 1..16: mol_type = other DNA
aaggcacaatccgacg

SEQ ID NO: 3484 - DNA, 16 bp, synthetic construct
  misc_feature 1..16: note = synthetic [barcode part1]
  source 1..16: mol_type = other DNA
ccttcttgttgtgacc

SEQ ID NO: 3485 - DNA, 16 bp, synthetic construct
  misc_feature 1..16: note = synthetic [barcode part1]
  source 1..16: mol_type = other DNA
aacgtcaggttgactc

SEQ ID NO: 3486 - DNA, 16 bp, synthetic construct
  misc_feature 1..16: note = synthetic [barcode part1]
  source 1..16: mol_type = other DNA
tgttctggcgaatctt

SEQ ID NO: 3487 - DNA, 16 bp, synthetic construct
  misc_feature 1..16: note = synthetic [barcode part1]
  source 1..16: mol_type = other DNA
tgtaccttgaaggcgt

SEQ ID NO: 3488 - DNA, 16 bp, synthetic construct
  misc_feature 1..16: note = synthetic [barcode part1]
  source 1..16: mol_type = other DNA
acacggaacaagaacg

SEQ ID NO: 3489 - DNA, 16 bp, synthetic construct
  misc_feature 1..16: note = synthetic [barcode part1]
  source 1..16: mol_type = other DNA
caagtcagactcgatc

SEQ ID NO: 3490 - DNA, 16 bp, synthetic construct
  misc_feature 1..16: note = synthetic [barcode part1]
  source 1..16: mol_type = other DNA
tattccgacgagtctt

SEQ ID NO: 3491 - DNA, 16 bp, synthetic construct
  misc_feature 1..16: note = synthetic [barcode part1]
  source 1..16: mol_type = other DNA
atcctagtgacgtcag

SEQ ID NO: 3492 - DNA, 16 bp, synthetic construct
  misc_feature 1..16: note = synthetic [barcode part1]
  source 1..16: mol_type = other DNA
actctaccggagagtt

SEQ ID NO: 3493 - DNA, 16 bp, synthetic construct
  misc_feature 1..16: note = synthetic [barcode part1]
  source 1..16: mol_type = other DNA
gccttacaggtgttcc

SEQ ID NO: 3494 - DNA, 16 bp, synthetic construct
  misc_feature 1..16: note = synthetic [barcode part1]
  source 1..16: mol_type = other DNA
cctaccgatcactctt

SEQ ID NO: 3495 - DNA, 16 bp, synthetic construct
  misc_feature 1..16: note = synthetic [barcode part1]
  source 1..16: mol_type = other DNA
accacctgacgtctac

SEQ ID NO: 3496 - DNA, 16 bp, synthetic construct
  misc_feature 1..16: note = synthetic [barcode part1]
  source 1..16: mol_type = other DNA
ccttgcgttagaccgt

SEQ ID NO: 3497 - DNA, 16 bp, synthetic construct
  misc_feature 1..16: note = synthetic [barcode part1]
  source 1..16: mol_type = other DNA
gtgactagttacgtgc

SEQ ID NO: 3498 - DNA, 16 bp, synthetic construct
  misc_feature 1..16: note = synthetic [barcode part1]
  source 1..16: mol_type = other DNA
acgtcctgacctgatc

SEQ ID NO: 3499 - DNA, 16 bp, synthetic construct
  misc_feature 1..16: note = synthetic [barcode part1]
  source 1..16: mol_type = other DNA
actccgtaatagtggc

SEQ ID NO: 3500 - DNA, 16 bp, synthetic construct
  misc_feature 1..16: note = synthetic [barcode part1]
  source 1..16: mol_type = other DNA
tcgtcacgatagaacc

SEQ ID NO: 3501 - DNA, 16 bp, synthetic construct
  misc_feature 1..16: note = synthetic [barcode part1]
  source 1..16: mol_type = other DNA
tggtgagagactcgtg

SEQ ID NO: 3502 - DNA, 16 bp, synthetic construct
  misc_feature 1..16: note = synthetic [barcode part1]
  source 1..16: mol_type = other DNA
tagtgaacggatactg

SEQ ID NO: 3503 - DNA, 16 bp, synthetic construct
  misc_feature 1..16: note = synthetic [barcode part1]
  source 1..16: mol_type = other DNA
cgcagtggtgatattc

SEQ ID NO: 3504 - DNA, 16 bp, synthetic construct
  misc_feature 1..16: note = synthetic [barcode part1]
  source 1..16: mol_type = other DNA
ccgcgaagaactgaac

SEQ ID NO: 3505 - DNA, 16 bp, synthetic construct
  misc_feature 1..16: note = synthetic [barcode part1]
  source 1..16: mol_type = other DNA
atcagatacggagact

SEQ ID NO: 3506 - DNA, 16 bp, synthetic construct
  misc_feature 1..16: note = synthetic [barcode part1]
  source 1..16: mol_type = other DNA
tccgatctggttgcac

SEQ ID NO: 3507 - DNA, 16 bp, synthetic construct
  misc_feature 1..16: note = synthetic [barcode part1]
  source 1..16: mol_type = other DNA
tgcgataagtaggtac

SEQ ID NO: 3508 - DNA, 16 bp, synthetic construct
  misc_feature 1..16: note = synthetic [barcode part1]
  source 1..16: mol_type = other DNA
gacaccaaccacagtt

SEQ ID NO: 3509 - DNA, 16 bp, synthetic construct
  misc_feature 1..16: note = synthetic [barcode part1]
  source 1..16: mol_type = other DNA
gaatagtcgacgagag

SEQ ID NO: 3510 - DNA, 16 bp, synthetic construct
  misc_feature 1..16: note = synthetic [barcode part1]
  source 1..16: mol_type = other DNA
tgcaatagtagacggt

SEQ ID NO: 3511 - DNA, 16 bp, synthetic construct
  misc_feature 1..16: note = synthetic [barcode part1]
  source 1..16: mol_type = other DNA
tcttggcgcgtctaac

SEQ ID NO: 3512 - DNA, 16 bp, synthetic construct
  misc_feature 1..16: note = synthetic [barcode part1]
  source 1..16: mol_type = other DNA
gagtgaccacagatcg

SEQ ID NO: 3513 - DNA, 16 bp, synthetic construct
  misc_feature 1..16: note = synthetic [barcode part1]
  source 1..16: mol_type = other DNA
cgtccgtcaaggtctt

SEQ ID NO: 3514 - DNA, 16 bp, synthetic construct
  misc_feature 1..16: note = synthetic [barcode part1]
  source 1..16: mol_type = other DNA
tatcttgcgagtgttc

SEQ ID NO: 3515 - DNA, 16 bp, synthetic construct
  misc_feature 1..16: note = synthetic [barcode part1]
  source 1..16: mol_type = other DNA
actgcgaataggcggt

SEQ ID NO: 3516 - DNA, 16 bp, synthetic construct
  misc_feature 1..16: note = synthetic [barcode part1]
  source 1..16: mol_type = other DNA
acgtggacaccaagtg

SEQ ID NO: 3517 - DNA, 16 bp, synthetic construct
  misc_feature 1..16: note = synthetic [barcode part1]
  source 1..16: mol_type = other DNA
cggccagtcaattagt

SEQ ID NO: 3518 - DNA, 16 bp, synthetic construct
  misc_feature 1..16: note = synthetic [barcode part1]
  source 1..16: mol_type = other DNA
tctacgtacacggagt

SEQ ID NO: 3519 - DNA, 16 bp, synthetic construct
  misc_feature 1..16: note = synthetic [barcode part1]
  source 1..16: mol_type = other DNA
gttagtctgtgacgtg

SEQ ID NO: 3520 - DNA, 16 bp, synthetic construct
  misc_feature 1..16: note = synthetic [barcode part1]
  source 1..16: mol_type = other DNA
tgacctaggtgacttg

SEQ ID NO: 3521 - DNA, 16 bp, synthetic construct
  misc_feature 1..16: note = synthetic [barcode part1]
  source 1..16: mol_type = other DNA
acaccggtataccaac

SEQ ID NO: 3522 - DNA, 16 bp, synthetic construct
  misc_feature 1..16: note = synthetic [barcode part1]
  source 1..16: mol_type = other DNA
ccacttaccacgacgt

SEQ ID NO: 3523 - DNA, 16 bp, synthetic construct
  misc_feature 1..16: note = synthetic [barcode part1]
  source 1..16: mol_type = other DNA
gagtggtacgtgactg

SEQ ID NO: 3524 - DNA, 16 bp, synthetic construct
  misc_feature 1..16: note = synthetic [barcode part1]
  source 1..16: mol_type = other DNA
tctgaccgcactagtc

SEQ ID NO: 3525 - DNA, 16 bp, synthetic construct
  misc_feature 1..16: note = synthetic [barcode part1]
  source 1..16: mol_type = other DNA
aaccgttcttgtatcg

SEQ ID NO: 3526 - DNA, 16 bp, synthetic construct
  misc_feature 1..16: note = synthetic [barcode part1]
  source 1..16: mol_type = other DNA
gttgtctaggcctatt

SEQ ID NO: 3527 - DNA, 16 bp, synthetic construct
  misc_feature 1..16: note = synthetic [barcode part1]
  source 1..16: mol_type = other DNA
gatacctcggatctag

SEQ ID NO: 3528 - DNA, 16 bp, synthetic construct
  misc_feature 1..16: note = synthetic [barcode part1]
  source 1..16: mol_type = other DNA
tctaatcgtatcgacc

SEQ ID NO: 3529 - DNA, 16 bp, synthetic construct
  misc_feature 1..16: note = synthetic [barcode part1]
  source 1..16: mol_type = other DNA
gcaagtcctccactgt

SEQ ID NO: 3530 - DNA, 16 bp, synthetic construct
  misc_feature 1..16: note = synthetic [barcode part1]
  source 1..16: mol_type = other DNA
tgttcttgactgtcag

SEQ ID NO: 3531 - DNA, 16 bp, synthetic construct
  misc_feature 1..16: note = synthetic [barcode part1]
  source 1..16: mol_type = other DNA
ttgtcttgcgcaaccg

SEQ ID NO: 3532 - DNA, 16 bp, synthetic construct
  misc_feature 1..16: note = synthetic [barcode part1]
  source 1..16: mol_type = other DNA
atcacgatatccgttc

SEQ ID NO: 3533 - DNA, 16 bp, synthetic construct
  misc_feature 1..16: note = synthetic [barcode part1]
  source 1..16: mol_type = other DNA
acgattagaggaacct

SEQ ID NO: 3534 - DNA, 16 bp, synthetic construct
  misc_feature 1..16: note = synthetic [barcode part1]
  source 1..16: mol_type = other DNA
aatcacgtgatacgcc

SEQ ID NO: 3535 - DNA, 16 bp, synthetic construct
  misc_feature 1..16: note = synthetic [barcode part1]
  source 1..16: mol_type = other DNA
gcgtgtatctcttcct

SEQ ID NO: 3536 - DNA, 16 bp, synthetic construct
  misc_feature 1..16: note = synthetic [barcode part1]
  source 1..16: mol_type = other DNA
gcaattccagaggcag

SEQ ID NO: 3537 - DNA, 16 bp, synthetic construct
  misc_feature 1..16: note = synthetic [barcode part1]
  source 1..16: mol_type = other DNA
tgtacgatacttcacc

SEQ ID NO: 3538 - DNA, 16 bp, synthetic construct
  misc_feature 1..16: note = synthetic [barcode part1]
  source 1..16: mol_type = other DNA
aacaattccggcaacc

SEQ ID NO: 3539 - DNA, 16 bp, synthetic construct
  misc_feature 1..16: note = synthetic [barcode part1]
  source 1..16: mol_type = other DNA
ttggacttcttacgtg

SEQ ID NO: 3540 - DNA, 16 bp, synthetic construct
  misc_feature 1..16: note = synthetic [barcode part1]
  source 1..16: mol_type = other DNA
cacgtagaggtacctt

SEQ ID NO: 3541 - DNA, 16 bp, synthetic construct
  misc_feature 1..16: note = synthetic [barcode part1]
  source 1..16: mol_type = other DNA
cgcgatcttaagtgtg

SEQ ID NO: 3542 - DNA, 16 bp, synthetic construct
  misc_feature 1..16: note = synthetic [barcode part1]
  source 1..16: mol_type = other DNA
agaagttcgacgtgcg

SEQ ID NO: 3543 - DNA, 16 bp, synthetic construct
  misc_feature 1..16: note = synthetic [barcode part1]
  source 1..16: mol_type = other DNA
gcactggtgtactaac

SEQ ID NO: 3544 - DNA, 16 bp, synthetic construct
  misc_feature 1..16: note = synthetic [barcode part1]
  source 1..16: mol_type = other DNA
ccttgtgaattcaacc

SEQ ID NO: 3545 - DNA, 16 bp, synthetic construct
  misc_feature 1..16: note = synthetic [barcode part1]
  source 1..16: mol_type = other DNA
gcactgcctattcgtg

SEQ ID NO: 3546 - DNA, 16 bp, synthetic construct
  misc_feature 1..16: note = synthetic [barcode part1]
  source 1..16: mol_type = other DNA
gtgagttgccaggaac

SEQ ID NO: 3547 - DNA, 16 bp, synthetic construct
  misc_feature 1..16: note = synthetic [barcode part1]
  source 1..16: mol_type = other DNA
ttgtcaccttgagtgt

SEQ ID NO: 3548 - DNA, 16 bp, synthetic construct
  misc_feature 1..16: note = synthetic [barcode part1]
  source 1..16: mol_type = other DNA
gcagacaacttactcg

SEQ ID NO: 3549 - DNA, 16 bp, synthetic construct
  misc_feature 1..16: note = synthetic [barcode part1]
  source 1..16: mol_type = other DNA
gtaggagaagagtgtc

SEQ ID NO: 3550 - DNA, 16 bp, synthetic construct
  misc_feature 1..16: note = synthetic [barcode part1]
  source 1..16: mol_type = other DNA
tgcctaattaggtgcg

SEQ ID NO: 3551 - DNA, 16 bp, synthetic construct
  misc_feature 1..16: note = synthetic [barcode part1]
  source 1..16: mol_type = other DNA
gatatagaccttcgcg

SEQ ID NO: 3552 - DNA, 16 bp, synthetic construct
  misc_feature 1..16: note = synthetic [barcode part1]
  source 1..16: mol_type = other DNA
gagattagtactcgag

SEQ ID NO: 3553 - DNA, 16 bp, synthetic construct
  misc_feature 1..16: note = synthetic [barcode part1]
  source 1..16: mol_type = other DNA
tgcagttaatcacgcg

SEQ ID NO: 3554 - DNA, 16 bp, synthetic construct
  misc_feature 1..16: note = synthetic [barcode part1]
  source 1..16: mol_type = other DNA
ccacgaacaagtctgt

SEQ ID NO: 3555 - DNA, 16 bp, synthetic construct
  misc_feature 1..16: note = synthetic [barcode part1]
  source 1..16: mol_type = other DNA
gacacgaaggtgtaag

SEQ ID NO: 3556 - DNA, 16 bp, synthetic construct
  misc_feature 1..16: note = synthetic [barcode part1]
  source 1..16: mol_type = other DNA
agtgcacgaccaaggt

SEQ ID NO: 3557 - DNA, 16 bp, synthetic construct
  misc_feature 1..16: note = synthetic [barcode part1]
  source 1..16: mol_type = other DNA
tattcgtgaatcctgc

SEQ ID NO: 3558 - DNA, 16 bp, synthetic construct
  misc_feature 1..16: note = synthetic [barcode part1]
  source 1..16: mol_type = other DNA
caagtgcaatcgcact

SEQ ID NO: 3559 - DNA, 16 bp, synthetic construct
  misc_feature 1..16: note = synthetic [barcode part1]
  source 1..16: mol_type = other DNA
cacgccaattgatacg

SEQ ID NO: 3560 - DNA, 16 bp, synthetic construct
  misc_feature 1..16: note = synthetic [barcode part1]
  source 1..16: mol_type = other DNA
caagattacgccacgt

SEQ ID NO: 3561 - DNA, 16 bp, synthetic construct
  misc_feature 1..16: note = synthetic [barcode part1]
  source 1..16: mol_type = other DNA
tcgaggccttgttcac

SEQ ID NO: 3562 - DNA, 16 bp, synthetic construct
  misc_feature 1..16: note = synthetic [barcode part1]
  source 1..16: mol_type = other DNA
gagtggtgactgtacg

SEQ ID NO: 3563 - DNA, 16 bp, synthetic construct
  misc_feature 1..16: note = synthetic [barcode part1]
  source 1..16: mol_type = other DNA
gtgcagtccaactcct

SEQ ID NO: 3564 - DNA, 16 bp, synthetic construct
  misc_feature 1..16: note = synthetic [barcode part1]
  source 1..16: mol_type = other DNA
acaggagacacagaac

SEQ ID NO: 3565 - DNA, 16 bp, synthetic construct
  misc_feature 1..16: note = synthetic [barcode part1]
  source 1..16: mol_type = other DNA
gtagttcctaccgaag

SEQ ID NO: 3566 - DNA, 16 bp, synthetic construct
  misc_feature 1..16: note = synthetic [barcode part1]
  source 1..16: mol_type = other DNA
atattcctcctgtgcc

SEQ ID NO: 3567 - DNA, 16 bp, synthetic construct
  misc_feature 1..16: note = synthetic [barcode part1]
  source 1..16: mol_type = other DNA
aagtcgtggcaattcc

SEQ ID NO: 3568 - DNA, 16 bp, synthetic construct
  misc_feature 1..16: note = synthetic [barcode part1]
  source 1..16: mol_type = other DNA
cctaaggtcctctctt

SEQ ID NO: 3569 - DNA, 16 bp, synthetic construct
  misc_feature 1..16: note = synthetic [barcode part1]
  source 1..16: mol_type = other DNA
gactgcagtgtcaact

SEQ ID NO: 3570 - DNA, 16 bp, synthetic construct
  misc_feature 1..16: note = synthetic [barcode part1]
  source 1..16: mol_type = other DNA
gcacagattacactcg

SEQ ID NO: 3571 - DNA, 16 bp, synthetic construct
  misc_feature 1..16: note = synthetic [barcode part1]
  source 1..16: mol_type = other DNA
tggtgtattaggtgcc

SEQ ID NO: 3572 - DNA, 16 bp, synthetic construct
  misc_feature 1..16: note = synthetic [barcode part1]
  source 1..16: mol_type = other DNA
gtcaagttcgttggac

SEQ ID NO: 3573 - DNA, 16 bp, synthetic construct
  misc_feature 1..16: note = synthetic [barcode part1]
  source 1..16: mol_type = other DNA
cgtctattcgcctact

SEQ ID NO: 3574 - DNA, 16 bp, synthetic construct
  misc_feature 1..16: note = synthetic [barcode part1]
  source 1..16: mol_type = other DNA
acgaggataacttgac

SEQ ID NO: 3575 - DNA, 16 bp, synthetic construct
  misc_feature 1..16: note = synthetic [barcode part1]
  source 1..16: mol_type = other DNA
gtgtacttgcctcacg

SEQ ID NO: 3576 - DNA, 16 bp, synthetic construct
  misc_feature 1..16: note = synthetic [barcode part1]
  source 1..16: mol_type = other DNA
tgaacaccaacagaac

SEQ ID NO: 3577 - DNA, 16 bp, synthetic construct
  misc_feature 1..16: note = synthetic [barcode part1]
  source 1..16: mol_type = other DNA
tcggcgtccttgattg

SEQ ID NO: 3578 - DNA, 16 bp, synthetic construct
  misc_feature 1..16: note = synthetic [barcode part1]
  source 1..16: mol_type = other DNA
tgcgtctctgtattcc

SEQ ID NO: 3579 - DNA, 16 bp, synthetic construct
  misc_feature 1..16: note = synthetic [barcode part1]
  source 1..16: mol_type = other DNA
gtactggagaggtcgt

SEQ ID NO: 3580 - DNA, 16 bp, synthetic construct
  misc_feature 1..16: note = synthetic [barcode part1]
  source 1..16: mol_type = other DNA
tgaccaagtactgtgc

SEQ ID NO: 3581 - DNA, 16 bp, synthetic construct
  misc_feature 1..16: note = synthetic [barcode part1]
  source 1..16: mol_type = other DNA
taccaactgacgtacg

SEQ ID NO: 3582 - DNA, 16 bp, synthetic construct
  misc_feature 1..16: note = synthetic [barcode part1]
  source 1..16: mol_type = other DNA
tctctccgatcaacct

SEQ ID NO: 3583 - DNA, 16 bp, synthetic construct
  misc_feature 1..16: note = synthetic [barcode part1]
  source 1..16: mol_type = other DNA
tccgatcgtactgacc

SEQ ID NO: 3584 - DNA, 16 bp, synthetic construct
  misc_feature 1..16: note = synthetic [barcode part1]
  source 1..16: mol_type = other DNA
tcgtaggttgtacggt

SEQ ID NO: 3585 - DNA, 16 bp, synthetic construct
  misc_feature 1..16: note = synthetic [barcode part1]
  source 1..16: mol_type = other DNA
agtgtcaacaccacac

SEQ ID NO: 3586 - DNA, 16 bp, synthetic construct
  misc_feature 1..16: note = synthetic [barcode part1]
  source 1..16: mol_type = other DNA
tcagttggtcacaacg

SEQ ID NO: 3587 - DNA, 16 bp, synthetic construct
  misc_feature 1..16: note = synthetic [barcode part1]
  source 1..16: mol_type = other DNA
gatagtaacggtggag

SEQ ID NO: 3588 - DNA, 16 bp, synthetic construct
  misc_feature 1..16: note = synthetic [barcode part1]
  source 1..16: mol_type = other DNA
gtgatcaattggcgtc

SEQ ID NO: 3589 - DNA, 16 bp, synthetic construct
  misc_feature 1..16: note = synthetic [barcode part1]
  source 1..16: mol_type = other DNA
acagtcaagaactgac

SEQ ID NO: 3590 - DNA, 16 bp, synthetic construct
  misc_feature 1..16: note = synthetic [barcode part1]
  source 1..16: mol_type = other DNA
gtctcgcgagtgttct

SEQ ID NO: 3591 - DNA, 16 bp, synthetic construct
  misc_feature 1..16: note = synthetic [barcode part1]
  source 1..16: mol_type = other DNA
tctgatccgcggttgt

SEQ ID NO: 3592 - DNA, 16 bp, synthetic construct
  misc_feature 1..16: note = synthetic [barcode part1]
  source 1..16: mol_type = other DNA
ccaattcctgccactt

SEQ ID NO: 3593 - DNA, 16 bp, synthetic construct
  misc_feature 1..16: note = synthetic [barcode part1]
  source 1..16: mol_type = other DNA
aagaccgaaggactag

SEQ ID NO: 3594 - DNA, 16 bp, synthetic construct
  misc_feature 1..16: note = synthetic [barcode part1]
  source 1..16: mol_type = other DNA
tgatcaggtactacgc

SEQ ID NO: 3595 - DNA, 16 bp, synthetic construct
  misc_feature 1..16: note = synthetic [barcode part1]
  source 1..16: mol_type = other DNA
cgaacactgtggatct

SEQ ID NO: 3596 - DNA, 16 bp, synthetic construct
  misc_feature 1..16: note = synthetic [barcode part1]
  source 1..16: mol_type = other DNA
tgactggaccgtgatt

SEQ ID NO: 3597 - DNA, 16 bp, synthetic construct
  misc_feature 1..16: note = synthetic [barcode part1]
  source 1..16: mol_type = other DNA
gcggccgatatattac

SEQ ID NO: 3598 - DNA, 16 bp, synthetic construct
  misc_feature 1..16: note = synthetic [barcode part1]
  source 1..16: mol_type = other DNA
gtcagtaatagaacgc

SEQ ID NO: 3599 - DNA, 16 bp, synthetic construct
  misc_feature 1..16: note = synthetic [barcode part1]
  source 1..16: mol_type = other DNA
agagtctaggccttac

SEQ ID NO: 3600 - DNA, 16 bp, synthetic construct
  misc_feature 1..16: note = synthetic [barcode part1]
  source 1..16: mol_type = other DNA
ttgcgcctattggatt

SEQ ID NO: 3601 - DNA, 16 bp, synthetic construct
  misc_feature 1..16: note = synthetic [barcode part1]
  source 1..16: mol_type = other DNA
aagtaacgtgcgaccg

SEQ ID NO: 3602 - DNA, 16 bp, synthetic construct
  misc_feature 1..16: note = synthetic [barcode part1]
  source 1..16: mol_type = other DNA
acttattggtgccact

SEQ ID NO: 3603 - DNA, 16 bp, synthetic construct
  misc_feature 1..16: note = synthetic [barcode part1]
  source 1..16: mol_type = other DNA
cggtaatactgagtcc

SEQ ID NO: 3604 - DNA, 16 bp, synthetic construct
  misc_feature 1..16: note = synthetic [barcode part1]
  source 1..16: mol_type = other DNA
caagaccgagatctct

SEQ ID NO: 3605 - DNA, 16 bp, synthetic construct
  misc_feature 1..16: note = synthetic [barcode part1]
  source 1..16: mol_type = other DNA
caataccggacagacg

SEQ ID NO: 3606 - DNA, 16 bp, synthetic construct
  misc_feature 1..16: note = synthetic [barcode part1]
  source 1..16: mol_type = other DNA
tcggcagttcgtactc

SEQ ID NO: 3607 - DNA, 16 bp, synthetic construct
  misc_feature 1..16: note = synthetic [barcode part1]
  source 1..16: mol_type = other DNA
gaagttctcgtaacgc

SEQ ID NO: 3608 - DNA, 16 bp, synthetic construct
  misc_feature 1..16: note = synthetic [barcode part1]
  source 1..16: mol_type = other DNA
tctattgtcctgtcgc

SEQ ID NO: 3609 - DNA, 16 bp, synthetic construct
  misc_feature 1..16: note = synthetic [barcode part1]
  source 1..16: mol_type = other DNA
tctgccttggaatccg

SEQ ID NO: 3610 - DNA, 16 bp, synthetic construct
  misc_feature 1..16: note = synthetic [barcode part1]
  source 1..16: mol_type = other DNA
gtggagattgagtcgc

SEQ ID NO: 3611 - DNA, 16 bp, synthetic construct
  misc_feature 1..16: note = synthetic [barcode part1]
  source 1..16: mol_type = other DNA
tctgtcgactagagac

SEQ ID NO: 3612 - DNA, 16 bp, synthetic construct
  misc_feature 1..16: note = synthetic [barcode part1]
  source 1..16: mol_type = other DNA
tcggaacgcctgtctt

SEQ ID NO: 3613 - DNA, 16 bp, synthetic construct
  misc_feature 1..16: note = synthetic [barcode part1]
  source 1..16: mol_type = other DNA
caccggttaactacag

SEQ ID NO: 3614 - DNA, 16 bp, synthetic construct
  misc_feature 1..16: note = synthetic [barcode part1]
  source 1..16: mol_type = other DNA
actgccggtacagaag

SEQ ID NO: 3615 - DNA, 16 bp, synthetic construct
  misc_feature 1..16: note = synthetic [barcode part1]
  source 1..16: mol_type = other DNA
taacttcgtatcgacc

SEQ ID NO: 3616 - DNA, 16 bp, synthetic construct
  misc_feature 1..16: note = synthetic [barcode part1]
  source 1..16: mol_type = other DNA
ttacggtgcactgtag

SEQ ID NO: 3617 - DNA, 16 bp, synthetic construct
  misc_feature 1..16: note = synthetic [barcode part1]
  source 1..16: mol_type = other DNA
tatagtacgaggcctc

SEQ ID NO: 3618 - DNA, 16 bp, synthetic construct
  misc_feature 1..16: note = synthetic [barcode part1]
  source 1..16: mol_type = other DNA
gttcgtactagacgtg

SEQ ID NO: 3619 - DNA, 16 bp, synthetic construct
  misc_feature 1..16: note = synthetic [barcode part1]
  source 1..16: mol_type = other DNA
ttcaccgtcaatacac

SEQ ID NO: 3620 - DNA, 16 bp, synthetic construct
  misc_feature 1..16: note = synthetic [barcode part1]
  source 1..16: mol_type = other DNA
tacggataggtagtac

SEQ ID NO: 3621 - DNA, 16 bp, synthetic construct
  misc_feature 1..16: note = synthetic [barcode part1]
  source 1..16: mol_type = other DNA
ttcactgtcgagtact

SEQ ID NO: 3622 - DNA, 16 bp, synthetic construct
  misc_feature 1..16: note = synthetic [barcode part1]
  source 1..16: mol_type = other DNA
acctattcgagacttc

SEQ ID NO: 3623 - DNA, 16 bp, synthetic construct
  misc_feature 1..16: note = synthetic [barcode part1]
  source 1..16: mol_type = other DNA
tcgtagataaggaacc

SEQ ID NO: 3624 - DNA, 16 bp, synthetic construct
  misc_feature 1..16: note = synthetic [barcode part1]
  source 1..16: mol_type = other DNA
ttgatccacggttact

SEQ ID NO: 3625 - DNA, 16 bp, synthetic construct
  misc_feature 1..16: note = synthetic [barcode part1]
  source 1..16: mol_type = other DNA
gacgtgtcgtacgatt

SEQ ID NO: 3626 - DNA, 16 bp, synthetic construct
  misc_feature 1..16: note = synthetic [barcode part1]
  source 1..16: mol_type = other DNA
tggtggaaggtaacag

SEQ ID NO: 3627 - DNA, 16 bp, synthetic construct
  misc_feature 1..16: note = synthetic [barcode part1]
  source 1..16: mol_type = other DNA
aggtggactcggaatc

SEQ ID NO: 3628 - DNA, 16 bp, synthetic construct
  misc_feature 1..16: note = synthetic [barcode part1]
  source 1..16: mol_type = other DNA
actcacctcgcagtac

SEQ ID NO: 3629 - DNA, 16 bp, synthetic construct
  misc_feature 1..16: note = synthetic [barcode part1]
  source 1..16: mol_type = other DNA
acacgcctattggtag

SEQ ID NO: 3630 - DNA, 16 bp, synthetic construct
  misc_feature 1..16: note = synthetic [barcode part1]
  source 1..16: mol_type = other DNA
cacagtagtcttaggc

SEQ ID NO: 3631 - DNA, 16 bp, synthetic construct
  misc_feature 1..16: note = synthetic [barcode part1]
  source 1..16: mol_type = other DNA
attgacaagtggtggt

SEQ ID NO: 3632 - DNA, 16 bp, synthetic construct
  misc_feature 1..16: note = synthetic [barcode part1]
  source 1..16: mol_type = other DNA
cctcgtagacttgacc

SEQ ID NO: 3633 - DNA, 16 bp, synthetic construct
  misc_feature 1..16: note = synthetic [barcode part1]
  source 1..16: mol_type = other DNA
cagtgatctaagtcgc

SEQ ID NO: 3634 - DNA, 16 bp, synthetic construct
  misc_feature 1..16: note = synthetic [barcode part1]
  source 1..16: mol_type = other DNA
gcactgccaagtagag

SEQ ID NO: 3635 - DNA, 16 bp, synthetic construct
  misc_feature 1..16: note = synthetic [barcode part1]
  source 1..16: mol_type = other DNA
gcgtgtagtgcgtatt

SEQ ID NO: 3636 - DNA, 16 bp, synthetic construct
  misc_feature 1..16: note = synthetic [barcode part1]
  source 1..16: mol_type = other DNA
gttcagacctggatac

SEQ ID NO: 3637 - DNA, 16 bp, synthetic construct
  misc_feature 1..16: note = synthetic [barcode part1]
  source 1..16: mol_type = other DNA
ccactcaagattccgc

SEQ ID NO: 3638 - DNA, 16 bp, synthetic construct
  misc_feature 1..16: note = synthetic [barcode part1]
  source 1..16: mol_type = other DNA
gactcggactatcaac

SEQ ID NO: 3639 - DNA, 16 bp, synthetic construct
  misc_feature 1..16: note = synthetic [barcode part1]
  source 1..16: mol_type = other DNA
gacacacacgtactgt

SEQ ID NO: 3640 - DNA, 16 bp, synthetic construct
  misc_feature 1..16: note = synthetic [barcode part1]
  source 1..16: mol_type = other DNA
agtgccacgtgatact

SEQ ID NO: 3641 - DNA, 16 bp, synthetic construct
  misc_feature 1..16: note = synthetic [barcode part1]
  source 1..16: mol_type = other DNA
gcgagtcttctcagtc

SEQ ID NO: 3642 - DNA, 16 bp, synthetic construct
  misc_feature 1..16: note = synthetic [barcode part1]
  source 1..16: mol_type = other DNA
ataggaacgacaactc

SEQ ID NO: 3643 - DNA, 16 bp, synthetic construct
  misc_feature 1..16: note = synthetic [barcode part1]
  source 1..16: mol_type = other DNA
caccttacgaagtggt

SEQ ID NO: 3644 - DNA, 16 bp, synthetic construct
  misc_feature 1..16: note = synthetic [barcode part1]
  source 1..16: mol_type = other DNA
atcttgcagtacacct

SEQ ID NO: 3645 - DNA, 16 bp, synthetic construct
  misc_feature 1..16: note = synthetic [barcode part1]
  source 1..16: mol_type = other DNA
gagttctacgtacacg

SEQ ID NO: 3646 - DNA, 16 bp, synthetic construct
  misc_feature 1..16: note = synthetic [barcode part1]
  source 1..16: mol_type = other DNA
ttgaagaggttgcgcg

SEQ ID NO: 3647 - DNA, 16 bp, synthetic construct
  misc_feature 1..16: note = synthetic [barcode part1]
  source 1..16: mol_type = other DNA
agtaccttgtctcgcg

SEQ ID NO: 3648 - DNA, 16 bp, synthetic construct
  misc_feature 1..16: note = synthetic [barcode part1]
  source 1..16: mol_type = other DNA
cgtaggttaggtacct

SEQ ID NO: 3649 - DNA, 16 bp, synthetic construct
  misc_feature 1..16: note = synthetic [barcode part1]
  source 1..16: mol_type = other DNA
tcgttagtgtacttcg

SEQ ID NO: 3650 - DNA, 16 bp, synthetic construct
  misc_feature 1..16: note = synthetic [barcode part1]
  source 1..16: mol_type = other DNA
aattggacacctcacg

SEQ ID NO: 3651 - DNA, 16 bp, synthetic construct
  misc_feature 1..16: note = synthetic [barcode part1]
  source 1..16: mol_type = other DNA
gtacttgtcaccttag

SEQ ID NO: 3652 - DNA, 16 bp, synthetic construct
  misc_feature 1..16: note = synthetic [barcode part1]
  source 1..16: mol_type = other DNA
gagatcgcgtaccaag

SEQ ID NO: 3653 - DNA, 16 bp, synthetic construct
  misc_feature 1..16: note = synthetic [barcode part1]
  source 1..16: mol_type = other DNA
gagaccagactacgtg

SEQ ID NO: 3654 - DNA, 16 bp, synthetic construct
  misc_feature 1..16: note = synthetic [barcode part1]
  source 1..16: mol_type = other DNA
tcttgtgacacggagt

SEQ ID NO: 3655 - DNA, 16 bp, synthetic construct
  misc_feature 1..16: note = synthetic [barcode part1]
  source 1..16: mol_type = other DNA
cgaaccgttagatcac

SEQ ID NO: 3656 - DNA, 16 bp, synthetic construct
  misc_feature 1..16: note = synthetic [barcode part1]
  source 1..16: mol_type = other DNA
tataagtcctaccacc

SEQ ID NO: 3657 - DNA, 16 bp, synthetic construct
  misc_feature 1..16: note = synthetic [barcode part1]
  source 1..16: mol_type = other DNA
actacggacggtactt

SEQ ID NO: 3658 - DNA, 16 bp, synthetic construct
  misc_feature 1..16: note = synthetic [barcode part1]
  source 1..16: mol_type = other DNA
tattagtgtgccgacg

SEQ ID NO: 3659 - DNA, 16 bp, synthetic construct
  misc_feature 1..16: note = synthetic [barcode part1]
  source 1..16: mol_type = other DNA
gacgacctagtaatcc

SEQ ID NO: 3660 - DNA, 16 bp, synthetic construct
  misc_feature 1..16: note = synthetic [barcode part1]
  source 1..16: mol_type = other DNA
aacctggtctctgcgt

SEQ ID NO: 3661 - DNA, 16 bp, synthetic construct
  misc_feature 1..16: note = synthetic [barcode part1]
  source 1..16: mol_type = other DNA
gcggttagattctctt

SEQ ID NO: 3662 - DNA, 16 bp, synthetic construct
  misc_feature 1..16: note = synthetic [barcode part1]
  source 1..16: mol_type = other DNA
tggtcagtggtactgt

SEQ ID NO: 3663 - DNA, 16 bp, synthetic construct
  misc_feature 1..16: note = synthetic [barcode part1]
  source 1..16: mol_type = other DNA
tgcacggtgaagagtc

SEQ ID NO: 3664 - DNA, 16 bp, synthetic construct
  misc_feature 1..16: note = synthetic [barcode part1]
  source 1..16: mol_type = other DNA
agattcgtgaaggatc

SEQ ID NO: 3665 - DNA, 16 bp, synthetic construct
  misc_feature 1..16: note = synthetic [barcode part1]
  source 1..16: mol_type = other DNA
tcgtaccactcaatac

SEQ ID NO: 3666 - DNA, 16 bp, synthetic construct
  misc_feature 1..16: note = synthetic [barcode part1]
  source 1..16: mol_type = other DNA
cgtgaacagacctact

SEQ ID NO: 3667 - DNA, 16 bp, synthetic construct
  misc_feature 1..16: note = synthetic [barcode part1]
  source 1..16: mol_type = other DNA
agaacctgcaggcaac

SEQ ID NO: 3668 - DNA, 16 bp, synthetic construct
  misc_feature 1..16: note = synthetic [barcode part1]
  source 1..16: mol_type = other DNA
cgacgtcttacaacag

SEQ ID NO: 3669 - DNA, 16 bp, synthetic construct
  misc_feature 1..16: note = synthetic [barcode part1]
  source 1..16: mol_type = other DNA
taaccgaccgactaac

SEQ ID NO: 3670 - DNA, 16 bp, synthetic construct
  misc_feature 1..16: note = synthetic [barcode part1]
  source 1..16: mol_type = other DNA
tatctcaactcgcaac

SEQ ID NO: 3671 - DNA, 16 bp, synthetic construct
  misc_feature 1..16: note = synthetic [barcode part1]
  source 1..16: mol_type = other DNA
aagtccacactccacc

SEQ ID NO: 3672 - DNA, 16 bp, synthetic construct
  misc_feature 1..16: note = synthetic [barcode part1]
  source 1..16: mol_type = other DNA
acttccgcgaatcgtc

SEQ ID NO: 3673 - DNA, 16 bp, synthetic construct
  misc_feature 1..16: note = synthetic [barcode part1]
  source 1..16: mol_type = other DNA
tctaacgttacacctg

SEQ ID NO: 3674 - DNA, 16 bp, synthetic construct
  misc_feature 1..16: note = synthetic [barcode part1]
  source 1..16: mol_type = other DNA
agaccacacgattcgt

SEQ ID NO: 3675 - DNA, 16 bp, synthetic construct
  misc_feature 1..16: note = synthetic [barcode part1]
  source 1..16: mol_type = other DNA
tctaactactacgcac

SEQ ID NO: 3676 - DNA, 16 bp, synthetic construct
  misc_feature 1..16: note = synthetic [barcode part1]
  source 1..16: mol_type = other DNA
taggtacagaacaacc

SEQ ID NO: 3677 - DNA, 16 bp, synthetic construct
  misc_feature 1..16: note = synthetic [barcode part1]
  source 1..16: mol_type = other DNA
gagacgtattatcgag

SEQ ID NO: 3678 - DNA, 16 bp, synthetic construct
  misc_feature 1..16: note = synthetic [barcode part1]
  source 1..16: mol_type = other DNA
gcctgtgttctcagtg

SEQ ID NO: 3679 - DNA, 16 bp, synthetic construct
  misc_feature 1..16: note = synthetic [barcode part1]
  source 1..16: mol_type = other DNA
gtcggtgtcgttgttc

SEQ ID NO: 3680 - DNA, 16 bp, synthetic construct
  misc_feature 1..16: note = synthetic [barcode part1]
  source 1..16: mol_type = other DNA
cagttaccaagaggcg

SEQ ID NO: 3681 - DNA, 16 bp, synthetic construct
  misc_feature 1..16: note = synthetic [barcode part1]
  source 1..16: mol_type = other DNA
gtcgtccacagactct

SEQ ID NO: 3682 - DNA, 16 bp, synthetic construct
  misc_feature 1..16: note = synthetic [barcode part1]
  source 1..16: mol_type = other DNA
gacaacggtgatagag

SEQ ID NO: 3683 - DNA, 16 bp, synthetic construct
  misc_feature 1..16: note = synthetic [barcode part1]
  source 1..16: mol_type = other DNA
gcctgtgtacgaattg

SEQ ID NO: 3684 - DNA, 16 bp, synthetic construct
  misc_feature 1..16: note = synthetic [barcode part1]
  source 1..16: mol_type = other DNA
acgttacgccttgaag

SEQ ID NO: 3685 - DNA, 16 bp, synthetic construct
  misc_feature 1..16: note = synthetic [barcode part1]
  source 1..16: mol_type = other DNA
gacctaatcctcacgc

SEQ ID NO: 3686 - DNA, 16 bp, synthetic construct
  misc_feature 1..16: note = synthetic [barcode part1]
  source 1..16: mol_type = other DNA
cgcacggtccaatctt

SEQ ID NO: 3687 - DNA, 16 bp, synthetic construct
  misc_feature 1..16: note = synthetic [barcode part1]
  source 1..16: mol_type = other DNA
caccgcaattgatcag

SEQ ID NO: 3688 - DNA, 16 bp, synthetic construct
  misc_feature 1..16: note = synthetic [barcode part1]
  source 1..16: mol_type = other DNA
agtgtggttcgtactg

SEQ ID NO: 3689 - DNA, 16 bp, synthetic construct
  misc_feature 1..16: note = synthetic [barcode part1]
  source 1..16: mol_type = other DNA
gatctccgtacaattc

SEQ ID NO: 3690 - DNA, 16 bp, synthetic construct
  misc_feature 1..16: note = synthetic [barcode part1]
  source 1..16: mol_type = other DNA
ttacttctgcggaccg

SEQ ID NO: 3691 - DNA, 16 bp, synthetic construct
  misc_feature 1..16: note = synthetic [barcode part1]
  source 1..16: mol_type = other DNA
tgagacctctcaaggt

SEQ ID NO: 3692 - DNA, 16 bp, synthetic construct
  misc_feature 1..16: note = synthetic [barcode part1]
  source 1..16: mol_type = other DNA
ataccaagaggcaact

SEQ ID NO: 3693 - DNA, 16 bp, synthetic construct
  misc_feature 1..16: note = synthetic [barcode part1]
  source 1..16: mol_type = other DNA
gtaattaggttcctcc

SEQ ID NO: 3694 - DNA, 16 bp, synthetic construct
  misc_feature 1..16: note = synthetic [barcode part1]
  source 1..16: mol_type = other DNA
tatatctctcggcagt

SEQ ID NO: 3695 - DNA, 16 bp, synthetic construct
  misc_feature 1..16: note = synthetic [barcode part1]
  source 1..16: mol_type = other DNA
gactagttggcgttac

SEQ ID NO: 3696 - DNA, 16 bp, synthetic construct
  misc_feature 1..16: note = synthetic [barcode part1]
  source 1..16: mol_type = other DNA
tctcgacgagatagtc

SEQ ID NO: 3697 - DNA, 16 bp, synthetic construct
  misc_feature 1..16: note = synthetic [barcode part1]
  source 1..16: mol_type = other DNA
cggtattgtctacttg

SEQ ID NO: 3698 - DNA, 16 bp, synthetic construct
  misc_feature 1..16: note = synthetic [barcode part1]
  source 1..16: mol_type = other DNA
ttgattacggccaacg

SEQ ID NO: 3699 - DNA, 16 bp, synthetic construct
  misc_feature 1..16: note = synthetic [barcode part1]
  source 1..16: mol_type = other DNA
taggaggcgtaattac

SEQ ID NO: 3700 - DNA, 16 bp, synthetic construct
  misc_feature 1..16: note = synthetic [barcode part1]
  source 1..16: mol_type = other DNA
agagataatccgacac

SEQ ID NO: 3701 - DNA, 16 bp, synthetic construct
  misc_feature 1..16: note = synthetic [barcode part1]
  source 1..16: mol_type = other DNA
acggacactatctacg

SEQ ID NO: 3702 - DNA, 16 bp, synthetic construct
  misc_feature 1..16: note = synthetic [barcode part1]
  source 1..16: mol_type = other DNA
cggatacgagataact

SEQ ID NO: 3703 - DNA, 16 bp, synthetic construct
  misc_feature 1..16: note = synthetic [barcode part1]
  source 1..16: mol_type = other DNA
cactaacggaagattg

SEQ ID NO: 3704 - DNA, 16 bp, synthetic construct
  misc_feature 1..16: note = synthetic [barcode part1]
  source 1..16: mol_type = other DNA
gacgatcggaggtact

SEQ ID NO: 3705 - DNA, 16 bp, synthetic construct
  misc_feature 1..16: note = synthetic [barcode part1]
  source 1..16: mol_type = other DNA
gttagacgacagttcc

SEQ ID NO: 3706 - DNA, 16 bp, synthetic construct
  misc_feature 1..16: note = synthetic [barcode part1]
  source 1..16: mol_type = other DNA
caggttggaggacact

SEQ ID NO: 3707 - DNA, 16 bp, synthetic construct
  misc_feature 1..16: note = synthetic [barcode part1]
  source 1..16: mol_type = other DNA
gtaacggtcacgcaag

SEQ ID NO: 3708 - DNA, 16 bp, synthetic construct
  misc_feature 1..16: note = synthetic [barcode part1]
  source 1..16: mol_type = other DNA
gaaccttcttcaggag

SEQ ID NO: 3709 - DNA, 16 bp, synthetic construct
  misc_feature 1..16: note = synthetic [barcode part1]
  source 1..16: mol_type = other DNA
attccgtggatcgagt

SEQ ID NO: 3710 - DNA, 16 bp, synthetic construct
  misc_feature 1..16: note = synthetic [barcode part1]
  source 1..16: mol_type = other DNA
gtgtggtaagaccggt

SEQ ID NO: 3711 - DNA, 16 bp, synthetic construct
  misc_feature 1..16: note = synthetic [barcode part1]
  source 1..16: mol_type = other DNA
cctgttaggaacgact

SEQ ID NO: 3712 - DNA, 16 bp, synthetic construct
  misc_feature 1..16: note = synthetic [barcode part1]
  source 1..16: mol_type = other DNA
tatcggaatccgacac

SEQ ID NO: 3713 - DNA, 16 bp, synthetic construct
  misc_feature 1..16: note = synthetic [barcode part1]
  source 1..16: mol_type = other DNA
gaatatccgtcgtctt

SEQ ID NO: 3714 - DNA, 16 bp, synthetic construct
  misc_feature 1..16: note = synthetic [barcode part1]
  source 1..16: mol_type = other DNA
gtagttgcgtagtcac

SEQ ID NO: 3715 - DNA, 16 bp, synthetic construct
  misc_feature 1..16: note = synthetic [barcode part1]
  source 1..16: mol_type = other DNA
tggacagttgtctgtg

SEQ ID NO: 3716 - DNA, 16 bp, synthetic construct
  misc_feature 1..16: note = synthetic [barcode part1]
  source 1..16: mol_type = other DNA
ttgagtgtgagtgtcc

SEQ ID NO: 3717 - DNA, 16 bp, synthetic construct
  misc_feature 1..16: note = synthetic [barcode part1]
  source 1..16: mol_type = other DNA
gtgaactctctcaatc

SEQ ID NO: 3718 - DNA, 16 bp, synthetic construct
  misc_feature 1..16: note = synthetic [barcode part1]
  source 1..16: mol_type = other DNA
atagtccacttctacg

SEQ ID NO: 3719 - DNA, 16 bp, synthetic construct
  misc_feature 1..16: note = synthetic [barcode part1]
  source 1..16: mol_type = other DNA
cagttgatctccttcc

SEQ ID NO: 3720 - DNA, 16 bp, synthetic construct
  misc_feature 1..16: note = synthetic [barcode part1]
  source 1..16: mol_type = other DNA
gagattcttacctacc

SEQ ID NO: 3721 - DNA, 16 bp, synthetic construct
  misc_feature 1..16: note = synthetic [barcode part1]
  source 1..16: mol_type = other DNA
tacgaacggtacctac

SEQ ID NO: 3722 - DNA, 16 bp, synthetic construct
  misc_feature 1..16: note = synthetic [barcode part1]
  source 1..16: mol_type = other DNA
cgcactctgaaccact

SEQ ID NO: 3723 - DNA, 16 bp, synthetic construct
  misc_feature 1..16: note = synthetic [barcode part1]
  source 1..16: mol_type = other DNA
tattaacgagagaccg

SEQ ID NO: 3724 - DNA, 16 bp, synthetic construct
  misc_feature 1..16: note = synthetic [barcode part1]
  source 1..16: mol_type = other DNA
tcaagtgtgaggtggc

SEQ ID NO: 3725 - DNA, 16 bp, synthetic construct
  misc_feature 1..16: note = synthetic [barcode part1]
  source 1..16: mol_type = other DNA
tgtgatcaagaaccag

SEQ ID NO: 3726 - DNA, 16 bp, synthetic construct
  misc_feature 1..16: note = synthetic [barcode part1]
  source 1..16: mol_type = other DNA
ttgtgcaaccagtacg

SEQ ID NO: 3727 - DNA, 16 bp, synthetic construct
  misc_feature 1..16: note = synthetic [barcode part1]
  source 1..16: mol_type = other DNA
acgtacacttctctcc

SEQ ID NO: 3728 - DNA, 16 bp, synthetic construct
  misc_feature 1..16: note = synthetic [barcode part1]
  source 1..16: mol_type = other DNA
tctacgtagaacgcgt

SEQ ID NO: 3729 - DNA, 16 bp, synthetic construct
  misc_feature 1..16: note = synthetic [barcode part1]
  source 1..16: mol_type = other DNA
cgtatagacctcctgc

SEQ ID NO: 3730 - DNA, 16 bp, synthetic construct
  misc_feature 1..16: note = synthetic [barcode part1]
  source 1..16: mol_type = other DNA
cgaatcttgccactcg

SEQ ID NO: 3731 - DNA, 16 bp, synthetic construct
  misc_feature 1..16: note = synthetic [barcode part1]
  source 1..16: mol_type = other DNA
tgatcaccactccgtg

SEQ ID NO: 3732 - DNA, 16 bp, synthetic construct
  misc_feature 1..16: note = synthetic [barcode part1]
  source 1..16: mol_type = other DNA
tgtattcctgcgtctc

SEQ ID NO: 3733 - DNA, 16 bp, synthetic construct
  misc_feature 1..16: note = synthetic [barcode part1]
  source 1..16: mol_type = other DNA
agattgtcctgcactt

SEQ ID NO: 3734 - DNA, 16 bp, synthetic construct
  misc_feature 1..16: note = synthetic [barcode part1]
  source 1..16: mol_type = other DNA
gactacgcctcgatct

SEQ ID NO: 3735 - DNA, 16 bp, synthetic construct
  misc_feature 1..16: note = synthetic [barcode part1]
  source 1..16: mol_type = other DNA
ttatcgcaggtctgtt

SEQ ID NO: 3736 - DNA, 16 bp, synthetic construct
  misc_feature 1..16: note = synthetic [barcode part1]
  source 1..16: mol_type = other DNA
gaggaactccgtagac

SEQ ID NO: 3737 - DNA, 16 bp, synthetic construct
  misc_feature 1..16: note = synthetic [barcode part1]
  source 1..16: mol_type = other DNA
gtgatcaatcacgcac

SEQ ID NO: 3738 - DNA, 16 bp, synthetic construct
  misc_feature 1..16: note = synthetic [barcode part1]
  source 1..16: mol_type = other DNA
gtcagagaccgtgtag

SEQ ID NO: 3739 - DNA, 16 bp, synthetic construct
  misc_feature 1..16: note = synthetic [barcode part1]
  source 1..16: mol_type = other DNA
tcctaaccgactcctt

SEQ ID NO: 3740 - DNA, 16 bp, synthetic construct
  misc_feature 1..16: note = synthetic [barcode part1]
  source 1..16: mol_type = other DNA
actaacagacgcgtct

SEQ ID NO: 3741 - DNA, 16 bp, synthetic construct
  misc_feature 1..16: note = synthetic [barcode part1]
  source 1..16: mol_type = other DNA
tcactgccagacgttc

SEQ ID NO: 3742 - DNA, 16 bp, synthetic construct
  misc_feature 1..16: note = synthetic [barcode part1]
  source 1..16: mol_type = other DNA
aaccggtagagtctct

SEQ ID NO: 3743 - DNA, 16 bp, synthetic construct
  misc_feature 1..16: note = synthetic [barcode part1]
  source 1..16: mol_type = other DNA
caagtcaacgtaagac

SEQ ID NO: 3744 - DNA, 16 bp, synthetic construct
  misc_feature 1..16: note = synthetic [barcode part1]
  source 1..16: mol_type = other DNA
tactggttggttgcag

SEQ ID NO: 3745 - DNA, 16 bp, synthetic construct
  misc_feature 1..16: note = synthetic [barcode part1]
  source 1..16: mol_type = other DNA
tctcttcctcttcctc

SEQ ID NO: 3746 - DNA, 16 bp, synthetic construct
  misc_feature 1..16: note = synthetic [barcode part1]
  source 1..16: mol_type = other DNA
acggcaccaattaacc

SEQ ID NO: 3747 - DNA, 16 bp, synthetic construct
  misc_feature 1..16: note = synthetic [barcode part1]
  source 1..16: mol_type = other DNA
agagagagaagaggag

SEQ ID NO: 3748 - DNA, 16 bp, synthetic construct
  misc_feature 1..16: note = synthetic [barcode part1]
  source 1..16: mol_type = other DNA
caatccactgtgtccg

SEQ ID NO: 3749 - DNA, 16 bp, synthetic construct
  misc_feature 1..16: note = synthetic [barcode part1]
  source 1..16: mol_type = other DNA
ttcagagattgcgacc

SEQ ID NO: 3750 - DNA, 16 bp, synthetic construct
  misc_feature 1..16: note = synthetic [barcode part1]
  source 1..16: mol_type = other DNA
gccagtaatccagact

SEQ ID NO: 3751 - DNA, 16 bp, synthetic construct
  misc_feature 1..16: note = synthetic [barcode part1]
  source 1..16: mol_type = other DNA
gtataacgagagacct

SEQ ID NO: 3752 - DNA, 16 bp, synthetic construct
  misc_feature 1..16: note = synthetic [barcode part1]
  source 1..16: mol_type = other DNA
tagatagtgtccgtcg

SEQ ID NO: 3753 - DNA, 16 bp, synthetic construct
  misc_feature 1..16: note = synthetic [barcode part1]
  source 1..16: mol_type = other DNA
caggcaattgtggcag

SEQ ID NO: 3754 - DNA, 16 bp, synthetic construct
  misc_feature 1..16: note = synthetic [barcode part1]
  source 1..16: mol_type = other DNA
cgttgttagtgtgtct

SEQ ID NO: 3755 - DNA, 16 bp, synthetic construct
  misc_feature 1..16: note = synthetic [barcode part1]
  source 1..16: mol_type = other DNA
cgtgacgcactataac

SEQ ID NO: 3756 - DNA, 16 bp, synthetic construct
  misc_feature 1..16: note = synthetic [barcode part1]
  source 1..16: mol_type = other DNA
tgtcctgaacgagatc

SEQ ID NO: 3757 - DNA, 16 bp, synthetic construct
  misc_feature 1..16: note = synthetic [barcode part1]
  source 1..16: mol_type = other DNA
ccaagtgtgagtgtct

SEQ ID NO: 3758 - DNA, 16 bp, synthetic construct
  misc_feature 1..16: note = synthetic [barcode part1]
  source 1..16: mol_type = other DNA
cacctcacgttatctc

SEQ ID NO: 3759 - DNA, 16 bp, synthetic construct
  misc_feature 1..16: note = synthetic [barcode part1]
  source 1..16: mol_type = other DNA
aattcggtcggtagtc

SEQ ID NO: 3760 - DNA, 16 bp, synthetic construct
  misc_feature 1..16: note = synthetic [barcode part1]
  source 1..16: mol_type = other DNA
gtcgttccttgaatac

SEQ ID NO: 3761 - DNA, 16 bp, synthetic construct
  misc_feature 1..16: note = synthetic [barcode part1]
  source 1..16: mol_type = other DNA
cgagtatcggtccttc

SEQ ID NO: 3762 - DNA, 16 bp, synthetic construct
  misc_feature 1..16: note = synthetic [barcode part1]
  source 1..16: mol_type = other DNA
cagagtctcagagtct

SEQ ID NO: 3763 - DNA, 16 bp, synthetic construct
  misc_feature 1..16: note = synthetic [barcode part1]
  source 1..16: mol_type = other DNA
agagtaaggtgaggtc

SEQ ID NO: 3764 - DNA, 16 bp, synthetic construct
  misc_feature 1..16: note = synthetic [barcode part1]
  source 1..16: mol_type = other DNA
tacacttgagtgtggc

SEQ ID NO: 3765 - DNA, 16 bp, synthetic construct
  misc_feature 1..16: note = synthetic [barcode part1]
  source 1..16: mol_type = other DNA
tacgttggaggtcgag

SEQ ID NO: 3766 - DNA, 16 bp, synthetic construct
  misc_feature 1..16: note = synthetic [barcode part1]
  source 1..16: mol_type = other DNA
gcgtaataccagtacc

SEQ ID NO: 3767 - DNA, 16 bp, synthetic construct
  misc_feature 1..16: note = synthetic [barcode part1]
  source 1..16: mol_type = other DNA
cagtgcagtacagtct

SEQ ID NO: 3768 - DNA, 16 bp, synthetic construct
  misc_feature 1..16: note = synthetic [barcode part1]
  source 1..16: mol_type = other DNA
actcgtagttgttctg

SEQ ID NO: 3769 - DNA, 16 bp, synthetic construct
  misc_feature 1..16: note = synthetic [barcode part1]
  source 1..16: mol_type = other DNA
aggtaaggcagtatct

SEQ ID NO: 3770 - DNA, 16 bp, synthetic construct
  misc_feature 1..16: note = synthetic [barcode part1]
  source 1..16: mol_type = other DNA
tagacgtaccagaggc

SEQ ID NO: 3771 - DNA, 16 bp, synthetic construct
  misc_feature 1..16: note = synthetic [barcode part1]
  source 1..16: mol_type = other DNA
cagatacaatccgtgc

SEQ ID NO: 3772 - DNA, 16 bp, synthetic construct
  misc_feature 1..16: note = synthetic [barcode part1]
  source 1..16: mol_type = other DNA
taactctcacgtaacc

SEQ ID NO: 3773 - DNA, 16 bp, synthetic construct
  misc_feature 1..16: note = synthetic [barcode part1]
  source 1..16: mol_type = other DNA
gtctgaagttctactc

SEQ ID NO: 3774 - DNA, 16 bp, synthetic construct
  misc_feature 1..16: note = synthetic [barcode part1]
  source 1..16: mol_type = other DNA
gttacgttgcaccaag

SEQ ID NO: 3775 - DNA, 16 bp, synthetic construct
  misc_feature 1..16: note = synthetic [barcode part1]
  source 1..16: mol_type = other DNA
ataggaacgactcggc

SEQ ID NO: 3776 - DNA, 16 bp, synthetic construct
  misc_feature 1..16: note = synthetic [barcode part1]
  source 1..16: mol_type = other DNA
gactgcagttggtgtt

SEQ ID NO: 3777 - DNA, 16 bp, synthetic construct
  misc_feature 1..16: note = synthetic [barcode part1]
  source 1..16: mol_type = other DNA
gacctctgtgcctaac

SEQ ID NO: 3778 - DNA, 16 bp, synthetic construct
  misc_feature 1..16: note = synthetic [barcode part1]
  source 1..16: mol_type = other DNA
agtactgactgcagtc

SEQ ID NO: 3779 - DNA, 16 bp, synthetic construct
  misc_feature 1..16: note = synthetic [barcode part1]
  source 1..16: mol_type = other DNA
gtcgcaggacgaatac

SEQ ID NO: 3780 - DNA, 16 bp, synthetic construct
  misc_feature 1..16: note = synthetic [barcode part1]
  source 1..16: mol_type = other DNA
caaggtgatagttgtg

SEQ ID NO: 3781 - DNA, 16 bp, synthetic construct
  misc_feature 1..16: note = synthetic [barcode part1]
  source 1..16: mol_type = other DNA
tgcgatagacgaacgc

SEQ ID NO: 3782 - DNA, 16 bp, synthetic construct
  misc_feature 1..16: note = synthetic [barcode part1]
  source 1..16: mol_type = other DNA
aactctcttaggcgtt

SEQ ID NO: 3783 - DNA, 16 bp, synthetic construct
  misc_feature 1..16: note = synthetic [barcode part1]
  source 1..16: mol_type = other DNA
gagattcgtaggtaac

SEQ ID NO: 3784 - DNA, 16 bp, synthetic construct
  misc_feature 1..16: note = synthetic [barcode part1]
  source 1..16: mol_type = other DNA
tgtgcagacctcctgt

SEQ ID NO: 3785 - DNA, 16 bp, synthetic construct
  misc_feature 1..16: note = synthetic [barcode part1]
  source 1..16: mol_type = other DNA
acggaacagacagtag

SEQ ID NO: 3786 - DNA, 16 bp, synthetic construct
  misc_feature 1..16: note = synthetic [barcode part1]
  source 1..16: mol_type = other DNA
ttcgccagttatcctc

SEQ ID NO: 3787 - DNA, 16 bp, synthetic construct
  misc_feature 1..16: note = synthetic [barcode part1]
  source 1..16: mol_type = other DNA
tgttcagagaacaacg

SEQ ID NO: 3788 - DNA, 16 bp, synthetic construct
  misc_feature 1..16: note = synthetic [barcode part1]
  source 1..16: mol_type = other DNA
gtcggtagacaacggt

SEQ ID NO: 3789 - DNA, 16 bp, synthetic construct
  misc_feature 1..16: note = synthetic [barcode part1]
  source 1..16: mol_type = other DNA
gaaccttgcactacag

SEQ ID NO: 3790 - DNA, 16 bp, synthetic construct
  misc_feature 1..16: note = synthetic [barcode part1]
  source 1..16: mol_type = other DNA
agaactcgacgaatac

SEQ ID NO: 3791 - DNA, 16 bp, synthetic construct
  misc_feature 1..16: note = synthetic [barcode part1]
  source 1..16: mol_type = other DNA
gtctgtagttagagag

SEQ ID NO: 3792 - DNA, 16 bp, synthetic construct
  misc_feature 1..16: note = synthetic [barcode part1]
  source 1..16: mol_type = other DNA
tcggagtctatctgtt

SEQ ID NO: 3793 - DNA, 16 bp, synthetic construct
  misc_feature 1..16: note = synthetic [barcode part1]
  source 1..16: mol_type = other DNA
tactgtccttgtgagt

SEQ ID NO: 3794 - DNA, 16 bp, synthetic construct
  misc_feature 1..16: note = synthetic [barcode part1]
  source 1..16: mol_type = other DNA
gcaaccagttggtact

SEQ ID NO: 3795 - DNA, 16 bp, synthetic construct
  misc_feature 1..16: note = synthetic [barcode part1]
  source 1..16: mol_type = other DNA
gataaccggagacacc

SEQ ID NO: 3796 - DNA, 16 bp, synthetic construct
  misc_feature 1..16: note = synthetic [barcode part1]
  source 1..16: mol_type = other DNA
tgacaattgcgtctct

SEQ ID NO: 3797 - DNA, 16 bp, synthetic construct
  misc_feature 1..16: note = synthetic [barcode part1]
  source 1..16: mol_type = other DNA
cgaaggtattctcacg

SEQ ID NO: 3798 - DNA, 16 bp, synthetic construct
  misc_feature 1..16: note = synthetic [barcode part1]
  source 1..16: mol_type = other DNA
tgcaagtcactcgaac

SEQ ID NO: 3799 - DNA, 16 bp, synthetic construct
  misc_feature 1..16: note = synthetic [barcode part1]
  source 1..16: mol_type = other DNA
tgtgtggtcgtcacct

SEQ ID NO: 3800 - DNA, 16 bp, synthetic construct
  misc_feature 1..16: note = synthetic [barcode part1]
  source 1..16: mol_type = other DNA
tattcgttgtccgtcc

SEQ ID NO: 3801 - DNA, 16 bp, synthetic construct
  misc_feature 1..16: note = synthetic [barcode part1]
  source 1..16: mol_type = other DNA
acgagttcgcagattc

SEQ ID NO: 3802 - DNA, 16 bp, synthetic construct
  misc_feature 1..16: note = synthetic [barcode part1]
  source 1..16: mol_type = other DNA
agaagactctacgagt

SEQ ID NO: 3803 - DNA, 16 bp, synthetic construct
  misc_feature 1..16: note = synthetic [barcode part1]
  source 1..16: mol_type = other DNA
gtggtcaaccagtact

SEQ ID NO: 3804 - DNA, 16 bp, synthetic construct
  misc_feature 1..16: note = synthetic [barcode part1]
  source 1..16: mol_type = other DNA
gtatcaccaggcgaag

SEQ ID NO: 3805 - DNA, 16 bp, synthetic construct
  misc_feature 1..16: note = synthetic [barcode part1]
  source 1..16: mol_type = other DNA
tacgtggcggaaggtt

SEQ ID NO: 3806 - DNA, 16 bp, synthetic construct
  misc_feature 1..16: note = synthetic [barcode part1]
  source 1..16: mol_type = other DNA
cgatatcgtccactcg

SEQ ID NO: 3807 - DNA, 16 bp, synthetic construct
  misc_feature 1..16: note = synthetic [barcode part1]
  source 1..16: mol_type = other DNA
actcttacagagacgc

SEQ ID NO: 3808 - DNA, 16 bp, synthetic construct
  misc_feature 1..16: note = synthetic [barcode part1]
  source 1..16: mol_type = other DNA
gatcactactcttgtg

SEQ ID NO: 3809 - DNA, 16 bp, synthetic construct
  misc_feature 1..16: note = synthetic [barcode part1]
  source 1..16: mol_type = other DNA
tccagaagttgcaacc

SEQ ID NO: 3810 - DNA, 16 bp, synthetic construct
  misc_feature 1..16: note = synthetic [barcode part1]
  source 1..16: mol_type = other DNA
aaggacgacaatccgc

SEQ ID NO: 3811 - DNA, 16 bp, synthetic construct
  misc_feature 1..16: note = synthetic [barcode part1]
  source 1..16: mol_type = other DNA
tctcttaagacacctg

SEQ ID NO: 3812 - DNA, 16 bp, synthetic construct
  misc_feature 1..16: note = synthetic [barcode part1]
  source 1..16: mol_type = other DNA
gtgccaactccactgt

SEQ ID NO: 3813 - DNA, 16 bp, synthetic construct
  misc_feature 1..16: note = synthetic [barcode part1]
  source 1..16: mol_type = other DNA
ttgatagaggcacagt

SEQ ID NO: 3814 - DNA, 16 bp, synthetic construct
  misc_feature 1..16: note = synthetic [barcode part1]
  source 1..16: mol_type = other DNA
accaacgagactaagt

SEQ ID NO: 3815 - DNA, 16 bp, synthetic construct
  misc_feature 1..16: note = synthetic [barcode part1]
  source 1..16: mol_type = other DNA
atactctaatccggtc

SEQ ID NO: 3816 - DNA, 16 bp, synthetic construct
  misc_feature 1..16: note = synthetic [barcode part1]
  source 1..16: mol_type = other DNA
actgttgcaacctgag

SEQ ID NO: 3817 - DNA, 16 bp, synthetic construct
  misc_feature 1..16: note = synthetic [barcode part1]
  source 1..16: mol_type = other DNA
cggataccttcgtcgt

SEQ ID NO: 3818 - DNA, 16 bp, synthetic construct
  misc_feature 1..16: note = synthetic [barcode part1]
  source 1..16: mol_type = other DNA
gccacttgagtagtac

SEQ ID NO: 3819 - DNA, 16 bp, synthetic construct
  misc_feature 1..16: note = synthetic [barcode part1]
  source 1..16: mol_type = other DNA
tcacaggatccagact

SEQ ID NO: 3820 - DNA, 16 bp, synthetic construct
  misc_feature 1..16: note = synthetic [barcode part1]
  source 1..16: mol_type = other DNA
tcagtccaggtacctc

SEQ ID NO: 3821 - DNA, 16 bp, synthetic construct
  misc_feature 1..16: note = synthetic [barcode part1]
  source 1..16: mol_type = other DNA
taagttggtacctcct

SEQ ID NO: 3822 - DNA, 16 bp, synthetic construct
  misc_feature 1..16: note = synthetic [barcode part1]
  source 1..16: mol_type = other DNA
gtgtaggattcagtag

SEQ ID NO: 3823 - DNA, 16 bp, synthetic construct
  misc_feature 1..16: note = synthetic [barcode part1]
  source 1..16: mol_type = other DNA
cggtgtcgtaatactg

SEQ ID NO: 3824 - DNA, 16 bp, synthetic construct
  misc_feature 1..16: note = synthetic [barcode part1]
  source 1..16: mol_type = other DNA
gagacgatctaggcac

SEQ ID NO: 3825 - DNA, 16 bp, synthetic construct
  misc_feature 1..16: note = synthetic [barcode part1]
  source 1..16: mol_type = other DNA
agtatagtaagtcgcg

SEQ ID NO: 3826 - DNA, 16 bp, synthetic construct
  misc_feature 1..16: note = synthetic [barcode part1]
  source 1..16: mol_type = other DNA
cgaacgaccacgatag

SEQ ID NO: 3827 - DNA, 16 bp, synthetic construct
  misc_feature 1..16: note = synthetic [barcode part1]
  source 1..16: mol_type = other DNA
cactgtccaggtctac

SEQ ID NO: 3828 - DNA, 16 bp, synthetic construct
  misc_feature 1..16: note = synthetic [barcode part1]
  source 1..16: mol_type = other DNA
aatatacggtctctcc

SEQ ID NO: 3829 - DNA, 16 bp, synthetic construct
  misc_feature 1..16: note = synthetic [barcode part1]
  source 1..16: mol_type = other DNA
tagtgtccgcctatcg

SEQ ID NO: 3830 - DNA, 16 bp, synthetic construct
  misc_feature 1..16: note = synthetic [barcode part1]
  source 1..16: mol_type = other DNA
ttgacggtagaagtgt

SEQ ID NO: 3831 - DNA, 16 bp, synthetic construct
  misc_feature 1..16: note = synthetic [barcode part1]
  source 1..16: mol_type = other DNA
gtacctcgatctgacc

SEQ ID NO: 3832 - DNA, 16 bp, synthetic construct
  misc_feature 1..16: note = synthetic [barcode part1]
  source 1..16: mol_type = other DNA
ccagacaggtattcgt

SEQ ID NO: 3833 - DNA, 16 bp, synthetic construct
  misc_feature 1..16: note = synthetic [barcode part1]
  source 1..16: mol_type = other DNA
ttcgaaggtgcgtatc

SEQ ID NO: 3834 - DNA, 16 bp, synthetic construct
  misc_feature 1..16: note = synthetic [barcode part1]
  source 1..16: mol_type = other DNA
ttgtgagttacacggc

SEQ ID NO: 3835 - DNA, 16 bp, synthetic construct
  misc_feature 1..16: note = synthetic [barcode part1]
  source 1..16: mol_type = other DNA
gaacgttcttgttacc

SEQ ID NO: 3836 - DNA, 16 bp, synthetic construct
  misc_feature 1..16: note = synthetic [barcode part1]
  source 1..16: mol_type = other DNA
gtcggcgtaggaagtt

SEQ ID NO: 3837 - DNA, 16 bp, synthetic construct
  misc_feature 1..16: note = synthetic [barcode part1]
  source 1..16: mol_type = other DNA
tgcctaacttcgccag

SEQ ID NO: 3838 - DNA, 16 bp, synthetic construct
  misc_feature 1..16: note = synthetic [barcode part1]
  source 1..16: mol_type = other DNA
aatatactcggaaggc

SEQ ID NO: 3839 - DNA, 16 bp, synthetic construct
  misc_feature 1..16: note = synthetic [barcode part1]
  source 1..16: mol_type = other DNA
tgtcctctcagaccag

SEQ ID NO: 3840 - DNA, 16 bp, synthetic construct
  misc_feature 1..16: note = synthetic [barcode part1]
  source 1..16: mol_type = other DNA
caagtcggattaccgt

SEQ ID NO: 3841 - DNA, 16 bp, synthetic construct
  misc_feature 1..16: note = synthetic [barcode part1]
  source 1..16: mol_type = other DNA
attcgaggatagaacc

SEQ ID NO: 3842 - DNA, 16 bp, synthetic construct
  misc_feature 1..16: note = synthetic [barcode part1]
  source 1..16: mol_type = other DNA
ttcgtacctagtgact

SEQ ID NO: 3843 - DNA, 16 bp, synthetic construct
  misc_feature 1..16: note = synthetic [barcode part1]
  source 1..16: mol_type = other DNA
ttactgtccgcaggtc

SEQ ID NO: 3844 - DNA, 16 bp, synthetic construct
  misc_feature 1..16: note = synthetic [barcode part1]
  source 1..16: mol_type = other DNA
taacgcgcagtgaggt

SEQ ID NO: 3845 - DNA, 16 bp, synthetic construct
  misc_feature 1..16: note = synthetic [barcode part1]
  source 1..16: mol_type = other DNA
cacgtcggagaagttg

SEQ ID NO: 3846 - DNA, 16 bp, synthetic construct
  misc_feature 1..16: note = synthetic [barcode part1]
  source 1..16: mol_type = other DNA
tcaacacgactaagag

SEQ ID NO: 3847 - DNA, 16 bp, synthetic construct
  misc_feature 1..16: note = synthetic [barcode part1]
  source 1..16: mol_type = other DNA
cacagagaacttagtg

SEQ ID NO: 3848 - DNA, 16 bp, synthetic construct
  misc_feature 1..16: note = synthetic [barcode part1]
  source 1..16: mol_type = other DNA
caggacacaccgatag

SEQ ID NO: 3849 - DNA, 16 bp, synthetic construct
  misc_feature 1..16: note = synthetic [barcode part1]
  source 1..16: mol_type = other DNA
tcgaatcgcaccttcg

SEQ ID NO: 3850 - DNA, 16 bp, synthetic construct
  misc_feature 1..16: note = synthetic [barcode part1]
  source 1..16: mol_type = other DNA
cctagaactgactgac

SEQ ID NO: 3851 - DNA, 16 bp, synthetic construct
  misc_feature 1..16: note = synthetic [barcode part1]
  source 1..16: mol_type = other DNA
tctctaacggtacgcc

SEQ ID NO: 3852 - DNA, 16 bp, synthetic construct
  misc_feature 1..16: note = synthetic [barcode part1]
  source 1..16: mol_type = other DNA
aactagacttgcgaag

SEQ ID NO: 3853 - DNA, 16 bp, synthetic construct
  misc_feature 1..16: note = synthetic [barcode part1]
  source 1..16: mol_type = other DNA
tcgtctgactctaggc

SEQ ID NO: 3854 - DNA, 16 bp, synthetic construct
  misc_feature 1..16: note = synthetic [barcode part1]
  source 1..16: mol_type = other DNA
gtagagaacgccttct

SEQ ID NO: 3855 - DNA, 16 bp, synthetic construct
  misc_feature 1..16: note = synthetic [barcode part1]
  source 1..16: mol_type = other DNA
cacttgaggaataacg

SEQ ID NO: 3856 - DNA, 16 bp, synthetic construct
  misc_feature 1..16: note = synthetic [barcode part1]
  source 1..16: mol_type = other DNA
accgcctacttacggt

SEQ ID NO: 3857 - DNA, 16 bp, synthetic construct
  misc_feature 1..16: note = synthetic [barcode part1]
  source 1..16: mol_type = other DNA
aggaccactagacgtg

SEQ ID NO: 3858 - DNA, 16 bp, synthetic construct
  misc_feature 1..16: note = synthetic [barcode part1]
  source 1..16: mol_type = other DNA
agattcgtaaggaacc

SEQ ID NO: 3859 - DNA, 16 bp, synthetic construct
  misc_feature 1..16: note = synthetic [barcode part1]
  source 1..16: mol_type = other DNA
ccaattgtctcttccg

SEQ ID NO: 3860 - DNA, 16 bp, synthetic construct
  misc_feature 1..16: note = synthetic [barcode part1]
  source 1..16: mol_type = other DNA
gcacacaagaactcct

SEQ ID NO: 3861 - DNA, 16 bp, synthetic construct
  misc_feature 1..16: note = synthetic [barcode part1]
  source 1..16: mol_type = other DNA
tgcgcggacagttatt

SEQ ID NO: 3862 - DNA, 16 bp, synthetic construct
  misc_feature 1..16: note = synthetic [barcode part1]
  source 1..16: mol_type = other DNA
gttctcggtgatctgc

SEQ ID NO: 3863 - DNA, 16 bp, synthetic construct
  misc_feature 1..16: note = synthetic [barcode part1]
  source 1..16: mol_type = other DNA
attcaggtctgttacc

SEQ ID NO: 3864 - DNA, 16 bp, synthetic construct
  misc_feature 1..16: note = synthetic [barcode part1]
  source 1..16: mol_type = other DNA
tctatacgttatcggc

SEQ ID NO: 3865 - DNA, 16 bp, synthetic construct
  misc_feature 1..16: note = synthetic [barcode part1]
  source 1..16: mol_type = other DNA
attcgtgatcaggaag

SEQ ID NO: 3866 - DNA, 16 bp, synthetic construct
  misc_feature 1..16: note = synthetic [barcode part1]
  source 1..16: mol_type = other DNA
cggagataagttatcg

SEQ ID NO: 3867 - DNA, 16 bp, synthetic construct
  misc_feature 1..16: note = synthetic [barcode part1]
  source 1..16: mol_type = other DNA
cctgcgttgtatctct

SEQ ID NO: 3868 - DNA, 16 bp, synthetic construct
  misc_feature 1..16: note = synthetic [barcode part1]
  source 1..16: mol_type = other DNA
acgttctgactgttgt

SEQ ID NO: 3869 - DNA, 16 bp, synthetic construct
  misc_feature 1..16: note = synthetic [barcode part1]
  source 1..16: mol_type = other DNA
tcttgtattgagtcgc

SEQ ID NO: 3870 - DNA, 16 bp, synthetic construct
  misc_feature 1..16: note = synthetic [barcode part1]
  source 1..16: mol_type = other DNA
tactatcgtgaggtgc

SEQ ID NO: 3871 - DNA, 16 bp, synthetic construct
  misc_feature 1..16: note = synthetic [barcode part1]
  source 1..16: mol_type = other DNA
gtgtcctaatccaatc

SEQ ID NO: 3872 - DNA, 16 bp, synthetic construct
  misc_feature 1..16: note = synthetic [barcode part1]
  source 1..16: mol_type = other DNA
cactgtctagaagacc

SEQ ID NO: 3873 - DNA, 16 bp, synthetic construct
  misc_feature 1..16: note = synthetic [barcode part1]
  source 1..16: mol_type = other DNA
cagaatagtgaggcag

SEQ ID NO: 3874 - DNA, 16 bp, synthetic construct
  misc_feature 1..16: note = synthetic [barcode part1]
  source 1..16: mol_type = other DNA
tccacctgttcacttg

SEQ ID NO: 3875 - DNA, 16 bp, synthetic construct
  misc_feature 1..16: note = synthetic [barcode part1]
  source 1..16: mol_type = other DNA
ccgcgaacagagaatc

SEQ ID NO: 3876 - DNA, 16 bp, synthetic construct
  misc_feature 1..16: note = synthetic [barcode part1]
  source 1..16: mol_type = other DNA
tcctgtgagtcaccac

SEQ ID NO: 3877 - DNA, 16 bp, synthetic construct
  misc_feature 1..16: note = synthetic [barcode part1]
  source 1..16: mol_type = other DNA
accagaccgaactgtt

SEQ ID NO: 3878 - DNA, 16 bp, synthetic construct
  misc_feature 1..16: note = synthetic [barcode part1]
  source 1..16: mol_type = other DNA
aactcgtggtggagtg

SEQ ID NO: 3879 - DNA, 16 bp, synthetic construct
  misc_feature 1..16: note = synthetic [barcode part1]
  source 1..16: mol_type = other DNA
gtccgtggaagtagtg

SEQ ID NO: 3880 - DNA, 16 bp, synthetic construct
  misc_feature 1..16: note = synthetic [barcode part1]
  source 1..16: mol_type = other DNA
aattggcgacctcaac

SEQ ID NO: 3881 - DNA, 16 bp, synthetic construct
  misc_feature 1..16: note = synthetic [barcode part1]
  source 1..16: mol_type = other DNA
tggaatcggtcaactc

SEQ ID NO: 3882 - DNA, 16 bp, synthetic construct
  misc_feature 1..16: note = synthetic [barcode part1]
  source 1..16: mol_type = other DNA
gtactggtggcgaagt

SEQ ID NO: 3883 - DNA, 16 bp, synthetic construct
  misc_feature 1..16: note = synthetic [barcode part1]
  source 1..16: mol_type = other DNA
aacgttcaagtgtccg

SEQ ID NO: 3884 - DNA, 16 bp, synthetic construct
  misc_feature 1..16: note = synthetic [barcode part1]
  source 1..16: mol_type = other DNA
aacttaggcgttctct

SEQ ID NO: 3885 - DNA, 16 bp, synthetic construct
  misc_feature 1..16: note = synthetic [barcode part1]
  source 1..16: mol_type = other DNA
tacaacaggacgaact

SEQ ID NO: 3886 - DNA, 16 bp, synthetic construct
  misc_feature 1..16: note = synthetic [barcode part1]
  source 1..16: mol_type = other DNA
gttagtggaacgtctc

SEQ ID NO: 3887 - DNA, 16 bp, synthetic construct
  misc_feature 1..16: note = synthetic [barcode part1]
  source 1..16: mol_type = other DNA
aggacgaacgagttcc

SEQ ID NO: 3888 - DNA, 16 bp, synthetic construct
  misc_feature 1..16: note = synthetic [barcode part1]
  source 1..16: mol_type = other DNA
gtcttagatcacggtg

SEQ ID NO: 3889 - DNA, 16 bp, synthetic construct
  misc_feature 1..16: note = synthetic [barcode part1]
  source 1..16: mol_type = other DNA
tgactgagtaccgtac

SEQ ID NO: 3890 - DNA, 16 bp, synthetic construct
  misc_feature 1..16: note = synthetic [barcode part1]
  source 1..16: mol_type = other DNA
gtgacgactattaccg

SEQ ID NO: 3891 - DNA, 16 bp, synthetic construct
  misc_feature 1..16: note = synthetic [barcode part1]
  source 1..16: mol_type = other DNA
caggacaggattagag

SEQ ID NO: 3892 - DNA, 16 bp, synthetic construct
  misc_feature 1..16: note = synthetic [barcode part1]
  source 1..16: mol_type = other DNA
attctcaatccggtac

SEQ ID NO: 3893 - DNA, 16 bp, synthetic construct
  misc_feature 1..16: note = synthetic [barcode part1]
  source 1..16: mol_type = other DNA
gtcaagtacaaggatc

SEQ ID NO: 3894 - DNA, 16 bp, synthetic construct
  misc_feature 1..16: note = synthetic [barcode part1]
  source 1..16: mol_type = other DNA
acgcctcttggcagtt

SEQ ID NO: 3895 - DNA, 16 bp, synthetic construct
  misc_feature 1..16: note = synthetic [barcode part1]
  source 1..16: mol_type = other DNA
ccgtaggttactgtcc

SEQ ID NO: 3896 - DNA, 16 bp, synthetic construct
  misc_feature 1..16: note = synthetic [barcode part1]
  source 1..16: mol_type = other DNA
tgaagtccagtactgc

SEQ ID NO: 3897 - DNA, 16 bp, synthetic construct
  misc_feature 1..16: note = synthetic [barcode part1]
  source 1..16: mol_type = other DNA
acaaggccaggtactg

SEQ ID NO: 3898 - DNA, 16 bp, synthetic construct
  misc_feature 1..16: note = synthetic [barcode part1]
  source 1..16: mol_type = other DNA
gtccgtcttacgacgt

SEQ ID NO: 3899 - DNA, 16 bp, synthetic construct
  misc_feature 1..16: note = synthetic [barcode part1]
  source 1..16: mol_type = other DNA
actggttgtgttgcag

SEQ ID NO: 3900 - DNA, 16 bp, synthetic construct
  misc_feature 1..16: note = synthetic [barcode part1]
  source 1..16: mol_type = other DNA
attgatacgaggaacc

SEQ ID NO: 3901 - DNA, 16 bp, synthetic construct
  misc_feature 1..16: note = synthetic [barcode part1]
  source 1..16: mol_type = other DNA
tacacacggagagaag

SEQ ID NO: 3902 - DNA, 16 bp, synthetic construct
  misc_feature 1..16: note = synthetic [barcode part1]
  source 1..16: mol_type = other DNA
tctccgtacttctgtg

SEQ ID NO: 3903 - DNA, 16 bp, synthetic construct
  misc_feature 1..16: note = synthetic [barcode part1]
  source 1..16: mol_type = other DNA
cagattacgcgcctct

SEQ ID NO: 3904 - DNA, 16 bp, synthetic construct
  misc_feature 1..16: note = synthetic [barcode part1]
  source 1..16: mol_type = other DNA
tcagacgcgagacagt

SEQ ID NO: 3905 - DNA, 16 bp, synthetic construct
  misc_feature 1..16: note = synthetic [barcode part1]
  source 1..16: mol_type = other DNA
cgcgatacactacagt

SEQ ID NO: 3906 - DNA, 16 bp, synthetic construct
  misc_feature 1..16: note = synthetic [barcode part1]
  source 1..16: mol_type = other DNA
aagactactcttggcg

SEQ ID NO: 3907 - DNA, 16 bp, synthetic construct
  misc_feature 1..16: note = synthetic [barcode part1]
  source 1..16: mol_type = other DNA
gtcttgataaccggtg

SEQ ID NO: 3908 - DNA, 16 bp, synthetic construct
  misc_feature 1..16: note = synthetic [barcode part1]
  source 1..16: mol_type = other DNA
cacgcgtagttaatcg

SEQ ID NO: 3909 - DNA, 16 bp, synthetic construct
  misc_feature 1..16: note = synthetic [barcode part1]
  source 1..16: mol_type = other DNA
cggcagtgtgttcttc

SEQ ID NO: 3910 - DNA, 16 bp, synthetic construct
  misc_feature 1..16: note = synthetic [barcode part1]
  source 1..16: mol_type = other DNA
actggattgagttgcc

SEQ ID NO: 3911 - DNA, 16 bp, synthetic construct
  misc_feature 1..16: note = synthetic [barcode part1]
  source 1..16: mol_type = other DNA
cgcgtgagagttagac

SEQ ID NO: 3912 - DNA, 16 bp, synthetic construct
  misc_feature 1..16: note = synthetic [barcode part1]
  source 1..16: mol_type = other DNA
acgtactaacgtaccg

SEQ ID NO: 3913 - DNA, 16 bp, synthetic construct
  misc_feature 1..16: note = synthetic [barcode part1]
  source 1..16: mol_type = other DNA
tccgttctacctactg

SEQ ID NO: 3914 - DNA, 16 bp, synthetic construct
  misc_feature 1..16: note = synthetic [barcode part1]
  source 1..16: mol_type = other DNA
cagaacggtccaagtg

SEQ ID NO: 3915 - DNA, 16 bp, synthetic construct
  misc_feature 1..16: note = synthetic [barcode part1]
  source 1..16: mol_type = other DNA
gttcactctgtccact

SEQ ID NO: 3916 - DNA, 16 bp, synthetic construct
  misc_feature 1..16: note = synthetic [barcode part1]
  source 1..16: mol_type = other DNA
aggagatcttggcctt

SEQ ID NO: 3917 - DNA, 16 bp, synthetic construct
  misc_feature 1..16: note = synthetic [barcode part1]
  source 1..16: mol_type = other DNA
cagacagttgtgatag

SEQ ID NO: 3918 - DNA, 16 bp, synthetic construct
  misc_feature 1..16: note = synthetic [barcode part1]
  source 1..16: mol_type = other DNA
tcgtactgaactgtct

SEQ ID NO: 3919 - DNA, 16 bp, synthetic construct
  misc_feature 1..16: note = synthetic [barcode part1]
  source 1..16: mol_type = other DNA
tgcgaatacctacgac

SEQ ID NO: 3920 - DNA, 16 bp, synthetic construct
  misc_feature 1..16: note = synthetic [barcode part1]
  source 1..16: mol_type = other DNA
tcctgaacgcctactg

SEQ ID NO: 3921 - DNA, 16 bp, synthetic construct
  misc_feature 1..16: note = synthetic [barcode part1]
  source 1..16: mol_type = other DNA
gtagaattgtccagag

SEQ ID NO: 3922 - DNA, 16 bp, synthetic construct
  misc_feature 1..16: note = synthetic [barcode part1]
  source 1..16: mol_type = other DNA
gagtcgtatagtccgt

SEQ ID NO: 3923 - DNA, 16 bp, synthetic construct
  misc_feature 1..16: note = synthetic [barcode part1]
  source 1..16: mol_type = other DNA
cgttcaacgcaagttg

SEQ ID NO: 3924 - DNA, 16 bp, synthetic construct
  misc_feature 1..16: note = synthetic [barcode part1]
  source 1..16: mol_type = other DNA
gtaacggtcgttactg

SEQ ID NO: 3925 - DNA, 16 bp, synthetic construct
  misc_feature 1..16: note = synthetic [barcode part1]
  source 1..16: mol_type = other DNA
gtcaaggaaggaatcg

SEQ ID NO: 3926 - DNA, 16 bp, synthetic construct
  misc_feature 1..16: note = synthetic [barcode part1]
  source 1..16: mol_type = other DNA
accacggcctacttac

SEQ ID NO: 3927 - DNA, 16 bp, synthetic construct
  misc_feature 1..16: note = synthetic [barcode part1]
  source 1..16: mol_type = other DNA
cctgaccgtattgatt

SEQ ID NO: 3928 - DNA, 16 bp, synthetic construct
  misc_feature 1..16: note = synthetic [barcode part1]
  source 1..16: mol_type = other DNA
agttggcgaccttagt

SEQ ID NO: 3929 - DNA, 16 bp, synthetic construct
  misc_feature 1..16: note = synthetic [barcode part1]
  source 1..16: mol_type = other DNA
attggcactgtgcaac

SEQ ID NO: 3930 - DNA, 16 bp, synthetic construct
  misc_feature 1..16: note = synthetic [barcode part1]
  source 1..16: mol_type = other DNA
cgtacgacttaatcct

SEQ ID NO: 3931 - DNA, 16 bp, synthetic construct
  misc_feature 1..16: note = synthetic [barcode part1]
  source 1..16: mol_type = other DNA
cgtgacgcacttactc

SEQ ID NO: 3932 - DNA, 16 bp, synthetic construct
  misc_feature 1..16: note = synthetic [barcode part1]
  source 1..16: mol_type = other DNA
tgacgttcctaagacg

SEQ ID NO: 3933 - DNA, 16 bp, synthetic construct
  misc_feature 1..16: note = synthetic [barcode part1]
  source 1..16: mol_type = other DNA
aactacgcgtacagtc

SEQ ID NO: 3934 - DNA, 16 bp, synthetic construct
  misc_feature 1..16: note = synthetic [barcode part1]
  source 1..16: mol_type = other DNA
tcactatccacttcgc

SEQ ID NO: 3935 - DNA, 16 bp, synthetic construct
  misc_feature 1..16: note = synthetic [barcode part1]
  source 1..16: mol_type = other DNA
gcgcaacttctgatcc

SEQ ID NO: 3936 - DNA, 16 bp, synthetic construct
  misc_feature 1..16: note = synthetic [barcode part1]
  source 1..16: mol_type = other DNA
gagttatcgccagact

SEQ ID NO: 3937 - DNA, 16 bp, synthetic construct
  misc_feature 1..16: note = synthetic [barcode part1]
  source 1..16: mol_type = other DNA
tccactgcgattcttc

SEQ ID NO: 3938 - DNA, 16 bp, synthetic construct
  misc_feature 1..16: note = synthetic [barcode part1]
  source 1..16: mol_type = other DNA
tgcgatacctacttac

SEQ ID NO: 3939 - DNA, 16 bp, synthetic construct
  misc_feature 1..16: note = synthetic [barcode part1]
  source 1..16: mol_type = other DNA
tctgtacttctcgcgt

SEQ ID NO: 3940 - DNA, 16 bp, synthetic construct
  misc_feature 1..16: note = synthetic [barcode part1]
  source 1..16: mol_type = other DNA
ccgcgtccttatattc

SEQ ID NO: 3941 - DNA, 16 bp, synthetic construct
  misc_feature 1..16: note = synthetic [barcode part1]
  source 1..16: mol_type = other DNA
aagtccgtctaactct

SEQ ID NO: 3942 - DNA, 16 bp, synthetic construct
  misc_feature 1..16: note = synthetic [barcode part1]
  source 1..16: mol_type = other DNA
gtactgacagtaagac

SEQ ID NO: 3943 - DNA, 16 bp, synthetic construct
  misc_feature 1..16: note = synthetic [barcode part1]
  source 1..16: mol_type = other DNA
aaccgcggatcagaac

SEQ ID NO: 3944 - DNA, 16 bp, synthetic construct
  misc_feature 1..16: note = synthetic [barcode part1]
  source 1..16: mol_type = other DNA
tgcgatacgttcgtcc

SEQ ID NO: 3945 - DNA, 16 bp, synthetic construct
  misc_feature 1..16: note = synthetic [barcode part1]
  source 1..16: mol_type = other DNA
ttacgttggacacgac

SEQ ID NO: 3946 - DNA, 16 bp, synthetic construct
  misc_feature 1..16: note = synthetic [barcode part1]
  source 1..16: mol_type = other DNA
tggatctgaacttgcg

SEQ ID NO: 3947 - DNA, 16 bp, synthetic construct
  misc_feature 1..16: note = synthetic [barcode part1]
  source 1..16: mol_type = other DNA
ttagttcgtggttacc

SEQ ID NO: 3948 - DNA, 16 bp, synthetic construct
  misc_feature 1..16: note = synthetic [barcode part1]
  source 1..16: mol_type = other DNA
ataccaggagacggtc

SEQ ID NO: 3949 - DNA, 16 bp, synthetic construct
  misc_feature 1..16: note = synthetic [barcode part1]
  source 1..16: mol_type = other DNA
caattccgaccaaggt

SEQ ID NO: 3950 - DNA, 16 bp, synthetic construct
  misc_feature 1..16: note = synthetic [barcode part1]
  source 1..16: mol_type = other DNA
gtattctggttcggcc

SEQ ID NO: 3951 - DNA, 16 bp, synthetic construct
  misc_feature 1..16: note = synthetic [barcode part1]
  source 1..16: mol_type = other DNA
acaccaactaggtgtc

SEQ ID NO: 3952 - DNA, 16 bp, synthetic construct
  misc_feature 1..16: note = synthetic [barcode part1]
  source 1..16: mol_type = other DNA
gacttactccgagtag

SEQ ID NO: 3953 - DNA, 16 bp, synthetic construct
  misc_feature 1..16: note = synthetic [barcode part1]
  source 1..16: mol_type = other DNA
cgcgtactataacacg

SEQ ID NO: 3954 - DNA, 16 bp, synthetic construct
  misc_feature 1..16: note = synthetic [barcode part1]
  source 1..16: mol_type = other DNA
aaggtagtccgtcact

SEQ ID NO: 3955 - DNA, 16 bp, synthetic construct
  misc_feature 1..16: note = synthetic [barcode part1]
  source 1..16: mol_type = other DNA
aaccaattgcgcgtgt

SEQ ID NO: 3956 - DNA, 16 bp, synthetic construct
  misc_feature 1..16: note = synthetic [barcode part1]
  source 1..16: mol_type = other DNA
ttgtatacacacggcg

SEQ ID NO: 3957 - DNA, 16 bp, synthetic construct
  misc_feature 1..16: note = synthetic [barcode part1]
  source 1..16: mol_type = other DNA
cacctctccgaatcag

SEQ ID NO: 3958 - DNA, 16 bp, synthetic construct
  misc_feature 1..16: note = synthetic [barcode part1]
  source 1..16: mol_type = other DNA
attgattaccgcgacg

SEQ ID NO: 3959 - DNA, 16 bp, synthetic construct
  misc_feature 1..16: note = synthetic [barcode part1]
  source 1..16: mol_type = other DNA
agtgatatccactgcg

SEQ ID NO: 3960 - DNA, 16 bp, synthetic construct
  misc_feature 1..16: note = synthetic [barcode part1]
  source 1..16: mol_type = other DNA
acgttagagttcgtgc

SEQ ID NO: 3961 - DNA, 16 bp, synthetic construct
  misc_feature 1..16: note = synthetic [barcode part1]
  source 1..16: mol_type = other DNA
gcaacgaccgtacaag

SEQ ID NO: 3962 - DNA, 16 bp, synthetic construct
  misc_feature 1..16: note = synthetic [barcode part1]
  source 1..16: mol_type = other DNA
gagacttgagtcctac

SEQ ID NO: 3963 - DNA, 16 bp, synthetic construct
  misc_feature 1..16: note = synthetic [barcode part1]
  source 1..16: mol_type = other DNA
gagaaccttctgatcg

SEQ ID NO: 3964 - DNA, 16 bp, synthetic construct
  misc_feature 1..16: note = synthetic [barcode part1]
  source 1..16: mol_type = other DNA
taatactccgtccgcg

SEQ ID NO: 3965 - DNA, 16 bp, synthetic construct
  misc_feature 1..16: note = synthetic [barcode part1]
  source 1..16: mol_type = other DNA
tgacgagtagacaccg

SEQ ID NO: 3966 - DNA, 16 bp, synthetic construct
  misc_feature 1..16: note = synthetic [barcode part1]
  source 1..16: mol_type = other DNA
cgtgcacttagtcaag

SEQ ID NO: 3967 - DNA, 16 bp, synthetic construct
  misc_feature 1..16: note = synthetic [barcode part1]
  source 1..16: mol_type = other DNA
actctagactgaccag

SEQ ID NO: 3968 - DNA, 16 bp, synthetic construct
  misc_feature 1..16: note = synthetic [barcode part1]
  source 1..16: mol_type = other DNA
tctgacctagtgcacc

SEQ ID NO: 3969 - DNA, 16 bp, synthetic construct
  misc_feature 1..16: note = synthetic [barcode part1]
  source 1..16: mol_type = other DNA
tcctgacgcgcaattc

SEQ ID NO: 3970 - DNA, 16 bp, synthetic construct
  misc_feature 1..16: note = synthetic [barcode part1]
  source 1..16: mol_type = other DNA
tcagtagaggttgtcc

SEQ ID NO: 3971 - DNA, 16 bp, synthetic construct
  misc_feature 1..16: note = synthetic [barcode part1]
  source 1..16: mol_type = other DNA
acacacttccagtccg

SEQ ID NO: 3972 - DNA, 16 bp, synthetic construct
  misc_feature 1..16: note = synthetic [barcode part1]
  source 1..16: mol_type = other DNA
gtgtaaccacgtgatc

SEQ ID NO: 3973 - DNA, 16 bp, synthetic construct
  misc_feature 1..16: note = synthetic [barcode part1]
  source 1..16: mol_type = other DNA
taaccgaaccgtgatc

SEQ ID NO: 3974 - DNA, 16 bp, synthetic construct
  misc_feature 1..16: note = synthetic [barcode part1]
  source 1..16: mol_type = other DNA
aacttgcgatagagtg

SEQ ID NO: 3975 - DNA, 16 bp, synthetic construct
  misc_feature 1..16: note = synthetic [barcode part1]
  source 1..16: mol_type = other DNA
agatcggaatcgagag

SEQ ID NO: 3976 - DNA, 16 bp, synthetic construct
  misc_feature 1..16: note = synthetic [barcode part1]
  source 1..16: mol_type = other DNA
ttagacggcagattcc

SEQ ID NO: 3977 - DNA, 16 bp, synthetic construct
  misc_feature 1..16: note = synthetic [barcode part1]
  source 1..16: mol_type = other DNA
tggaccactaggttgt

SEQ ID NO: 3978 - DNA, 16 bp, synthetic construct
  misc_feature 1..16: note = synthetic [barcode part1]
  source 1..16: mol_type = other DNA
tgcaacactcactcgc

SEQ ID NO: 3979 - DNA, 16 bp, synthetic construct
  misc_feature 1..16: note = synthetic [barcode part1]
  source 1..16: mol_type = other DNA
cagttagtccttcctc

SEQ ID NO: 3980 - DNA, 16 bp, synthetic construct
  misc_feature 1..16: note = synthetic [barcode part1]
  source 1..16: mol_type = other DNA
gtcctggactatagtg

SEQ ID NO: 3981 - DNA, 16 bp, synthetic construct
  misc_feature 1..16: note = synthetic [barcode part1]
  source 1..16: mol_type = other DNA
tccaccaagaacaacc

SEQ ID NO: 3982 - DNA, 16 bp, synthetic construct
  misc_feature 1..16: note = synthetic [barcode part1]
  source 1..16: mol_type = other DNA
caagactagaagaggc

SEQ ID NO: 3983 - DNA, 16 bp, synthetic construct
  misc_feature 1..16: note = synthetic [barcode part1]
  source 1..16: mol_type = other DNA
tgaacacctagtacgc

SEQ ID NO: 3984 - DNA, 16 bp, synthetic construct
  misc_feature 1..16: note = synthetic [barcode part1]
  source 1..16: mol_type = other DNA
cgagactgttgcagtt

SEQ ID NO: 3985 - DNA, 16 bp, synthetic construct
  misc_feature 1..16: note = synthetic [barcode part1]
  source 1..16: mol_type = other DNA
acaacgtacactgcac

SEQ ID NO: 3986 - DNA, 16 bp, synthetic construct
  misc_feature 1..16: note = synthetic [barcode part1]
  source 1..16: mol_type = other DNA
tcacaggcgaggagtt

SEQ ID NO: 3987 - DNA, 16 bp, synthetic construct
  misc_feature 1..16: note = synthetic [barcode part1]
  source 1..16: mol_type = other DNA
taatccggtgaaggcg

SEQ ID NO: 3988 - DNA, 16 bp, synthetic construct
  misc_feature 1..16: note = synthetic [barcode part1]
  source 1..16: mol_type = other DNA
cacagagaccggattg

SEQ ID NO: 3989 - DNA, 16 bp, synthetic construct
  misc_feature 1..16: note = synthetic [barcode part1]
  source 1..16: mol_type = other DNA
ccgaccttagaggatt

SEQ ID NO: 3990 - DNA, 16 bp, synthetic construct
  misc_feature 1..16: note = synthetic [barcode part1]
  source 1..16: mol_type = other DNA
tggtccgttcaacaag

SEQ ID NO: 3991 - DNA, 16 bp, synthetic construct
  misc_feature 1..16: note = synthetic [barcode part1]
  source 1..16: mol_type = other DNA
gcgtaatcacagttgc

SEQ ID NO: 3992 - DNA, 16 bp, synthetic construct
  misc_feature 1..16: note = synthetic [barcode part1]
  source 1..16: mol_type = other DNA
tcctgactcagatatc

SEQ ID NO: 3993 - DNA, 16 bp, synthetic construct
  misc_feature 1..16: note = synthetic [barcode part1]
  source 1..16: mol_type = other DNA
tgcaatcctctgccag

SEQ ID NO: 3994 - DNA, 16 bp, synthetic construct
  misc_feature 1..16: note = synthetic [barcode part1]
  source 1..16: mol_type = other DNA
agaaggaaggaccttg

SEQ ID NO: 3995 - DNA, 16 bp, synthetic construct
  misc_feature 1..16: note = synthetic [barcode part1]
  source 1..16: mol_type = other DNA
gtactgtgcagtgttg

SEQ ID NO: 3996 - DNA, 16 bp, synthetic construct
  misc_feature 1..16: note = synthetic [barcode part1]
  source 1..16: mol_type = other DNA
tcaattcgtagtcgtc

SEQ ID NO: 3997 - DNA, 16 bp, synthetic construct
  misc_feature 1..16: note = synthetic [barcode part1]
  source 1..16: mol_type = other DNA
agacttcaggaggaag

SEQ ID NO: 3998 - DNA, 16 bp, synthetic construct
  misc_feature 1..16: note = synthetic [barcode part1]
  source 1..16: mol_type = other DNA
gtaaccggtcggtatt

SEQ ID NO: 3999 - DNA, 16 bp, synthetic construct
  misc_feature 1..16: note = synthetic [barcode part1]
  source 1..16: mol_type = other DNA
acggacaccgtagtag

SEQ ID NO: 4000 - DNA, 16 bp, synthetic construct
  misc_feature 1..16: note = synthetic [barcode part1]
  source 1..16: mol_type = other DNA
cacgcacagttctaag

SEQ ID NO: 4001 - DNA, 16 bp, synthetic construct
  misc_feature 1..16: note = synthetic [barcode part1]
  source 1..16: mol_type = other DNA
ttctcgcggtaatccg

SEQ ID NO: 4002 - DNA, 16 bp, synthetic construct
  misc_feature 1..16: note = synthetic [barcode part1]
  source 1..16: mol_type = other DNA
tgtgttctctgacagt

SEQ ID NO: 4003 - DNA, 16 bp, synthetic construct
  misc_feature 1..16: note = synthetic [barcode part1]
  source 1..16: mol_type = other DNA
gaatcaagtgcgccag

SEQ ID NO: 4004 - DNA, 16 bp, synthetic construct
  misc_feature 1..16: note = synthetic [barcode part1]
  source 1..16: mol_type = other DNA
aaggacgtgtctctac

SEQ ID NO: 4005 - DNA, 16 bp, synthetic construct
  misc_feature 1..16: note = synthetic [barcode part1]
  source 1..16: mol_type = other DNA
tacctcgaatatctgc

SEQ ID NO: 4006 - DNA, 16 bp, synthetic construct
  misc_feature 1..16: note = synthetic [barcode part1]
  source 1..16: mol_type = other DNA
gaggtgaatctcactc

SEQ ID NO: 4007 - DNA, 16 bp, synthetic construct
  misc_feature 1..16: note = synthetic [barcode part1]
  source 1..16: mol_type = other DNA
accttcgtagaccacc

SEQ ID NO: 4008 - DNA, 16 bp, synthetic construct
  misc_feature 1..16: note = synthetic [barcode part1]
  source 1..16: mol_type = other DNA
ttagattccttcgcag

SEQ ID NO: 4009 - DNA, 16 bp, synthetic construct
  misc_feature 1..16: note = synthetic [barcode part1]
  source 1..16: mol_type = other DNA
tcctagtaggaaccgt

SEQ ID NO: 4010 - DNA, 16 bp, synthetic construct
  misc_feature 1..16: note = synthetic [barcode part1]
  source 1..16: mol_type = other DNA
gtgaacctaatctcct

SEQ ID NO: 4011 - DNA, 16 bp, synthetic construct
  misc_feature 1..16: note = synthetic [barcode part1]
  source 1..16: mol_type = other DNA
ccttgtgaaccactgc

SEQ ID NO: 4012 - DNA, 16 bp, synthetic construct
  misc_feature 1..16: note = synthetic [barcode part1]
  source 1..16: mol_type = other DNA
atctctgatccagtgt

SEQ ID NO: 4013 - DNA, 16 bp, synthetic construct
  misc_feature 1..16: note = synthetic [barcode part1]
  source 1..16: mol_type = other DNA
tggtacgacacgactt

SEQ ID NO: 4014 - DNA, 16 bp, synthetic construct
  misc_feature 1..16: note = synthetic [barcode part1]
  source 1..16: mol_type = other DNA
tcactcgagacagatc

SEQ ID NO: 4015 - DNA, 16 bp, synthetic construct
  misc_feature 1..16: note = synthetic [barcode part1]
  source 1..16: mol_type = other DNA
tagtgatcttccacgt

SEQ ID NO: 4016 - DNA, 16 bp, synthetic construct
  misc_feature 1..16: note = synthetic [barcode part1]
  source 1..16: mol_type = other DNA
gaccgtgaaggttgac

SEQ ID NO: 4017 - DNA, 16 bp, synthetic construct
  misc_feature 1..16: note = synthetic [barcode part1]
  source 1..16: mol_type = other DNA
ttgccaccttaagtac

SEQ ID NO: 4018 - DNA, 16 bp, synthetic construct
  misc_feature 1..16: note = synthetic [barcode part1]
  source 1..16: mol_type = other DNA
cctgcacctaacaatt

SEQ ID NO: 4019 - DNA, 16 bp, synthetic construct
  misc_feature 1..16: note = synthetic [barcode part1]
  source 1..16: mol_type = other DNA
taccgtcctatcactc

SEQ ID NO: 4020 - DNA, 16 bp, synthetic construct
  misc_feature 1..16: note = synthetic [barcode part1]
  source 1..16: mol_type = other DNA
ttacgttaggcgcaac

SEQ ID NO: 4021 - DNA, 16 bp, synthetic construct
  misc_feature 1..16: note = synthetic [barcode part1]
  source 1..16: mol_type = other DNA
tgtacaggaactgaac

SEQ ID NO: 4022 - DNA, 16 bp, synthetic construct
  misc_feature 1..16: note = synthetic [barcode part1]
  source 1..16: mol_type = other DNA
ttcgtcgtgtaagttc

SEQ ID NO: 4023 - DNA, 16 bp, synthetic construct
  misc_feature 1..16: note = synthetic [barcode part1]
  source 1..16: mol_type = other DNA
tacacaatcaccacct

SEQ ID NO: 4024 - DNA, 16 bp, synthetic construct
  misc_feature 1..16: note = synthetic [barcode part1]
  source 1..16: mol_type = other DNA
cgtggaacaataactg

SEQ ID NO: 4025 - DNA, 16 bp, synthetic construct
  misc_feature 1..16: note = synthetic [barcode part1]
  source 1..16: mol_type = other DNA
actcgcgtataggttg

SEQ ID NO: 4026 - DNA, 16 bp, synthetic construct
  misc_feature 1..16: note = synthetic [barcode part1]
  source 1..16: mol_type = other DNA
cagttcctctcctaac

SEQ ID NO: 4027 - DNA, 16 bp, synthetic construct
  misc_feature 1..16: note = synthetic [barcode part1]
  source 1..16: mol_type = other DNA
aggtatctctactacc

SEQ ID NO: 4028 - DNA, 16 bp, synthetic construct
  misc_feature 1..16: note = synthetic [barcode part1]
  source 1..16: mol_type = other DNA
gaggaactgttgacgc

SEQ ID NO: 4029 - DNA, 16 bp, synthetic construct
  misc_feature 1..16: note = synthetic [barcode part1]
  source 1..16: mol_type = other DNA
acctggattcagacgt

SEQ ID NO: 4030 - DNA, 16 bp, synthetic construct
  misc_feature 1..16: note = synthetic [barcode part1]
  source 1..16: mol_type = other DNA
acggagacgacttgac

SEQ ID NO: 4031 - DNA, 16 bp, synthetic construct
  misc_feature 1..16: note = synthetic [barcode part1]
  source 1..16: mol_type = other DNA
gcgacacactgattac

SEQ ID NO: 4032 - DNA, 16 bp, synthetic construct
  misc_feature 1..16: note = synthetic [barcode part1]
  source 1..16: mol_type = other DNA
tcactcgcacctattc

SEQ ID NO: 4033 - DNA, 16 bp, synthetic construct
  misc_feature 1..16: note = synthetic [barcode part1]
  source 1..16: mol_type = other DNA
tacgttcgttcggcgt

SEQ ID NO: 4034 - DNA, 16 bp, synthetic construct
  misc_feature 1..16: note = synthetic [barcode part1]
  source 1..16: mol_type = other DNA
acctgccggtactgtt

SEQ ID NO: 4035 - DNA, 16 bp, synthetic construct
  misc_feature 1..16: note = synthetic [barcode part1]
  source 1..16: mol_type = other DNA
aacgcgcgtgttaatc

SEQ ID NO: 4036 - DNA, 16 bp, synthetic construct
  misc_feature 1..16: note = synthetic [barcode part1]
  source 1..16: mol_type = other DNA
ttcaacctcgacctct

SEQ ID NO: 4037 - DNA, 16 bp, synthetic construct
  misc_feature 1..16: note = synthetic [barcode part1]
  source 1..16: mol_type = other DNA
attcactctgtgacac

SEQ ID NO: 4038 - DNA, 16 bp, synthetic construct
  misc_feature 1..16: note = synthetic [barcode part1]
  source 1..16: mol_type = other DNA
aataaggcgtgaactc

SEQ ID NO: 4039 - DNA, 16 bp, synthetic construct
  misc_feature 1..16: note = synthetic [barcode part1]
  source 1..16: mol_type = other DNA
tggagaggaagtcaac

SEQ ID NO: 4040 - DNA, 16 bp, synthetic construct
  misc_feature 1..16: note = synthetic [barcode part1]
  source 1..16: mol_type = other DNA
aacacactgcagtcac

SEQ ID NO: 4041 - DNA, 16 bp, synthetic construct
  misc_feature 1..16: note = synthetic [barcode part1]
  source 1..16: mol_type = other DNA
tcgtctgcctaagacc

SEQ ID NO: 4042 - DNA, 16 bp, synthetic construct
  misc_feature 1..16: note = synthetic [barcode part1]
  source 1..16: mol_type = other DNA
tagtctcgagactggt

SEQ ID NO: 4043 - DNA, 16 bp, synthetic construct
  misc_feature 1..16: note = synthetic [barcode part1]
  source 1..16: mol_type = other DNA
tggtgtacgactctcc

SEQ ID NO: 4044 - DNA, 16 bp, synthetic construct
  misc_feature 1..16: note = synthetic [barcode part1]
  source 1..16: mol_type = other DNA
tgtacctcgttaggtt

SEQ ID NO: 4045 - DNA, 16 bp, synthetic construct
  misc_feature 1..16: note = synthetic [barcode part1]
  source 1..16: mol_type = other DNA
cgagtgacttatccag

SEQ ID NO: 4046 - DNA, 16 bp, synthetic construct
  misc_feature 1..16: note = synthetic [barcode part1]
  source 1..16: mol_type = other DNA
gatcgatccggaattc

SEQ ID NO: 4047 - DNA, 16 bp, synthetic construct
  misc_feature 1..16: note = synthetic [barcode part1]
  source 1..16: mol_type = other DNA
agtcggatctgattcg

SEQ ID NO: 4048 - DNA, 16 bp, synthetic construct
  misc_feature 1..16: note = synthetic [barcode part1]
  source 1..16: mol_type = other DNA
gtggtatattggtcgc

SEQ ID NO: 4049 - DNA, 16 bp, synthetic construct
  misc_feature 1..16: note = synthetic [barcode part1]
  source 1..16: mol_type = other DNA
atactccacgtggagt

SEQ ID NO: 4050 - DNA, 16 bp, synthetic construct
  misc_feature 1..16: note = synthetic [barcode part1]
  source 1..16: mol_type = other DNA
aggcaacacgtggttg

SEQ ID NO: 4051 - DNA, 16 bp, synthetic construct
  misc_feature 1..16: note = synthetic [barcode part1]
  source 1..16: mol_type = other DNA
tataggaaccgaatcg

SEQ ID NO: 4052 - DNA, 16 bp, synthetic construct
  misc_feature 1..16: note = synthetic [barcode part1]
  source 1..16: mol_type = other DNA
atccaaccaacaaccg

SEQ ID NO: 4053 - DNA, 16 bp, synthetic construct
  misc_feature 1..16: note = synthetic [barcode part1]
  source 1..16: mol_type = other DNA
tgcaccttattggatc

SEQ ID NO: 4054 - DNA, 16 bp, synthetic construct
  misc_feature 1..16: note = synthetic [barcode part1]
  source 1..16: mol_type = other DNA
tactctgcaggacagt

SEQ ID NO: 4055 - DNA, 16 bp, synthetic construct
  misc_feature 1..16: note = synthetic [barcode part1]
  source 1..16: mol_type = other DNA
atcctgcgagtgttcc

SEQ ID NO: 4056 - DNA, 16 bp, synthetic construct
  misc_feature 1..16: note = synthetic [barcode part1]
  source 1..16: mol_type = other DNA
ttctcgaggttgaggt

SEQ ID NO: 4057 - DNA, 16 bp, synthetic construct
  misc_feature 1..16: note = synthetic [barcode part1]
  source 1..16: mol_type = other DNA
ttacgagaccttctac

SEQ ID NO: 4058 - DNA, 16 bp, synthetic construct
  misc_feature 1..16: note = synthetic [barcode part1]
  source 1..16: mol_type = other DNA
acttgtggccgttctg

SEQ ID NO: 4059 - DNA, 16 bp, synthetic construct
  misc_feature 1..16: note = synthetic [barcode part1]
  source 1..16: mol_type = other DNA
gactctatccgtccag

SEQ ID NO: 4060 - DNA, 16 bp, synthetic construct
  misc_feature 1..16: note = synthetic [barcode part1]
  source 1..16: mol_type = other DNA
agtcagttgcagtacc

SEQ ID NO: 4061 - DNA, 16 bp, synthetic construct
  misc_feature 1..16: note = synthetic [barcode part1]
  source 1..16: mol_type = other DNA
ttatcacctgtctcgc

SEQ ID NO: 4062 - DNA, 16 bp, synthetic construct
  misc_feature 1..16: note = synthetic [barcode part1]
  source 1..16: mol_type = other DNA
gataagatacgttggc

SEQ ID NO: 4063 - DNA, 16 bp, synthetic construct
  misc_feature 1..16: note = synthetic [barcode part1]
  source 1..16: mol_type = other DNA
gagactccacttgcct

SEQ ID NO: 4064 - DNA, 16 bp, synthetic construct
  misc_feature 1..16: note = synthetic [barcode part1]
  source 1..16: mol_type = other DNA
tgtggcgttgtgatac

SEQ ID NO: 4065 - DNA, 16 bp, synthetic construct
  misc_feature 1..16: note = synthetic [barcode part1]
  source 1..16: mol_type = other DNA
tggagtgttgtgcgag

SEQ ID NO: 4066 - DNA, 16 bp, synthetic construct
  misc_feature 1..16: note = synthetic [barcode part1]
  source 1..16: mol_type = other DNA
gcgccagtagtgaagt

SEQ ID NO: 4067 - DNA, 16 bp, synthetic construct
  misc_feature 1..16: note = synthetic [barcode part1]
  source 1..16: mol_type = other DNA
tacgactctcctggtg

SEQ ID NO: 4068 - DNA, 16 bp, synthetic construct
  misc_feature 1..16: note = synthetic [barcode part1]
  source 1..16: mol_type = other DNA
agtcctattatccacg

SEQ ID NO: 4069 - DNA, 16 bp, synthetic construct
  misc_feature 1..16: note = synthetic [barcode part1]
  source 1..16: mol_type = other DNA
agaatccttcgttcac

SEQ ID NO: 4070 - DNA, 16 bp, synthetic construct
  misc_feature 1..16: note = synthetic [barcode part1]
  source 1..16: mol_type = other DNA
cgtcttcactaggtcg

SEQ ID NO: 4071 - DNA, 16 bp, synthetic construct
  misc_feature 1..16: note = synthetic [barcode part1]
  source 1..16: mol_type = other DNA
gttacggcaggcaagt

SEQ ID NO: 4072 - DNA, 16 bp, synthetic construct
  misc_feature 1..16: note = synthetic [barcode part1]
  source 1..16: mol_type = other DNA
tgcagttctggtgtag

SEQ ID NO: 4073 - DNA, 16 bp, synthetic construct
  misc_feature 1..16: note = synthetic [barcode part1]
  source 1..16: mol_type = other DNA
gaggtcttgaagtcct

SEQ ID NO: 4074 - DNA, 16 bp, synthetic construct
  misc_feature 1..16: note = synthetic [barcode part1]
  source 1..16: mol_type = other DNA
tattccttcggatcag

SEQ ID NO: 4075 - DNA, 16 bp, synthetic construct
  misc_feature 1..16: note = synthetic [barcode part1]
  source 1..16: mol_type = other DNA
cagaactattggccac

SEQ ID NO: 4076 - DNA, 16 bp, synthetic construct
  misc_feature 1..16: note = synthetic [barcode part1]
  source 1..16: mol_type = other DNA
tacgtggtcgttgcct

SEQ ID NO: 4077 - DNA, 16 bp, synthetic construct
  misc_feature 1..16: note = synthetic [barcode part1]
  source 1..16: mol_type = other DNA
gtgatcttccggtaag

SEQ ID NO: 4078 - DNA, 16 bp, synthetic construct
  misc_feature 1..16: note = synthetic [barcode part1]
  source 1..16: mol_type = other DNA
caagtctgatagaacg

SEQ ID NO: 4079 - DNA, 16 bp, synthetic construct
  misc_feature 1..16: note = synthetic [barcode part1]
  source 1..16: mol_type = other DNA
ttggaggcgtattaag

SEQ ID NO: 4080 - DNA, 16 bp, synthetic construct
  misc_feature 1..16: note = synthetic [barcode part1]
  source 1..16: mol_type = other DNA
agtgtatccagagagt

SEQ ID NO: 4081 - DNA, 16 bp, synthetic construct
  misc_feature 1..16: note = synthetic [barcode part1]
  source 1..16: mol_type = other DNA
tactcagacgtccaag

SEQ ID NO: 4082 - DNA, 16 bp, synthetic construct
  misc_feature 1..16: note = synthetic [barcode part1]
  source 1..16: mol_type = other DNA
caggattggaacttcc

SEQ ID NO: 4083 - DNA, 16 bp, synthetic construct
  misc_feature 1..16: note = synthetic [barcode part1]
  source 1..16: mol_type = other DNA
tacaacgcctggaatc

SEQ ID NO: 4084 - DNA, 16 bp, synthetic construct
  misc_feature 1..16: note = synthetic [barcode part1]
  source 1..16: mol_type = other DNA
actgcggagtgagtac

SEQ ID NO: 4085 - DNA, 16 bp, synthetic construct
  misc_feature 1..16: note = synthetic [barcode part1]
  source 1..16: mol_type = other DNA
actaggtccgttagac

SEQ ID NO: 4086 - DNA, 16 bp, synthetic construct
  misc_feature 1..16: note = synthetic [barcode part1]
  source 1..16: mol_type = other DNA
gaggagtgagttgaac

SEQ ID NO: 4087 - DNA, 16 bp, synthetic construct
  misc_feature 1..16: note = synthetic [barcode part1]
  source 1..16: mol_type = other DNA
ttgactcggaccaagt

SEQ ID NO: 4088 - DNA, 16 bp, synthetic construct
  misc_feature 1..16: note = synthetic [barcode part1]
  source 1..16: mol_type = other DNA
ccttaacgtcgaaggt

SEQ ID NO: 4089 - DNA, 16 bp, synthetic construct
  misc_feature 1..16: note = synthetic [barcode part1]
  source 1..16: mol_type = other DNA
atcaccactcctgcag

SEQ ID NO: 4090 - DNA, 16 bp, synthetic construct
  misc_feature 1..16: note = synthetic [barcode part1]
  source 1..16: mol_type = other DNA
acagtcaacactgacc

SEQ ID NO: 4091 - DNA, 16 bp, synthetic construct
  misc_feature 1..16: note = synthetic [barcode part1]
  source 1..16: mol_type = other DNA
agactattggaggtgt

SEQ ID NO: 4092 - DNA, 16 bp, synthetic construct
  misc_feature 1..16: note = synthetic [barcode part1]
  source 1..16: mol_type = other DNA
tgcagataacaagacc

SEQ ID NO: 4093 - DNA, 16 bp, synthetic construct
  misc_feature 1..16: note = synthetic [barcode part1]
  source 1..16: mol_type = other DNA
gttggccaagatcttg

SEQ ID NO: 4094 - DNA, 16 bp, synthetic construct
  misc_feature 1..16: note = synthetic [barcode part1]
  source 1..16: mol_type = other DNA
caagtctactctactg

SEQ ID NO: 4095 - DNA, 16 bp, synthetic construct
  misc_feature 1..16: note = synthetic [barcode part1]
  source 1..16: mol_type = other DNA
tgcaagtctcactatc

SEQ ID NO: 4096 - DNA, 16 bp, synthetic construct
  misc_feature 1..16: note = synthetic [barcode part1]
  source 1..16: mol_type = other DNA
ccacttgccgcaatac

SEQ ID NO: 4097 - DNA, 16 bp, synthetic construct
  misc_feature 1..16: note = synthetic [barcode part1]
  source 1..16: mol_type = other DNA
cactaacagagaatcg

SEQ ID NO: 4098 - DNA, 16 bp, synthetic construct
  misc_feature 1..16: note = synthetic [barcode part1]
  source 1..16: mol_type = other DNA
gttggcgacttctcac

SEQ ID NO: 4099 - DNA, 16 bp, synthetic construct
  misc_feature 1..16: note = synthetic [barcode part1]
  source 1..16: mol_type = other DNA
gtctactcgtccactt

SEQ ID NO: 4100 - DNA, 16 bp, synthetic construct
  misc_feature 1..16: note = synthetic [barcode part1]
  source 1..16: mol_type = other DNA
cagtgattacagagac

SEQ ID NO: 4101 - DNA, 16 bp, synthetic construct
  misc_feature 1..16: note = synthetic [barcode part1]
  source 1..16: mol_type = other DNA
gtagttgccggttctc

SEQ ID NO: 4102 - DNA, 16 bp, synthetic construct
  misc_feature 1..16: note = synthetic [barcode part1]
  source 1..16: mol_type = other DNA
ttgttactggagtggc

SEQ ID NO: 4103 - DNA, 16 bp, synthetic construct
  misc_feature 1..16: note = synthetic [barcode part1]
  source 1..16: mol_type = other DNA
gtgttacgccttagag

SEQ ID NO: 4104 - DNA, 16 bp, synthetic construct
  misc_feature 1..16: note = synthetic [barcode part1]
  source 1..16: mol_type = other DNA
tcggttacttcgagag

SEQ ID NO: 4105 - DNA, 16 bp, synthetic construct
  misc_feature 1..16: note = synthetic [barcode part1]
  source 1..16: mol_type = other DNA
tcgagtgtccgtcgtt

SEQ ID NO: 4106 - DNA, 16 bp, synthetic construct
  misc_feature 1..16: note = synthetic [barcode part1]
  source 1..16: mol_type = other DNA
aacagaggcgttcggt

SEQ ID NO: 4107 - DNA, 16 bp, synthetic construct
  misc_feature 1..16: note = synthetic [barcode part1]
  source 1..16: mol_type = other DNA
gtagataggcagacag

SEQ ID NO: 4108 - DNA, 16 bp, synthetic construct
  misc_feature 1..16: note = synthetic [barcode part1]
  source 1..16: mol_type = other DNA
gtggcactaactaacc

SEQ ID NO: 4109 - DNA, 16 bp, synthetic construct
  misc_feature 1..16: note = synthetic [barcode part1]
  source 1..16: mol_type = other DNA
tagtcttaccacgtac

SEQ ID NO: 4110 - DNA, 16 bp, synthetic construct
  misc_feature 1..16: note = synthetic [barcode part1]
  source 1..16: mol_type = other DNA
tattagaacggtccgc

SEQ ID NO: 4111 - DNA, 16 bp, synthetic construct
  misc_feature 1..16: note = synthetic [barcode part1]
  source 1..16: mol_type = other DNA
ttggactgtcaggttg

SEQ ID NO: 4112 - DNA, 16 bp, synthetic construct
  misc_feature 1..16: note = synthetic [barcode part1]
  source 1..16: mol_type = other DNA
tactgcactgagactg

SEQ ID NO: 4113 - DNA, 16 bp, synthetic construct
  misc_feature 1..16: note = synthetic [barcode part1]
  source 1..16: mol_type = other DNA
cggatactagtgaagt

SEQ ID NO: 4114 - DNA, 16 bp, synthetic construct
  misc_feature 1..16: note = synthetic [barcode part1]
  source 1..16: mol_type = other DNA
tagactattccgcact

SEQ ID NO: 4115 - DNA, 16 bp, synthetic construct
  misc_feature 1..16: note = synthetic [barcode part1]
  source 1..16: mol_type = other DNA
agaggtcggaattgag

SEQ ID NO: 4116 - DNA, 16 bp, synthetic construct
  misc_feature 1..16: note = synthetic [barcode part1]
  source 1..16: mol_type = other DNA
caacttcgccacacgt

SEQ ID NO: 4117 - DNA, 16 bp, synthetic construct
  misc_feature 1..16: note = synthetic [barcode part1]
  source 1..16: mol_type = other DNA
accacctgcagattcc

SEQ ID NO: 4118 - DNA, 16 bp, synthetic construct
  misc_feature 1..16: note = synthetic [barcode part1]
  source 1..16: mol_type = other DNA
gactcctgcgtagttc

SEQ ID NO: 4119 - DNA, 16 bp, synthetic construct
  misc_feature 1..16: note = synthetic [barcode part1]
  source 1..16: mol_type = other DNA
tcacctgaataccgcc

SEQ ID NO: 4120 - DNA, 16 bp, synthetic construct
  misc_feature 1..16: note = synthetic [barcode part1]
  source 1..16: mol_type = other DNA
tctcaacttctgccgt

SEQ ID NO: 4121 - DNA, 16 bp, synthetic construct
  misc_feature 1..16: note = synthetic [barcode part1]
  source 1..16: mol_type = other DNA
gtgcaaggcaatccag

SEQ ID NO: 4122 - DNA, 16 bp, synthetic construct
  misc_feature 1..16: note = synthetic [barcode part1]
  source 1..16: mol_type = other DNA
ttgcgaagtagaacac

SEQ ID NO: 4123 - DNA, 16 bp, synthetic construct
  misc_feature 1..16: note = synthetic [barcode part1]
  source 1..16: mol_type = other DNA
gatacgcacgccaatt

SEQ ID NO: 4124 - DNA, 16 bp, synthetic construct
  misc_feature 1..16: note = synthetic [barcode part1]
  source 1..16: mol_type = other DNA
attcgtcagtgtcact

SEQ ID NO: 4125 - DNA, 16 bp, synthetic construct
  misc_feature 1..16: note = synthetic [barcode part1]
  source 1..16: mol_type = other DNA
agagtccagacagatt

SEQ ID NO: 4126 - DNA, 16 bp, synthetic construct
  misc_feature 1..16: note = synthetic [barcode part1]
  source 1..16: mol_type = other DNA
ataacttacgaggacg

SEQ ID NO: 4127 - DNA, 16 bp, synthetic construct
  misc_feature 1..16: note = synthetic [barcode part1]
  source 1..16: mol_type = other DNA
tgatcaggtaccgtac

SEQ ID NO: 4128 - DNA, 16 bp, synthetic construct
  misc_feature 1..16: note = synthetic [barcode part1]
  source 1..16: mol_type = other DNA
tgtgactcagtaagag

SEQ ID NO: 4129 - DNA, 16 bp, synthetic construct
  misc_feature 1..16: note = synthetic [barcode part1]
  source 1..16: mol_type = other DNA
agatccagacgtgttc

SEQ ID NO: 4130 - DNA, 16 bp, synthetic construct
  misc_feature 1..16: note = synthetic [barcode part1]
  source 1..16: mol_type = other DNA
tctctgagttggtgtt

SEQ ID NO: 4131 - DNA, 16 bp, synthetic construct
  misc_feature 1..16: note = synthetic [barcode part1]
  source 1..16: mol_type = other DNA
gacagtcgtgtctcct

SEQ ID NO: 4132 - DNA, 16 bp, synthetic construct
  misc_feature 1..16: note = synthetic [barcode part1]
  source 1..16: mol_type = other DNA
agtcttccttcgtcgt

SEQ ID NO: 4133 - DNA, 16 bp, synthetic construct
  misc_feature 1..16: note = synthetic [barcode part1]
  source 1..16: mol_type = other DNA
tccaacaggcaatctg

SEQ ID NO: 4134 - DNA, 16 bp, synthetic construct
  misc_feature 1..16: note = synthetic [barcode part1]
  source 1..16: mol_type = other DNA
caagtctcgttcagag

SEQ ID NO: 4135 - DNA, 16 bp, synthetic construct
  misc_feature 1..16: note = synthetic [barcode part1]
  source 1..16: mol_type = other DNA
cgtaacacaggtggac

SEQ ID NO: 4136 - DNA, 16 bp, synthetic construct
  misc_feature 1..16: note = synthetic [barcode part1]
  source 1..16: mol_type = other DNA
aatccttaatctgcgc

SEQ ID NO: 4137 - DNA, 16 bp, synthetic construct
  misc_feature 1..16: note = synthetic [barcode part1]
  source 1..16: mol_type = other DNA
atctgagaggtctgtc

SEQ ID NO: 4138 - DNA, 16 bp, synthetic construct
  misc_feature 1..16: note = synthetic [barcode part1]
  source 1..16: mol_type = other DNA
cgttaagtgtcagacc

SEQ ID NO: 4139 - DNA, 16 bp, synthetic construct
  misc_feature 1..16: note = synthetic [barcode part1]
  source 1..16: mol_type = other DNA
gttcgtagttgaagag

SEQ ID NO: 4140 - DNA, 16 bp, synthetic construct
  misc_feature 1..16: note = synthetic [barcode part1]
  source 1..16: mol_type = other DNA
gtgtgattctctcaac

SEQ ID NO: 4141 - DNA, 16 bp, synthetic construct
  misc_feature 1..16: note = synthetic [barcode part1]
  source 1..16: mol_type = other DNA
ttgcgtaatcggtacg

SEQ ID NO: 4142 - DNA, 16 bp, synthetic construct
  misc_feature 1..16: note = synthetic [barcode part1]
  source 1..16: mol_type = other DNA
tacggcactgtagtgt

SEQ ID NO: 4143 - DNA, 16 bp, synthetic construct
  misc_feature 1..16: note = synthetic [barcode part1]
  source 1..16: mol_type = other DNA
tccacgtagtcgttgc

SEQ ID NO: 4144 - DNA, 16 bp, synthetic construct
  misc_feature 1..16: note = synthetic [barcode part1]
  source 1..16: mol_type = other DNA
acaagtccggcagaac

SEQ ID NO: 4145 - DNA, 16 bp, synthetic construct
  misc_feature 1..16: note = synthetic [barcode part1]
  source 1..16: mol_type = other DNA
taggttcgcagattcg

SEQ ID NO: 4146 - DNA, 16 bp, synthetic construct
  misc_feature 1..16: note = synthetic [barcode part1]
  source 1..16: mol_type = other DNA
tcttgttgcctgcgag

SEQ ID NO: 4147 - DNA, 16 bp, synthetic construct
  misc_feature 1..16: note = synthetic [barcode part1]
  source 1..16: mol_type = other DNA
attaatccgtggcgtg

SEQ ID NO: 4148 - DNA, 16 bp, synthetic construct
  misc_feature 1..16: note = synthetic [barcode part1]
  source 1..16: mol_type = other DNA
tccgttcgcgaataag

SEQ ID NO: 4149 - DNA, 16 bp, synthetic construct
  misc_feature 1..16: note = synthetic [barcode part1]
  source 1..16: mol_type = other DNA
ttcctcctcagttggt

SEQ ID NO: 4150 - DNA, 16 bp, synthetic construct
  misc_feature 1..16: note = synthetic [barcode part1]
  source 1..16: mol_type = other DNA
attctctccgaggaag

SEQ ID NO: 4151 - DNA, 16 bp, synthetic construct
  misc_feature 1..16: note = synthetic [barcode part1]
  source 1..16: mol_type = other DNA
gttaaccggttggttg

SEQ ID NO: 4152 - DNA, 16 bp, synthetic construct
  misc_feature 1..16: note = synthetic [barcode part1]
  source 1..16: mol_type = other DNA
acgaagaggaggtgtt

SEQ ID NO: 4153 - DNA, 16 bp, synthetic construct
  misc_feature 1..16: note = synthetic [barcode part1]
  source 1..16: mol_type = other DNA
cctgagagtcgcaatt

SEQ ID NO: 4154 - DNA, 16 bp, synthetic construct
  misc_feature 1..16: note = synthetic [barcode part1]
  source 1..16: mol_type = other DNA
tgactagactgcgatc

SEQ ID NO: 4155 - DNA, 16 bp, synthetic construct
  misc_feature 1..16: note = synthetic [barcode part1]
  source 1..16: mol_type = other DNA
tgtactggaggaaccg

SEQ ID NO: 4156 - DNA, 16 bp, synthetic construct
  misc_feature 1..16: note = synthetic [barcode part1]
  source 1..16: mol_type = other DNA
aggcaagtcgcagtac

SEQ ID NO: 4157 - DNA, 16 bp, synthetic construct
  misc_feature 1..16: note = synthetic [barcode part1]
  source 1..16: mol_type = other DNA
cgtcctgacaggtctt

SEQ ID NO: 4158 - DNA, 16 bp, synthetic construct
  misc_feature 1..16: note = synthetic [barcode part1]
  source 1..16: mol_type = other DNA
aactcgttagacgtcg

SEQ ID NO: 4159 - DNA, 16 bp, synthetic construct
  misc_feature 1..16: note = synthetic [barcode part1]
  source 1..16: mol_type = other DNA
acttgcaggaggtcag

SEQ ID NO: 4160 - DNA, 16 bp, synthetic construct
  misc_feature 1..16: note = synthetic [barcode part1]
  source 1..16: mol_type = other DNA
gaaggcggcaacttgt

SEQ ID NO: 4161 - DNA, 16 bp, synthetic construct
  misc_feature 1..16: note = synthetic [barcode part1]
  source 1..16: mol_type = other DNA
acactcttgatctggt

SEQ ID NO: 4162 - DNA, 16 bp, synthetic construct
  misc_feature 1..16: note = synthetic [barcode part1]
  source 1..16: mol_type = other DNA
tggactacgtgaaggc

SEQ ID NO: 4163 - DNA, 16 bp, synthetic construct
  misc_feature 1..16: note = synthetic [barcode part1]
  source 1..16: mol_type = other DNA
agatcacacaagaacc

SEQ ID NO: 4164 - DNA, 16 bp, synthetic construct
  misc_feature 1..16: note = synthetic [barcode part1]
  source 1..16: mol_type = other DNA
accagttaggaccttg

SEQ ID NO: 4165 - DNA, 16 bp, synthetic construct
  misc_feature 1..16: note = synthetic [barcode part1]
  source 1..16: mol_type = other DNA
tgcacgattgttacct

SEQ ID NO: 4166 - DNA, 16 bp, synthetic construct
  misc_feature 1..16: note = synthetic [barcode part1]
  source 1..16: mol_type = other DNA
gactagttaaccggtc

SEQ ID NO: 4167 - DNA, 16 bp, synthetic construct
  misc_feature 1..16: note = synthetic [barcode part1]
  source 1..16: mol_type = other DNA
ccgatctataaggtgc

SEQ ID NO: 4168 - DNA, 16 bp, synthetic construct
  misc_feature 1..16: note = synthetic [barcode part1]
  source 1..16: mol_type = other DNA
ttaactcggtgtactc

SEQ ID NO: 4169 - DNA, 16 bp, synthetic construct
  misc_feature 1..16: note = synthetic [barcode part1]
  source 1..16: mol_type = other DNA
tcacaaggcctctcac

SEQ ID NO: 4170 - DNA, 16 bp, synthetic construct
  misc_feature 1..16: note = synthetic [barcode part1]
  source 1..16: mol_type = other DNA
acagtaactgttgccg

SEQ ID NO: 4171 - DNA, 16 bp, synthetic construct
  misc_feature 1..16: note = synthetic [barcode part1]
  source 1..16: mol_type = other DNA
ccaagtacacttaggc

SEQ ID NO: 4172 - DNA, 16 bp, synthetic construct
  misc_feature 1..16: note = synthetic [barcode part1]
  source 1..16: mol_type = other DNA
acgttcactattccag

SEQ ID NO: 4173 - DNA, 16 bp, synthetic construct
  misc_feature 1..16: note = synthetic [barcode part1]
  source 1..16: mol_type = other DNA
gacgatcgactcgatt

SEQ ID NO: 4174 - DNA, 16 bp, synthetic construct
  misc_feature 1..16: note = synthetic [barcode part1]
  source 1..16: mol_type = other DNA
gacgtattgcgatcac

SEQ ID NO: 4175 - DNA, 16 bp, synthetic construct
  misc_feature 1..16: note = synthetic [barcode part1]
  source 1..16: mol_type = other DNA
cacttgatacaggtcg

SEQ ID NO: 4176 - DNA, 16 bp, synthetic construct
  misc_feature 1..16: note = synthetic [barcode part1]
  source 1..16: mol_type = other DNA
gtacctccgatctgac

SEQ ID NO: 4177 - DNA, 16 bp, synthetic construct
  misc_feature 1..16: note = synthetic [barcode part1]
  source 1..16: mol_type = other DNA
caccttgaacagaacc

SEQ ID NO: 4178 - DNA, 16 bp, synthetic construct
  misc_feature 1..16: note = synthetic [barcode part1]
  source 1..16: mol_type = other DNA
acttcgactaggactg

SEQ ID NO: 4179 - DNA, 16 bp, synthetic construct
  misc_feature 1..16: note = synthetic [barcode part1]
  source 1..16: mol_type = other DNA
atctccgacagagatc

SEQ ID NO: 4180 - DNA, 16 bp, synthetic construct
  misc_feature 1..16: note = synthetic [barcode part1]
  source 1..16: mol_type = other DNA
ttccgactgtatcggc

SEQ ID NO: 4181 - DNA, 16 bp, synthetic construct
  misc_feature 1..16: note = synthetic [barcode part1]
  source 1..16: mol_type = other DNA
caactcaggtgcagag

SEQ ID NO: 4182 - DNA, 16 bp, synthetic construct
  misc_feature 1..16: note = synthetic [barcode part1]
  source 1..16: mol_type = other DNA
cacttcacagacactt

SEQ ID NO: 4183 - DNA, 16 bp, synthetic construct
  misc_feature 1..16: note = synthetic [barcode part1]
  source 1..16: mol_type = other DNA
aaccaacaccagttgc

SEQ ID NO: 4184 - DNA, 16 bp, synthetic construct
  misc_feature 1..16: note = synthetic [barcode part1]
  source 1..16: mol_type = other DNA
agagtcgtgtatcaag

SEQ ID NO: 4185 - DNA, 16 bp, synthetic construct
  misc_feature 1..16: note = synthetic [barcode part1]
  source 1..16: mol_type = other DNA
cgtagaggccactaag

SEQ ID NO: 4186 - DNA, 16 bp, synthetic construct
  misc_feature 1..16: note = synthetic [barcode part1]
  source 1..16: mol_type = other DNA
cacgtgatactctact

SEQ ID NO: 4187 - DNA, 16 bp, synthetic construct
  misc_feature 1..16: note = synthetic [barcode part1]
  source 1..16: mol_type = other DNA
acggaacacttcgttg

SEQ ID NO: 4188 - DNA, 16 bp, synthetic construct
  misc_feature 1..16: note = synthetic [barcode part1]
  source 1..16: mol_type = other DNA
actagtgtgagtccac

SEQ ID NO: 4189 - DNA, 16 bp, synthetic construct
  misc_feature 1..16: note = synthetic [barcode part1]
  source 1..16: mol_type = other DNA
tatctcaccgcaggtc

SEQ ID NO: 4190 - DNA, 16 bp, synthetic construct
  misc_feature 1..16: note = synthetic [barcode part1]
  source 1..16: mol_type = other DNA
gcagaggtcaggttgt

SEQ ID NO: 4191 - DNA, 16 bp, synthetic construct
  misc_feature 1..16: note = synthetic [barcode part1]
  source 1..16: mol_type = other DNA
tgacgcacgaccttct

SEQ ID NO: 4192 - DNA, 16 bp, synthetic construct
  misc_feature 1..16: note = synthetic [barcode part1]
  source 1..16: mol_type = other DNA
aacaccaagtcctgac

SEQ ID NO: 4193 - DNA, 16 bp, synthetic construct
  misc_feature 1..16: note = synthetic [barcode part1]
  source 1..16: mol_type = other DNA
ttaaccgtgtagtgcg

SEQ ID NO: 4194 - DNA, 16 bp, synthetic construct
  misc_feature 1..16: note = synthetic [barcode part1]
  source 1..16: mol_type = other DNA
tacacactcaggactg

SEQ ID NO: 4195 - DNA, 16 bp, synthetic construct
  misc_feature 1..16: note = synthetic [barcode part1]
  source 1..16: mol_type = other DNA
agaatagacggattcc

SEQ ID NO: 4196 - DNA, 16 bp, synthetic construct
  misc_feature 1..16: note = synthetic [barcode part1]
  source 1..16: mol_type = other DNA
gtctctgcgttgaacc

SEQ ID NO: 4197 - DNA, 16 bp, synthetic construct
  misc_feature 1..16: note = synthetic [barcode part1]
  source 1..16: mol_type = other DNA
ttacgttatccagtgc

SEQ ID NO: 4198 - DNA, 16 bp, synthetic construct
  misc_feature 1..16: note = synthetic [barcode part1]
  source 1..16: mol_type = other DNA
acaagagtcggattgt

SEQ ID NO: 4199 - DNA, 16 bp, synthetic construct
  misc_feature 1..16: note = synthetic [barcode part1]
  source 1..16: mol_type = other DNA
cgcgacactataacac

SEQ ID NO: 4200 - DNA, 16 bp, synthetic construct
  misc_feature 1..16: note = synthetic [barcode part1]
  source 1..16: mol_type = other DNA
atctgtcacctgcctt

SEQ ID NO: 4201 - DNA, 16 bp, synthetic construct
  misc_feature 1..16: note = synthetic [barcode part1]
  source 1..16: mol_type = other DNA
tacgtaggtgagatac

SEQ ID NO: 4202 - DNA, 16 bp, synthetic construct
  misc_feature 1..16: note = synthetic [barcode part1]
  source 1..16: mol_type = other DNA
ttctgagtctaaggcg

SEQ ID NO: 4203 - DNA, 16 bp, synthetic construct
  misc_feature 1..16: note = synthetic [barcode part1]
  source 1..16: mol_type = other DNA
tgtgaggatatcctcg

SEQ ID NO: 4204 - DNA, 16 bp, synthetic construct
  misc_feature 1..16: note = synthetic [barcode part1]
  source 1..16: mol_type = other DNA
cagtactgtgagtaag

SEQ ID NO: 4205 - DNA, 16 bp, synthetic construct
  misc_feature 1..16: note = synthetic [barcode part1]
  source 1..16: mol_type = other DNA
acttgacctgacagtg

SEQ ID NO: 4206 - DNA, 16 bp, synthetic construct
  misc_feature 1..16: note = synthetic [barcode part1]
  source 1..16: mol_type = other DNA
gtcaggaagttctctg

SEQ ID NO: 4207 - DNA, 16 bp, synthetic construct
  misc_feature 1..16: note = synthetic [barcode part1]
  source 1..16: mol_type = other DNA
tgttcgacagtagaag

SEQ ID NO: 4208 - DNA, 16 bp, synthetic construct
  misc_feature 1..16: note = synthetic [barcode part1]
  source 1..16: mol_type = other DNA
aacttggcctctatac

SEQ ID NO: 4209 - DNA, 16 bp, synthetic construct
  misc_feature 1..16: note = synthetic [barcode part1]
  source 1..16: mol_type = other DNA
tggtactcgtcacaag

SEQ ID NO: 4210 - DNA, 16 bp, synthetic construct
  misc_feature 1..16: note = synthetic [barcode part1]
  source 1..16: mol_type = other DNA
gtagtgcagagaaggt

SEQ ID NO: 4211 - DNA, 16 bp, synthetic construct
  misc_feature 1..16: note = synthetic [barcode part1]
  source 1..16: mol_type = other DNA
tctaactgcgtaccgc

SEQ ID NO: 4212 - DNA, 16 bp, synthetic construct
  misc_feature 1..16: note = synthetic [barcode part1]
  source 1..16: mol_type = other DNA
cgacgacgaagtgtac

SEQ ID NO: 4213 - DNA, 16 bp, synthetic construct
  misc_feature 1..16: note = synthetic [barcode part1]
  source 1..16: mol_type = other DNA
aggattctaggacctc

SEQ ID NO: 4214 - DNA, 16 bp, synthetic construct
  misc_feature 1..16: note = synthetic [barcode part1]
  source 1..16: mol_type = other DNA
tgagagaggtcctctt

SEQ ID NO: 4215 - DNA, 16 bp, synthetic construct
  misc_feature 1..16: note = synthetic [barcode part1]
  source 1..16: mol_type = other DNA
gtctccacgttagacc

SEQ ID NO: 4216 - DNA, 16 bp, synthetic construct
  misc_feature 1..16: note = synthetic [barcode part1]
  source 1..16: mol_type = other DNA
gagtactgtccacaac

SEQ ID NO: 4217 - DNA, 16 bp, synthetic construct
  misc_feature 1..16: note = synthetic [barcode part1]
  source 1..16: mol_type = other DNA
atagttacgcacgacc

SEQ ID NO: 4218 - DNA, 16 bp, synthetic construct
  misc_feature 1..16: note = synthetic [barcode part1]
  source 1..16: mol_type = other DNA
cacctactaaggcctc

SEQ ID NO: 4219 - DNA, 16 bp, synthetic construct
  misc_feature 1..16: note = synthetic [barcode part1]
  source 1..16: mol_type = other DNA
ttcactaccgagtatc

SEQ ID NO: 4220 - DNA, 16 bp, synthetic construct
  misc_feature 1..16: note = synthetic [barcode part1]
  source 1..16: mol_type = other DNA
caaccgactggttagt

SEQ ID NO: 4221 - DNA, 16 bp, synthetic construct
  misc_feature 1..16: note = synthetic [barcode part1]
  source 1..16: mol_type = other DNA
cctctgtgttcggtag

SEQ ID NO: 4222 - DNA, 16 bp, synthetic construct
  misc_feature 1..16: note = synthetic [barcode part1]
  source 1..16: mol_type = other DNA
aactattaggcacgag

SEQ ID NO: 4223 - DNA, 16 bp, synthetic construct
  misc_feature 1..16: note = synthetic [barcode part1]
  source 1..16: mol_type = other DNA
tggtatcacttcggag

SEQ ID NO: 4224 - DNA, 16 bp, synthetic construct
  misc_feature 1..16: note = synthetic [barcode part1]
  source 1..16: mol_type = other DNA
cagtagtcacggagac

SEQ ID NO: 4225 - DNA, 16 bp, synthetic construct
  misc_feature 1..16: note = synthetic [barcode part1]
  source 1..16: mol_type = other DNA
aacctaacggtccagt

SEQ ID NO: 4226 - DNA, 16 bp, synthetic construct
  misc_feature 1..16: note = synthetic [barcode part1]
  source 1..16: mol_type = other DNA
gattggttacggtacc

SEQ ID NO: 4227 - DNA, 16 bp, synthetic construct
  misc_feature 1..16: note = synthetic [barcode part1]
  source 1..16: mol_type = other DNA
tcctcaaggaagacct

SEQ ID NO: 4228 - DNA, 16 bp, synthetic construct
  misc_feature 1..16: note = synthetic [barcode part1]
  source 1..16: mol_type = other DNA
gtctagtgattcgacg

SEQ ID NO: 4229 - DNA, 16 bp, synthetic construct
  misc_feature 1..16: note = synthetic [barcode part1]
  source 1..16: mol_type = other DNA
aacgttggtgtcacac

SEQ ID NO: 4230 - DNA, 16 bp, synthetic construct
  misc_feature 1..16: note = synthetic [barcode part1]
  source 1..16: mol_type = other DNA
tccacgtcaacgactc

SEQ ID NO: 4231 - DNA, 16 bp, synthetic construct
  misc_feature 1..16: note = synthetic [barcode part1]
  source 1..16: mol_type = other DNA
acagaggaccaggttc

SEQ ID NO: 4232 - DNA, 16 bp, synthetic construct
  misc_feature 1..16: note = synthetic [barcode part1]
  source 1..16: mol_type = other DNA
tgtaagtggtggagtt

SEQ ID NO: 4233 - DNA, 16 bp, synthetic construct
  misc_feature 1..16: note = synthetic [barcode part1]
  source 1..16: mol_type = other DNA
gcaagacggatagtag

SEQ ID NO: 4234 - DNA, 16 bp, synthetic construct
  misc_feature 1..16: note = synthetic [barcode part1]
  source 1..16: mol_type = other DNA
cgaacttaacgtccag

SEQ ID NO: 4235 - DNA, 16 bp, synthetic construct
  misc_feature 1..16: note = synthetic [barcode part1]
  source 1..16: mol_type = other DNA
cacaggaactattgag

SEQ ID NO: 4236 - DNA, 16 bp, synthetic construct
  misc_feature 1..16: note = synthetic [barcode part1]
  source 1..16: mol_type = other DNA
tcctgactgcaagtcc

SEQ ID NO: 4237 - DNA, 16 bp, synthetic construct
  misc_feature 1..16: note = synthetic [barcode part1]
  source 1..16: mol_type = other DNA
tctagactaggcctag

SEQ ID NO: 4238 - DNA, 16 bp, synthetic construct
  misc_feature 1..16: note = synthetic [barcode part1]
  source 1..16: mol_type = other DNA
ttctcggaaggaactc

SEQ ID NO: 4239 - DNA, 16 bp, synthetic construct
  misc_feature 1..16: note = synthetic [barcode part1]
  source 1..16: mol_type = other DNA
caagaggaaccaagac

SEQ ID NO: 4240 - DNA, 16 bp, synthetic construct
  misc_feature 1..16: note = synthetic [barcode part1]
  source 1..16: mol_type = other DNA
gtaagtacgaggcctg

SEQ ID NO: 4241 - DNA, 16 bp, synthetic construct
  misc_feature 1..16: note = synthetic [barcode part1]
  source 1..16: mol_type = other DNA
cgttagtaatcgagag

SEQ ID NO: 4242 - DNA, 16 bp, synthetic construct
  misc_feature 1..16: note = synthetic [barcode part1]
  source 1..16: mol_type = other DNA
aacgccacgcaatact

SEQ ID NO: 4243 - DNA, 16 bp, synthetic construct
  misc_feature 1..16: note = synthetic [barcode part1]
  source 1..16: mol_type = other DNA
taatcgccgtcctacg

SEQ ID NO: 4244 - DNA, 16 bp, synthetic construct
  misc_feature 1..16: note = synthetic [barcode part1]
  source 1..16: mol_type = other DNA
atcggatccgttgaac

SEQ ID NO: 4245 - DNA, 16 bp, synthetic construct
  misc_feature 1..16: note = synthetic [barcode part1]
  source 1..16: mol_type = other DNA
tggaggtaacggttcg

SEQ ID NO: 4246 - DNA, 16 bp, synthetic construct
  misc_feature 1..16: note = synthetic [barcode part1]
  source 1..16: mol_type = other DNA
agaacgcgtcgtcaag

SEQ ID NO: 4247 - DNA, 16 bp, synthetic construct
  misc_feature 1..16: note = synthetic [barcode part1]
  source 1..16: mol_type = other DNA
aactcgagactcagtc

SEQ ID NO: 4248 - DNA, 16 bp, synthetic construct
  misc_feature 1..16: note = synthetic [barcode part1]
  source 1..16: mol_type = other DNA
cctcgcactggtgatt

SEQ ID NO: 4249 - DNA, 16 bp, synthetic construct
  misc_feature 1..16: note = synthetic [barcode part1]
  source 1..16: mol_type = other DNA
gacttacacaggtctg

SEQ ID NO: 4250 - DNA, 16 bp, synthetic construct
  misc_feature 1..16: note = synthetic [barcode part1]
  source 1..16: mol_type = other DNA
gttcaagacgatagac

SEQ ID NO: 4251 - DNA, 16 bp, synthetic construct
  misc_feature 1..16: note = synthetic [barcode part1]
  source 1..16: mol_type = other DNA
cacaatcgcgtagttg

SEQ ID NO: 4252 - DNA, 16 bp, synthetic construct
  misc_feature 1..16: note = synthetic [barcode part1]
  source 1..16: mol_type = other DNA
tgacacacctcactgc

SEQ ID NO: 4253 - DNA, 16 bp, synthetic construct
  misc_feature 1..16: note = synthetic [barcode part1]
  source 1..16: mol_type = other DNA
tccgagactaactggt

SEQ ID NO: 4254 - DNA, 16 bp, synthetic construct
  misc_feature 1..16: note = synthetic [barcode part1]
  source 1..16: mol_type = other DNA
gcgcgataaccttctc

SEQ ID NO: 4255 - DNA, 16 bp, synthetic construct
  misc_feature 1..16: note = synthetic [barcode part1]
  source 1..16: mol_type = other DNA
atctatcggcgtcacc

SEQ ID NO: 4256 - DNA, 16 bp, synthetic construct
  misc_feature 1..16: note = synthetic [barcode part1]
  source 1..16: mol_type = other DNA
atctccgaggtcactc

SEQ ID NO: 4257 - DNA, 16 bp, synthetic construct
  misc_feature 1..16: note = synthetic [barcode part1]
  source 1..16: mol_type = other DNA
tacgtgttcaggactg

SEQ ID NO: 4258 - DNA, 16 bp, synthetic construct
  misc_feature 1..16: note = synthetic [barcode part1]
  source 1..16: mol_type = other DNA
tctgattatcacgtgc

SEQ ID NO: 4259 - DNA, 16 bp, synthetic construct
  misc_feature 1..16: note = synthetic [barcode part1]
  source 1..16: mol_type = other DNA
tgtctgtaacaccgtt

SEQ ID NO: 4260 - DNA, 16 bp, synthetic construct
  misc_feature 1..16: note = synthetic [barcode part1]
  source 1..16: mol_type = other DNA
gaccacggtattaacc

SEQ ID NO: 4261 - DNA, 16 bp, synthetic construct
  misc_feature 1..16: note = synthetic [barcode part1]
  source 1..16: mol_type = other DNA
gacactgaccacaact

SEQ ID NO: 4262 - DNA, 16 bp, synthetic construct
  misc_feature 1..16: note = synthetic [barcode part1]
  source 1..16: mol_type = other DNA
cagaggtattcctacg

SEQ ID NO: 4263 - DNA, 16 bp, synthetic construct
  misc_feature 1..16: note = synthetic [barcode part1]
  source 1..16: mol_type = other DNA
acaccgaaggagtcgt

SEQ ID NO: 4264 - DNA, 16 bp, synthetic construct
  misc_feature 1..16: note = synthetic [barcode part1]
  source 1..16: mol_type = other DNA
gaggtgtagaacacag

SEQ ID NO: 4265 - DNA, 16 bp, synthetic construct
  misc_feature 1..16: note = synthetic [barcode part1]
  source 1..16: mol_type = other DNA
tgacgcaagttcacgt

SEQ ID NO: 4266 - DNA, 16 bp, synthetic construct
  misc_feature 1..16: note = synthetic [barcode part1]
  source 1..16: mol_type = other DNA
gtgaagatcttcgcgt

SEQ ID NO: 4267 - DNA, 16 bp, synthetic construct
  misc_feature 1..16: note = synthetic [barcode part1]
  source 1..16: mol_type = other DNA
cggcggatagatactg

SEQ ID NO: 4268 - DNA, 16 bp, synthetic construct
  misc_feature 1..16: note = synthetic [barcode part1]
  source 1..16: mol_type = other DNA
gaacacggtataggag

SEQ ID NO: 4269 - DNA, 16 bp, synthetic construct
  misc_feature 1..16: note = synthetic [barcode part1]
  source 1..16: mol_type = other DNA
gacctggaaggtgtac

SEQ ID NO: 4270 - DNA, 16 bp, synthetic construct
  misc_feature 1..16: note = synthetic [barcode part1]
  source 1..16: mol_type = other DNA
tggaacgatctaagtg

SEQ ID NO: 4271 - DNA, 16 bp, synthetic construct
  misc_feature 1..16: note = synthetic [barcode part1]
  source 1..16: mol_type = other DNA
ttactgcagacctgtt

SEQ ID NO: 4272 - DNA, 16 bp, synthetic construct
  misc_feature 1..16: note = synthetic [barcode part1]
  source 1..16: mol_type = other DNA
cggaagttaagttacg

SEQ ID NO: 4273 - DNA, 16 bp, synthetic construct
  misc_feature 1..16: note = synthetic [barcode part1]
  source 1..16: mol_type = other DNA
acggagtgtgatagag

SEQ ID NO: 4274 - DNA, 16 bp, synthetic construct
  misc_feature 1..16: note = synthetic [barcode part1]
  source 1..16: mol_type = other DNA
gacaggacacgagttc

SEQ ID NO: 4275 - DNA, 16 bp, synthetic construct
  misc_feature 1..16: note = synthetic [barcode part1]
  source 1..16: mol_type = other DNA
tgttaggatctccgcc

SEQ ID NO: 4276 - DNA, 16 bp, synthetic construct
  misc_feature 1..16: note = synthetic [barcode part1]
  source 1..16: mol_type = other DNA
tggcgtggtattcaac

SEQ ID NO: 4277 - DNA, 16 bp, synthetic construct
  misc_feature 1..16: note = synthetic [barcode part1]
  source 1..16: mol_type = other DNA
tggtgcgagttgtatc

SEQ ID NO: 4278 - DNA, 16 bp, synthetic construct
  misc_feature 1..16: note = synthetic [barcode part1]
  source 1..16: mol_type = other DNA
gtgacgttcgagactt

SEQ ID NO: 4279 - DNA, 16 bp, synthetic construct
  misc_feature 1..16: note = synthetic [barcode part1]
  source 1..16: mol_type = other DNA
tggtggaacgaacctg

SEQ ID NO: 4280 - DNA, 16 bp, synthetic construct
  misc_feature 1..16: note = synthetic [barcode part1]
  source 1..16: mol_type = other DNA
aggtgaccagtaagag

SEQ ID NO: 4281 - DNA, 16 bp, synthetic construct
  misc_feature 1..16: note = synthetic [barcode part1]
  source 1..16: mol_type = other DNA
ttagtctgtaaccgtc

SEQ ID NO: 4282 - DNA, 16 bp, synthetic construct
  misc_feature 1..16: note = synthetic [barcode part1]
  source 1..16: mol_type = other DNA
gatagattcgtccacg

SEQ ID NO: 4283 - DNA, 16 bp, synthetic construct
  misc_feature 1..16: note = synthetic [barcode part1]
  source 1..16: mol_type = other DNA
gtcacctctacggatc

SEQ ID NO: 4284 - DNA, 16 bp, synthetic construct
  misc_feature 1..16: note = synthetic [barcode part1]
  source 1..16: mol_type = other DNA
acgatctgtccttgcg

SEQ ID NO: 4285 - DNA, 16 bp, synthetic construct
  misc_feature 1..16: note = synthetic [barcode part1]
  source 1..16: mol_type = other DNA
tattaaggttcctgcc

SEQ ID NO: 4286 - DNA, 16 bp, synthetic construct
  misc_feature 1..16: note = synthetic [barcode part1]
  source 1..16: mol_type = other DNA
gaactgtgcgagagtc

SEQ ID NO: 4287 - DNA, 16 bp, synthetic construct
  misc_feature 1..16: note = synthetic [barcode part1]
  source 1..16: mol_type = other DNA
acactgacctctgacc

SEQ ID NO: 4288 - DNA, 16 bp, synthetic construct
  misc_feature 1..16: note = synthetic [barcode part1]
  source 1..16: mol_type = other DNA
cggttggttaagatcc

SEQ ID NO: 4289 - DNA, 16 bp, synthetic construct
  misc_feature 1..16: note = synthetic [barcode part1]
  source 1..16: mol_type = other DNA
tggagagaggatcaac

SEQ ID NO: 4290 - DNA, 16 bp, synthetic construct
  misc_feature 1..16: note = synthetic [barcode part1]
  source 1..16: mol_type = other DNA
cctagtctcttggttc

SEQ ID NO: 4291 - DNA, 16 bp, synthetic construct
  misc_feature 1..16: note = synthetic [barcode part1]
  source 1..16: mol_type = other DNA
ttaacctgtctgagtc

SEQ ID NO: 4292 - DNA, 16 bp, synthetic construct
  misc_feature 1..16: note = synthetic [barcode part1]
  source 1..16: mol_type = other DNA
gacactggtcacagtt

SEQ ID NO: 4293 - DNA, 16 bp, synthetic construct
  misc_feature 1..16: note = synthetic [barcode part1]
  source 1..16: mol_type = other DNA
tggcgtgtacagattc

SEQ ID NO: 4294 - DNA, 16 bp, synthetic construct
  misc_feature 1..16: note = synthetic [barcode part1]
  source 1..16: mol_type = other DNA
cgacagattgtcctag

SEQ ID NO: 4295 - DNA, 16 bp, synthetic construct
  misc_feature 1..16: note = synthetic [barcode part1]
  source 1..16: mol_type = other DNA
tatctcgacagactct

SEQ ID NO: 4296 - DNA, 16 bp, synthetic construct
  misc_feature 1..16: note = synthetic [barcode part1]
  source 1..16: mol_type = other DNA
tcgttgtatctacggt

SEQ ID NO: 4297 - DNA, 16 bp, synthetic construct
  misc_feature 1..16: note = synthetic [barcode part1]
  source 1..16: mol_type = other DNA
cacttcgaccttatcc

SEQ ID NO: 4298 - DNA, 16 bp, synthetic construct
  misc_feature 1..16: note = synthetic [barcode part1]
  source 1..16: mol_type = other DNA
ccgacgtgtgtattag

SEQ ID NO: 4299 - DNA, 16 bp, synthetic construct
  misc_feature 1..16: note = synthetic [barcode part1]
  source 1..16: mol_type = other DNA
gagttgcgcagaggtt

SEQ ID NO: 4300 - DNA, 16 bp, synthetic construct
  misc_feature 1..16: note = synthetic [barcode part1]
  source 1..16: mol_type = other DNA
cacactactaactctg

SEQ ID NO: 4301 - DNA, 16 bp, synthetic construct
  misc_feature 1..16: note = synthetic [barcode part1]
  source 1..16: mol_type = other DNA
tggcgtaactgttctt

SEQ ID NO: 4302 - DNA, 16 bp, synthetic construct
  misc_feature 1..16: note = synthetic [barcode part1]
  source 1..16: mol_type = other DNA
cggttatcggatctag

SEQ ID NO: 4303 - DNA, 16 bp, synthetic construct
  misc_feature 1..16: note = synthetic [barcode part1]
  source 1..16: mol_type = other DNA
gtggattccttactac

SEQ ID NO: 4304 - DNA, 16 bp, synthetic construct
  misc_feature 1..16: note = synthetic [barcode part1]
  source 1..16: mol_type = other DNA
gagtgacaacctatag

SEQ ID NO: 4305 - DNA, 16 bp, synthetic construct
  misc_feature 1..16: note = synthetic [barcode part1]
  source 1..16: mol_type = other DNA
gccgaacgagtacaac

SEQ ID NO: 4306 - DNA, 16 bp, synthetic construct
  misc_feature 1..16: note = synthetic [barcode part1]
  source 1..16: mol_type = other DNA
gaacgttcggaataac

SEQ ID NO: 4307 - DNA, 16 bp, synthetic construct
  misc_feature 1..16: note = synthetic [barcode part1]
  source 1..16: mol_type = other DNA
cgtgaacaggtctgtt

SEQ ID NO: 4308 - DNA, 16 bp, synthetic construct
  misc_feature 1..16: note = synthetic [barcode part1]
  source 1..16: mol_type = other DNA
gaatcgtcgttgaacc

SEQ ID NO: 4309 - DNA, 16 bp, synthetic construct
  misc_feature 1..16: note = synthetic [barcode part1]
  source 1..16: mol_type = other DNA
tctaggagtcggttac

SEQ ID NO: 4310 - DNA, 16 bp, synthetic construct
  misc_feature 1..16: note = synthetic [barcode part1]
  source 1..16: mol_type = other DNA
tgaggacttcgacgag

SEQ ID NO: 4311 - DNA, 16 bp, synthetic construct
  misc_feature 1..16: note = synthetic [barcode part1]
  source 1..16: mol_type = other DNA
ttaggaacggtctctg

SEQ ID NO: 4312 - DNA, 16 bp, synthetic construct
  misc_feature 1..16: note = synthetic [barcode part1]
  source 1..16: mol_type = other DNA
agacgcactctatacg

SEQ ID NO: 4313 - DNA, 16 bp, synthetic construct
  misc_feature 1..16: note = synthetic [barcode part1]
  source 1..16: mol_type = other DNA
gtccgcctattataac

SEQ ID NO: 4314 - DNA, 16 bp, synthetic construct
  misc_feature 1..16: note = synthetic [barcode part1]
  source 1..16: mol_type = other DNA
tgtaacggtgacgttc

SEQ ID NO: 4315 - DNA, 16 bp, synthetic construct
  misc_feature 1..16: note = synthetic [barcode part1]
  source 1..16: mol_type = other DNA
taggactcagttggtc

SEQ ID NO: 4316 - DNA, 16 bp, synthetic construct
  misc_feature 1..16: note = synthetic [barcode part1]
  source 1..16: mol_type = other DNA
gatcacggttacacgt

SEQ ID NO: 4317 - DNA, 16 bp, synthetic construct
  misc_feature 1..16: note = synthetic [barcode part1]
  source 1..16: mol_type = other DNA
gtaccaggtgcaactt

SEQ ID NO: 4318 - DNA, 16 bp, synthetic construct
  misc_feature 1..16: note = synthetic [barcode part1]
  source 1..16: mol_type = other DNA
cgcaacctatagatcg

SEQ ID NO: 4319 - DNA, 16 bp, synthetic construct
  misc_feature 1..16: note = synthetic [barcode part1]
  source 1..16: mol_type = other DNA
ccagtagtgaggacgt

SEQ ID NO: 4320 - DNA, 16 bp, synthetic construct
  misc_feature 1..16: note = synthetic [barcode part1]
  source 1..16: mol_type = other DNA
acttggactgcgaatc

SEQ ID NO: 4321 - DNA, 16 bp, synthetic construct
  misc_feature 1..16: note = synthetic [barcode part1]
  source 1..16: mol_type = other DNA
aatctgcgtagacctg

SEQ ID NO: 4322 - DNA, 16 bp, synthetic construct
  misc_feature 1..16: note = synthetic [barcode part1]
  source 1..16: mol_type = other DNA
tgagatcgtcagttgc

SEQ ID NO: 4323 - DNA, 16 bp, synthetic construct
  misc_feature 1..16: note = synthetic [barcode part1]
  source 1..16: mol_type = other DNA
cgtctgtatagtatcc

SEQ ID NO: 4324 - DNA, 16 bp, synthetic construct
  misc_feature 1..16: note = synthetic [barcode part1]
  source 1..16: mol_type = other DNA
ttgaagtaggcggatt

SEQ ID NO: 4325 - DNA, 16 bp, synthetic construct
  misc_feature 1..16: note = synthetic [barcode part1]
  source 1..16: mol_type = other DNA
cgtgcaagtgatcgtt

SEQ ID NO: 4326 - DNA, 16 bp, synthetic construct
  misc_feature 1..16: note = synthetic [barcode part1]
  source 1..16: mol_type = other DNA
cgaattggcgtctctc

SEQ ID NO: 4327 - DNA, 16 bp, synthetic construct
  misc_feature 1..16: note = synthetic [barcode part1]
  source 1..16: mol_type = other DNA
tcacagacagacctac

SEQ ID NO: 4328 - DNA, 16 bp, synthetic construct
  misc_feature 1..16: note = synthetic [barcode part1]
  source 1..16: mol_type = other DNA
cgaacgactattcgtg

SEQ ID NO: 4329 - DNA, 16 bp, synthetic construct
  misc_feature 1..16: note = synthetic [barcode part1]
  source 1..16: mol_type = other DNA
tctacttccactcgtg

SEQ ID NO: 4330 - DNA, 16 bp, synthetic construct
  misc_feature 1..16: note = synthetic [barcode part1]
  source 1..16: mol_type = other DNA
cctaaggtacacacgt

SEQ ID NO: 4331 - DNA, 16 bp, synthetic construct
  misc_feature 1..16: note = synthetic [barcode part1]
  source 1..16: mol_type = other DNA
acggaaccgaagtaag

SEQ ID NO: 4332 - DNA, 16 bp, synthetic construct
  misc_feature 1..16: note = synthetic [barcode part1]
  source 1..16: mol_type = other DNA
cggtaataccaccaac

SEQ ID NO: 4333 - DNA, 16 bp, synthetic construct
  misc_feature 1..16: note = synthetic [barcode part1]
  source 1..16: mol_type = other DNA
taggatattcgcgaag

SEQ ID NO: 4334 - DNA, 16 bp, synthetic construct
  misc_feature 1..16: note = synthetic [barcode part1]
  source 1..16: mol_type = other DNA
gtcacctcgttcagac

SEQ ID NO: 4335 - DNA, 16 bp, synthetic construct
  misc_feature 1..16: note = synthetic [barcode part1]
  source 1..16: mol_type = other DNA
atcgagtatctccgcc

SEQ ID NO: 4336 - DNA, 16 bp, synthetic construct
  misc_feature 1..16: note = synthetic [barcode part1]
  source 1..16: mol_type = other DNA
ataggcggaacctcag

SEQ ID NO: 4337 - DNA, 16 bp, synthetic construct
  misc_feature 1..16: note = synthetic [barcode part1]
  source 1..16: mol_type = other DNA
acctgccacttatcct

SEQ ID NO: 4338 - DNA, 16 bp, synthetic construct
  misc_feature 1..16: note = synthetic [barcode part1]
  source 1..16: mol_type = other DNA
gtccaagacgacaggt

SEQ ID NO: 4339 - DNA, 16 bp, synthetic construct
  misc_feature 1..16: note = synthetic [barcode part1]
  source 1..16: mol_type = other DNA
actcaactacgagaag

SEQ ID NO: 4340 - DNA, 16 bp, synthetic construct
  misc_feature 1..16: note = synthetic [barcode part1]
  source 1..16: mol_type = other DNA
acaaggagacctgatt

SEQ ID NO: 4341 - DNA, 16 bp, synthetic construct
  misc_feature 1..16: note = synthetic [barcode part1]
  source 1..16: mol_type = other DNA
tgtcttacctgttgcc

SEQ ID NO: 4342 - DNA, 16 bp, synthetic construct
  misc_feature 1..16: note = synthetic [barcode part1]
  source 1..16: mol_type = other DNA
ccgatctagtggtaac

SEQ ID NO: 4343 - DNA, 16 bp, synthetic construct
  misc_feature 1..16: note = synthetic [barcode part1]
  source 1..16: mol_type = other DNA
agtcgcctagaggtag

SEQ ID NO: 4344 - DNA, 16 bp, synthetic construct
  misc_feature 1..16: note = synthetic [barcode part1]
  source 1..16: mol_type = other DNA
cctaatcaccgcgtgt

SEQ ID NO: 4345 - DNA, 16 bp, synthetic construct
  misc_feature 1..16: note = synthetic [barcode part1]
  source 1..16: mol_type = other DNA
tggccagtagttaacc

SEQ ID NO: 4346 - DNA, 16 bp, synthetic construct
  misc_feature 1..16: note = synthetic [barcode part1]
  source 1..16: mol_type = other DNA
taggagaattgcacgt

SEQ ID NO: 4347 - DNA, 16 bp, synthetic construct
  misc_feature 1..16: note = synthetic [barcode part1]
  source 1..16: mol_type = other DNA
ccttcagactggtgtc

SEQ ID NO: 4348 - DNA, 16 bp, synthetic construct
  misc_feature 1..16: note = synthetic [barcode part1]
  source 1..16: mol_type = other DNA
tagtagagtggcgaag

SEQ ID NO: 4349 - DNA, 16 bp, synthetic construct
  misc_feature 1..16: note = synthetic [barcode part1]
  source 1..16: mol_type = other DNA
aactgtgtcttagtcc

SEQ ID NO: 4350 - DNA, 16 bp, synthetic construct
  misc_feature 1..16: note = synthetic [barcode part1]
  source 1..16: mol_type = other DNA
ttcggaggtcacaact

SEQ ID NO: 4351 - DNA, 16 bp, synthetic construct
  misc_feature 1..16: note = synthetic [barcode part1]
  source 1..16: mol_type = other DNA
atctaggcgaacactc

SEQ ID NO: 4352 - DNA, 16 bp, synthetic construct
  misc_feature 1..16: note = synthetic [barcode part1]
  source 1..16: mol_type = other DNA
agtgttcgcgattacg

SEQ ID NO: 4353 - DNA, 16 bp, synthetic construct
  misc_feature 1..16: note = synthetic [barcode part1]
  source 1..16: mol_type = other DNA
ttatattactcggcgc

SEQ ID NO: 4354 - DNA, 16 bp, synthetic construct
  misc_feature 1..16: note = synthetic [barcode part1]
  source 1..16: mol_type = other DNA
ttcgacaggtaactcg

SEQ ID NO: 4355 - DNA, 16 bp, synthetic construct
  misc_feature 1..16: note = synthetic [barcode part1]
  source 1..16: mol_type = other DNA
gatcacttcgtattcg

SEQ ID NO: 4356 - DNA, 16 bp, synthetic construct
  misc_feature 1..16: note = synthetic [barcode part1]
  source 1..16: mol_type = other DNA
ttacgcaaggaagttg

SEQ ID NO: 4357 - DNA, 16 bp, synthetic construct
  misc_feature 1..16: note = synthetic [barcode part1]
  source 1..16: mol_type = other DNA
atctgccagaccttgc

SEQ ID NO: 4358 - DNA, 16 bp, synthetic construct
  misc_feature 1..16: note = synthetic [barcode part1]
  source 1..16: mol_type = other DNA
gaactgcggtaatcct

SEQ ID NO: 4359 - DNA, 16 bp, synthetic construct
  misc_feature 1..16: note = synthetic [barcode part1]
  source 1..16: mol_type = other DNA
ttgcgtcaacgtgaac

SEQ ID NO: 4360 - DNA, 16 bp, synthetic construct
  misc_feature 1..16: note = synthetic [barcode part1]
  source 1..16: mol_type = other DNA
aggcgccttatctcgt

SEQ ID NO: 4361 - DNA, 16 bp, synthetic construct
  misc_feature 1..16: note = synthetic [barcode part1]
  source 1..16: mol_type = other DNA
tgaaccggaaggcgtt

SEQ ID NO: 4362 - DNA, 16 bp, synthetic construct
  misc_feature 1..16: note = synthetic [barcode part1]
  source 1..16: mol_type = other DNA
tcacagttcgaccaag

SEQ ID NO: 4363 - DNA, 16 bp, synthetic construct
  misc_feature 1..16: note = synthetic [barcode part1]
  source 1..16: mol_type = other DNA
tcttgcgtagtctaac

SEQ ID NO: 4364 - DNA, 16 bp, synthetic construct
  misc_feature 1..16: note = synthetic [barcode part1]
  source 1..16: mol_type = other DNA
tacggcacgcctactt

SEQ ID NO: 4365 - DNA, 16 bp, synthetic construct
  misc_feature 1..16: note = synthetic [barcode part1]
  source 1..16: mol_type = other DNA
gttaagacgcggtcag

SEQ ID NO: 4366 - DNA, 16 bp, synthetic construct
  misc_feature 1..16: note = synthetic [barcode part1]
  source 1..16: mol_type = other DNA
gttataggtctgcctt

SEQ ID NO: 4367 - DNA, 16 bp, synthetic construct
  misc_feature 1..16: note = synthetic [barcode part1]
  source 1..16: mol_type = other DNA
agatcggcgtgtaacg

SEQ ID NO: 4368 - DNA, 16 bp, synthetic construct
  misc_feature 1..16: note = synthetic [barcode part1]
  source 1..16: mol_type = other DNA
tgcgtggaagtattcc

SEQ ID NO: 4369 - DNA, 16 bp, synthetic construct
  misc_feature 1..16: note = synthetic [barcode part1]
  source 1..16: mol_type = other DNA
caactgttcgtacgag

SEQ ID NO: 4370 - DNA, 16 bp, synthetic construct
  misc_feature 1..16: note = synthetic [barcode part1]
  source 1..16: mol_type = other DNA
atcgcgatccaaggtt

SEQ ID NO: 4371 - DNA, 16 bp, synthetic construct
  misc_feature 1..16: note = synthetic [barcode part1]
  source 1..16: mol_type = other DNA
aacagaggcgtaactt

SEQ ID NO: 4372 - DNA, 16 bp, synthetic construct
  misc_feature 1..16: note = synthetic [barcode part1]
  source 1..16: mol_type = other DNA
tccaccgttcctaact

SEQ ID NO: 4373 - DNA, 16 bp, synthetic construct
  misc_feature 1..16: note = synthetic [barcode part1]
  source 1..16: mol_type = other DNA
agtcacgaaggaatct

SEQ ID NO: 4374 - DNA, 16 bp, synthetic construct
  misc_feature 1..16: note = synthetic [barcode part1]
  source 1..16: mol_type = other DNA
aggagacacagaacac

SEQ ID NO: 4375 - DNA, 16 bp, synthetic construct
  misc_feature 1..16: note = synthetic [barcode part1]
  source 1..16: mol_type = other DNA
tcggtcctgttctgtt

SEQ ID NO: 4376 - DNA, 16 bp, synthetic construct
  misc_feature 1..16: note = synthetic [barcode part1]
  source 1..16: mol_type = other DNA
ataggtcgtgcagttc

SEQ ID NO: 4377 - DNA, 16 bp, synthetic construct
  misc_feature 1..16: note = synthetic [barcode part1]
  source 1..16: mol_type = other DNA
tagtaaggcagtggag

SEQ ID NO: 4378 - DNA, 16 bp, synthetic construct
  misc_feature 1..16: note = synthetic [barcode part1]
  source 1..16: mol_type = other DNA
tgaggagacgtatcgc

SEQ ID NO: 4379 - DNA, 16 bp, synthetic construct
  misc_feature 1..16: note = synthetic [barcode part1]
  source 1..16: mol_type = other DNA
actatctggtacttgc

SEQ ID NO: 4380 - DNA, 16 bp, synthetic construct
  misc_feature 1..16: note = synthetic [barcode part1]
  source 1..16: mol_type = other DNA
agtgcacgagatcggt

SEQ ID NO: 4381 - DNA, 16 bp, synthetic construct
  misc_feature 1..16: note = synthetic [barcode part1]
  source 1..16: mol_type = other DNA
cctaccgactattcct

SEQ ID NO: 4382 - DNA, 16 bp, synthetic construct
  misc_feature 1..16: note = synthetic [barcode part1]
  source 1..16: mol_type = other DNA
tgttcaggttgagaag

SEQ ID NO: 4383 - DNA, 16 bp, synthetic construct
  misc_feature 1..16: note = synthetic [barcode part1]
  source 1..16: mol_type = other DNA
atcttgtcaccaacac

SEQ ID NO: 4384 - DNA, 16 bp, synthetic construct
  misc_feature 1..16: note = synthetic [barcode part1]
  source 1..16: mol_type = other DNA
gcaagtctcagacgtt

SEQ ID NO: 4385 - DNA, 16 bp, synthetic construct
  misc_feature 1..16: note = synthetic [barcode part1]
  source 1..16: mol_type = other DNA
gtccaagttcactact

SEQ ID NO: 4386 - DNA, 16 bp, synthetic construct
  misc_feature 1..16: note = synthetic [barcode part1]
  source 1..16: mol_type = other DNA
cctggttgccgtatac

SEQ ID NO: 4387 - DNA, 16 bp, synthetic construct
  misc_feature 1..16: note = synthetic [barcode part1]
  source 1..16: mol_type = other DNA
atcaggtgtagtccac

SEQ ID NO: 4388 - DNA, 16 bp, synthetic construct
  misc_feature 1..16: note = synthetic [barcode part1]
  source 1..16: mol_type = other DNA
caaggtcaactctggt

SEQ ID NO: 4389 - DNA, 16 bp, synthetic construct
  misc_feature 1..16: note = synthetic [barcode part1]
  source 1..16: mol_type = other DNA
tcgtgaggtgatcgtt

SEQ ID NO: 4390 - DNA, 16 bp, synthetic construct
  misc_feature 1..16: note = synthetic [barcode part1]
  source 1..16: mol_type = other DNA
ttaacggtagatcgcc

SEQ ID NO: 4391 - DNA, 16 bp, synthetic construct
  misc_feature 1..16: note = synthetic [barcode part1]
  source 1..16: mol_type = other DNA
accggtaacttcttgt

SEQ ID NO: 4392 - DNA, 16 bp, synthetic construct
  misc_feature 1..16: note = synthetic [barcode part1]
  source 1..16: mol_type = other DNA
caggttaggaagtgcc

SEQ ID NO: 4393 - DNA, 16 bp, synthetic construct
  misc_feature 1..16: note = synthetic [barcode part1]
  source 1..16: mol_type = other DNA
tcgcaggaagtcgaac

SEQ ID NO: 4394 - DNA, 16 bp, synthetic construct
  misc_feature 1..16: note = synthetic [barcode part1]
  source 1..16: mol_type = other DNA
gcaatcactggaggac

SEQ ID NO: 4395 - DNA, 16 bp, synthetic construct
  misc_feature 1..16: note = synthetic [barcode part1]
  source 1..16: mol_type = other DNA
taccggaaggcacagt

SEQ ID NO: 4396 - DNA, 16 bp, synthetic construct
  misc_feature 1..16: note = synthetic [barcode part1]
  source 1..16: mol_type = other DNA
cagatcgtcgaactgt

SEQ ID NO: 4397 - DNA, 16 bp, synthetic construct
  misc_feature 1..16: note = synthetic [barcode part1]
  source 1..16: mol_type = other DNA
ataccagtggcggaac

SEQ ID NO: 4398 - DNA, 16 bp, synthetic construct
  misc_feature 1..16: note = synthetic [barcode part1]
  source 1..16: mol_type = other DNA
actgcgcctgatatag

SEQ ID NO: 4399 - DNA, 16 bp, synthetic construct
  misc_feature 1..16: note = synthetic [barcode part1]
  source 1..16: mol_type = other DNA
gcctactattccggac

SEQ ID NO: 4400 - DNA, 16 bp, synthetic construct
  misc_feature 1..16: note = synthetic [barcode part1]
  source 1..16: mol_type = other DNA
gttcctagttcaacgt

SEQ ID NO: 4401 - DNA, 16 bp, synthetic construct
  misc_feature 1..16: note = synthetic [barcode part1]
  source 1..16: mol_type = other DNA
agaccgaattgtgtag

SEQ ID NO: 4402 - DNA, 16 bp, synthetic construct
  misc_feature 1..16: note = synthetic [barcode part1]
  source 1..16: mol_type = other DNA
ttggaataggcaggtt

SEQ ID NO: 4403 - DNA, 16 bp, synthetic construct
  misc_feature 1..16: note = synthetic [barcode part1]
  source 1..16: mol_type = other DNA
ttcacgaatcttaccg

SEQ ID NO: 4404 - DNA, 16 bp, synthetic construct
  misc_feature 1..16: note = synthetic [barcode part1]
  source 1..16: mol_type = other DNA
gaagaacctgcgtggt

SEQ ID NO: 4405 - DNA, 16 bp, synthetic construct
  misc_feature 1..16: note = synthetic [barcode part1]
  source 1..16: mol_type = other DNA
gtgccgagaagtgatc

SEQ ID NO: 4406 - DNA, 16 bp, synthetic construct
  misc_feature 1..16: note = synthetic [barcode part1]
  source 1..16: mol_type = other DNA
gattacggtacaccac

SEQ ID NO: 4407 - DNA, 16 bp, synthetic construct
  misc_feature 1..16: note = synthetic [barcode part1]
  source 1..16: mol_type = other DNA
ttctgttgtgagttcg

SEQ ID NO: 4408 - DNA, 16 bp, synthetic construct
  misc_feature 1..16: note = synthetic [barcode part1]
  source 1..16: mol_type = other DNA
cgcgtcagatcttctg

SEQ ID NO: 4409 - DNA, 16 bp, synthetic construct
  misc_feature 1..16: note = synthetic [barcode part1]
  source 1..16: mol_type = other DNA
cgtaatccttctggcg

SEQ ID NO: 4410 - DNA, 16 bp, synthetic construct
  misc_feature 1..16: note = synthetic [barcode part1]
  source 1..16: mol_type = other DNA
agtacctataggacag

SEQ ID NO: 4411 - DNA, 16 bp, synthetic construct
  misc_feature 1..16: note = synthetic [barcode part1]
  source 1..16: mol_type = other DNA
acgtgttagtggcgag

SEQ ID NO: 4412 - DNA, 16 bp, synthetic construct
  misc_feature 1..16: note = synthetic [barcode part1]
  source 1..16: mol_type = other DNA
cctctgtctgtacttg

SEQ ID NO: 4413 - DNA, 16 bp, synthetic construct
  misc_feature 1..16: note = synthetic [barcode part1]
  source 1..16: mol_type = other DNA
aagttactccgcgcct

SEQ ID NO: 4414 - DNA, 16 bp, synthetic construct
  misc_feature 1..16: note = synthetic [barcode part1]
  source 1..16: mol_type = other DNA
gttctgcgtgatcgtc

SEQ ID NO: 4415 - DNA, 16 bp, synthetic construct
  misc_feature 1..16: note = synthetic [barcode part1]
  source 1..16: mol_type = other DNA
cgtacggttcgattcc

SEQ ID NO: 4416 - DNA, 16 bp, synthetic construct
  misc_feature 1..16: note = synthetic [barcode part1]
  source 1..16: mol_type = other DNA
tacgtccgaactgtcc

SEQ ID NO: 4417 - DNA, 16 bp, synthetic construct
  misc_feature 1..16: note = synthetic [barcode part1]
  source 1..16: mol_type = other DNA
tgtagacctcgttatc

SEQ ID NO: 4418 - DNA, 16 bp, synthetic construct
  misc_feature 1..16: note = synthetic [barcode part1]
  source 1..16: mol_type = other DNA
tccgaagtgtacgtgt

SEQ ID NO: 4419 - DNA, 16 bp, synthetic construct
  misc_feature 1..16: note = synthetic [barcode part1]
  source 1..16: mol_type = other DNA
tataaggcgcaggaag

SEQ ID NO: 4420 - DNA, 16 bp, synthetic construct
  misc_feature 1..16: note = synthetic [barcode part1]
  source 1..16: mol_type = other DNA
attctggccttcttcg

SEQ ID NO: 4421 - DNA, 16 bp, synthetic construct
  misc_feature 1..16: note = synthetic [barcode part1]
  source 1..16: mol_type = other DNA
tcgtatcgcctctgtt

SEQ ID NO: 4422 - DNA, 16 bp, synthetic construct
  misc_feature 1..16: note = synthetic [barcode part1]
  source 1..16: mol_type = other DNA
taggtacacacttggc

SEQ ID NO: 4423 - DNA, 16 bp, synthetic construct
  misc_feature 1..16: note = synthetic [barcode part1]
  source 1..16: mol_type = other DNA
aggcactcctattgtt

SEQ ID NO: 4424 - DNA, 16 bp, synthetic construct
  misc_feature 1..16: note = synthetic [barcode part1]
  source 1..16: mol_type = other DNA
tctcagaggtattgcg

SEQ ID NO: 4425 - DNA, 16 bp, synthetic construct
  misc_feature 1..16: note = synthetic [barcode part1]
  source 1..16: mol_type = other DNA
cgttctcgtatcttcg

SEQ ID NO: 4426 - DNA, 16 bp, synthetic construct
  misc_feature 1..16: note = synthetic [barcode part1]
  source 1..16: mol_type = other DNA
aaccaacgaggaagac

SEQ ID NO: 4427 - DNA, 16 bp, synthetic construct
  misc_feature 1..16: note = synthetic [barcode part1]
  source 1..16: mol_type = other DNA
ccgtccacctagagtt

SEQ ID NO: 4428 - DNA, 16 bp, synthetic construct
  misc_feature 1..16: note = synthetic [barcode part1]
  source 1..16: mol_type = other DNA
atcgcgacacttgcct

SEQ ID NO: 4429 - DNA, 16 bp, synthetic construct
  misc_feature 1..16: note = synthetic [barcode part1]
  source 1..16: mol_type = other DNA
gatcctacactgtgag

SEQ ID NO: 4430 - DNA, 16 bp, synthetic construct
  misc_feature 1..16: note = synthetic [barcode part1]
  source 1..16: mol_type = other DNA
tggcagaacttcactg

SEQ ID NO: 4431 - DNA, 16 bp, synthetic construct
  misc_feature 1..16: note = synthetic [barcode part1]
  source 1..16: mol_type = other DNA
caacacgtgcgttagt

SEQ ID NO: 4432 - DNA, 16 bp, synthetic construct
  misc_feature 1..16: note = synthetic [barcode part1]
  source 1..16: mol_type = other DNA
gtcctcacgttaggtc

SEQ ID NO: 4433 - DNA, 16 bp, synthetic construct
  misc_feature 1..16: note = synthetic [barcode part1]
  source 1..16: mol_type = other DNA
gacaggattagtgtac

SEQ ID NO: 4434 - DNA, 16 bp, synthetic construct
  misc_feature 1..16: note = synthetic [barcode part1]
  source 1..16: mol_type = other DNA
gcctctgtgtcagact

SEQ ID NO: 4435 - DNA, 16 bp, synthetic construct
  misc_feature 1..16: note = synthetic [barcode part1]
  source 1..16: mol_type = other DNA
gtgatcagtattggcc

SEQ ID NO: 4436 - DNA, 16 bp, synthetic construct
  misc_feature 1..16: note = synthetic [barcode part1]
  source 1..16: mol_type = other DNA
atataggattcggcag

SEQ ID NO: 4437 - DNA, 16 bp, synthetic construct
  misc_feature 1..16: note = synthetic [barcode part1]
  source 1..16: mol_type = other DNA
aactggttggtgttgc

SEQ ID NO: 4438 - DNA, 16 bp, synthetic construct
  misc_feature 1..16: note = synthetic [barcode part1]
  source 1..16: mol_type = other DNA
ccttaacgcgtccagt

SEQ ID NO: 4439 - DNA, 16 bp, synthetic construct
  misc_feature 1..16: note = synthetic [barcode part1]
  source 1..16: mol_type = other DNA
caactgagtcacaacc

SEQ ID NO: 4440 - DNA, 16 bp, synthetic construct
  misc_feature 1..16: note = synthetic [barcode part1]
  source 1..16: mol_type = other DNA
agtgtcgttccttcct

SEQ ID NO: 4441 - DNA, 16 bp, synthetic construct
  misc_feature 1..16: note = synthetic [barcode part1]
  source 1..16: mol_type = other DNA
agacactgaataacgc

SEQ ID NO: 4442 - DNA, 16 bp, synthetic construct
  misc_feature 1..16: note = synthetic [barcode part1]
  source 1..16: mol_type = other DNA
gcgttagaatccacgt

SEQ ID NO: 4443 - DNA, 16 bp, synthetic construct
  misc_feature 1..16: note = synthetic [barcode part1]
  source 1..16: mol_type = other DNA
gagattactgagtgtg

SEQ ID NO: 4444 - DNA, 16 bp, synthetic construct
  misc_feature 1..16: note = synthetic [barcode part1]
  source 1..16: mol_type = other DNA
atctgagagacggtgc

SEQ ID NO: 4445 - DNA, 16 bp, synthetic construct
  misc_feature 1..16: note = synthetic [barcode part1]
  source 1..16: mol_type = other DNA
agttcttagtcacacc

SEQ ID NO: 4446 - DNA, 16 bp, synthetic construct
  misc_feature 1..16: note = synthetic [barcode part1]
  source 1..16: mol_type = other DNA
caattggtcgaggttc

SEQ ID NO: 4447 - DNA, 16 bp, synthetic construct
  misc_feature 1..16: note = synthetic [barcode part1]
  source 1..16: mol_type = other DNA
acgaatatatcgcgag

SEQ ID NO: 4448 - DNA, 16 bp, synthetic construct
  misc_feature 1..16: note = synthetic [barcode part1]
  source 1..16: mol_type = other DNA
gatcgttatccttgtg

SEQ ID NO: 4449 - DNA, 16 bp, synthetic construct
  misc_feature 1..16: note = synthetic [barcode part1]
  source 1..16: mol_type = other DNA
tcaataggtggcctgt

SEQ ID NO: 4450 - DNA, 16 bp, synthetic construct
  misc_feature 1..16: note = synthetic [barcode part1]
  source 1..16: mol_type = other DNA
ttgcacaacacaccag

SEQ ID NO: 4451 - DNA, 16 bp, synthetic construct
  misc_feature 1..16: note = synthetic [barcode part1]
  source 1..16: mol_type = other DNA
atccgccaacaagtgt

SEQ ID NO: 4452 - DNA, 16 bp, synthetic construct
  misc_feature 1..16: note = synthetic [barcode part1]
  source 1..16: mol_type = other DNA
tccgcagtcaccttag

SEQ ID NO: 4453 - DNA, 16 bp, synthetic construct
  misc_feature 1..16: note = synthetic [barcode part1]
  source 1..16: mol_type = other DNA
atccaagttgtctcac

SEQ ID NO: 4454 - DNA, 16 bp, synthetic construct
  misc_feature 1..16: note = synthetic [barcode part1]
  source 1..16: mol_type = other DNA
aacgttccgttccacg

SEQ ID NO: 4455 - DNA, 16 bp, synthetic construct
  misc_feature 1..16: note = synthetic [barcode part1]
  source 1..16: mol_type = other DNA
agattgacgtgactag

SEQ ID NO: 4456 - DNA, 16 bp, synthetic construct
  misc_feature 1..16: note = synthetic [barcode part1]
  source 1..16: mol_type = other DNA
acttcaccgttccact

SEQ ID NO: 4457 - DNA, 16 bp, synthetic construct
  misc_feature 1..16: note = synthetic [barcode part1]
  source 1..16: mol_type = other DNA
agtacctgtggaatag

SEQ ID NO: 4458 - DNA, 16 bp, synthetic construct
  misc_feature 1..16: note = synthetic [barcode part1]
  source 1..16: mol_type = other DNA
caacacttgaacgaag

SEQ ID NO: 4459 - DNA, 16 bp, synthetic construct
  misc_feature 1..16: note = synthetic [barcode part1]
  source 1..16: mol_type = other DNA
cacctcggtgataagt

SEQ ID NO: 4460 - DNA, 16 bp, synthetic construct
  misc_feature 1..16: note = synthetic [barcode part1]
  source 1..16: mol_type = other DNA
tccgtaatcacagacg

SEQ ID NO: 4461 - DNA, 16 bp, synthetic construct
  misc_feature 1..16: note = synthetic [barcode part1]
  source 1..16: mol_type = other DNA
aattgtggactgaggt

SEQ ID NO: 4462 - DNA, 16 bp, synthetic construct
  misc_feature 1..16: note = synthetic [barcode part1]
  source 1..16: mol_type = other DNA
gatacggtcaccgaag

SEQ ID NO: 4463 - DNA, 16 bp, synthetic construct
  misc_feature 1..16: note = synthetic [barcode part1]
  source 1..16: mol_type = other DNA
acaatccacctgacag

SEQ ID NO: 4464 - DNA, 16 bp, synthetic construct
  misc_feature 1..16: note = synthetic [barcode part1]
  source 1..16: mol_type = other DNA
attcggagatacctgc

SEQ ID NO: 4465 - DNA, 16 bp, synthetic construct
  misc_feature 1..16: note = synthetic [barcode part1]
  source 1..16: mol_type = other DNA
acctgcgtagtccttg

SEQ ID NO: 4466 - DNA, 16 bp, synthetic construct
  misc_feature 1..16: note = synthetic [barcode part1]
  source 1..16: mol_type = other DNA
cacgtaagtcttctac

SEQ ID NO: 4467 - DNA, 16 bp, synthetic construct
  misc_feature 1..16: note = synthetic [barcode part1]
  source 1..16: mol_type = other DNA
tccaccgagagattgt

SEQ ID NO: 4468 - DNA, 16 bp, synthetic construct
  misc_feature 1..16: note = synthetic [barcode part1]
  source 1..16: mol_type = other DNA
gatatcgacaccacac

SEQ ID NO: 4469 - DNA, 16 bp, synthetic construct
  misc_feature 1..16: note = synthetic [barcode part1]
  source 1..16: mol_type = other DNA
taacgtggtcgtcctc

SEQ ID NO: 4470 - DNA, 16 bp, synthetic construct
  misc_feature 1..16: note = synthetic [barcode part1]
  source 1..16: mol_type = other DNA
tagactggatcgtcac

SEQ ID NO: 4471 - DNA, 16 bp, synthetic construct
  misc_feature 1..16: note = synthetic [barcode part1]
  source 1..16: mol_type = other DNA
tactactcaccggtgc

SEQ ID NO: 4472 - DNA, 16 bp, synthetic construct
  misc_feature 1..16: note = synthetic [barcode part1]
  source 1..16: mol_type = other DNA
cactcgtcttggaacc

SEQ ID NO: 4473 - DNA, 16 bp, synthetic construct
  misc_feature 1..16: note = synthetic [barcode part1]
  source 1..16: mol_type = other DNA
agtcaacactgtggtc

SEQ ID NO: 4474 - DNA, 16 bp, synthetic construct
  misc_feature 1..16: note = synthetic [barcode part1]
  source 1..16: mol_type = other DNA
ttgaggttctattcgc

SEQ ID NO: 4475 - DNA, 16 bp, synthetic construct
  misc_feature 1..16: note = synthetic [barcode part1]
  source 1..16: mol_type = other DNA
tccaccggtataactt

SEQ ID NO: 4476 - DNA, 16 bp, synthetic construct
  misc_feature 1..16: note = synthetic [barcode part1]
  source 1..16: mol_type = other DNA
gtactgaggaggtcac

SEQ ID NO: 4477 - DNA, 16 bp, synthetic construct
  misc_feature 1..16: note = synthetic [barcode part1]
  source 1..16: mol_type = other DNA
tcggaagttagtacag

SEQ ID NO: 4478 - DNA, 16 bp, synthetic construct
  misc_feature 1..16: note = synthetic [barcode part1]
  source 1..16: mol_type = other DNA
cctgattccttctggt

SEQ ID NO: 4479 - DNA, 16 bp, synthetic construct
  misc_feature 1..16: note = synthetic [barcode part1]
  source 1..16: mol_type = other DNA
agagattggtcggaag

SEQ ID NO: 4480 - DNA, 16 bp, synthetic construct
  misc_feature 1..16: note = synthetic [barcode part1]
  source 1..16: mol_type = other DNA
ccgtgactataacacg

SEQ ID NO: 4481 - DNA, 16 bp, synthetic construct
  misc_feature 1..16: note = synthetic [barcode part1]
  source 1..16: mol_type = other DNA
gtgaaccgacttgtgt

SEQ ID NO: 4482 - DNA, 16 bp, synthetic construct
  misc_feature 1..16: note = synthetic [barcode part1]
  source 1..16: mol_type = other DNA
aattagtgtgccgcac

SEQ ID NO: 4483 - DNA, 16 bp, synthetic construct
  misc_feature 1..16: note = synthetic [barcode part1]
  source 1..16: mol_type = other DNA
tcaaggtggcggatac

SEQ ID NO: 4484 - DNA, 16 bp, synthetic construct
  misc_feature 1..16: note = synthetic [barcode part1]
  source 1..16: mol_type = other DNA
ttacaccaggtcgcct

SEQ ID NO: 4485 - DNA, 16 bp, synthetic construct
  misc_feature 1..16: note = synthetic [barcode part1]
  source 1..16: mol_type = other DNA
tcttgagaacgttgcg

SEQ ID NO: 4486 - DNA, 16 bp, synthetic construct
  misc_feature 1..16: note = synthetic [barcode part1]
  source 1..16: mol_type = other DNA
cgcaatacagacaggc

SEQ ID NO: 4487 - DNA, 16 bp, synthetic construct
  misc_feature 1..16: note = synthetic [barcode part1]
  source 1..16: mol_type = other DNA
tagaggaacgccgact

SEQ ID NO: 4488 - DNA, 16 bp, synthetic construct
  misc_feature 1..16: note = synthetic [barcode part1]
  source 1..16: mol_type = other DNA
aaggcaccaatccgag

SEQ ID NO: 4489 - DNA, 16 bp, synthetic construct
  misc_feature 1..16: note = synthetic [barcode part1]
  source 1..16: mol_type = other DNA
gaggaacttcaacctc

SEQ ID NO: 4490 - DNA, 16 bp, synthetic construct
  misc_feature 1..16: note = synthetic [barcode part1]
  source 1..16: mol_type = other DNA
ataggcgttgtctgtg

SEQ ID NO: 4491 - DNA, 16 bp, synthetic construct
  misc_feature 1..16: note = synthetic [barcode part1]
  source 1..16: mol_type = other DNA
ttcaaggaacttcggc

SEQ ID NO: 4492 - DNA, 16 bp, synthetic construct
  misc_feature 1..16: note = synthetic [barcode part1]
  source 1..16: mol_type = other DNA
actgactgactagtcg

SEQ ID NO: 4493 - DNA, 16 bp, synthetic construct
  misc_feature 1..16: note = synthetic [barcode part1]
  source 1..16: mol_type = other DNA
tacactggttgacgtg

SEQ ID NO: 4494 - DNA, 16 bp, synthetic construct
  misc_feature 1..16: note = synthetic [barcode part1]
  source 1..16: mol_type = other DNA
cagtacacggtcttcc

SEQ ID NO: 4495 - DNA, 16 bp, synthetic construct
  misc_feature 1..16: note = synthetic [barcode part1]
  source 1..16: mol_type = other DNA
aagtgtctctgagtgc

SEQ ID NO: 4496 - DNA, 16 bp, synthetic construct
  misc_feature 1..16: note = synthetic [barcode part1]
  source 1..16: mol_type = other DNA
gcacttctcaagtcgc

SEQ ID NO: 4497 - DNA, 16 bp, synthetic construct
  misc_feature 1..16: note = synthetic [barcode part1]
  source 1..16: mol_type = other DNA
cacggtactcgaagtt

SEQ ID NO: 4498 - DNA, 16 bp, synthetic construct
  misc_feature 1..16: note = synthetic [barcode part1]
  source 1..16: mol_type = other DNA
gtacgcctattgacag

SEQ ID NO: 4499 - DNA, 16 bp, synthetic construct
  misc_feature 1..16: note = synthetic [barcode part1]
  source 1..16: mol_type = other DNA
ccgttcggtaacacct

SEQ ID NO: 4500 - DNA, 16 bp, synthetic construct
  misc_feature 1..16: note = synthetic [barcode part1]
  source 1..16: mol_type = other DNA
actgtgagagtaagtc

SEQ ID NO: 4501 - DNA, 16 bp, synthetic construct
  misc_feature 1..16: note = synthetic [barcode part1]
  source 1..16: mol_type = other DNA
tagtaaggcgacagag

SEQ ID NO: 4502 - DNA, 16 bp, synthetic construct
  misc_feature 1..16: note = synthetic [barcode part1]
  source 1..16: mol_type = other DNA
tgcgtgacttaactct

SEQ ID NO: 4503 - DNA, 16 bp, synthetic construct
  misc_feature 1..16: note = synthetic [barcode part1]
  source 1..16: mol_type = other DNA
acgagtcagaagttgt

SEQ ID NO: 4504 - DNA, 16 bp, synthetic construct
  misc_feature 1..16: note = synthetic [barcode part1]
  source 1..16: mol_type = other DNA
tcaattcagtgcgttc

SEQ ID NO: 4505 - DNA, 16 bp, synthetic construct
  misc_feature 1..16: note = synthetic [barcode part1]
  source 1..16: mol_type = other DNA
gtacgcgttctaagac

SEQ ID NO: 4506 - DNA, 16 bp, synthetic construct
  misc_feature 1..16: note = synthetic [barcode part1]
  source 1..16: mol_type = other DNA
ttccagacttacctag

SEQ ID NO: 4507 - DNA, 16 bp, synthetic construct
  misc_feature 1..16: note = synthetic [barcode part1]
  source 1..16: mol_type = other DNA
tggaaccactgactgt

SEQ ID NO: 4508 - DNA, 16 bp, synthetic construct
  misc_feature 1..16: note = synthetic [barcode part1]
  source 1..16: mol_type = other DNA
ttcgtcgccttcaatc

SEQ ID NO: 4509 - DNA, 16 bp, synthetic construct
  misc_feature 1..16: note = synthetic [barcode part1]
  source 1..16: mol_type = other DNA
cgcgcaagtgattatc

SEQ ID NO: 4510 - DNA, 16 bp, synthetic construct
  misc_feature 1..16: note = synthetic [barcode part1]
  source 1..16: mol_type = other DNA
gtcaactccgaagttg

SEQ ID NO: 4511 - DNA, 16 bp, synthetic construct
  misc_feature 1..16: note = synthetic [barcode part1]
  source 1..16: mol_type = other DNA
gttgacttgcaacacg

SEQ ID NO: 4512 - DNA, 16 bp, synthetic construct
  misc_feature 1..16: note = synthetic [barcode part1]
  source 1..16: mol_type = other DNA
tggcgaacctgagtag

SEQ ID NO: 4513 - DNA, 16 bp, synthetic construct
  misc_feature 1..16: note = synthetic [barcode part1]
  source 1..16: mol_type = other DNA
gacgttgtacgtacgt

SEQ ID NO: 4514 - DNA, 16 bp, synthetic construct
  misc_feature 1..16: note = synthetic [barcode part1]
  source 1..16: mol_type = other DNA
tgtcgaattcacgttc

SEQ ID NO: 4515 - DNA, 16 bp, synthetic construct
  misc_feature 1..16: note = synthetic [barcode part1]
  source 1..16: mol_type = other DNA
ttctctcagagaggac

SEQ ID NO: 4516 - DNA, 16 bp, synthetic construct
  misc_feature 1..16: note = synthetic [barcode part1]
  source 1..16: mol_type = other DNA
atagaacgcctgtaag

SEQ ID NO: 4517 - DNA, 16 bp, synthetic construct
  misc_feature 1..16: note = synthetic [barcode part1]
  source 1..16: mol_type = other DNA
cctaaggtcaactggt

SEQ ID NO: 4518 - DNA, 16 bp, synthetic construct
  misc_feature 1..16: note = synthetic [barcode part1]
  source 1..16: mol_type = other DNA
taagtacgcgcgactt

SEQ ID NO: 4519 - DNA, 16 bp, synthetic construct
  misc_feature 1..16: note = synthetic [barcode part1]
  source 1..16: mol_type = other DNA
cgcgcctatctaacac

SEQ ID NO: 4520 - DNA, 16 bp, synthetic construct
  misc_feature 1..16: note = synthetic [barcode part1]
  source 1..16: mol_type = other DNA
gtagtcgcacgcaatt

SEQ ID NO: 4521 - DNA, 16 bp, synthetic construct
  misc_feature 1..16: note = synthetic [barcode part1]
  source 1..16: mol_type = other DNA
cctaactcgtggtcgt

SEQ ID NO: 4522 - DNA, 16 bp, synthetic construct
  misc_feature 1..16: note = synthetic [barcode part1]
  source 1..16: mol_type = other DNA
gactcaggacttgact

SEQ ID NO: 4523 - DNA, 16 bp, synthetic construct
  misc_feature 1..16: note = synthetic [barcode part1]
  source 1..16: mol_type = other DNA
gacaggagaccgtatc

SEQ ID NO: 4524 - DNA, 16 bp, synthetic construct
  misc_feature 1..16: note = synthetic [barcode part1]
  source 1..16: mol_type = other DNA
tgcgttcgtaagaacc

SEQ ID NO: 4525 - DNA, 16 bp, synthetic construct
  misc_feature 1..16: note = synthetic [barcode part1]
  source 1..16: mol_type = other DNA
cagtgatctctacgcc

SEQ ID NO: 4526 - DNA, 16 bp, synthetic construct
  misc_feature 1..16: note = synthetic [barcode part1]
  source 1..16: mol_type = other DNA
gcggtatcggttaact

SEQ ID NO: 4527 - DNA, 16 bp, synthetic construct
  misc_feature 1..16: note = synthetic [barcode part1]
  source 1..16: mol_type = other DNA
agtgattgaagtgcgt

SEQ ID NO: 4528 - DNA, 16 bp, synthetic construct
  misc_feature 1..16: note = synthetic [barcode part1]
  source 1..16: mol_type = other DNA
caagtactcaggtacc

SEQ ID NO: 4529 - DNA, 16 bp, synthetic construct
  misc_feature 1..16: note = synthetic [barcode part1]
  source 1..16: mol_type = other DNA
gaggtcttccaaggtt

SEQ ID NO: 4530 - DNA, 16 bp, synthetic construct
  misc_feature 1..16: note = synthetic [barcode part1]
  source 1..16: mol_type = other DNA
caatcgaattacggcc

SEQ ID NO: 4531 - DNA, 16 bp, synthetic construct
  misc_feature 1..16: note = synthetic [barcode part1]
  source 1..16: mol_type = other DNA
cacgcgatccaattcc

SEQ ID NO: 4532 - DNA, 16 bp, synthetic construct
  misc_feature 1..16: note = synthetic [barcode part1]
  source 1..16: mol_type = other DNA
ccgtctagtaggtaac

SEQ ID NO: 4533 - DNA, 16 bp, synthetic construct
  misc_feature 1..16: note = synthetic [barcode part1]
  source 1..16: mol_type = other DNA
atagagaagttcgacc

SEQ ID NO: 4534 - DNA, 16 bp, synthetic construct
  misc_feature 1..16: note = synthetic [barcode part1]
  source 1..16: mol_type = other DNA
cgattcctcaactctc

SEQ ID NO: 4535 - DNA, 16 bp, synthetic construct
  misc_feature 1..16: note = synthetic [barcode part1]
  source 1..16: mol_type = other DNA
gcgattaggccttctc

SEQ ID NO: 4536 - DNA, 16 bp, synthetic construct
  misc_feature 1..16: note = synthetic [barcode part1]
  source 1..16: mol_type = other DNA
tcctgtcaacagaacg

SEQ ID NO: 4537 - DNA, 16 bp, synthetic construct
  misc_feature 1..16: note = synthetic [barcode part1]
  source 1..16: mol_type = other DNA
cctacctaacactgcg

SEQ ID NO: 4538 - DNA, 16 bp, synthetic construct
  misc_feature 1..16: note = synthetic [barcode part1]
  source 1..16: mol_type = other DNA
cgtggattctatcact

SEQ ID NO: 4539 - DNA, 16 bp, synthetic construct
  misc_feature 1..16: note = synthetic [barcode part1]
  source 1..16: mol_type = other DNA
gttgtgaattcgttcc

SEQ ID NO: 4540 - DNA, 16 bp, synthetic construct
  misc_feature 1..16: note = synthetic [barcode part1]
  source 1..16: mol_type = other DNA
agtctagtgcaagaac

SEQ ID NO: 4541 - DNA, 16 bp, synthetic construct
  misc_feature 1..16: note = synthetic [barcode part1]
  source 1..16: mol_type = other DNA
tgattggtgactggtc

SEQ ID NO: 4542 - DNA, 16 bp, synthetic construct
  misc_feature 1..16: note = synthetic [barcode part1]
  source 1..16: mol_type = other DNA
taatctcgtcggcacc

SEQ ID NO: 4543 - DNA, 16 bp, synthetic construct
  misc_feature 1..16: note = synthetic [barcode part1]
  source 1..16: mol_type = other DNA
acgtaggcagagatag

SEQ ID NO: 4544 - DNA, 16 bp, synthetic construct
  misc_feature 1..16: note = synthetic [barcode part1]
  source 1..16: mol_type = other DNA
tctctagacgtgttgt

SEQ ID NO: 4545 - DNA, 16 bp, synthetic construct
  misc_feature 1..16: note = synthetic [barcode part1]
  source 1..16: mol_type = other DNA
tactggagacagtctc

SEQ ID NO: 4546 - DNA, 16 bp, synthetic construct
  misc_feature 1..16: note = synthetic [barcode part1]
  source 1..16: mol_type = other DNA
gaggtaagtggtgagt

SEQ ID NO: 4547 - DNA, 16 bp, synthetic construct
  misc_feature 1..16: note = synthetic [barcode part1]
  source 1..16: mol_type = other DNA
acttagacaggtgcct

SEQ ID NO: 4548 - DNA, 16 bp, synthetic construct
  misc_feature 1..16: note = synthetic [barcode part1]
  source 1..16: mol_type = other DNA
atacacagtaccgcgt

SEQ ID NO: 4549 - DNA, 16 bp, synthetic construct
  misc_feature 1..16: note = synthetic [barcode part1]
  source 1..16: mol_type = other DNA
aatactagacctcggc

SEQ ID NO: 4550 - DNA, 16 bp, synthetic construct
  misc_feature 1..16: note = synthetic [barcode part1]
  source 1..16: mol_type = other DNA
gcctaagtgtcgcctt

SEQ ID NO: 4551 - DNA, 16 bp, synthetic construct
  misc_feature 1..16: note = synthetic [barcode part1]
  source 1..16: mol_type = other DNA
cctgattgccaatact

SEQ ID NO: 4552 - DNA, 16 bp, synthetic construct
  misc_feature 1..16: note = synthetic [barcode part1]
  source 1..16: mol_type = other DNA
caacggattcgaatag

SEQ ID NO: 4553 - DNA, 16 bp, synthetic construct
  misc_feature 1..16: note = synthetic [barcode part1]
  source 1..16: mol_type = other DNA
gacgtatagaggattc

SEQ ID NO: 4554 - DNA, 16 bp, synthetic construct
  misc_feature 1..16: note = synthetic [barcode part1]
  source 1..16: mol_type = other DNA
tgtgtgaattcctcac

SEQ ID NO: 4555 - DNA, 16 bp, synthetic construct
  misc_feature 1..16: note = synthetic [barcode part1]
  source 1..16: mol_type = other DNA
gtcctgttctgacttc

SEQ ID NO: 4556 - DNA, 16 bp, synthetic construct
  misc_feature 1..16: note = synthetic [barcode part1]
  source 1..16: mol_type = other DNA
gtatcagtcagtgtgc

SEQ ID NO: 4557 - DNA, 16 bp, synthetic construct
  misc_feature 1..16: note = synthetic [barcode part1]
  source 1..16: mol_type = other DNA
gtagtatcggtcgact

SEQ ID NO: 4558 - DNA, 16 bp, synthetic construct
  misc_feature 1..16: note = synthetic [barcode part1]
  source 1..16: mol_type = other DNA
tatccgtgacagacgt

SEQ ID NO: 4559 - DNA, 16 bp, synthetic construct
  misc_feature 1..16: note = synthetic [barcode part1]
  source 1..16: mol_type = other DNA
acgtctctcaatagtc

SEQ ID NO: 4560 - DNA, 16 bp, synthetic construct
  misc_feature 1..16: note = synthetic [barcode part1]
  source 1..16: mol_type = other DNA
tgtgtacgtacacacg

SEQ ID NO: 4561 - DNA, 16 bp, synthetic construct
  misc_feature 1..16: note = synthetic [barcode part1]
  source 1..16: mol_type = other DNA
gcaaggaccgagttac

SEQ ID NO: 4562 - DNA, 16 bp, synthetic construct
  misc_feature 1..16: note = synthetic [barcode part1]
  source 1..16: mol_type = other DNA
ccggtgtggagaattg

SEQ ID NO: 4563 - DNA, 16 bp, synthetic construct
  misc_feature 1..16: note = synthetic [barcode part1]
  source 1..16: mol_type = other DNA
attggcagatagtgac

SEQ ID NO: 4564 - DNA, 16 bp, synthetic construct
  misc_feature 1..16: note = synthetic [barcode part1]
  source 1..16: mol_type = other DNA
agttctccgtgccagt

SEQ ID NO: 4565 - DNA, 16 bp, synthetic construct
  misc_feature 1..16: note = synthetic [barcode part1]
  source 1..16: mol_type = other DNA
acgttcctggcctaac

SEQ ID NO: 4566 - DNA, 16 bp, synthetic construct
  misc_feature 1..16: note = synthetic [barcode part1]
  source 1..16: mol_type = other DNA
cgtgtagaacgatagt

SEQ ID NO: 4567 - DNA, 16 bp, synthetic construct
  misc_feature 1..16: note = synthetic [barcode part1]
  source 1..16: mol_type = other DNA
aggcctatagaggatt

SEQ ID NO: 4568 - DNA, 16 bp, synthetic construct
  misc_feature 1..16: note = synthetic [barcode part1]
  source 1..16: mol_type = other DNA
cggatagtgtctgttg

SEQ ID NO: 4569 - DNA, 16 bp, synthetic construct
  misc_feature 1..16: note = synthetic [barcode part1]
  source 1..16: mol_type = other DNA
cgtataccgtgatacg

SEQ ID NO: 4570 - DNA, 16 bp, synthetic construct
  misc_feature 1..16: note = synthetic [barcode part1]
  source 1..16: mol_type = other DNA
tcactcaagtaggcgt

SEQ ID NO: 4571 - DNA, 16 bp, synthetic construct
  misc_feature 1..16: note = synthetic [barcode part1]
  source 1..16: mol_type = other DNA
gtgttcaattcgcgag

SEQ ID NO: 4572 - DNA, 16 bp, synthetic construct
  misc_feature 1..16: note = synthetic [barcode part1]
  source 1..16: mol_type = other DNA
actcctggaaccgttc

SEQ ID NO: 4573 - DNA, 16 bp, synthetic construct
  misc_feature 1..16: note = synthetic [barcode part1]
  source 1..16: mol_type = other DNA
aaggaacggatatcct

SEQ ID NO: 4574 - DNA, 16 bp, synthetic construct
  misc_feature 1..16: note = synthetic [barcode part1]
  source 1..16: mol_type = other DNA
agttgtgtggtcacac

SEQ ID NO: 4575 - DNA, 16 bp, synthetic construct
  misc_feature 1..16: note = synthetic [barcode part1]
  source 1..16: mol_type = other DNA
ttcttccgagacttcc

SEQ ID NO: 4576 - DNA, 16 bp, synthetic construct
  misc_feature 1..16: note = synthetic [barcode part1]
  source 1..16: mol_type = other DNA
cagattggaagacgcc

SEQ ID NO: 4577 - DNA, 16 bp, synthetic construct
  misc_feature 1..16: note = synthetic [barcode part1]
  source 1..16: mol_type = other DNA
aattcctgcgtaatcc

SEQ ID NO: 4578 - DNA, 16 bp, synthetic construct
  misc_feature 1..16: note = synthetic [barcode part1]
  source 1..16: mol_type = other DNA
acttctataggtcacc

SEQ ID NO: 4579 - DNA, 16 bp, synthetic construct
  misc_feature 1..16: note = synthetic [barcode part1]
  source 1..16: mol_type = other DNA
cgacaatctcttgtac

SEQ ID NO: 4580 - DNA, 16 bp, synthetic construct
  misc_feature 1..16: note = synthetic [barcode part1]
  source 1..16: mol_type = other DNA
aatccaggtgcctctc

SEQ ID NO: 4581 - DNA, 16 bp, synthetic construct
  misc_feature 1..16: note = synthetic [barcode part1]
  source 1..16: mol_type = other DNA
agtccggtcttgtgtc

SEQ ID NO: 4582 - DNA, 16 bp, synthetic construct
  misc_feature 1..16: note = synthetic [barcode part1]
  source 1..16: mol_type = other DNA
ttataacacgcgcacg

SEQ ID NO: 4583 - DNA, 16 bp, synthetic construct
  misc_feature 1..16: note = synthetic [barcode part1]
  source 1..16: mol_type = other DNA
agtctctaacttgcgt

SEQ ID NO: 4584 - DNA, 16 bp, synthetic construct
  misc_feature 1..16: note = synthetic [barcode part1]
  source 1..16: mol_type = other DNA
tggaatcgaccagttc

SEQ ID NO: 4585 - DNA, 16 bp, synthetic construct
  misc_feature 1..16: note = synthetic [barcode part1]
  source 1..16: mol_type = other DNA
aacttctgccgagaac

SEQ ID NO: 4586 - DNA, 16 bp, synthetic construct
  misc_feature 1..16: note = synthetic [barcode part1]
  source 1..16: mol_type = other DNA
gaggttcactccaagt

SEQ ID NO: 4587 - DNA, 16 bp, synthetic construct
  misc_feature 1..16: note = synthetic [barcode part1]
  source 1..16: mol_type = other DNA
tggcgaatacttgaag

SEQ ID NO: 4588 - DNA, 16 bp, synthetic construct
  misc_feature 1..16: note = synthetic [barcode part1]
  source 1..16: mol_type = other DNA
tgaagtacgccttacg

SEQ ID NO: 4589 - DNA, 16 bp, synthetic construct
  misc_feature 1..16: note = synthetic [barcode part1]
  source 1..16: mol_type = other DNA
cgagtgactatctgtg

SEQ ID NO: 4590 - DNA, 16 bp, synthetic construct
  misc_feature 1..16: note = synthetic [barcode part1]
  source 1..16: mol_type = other DNA
aagtgatagttgcgtg

SEQ ID NO: 4591 - DNA, 16 bp, synthetic construct
  misc_feature 1..16: note = synthetic [barcode part1]
  source 1..16: mol_type = other DNA
gtattatctgtccacg

SEQ ID NO: 4592 - DNA, 16 bp, synthetic construct
  misc_feature 1..16: note = synthetic [barcode part1]
  source 1..16: mol_type = other DNA
aatatacaccggcacc

SEQ ID NO: 4593 - DNA, 16 bp, synthetic construct
  misc_feature 1..16: note = synthetic [barcode part1]
  source 1..16: mol_type = other DNA
tcacgccaagttactt

SEQ ID NO: 4594 - DNA, 16 bp, synthetic construct
  misc_feature 1..16: note = synthetic [barcode part1]
  source 1..16: mol_type = other DNA
ccaagaggttagagag

SEQ ID NO: 4595 - DNA, 16 bp, synthetic construct
  misc_feature 1..16: note = synthetic [barcode part1]
  source 1..16: mol_type = other DNA
tcgaactgttaccgag

SEQ ID NO: 4596 - DNA, 16 bp, synthetic construct
  misc_feature 1..16: note = synthetic [barcode part1]
  source 1..16: mol_type = other DNA
acaactcggcacagag

SEQ ID NO: 4597 - DNA, 16 bp, synthetic construct
  misc_feature 1..16: note = synthetic [barcode part1]
  source 1..16: mol_type = other DNA
tggtaggatctcactg

SEQ ID NO: 4598 - DNA, 16 bp, synthetic construct
  misc_feature 1..16: note = synthetic [barcode part1]
  source 1..16: mol_type = other DNA
tcttcctcttcaaggc

SEQ ID NO: 4599 - DNA, 16 bp, synthetic construct
  misc_feature 1..16: note = synthetic [barcode part1]
  source 1..16: mol_type = other DNA
tcaacgttggtgtacg

SEQ ID NO: 4600 - DNA, 16 bp, synthetic construct
  misc_feature 1..16: note = synthetic [barcode part1]
  source 1..16: mol_type = other DNA
tcttgaggagtggacg

SEQ ID NO: 4601 - DNA, 16 bp, synthetic construct
  misc_feature 1..16: note = synthetic [barcode part1]
  source 1..16: mol_type = other DNA
agaatacgtgcgagag

SEQ ID NO: 4602 - DNA, 16 bp, synthetic construct
  misc_feature 1..16: note = synthetic [barcode part1]
  source 1..16: mol_type = other DNA
actcaagtctaccgcc

SEQ ID NO: 4603 - DNA, 16 bp, synthetic construct
  misc_feature 1..16: note = synthetic [barcode part1]
  source 1..16: mol_type = other DNA
gaacgcaaccgtcaag

SEQ ID NO: 4604 - DNA, 16 bp, synthetic construct
  misc_feature 1..16: note = synthetic [barcode part1]
  source 1..16: mol_type = other DNA
acagtacaccagtcac

SEQ ID NO: 4605 - DNA, 16 bp, synthetic construct
  misc_feature 1..16: note = synthetic [barcode part1]
  source 1..16: mol_type = other DNA
taactgacgcgtacgt

SEQ ID NO: 4606 - DNA, 16 bp, synthetic construct
  misc_feature 1..16: note = synthetic [barcode part1]
  source 1..16: mol_type = other DNA
aactgtgcgtacgatc

SEQ ID NO: 4607 - DNA, 16 bp, synthetic construct
  misc_feature 1..16: note = synthetic [barcode part1]
  source 1..16: mol_type = other DNA
ccgtatcttcagtggc

SEQ ID NO: 4608 - DNA, 16 bp, synthetic construct
  misc_feature 1..16: note = synthetic [barcode part1]
  source 1..16: mol_type = other DNA
gtaactagacctcctt

SEQ ID NO: 4609 - DNA, 16 bp, synthetic construct
  misc_feature 1..16: note = synthetic [barcode part1]
  source 1..16: mol_type = other DNA
ttgcacacacacagtg

SEQ ID NO: 4610 - DNA, 16 bp, synthetic construct
  misc_feature 1..16: note = synthetic [barcode part1]
  source 1..16: mol_type = other DNA
gaggatatcgttgagt

SEQ ID NO: 4611 - DNA, 16 bp, synthetic construct
  misc_feature 1..16: note = synthetic [barcode part1]
  source 1..16: mol_type = other DNA
gagaggcctacgtagt

SEQ ID NO: 4612 - DNA, 16 bp, synthetic construct
  misc_feature 1..16: note = synthetic [barcode part1]
  source 1..16: mol_type = other DNA
aacagaatcgacacac

SEQ ID NO: 4613 - DNA, 16 bp, synthetic construct
  misc_feature 1..16: note = synthetic [barcode part1]
  source 1..16: mol_type = other DNA
aactcagaccagactc

SEQ ID NO: 4614 - DNA, 16 bp, synthetic construct
  misc_feature 1..16: note = synthetic [barcode part1]
  source 1..16: mol_type = other DNA
tggcagtgactcgatt

SEQ ID NO: 4615 - DNA, 16 bp, synthetic construct
  misc_feature 1..16: note = synthetic [barcode part1]
  source 1..16: mol_type = other DNA
tctaggaactaaccgc

SEQ ID NO: 4616 - DNA, 16 bp, synthetic construct
  misc_feature 1..16: note = synthetic [barcode part1]
  source 1..16: mol_type = other DNA
cggatacgattgcact

SEQ ID NO: 4617 - DNA, 16 bp, synthetic construct
  misc_feature 1..16: note = synthetic [barcode part1]
  source 1..16: mol_type = other DNA
attcgcaattgtctcg

SEQ ID NO: 4618 - DNA, 16 bp, synthetic construct
  misc_feature 1..16: note = synthetic [barcode part1]
  source 1..16: mol_type = other DNA
tccgatcacgtactgc

SEQ ID NO: 4619 - DNA, 16 bp, synthetic construct
  misc_feature 1..16: note = synthetic [barcode part1]
  source 1..16: mol_type = other DNA
atcagtacaggagact

SEQ ID NO: 4620 - DNA, 16 bp, synthetic construct
  misc_feature 1..16: note = synthetic [barcode part1]
  source 1..16: mol_type = other DNA
gcgttgaattgagagt

SEQ ID NO: 4621 - DNA, 16 bp, synthetic construct
  misc_feature 1..16: note = synthetic [barcode part1]
  source 1..16: mol_type = other DNA
cctgatagtctccacg

SEQ ID NO: 4622 - DNA, 16 bp, synthetic construct
  misc_feature 1..16: note = synthetic [barcode part1]
  source 1..16: mol_type = other DNA
tcttggcaaggattgc

SEQ ID NO: 4623 - DNA, 16 bp, synthetic construct
  misc_feature 1..16: note = synthetic [barcode part1]
  source 1..16: mol_type = other DNA
acctcacctactatcc

SEQ ID NO: 4624 - DNA, 16 bp, synthetic construct
  misc_feature 1..16: note = synthetic [barcode part1]
  source 1..16: mol_type = other DNA
gattgaattgccaccg

SEQ ID NO: 4625 - DNA, 16 bp, synthetic construct
  misc_feature 1..16: note = synthetic [barcode part1]
  source 1..16: mol_type = other DNA
ttccggcctgatacgt

SEQ ID NO: 4626 - DNA, 16 bp, synthetic construct
  misc_feature 1..16: note = synthetic [barcode part1]
  source 1..16: mol_type = other DNA
gtgatcagtataccgc

SEQ ID NO: 4627 - DNA, 16 bp, synthetic construct
  misc_feature 1..16: note = synthetic [barcode part1]
  source 1..16: mol_type = other DNA
atccagtgtacaagag

SEQ ID NO: 4628 - DNA, 16 bp, synthetic construct
  misc_feature 1..16: note = synthetic [barcode part1]
  source 1..16: mol_type = other DNA
aacttctccggcgtac

SEQ ID NO: 4629 - DNA, 16 bp, synthetic construct
  misc_feature 1..16: note = synthetic [barcode part1]
  source 1..16: mol_type = other DNA
ccgtcttctagacgtg

SEQ ID NO: 4630 - DNA, 16 bp, synthetic construct
  misc_feature 1..16: note = synthetic [barcode part1]
  source 1..16: mol_type = other DNA
agacacgattggaccg

SEQ ID NO: 4631 - DNA, 16 bp, synthetic construct
  misc_feature 1..16: note = synthetic [barcode part1]
  source 1..16: mol_type = other DNA
caacggttcctgtatt

SEQ ID NO: 4632 - DNA, 16 bp, synthetic construct
  misc_feature 1..16: note = synthetic [barcode part1]
  source 1..16: mol_type = other DNA
cgcctgatataagtcg

SEQ ID NO: 4633 - DNA, 16 bp, synthetic construct
  misc_feature 1..16: note = synthetic [barcode part1]
  source 1..16: mol_type = other DNA
ttcctggtagtgtgcc

SEQ ID NO: 4634 - DNA, 16 bp, synthetic construct
  misc_feature 1..16: note = synthetic [barcode part1]
  source 1..16: mol_type = other DNA
tgaacactggtcctcc

SEQ ID NO: 4635 - DNA, 16 bp, synthetic construct
  misc_feature 1..16: note = synthetic [barcode part1]
  source 1..16: mol_type = other DNA
aaggtctccgcctatc

SEQ ID NO: 4636 - DNA, 16 bp, synthetic construct
  misc_feature 1..16: note = synthetic [barcode part1]
  source 1..16: mol_type = other DNA
tgaacaacaggtggag

SEQ ID NO: 4637 - DNA, 16 bp, synthetic construct
  misc_feature 1..16: note = synthetic [barcode part1]
  source 1..16: mol_type = other DNA
gagagtctgtgtggtg

SEQ ID NO: 4638 - DNA, 16 bp, synthetic construct
  misc_feature 1..16: note = synthetic [barcode part1]
  source 1..16: mol_type = other DNA
tggcgaatcgcaagtg

SEQ ID NO: 4639 - DNA, 16 bp, synthetic construct
  misc_feature 1..16: note = synthetic [barcode part1]
  source 1..16: mol_type = other DNA
tcacgatcctcagaag

SEQ ID NO: 4640 - DNA, 16 bp, synthetic construct
  misc_feature 1..16: note = synthetic [barcode part1]
  source 1..16: mol_type = other DNA
cgtcggtctaaccttg

SEQ ID NO: 4641 - DNA, 16 bp, synthetic construct
  misc_feature 1..16: note = synthetic [barcode part1]
  source 1..16: mol_type = other DNA
ccttcaccgttgaacg

SEQ ID NO: 4642 - DNA, 16 bp, synthetic construct
  misc_feature 1..16: note = synthetic [barcode part1]
  source 1..16: mol_type = other DNA
gcctggatatcactcc

SEQ ID NO: 4643 - DNA, 16 bp, synthetic construct
  misc_feature 1..16: note = synthetic [barcode part1]
  source 1..16: mol_type = other DNA
gtaagaattggtgacc

SEQ ID NO: 4644 - DNA, 16 bp, synthetic construct
  misc_feature 1..16: note = synthetic [barcode part1]
  source 1..16: mol_type = other DNA
atattactggacggag

SEQ ID NO: 4645 - DNA, 16 bp, synthetic construct
  misc_feature 1..16: note = synthetic [barcode part1]
  source 1..16: mol_type = other DNA
gagtctgcaggagact

SEQ ID NO: 4646 - DNA, 16 bp, synthetic construct
  misc_feature 1..16: note = synthetic [barcode part1]
  source 1..16: mol_type = other DNA
tagaacaccgcacgag

SEQ ID NO: 4647 - DNA, 16 bp, synthetic construct
  misc_feature 1..16: note = synthetic [barcode part1]
  source 1..16: mol_type = other DNA
tacgagtgtaggttcc

SEQ ID NO: 4648 - DNA, 16 bp, synthetic construct
  misc_feature 1..16: note = synthetic [barcode part1]
  source 1..16: mol_type = other DNA
aggtctaagacactcc

SEQ ID NO: 4649 - DNA, 16 bp, synthetic construct
  misc_feature 1..16: note = synthetic [barcode part1]
  source 1..16: mol_type = other DNA
ccttcgacgcgtaatc

SEQ ID NO: 4650 - DNA, 16 bp, synthetic construct
  misc_feature 1..16: note = synthetic [barcode part1]
  source 1..16: mol_type = other DNA
atctactggatctcac

SEQ ID NO: 4651 - DNA, 16 bp, synthetic construct
  misc_feature 1..16: note = synthetic [barcode part1]
  source 1..16: mol_type = other DNA
aagatctgcggatagt

SEQ ID NO: 4652 - DNA, 16 bp, synthetic construct
  misc_feature 1..16: note = synthetic [barcode part1]
  source 1..16: mol_type = other DNA
gcaccacaatattgcg

SEQ ID NO: 4653 - DNA, 16 bp, synthetic construct
  misc_feature 1..16: note = synthetic [barcode part1]
  source 1..16: mol_type = other DNA
tgtccgtccacaacac

SEQ ID NO: 4654 - DNA, 16 bp, synthetic construct
  misc_feature 1..16: note = synthetic [barcode part1]
  source 1..16: mol_type = other DNA
tgattcggacgcgaag

SEQ ID NO: 4655 - DNA, 16 bp, synthetic construct
  misc_feature 1..16: note = synthetic [barcode part1]
  source 1..16: mol_type = other DNA
attccttccgagagag

SEQ ID NO: 4656 - DNA, 16 bp, synthetic construct
  misc_feature 1..16: note = synthetic [barcode part1]
  source 1..16: mol_type = other DNA
acggactgatcgtgtt

SEQ ID NO: 4657 - DNA, 16 bp, synthetic construct
  misc_feature 1..16: note = synthetic [barcode part1]
  source 1..16: mol_type = other DNA
taccgccttatacagt

SEQ ID NO: 4658 - DNA, 16 bp, synthetic construct
  misc_feature 1..16: note = synthetic [barcode part1]
  source 1..16: mol_type = other DNA
cagactatagtccgac

SEQ ID NO: 4659 - DNA, 16 bp, synthetic construct
  misc_feature 1..16: note = synthetic [barcode part1]
  source 1..16: mol_type = other DNA
aggactgcagtaagag

SEQ ID NO: 4660 - DNA, 16 bp, synthetic construct
  misc_feature 1..16: note = synthetic [barcode part1]
  source 1..16: mol_type = other DNA
accgagaatcagtgcg

SEQ ID NO: 4661 - DNA, 16 bp, synthetic construct
  misc_feature 1..16: note = synthetic [barcode part1]
  source 1..16: mol_type = other DNA
cgcaggccttgttgtt

SEQ ID NO: 4662 - DNA, 16 bp, synthetic construct
  misc_feature 1..16: note = synthetic [barcode part1]
  source 1..16: mol_type = other DNA
gtggatcgtcactcct

SEQ ID NO: 4663 - DNA, 16 bp, synthetic construct
  misc_feature 1..16: note = synthetic [barcode part1]
  source 1..16: mol_type = other DNA
tggtcctagttaggac

SEQ ID NO: 4664 - DNA, 16 bp, synthetic construct
  misc_feature 1..16: note = synthetic [barcode part1]
  source 1..16: mol_type = other DNA
tgcggacttatcctgc

SEQ ID NO: 4665 - DNA, 16 bp, synthetic construct
  misc_feature 1..16: note = synthetic [barcode part1]
  source 1..16: mol_type = other DNA
cctcagtaattacacc

SEQ ID NO: 4666 - DNA, 16 bp, synthetic construct
  misc_feature 1..16: note = synthetic [barcode part1]
  source 1..16: mol_type = other DNA
tactggttggtacacg

SEQ ID NO: 4667 - DNA, 16 bp, synthetic construct
  misc_feature 1..16: note = synthetic [barcode part1]
  source 1..16: mol_type = other DNA
accaagtactcttgtc

SEQ ID NO: 4668 - DNA, 16 bp, synthetic construct
  misc_feature 1..16: note = synthetic [barcode part1]
  source 1..16: mol_type = other DNA
gcacctcctgacaact

SEQ ID NO: 4669 - DNA, 16 bp, synthetic construct
  misc_feature 1..16: note = synthetic [barcode part1]
  source 1..16: mol_type = other DNA
ttccttcctaactggc

SEQ ID NO: 4670 - DNA, 16 bp, synthetic construct
  misc_feature 1..16: note = synthetic [barcode part1]
  source 1..16: mol_type = other DNA
gtcgtagaggtggact

SEQ ID NO: 4671 - DNA, 16 bp, synthetic construct
  misc_feature 1..16: note = synthetic [barcode part1]
  source 1..16: mol_type = other DNA
caccgacgagactaag

SEQ ID NO: 4672 - DNA, 16 bp, synthetic construct
  misc_feature 1..16: note = synthetic [barcode part1]
  source 1..16: mol_type = other DNA
caacacgcggttcctt

SEQ ID NO: 4673 - DNA, 16 bp, synthetic construct
  misc_feature 1..16: note = synthetic [barcode part1]
  source 1..16: mol_type = other DNA
gcagttaagagttgac

SEQ ID NO: 4674 - DNA, 16 bp, synthetic construct
  misc_feature 1..16: note = synthetic [barcode part1]
  source 1..16: mol_type = other DNA
attgtcgttccgcgtg

SEQ ID NO: 4675 - DNA, 16 bp, synthetic construct
  misc_feature 1..16: note = synthetic [barcode part1]
  source 1..16: mol_type = other DNA
cggttgcactcttcag

SEQ ID NO: 4676 - DNA, 16 bp, synthetic construct
  misc_feature 1..16: note = synthetic [barcode part1]
  source 1..16: mol_type = other DNA
attcacgaggacggtg

SEQ ID NO: 4677 - DNA, 16 bp, synthetic construct
  misc_feature 1..16: note = synthetic [barcode part1]
  source 1..16: mol_type = other DNA
caccggacgttcttac

SEQ ID NO: 4678 - DNA, 16 bp, synthetic construct
  misc_feature 1..16: note = synthetic [barcode part1]
  source 1..16: mol_type = other DNA
taggttgcctccacac

SEQ ID NO: 4679 - DNA, 16 bp, synthetic construct
  misc_feature 1..16: note = synthetic [barcode part1]
  source 1..16: mol_type = other DNA
gtgccaagtactcagt

SEQ ID NO: 4680 - DNA, 16 bp, synthetic construct
  misc_feature 1..16: note = synthetic [barcode part1]
  source 1..16: mol_type = other DNA
atcgtcctgttactcc

SEQ ID NO: 4681 - DNA, 16 bp, synthetic construct
  misc_feature 1..16: note = synthetic [barcode part1]
  source 1..16: mol_type = other DNA
tggtcgcgtaggatag

SEQ ID NO: 4682 - DNA, 16 bp, synthetic construct
  misc_feature 1..16: note = synthetic [barcode part1]
  source 1..16: mol_type = other DNA
aacgtggtaagttacg

SEQ ID NO: 4683 - DNA, 16 bp, synthetic construct
  misc_feature 1..16: note = synthetic [barcode part1]
  source 1..16: mol_type = other DNA
tcttactggattcacg

SEQ ID NO: 4684 - DNA, 16 bp, synthetic construct
  misc_feature 1..16: note = synthetic [barcode part1]
  source 1..16: mol_type = other DNA
aggtaatacacgatcg

SEQ ID NO: 4685 - DNA, 16 bp, synthetic construct
  misc_feature 1..16: note = synthetic [barcode part1]
  source 1..16: mol_type = other DNA
ttgcctgtgttacggc

SEQ ID NO: 4686 - DNA, 16 bp, synthetic construct
  misc_feature 1..16: note = synthetic [barcode part1]
  source 1..16: mol_type = other DNA
gacttcaattccggag

SEQ ID NO: 4687 - DNA, 16 bp, synthetic construct
  misc_feature 1..16: note = synthetic [barcode part1]
  source 1..16: mol_type = other DNA
agaatacgttaccgag

SEQ ID NO: 4688 - DNA, 16 bp, synthetic construct
  misc_feature 1..16: note = synthetic [barcode part1]
  source 1..16: mol_type = other DNA
tacgagttggacactc

SEQ ID NO: 4689 - DNA, 16 bp, synthetic construct
  misc_feature 1..16: note = synthetic [barcode part1]
  source 1..16: mol_type = other DNA
tcacctggtgagtaac

SEQ ID NO: 4690 - DNA, 16 bp, synthetic construct
  misc_feature 1..16: note = synthetic [barcode part1]
  source 1..16: mol_type = other DNA
agaactctattcgtcc

SEQ ID NO: 4691 - DNA, 16 bp, synthetic construct
  misc_feature 1..16: note = synthetic [barcode part1]
  source 1..16: mol_type = other DNA
caacagtctccacgtc

SEQ ID NO: 4692 - DNA, 16 bp, synthetic construct
  misc_feature 1..16: note = synthetic [barcode part1]
  source 1..16: mol_type = other DNA
acgtggtatcgacgtt

SEQ ID NO: 4693 - DNA, 16 bp, synthetic construct
  misc_feature 1..16: note = synthetic [barcode part1]
  source 1..16: mol_type = other DNA
tcgaacttacacttcg

SEQ ID NO: 4694 - DNA, 16 bp, synthetic construct
  misc_feature 1..16: note = synthetic [barcode part1]
  source 1..16: mol_type = other DNA
tcgactccgagtctac

SEQ ID NO: 4695 - DNA, 16 bp, synthetic construct
  misc_feature 1..16: note = synthetic [barcode part1]
  source 1..16: mol_type = other DNA
gtattggactgagaac

SEQ ID NO: 4696 - DNA, 16 bp, synthetic construct
  misc_feature 1..16: note = synthetic [barcode part1]
  source 1..16: mol_type = other DNA
tgtgttgacaccagtg

SEQ ID NO: 4697 - DNA, 16 bp, synthetic construct
  misc_feature 1..16: note = synthetic [barcode part1]
  source 1..16: mol_type = other DNA
tgtggcgtgcctattc

SEQ ID NO: 4698 - DNA, 16 bp, synthetic construct
  misc_feature 1..16: note = synthetic [barcode part1]
  source 1..16: mol_type = other DNA
gattattggtggtccg

SEQ ID NO: 4699 - DNA, 16 bp, synthetic construct
  misc_feature 1..16: note = synthetic [barcode part1]
  source 1..16: mol_type = other DNA
tgttgaccacagtcag

SEQ ID NO: 4700 - DNA, 16 bp, synthetic construct
  misc_feature 1..16: note = synthetic [barcode part1]
  source 1..16: mol_type = other DNA
acgtgaggcctagtag

SEQ ID NO: 4701 - DNA, 16 bp, synthetic construct
  misc_feature 1..16: note = synthetic [barcode part1]
  source 1..16: mol_type = other DNA
ttatcgtgtctcgtcc

SEQ ID NO: 4702 - DNA, 16 bp, synthetic construct
  misc_feature 1..16: note = synthetic [barcode part1]
  source 1..16: mol_type = other DNA
tctatcaagttcgcac

SEQ ID NO: 4703 - DNA, 16 bp, synthetic construct
  misc_feature 1..16: note = synthetic [barcode part1]
  source 1..16: mol_type = other DNA
gttggcgataattgcc

SEQ ID NO: 4704 - DNA, 16 bp, synthetic construct
  misc_feature 1..16: note = synthetic [barcode part1]
  source 1..16: mol_type = other DNA
gcacagaggattaccg

SEQ ID NO: 4705 - DNA, 16 bp, synthetic construct
  misc_feature 1..16: note = synthetic [barcode part1]
  source 1..16: mol_type = other DNA
actctgcgaacacctc

SEQ ID NO: 4706 - DNA, 16 bp, synthetic construct
  misc_feature 1..16: note = synthetic [barcode part1]
  source 1..16: mol_type = other DNA
ttagacggcgataggc

SEQ ID NO: 4707 - DNA, 16 bp, synthetic construct
  misc_feature 1..16: note = synthetic [barcode part1]
  source 1..16: mol_type = other DNA
cagttggcaaccagtt

SEQ ID NO: 4708 - DNA, 16 bp, synthetic construct
  misc_feature 1..16: note = synthetic [barcode part1]
  source 1..16: mol_type = other DNA
tccagaactaggatcc

SEQ ID NO: 4709 - DNA, 16 bp, synthetic construct
  misc_feature 1..16: note = synthetic [barcode part1]
  source 1..16: mol_type = other DNA
ttatctgcaggattcc

SEQ ID NO: 4710 - DNA, 16 bp, synthetic construct
  misc_feature 1..16: note = synthetic [barcode part1]
  source 1..16: mol_type = other DNA
ttcggagtcgagactt

SEQ ID NO: 4711 - DNA, 16 bp, synthetic construct
  misc_feature 1..16: note = synthetic [barcode part1]
  source 1..16: mol_type = other DNA
tcctcgacgattgcac

SEQ ID NO: 4712 - DNA, 16 bp, synthetic construct
  misc_feature 1..16: note = synthetic [barcode part1]
  source 1..16: mol_type = other DNA
acctaacaatcgccag

SEQ ID NO: 4713 - DNA, 16 bp, synthetic construct
  misc_feature 1..16: note = synthetic [barcode part1]
  source 1..16: mol_type = other DNA
gtgaggatacactctc

SEQ ID NO: 4714 - DNA, 16 bp, synthetic construct
  misc_feature 1..16: note = synthetic [barcode part1]
  source 1..16: mol_type = other DNA
cggactccactattcg

SEQ ID NO: 4715 - DNA, 16 bp, synthetic construct
  misc_feature 1..16: note = synthetic [barcode part1]
  source 1..16: mol_type = other DNA
gtacgtacaacactgc

SEQ ID NO: 4716 - DNA, 16 bp, synthetic construct
  misc_feature 1..16: note = synthetic [barcode part1]
  source 1..16: mol_type = other DNA
gtgcgaagaaccgttg

SEQ ID NO: 4717 - DNA, 16 bp, synthetic construct
  misc_feature 1..16: note = synthetic [barcode part1]
  source 1..16: mol_type = other DNA
gagtgaggtgacgttc

SEQ ID NO: 4718 - DNA, 16 bp, synthetic construct
  misc_feature 1..16: note = synthetic [barcode part1]
  source 1..16: mol_type = other DNA
taagaggacaccgatt

SEQ ID NO: 4719 - DNA, 16 bp, synthetic construct
  misc_feature 1..16: note = synthetic [barcode part1]
  source 1..16: mol_type = other DNA
aggtctatatcggtgc

SEQ ID NO: 4720 - DNA, 16 bp, synthetic construct
  misc_feature 1..16: note = synthetic [barcode part1]
  source 1..16: mol_type = other DNA
ttacggatagagagtc

SEQ ID NO: 4721 - DNA, 16 bp, synthetic construct
  misc_feature 1..16: note = synthetic [barcode part1]
  source 1..16: mol_type = other DNA
taaggtctcctaaggc

SEQ ID NO: 4722 - DNA, 16 bp, synthetic construct
  misc_feature 1..16: note = synthetic [barcode part1]
  source 1..16: mol_type = other DNA
acgatctgaacgtaag

SEQ ID NO: 4723 - DNA, 16 bp, synthetic construct
  misc_feature 1..16: note = synthetic [barcode part1]
  source 1..16: mol_type = other DNA
tatcaggttgccagac

SEQ ID NO: 4724 - DNA, 16 bp, synthetic construct
  misc_feature 1..16: note = synthetic [barcode part1]
  source 1..16: mol_type = other DNA
tgcaagtaacactcgc

SEQ ID NO: 4725 - DNA, 16 bp, synthetic construct
  misc_feature 1..16: note = synthetic [barcode part1]
  source 1..16: mol_type = other DNA
gcaatcaccgactctc

SEQ ID NO: 4726 - DNA, 16 bp, synthetic construct
  misc_feature 1..16: note = synthetic [barcode part1]
  source 1..16: mol_type = other DNA
tgatctgatccggtag

SEQ ID NO: 4727 - DNA, 16 bp, synthetic construct
  misc_feature 1..16: note = synthetic [barcode part1]
  source 1..16: mol_type = other DNA
gcgcgactcctaatct

SEQ ID NO: 4728 - DNA, 16 bp, synthetic construct
  misc_feature 1..16: note = synthetic [barcode part1]
  source 1..16: mol_type = other DNA
aacaaggcacgtcggt

SEQ ID NO: 4729 - DNA, 16 bp, synthetic construct
  misc_feature 1..16: note = synthetic [barcode part1]
  source 1..16: mol_type = other DNA
aaggacggtctaacgc

SEQ ID NO: 4730 - DNA, 16 bp, synthetic construct
  misc_feature 1..16: note = synthetic [barcode part1]
  source 1..16: mol_type = other DNA
tgatctctaacgcact

SEQ ID NO: 4731 - DNA, 16 bp, synthetic construct
  misc_feature 1..16: note = synthetic [barcode part1]
  source 1..16: mol_type = other DNA
gcaaggatcctatacc

SEQ ID NO: 4732 - DNA, 16 bp, synthetic construct
  misc_feature 1..16: note = synthetic [barcode part1]
  source 1..16: mol_type = other DNA
acactgagtcagaggc

SEQ ID NO: 4733 - DNA, 16 bp, synthetic construct
  misc_feature 1..16: note = synthetic [barcode part1]
  source 1..16: mol_type = other DNA
tacgcgatcgttactt

SEQ ID NO: 4734 - DNA, 16 bp, synthetic construct
  misc_feature 1..16: note = synthetic [barcode part1]
  source 1..16: mol_type = other DNA
ttactctaccgccttg

SEQ ID NO: 4735 - DNA, 16 bp, synthetic construct
  misc_feature 1..16: note = synthetic [barcode part1]
  source 1..16: mol_type = other DNA
gtcttccgagatcaag

SEQ ID NO: 4736 - DNA, 16 bp, synthetic construct
  misc_feature 1..16: note = synthetic [barcode part1]
  source 1..16: mol_type = other DNA
cgtggtgcctacttac

SEQ ID NO: 4737 - DNA, 16 bp, synthetic construct
  misc_feature 1..16: note = synthetic [barcode part1]
  source 1..16: mol_type = other DNA
agtaaccgaggtgcac

SEQ ID NO: 4738 - DNA, 16 bp, synthetic construct
  misc_feature 1..16: note = synthetic [barcode part1]
  source 1..16: mol_type = other DNA
ttcgcctctcgaagtg

SEQ ID NO: 4739 - DNA, 16 bp, synthetic construct
  misc_feature 1..16: note = synthetic [barcode part1]
  source 1..16: mol_type = other DNA
tcgccgtctatcttgt

SEQ ID NO: 4740 - DNA, 16 bp, synthetic construct
  misc_feature 1..16: note = synthetic [barcode part1]
  source 1..16: mol_type = other DNA
gacgacactcggatag

SEQ ID NO: 4741 - DNA, 16 bp, synthetic construct
  misc_feature 1..16: note = synthetic [barcode part1]
  source 1..16: mol_type = other DNA
gagttgtatctctacc

SEQ ID NO: 4742 - DNA, 16 bp, synthetic construct
  misc_feature 1..16: note = synthetic [barcode part1]
  source 1..16: mol_type = other DNA
cctactgcgtattaac

SEQ ID NO: 4743 - DNA, 16 bp, synthetic construct
  misc_feature 1..16: note = synthetic [barcode part1]
  source 1..16: mol_type = other DNA
gtgcagtactgacact

SEQ ID NO: 4744 - DNA, 16 bp, synthetic construct
  misc_feature 1..16: note = synthetic [barcode part1]
  source 1..16: mol_type = other DNA
gatccttaacttgcgt

SEQ ID NO: 4745 - DNA, 16 bp, synthetic construct
  misc_feature 1..16: note = synthetic [barcode part1]
  source 1..16: mol_type = other DNA
gtatcttgttgtcgac

SEQ ID NO: 4746 - DNA, 16 bp, synthetic construct
  misc_feature 1..16: note = synthetic [barcode part1]
  source 1..16: mol_type = other DNA
gtcgtctactcgcaac

SEQ ID NO: 4747 - DNA, 16 bp, synthetic construct
  misc_feature 1..16: note = synthetic [barcode part1]
  source 1..16: mol_type = other DNA
atactcgttacctcag

SEQ ID NO: 4748 - DNA, 16 bp, synthetic construct
  misc_feature 1..16: note = synthetic [barcode part1]
  source 1..16: mol_type = other DNA
gtagttgccggagaac

SEQ ID NO: 4749 - DNA, 16 bp, synthetic construct
  misc_feature 1..16: note = synthetic [barcode part1]
  source 1..16: mol_type = other DNA
tgcacaagacgtgttc

SEQ ID NO: 4750 - DNA, 16 bp, synthetic construct
  misc_feature 1..16: note = synthetic [barcode part1]
  source 1..16: mol_type = other DNA
ttggtgtgatcctccg

SEQ ID NO: 4751 - DNA, 16 bp, synthetic construct
  misc_feature 1..16: note = synthetic [barcode part1]
  source 1..16: mol_type = other DNA
tataaggaccgccgag

SEQ ID NO: 4752 - DNA, 16 bp, synthetic construct
  misc_feature 1..16: note = synthetic [barcode part1]
  source 1..16: mol_type = other DNA
tgcctgttcgtaacgc

SEQ ID NO: 4753 - DNA, 16 bp, synthetic construct
  misc_feature 1..16: note = synthetic [barcode part1]
  source 1..16: mol_type = other DNA
tgttactctgcgtaac

SEQ ID NO: 4754 - DNA, 16 bp, synthetic construct
  misc_feature 1..16: note = synthetic [barcode part1]
  source 1..16: mol_type = other DNA
cgaaggatagttgtac

SEQ ID NO: 4755 - DNA, 16 bp, synthetic construct
  misc_feature 1..16: note = synthetic [barcode part1]
  source 1..16: mol_type = other DNA
gataacacggaacgag

SEQ ID NO: 4756 - DNA, 16 bp, synthetic construct
  misc_feature 1..16: note = synthetic [barcode part1]
  source 1..16: mol_type = other DNA
ccgtaccactcaacgt

SEQ ID NO: 4757 - DNA, 16 bp, synthetic construct
  misc_feature 1..16: note = synthetic [barcode part1]
  source 1..16: mol_type = other DNA
gtcgagataacgcgtg

SEQ ID NO: 4758 - DNA, 16 bp, synthetic construct
  misc_feature 1..16: note = synthetic [barcode part1]
  source 1..16: mol_type = other DNA
aaggtcgtcggtgtag

SEQ ID NO: 4759 - DNA, 16 bp, synthetic construct
  misc_feature 1..16: note = synthetic [barcode part1]
  source 1..16: mol_type = other DNA
tcagactcctctatag

SEQ ID NO: 4760 - DNA, 16 bp, synthetic construct
  misc_feature 1..16: note = synthetic [barcode part1]
  source 1..16: mol_type = other DNA
aagagtactcaacgac

SEQ ID NO: 4761 - DNA, 16 bp, synthetic construct
  misc_feature 1..16: note = synthetic [barcode part1]
  source 1..16: mol_type = other DNA
gcagttaccgaaggac

SEQ ID NO: 4762 - DNA, 16 bp, synthetic construct
  misc_feature 1..16: note = synthetic [barcode part1]
  source 1..16: mol_type = other DNA
taggcactggcgaagt

SEQ ID NO: 4763 - DNA, 16 bp, synthetic construct
  misc_feature 1..16: note = synthetic [barcode part1]
  source 1..16: mol_type = other DNA
cagaggttgagttgcg

SEQ ID NO: 4764 - DNA, 16 bp, synthetic construct
  misc_feature 1..16: note = synthetic [barcode part1]
  source 1..16: mol_type = other DNA
tgtcagtcaacacacg

SEQ ID NO: 4765 - DNA, 16 bp, synthetic construct
  misc_feature 1..16: note = synthetic [barcode part1]
  source 1..16: mol_type = other DNA
acttcttgtaccaacg

SEQ ID NO: 4766 - DNA, 16 bp, synthetic construct
  misc_feature 1..16: note = synthetic [barcode part1]
  source 1..16: mol_type = other DNA
ttatcggcgacaactg

SEQ ID NO: 4767 - DNA, 16 bp, synthetic construct
  misc_feature 1..16: note = synthetic [barcode part1]
  source 1..16: mol_type = other DNA
caagtactgcaggttc

SEQ ID NO: 4768 - DNA, 16 bp, synthetic construct
  misc_feature 1..16: note = synthetic [barcode part1]
  source 1..16: mol_type = other DNA
cgtattgttgacttcg

SEQ ID NO: 4769 - DNA, 16 bp, synthetic construct
  misc_feature 1..16: note = synthetic [barcode part1]
  source 1..16: mol_type = other DNA
gattattcggaccacg

SEQ ID NO: 4770 - DNA, 16 bp, synthetic construct
  misc_feature 1..16: note = synthetic [barcode part1]
  source 1..16: mol_type = other DNA
gaggaacgacacactc

SEQ ID NO: 4771 - DNA, 16 bp, synthetic construct
  misc_feature 1..16: note = synthetic [barcode part1]
  source 1..16: mol_type = other DNA
atactggcacgagttc

SEQ ID NO: 4772 - DNA, 16 bp, synthetic construct
  misc_feature 1..16: note = synthetic [barcode part1]
  source 1..16: mol_type = other DNA
cgtaagtcggaataac

SEQ ID NO: 4773 - DNA, 16 bp, synthetic construct
  misc_feature 1..16: note = synthetic [barcode part1]
  source 1..16: mol_type = other DNA
ttcgtacgtcactagt

SEQ ID NO: 4774 - DNA, 16 bp, synthetic construct
  misc_feature 1..16: note = synthetic [barcode part1]
  source 1..16: mol_type = other DNA
aaggagtagacacctt

SEQ ID NO: 4775 - DNA, 16 bp, synthetic construct
  misc_feature 1..16: note = synthetic [barcode part1]
  source 1..16: mol_type = other DNA
tcctagttggcgaagt

SEQ ID NO: 4776 - DNA, 16 bp, synthetic construct
  misc_feature 1..16: note = synthetic [barcode part1]
  source 1..16: mol_type = other DNA
cacctatatctcaggt

SEQ ID NO: 4777 - DNA, 16 bp, synthetic construct
  misc_feature 1..16: note = synthetic [barcode part1]
  source 1..16: mol_type = other DNA
gacgtagattcctacg

SEQ ID NO: 4778 - DNA, 16 bp, synthetic construct
  misc_feature 1..16: note = synthetic [barcode part1]
  source 1..16: mol_type = other DNA
actcgtattggacacg

SEQ ID NO: 4779 - DNA, 16 bp, synthetic construct
  misc_feature 1..16: note = synthetic [barcode part1]
  source 1..16: mol_type = other DNA
aggtagacacttgcct

SEQ ID NO: 4780 - DNA, 16 bp, synthetic construct
  misc_feature 1..16: note = synthetic [barcode part1]
  source 1..16: mol_type = other DNA
gtagtgcggaattcct

SEQ ID NO: 4781 - DNA, 16 bp, synthetic construct
  misc_feature 1..16: note = synthetic [barcode part1]
  source 1..16: mol_type = other DNA
tctccactgttggacg

SEQ ID NO: 4782 - DNA, 16 bp, synthetic construct
  misc_feature 1..16: note = synthetic [barcode part1]
  source 1..16: mol_type = other DNA
accggtgagattggac

SEQ ID NO: 4783 - DNA, 16 bp, synthetic construct
  misc_feature 1..16: note = synthetic [barcode part1]
  source 1..16: mol_type = other DNA
agtccaatcagtggtc

SEQ ID NO: 4784 - DNA, 16 bp, synthetic construct
  misc_feature 1..16: note = synthetic [barcode part1]
  source 1..16: mol_type = other DNA
caataaggttcacgag

SEQ ID NO: 4785 - DNA, 16 bp, synthetic construct
  misc_feature 1..16: note = synthetic [barcode part1]
  source 1..16: mol_type = other DNA
tcgagagagagatcag

SEQ ID NO: 4786 - DNA, 16 bp, synthetic construct
  misc_feature 1..16: note = synthetic [barcode part1]
  source 1..16: mol_type = other DNA
tgatatacgcgttggc

SEQ ID NO: 4787 - DNA, 16 bp, synthetic construct
  misc_feature 1..16: note = synthetic [barcode part1]
  source 1..16: mol_type = other DNA
tgtagactaggcgttc

SEQ ID NO: 4788 - DNA, 16 bp, synthetic construct
  misc_feature 1..16: note = synthetic [barcode part1]
  source 1..16: mol_type = other DNA
atacttacttaccgcg

SEQ ID NO: 4789 - DNA, 16 bp, synthetic construct
  misc_feature 1..16: note = synthetic [barcode part1]
  source 1..16: mol_type = other DNA
tcctcacaagtcgtcg

SEQ ID NO: 4790 - DNA, 16 bp, synthetic construct
  misc_feature 1..16: note = synthetic [barcode part1]
  source 1..16: mol_type = other DNA
gattaacgtcgcggtt

SEQ ID NO: 4791 - DNA, 16 bp, synthetic construct
  misc_feature 1..16: note = synthetic [barcode part1]
  source 1..16: mol_type = other DNA
cactgagatctggtgt

SEQ ID NO: 4792 - DNA, 16 bp, synthetic construct
  misc_feature 1..16: note = synthetic [barcode part1]
  source 1..16: mol_type = other DNA
ataccttgaaggcacc

SEQ ID NO: 4793 - DNA, 16 bp, synthetic construct
  misc_feature 1..16: note = synthetic [barcode part1]
  source 1..16: mol_type = other DNA
tcttggaacttgttcg

SEQ ID NO: 4794 - DNA, 16 bp, synthetic construct
  misc_feature 1..16: note = synthetic [barcode part1]
  source 1..16: mol_type = other DNA
tctcctgacttctcag

SEQ ID NO: 4795 - DNA, 16 bp, synthetic construct
  misc_feature 1..16: note = synthetic [barcode part1]
  source 1..16: mol_type = other DNA
gcagtataatcggtcc

SEQ ID NO: 4796 - DNA, 16 bp, synthetic construct
  misc_feature 1..16: note = synthetic [barcode part1]
  source 1..16: mol_type = other DNA
gtgtccgtacttgaag

SEQ ID NO: 4797 - DNA, 16 bp, synthetic construct
  misc_feature 1..16: note = synthetic [barcode part1]
  source 1..16: mol_type = other DNA
ttcaccgacgcgattc

SEQ ID NO: 4798 - DNA, 16 bp, synthetic construct
  misc_feature 1..16: note = synthetic [barcode part1]
  source 1..16: mol_type = other DNA
gtaacaacactccacg

SEQ ID NO: 4799 - DNA, 16 bp, synthetic construct
  misc_feature 1..16: note = synthetic [barcode part1]
  source 1..16: mol_type = other DNA
tactacgtacgacgtg

SEQ ID NO: 4800 - DNA, 16 bp, synthetic construct
  misc_feature 1..16: note = synthetic [barcode part1]
  source 1..16: mol_type = other DNA
aagtgcgactatcaag

SEQ ID NO: 4801 - DNA, 16 bp, synthetic construct
  misc_feature 1..16: note = synthetic [barcode part1]
  source 1..16: mol_type = other DNA
tggttagactagtcgc

SEQ ID NO: 4802 - DNA, 16 bp, synthetic construct
  misc_feature 1..16: note = synthetic [barcode part1]
  source 1..16: mol_type = other DNA
atcgttcagatccact

SEQ ID NO: 4803 - DNA, 16 bp, synthetic construct
  misc_feature 1..16: note = synthetic [barcode part1]
  source 1..16: mol_type = other DNA
aaccggtcggtattgt

SEQ ID NO: 4804 - DNA, 16 bp, synthetic construct
  misc_feature 1..16: note = synthetic [barcode part1]
  source 1..16: mol_type = other DNA
cgaggcgaatagtaag

SEQ ID NO: 4805 - DNA, 16 bp, synthetic construct
  misc_feature 1..16: note = synthetic [barcode part1]
  source 1..16: mol_type = other DNA
cactactgtccaagtt

SEQ ID NO: 4806 - DNA, 16 bp, synthetic construct
  misc_feature 1..16: note = synthetic [barcode part1]
  source 1..16: mol_type = other DNA
gtgcagtggccttctt

SEQ ID NO: 4807 - DNA, 16 bp, synthetic construct
  misc_feature 1..16: note = synthetic [barcode part1]
  source 1..16: mol_type = other DNA
cagtataggccgtgtt

SEQ ID NO: 4808 - DNA, 16 bp, synthetic construct
  misc_feature 1..16: note = synthetic [barcode part1]
  source 1..16: mol_type = other DNA
aggagactggacttgc

SEQ ID NO: 4809 - DNA, 16 bp, synthetic construct
  misc_feature 1..16: note = synthetic [barcode part1]
  source 1..16: mol_type = other DNA
acagtcgaactcttct

SEQ ID NO: 4810 - DNA, 16 bp, synthetic construct
  misc_feature 1..16: note = synthetic [barcode part1]
  source 1..16: mol_type = other DNA
tcttcggcgtggttac

SEQ ID NO: 4811 - DNA, 16 bp, synthetic construct
  misc_feature 1..16: note = synthetic [barcode part1]
  source 1..16: mol_type = other DNA
aacgacgttatagacg

SEQ ID NO: 4812 - DNA, 16 bp, synthetic construct
  misc_feature 1..16: note = synthetic [barcode part1]
  source 1..16: mol_type = other DNA
agaggatcctgatcct

SEQ ID NO: 4813 - DNA, 16 bp, synthetic construct
  misc_feature 1..16: note = synthetic [barcode part1]
  source 1..16: mol_type = other DNA
acaggacctacgaacg

SEQ ID NO: 4814 - DNA, 16 bp, synthetic construct
  misc_feature 1..16: note = synthetic [barcode part1]
  source 1..16: mol_type = other DNA
aggagtcttctccaag

SEQ ID NO: 4815 - DNA, 16 bp, synthetic construct
  misc_feature 1..16: note = synthetic [barcode part1]
  source 1..16: mol_type = other DNA
caagttgtcagtgacc

SEQ ID NO: 4816 - DNA, 16 bp, synthetic construct
  misc_feature 1..16: note = synthetic [barcode part1]
  source 1..16: mol_type = other DNA
ccgagtaggtgagact

SEQ ID NO: 4817 - DNA, 16 bp, synthetic construct
  misc_feature 1..16: note = synthetic [barcode part1]
  source 1..16: mol_type = other DNA
cggacctagtaagacg

SEQ ID NO: 4818 - DNA, 16 bp, synthetic construct
  misc_feature 1..16: note = synthetic [barcode part1]
  source 1..16: mol_type = other DNA
gcactggattggagac

SEQ ID NO: 4819 - DNA, 16 bp, synthetic construct
  misc_feature 1..16: note = synthetic [barcode part1]
  source 1..16: mol_type = other DNA
cgagattccgagattc

SEQ ID NO: 4820 - DNA, 16 bp, synthetic construct
  misc_feature 1..16: note = synthetic [barcode part1]
  source 1..16: mol_type = other DNA
gttaacgcacctcgtc

SEQ ID NO: 4821 - DNA, 16 bp, synthetic construct
  misc_feature 1..16: note = synthetic [barcode part1]
  source 1..16: mol_type = other DNA
ccagacaggcggaatt

SEQ ID NO: 4822 - DNA, 16 bp, synthetic construct
  misc_feature 1..16: note = synthetic [barcode part1]
  source 1..16: mol_type = other DNA
tattctatccggacgt

SEQ ID NO: 4823 - DNA, 16 bp, synthetic construct
  misc_feature 1..16: note = synthetic [barcode part1]
  source 1..16: mol_type = other DNA
tctatatctaggccgt

SEQ ID NO: 4824 - DNA, 16 bp, synthetic construct
  misc_feature 1..16: note = synthetic [barcode part1]
  source 1..16: mol_type = other DNA
agaggattccgacctt

SEQ ID NO: 4825 - DNA, 16 bp, synthetic construct
  misc_feature 1..16: note = synthetic [barcode part1]
  source 1..16: mol_type = other DNA
tctggaaggaatctcc

SEQ ID NO: 4826 - DNA, 16 bp, synthetic construct
  misc_feature 1..16: note = synthetic [barcode part1]
  source 1..16: mol_type = other DNA
tcgtactctgccgagt

SEQ ID NO: 4827 - DNA, 16 bp, synthetic construct
  misc_feature 1..16: note = synthetic [barcode part1]
  source 1..16: mol_type = other DNA
tccaccgatacgacct

SEQ ID NO: 4828 - DNA, 16 bp, synthetic construct
  misc_feature 1..16: note = synthetic [barcode part1]
  source 1..16: mol_type = other DNA
tatcaggatagtccgc

SEQ ID NO: 4829 - DNA, 16 bp, synthetic construct
  misc_feature 1..16: note = synthetic [barcode part1]
  source 1..16: mol_type = other DNA
gcgcctatattgcctg

SEQ ID NO: 4830 - DNA, 16 bp, synthetic construct
  misc_feature 1..16: note = synthetic [barcode part1]
  source 1..16: mol_type = other DNA
taccgcggttgattag

SEQ ID NO: 4831 - DNA, 16 bp, synthetic construct
  misc_feature 1..16: note = synthetic [barcode part1]
  source 1..16: mol_type = other DNA
tcggttcttgcgtgac

SEQ ID NO: 4832 - DNA, 16 bp, synthetic construct
  misc_feature 1..16: note = synthetic [barcode part1]
  source 1..16: mol_type = other DNA
cggtgtggttgtcttc

SEQ ID NO: 4833 - DNA, 16 bp, synthetic construct
  misc_feature 1..16: note = synthetic [barcode part1]
  source 1..16: mol_type = other DNA
attgcactagttcctg

SEQ ID NO: 4834 - DNA, 16 bp, synthetic construct
  misc_feature 1..16: note = synthetic [barcode part1]
  source 1..16: mol_type = other DNA
ccgatcgtcgattaag

SEQ ID NO: 4835 - DNA, 16 bp, synthetic construct
  misc_feature 1..16: note = synthetic [barcode part1]
  source 1..16: mol_type = other DNA
caatacgttctactgc

SEQ ID NO: 4836 - DNA, 16 bp, synthetic construct
  misc_feature 1..16: note = synthetic [barcode part1]
  source 1..16: mol_type = other DNA
aatctcggtgaacaag

SEQ ID NO: 4837 - DNA, 16 bp, synthetic construct
  misc_feature 1..16: note = synthetic [barcode part1]
  source 1..16: mol_type = other DNA
acctaggtatccgagt

SEQ ID NO: 4838 - DNA, 16 bp, synthetic construct
  misc_feature 1..16: note = synthetic [barcode part1]
  source 1..16: mol_type = other DNA
tctgaccaccgtgtac

SEQ ID NO: 4839 - DNA, 16 bp, synthetic construct
  misc_feature 1..16: note = synthetic [barcode part1]
  source 1..16: mol_type = other DNA
tgacttgactcttgtg

SEQ ID NO: 4840 - DNA, 16 bp, synthetic construct
  misc_feature 1..16: note = synthetic [barcode part1]
  source 1..16: mol_type = other DNA
aagtgtcggacagtgc

SEQ ID NO: 4841 - DNA, 16 bp, synthetic construct
  misc_feature 1..16: note = synthetic [barcode part1]
  source 1..16: mol_type = other DNA
gtggacagagttccag

SEQ ID NO: 4842 - DNA, 16 bp, synthetic construct
  misc_feature 1..16: note = synthetic [barcode part1]
  source 1..16: mol_type = other DNA
atcttgtatctaggcc

SEQ ID NO: 4843 - DNA, 16 bp, synthetic construct
  misc_feature 1..16: note = synthetic [barcode part1]
  source 1..16: mol_type = other DNA
gcactaacttcgttac

SEQ ID NO: 4844 - DNA, 16 bp, synthetic construct
  misc_feature 1..16: note = synthetic [barcode part1]
  source 1..16: mol_type = other DNA
gtcaggtgaacgcagt

SEQ ID NO: 4845 - DNA, 16 bp, synthetic construct
  misc_feature 1..16: note = synthetic [barcode part1]
  source 1..16: mol_type = other DNA
gcgtctgagtaagacg

SEQ ID NO: 4846 - DNA, 16 bp, synthetic construct
  misc_feature 1..16: note = synthetic [barcode part1]
  source 1..16: mol_type = other DNA
acaattattctccggc

SEQ ID NO: 4847 - DNA, 16 bp, synthetic construct
  misc_feature 1..16: note = synthetic [barcode part1]
  source 1..16: mol_type = other DNA
tgcctcgattcgcagt

SEQ ID NO: 4848 - DNA, 16 bp, synthetic construct
  misc_feature 1..16: note = synthetic [barcode part1]
  source 1..16: mol_type = other DNA
aagaacgtggatcact

SEQ ID NO: 4849 - DNA, 16 bp, synthetic construct
  misc_feature 1..16: note = synthetic [barcode part1]
  source 1..16: mol_type = other DNA
ttagaagagttcgcag

SEQ ID NO: 4850 - DNA, 16 bp, synthetic construct
  misc_feature 1..16: note = synthetic [barcode part1]
  source 1..16: mol_type = other DNA
tccttgacggttgcgt

SEQ ID NO: 4851 - DNA, 16 bp, synthetic construct
  misc_feature 1..16: note = synthetic [barcode part1]
  source 1..16: mol_type = other DNA
cgtgacactcggaatt

SEQ ID NO: 4852 - DNA, 16 bp, synthetic construct
  misc_feature 1..16: note = synthetic [barcode part1]
  source 1..16: mol_type = other DNA
agtaaggacgcaatct

SEQ ID NO: 4853 - DNA, 16 bp, synthetic construct
  misc_feature 1..16: note = synthetic [barcode part1]
  source 1..16: mol_type = other DNA
tcgacggacaattcac

SEQ ID NO: 4854 - DNA, 16 bp, synthetic construct
  misc_feature 1..16: note = synthetic [barcode part1]
  source 1..16: mol_type = other DNA
tattaaggcgaagacc

SEQ ID NO: 4855 - DNA, 16 bp, synthetic construct
  misc_feature 1..16: note = synthetic [barcode part1]
  source 1..16: mol_type = other DNA
ccgacaggagttattc

SEQ ID NO: 4856 - DNA, 16 bp, synthetic construct
  misc_feature 1..16: note = synthetic [barcode part1]
  source 1..16: mol_type = other DNA
acgtcctaccggattc

SEQ ID NO: 4857 - DNA, 16 bp, synthetic construct
  misc_feature 1..16: note = synthetic [barcode part1]
  source 1..16: mol_type = other DNA
gcaactactaaggaac

SEQ ID NO: 4858 - DNA, 16 bp, synthetic construct
  misc_feature 1..16: note = synthetic [barcode part1]
  source 1..16: mol_type = other DNA
aaccgtggattcttct

SEQ ID NO: 4859 - DNA, 16 bp, synthetic construct
  misc_feature 1..16: note = synthetic [barcode part1]
  source 1..16: mol_type = other DNA
gtgatctgcaacctag

SEQ ID NO: 4860 - DNA, 16 bp, synthetic construct
  misc_feature 1..16: note = synthetic [barcode part1]
  source 1..16: mol_type = other DNA
gatagtcgtgtagaac

SEQ ID NO: 4861 - DNA, 16 bp, synthetic construct
  misc_feature 1..16: note = synthetic [barcode part1]
  source 1..16: mol_type = other DNA
gcctattgttctaggt

SEQ ID NO: 4862 - DNA, 16 bp, synthetic construct
  misc_feature 1..16: note = synthetic [barcode part1]
  source 1..16: mol_type = other DNA
gttgacaattcctcac

SEQ ID NO: 4863 - DNA, 16 bp, synthetic construct
  misc_feature 1..16: note = synthetic [barcode part1]
  source 1..16: mol_type = other DNA
gtagtgcgccaattgt

SEQ ID NO: 4864 - DNA, 16 bp, synthetic construct
  misc_feature 1..16: note = synthetic [barcode part1]
  source 1..16: mol_type = other DNA
gtgtggattgtgttcg

SEQ ID NO: 4865 - DNA, 16 bp, synthetic construct
  misc_feature 1..16: note = synthetic [barcode part1]
  source 1..16: mol_type = other DNA
ccttcgtgtctggtag

SEQ ID NO: 4866 - DNA, 16 bp, synthetic construct
  misc_feature 1..16: note = synthetic [barcode part1]
  source 1..16: mol_type = other DNA
gagaacaggtggcctt

SEQ ID NO: 4867 - DNA, 16 bp, synthetic construct
  misc_feature 1..16: note = synthetic [barcode part1]
  source 1..16: mol_type = other DNA
aacggttcaacttggc

SEQ ID NO: 4868 - DNA, 16 bp, synthetic construct
  misc_feature 1..16: note = synthetic [barcode part1]
  source 1..16: mol_type = other DNA
tgtgactacacggttg

SEQ ID NO: 4869 - DNA, 16 bp, synthetic construct
  misc_feature 1..16: note = synthetic [barcode part1]
  source 1..16: mol_type = other DNA
gtattgcacaacaccg

SEQ ID NO: 4870 - DNA, 16 bp, synthetic construct
  misc_feature 1..16: note = synthetic [barcode part1]
  source 1..16: mol_type = other DNA
gattcgatatacctcc

SEQ ID NO: 4871 - DNA, 16 bp, synthetic construct
  misc_feature 1..16: note = synthetic [barcode part1]
  source 1..16: mol_type = other DNA
tcgacctaggcacttc

SEQ ID NO: 4872 - DNA, 16 bp, synthetic construct
  misc_feature 1..16: note = synthetic [barcode part1]
  source 1..16: mol_type = other DNA
ccacttagtaggcagt

SEQ ID NO: 4873 - DNA, 16 bp, synthetic construct
  misc_feature 1..16: note = synthetic [barcode part1]
  source 1..16: mol_type = other DNA
agtctctgagacgact

SEQ ID NO: 4874 - DNA, 16 bp, synthetic construct
  misc_feature 1..16: note = synthetic [barcode part1]
  source 1..16: mol_type = other DNA
tcctagtgcgtctggt

SEQ ID NO: 4875 - DNA, 16 bp, synthetic construct
  misc_feature 1..16: note = synthetic [barcode part1]
  source 1..16: mol_type = other DNA
gccgatattatcgtct

SEQ ID NO: 4876 - DNA, 16 bp, synthetic construct
  misc_feature 1..16: note = synthetic [barcode part1]
  source 1..16: mol_type = other DNA
aggcaccttgttctgc

SEQ ID NO: 4877 - DNA, 16 bp, synthetic construct
  misc_feature 1..16: note = synthetic [barcode part1]
  source 1..16: mol_type = other DNA
cgtaactattgttccg

SEQ ID NO: 4878 - DNA, 16 bp, synthetic construct
  misc_feature 1..16: note = synthetic [barcode part1]
  source 1..16: mol_type = other DNA
gtgcaatctaaggaac

SEQ ID NO: 4879 - DNA, 16 bp, synthetic construct
  misc_feature 1..16: note = synthetic [barcode part1]
  source 1..16: mol_type = other DNA
tccaatcgcactaact

SEQ ID NO: 4880 - DNA, 16 bp, synthetic construct
  misc_feature 1..16: note = synthetic [barcode part1]
  source 1..16: mol_type = other DNA
tccggtggaattgttg

SEQ ID NO: 4881 - DNA, 16 bp, synthetic construct
  misc_feature 1..16: note = synthetic [barcode part1]
  source 1..16: mol_type = other DNA
tggaaggtagtacgcc

SEQ ID NO: 4882 - DNA, 16 bp, synthetic construct
  misc_feature 1..16: note = synthetic [barcode part1]
  source 1..16: mol_type = other DNA
tatacgcgaccaactg

SEQ ID NO: 4883 - DNA, 16 bp, synthetic construct
  misc_feature 1..16: note = synthetic [barcode part1]
  source 1..16: mol_type = other DNA
cgtgaaggtcgagttg

SEQ ID NO: 4884 - DNA, 16 bp, synthetic construct
  misc_feature 1..16: note = synthetic [barcode part1]
  source 1..16: mol_type = other DNA
cacacaatcgttgttc

SEQ ID NO: 4885 - DNA, 16 bp, synthetic construct
  misc_feature 1..16: note = synthetic [barcode part1]
  source 1..16: mol_type = other DNA
acgatctcgaactgtg

SEQ ID NO: 4886 - DNA, 16 bp, synthetic construct
  misc_feature 1..16: note = synthetic [barcode part1]
  source 1..16: mol_type = other DNA
gtcgagacgcaatcag

SEQ ID NO: 4887 - DNA, 16 bp, synthetic construct
  misc_feature 1..16: note = synthetic [barcode part1]
  source 1..16: mol_type = other DNA
agtcgtgaccggtatt

SEQ ID NO: 4888 - DNA, 16 bp, synthetic construct
  misc_feature 1..16: note = synthetic [barcode part1]
  source 1..16: mol_type = other DNA
cagagtgaacgtattg

SEQ ID NO: 4889 - DNA, 16 bp, synthetic construct
  misc_feature 1..16: note = synthetic [barcode part1]
  source 1..16: mol_type = other DNA
accagatcggattacc

SEQ ID NO: 4890 - DNA, 16 bp, synthetic construct
  misc_feature 1..16: note = synthetic [barcode part1]
  source 1..16: mol_type = other DNA
aatacaggacacggag

SEQ ID NO: 4891 - DNA, 16 bp, synthetic construct
  misc_feature 1..16: note = synthetic [barcode part1]
  source 1..16: mol_type = other DNA
tacggtacttaggacc

SEQ ID NO: 4892 - DNA, 16 bp, synthetic construct
  misc_feature 1..16: note = synthetic [barcode part1]
  source 1..16: mol_type = other DNA
tgtcgaacgtcagatc

SEQ ID NO: 4893 - DNA, 16 bp, synthetic construct
  misc_feature 1..16: note = synthetic [barcode part1]
  source 1..16: mol_type = other DNA
tggagaaccggttctt

SEQ ID NO: 4894 - DNA, 16 bp, synthetic construct
  misc_feature 1..16: note = synthetic [barcode part1]
  source 1..16: mol_type = other DNA
tggccgaactaactac

SEQ ID NO: 4895 - DNA, 16 bp, synthetic construct
  misc_feature 1..16: note = synthetic [barcode part1]
  source 1..16: mol_type = other DNA
atcgaggtacgcagtg

SEQ ID NO: 4896 - DNA, 16 bp, synthetic construct
  misc_feature 1..16: note = synthetic [barcode part1]
  source 1..16: mol_type = other DNA
gtgcagaatcttcacg

SEQ ID NO: 4897 - DNA, 16 bp, synthetic construct
  misc_feature 1..16: note = synthetic [barcode part1]
  source 1..16: mol_type = other DNA
accaacgtctaacctt

SEQ ID NO: 4898 - DNA, 16 bp, synthetic construct
  misc_feature 1..16: note = synthetic [barcode part1]
  source 1..16: mol_type = other DNA
cgatacttgccacaag

SEQ ID NO: 4899 - DNA, 16 bp, synthetic construct
  misc_feature 1..16: note = synthetic [barcode part1]
  source 1..16: mol_type = other DNA
gatctggagttgtcgt

SEQ ID NO: 4900 - DNA, 16 bp, synthetic construct
  misc_feature 1..16: note = synthetic [barcode part1]
  source 1..16: mol_type = other DNA
gtgttcacaagtgtcg

SEQ ID NO: 4901 - DNA, 16 bp, synthetic construct
  misc_feature 1..16: note = synthetic [barcode part1]
  source 1..16: mol_type = other DNA
gatcctctcagtacgc

SEQ ID NO: 4902 - DNA, 16 bp, synthetic construct
  misc_feature 1..16: note = synthetic [barcode part1]
  source 1..16: mol_type = other DNA
tcacgaacttaacctc

SEQ ID NO: 4903 - DNA, 16 bp, synthetic construct
  misc_feature 1..16: note = synthetic [barcode part1]
  source 1..16: mol_type = other DNA
cagtatacctcgccgt

SEQ ID NO: 4904 - DNA, 16 bp, synthetic construct
  misc_feature 1..16: note = synthetic [barcode part1]
  source 1..16: mol_type = other DNA
ttgacgacaccagatc

SEQ ID NO: 4905 - DNA, 16 bp, synthetic construct
  misc_feature 1..16: note = synthetic [barcode part1]
  source 1..16: mol_type = other DNA
ttgcctcaagacaacg

SEQ ID NO: 4906 - DNA, 16 bp, synthetic construct
  misc_feature 1..16: note = synthetic [barcode part1]
  source 1..16: mol_type = other DNA
aatatacgaccgagac

SEQ ID NO: 4907 - DNA, 16 bp, synthetic construct
  misc_feature 1..16: note = synthetic [barcode part1]
  source 1..16: mol_type = other DNA
aagtccgcagaggact

SEQ ID NO: 4908 - DNA, 16 bp, synthetic construct
  misc_feature 1..16: note = synthetic [barcode part1]
  source 1..16: mol_type = other DNA
accacctgatatccgc

SEQ ID NO: 4909 - DNA, 16 bp, synthetic construct
  misc_feature 1..16: note = synthetic [barcode part1]
  source 1..16: mol_type = other DNA
taacggcgtacttctt

SEQ ID NO: 4910 - DNA, 16 bp, synthetic construct
  misc_feature 1..16: note = synthetic [barcode part1]
  source 1..16: mol_type = other DNA
tgaggtcttgaggtct

SEQ ID NO: 4911 - DNA, 16 bp, synthetic construct
  misc_feature 1..16: note = synthetic [barcode part1]
  source 1..16: mol_type = other DNA
tcgccgtcttatcgtt

SEQ ID NO: 4912 - DNA, 16 bp, synthetic construct
  misc_feature 1..16: note = synthetic [barcode part1]
  source 1..16: mol_type = other DNA
tctgagactctccttc

SEQ ID NO: 4913 - DNA, 16 bp, synthetic construct
  misc_feature 1..16: note = synthetic [barcode part1]
  source 1..16: mol_type = other DNA
ttgttgtggcgttcgc

SEQ ID NO: 4914 - DNA, 16 bp, synthetic construct
  misc_feature 1..16: note = synthetic [barcode part1]
  source 1..16: mol_type = other DNA
gccgacaacttagatc

SEQ ID NO: 4915 - DNA, 16 bp, synthetic construct
  misc_feature 1..16: note = synthetic [barcode part1]
  source 1..16: mol_type = other DNA
caggtgtgttgttctt

SEQ ID NO: 4916 - DNA, 16 bp, synthetic construct
  misc_feature 1..16: note = synthetic [barcode part1]
  source 1..16: mol_type = other DNA
gttattaggccaccag

SEQ ID NO: 4917 - DNA, 16 bp, synthetic construct
  misc_feature 1..16: note = synthetic [barcode part1]
  source 1..16: mol_type = other DNA
ttattcggataggcgc

SEQ ID NO: 4918 - DNA, 16 bp, synthetic construct
  misc_feature 1..16: note = synthetic [barcode part1]
  source 1..16: mol_type = other DNA
tcgcgtctatcggact

SEQ ID NO: 4919 - DNA, 16 bp, synthetic construct
  misc_feature 1..16: note = synthetic [barcode part1]
  source 1..16: mol_type = other DNA
cgcaccagactagaag

SEQ ID NO: 4920 - DNA, 16 bp, synthetic construct
  misc_feature 1..16: note = synthetic [barcode part1]
  source 1..16: mol_type = other DNA
tgcctggtacactaag

SEQ ID NO: 4921 - DNA, 16 bp, synthetic construct
  misc_feature 1..16: note = synthetic [barcode part1]
  source 1..16: mol_type = other DNA
cgatctctgtaaccgc

SEQ ID NO: 4922 - DNA, 16 bp, synthetic construct
  misc_feature 1..16: note = synthetic [barcode part1]
  source 1..16: mol_type = other DNA
gtatctgtccaggtag

SEQ ID NO: 4923 - DNA, 16 bp, synthetic construct
  misc_feature 1..16: note = synthetic [barcode part1]
  source 1..16: mol_type = other DNA
tctaactgttacgtgc

SEQ ID NO: 4924 - DNA, 16 bp, synthetic construct
  misc_feature 1..16: note = synthetic [barcode part1]
  source 1..16: mol_type = other DNA
gccacttctataagtc

SEQ ID NO: 4925 - DNA, 16 bp, synthetic construct
  misc_feature 1..16: note = synthetic [barcode part1]
  source 1..16: mol_type = other DNA
cgagaagtgcgattgc

SEQ ID NO: 4926 - DNA, 16 bp, synthetic construct
  misc_feature 1..16: note = synthetic [barcode part1]
  source 1..16: mol_type = other DNA
gtgaacgtggatagag

SEQ ID NO: 4927 - DNA, 16 bp, synthetic construct
  misc_feature 1..16: note = synthetic [barcode part1]
  source 1..16: mol_type = other DNA
acactgactgacgtac

SEQ ID NO: 4928 - DNA, 16 bp, synthetic construct
  misc_feature 1..16: note = synthetic [barcode part1]
  source 1..16: mol_type = other DNA
tgtggcaggacaggtt

SEQ ID NO: 4929 - DNA, 16 bp, synthetic construct
  misc_feature 1..16: note = synthetic [barcode part1]
  source 1..16: mol_type = other DNA
agtggtcgcacagagt

SEQ ID NO: 4930 - DNA, 16 bp, synthetic construct
  misc_feature 1..16: note = synthetic [barcode part1]
  source 1..16: mol_type = other DNA
caacgtaacacagtcc

SEQ ID NO: 4931 - DNA, 16 bp, synthetic construct
  misc_feature 1..16: note = synthetic [barcode part1]
  source 1..16: mol_type = other DNA
agagacgtaccaggtc

SEQ ID NO: 4932 - DNA, 16 bp, synthetic construct
  misc_feature 1..16: note = synthetic [barcode part1]
  source 1..16: mol_type = other DNA
aactggtcgcgatatc

SEQ ID NO: 4933 - DNA, 16 bp, synthetic construct
  misc_feature 1..16: note = synthetic [barcode part1]
  source 1..16: mol_type = other DNA
agacgccaagtggtac

SEQ ID NO: 4934 - DNA, 16 bp, synthetic construct
  misc_feature 1..16: note = synthetic [barcode part1]
  source 1..16: mol_type = other DNA
gcaacacttggtcagt

SEQ ID NO: 4935 - DNA, 16 bp, synthetic construct
  misc_feature 1..16: note = synthetic [barcode part1]
  source 1..16: mol_type = other DNA
attgtgcagaggccag

SEQ ID NO: 4936 - DNA, 16 bp, synthetic construct
  misc_feature 1..16: note = synthetic [barcode part1]
  source 1..16: mol_type = other DNA
gtacgttgcagttgtg

SEQ ID NO: 4937 - DNA, 16 bp, synthetic construct
  misc_feature 1..16: note = synthetic [barcode part1]
  source 1..16: mol_type = other DNA
agtcttcggtccacgt

SEQ ID NO: 4938 - DNA, 16 bp, synthetic construct
  misc_feature 1..16: note = synthetic [barcode part1]
  source 1..16: mol_type = other DNA
ttccaagtgagactcg

SEQ ID NO: 4939 - DNA, 16 bp, synthetic construct
  misc_feature 1..16: note = synthetic [barcode part1]
  source 1..16: mol_type = other DNA
cgtggatctcgtcact

SEQ ID NO: 4940 - DNA, 16 bp, synthetic construct
  misc_feature 1..16: note = synthetic [barcode part1]
  source 1..16: mol_type = other DNA
gtaccttgccagacct

SEQ ID NO: 4941 - DNA, 16 bp, synthetic construct
  misc_feature 1..16: note = synthetic [barcode part1]
  source 1..16: mol_type = other DNA
tggacttccgtctcag

SEQ ID NO: 4942 - DNA, 16 bp, synthetic construct
  misc_feature 1..16: note = synthetic [barcode part1]
  source 1..16: mol_type = other DNA
gtgatcacaatacgcc

SEQ ID NO: 4943 - DNA, 16 bp, synthetic construct
  misc_feature 1..16: note = synthetic [barcode part1]
  source 1..16: mol_type = other DNA
accgagaaggaagttg

SEQ ID NO: 4944 - DNA, 16 bp, synthetic construct
  misc_feature 1..16: note = synthetic [barcode part1]
  source 1..16: mol_type = other DNA
tcggtattctcttgag

SEQ ID NO: 4945 - DNA, 16 bp, synthetic construct
  misc_feature 1..16: note = synthetic [barcode part1]
  source 1..16: mol_type = other DNA
gcgtattataggacag

SEQ ID NO: 4946 - DNA, 16 bp, synthetic construct
  misc_feature 1..16: note = synthetic [barcode part1]
  source 1..16: mol_type = other DNA
gcgacgttcttaagac

SEQ ID NO: 4947 - DNA, 16 bp, synthetic construct
  misc_feature 1..16: note = synthetic [barcode part1]
  source 1..16: mol_type = other DNA
aatctgagactgccgt

SEQ ID NO: 4948 - DNA, 16 bp, synthetic construct
  misc_feature 1..16: note = synthetic [barcode part1]
  source 1..16: mol_type = other DNA
gtgacagacgattgcg

SEQ ID NO: 4949 - DNA, 16 bp, synthetic construct
  misc_feature 1..16: note = synthetic [barcode part1]
  source 1..16: mol_type = other DNA
actgacactgcacaac

SEQ ID NO: 4950 - DNA, 16 bp, synthetic construct
  misc_feature 1..16: note = synthetic [barcode part1]
  source 1..16: mol_type = other DNA
aacctggtgtacttct

SEQ ID NO: 4951 - DNA, 16 bp, synthetic construct
  misc_feature 1..16: note = synthetic [barcode part1]
  source 1..16: mol_type = other DNA
actgtggaggcgaact

SEQ ID NO: 4952 - DNA, 16 bp, synthetic construct
  misc_feature 1..16: note = synthetic [barcode part1]
  source 1..16: mol_type = other DNA
aatcacgcaattgcgc

SEQ ID NO: 4953 - DNA, 16 bp, synthetic construct
  misc_feature 1..16: note = synthetic [barcode part1]
  source 1..16: mol_type = other DNA
actgaggcacaattag

SEQ ID NO: 4954 - DNA, 16 bp, synthetic construct
  misc_feature 1..16: note = synthetic [barcode part1]
  source 1..16: mol_type = other DNA
tcaacctgacgtactt

SEQ ID NO: 4955 - DNA, 16 bp, synthetic construct
  misc_feature 1..16: note = synthetic [barcode part1]
  source 1..16: mol_type = other DNA
gaaggtcgcgtgttag

SEQ ID NO: 4956 - DNA, 16 bp, synthetic construct
  misc_feature 1..16: note = synthetic [barcode part1]
  source 1..16: mol_type = other DNA
tctaataccacgttcg

SEQ ID NO: 4957 - DNA, 16 bp, synthetic construct
  misc_feature 1..16: note = synthetic [barcode part1]
  source 1..16: mol_type = other DNA
tgcgatacggaatctc

SEQ ID NO: 4958 - DNA, 16 bp, synthetic construct
  misc_feature 1..16: note = synthetic [barcode part1]
  source 1..16: mol_type = other DNA
cgtggcagtctacttc

SEQ ID NO: 4959 - DNA, 16 bp, synthetic construct
  misc_feature 1..16: note = synthetic [barcode part1]
  source 1..16: mol_type = other DNA
aagtcaacgtggccag

SEQ ID NO: 4960 - DNA, 16 bp, synthetic construct
  misc_feature 1..16: note = synthetic [barcode part1]
  source 1..16: mol_type = other DNA
aggtacggatcgtcag

SEQ ID NO: 4961 - DNA, 16 bp, synthetic construct
  misc_feature 1..16: note = synthetic [barcode part1]
  source 1..16: mol_type = other DNA
aagaggtctcgatcct

SEQ ID NO: 4962 - DNA, 16 bp, synthetic construct
  misc_feature 1..16: note = synthetic [barcode part1]
  source 1..16: mol_type = other DNA
atattacaggtaggcg

SEQ ID NO: 4963 - DNA, 16 bp, synthetic construct
  misc_feature 1..16: note = synthetic [barcode part1]
  source 1..16: mol_type = other DNA
tggttgacgactaacc

SEQ ID NO: 4964 - DNA, 16 bp, synthetic construct
  misc_feature 1..16: note = synthetic [barcode part1]
  source 1..16: mol_type = other DNA
gactgcgatcagtatc

SEQ ID NO: 4965 - DNA, 16 bp, synthetic construct
  misc_feature 1..16: note = synthetic [barcode part1]
  source 1..16: mol_type = other DNA
acggttgcgtacagtt

SEQ ID NO: 4966 - DNA, 16 bp, synthetic construct
  misc_feature 1..16: note = synthetic [barcode part1]
  source 1..16: mol_type = other DNA
acgtcaggtcactcct

SEQ ID NO: 4967 - DNA, 16 bp, synthetic construct
  misc_feature 1..16: note = synthetic [barcode part1]
  source 1..16: mol_type = other DNA
ccaacaactactggac

SEQ ID NO: 4968 - DNA, 16 bp, synthetic construct
  misc_feature 1..16: note = synthetic [barcode part1]
  source 1..16: mol_type = other DNA
tgtggacggcaaggtt

SEQ ID NO: 4969 - DNA, 16 bp, synthetic construct
  misc_feature 1..16: note = synthetic [barcode part1]
  source 1..16: mol_type = other DNA
tcctctcctggttagt

SEQ ID NO: 4970 - DNA, 16 bp, synthetic construct
  misc_feature 1..16: note = synthetic [barcode part1]
  source 1..16: mol_type = other DNA
gcaacgaagacgtctg

SEQ ID NO: 4971 - DNA, 16 bp, synthetic construct
  misc_feature 1..16: note = synthetic [barcode part1]
  source 1..16: mol_type = other DNA
acaggtgacctcagag

SEQ ID NO: 4972 - DNA, 16 bp, synthetic construct
  misc_feature 1..16: note = synthetic [barcode part1]
  source 1..16: mol_type = other DNA
gactggatatcctgtg

SEQ ID NO: 4973 - DNA, 16 bp, synthetic construct
  misc_feature 1..16: note = synthetic [barcode part1]
  source 1..16: mol_type = other DNA
tacagacaggtaacac

SEQ ID NO: 4974 - DNA, 16 bp, synthetic construct
  misc_feature 1..16: note = synthetic [barcode part1]
  source 1..16: mol_type = other DNA
gactgcaacacgttgt

SEQ ID NO: 4975 - DNA, 16 bp, synthetic construct
  misc_feature 1..16: note = synthetic [barcode part1]
  source 1..16: mol_type = other DNA
actgaactgttggacc

SEQ ID NO: 4976 - DNA, 16 bp, synthetic construct
  misc_feature 1..16: note = synthetic [barcode part1]
  source 1..16: mol_type = other DNA
gtaggaatagtctggt

SEQ ID NO: 4977 - DNA, 16 bp, synthetic construct
  misc_feature 1..16: note = synthetic [barcode part1]
  source 1..16: mol_type = other DNA
accgaattagaagtgc

SEQ ID NO: 4978 - DNA, 16 bp, synthetic construct
  misc_feature 1..16: note = synthetic [barcode part1]
  source 1..16: mol_type = other DNA
caaccaagtaccgtac

SEQ ID NO: 4979 - DNA, 16 bp, synthetic construct
  misc_feature 1..16: note = synthetic [barcode part1]
  source 1..16: mol_type = other DNA
tgacgttagatagacg

SEQ ID NO: 4980 - DNA, 16 bp, synthetic construct
  misc_feature 1..16: note = synthetic [barcode part1]
  source 1..16: mol_type = other DNA
ttgtcgttgtctgagt

SEQ ID NO: 4981 - DNA, 16 bp, synthetic construct
  misc_feature 1..16: note = synthetic [barcode part1]
  source 1..16: mol_type = other DNA
ttgatctggtacactc

SEQ ID NO: 4982 - DNA, 16 bp, synthetic construct
  misc_feature 1..16: note = synthetic [barcode part1]
  source 1..16: mol_type = other DNA
aagtacagtcgagttg

SEQ ID NO: 4983 - DNA, 16 bp, synthetic construct
  misc_feature 1..16: note = synthetic [barcode part1]
  source 1..16: mol_type = other DNA
ccaacaggtgattcgt

SEQ ID NO: 4984 - DNA, 16 bp, synthetic construct
  misc_feature 1..16: note = synthetic [barcode part1]
  source 1..16: mol_type = other DNA
tacttgttgagactcc

SEQ ID NO: 4985 - DNA, 16 bp, synthetic construct
  misc_feature 1..16: note = synthetic [barcode part1]
  source 1..16: mol_type = other DNA
gatcctcgtacttggc

SEQ ID NO: 4986 - DNA, 16 bp, synthetic construct
  misc_feature 1..16: note = synthetic [barcode part1]
  source 1..16: mol_type = other DNA
agttcctacgcaactt

SEQ ID NO: 4987 - DNA, 16 bp, synthetic construct
  misc_feature 1..16: note = synthetic [barcode part1]
  source 1..16: mol_type = other DNA
ccttgtcactctactg

SEQ ID NO: 4988 - DNA, 16 bp, synthetic construct
  misc_feature 1..16: note = synthetic [barcode part1]
  source 1..16: mol_type = other DNA
ccagataagtaaggtc

SEQ ID NO: 4989 - DNA, 16 bp, synthetic construct
  misc_feature 1..16: note = synthetic [barcode part1]
  source 1..16: mol_type = other DNA
agtggtccttccacgt

SEQ ID NO: 4990 - DNA, 16 bp, synthetic construct
  misc_feature 1..16: note = synthetic [barcode part1]
  source 1..16: mol_type = other DNA
agtacggtctggtgag

SEQ ID NO: 4991 - DNA, 16 bp, synthetic construct
  misc_feature 1..16: note = synthetic [barcode part1]
  source 1..16: mol_type = other DNA
aggaacgtactcttgc

SEQ ID NO: 4992 - DNA, 16 bp, synthetic construct
  misc_feature 1..16: note = synthetic [barcode part1]
  source 1..16: mol_type = other DNA
tgacggcacactcttc

SEQ ID NO: 4993 - DNA, 16 bp, synthetic construct
  misc_feature 1..16: note = synthetic [barcode part1]
  source 1..16: mol_type = other DNA
acgcagtccaattctt

SEQ ID NO: 4994 - DNA, 16 bp, synthetic construct
  misc_feature 1..16: note = synthetic [barcode part1]
  source 1..16: mol_type = other DNA
tagtcctcgcaattgt

SEQ ID NO: 4995 - DNA, 16 bp, synthetic construct
  misc_feature 1..16: note = synthetic [barcode part1]
  source 1..16: mol_type = other DNA
aacgttctattccgtg

SEQ ID NO: 4996 - DNA, 16 bp, synthetic construct
  misc_feature 1..16: note = synthetic [barcode part1]
  source 1..16: mol_type = other DNA
aggagtgaggtcgttc

SEQ ID NO: 4997 - DNA, 16 bp, synthetic construct
  misc_feature 1..16: note = synthetic [barcode part1]
  source 1..16: mol_type = other DNA
agtgttgtcagttggc

SEQ ID NO: 4998 - DNA, 16 bp, synthetic construct
  misc_feature 1..16: note = synthetic [barcode part1]
  source 1..16: mol_type = other DNA
cagtgcctgcctattg

SEQ ID NO: 4999 - DNA, 16 bp, synthetic construct
  misc_feature 1..16: note = synthetic [barcode part1]
  source 1..16: mol_type = other DNA
atctcaggtcacaacg

SEQ ID NO: 5000 - DNA, 16 bp, synthetic construct
  misc_feature 1..16: note = synthetic [barcode part1]
  source 1..16: mol_type = other DNA
cgagaggactgacact

SEQ ID NO: 5001 - DNA, 16 bp, synthetic construct
  misc_feature 1..16: note = synthetic [barcode part1]
  source 1..16: mol_type = other DNA
aggatcgacgtccaag

SEQ ID NO: 5002 - DNA, 16 bp, synthetic construct
  misc_feature 1..16: note = synthetic [barcode part1]
  source 1..16: mol_type = other DNA
gttcgccttatccact

SEQ ID NO: 5003 - DNA, 16 bp, synthetic construct
  misc_feature 1..16: note = synthetic [barcode part1]
  source 1..16: mol_type = other DNA
agtctcctcttatcgc

SEQ ID NO: 5004 - DNA, 16 bp, synthetic construct
  misc_feature 1..16: note = synthetic [barcode part1]
  source 1..16: mol_type = other DNA
gaccaagagtgtgtcg

SEQ ID NO: 5005 - DNA, 16 bp, synthetic construct
  misc_feature 1..16: note = synthetic [barcode part1]
  source 1..16: mol_type = other DNA
tcacgccgtctagtgt

SEQ ID NO: 5006 - DNA, 16 bp, synthetic construct
  misc_feature 1..16: note = synthetic [barcode part1]
  source 1..16: mol_type = other DNA
gcagagagttattgac

SEQ ID NO: 5007 - DNA, 16 bp, synthetic construct
  misc_feature 1..16: note = synthetic [barcode part1]
  source 1..16: mol_type = other DNA
ccaactacttctctcg

SEQ ID NO: 5008 - DNA, 16 bp, synthetic construct
  misc_feature 1..16: note = synthetic [barcode part1]
  source 1..16: mol_type = other DNA
acctgaatccaagtgc

SEQ ID NO: 5009 - DNA, 16 bp, synthetic construct
  misc_feature 1..16: note = synthetic [barcode part1]
  source 1..16: mol_type = other DNA
cgttgtcgaatcgaac

SEQ ID NO: 5010 - DNA, 16 bp, synthetic construct
  misc_feature 1..16: note = synthetic [barcode part1]
  source 1..16: mol_type = other DNA
gaggatatctggtagt

SEQ ID NO: 5011 - DNA, 16 bp, synthetic construct
  misc_feature 1..16: note = synthetic [barcode part1]
  source 1..16: mol_type = other DNA
tgtacggtaccttgtt

SEQ ID NO: 5012 - DNA, 16 bp, synthetic construct
  misc_feature 1..16: note = synthetic [barcode part1]
  source 1..16: mol_type = other DNA
cctaagacagtcaacc

SEQ ID NO: 5013 - DNA, 16 bp, synthetic construct
  misc_feature 1..16: note = synthetic [barcode part1]
  source 1..16: mol_type = other DNA
aaccaactgacactgc

SEQ ID NO: 5014 - DNA, 16 bp, synthetic construct
  misc_feature 1..16: note = synthetic [barcode part1]
  source 1..16: mol_type = other DNA
gcaccgtcgaatagag

SEQ ID NO: 5015 - DNA, 16 bp, synthetic construct
  misc_feature 1..16: note = synthetic [barcode part1]
  source 1..16: mol_type = other DNA
aatccgtacgaatccg

SEQ ID NO: 5016 - DNA, 16 bp, synthetic construct
  misc_feature 1..16: note = synthetic [barcode part1]
  source 1..16: mol_type = other DNA
tcaacgagagtacaac

SEQ ID NO: 5017 - DNA, 16 bp, synthetic construct
  misc_feature 1..16: note = synthetic [barcode part1]
  source 1..16: mol_type = other DNA
ccgacctgaatcaagt

SEQ ID NO: 5018 - DNA, 16 bp, synthetic construct
  misc_feature 1..16: note = synthetic [barcode part1]
  source 1..16: mol_type = other DNA
gattcaggaggatatc

SEQ ID NO: 5019 - DNA, 16 bp, synthetic construct
  misc_feature 1..16: note = synthetic [barcode part1]
  source 1..16: mol_type = other DNA
tattcggacgcagttg

SEQ ID NO: 5020 - DNA, 16 bp, synthetic construct
  misc_feature 1..16: note = synthetic [barcode part1]
  source 1..16: mol_type = other DNA
tcgatcagaccgattg

SEQ ID NO: 5021 - DNA, 16 bp, synthetic construct
  misc_feature 1..16: note = synthetic [barcode part1]
  source 1..16: mol_type = other DNA
tactgttcctgacctc

SEQ ID NO: 5022 - DNA, 16 bp, synthetic construct
  misc_feature 1..16: note = synthetic [barcode part1]
  source 1..16: mol_type = other DNA
acgtaaccttcctggc

SEQ ID NO: 5023 - DNA, 16 bp, synthetic construct
  misc_feature 1..16: note = synthetic [barcode part1]
  source 1..16: mol_type = other DNA
ataacgtccaaccggt

SEQ ID NO: 5024 - DNA, 16 bp, synthetic construct
  misc_feature 1..16: note = synthetic [barcode part1]
  source 1..16: mol_type = other DNA
tgtatagtaccggcgt

SEQ ID NO: 5025 - DNA, 16 bp, synthetic construct
  misc_feature 1..16: note = synthetic [barcode part1]
  source 1..16: mol_type = other DNA
acttccgtgagttatc

SEQ ID NO: 5026 - DNA, 16 bp, synthetic construct
  misc_feature 1..16: note = synthetic [barcode part1]
  source 1..16: mol_type = other DNA
gtcgccacaattcaag

SEQ ID NO: 5027 - DNA, 16 bp, synthetic construct
  misc_feature 1..16: note = synthetic [barcode part1]
  source 1..16: mol_type = other DNA
gtgaccacaacacact

SEQ ID NO: 5028 - DNA, 16 bp, synthetic construct
  misc_feature 1..16: note = synthetic [barcode part1]
  source 1..16: mol_type = other DNA
gtcgaattagatcgcc

SEQ ID NO: 5029 - DNA, 16 bp, synthetic construct
  misc_feature 1..16: note = synthetic [barcode part1]
  source 1..16: mol_type = other DNA
accttacgaaccaggt

SEQ ID NO: 5030 - DNA, 16 bp, synthetic construct
  misc_feature 1..16: note = synthetic [barcode part1]
  source 1..16: mol_type = other DNA
tggaaccgatcaacct

SEQ ID NO: 5031 - DNA, 16 bp, synthetic construct
  misc_feature 1..16: note = synthetic [barcode part1]
  source 1..16: mol_type = other DNA
aacgtgccttcaactt

SEQ ID NO: 5032 - DNA, 16 bp, synthetic construct
  misc_feature 1..16: note = synthetic [barcode part1]
  source 1..16: mol_type = other DNA
cgaatataccaggagt

SEQ ID NO: 5033 - DNA, 16 bp, synthetic construct
  misc_feature 1..16: note = synthetic [barcode part1]
  source 1..16: mol_type = other DNA
ttcgccgacgtgatct

SEQ ID NO: 5034 - DNA, 16 bp, synthetic construct
  misc_feature 1..16: note = synthetic [barcode part1]
  source 1..16: mol_type = other DNA
acctatctaggatcct

SEQ ID NO: 5035 - DNA, 16 bp, synthetic construct
  misc_feature 1..16: note = synthetic [barcode part1]
  source 1..16: mol_type = other DNA
gtatcgttacctgttg

SEQ ID NO: 5036 - DNA, 16 bp, synthetic construct
  misc_feature 1..16: note = synthetic [barcode part1]
  source 1..16: mol_type = other DNA
ttgtacttaggccgcc

SEQ ID NO: 5037 - DNA, 16 bp, synthetic construct
  misc_feature 1..16: note = synthetic [barcode part1]
  source 1..16: mol_type = other DNA
tgtattccagaggcac

SEQ ID NO: 5038 - DNA, 16 bp, synthetic construct
  misc_feature 1..16: note = synthetic [barcode part1]
  source 1..16: mol_type = other DNA
atacgtgattgaccgc

SEQ ID NO: 5039 - DNA, 16 bp, synthetic construct
  misc_feature 1..16: note = synthetic [barcode part1]
  source 1..16: mol_type = other DNA
gaattgtgaacgcagt

SEQ ID NO: 5040 - DNA, 16 bp, synthetic construct
  misc_feature 1..16: note = synthetic [barcode part1]
  source 1..16: mol_type = other DNA
aggacactcttacgtg

SEQ ID NO: 5041 - DNA, 16 bp, synthetic construct
  misc_feature 1..16: note = synthetic [barcode part1]
  source 1..16: mol_type = other DNA
tatccgtagtggacgt

SEQ ID NO: 5042 - DNA, 16 bp, synthetic construct
  misc_feature 1..16: note = synthetic [barcode part1]
  source 1..16: mol_type = other DNA
gaattcactgcacggt

SEQ ID NO: 5043 - DNA, 16 bp, synthetic construct
  misc_feature 1..16: note = synthetic [barcode part1]
  source 1..16: mol_type = other DNA
tggatctcgtcgtctg

SEQ ID NO: 5044 - DNA, 16 bp, synthetic construct
  misc_feature 1..16: note = synthetic [barcode part1]
  source 1..16: mol_type = other DNA
gaagaccgcactagtg

SEQ ID NO: 5045 - DNA, 16 bp, synthetic construct
  misc_feature 1..16: note = synthetic [barcode part1]
  source 1..16: mol_type = other DNA
gacgtcagttgtggtt

SEQ ID NO: 5046 - DNA, 16 bp, synthetic construct
  misc_feature 1..16: note = synthetic [barcode part1]
  source 1..16: mol_type = other DNA
agtcggttcggttagt

SEQ ID NO: 5047 - DNA, 16 bp, synthetic construct
  misc_feature 1..16: note = synthetic [barcode part1]
  source 1..16: mol_type = other DNA
tcggtaataagaacgc

SEQ ID NO: 5048 - DNA, 16 bp, synthetic construct
  misc_feature 1..16: note = synthetic [barcode part1]
  source 1..16: mol_type = other DNA
cgtactaactacgcag

SEQ ID NO: 5049 - DNA, 16 bp, synthetic construct
  misc_feature 1..16: note = synthetic [barcode part1]
  source 1..16: mol_type = other DNA
gtagaccaaggcaatt

SEQ ID NO: 5050 - DNA, 16 bp, synthetic construct
  misc_feature 1..16: note = synthetic [barcode part1]
  source 1..16: mol_type = other DNA
ttgcgtcctattgaac

SEQ ID NO: 5051 - DNA, 16 bp, synthetic construct
  misc_feature 1..16: note = synthetic [barcode part1]
  source 1..16: mol_type = other DNA
actgaaccgtcttcgc

SEQ ID NO: 5052 - DNA, 16 bp, synthetic construct
  misc_feature 1..16: note = synthetic [barcode part1]
  source 1..16: mol_type = other DNA
gacggagttggtgtgt

SEQ ID NO: 5053 - DNA, 16 bp, synthetic construct
  misc_feature 1..16: note = synthetic [barcode part1]
  source 1..16: mol_type = other DNA
ttcgaccactacacgc

SEQ ID NO: 5054 - DNA, 16 bp, synthetic construct
  misc_feature 1..16: note = synthetic [barcode part1]
  source 1..16: mol_type = other DNA
attagaggtcggcgtg

SEQ ID NO: 5055 - DNA, 16 bp, synthetic construct
  misc_feature 1..16: note = synthetic [barcode part1]
  source 1..16: mol_type = other DNA
cctcagttaatcctcc

SEQ ID NO: 5056 - DNA, 16 bp, synthetic construct
  misc_feature 1..16: note = synthetic [barcode part1]
  source 1..16: mol_type = other DNA
gtctggcgttagattg

SEQ ID NO: 5057 - DNA, 16 bp, synthetic construct
  misc_feature 1..16: note = synthetic [barcode part1]
  source 1..16: mol_type = other DNA
tgaacactggtgaggc

SEQ ID NO: 5058 - DNA, 16 bp, synthetic construct
  misc_feature 1..16: note = synthetic [barcode part1]
  source 1..16: mol_type = other DNA
tgagaggtgtggtcac

SEQ ID NO: 5059 - DNA, 16 bp, synthetic construct
  misc_feature 1..16: note = synthetic [barcode part1]
  source 1..16: mol_type = other DNA
gtagatcgaggactgc

SEQ ID NO: 5060 - DNA, 16 bp, synthetic construct
  misc_feature 1..16: note = synthetic [barcode part1]
  source 1..16: mol_type = other DNA
accttatcgttagtgc

SEQ ID NO: 5061 - DNA, 16 bp, synthetic construct
  misc_feature 1..16: note = synthetic [barcode part1]
  source 1..16: mol_type = other DNA
tgagttctaccgcctg

SEQ ID NO: 5062 - DNA, 16 bp, synthetic construct
  misc_feature 1..16: note = synthetic [barcode part1]
  source 1..16: mol_type = other DNA
cctctcaaccttctag

SEQ ID NO: 5063 - DNA, 16 bp, synthetic construct
  misc_feature 1..16: note = synthetic [barcode part1]
  source 1..16: mol_type = other DNA
gcgttctggttatcgc

SEQ ID NO: 5064 - DNA, 16 bp, synthetic construct
  misc_feature 1..16: note = synthetic [barcode part1]
  source 1..16: mol_type = other DNA
aattgcacgcgactgt

SEQ ID NO: 5065 - DNA, 16 bp, synthetic construct
  misc_feature 1..16: note = synthetic [barcode part1]
  source 1..16: mol_type = other DNA
gtcgaatctgtattcc

SEQ ID NO: 5066 - DNA, 16 bp, synthetic construct
  misc_feature 1..16: note = synthetic [barcode part1]
  source 1..16: mol_type = other DNA
ttgcacagttgtgcag

SEQ ID NO: 5067 - DNA, 16 bp, synthetic construct
  misc_feature 1..16: note = synthetic [barcode part1]
  source 1..16: mol_type = other DNA
tgaccgcacaaggtag

SEQ ID NO: 5068 - DNA, 16 bp, synthetic construct
  misc_feature 1..16: note = synthetic [barcode part1]
  source 1..16: mol_type = other DNA
tgcgtcttagactatc

SEQ ID NO: 5069 - DNA, 16 bp, synthetic construct
  misc_feature 1..16: note = synthetic [barcode part1]
  source 1..16: mol_type = other DNA
aaggtagttcagacgt

SEQ ID NO: 5070 - DNA, 16 bp, synthetic construct
  misc_feature 1..16: note = synthetic [barcode part1]
  source 1..16: mol_type = other DNA
tccacactacgtcttc

SEQ ID NO: 5071 - DNA, 16 bp, synthetic construct
  misc_feature 1..16: note = synthetic [barcode part1]
  source 1..16: mol_type = other DNA
taatactgcctgtctg

SEQ ID NO: 5072 - DNA, 16 bp, synthetic construct
  misc_feature 1..16: note = synthetic [barcode part1]
  source 1..16: mol_type = other DNA
gacctcggtagtattg

SEQ ID NO: 5073 - DNA, 16 bp, synthetic construct
  misc_feature 1..16: note = synthetic [barcode part1]
  source 1..16: mol_type = other DNA
gtagttcgacgcagag

SEQ ID NO: 5074 - DNA, 16 bp, synthetic construct
  misc_feature 1..16: note = synthetic [barcode part1]
  source 1..16: mol_type = other DNA
tctcaatccttaccgc

SEQ ID NO: 5075 - DNA, 16 bp, synthetic construct
  misc_feature 1..16: note = synthetic [barcode part1]
  source 1..16: mol_type = other DNA
gacgtgttacgcgatt

SEQ ID NO: 5076 - DNA, 16 bp, synthetic construct
  misc_feature 1..16: note = synthetic [barcode part1]
  source 1..16: mol_type = other DNA
aagtccaggtggcaac

SEQ ID NO: 5077 - DNA, 16 bp, synthetic construct
  misc_feature 1..16: note = synthetic [barcode part1]
  source 1..16: mol_type = other DNA
tctagagaggatcctc

SEQ ID NO: 5078 - DNA, 16 bp, synthetic construct
  misc_feature 1..16: note = synthetic [barcode part1]
  source 1..16: mol_type = other DNA
gcctggagagtgatac

SEQ ID NO: 5079 - DNA, 16 bp, synthetic construct
  misc_feature 1..16: note = synthetic [barcode part1]
  source 1..16: mol_type = other DNA
aagataggacgagacc

SEQ ID NO: 5080 - DNA, 16 bp, synthetic construct
  misc_feature 1..16: note = synthetic [barcode part1]
  source 1..16: mol_type = other DNA
tagtcgttctggcctg

SEQ ID NO: 5081 - DNA, 16 bp, synthetic construct
  misc_feature 1..16: note = synthetic [barcode part1]
  source 1..16: mol_type = other DNA
gcgaactgccacttct

SEQ ID NO: 5082 - DNA, 16 bp, synthetic construct
  misc_feature 1..16: note = synthetic [barcode part1]
  source 1..16: mol_type = other DNA
gtatcttggccgtcac

SEQ ID NO: 5083 - DNA, 16 bp, synthetic construct
  misc_feature 1..16: note = synthetic [barcode part1]
  source 1..16: mol_type = other DNA
tgacgagtcgttctag

SEQ ID NO: 5084 - DNA, 16 bp, synthetic construct
  misc_feature 1..16: note = synthetic [barcode part1]
  source 1..16: mol_type = other DNA
cactgcggttatagtg

SEQ ID NO: 5085 - DNA, 16 bp, synthetic construct
  misc_feature 1..16: note = synthetic [barcode part1]
  source 1..16: mol_type = other DNA
ttggacttgactcgag

SEQ ID NO: 5086 - DNA, 16 bp, synthetic construct
  misc_feature 1..16: note = synthetic [barcode part1]
  source 1..16: mol_type = other DNA
gcaattgccgatcctc

SEQ ID NO: 5087 - DNA, 16 bp, synthetic construct
  misc_feature 1..16: note = synthetic [barcode part1]
  source 1..16: mol_type = other DNA
tacgaacgcggtagac

SEQ ID NO: 5088 - DNA, 16 bp, synthetic construct
  misc_feature 1..16: note = synthetic [barcode part1]
  source 1..16: mol_type = other DNA
tcggatagtcttgttc

SEQ ID NO: 5089 - DNA, 16 bp, synthetic construct
  misc_feature 1..16: note = synthetic [barcode part1]
  source 1..16: mol_type = other DNA
acagatagtggtactg

SEQ ID NO: 5090 - DNA, 16 bp, synthetic construct
  misc_feature 1..16: note = synthetic [barcode part1]
  source 1..16: mol_type = other DNA
gattcagtggtctgac

SEQ ID NO: 5091 - DNA, 16 bp, synthetic construct
  misc_feature 1..16: note = synthetic [barcode part1]
  source 1..16: mol_type = other DNA
ttgtgcaacacgtcag

SEQ ID NO: 5092 - DNA, 16 bp, synthetic construct
  misc_feature 1..16: note = synthetic [barcode part1]
  source 1..16: mol_type = other DNA
tagatcgtatacctcc

SEQ ID NO: 5093 - DNA, 16 bp, synthetic construct
  misc_feature 1..16: note = synthetic [barcode part1]
  source 1..16: mol_type = other DNA
cggaacctaatcgatc

SEQ ID NO: 5094 - DNA, 16 bp, synthetic construct
  misc_feature 1..16: note = synthetic [barcode part1]
  source 1..16: mol_type = other DNA
actaggttgttggacc

SEQ ID NO: 5095 - DNA, 16 bp, synthetic construct
  misc_feature 1..16: note = synthetic [barcode part1]
  source 1..16: mol_type = other DNA
cgcacgaacttcttgc

SEQ ID NO: 5096 - DNA, 16 bp, synthetic construct
  misc_feature 1..16: note = synthetic [barcode part1]
  source 1..16: mol_type = other DNA
tcgtctcactattccg

SEQ ID NO: 5097 - DNA, 16 bp, synthetic construct
  misc_feature 1..16: note = synthetic [barcode part1]
  source 1..16: mol_type = other DNA
tggttgtctatcactg

SEQ ID NO: 5098 - DNA, 16 bp, synthetic construct
  misc_feature 1..16: note = synthetic [barcode part1]
  source 1..16: mol_type = other DNA
gttcgatcgcgagaag

SEQ ID NO: 5099 - DNA, 16 bp, synthetic construct
  misc_feature 1..16: note = synthetic [barcode part1]
  source 1..16: mol_type = other DNA
cgttgattcaaggaag

SEQ ID NO: 5100 - DNA, 16 bp, synthetic construct
  misc_feature 1..16: note = synthetic [barcode part1]
  source 1..16: mol_type = other DNA
acgttacacgacgttg

SEQ ID NO: 5101 - DNA, 16 bp, synthetic construct
  misc_feature 1..16: note = synthetic [barcode part1]
  source 1..16: mol_type = other DNA
atagaacaggtccgcg

SEQ ID NO: 5102 - DNA, 16 bp, synthetic construct
  misc_feature 1..16: note = synthetic [barcode part1]
  source 1..16: mol_type = other DNA
tattagaactcctgcc

SEQ ID NO: 5103 - DNA, 16 bp, synthetic construct
  misc_feature 1..16: note = synthetic [barcode part1]
  source 1..16: mol_type = other DNA
atcaacgaggtgttcc

SEQ ID NO: 5104 - DNA, 16 bp, synthetic construct
  misc_feature 1..16: note = synthetic [barcode part1]
  source 1..16: mol_type = other DNA
cagtactgcaacgttg

SEQ ID NO: 5105 - DNA, 16 bp, synthetic construct
  misc_feature 1..16: note = synthetic [barcode part1]
  source 1..16: mol_type = other DNA
acgaaggccagtgatc

SEQ ID NO: 5106 - DNA, 16 bp, synthetic construct
  misc_feature 1..16: note = synthetic [barcode part1]
  source 1..16: mol_type = other DNA
ttgcagaccgtcactc

SEQ ID NO: 5107 - DNA, 16 bp, synthetic construct
  misc_feature 1..16: note = synthetic [barcode part1]
  source 1..16: mol_type = other DNA
agttcaccaggtgttg

SEQ ID NO: 5108 - DNA, 16 bp, synthetic construct
  misc_feature 1..16: note = synthetic [barcode part1]
  source 1..16: mol_type = other DNA
acaccgaattgaaggt

SEQ ID NO: 5109 - DNA, 16 bp, synthetic construct
  misc_feature 1..16: note = synthetic [barcode part1]
  source 1..16: mol_type = other DNA
tgagtcttctggacag

SEQ ID NO: 5110 - DNA, 16 bp, synthetic construct
  misc_feature 1..16: note = synthetic [barcode part1]
  source 1..16: mol_type = other DNA
tctaggttcgcgtaag

SEQ ID NO: 5111 - DNA, 16 bp, synthetic construct
  misc_feature 1..16: note = synthetic [barcode part1]
  source 1..16: mol_type = other DNA
cggacgtgttgaagac

SEQ ID NO: 5112 - DNA, 16 bp, synthetic construct
  misc_feature 1..16: note = synthetic [barcode part1]
  source 1..16: mol_type = other DNA
gacttgacgtgaaggc

SEQ ID NO: 5113 - DNA, 16 bp, synthetic construct
  misc_feature 1..16: note = synthetic [barcode part1]
  source 1..16: mol_type = other DNA
tcacgaggacgacagt

SEQ ID NO: 5114 - DNA, 16 bp, synthetic construct
  misc_feature 1..16: note = synthetic [barcode part1]
  source 1..16: mol_type = other DNA
cggcagtacacaagac

SEQ ID NO: 5115 - DNA, 16 bp, synthetic construct
  misc_feature 1..16: note = synthetic [barcode part1]
  source 1..16: mol_type = other DNA
agataagtcacggcgc

SEQ ID NO: 5116 - DNA, 16 bp, synthetic construct
  misc_feature 1..16: note = synthetic [barcode part1]
  source 1..16: mol_type = other DNA
acacactcactggtag

SEQ ID NO: 5117 - DNA, 16 bp, synthetic construct
  misc_feature 1..16: note = synthetic [barcode part1]
  source 1..16: mol_type = other DNA
aagaggtgagtgtctt

SEQ ID NO: 5118 - DNA, 16 bp, synthetic construct
  misc_feature 1..16: note = synthetic [barcode part1]
  source 1..16: mol_type = other DNA
ttctgtatcaacggtc

SEQ ID NO: 5119 - DNA, 16 bp, synthetic construct
  misc_feature 1..16: note = synthetic [barcode part1]
  source 1..16: mol_type = other DNA
cgtgtctgttcaacgc

SEQ ID NO: 5120 - DNA, 16 bp, synthetic construct
  misc_feature 1..16: note = synthetic [barcode part1]
  source 1..16: mol_type = other DNA
gcgattagtcagtgtc

SEQ ID NO: 5121 - DNA, 16 bp, synthetic construct
  misc_feature 1..16: note = synthetic [barcode part1]
  source 1..16: mol_type = other DNA
tgaatcgtcttcacac

SEQ ID NO: 5122 - DNA, 16 bp, synthetic construct
  misc_feature 1..16: note = synthetic [barcode part1]
  source 1..16: mol_type = other DNA
ttcgttgacgtggcct

SEQ ID NO: 5123 - DNA, 16 bp, synthetic construct
  misc_feature 1..16: note = synthetic [barcode part1]
  source 1..16: mol_type = other DNA
ttggtccgaactgaac

SEQ ID NO: 5124 - DNA, 16 bp, synthetic construct
  misc_feature 1..16: note = synthetic [barcode part1]
  source 1..16: mol_type = other DNA
ttgtgcaacgtaccag

SEQ ID NO: 5125 - DNA, 16 bp, synthetic construct
  misc_feature 1..16: note = synthetic [barcode part1]
  source 1..16: mol_type = other DNA
cagttcaaggtacaag

SEQ ID NO: 5126 - DNA, 16 bp, synthetic construct
  misc_feature 1..16: note = synthetic [barcode part1]
  source 1..16: mol_type = other DNA
gtggaaccgaacgttg

SEQ ID NO: 5127 - DNA, 16 bp, synthetic construct
  misc_feature 1..16: note = synthetic [barcode part1]
  source 1..16: mol_type = other DNA
tcaatctgtgactacc

SEQ ID NO: 5128 - DNA, 16 bp, synthetic construct
  misc_feature 1..16: note = synthetic [barcode part1]
  source 1..16: mol_type = other DNA
tattctggttcgcggc

SEQ ID NO: 5129 - DNA, 16 bp, synthetic construct
  misc_feature 1..16: note = synthetic [barcode part1]
  source 1..16: mol_type = other DNA
tcgtagtatacgtgcg

SEQ ID NO: 5130 - DNA, 16 bp, synthetic construct
  misc_feature 1..16: note = synthetic [barcode part1]
  source 1..16: mol_type = other DNA
tgtagtagacgccact

SEQ ID NO: 5131 - DNA, 16 bp, synthetic construct
  misc_feature 1..16: note = synthetic [barcode part1]
  source 1..16: mol_type = other DNA
ttgaggtgagttctgc

SEQ ID NO: 5132 - DNA, 16 bp, synthetic construct
  misc_feature 1..16: note = synthetic [barcode part1]
  source 1..16: mol_type = other DNA
atagaggccggtgact

SEQ ID NO: 5133 - DNA, 16 bp, synthetic construct
  misc_feature 1..16: note = synthetic [barcode part1]
  source 1..16: mol_type = other DNA
gatcacttgaaccacg

SEQ ID NO: 5134 - DNA, 16 bp, synthetic construct
  misc_feature 1..16: note = synthetic [barcode part1]
  source 1..16: mol_type = other DNA
gccagtgcaaggaatc

SEQ ID NO: 5135 - DNA, 16 bp, synthetic construct
  misc_feature 1..16: note = synthetic [barcode part1]
  source 1..16: mol_type = other DNA
aacggacgcgaataag

SEQ ID NO: 5136 - DNA, 16 bp, synthetic construct
  misc_feature 1..16: note = synthetic [barcode part1]
  source 1..16: mol_type = other DNA
tgcaggaaggatacag

SEQ ID NO: 5137 - DNA, 16 bp, synthetic construct
  misc_feature 1..16: note = synthetic [barcode part1]
  source 1..16: mol_type = other DNA
cgtgtatctaaggtcg

SEQ ID NO: 5138 - DNA, 16 bp, synthetic construct
  misc_feature 1..16: note = synthetic [barcode part1]
  source 1..16: mol_type = other DNA
tcgcacggattctctg

SEQ ID NO: 5139 - DNA, 16 bp, synthetic construct
  misc_feature 1..16: note = synthetic [barcode part1]
  source 1..16: mol_type = other DNA
tcagtgagtgaaggcc

SEQ ID NO: 5140 - DNA, 16 bp, synthetic construct
  misc_feature 1..16: note = synthetic [barcode part1]
  source 1..16: mol_type = other DNA
tcaggatacaggcgac

SEQ ID NO: 5141 - DNA, 16 bp, synthetic construct
  misc_feature 1..16: note = synthetic [barcode part1]
  source 1..16: mol_type = other DNA
aagtgcctggatacct

SEQ ID NO: 5142 - DNA, 16 bp, synthetic construct
  misc_feature 1..16: note = synthetic [barcode part1]
  source 1..16: mol_type = other DNA
ttactggttccgtgcg

SEQ ID NO: 5143 - DNA, 16 bp, synthetic construct
  misc_feature 1..16: note = synthetic [barcode part1]
  source 1..16: mol_type = other DNA
aacacaacggagacag

SEQ ID NO: 5144 - DNA, 16 bp, synthetic construct
  misc_feature 1..16: note = synthetic [barcode part1]
  source 1..16: mol_type = other DNA
agaatcaagttgtgcg

SEQ ID NO: 5145 - DNA, 16 bp, synthetic construct
  misc_feature 1..16: note = synthetic [barcode part1]
  source 1..16: mol_type = other DNA
acacggttcaagaagt

SEQ ID NO: 5146 - DNA, 16 bp, synthetic construct
  misc_feature 1..16: note = synthetic [barcode part1]
  source 1..16: mol_type = other DNA
tagtcaccaggagacg

SEQ ID NO: 5147 - DNA, 16 bp, synthetic construct
  misc_feature 1..16: note = synthetic [barcode part1]
  source 1..16: mol_type = other DNA
attctcgcagatcgtt

SEQ ID NO: 5148 - DNA, 16 bp, synthetic construct
  misc_feature 1..16: note = synthetic [barcode part1]
  source 1..16: mol_type = other DNA
caacaggtgaacgtcg

SEQ ID NO: 5149 - DNA, 16 bp, synthetic construct
  misc_feature 1..16: note = synthetic [barcode part1]
  source 1..16: mol_type = other DNA
atagtgcactaaccgc

SEQ ID NO: 5150 - DNA, 16 bp, synthetic construct
  misc_feature 1..16: note = synthetic [barcode part1]
  source 1..16: mol_type = other DNA
ttacaaggagtcgagt

SEQ ID NO: 5151 - DNA, 16 bp, synthetic construct
  misc_feature 1..16: note = synthetic [barcode part1]
  source 1..16: mol_type = other DNA
tctcaacgcgcagtct

SEQ ID NO: 5152 - DNA, 16 bp, synthetic construct
  misc_feature 1..16: note = synthetic [barcode part1]
  source 1..16: mol_type = other DNA
ccacaaggcaactact

SEQ ID NO: 5153 - DNA, 16 bp, synthetic construct
  misc_feature 1..16: note = synthetic [barcode part1]
  source 1..16: mol_type = other DNA
tatacagtccggttct

SEQ ID NO: 5154 - DNA, 16 bp, synthetic construct
  misc_feature 1..16: note = synthetic [barcode part1]
  source 1..16: mol_type = other DNA
tgcacctacctagtgc

SEQ ID NO: 5155 - DNA, 16 bp, synthetic construct
  misc_feature 1..16: note = synthetic [barcode part1]
  source 1..16: mol_type = other DNA
cctattggattcgtgt

SEQ ID NO: 5156 - DNA, 16 bp, synthetic construct
  misc_feature 1..16: note = synthetic [barcode part1]
  source 1..16: mol_type = other DNA
caagtacaacctgcac

SEQ ID NO: 5157 - DNA, 16 bp, synthetic construct
  misc_feature 1..16: note = synthetic [barcode part1]
  source 1..16: mol_type = other DNA
cgatcttaagaggcct

SEQ ID NO: 5158 - DNA, 16 bp, synthetic construct
  misc_feature 1..16: note = synthetic [barcode part1]
  source 1..16: mol_type = other DNA
gtcttcggaattgttc

SEQ ID NO: 5159 - DNA, 16 bp, synthetic construct
  misc_feature 1..16: note = synthetic [barcode part1]
  source 1..16: mol_type = other DNA
gtgttgaccaggtatc

SEQ ID NO: 5160 - DNA, 16 bp, synthetic construct
  misc_feature 1..16: note = synthetic [barcode part1]
  source 1..16: mol_type = other DNA
ttatacacggtgtgcg

SEQ ID NO: 5161 - DNA, 16 bp, synthetic construct
  misc_feature 1..16: note = synthetic [barcode part1]
  source 1..16: mol_type = other DNA
cctacacagtctaatc

SEQ ID NO: 5162 - DNA, 16 bp, synthetic construct
  misc_feature 1..16: note = synthetic [barcode part1]
  source 1..16: mol_type = other DNA
tgttggtctccgatcg

SEQ ID NO: 5163 - DNA, 16 bp, synthetic construct
  misc_feature 1..16: note = synthetic [barcode part1]
  source 1..16: mol_type = other DNA
cagttcctcaatcctc

SEQ ID NO: 5164 - DNA, 16 bp, synthetic construct
  misc_feature 1..16: note = synthetic [barcode part1]
  source 1..16: mol_type = other DNA
aatagaccaagatccg

SEQ ID NO: 5165 - DNA, 16 bp, synthetic construct
  misc_feature 1..16: note = synthetic [barcode part1]
  source 1..16: mol_type = other DNA
cgaactaaggatacac

SEQ ID NO: 5166 - DNA, 16 bp, synthetic construct
  misc_feature 1..16: note = synthetic [barcode part1]
  source 1..16: mol_type = other DNA
gttggcgaatagtaac

SEQ ID NO: 5167 - DNA, 16 bp, synthetic construct
  misc_feature 1..16: note = synthetic [barcode part1]
  source 1..16: mol_type = other DNA
aattcaactctcgcac

SEQ ID NO: 5168 - DNA, 16 bp, synthetic construct
  misc_feature 1..16: note = synthetic [barcode part1]
  source 1..16: mol_type = other DNA
gcagactgtgtctagt

SEQ ID NO: 5169 - DNA, 16 bp, synthetic construct
  misc_feature 1..16: note = synthetic [barcode part1]
  source 1..16: mol_type = other DNA
tcggatactacagacc

SEQ ID NO: 5170 - DNA, 16 bp, synthetic construct
  misc_feature 1..16: note = synthetic [barcode part1]
  source 1..16: mol_type = other DNA
cacgtgcaatcaatcg

SEQ ID NO: 5171 - DNA, 16 bp, synthetic construct
  misc_feature 1..16: note = synthetic [barcode part1]
  source 1..16: mol_type = other DNA
tgtgcgactgttactt

SEQ ID NO: 5172 - DNA, 16 bp, synthetic construct
  misc_feature 1..16: note = synthetic [barcode part1]
  source 1..16: mol_type = other DNA
atctcttaccaacacg

SEQ ID NO: 5173 - DNA, 16 bp, synthetic construct
  misc_feature 1..16: note = synthetic [barcode part1]
  source 1..16: mol_type = other DNA
acacttccacgtctct

SEQ ID NO: 5174 - DNA, 16 bp, synthetic construct
  misc_feature 1..16: note = synthetic [barcode part1]
  source 1..16: mol_type = other DNA
cctccaacgtagttgc

SEQ ID NO: 5175 - DNA, 16 bp, synthetic construct
  misc_feature 1..16: note = synthetic [barcode part1]
  source 1..16: mol_type = other DNA
tgtctattcgcggcac

SEQ ID NO: 5176 - DNA, 16 bp, synthetic construct
  misc_feature 1..16: note = synthetic [barcode part1]
  source 1..16: mol_type = other DNA
acctagatccactatc

SEQ ID NO: 5177 - DNA, 16 bp, synthetic construct
  misc_feature 1..16: note = synthetic [barcode part1]
  source 1..16: mol_type = other DNA
tctgccttggatagag

SEQ ID NO: 5178 - DNA, 16 bp, synthetic construct
  misc_feature 1..16: note = synthetic [barcode part1]
  source 1..16: mol_type = other DNA
gtaaccaatcgacgtc

SEQ ID NO: 5179 - DNA, 16 bp, synthetic construct
  misc_feature 1..16: note = synthetic [barcode part1]
  source 1..16: mol_type = other DNA
tctcgtctaggacaag

SEQ ID NO: 5180 - DNA, 16 bp, synthetic construct
  misc_feature 1..16: note = synthetic [barcode part1]
  source 1..16: mol_type = other DNA
tcgcagataggagatt

SEQ ID NO: 5181 - DNA, 16 bp, synthetic construct
  misc_feature 1..16: note = synthetic [barcode part1]
  source 1..16: mol_type = other DNA
tgtactgactgacgtg

SEQ ID NO: 5182 - DNA, 16 bp, synthetic construct
  misc_feature 1..16: note = synthetic [barcode part1]
  source 1..16: mol_type = other DNA
tacgcctctatcaggc

SEQ ID NO: 5183 - DNA, 16 bp, synthetic construct
  misc_feature 1..16: note = synthetic [barcode part1]
  source 1..16: mol_type = other DNA
gatacgtgttgcgtac

SEQ ID NO: 5184 - DNA, 16 bp, synthetic construct
  misc_feature 1..16: note = synthetic [barcode part1]
  source 1..16: mol_type = other DNA
gaggtgaatctgtaac

SEQ ID NO: 5185 - DNA, 16 bp, synthetic construct
  misc_feature 1..16: note = synthetic [barcode part1]
  source 1..16: mol_type = other DNA
gtgttctcagttcagt

SEQ ID NO: 5186 - DNA, 16 bp, synthetic construct
  misc_feature 1..16: note = synthetic [barcode part1]
  source 1..16: mol_type = other DNA
taggtcgattggacct

SEQ ID NO: 5187 - DNA, 16 bp, synthetic construct
  misc_feature 1..16: note = synthetic [barcode part1]
  source 1..16: mol_type = other DNA
agtactcggaccagag

SEQ ID NO: 5188 - DNA, 16 bp, synthetic construct
  misc_feature 1..16: note = synthetic [barcode part1]
  source 1..16: mol_type = other DNA
tattctcgttagaccg

SEQ ID NO: 5189 - DNA, 16 bp, synthetic construct
  misc_feature 1..16: note = synthetic [barcode part1]
  source 1..16: mol_type = other DNA
atctcgagatctcgag

SEQ ID NO: 5190 - DNA, 16 bp, synthetic construct
  misc_feature 1..16: note = synthetic [barcode part1]
  source 1..16: mol_type = other DNA
atctgaccagtaaccg

SEQ ID NO: 5191 - DNA, 16 bp, synthetic construct
  misc_feature 1..16: note = synthetic [barcode part1]
  source 1..16: mol_type = other DNA
actggacgtaatccgt

SEQ ID NO: 5192 - DNA, 16 bp, synthetic construct
  misc_feature 1..16: note = synthetic [barcode part1]
  source 1..16: mol_type = other DNA
atcacagttgtggcac

SEQ ID NO: 5193 - DNA, 16 bp, synthetic construct
  misc_feature 1..16: note = synthetic [barcode part1]
  source 1..16: mol_type = other DNA
gcaatcgcacacgatt

SEQ ID NO: 5194 - DNA, 16 bp, synthetic construct
  misc_feature 1..16: note = synthetic [barcode part1]
  source 1..16: mol_type = other DNA
cctattaacacagtcc

SEQ ID NO: 5195 - DNA, 16 bp, synthetic construct
  misc_feature 1..16: note = synthetic [barcode part1]
  source 1..16: mol_type = other DNA
aggtcacagtataggt

SEQ ID NO: 5196 - DNA, 16 bp, synthetic construct
  misc_feature 1..16: note = synthetic [barcode part1]
  source 1..16: mol_type = other DNA
gcgttctggcctaatc

SEQ ID NO: 5197 - DNA, 16 bp, synthetic construct
  misc_feature 1..16: note = synthetic [barcode part1]
  source 1..16: mol_type = other DNA
cgcaattaagacagtg

SEQ ID NO: 5198 - DNA, 16 bp, synthetic construct
  misc_feature 1..16: note = synthetic [barcode part1]
  source 1..16: mol_type = other DNA
cgacgaattcaggcag

SEQ ID NO: 5199 - DNA, 16 bp, synthetic construct
  misc_feature 1..16: note = synthetic [barcode part1]
  source 1..16: mol_type = other DNA
cacacttgacaactct

SEQ ID NO: 5200 - DNA, 16 bp, synthetic construct
  misc_feature 1..16: note = synthetic [barcode part1]
  source 1..16: mol_type = other DNA
atacagtctccaacct

SEQ ID NO: 5201 - DNA, 16 bp, synthetic construct
  misc_feature 1..16: note = synthetic [barcode part1]
  source 1..16: mol_type = other DNA
gacactgtgcaacgtt

SEQ ID NO: 5202 - DNA, 16 bp, synthetic construct
  misc_feature 1..16: note = synthetic [barcode part1]
  source 1..16: mol_type = other DNA
cgaattaggcctggtt

SEQ ID NO: 5203 - DNA, 16 bp, synthetic construct
  misc_feature 1..16: note = synthetic [barcode part1]
  source 1..16: mol_type = other DNA
cgaagttcacgatacc

SEQ ID NO: 5204 - DNA, 16 bp, synthetic construct
  misc_feature 1..16: note = synthetic [barcode part1]
  source 1..16: mol_type = other DNA
gaggttggtacgactg

SEQ ID NO: 5205 - DNA, 16 bp, synthetic construct
  misc_feature 1..16: note = synthetic [barcode part1]
  source 1..16: mol_type = other DNA
agtccggacactcttc

SEQ ID NO: 5206 - DNA, 16 bp, synthetic construct
  misc_feature 1..16: note = synthetic [barcode part1]
  source 1..16: mol_type = other DNA
gaagagtctcgcaggt

SEQ ID NO: 5207 - DNA, 16 bp, synthetic construct
  misc_feature 1..16: note = synthetic [barcode part1]
  source 1..16: mol_type = other DNA
gcagtcactaggaggt

SEQ ID NO: 5208 - DNA, 16 bp, synthetic construct
  misc_feature 1..16: note = synthetic [barcode part1]
  source 1..16: mol_type = other DNA
acgcaagaataacctg

SEQ ID NO: 5209 - DNA, 16 bp, synthetic construct
  misc_feature 1..16: note = synthetic [barcode part1]
  source 1..16: mol_type = other DNA
aatcgcactggtctcc

SEQ ID NO: 5210 - DNA, 16 bp, synthetic construct
  misc_feature 1..16: note = synthetic [barcode part1]
  source 1..16: mol_type = other DNA
cacacgaattccttgt

SEQ ID NO: 5211 - DNA, 16 bp, synthetic construct
  misc_feature 1..16: note = synthetic [barcode part1]
  source 1..16: mol_type = other DNA
gcacctgaataaggcg

SEQ ID NO: 5212 - DNA, 16 bp, synthetic construct
  misc_feature 1..16: note = synthetic [barcode part1]
  source 1..16: mol_type = other DNA
cacggtcgtattcaag

SEQ ID NO: 5213 - DNA, 16 bp, synthetic construct
  misc_feature 1..16: note = synthetic [barcode part1]
  source 1..16: mol_type = other DNA
cagttctgtaccagtt

SEQ ID NO: 5214 - DNA, 16 bp, synthetic construct
  misc_feature 1..16: note = synthetic [barcode part1]
  source 1..16: mol_type = other DNA
tctcacgccgacaatc

SEQ ID NO: 5215 - DNA, 16 bp, synthetic construct
  misc_feature 1..16: note = synthetic [barcode part1]
  source 1..16: mol_type = other DNA
tatctcaggtgtccgc

SEQ ID NO: 5216 - DNA, 16 bp, synthetic construct
  misc_feature 1..16: note = synthetic [barcode part1]
  source 1..16: mol_type = other DNA
gcgagtcagaagtcac

SEQ ID NO: 5217 - DNA, 16 bp, synthetic construct
  misc_feature 1..16: note = synthetic [barcode part1]
  source 1..16: mol_type = other DNA
taccgaataggttgcc

SEQ ID NO: 5218 - DNA, 16 bp, synthetic construct
  misc_feature 1..16: note = synthetic [barcode part1]
  source 1..16: mol_type = other DNA
aacaggccgagacttg

SEQ ID NO: 5219 - DNA, 16 bp, synthetic construct
  misc_feature 1..16: note = synthetic [barcode part1]
  source 1..16: mol_type = other DNA
acgaacgcaagactcg

SEQ ID NO: 5220 - DNA, 16 bp, synthetic construct
  misc_feature 1..16: note = synthetic [barcode part1]
  source 1..16: mol_type = other DNA
gtcaacaacctggatc

SEQ ID NO: 5221 - DNA, 16 bp, synthetic construct
  misc_feature 1..16: note = synthetic [barcode part1]
  source 1..16: mol_type = other DNA
gtgtcaataacaggac

SEQ ID NO: 5222 - DNA, 16 bp, synthetic construct
  misc_feature 1..16: note = synthetic [barcode part1]
  source 1..16: mol_type = other DNA
tattctaggcgttcgt

SEQ ID NO: 5223 - DNA, 16 bp, synthetic construct
  misc_feature 1..16: note = synthetic [barcode part1]
  source 1..16: mol_type = other DNA
tgactgtgtaaccgtg

SEQ ID NO: 5224 - DNA, 16 bp, synthetic construct
  misc_feature 1..16: note = synthetic [barcode part1]
  source 1..16: mol_type = other DNA
tgcgtctcactagacc

SEQ ID NO: 5225 - DNA, 16 bp, synthetic construct
  misc_feature 1..16: note = synthetic [barcode part1]
  source 1..16: mol_type = other DNA
acggtatccagaatcc

SEQ ID NO: 5226 - DNA, 16 bp, synthetic construct
  misc_feature 1..16: note = synthetic [barcode part1]
  source 1..16: mol_type = other DNA
aggatctcttacttgc

SEQ ID NO: 5227 - DNA, 16 bp, synthetic construct
  misc_feature 1..16: note = synthetic [barcode part1]
  source 1..16: mol_type = other DNA
taactaaggtcggtcc

SEQ ID NO: 5228 - DNA, 16 bp, synthetic construct
  misc_feature 1..16: note = synthetic [barcode part1]
  source 1..16: mol_type = other DNA
gcgattatcagttctc

SEQ ID NO: 5229 - DNA, 16 bp, synthetic construct
  misc_feature 1..16: note = synthetic [barcode part1]
  source 1..16: mol_type = other DNA
cgacaacgaggtgtgt

SEQ ID NO: 5230 - DNA, 16 bp, synthetic construct
  misc_feature 1..16: note = synthetic [barcode part1]
  source 1..16: mol_type = other DNA
agactggttagtctcg

SEQ ID NO: 5231 - DNA, 16 bp, synthetic construct
  misc_feature 1..16: note = synthetic [barcode part1]
  source 1..16: mol_type = other DNA
cacgtcttctgtgttc

SEQ ID NO: 5232 - DNA, 16 bp, synthetic construct
  misc_feature 1..16: note = synthetic [barcode part1]
  source 1..16: mol_type = other DNA
agaagaggccagttag

SEQ ID NO: 5233 - DNA, 16 bp, synthetic construct
  misc_feature 1..16: note = synthetic [barcode part1]
  source 1..16: mol_type = other DNA
ttcgccactaagtgcc

SEQ ID NO: 5234 - DNA, 16 bp, synthetic construct
  misc_feature 1..16: note = synthetic [barcode part1]
  source 1..16: mol_type = other DNA
cctggtcaactctctt

SEQ ID NO: 5235 - DNA, 16 bp, synthetic construct
  misc_feature 1..16: note = synthetic [barcode part1]
  source 1..16: mol_type = other DNA
gtagtctctgtatctg

SEQ ID NO: 5236 - DNA, 16 bp, synthetic construct
  misc_feature 1..16: note = synthetic [barcode part1]
  source 1..16: mol_type = other DNA
tagttgcagatcgaag

SEQ ID NO: 5237 - DNA, 16 bp, synthetic construct
  misc_feature 1..16: note = synthetic [barcode part1]
  source 1..16: mol_type = other DNA
tgacaacttggcagtc

SEQ ID NO: 5238 - DNA, 16 bp, synthetic construct
  misc_feature 1..16: note = synthetic [barcode part1]
  source 1..16: mol_type = other DNA
ttcgtccgtgaacaag

SEQ ID NO: 5239 - DNA, 16 bp, synthetic construct
  misc_feature 1..16: note = synthetic [barcode part1]
  source 1..16: mol_type = other DNA
gacttcttgacggagt

SEQ ID NO: 5240 - DNA, 16 bp, synthetic construct
  misc_feature 1..16: note = synthetic [barcode part1]
  source 1..16: mol_type = other DNA
cctgtcttgtctactg

SEQ ID NO: 5241 - DNA, 16 bp, synthetic construct
  misc_feature 1..16: note = synthetic [barcode part1]
  source 1..16: mol_type = other DNA
gttggaccttgtactt

SEQ ID NO: 5242 - DNA, 16 bp, synthetic construct
  misc_feature 1..16: note = synthetic [barcode part1]
  source 1..16: mol_type = other DNA
gtgagagtagtaatcc

SEQ ID NO: 5243 - DNA, 16 bp, synthetic construct
  misc_feature 1..16: note = synthetic [barcode part1]
  source 1..16: mol_type = other DNA
gcctataattacctcg

SEQ ID NO: 5244 - DNA, 16 bp, synthetic construct
  misc_feature 1..16: note = synthetic [barcode part1]
  source 1..16: mol_type = other DNA
tcctgataacttgcgt

SEQ ID NO: 5245 - DNA, 16 bp, synthetic construct
  misc_feature 1..16: note = synthetic [barcode part1]
  source 1..16: mol_type = other DNA
tcaacagacaggaatc

SEQ ID NO: 5246 - DNA, 16 bp, synthetic construct
  misc_feature 1..16: note = synthetic [barcode part1]
  source 1..16: mol_type = other DNA
gaaggcaacaatccgc

SEQ ID NO: 5247 - DNA, 16 bp, synthetic construct
  misc_feature 1..16: note = synthetic [barcode part1]
  source 1..16: mol_type = other DNA
aacgtgccaatcgtgt

SEQ ID NO: 5248 - DNA, 16 bp, synthetic construct
  misc_feature 1..16: note = synthetic [barcode part1]
  source 1..16: mol_type = other DNA
aatacgcgtcgtgtac

SEQ ID NO: 5249 - DNA, 16 bp, synthetic construct
  misc_feature 1..16: note = synthetic [barcode part1]
  source 1..16: mol_type = other DNA
cctaaggagaggaagt

SEQ ID NO: 5250 - DNA, 16 bp, synthetic construct
  misc_feature 1..16: note = synthetic [barcode part1]
  source 1..16: mol_type = other DNA
caactaggtgtcacac

SEQ ID NO: 5251 - DNA, 16 bp, synthetic construct
  misc_feature 1..16: note = synthetic [barcode part1]
  source 1..16: mol_type = other DNA
gttgaggaagaccaag

SEQ ID NO: 5252 - DNA, 16 bp, synthetic construct
  misc_feature 1..16: note = synthetic [barcode part1]
  source 1..16: mol_type = other DNA
ttccaacctgaacgtt

SEQ ID NO: 5253 - DNA, 16 bp, synthetic construct
  misc_feature 1..16: note = synthetic [barcode part1]
  source 1..16: mol_type = other DNA
acgttaggttatctcc

SEQ ID NO: 5254 - DNA, 16 bp, synthetic construct
  misc_feature 1..16: note = synthetic [barcode part1]
  source 1..16: mol_type = other DNA
aagtattggtgtccgc

SEQ ID NO: 5255 - DNA, 16 bp, synthetic construct
  misc_feature 1..16: note = synthetic [barcode part1]
  source 1..16: mol_type = other DNA
gtcgaatagtacagac

SEQ ID NO: 5256 - DNA, 16 bp, synthetic construct
  misc_feature 1..16: note = synthetic [barcode part1]
  source 1..16: mol_type = other DNA
ccgtatccgaactgtc

SEQ ID NO: 5257 - DNA, 16 bp, synthetic construct
  misc_feature 1..16: note = synthetic [barcode part1]
  source 1..16: mol_type = other DNA
aacgattgcgttcctt

SEQ ID NO: 5258 - DNA, 16 bp, synthetic construct
  misc_feature 1..16: note = synthetic [barcode part1]
  source 1..16: mol_type = other DNA
atcgtactgactcttg

SEQ ID NO: 5259 - DNA, 16 bp, synthetic construct
  misc_feature 1..16: note = synthetic [barcode part1]
  source 1..16: mol_type = other DNA
ttaggacgtctgcctc

SEQ ID NO: 5260 - DNA, 16 bp, synthetic construct
  misc_feature 1..16: note = synthetic [barcode part1]
  source 1..16: mol_type = other DNA
gtgcaagaacgtagag

SEQ ID NO: 5261 - DNA, 16 bp, synthetic construct
  misc_feature 1..16: note = synthetic [barcode part1]
  source 1..16: mol_type = other DNA
gtatcactgtctatcg

SEQ ID NO: 5262 - DNA, 16 bp, synthetic construct
  misc_feature 1..16: note = synthetic [barcode part1]
  source 1..16: mol_type = other DNA
cgactatcagatccag

SEQ ID NO: 5263 - DNA, 16 bp, synthetic construct
  misc_feature 1..16: note = synthetic [barcode part1]
  source 1..16: mol_type = other DNA
tacacgaattcggacc

SEQ ID NO: 5264 - DNA, 16 bp, synthetic construct
  misc_feature 1..16: note = synthetic [barcode part1]
  source 1..16: mol_type = other DNA
cagtggactgcaagtg

SEQ ID NO: 5265 - DNA, 16 bp, synthetic construct
  misc_feature 1..16: note = synthetic [barcode part1]
  source 1..16: mol_type = other DNA
ttccacgtgatagttc

SEQ ID NO: 5266 - DNA, 16 bp, synthetic construct
  misc_feature 1..16: note = synthetic [barcode part1]
  source 1..16: mol_type = other DNA
ttcacgcgattaccgc

SEQ ID NO: 5267 - DNA, 16 bp, synthetic construct
  misc_feature 1..16: note = synthetic [barcode part1]
  source 1..16: mol_type = other DNA
tctctcggcaactacg

SEQ ID NO: 5268 - DNA, 16 bp, synthetic construct
  misc_feature 1..16: note = synthetic [barcode part1]
  source 1..16: mol_type = other DNA
cgcgcagtaagaggtt

SEQ ID NO: 5269 - DNA, 16 bp, synthetic construct
  misc_feature 1..16: note = synthetic [barcode part1]
  source 1..16: mol_type = other DNA
cgaatactcggtacac

SEQ ID NO: 5270 - DNA, 16 bp, synthetic construct
  misc_feature 1..16: note = synthetic [barcode part1]
  source 1..16: mol_type = other DNA
agttgcagacttcttc

SEQ ID NO: 5271 - DNA, 16 bp, synthetic construct
  misc_feature 1..16: note = synthetic [barcode part1]
  source 1..16: mol_type = other DNA
ttgtgtgcgatcgtag

SEQ ID NO: 5272 - DNA, 16 bp, synthetic construct
  misc_feature 1..16: note = synthetic [barcode part1]
  source 1..16: mol_type = other DNA
tgatagacctaccgtg

SEQ ID NO: 5273 - DNA, 16 bp, synthetic construct
  misc_feature 1..16: note = synthetic [barcode part1]
  source 1..16: mol_type = other DNA
tgacacgcgacttcct

SEQ ID NO: 5274 - DNA, 16 bp, synthetic construct
  misc_feature 1..16: note = synthetic [barcode part1]
  source 1..16: mol_type = other DNA
gaggaacaacgcgttc

SEQ ID NO: 5275 - DNA, 16 bp, synthetic construct
  misc_feature 1..16: note = synthetic [barcode part1]
  source 1..16: mol_type = other DNA
gttcttaggtaactcc

SEQ ID NO: 5276 - DNA, 16 bp, synthetic construct
  misc_feature 1..16: note = synthetic [barcode part1]
  source 1..16: mol_type = other DNA
agtccgatcggtaact

SEQ ID NO: 5277 - DNA, 16 bp, synthetic construct
  misc_feature 1..16: note = synthetic [barcode part1]
  source 1..16: mol_type = other DNA
cactaccacctgaacc

SEQ ID NO: 5278 - DNA, 16 bp, synthetic construct
  misc_feature 1..16: note = synthetic [barcode part1]
  source 1..16: mol_type = other DNA
gcgcgattcttagtcc

SEQ ID NO: 5279 - DNA, 16 bp, synthetic construct
  misc_feature 1..16: note = synthetic [barcode part1]
  source 1..16: mol_type = other DNA
tacgttggtgtaccag

SEQ ID NO: 5280 - DNA, 16 bp, synthetic construct
  misc_feature 1..16: note = synthetic [barcode part1]
  source 1..16: mol_type = other DNA
tccacgtaccaagtcc

SEQ ID NO: 5281 - DNA, 16 bp, synthetic construct
  misc_feature 1..16: note = synthetic [barcode part1]
  source 1..16: mol_type = other DNA
acggagacaatctaac

SEQ ID NO: 5282 - DNA, 16 bp, synthetic construct
  misc_feature 1..16: note = synthetic [barcode part1]
  source 1..16: mol_type = other DNA
aagtcgccttagtggt

SEQ ID NO: 5283 - DNA, 16 bp, synthetic construct
  misc_feature 1..16: note = synthetic [barcode part1]
  source 1..16: mol_type = other DNA
acctcgtggtgtactc

SEQ ID NO: 5284 - DNA, 16 bp, synthetic construct
  misc_feature 1..16: note = synthetic [barcode part1]
  source 1..16: mol_type = other DNA
tcttctcaatcggtcc

SEQ ID NO: 5285 - DNA, 16 bp, synthetic construct
  misc_feature 1..16: note = synthetic [barcode part1]
  source 1..16: mol_type = other DNA
aaggtcgattgttccg

SEQ ID NO: 5286 - DNA, 16 bp, synthetic construct
  misc_feature 1..16: note = synthetic [barcode part1]
  source 1..16: mol_type = other DNA
cctactgttaatacgc

SEQ ID NO: 5287 - DNA, 16 bp, synthetic construct
  misc_feature 1..16: note = synthetic [barcode part1]
  source 1..16: mol_type = other DNA
cgcacgatactagtac

SEQ ID NO: 5288 - DNA, 16 bp, synthetic construct
  misc_feature 1..16: note = synthetic [barcode part1]
  source 1..16: mol_type = other DNA
acacacgatcaaccgt

SEQ ID NO: 5289 - DNA, 16 bp, synthetic construct
  misc_feature 1..16: note = synthetic [barcode part1]
  source 1..16: mol_type = other DNA
acacacaacgtacgtc

SEQ ID NO: 5290 - DNA, 16 bp, synthetic construct
  misc_feature 1..16: note = synthetic [barcode part1]
  source 1..16: mol_type = other DNA
tccgtgcgacctagtt

SEQ ID NO: 5291 - DNA, 16 bp, synthetic construct
  misc_feature 1..16: note = synthetic [barcode part1]
  source 1..16: mol_type = other DNA
taatcctcggttgcgc

SEQ ID NO: 5292 - DNA, 16 bp, synthetic construct
  misc_feature 1..16: note = synthetic [barcode part1]
  source 1..16: mol_type = other DNA
agtatcacgtggcact

SEQ ID NO: 5293 - DNA, 16 bp, synthetic construct
  misc_feature 1..16: note = synthetic [barcode part1]
  source 1..16: mol_type = other DNA
tatcttgaacactcgc

SEQ ID NO: 5294 - DNA, 16 bp, synthetic construct
  misc_feature 1..16: note = synthetic [barcode part1]
  source 1..16: mol_type = other DNA
tgttgacaaccagaag

SEQ ID NO: 5295 - DNA, 16 bp, synthetic construct
  misc_feature 1..16: note = synthetic [barcode part1]
  source 1..16: mol_type = other DNA
tgcgaagtaacgaccg

SEQ ID NO: 5296 - DNA, 16 bp, synthetic construct
  misc_feature 1..16: note = synthetic [barcode part1]
  source 1..16: mol_type = other DNA
tggcagagtgaacctg

SEQ ID NO: 5297 - DNA, 16 bp, synthetic construct
  misc_feature 1..16: note = synthetic [barcode part1]
  source 1..16: mol_type = other DNA
tgagtacgtcaagaac

SEQ ID NO: 5298 - DNA, 16 bp, synthetic construct
  misc_feature 1..16: note = synthetic [barcode part1]
  source 1..16: mol_type = other DNA
ccactctagagtaacg

SEQ ID NO: 5299 - DNA, 16 bp, synthetic construct
  misc_feature 1..16: note = synthetic [barcode part1]
  source 1..16: mol_type = other DNA
tgtctattactgtggc

SEQ ID NO: 5300 - DNA, 16 bp, synthetic construct
  misc_feature 1..16: note = synthetic [barcode part1]
  source 1..16: mol_type = other DNA
ccgtgagaatagtggc

SEQ ID NO: 5301 - DNA, 16 bp, synthetic construct
  misc_feature 1..16: note = synthetic [barcode part1]
  source 1..16: mol_type = other DNA
attcggattgcgagtc

SEQ ID NO: 5302 - DNA, 16 bp, synthetic construct
  misc_feature 1..16: note = synthetic [barcode part1]
  source 1..16: mol_type = other DNA
tactgtccggagagtt

SEQ ID NO: 5303 - DNA, 16 bp, synthetic construct
  misc_feature 1..16: note = synthetic [barcode part1]
  source 1..16: mol_type = other DNA
acggactctcctaatt

SEQ ID NO: 5304 - DNA, 16 bp, synthetic construct
  misc_feature 1..16: note = synthetic [barcode part1]
  source 1..16: mol_type = other DNA
cgagattgttacggtc

SEQ ID NO: 5305 - DNA, 16 bp, synthetic construct
  misc_feature 1..16: note = synthetic [barcode part1]
  source 1..16: mol_type = other DNA
actgcctggataacac

SEQ ID NO: 5306 - DNA, 16 bp, synthetic construct
  misc_feature 1..16: note = synthetic [barcode part1]
  source 1..16: mol_type = other DNA
gccggacactcttact

SEQ ID NO: 5307 - DNA, 16 bp, synthetic construct
  misc_feature 1..16: note = synthetic [barcode part1]
  source 1..16: mol_type = other DNA
gaaggattgccgacgt

SEQ ID NO: 5308 - DNA, 16 bp, synthetic construct
  misc_feature 1..16: note = synthetic [barcode part1]
  source 1..16: mol_type = other DNA
ccaattcggatactct

SEQ ID NO: 5309 - DNA, 16 bp, synthetic construct
  misc_feature 1..16: note = synthetic [barcode part1]
  source 1..16: mol_type = other DNA
aggaacgcagagatac

SEQ ID NO: 5310 - DNA, 16 bp, synthetic construct
  misc_feature 1..16: note = synthetic [barcode part1]
  source 1..16: mol_type = other DNA
tgtgaacgtagacctc

SEQ ID NO: 5311 - DNA, 16 bp, synthetic construct
  misc_feature 1..16: note = synthetic [barcode part1]
  source 1..16: mol_type = other DNA
agtctagagtccaacc

SEQ ID NO: 5312 - DNA, 16 bp, synthetic construct
  misc_feature 1..16: note = synthetic [barcode part1]
  source 1..16: mol_type = other DNA
tgtagtgtgccgtaac

SEQ ID NO: 5313 - DNA, 16 bp, synthetic construct
  misc_feature 1..16: note = synthetic [barcode part1]
  source 1..16: mol_type = other DNA
gccagtgataaggcac

SEQ ID NO: 5314 - DNA, 16 bp, synthetic construct
  misc_feature 1..16: note = synthetic [barcode part1]
  source 1..16: mol_type = other DNA
accgaacgtccttatt

SEQ ID NO: 5315 - DNA, 16 bp, synthetic construct
  misc_feature 1..16: note = synthetic [barcode part1]
  source 1..16: mol_type = other DNA
atcagacacgaggacc

SEQ ID NO: 5316 - DNA, 16 bp, synthetic construct
  misc_feature 1..16: note = synthetic [barcode part1]
  source 1..16: mol_type = other DNA
acaacctatccttacg

SEQ ID NO: 5317 - DNA, 16 bp, synthetic construct
  misc_feature 1..16: note = synthetic [barcode part1]
  source 1..16: mol_type = other DNA
tcgcgtcgtgaagatt

SEQ ID NO: 5318 - DNA, 16 bp, synthetic construct
  misc_feature 1..16: note = synthetic [barcode part1]
  source 1..16: mol_type = other DNA
tcgttaggtattcctg

SEQ ID NO: 5319 - DNA, 16 bp, synthetic construct
  misc_feature 1..16: note = synthetic [barcode part1]
  source 1..16: mol_type = other DNA
cgccaacttaattctg

SEQ ID NO: 5320 - DNA, 16 bp, synthetic construct
  misc_feature 1..16: note = synthetic [barcode part1]
  source 1..16: mol_type = other DNA
gccaataacgactacc

SEQ ID NO: 5321 - DNA, 16 bp, synthetic construct
  misc_feature 1..16: note = synthetic [barcode part1]
  source 1..16: mol_type = other DNA
gtaaccagtaccgatc

SEQ ID NO: 5322 - DNA, 16 bp, synthetic construct
  misc_feature 1..16: note = synthetic [barcode part1]
  source 1..16: mol_type = other DNA
tcgtgccaacggtctt

SEQ ID NO: 5323 - DNA, 16 bp, synthetic construct
  misc_feature 1..16: note = synthetic [barcode part1]
  source 1..16: mol_type = other DNA
cagtgatagagatacc

SEQ ID NO: 5324 - DNA, 16 bp, synthetic construct
  misc_feature 1..16: note = synthetic [barcode part1]
  source 1..16: mol_type = other DNA
atagtgtcggccagtt

SEQ ID NO: 5325 - DNA, 16 bp, synthetic construct
  misc_feature 1..16: note = synthetic [barcode part1]
  source 1..16: mol_type = other DNA
atcgtcaatcgagtcg

SEQ ID NO: 5326 - DNA, 16 bp, synthetic construct
  misc_feature 1..16: note = synthetic [barcode part1]
  source 1..16: mol_type = other DNA
tacgtgtgtgtcacag

SEQ ID NO: 5327 - DNA, 16 bp, synthetic construct
  misc_feature 1..16: note = synthetic [barcode part1]
  source 1..16: mol_type = other DNA
tctcaacggccacact

SEQ ID NO: 5328 - DNA, 16 bp, synthetic construct
  misc_feature 1..16: note = synthetic [barcode part1]
  source 1..16: mol_type = other DNA
tatcggatcactggac

SEQ ID NO: 5329 - DNA, 16 bp, synthetic construct
  misc_feature 1..16: note = synthetic [barcode part1]
  source 1..16: mol_type = other DNA
cgttagaatagtccgc

SEQ ID NO: 5330 - DNA, 16 bp, synthetic construct
  misc_feature 1..16: note = synthetic [barcode part1]
  source 1..16: mol_type = other DNA
caacctccacaatcgc

SEQ ID NO: 5331 - DNA, 16 bp, synthetic construct
  misc_feature 1..16: note = synthetic [barcode part1]
  source 1..16: mol_type = other DNA
actctcgaggtcactc

SEQ ID NO: 5332 - DNA, 16 bp, synthetic construct
  misc_feature 1..16: note = synthetic [barcode part1]
  source 1..16: mol_type = other DNA
accgtgacgaacaggt

SEQ ID NO: 5333 - DNA, 16 bp, synthetic construct
  misc_feature 1..16: note = synthetic [barcode part1]
  source 1..16: mol_type = other DNA
cgtggcggaacgaatt

SEQ ID NO: 5334 - DNA, 16 bp, synthetic construct
  misc_feature 1..16: note = synthetic [barcode part1]
  source 1..16: mol_type = other DNA
ccagaactggaacctt

SEQ ID NO: 5335 - DNA, 16 bp, synthetic construct
  misc_feature 1..16: note = synthetic [barcode part1]
  source 1..16: mol_type = other DNA
gtcgaagatcaatacg

SEQ ID NO: 5336 - DNA, 16 bp, synthetic construct
  misc_feature 1..16: note = synthetic [barcode part1]
  source 1..16: mol_type = other DNA
cggtagaactcgtgag

SEQ ID NO: 5337 - DNA, 16 bp, synthetic construct
  misc_feature 1..16: note = synthetic [barcode part1]
  source 1..16: mol_type = other DNA
agatcactgaagacac

SEQ ID NO: 5338 - DNA, 16 bp, synthetic construct
  misc_feature 1..16: note = synthetic [barcode part1]
  source 1..16: mol_type = other DNA
gacgattaccgttgac

SEQ ID NO: 5339 - DNA, 16 bp, synthetic construct
  misc_feature 1..16: note = synthetic [barcode part1]
  source 1..16: mol_type = other DNA
gagttcaaggtgttcc

SEQ ID NO: 5340 - DNA, 16 bp, synthetic construct
  misc_feature 1..16: note = synthetic [barcode part1]
  source 1..16: mol_type = other DNA
gaacgtgtaacagttg

SEQ ID NO: 5341 - DNA, 16 bp, synthetic construct
  misc_feature 1..16: note = synthetic [barcode part1]
  source 1..16: mol_type = other DNA
cactaccaagtcgaac

SEQ ID NO: 5342 - DNA, 16 bp, synthetic construct
  misc_feature 1..16: note = synthetic [barcode part1]
  source 1..16: mol_type = other DNA
caactctggtcaaggt

SEQ ID NO: 5343 - DNA, 16 bp, synthetic construct
  misc_feature 1..16: note = synthetic [barcode part1]
  source 1..16: mol_type = other DNA
ccgttcgtaagatctt

SEQ ID NO: 5344 - DNA, 16 bp, synthetic construct
  misc_feature 1..16: note = synthetic [barcode part1]
  source 1..16: mol_type = other DNA
taccttagagtgacgc

SEQ ID NO: 5345 - DNA, 16 bp, synthetic construct
  misc_feature 1..16: note = synthetic [barcode part1]
  source 1..16: mol_type = other DNA
tatctggtggcaggag

SEQ ID NO: 5346 - DNA, 16 bp, synthetic construct
  misc_feature 1..16: note = synthetic [barcode part1]
  source 1..16: mol_type = other DNA
gttctgcaatacactc

SEQ ID NO: 5347 - DNA, 16 bp, synthetic construct
  misc_feature 1..16: note = synthetic [barcode part1]
  source 1..16: mol_type = other DNA
actctgagatcggttg

SEQ ID NO: 5348 - DNA, 16 bp, synthetic construct
  misc_feature 1..16: note = synthetic [barcode part1]
  source 1..16: mol_type = other DNA
ttcgattcacgcaatc

SEQ ID NO: 5349 - DNA, 16 bp, synthetic construct
  misc_feature 1..16: note = synthetic [barcode part1]
  source 1..16: mol_type = other DNA
tagttatcgagaggtg

SEQ ID NO: 5350 - DNA, 16 bp, synthetic construct
  misc_feature 1..16: note = synthetic [barcode part1]
  source 1..16: mol_type = other DNA
tagacaccagtagaac

SEQ ID NO: 5351 - DNA, 16 bp, synthetic construct
  misc_feature 1..16: note = synthetic [barcode part1]
  source 1..16: mol_type = other DNA
ttcggattggacctag

SEQ ID NO: 5352 - DNA, 16 bp, synthetic construct
  misc_feature 1..16: note = synthetic [barcode part1]
  source 1..16: mol_type = other DNA
gagtgcagacttgacg

SEQ ID NO: 5353 - DNA, 16 bp, synthetic construct
  misc_feature 1..16: note = synthetic [barcode part1]
  source 1..16: mol_type = other DNA
gatagtagaattcgcg

SEQ ID NO: 5354 - DNA, 16 bp, synthetic construct
  misc_feature 1..16: note = synthetic [barcode part1]
  source 1..16: mol_type = other DNA
gacggaatcctgttac

SEQ ID NO: 5355 - DNA, 16 bp, synthetic construct
  misc_feature 1..16: note = synthetic [barcode part1]
  source 1..16: mol_type = other DNA
ccagttcgtaactgcc

SEQ ID NO: 5356 - DNA, 16 bp, synthetic construct
  misc_feature 1..16: note = synthetic [barcode part1]
  source 1..16: mol_type = other DNA
ttgttgcgaatccgtt

SEQ ID NO: 5357 - DNA, 16 bp, synthetic construct
  misc_feature 1..16: note = synthetic [barcode part1]
  source 1..16: mol_type = other DNA
gtcgtaactactcgcc

SEQ ID NO: 5358 - DNA, 16 bp, synthetic construct
  misc_feature 1..16: note = synthetic [barcode part1]
  source 1..16: mol_type = other DNA
gagtgacactgagaag

SEQ ID NO: 5359 - DNA, 16 bp, synthetic construct
  misc_feature 1..16: note = synthetic [barcode part1]
  source 1..16: mol_type = other DNA
tggagttataccgcac

SEQ ID NO: 5360 - DNA, 16 bp, synthetic construct
  misc_feature 1..16: note = synthetic [barcode part1]
  source 1..16: mol_type = other DNA
taccagtgtactggtg

SEQ ID NO: 5361 - DNA, 16 bp, synthetic construct
  misc_feature 1..16: note = synthetic [barcode part1]
  source 1..16: mol_type = other DNA
taacttccgacacgcc

SEQ ID NO: 5362 - DNA, 16 bp, synthetic construct
  misc_feature 1..16: note = synthetic [barcode part1]
  source 1..16: mol_type = other DNA
gtaatcgacgttggtc

SEQ ID NO: 5363 - DNA, 16 bp, synthetic construct
  misc_feature 1..16: note = synthetic [barcode part1]
  source 1..16: mol_type = other DNA
ccttgatcgtgtcggt

SEQ ID NO: 5364 - DNA, 16 bp, synthetic construct
  misc_feature 1..16: note = synthetic [barcode part1]
  source 1..16: mol_type = other DNA
atccttataggtcacc

SEQ ID NO: 5365 - DNA, 16 bp, synthetic construct
  misc_feature 1..16: note = synthetic [barcode part1]
  source 1..16: mol_type = other DNA
acgtcgaattagaggt

SEQ ID NO: 5366 - DNA, 16 bp, synthetic construct
  misc_feature 1..16: note = synthetic [barcode part1]
  source 1..16: mol_type = other DNA
tcaacgaggcgtagac

SEQ ID NO: 5367 - DNA, 16 bp, synthetic construct
  misc_feature 1..16: note = synthetic [barcode part1]
  source 1..16: mol_type = other DNA
tgatcgtctacgcaag

SEQ ID NO: 5368 - DNA, 16 bp, synthetic construct
  misc_feature 1..16: note = synthetic [barcode part1]
  source 1..16: mol_type = other DNA
gtgtgcgtaaccaatc

SEQ ID NO: 5369 - DNA, 16 bp, synthetic construct
  misc_feature 1..16: note = synthetic [barcode part1]
  source 1..16: mol_type = other DNA
cgtaactctctgttag

SEQ ID NO: 5370 - DNA, 16 bp, synthetic construct
  misc_feature 1..16: note = synthetic [barcode part1]
  source 1..16: mol_type = other DNA
gaggcagtaagacagt

SEQ ID NO: 5371 - DNA, 16 bp, synthetic construct
  misc_feature 1..16: note = synthetic [barcode part1]
  source 1..16: mol_type = other DNA
ttaggtggatagaacc

SEQ ID NO: 5372 - DNA, 16 bp, synthetic construct
  misc_feature 1..16: note = synthetic [barcode part1]
  source 1..16: mol_type = other DNA
acaattgccgatctct

SEQ ID NO: 5373 - DNA, 16 bp, synthetic construct
  misc_feature 1..16: note = synthetic [barcode part1]
  source 1..16: mol_type = other DNA
tcggtccttacgcagt

SEQ ID NO: 5374 - DNA, 16 bp, synthetic construct
  misc_feature 1..16: note = synthetic [barcode part1]
  source 1..16: mol_type = other DNA
aatcggcaattccggt

SEQ ID NO: 5375 - DNA, 16 bp, synthetic construct
  misc_feature 1..16: note = synthetic [barcode part1]
  source 1..16: mol_type = other DNA
gataaccaagaacacc

SEQ ID NO: 5376 - DNA, 16 bp, synthetic construct
  misc_feature 1..16: note = synthetic [barcode part1]
  source 1..16: mol_type = other DNA
tagttcctggcgcgtt

SEQ ID NO: 5377 - DNA, 16 bp, synthetic construct
  misc_feature 1..16: note = synthetic [barcode part1]
  source 1..16: mol_type = other DNA
cgtgtgacgaatctgt

SEQ ID NO: 5378 - DNA, 16 bp, synthetic construct
  misc_feature 1..16: note = synthetic [barcode part1]
  source 1..16: mol_type = other DNA
tgattcctctctcggt

SEQ ID NO: 5379 - DNA, 16 bp, synthetic construct
  misc_feature 1..16: note = synthetic [barcode part1]
  source 1..16: mol_type = other DNA
gtggacctgataggac

SEQ ID NO: 5380 - DNA, 16 bp, synthetic construct
  misc_feature 1..16: note = synthetic [barcode part1]
  source 1..16: mol_type = other DNA
tctacgttaatccggt

SEQ ID NO: 5381 - DNA, 16 bp, synthetic construct
  misc_feature 1..16: note = synthetic [barcode part1]
  source 1..16: mol_type = other DNA
agatatccaaggtggt

SEQ ID NO: 5382 - DNA, 16 bp, synthetic construct
  misc_feature 1..16: note = synthetic [barcode part1]
  source 1..16: mol_type = other DNA
cggatcagattcgact

SEQ ID NO: 5383 - DNA, 16 bp, synthetic construct
  misc_feature 1..16: note = synthetic [barcode part1]
  source 1..16: mol_type = other DNA
agtctgagactactgc

SEQ ID NO: 5384 - DNA, 16 bp, synthetic construct
  misc_feature 1..16: note = synthetic [barcode part1]
  source 1..16: mol_type = other DNA
gcgtagactacacttg

SEQ ID NO: 5385 - DNA, 16 bp, synthetic construct
  misc_feature 1..16: note = synthetic [barcode part1]
  source 1..16: mol_type = other DNA
cacgagaatacctctg

SEQ ID NO: 5386 - DNA, 16 bp, synthetic construct
  misc_feature 1..16: note = synthetic [barcode part1]
  source 1..16: mol_type = other DNA
acctccgaacgactct

SEQ ID NO: 5387 - DNA, 16 bp, synthetic construct
  misc_feature 1..16: note = synthetic [barcode part1]
  source 1..16: mol_type = other DNA
tgcactaggtcttccg

SEQ ID NO: 5388 - DNA, 16 bp, synthetic construct
  misc_feature 1..16: note = synthetic [barcode part1]
  source 1..16: mol_type = other DNA
tgcaactcacgttgag

SEQ ID NO: 5389 - DNA, 16 bp, synthetic construct
  misc_feature 1..16: note = synthetic [barcode part1]
  source 1..16: mol_type = other DNA
acaactgttggtcttc

SEQ ID NO: 5390 - DNA, 16 bp, synthetic construct
  misc_feature 1..16: note = synthetic [barcode part1]
  source 1..16: mol_type = other DNA
ataccgaagagtagtc

SEQ ID NO: 5391 - DNA, 16 bp, synthetic construct
  misc_feature 1..16: note = synthetic [barcode part1]
  source 1..16: mol_type = other DNA
gtgatcaaccgtgtac

SEQ ID NO: 5392 - DNA, 16 bp, synthetic construct
  misc_feature 1..16: note = synthetic [barcode part1]
  source 1..16: mol_type = other DNA
tactgaccagtgtgtg

SEQ ID NO: 5393 - DNA, 16 bp, synthetic construct
  misc_feature 1..16: note = synthetic [barcode part1]
  source 1..16: mol_type = other DNA
aggtcgtcgagttgtt

SEQ ID NO: 5394 - DNA, 16 bp, synthetic construct
  misc_feature 1..16: note = synthetic [barcode part1]
  source 1..16: mol_type = other DNA
gcctgtgactgagaag

SEQ ID NO: 5395 - DNA, 16 bp, synthetic construct
  misc_feature 1..16: note = synthetic [barcode part1]
  source 1..16: mol_type = other DNA
cacaagtctacttcac

SEQ ID NO: 5396 - DNA, 16 bp, synthetic construct
  misc_feature 1..16: note = synthetic [barcode part1]
  source 1..16: mol_type = other DNA
tcggttacggtatcag

SEQ ID NO: 5397 - DNA, 16 bp, synthetic construct
  misc_feature 1..16: note = synthetic [barcode part1]
  source 1..16: mol_type = other DNA
tgagactgactctgac

SEQ ID NO: 5398 - DNA, 16 bp, synthetic construct
  misc_feature 1..16: note = synthetic [barcode part1]
  source 1..16: mol_type = other DNA
atagaccaccgtcctc

SEQ ID NO: 5399 - DNA, 16 bp, synthetic construct
  misc_feature 1..16: note = synthetic [barcode part1]
  source 1..16: mol_type = other DNA
ccagtatccttagttg

SEQ ID NO: 5400 - DNA, 16 bp, synthetic construct
  misc_feature 1..16: note = synthetic [barcode part1]
  source 1..16: mol_type = other DNA
caacgttcgcctactg

SEQ ID NO: 5401 - DNA, 16 bp, synthetic construct
  misc_feature 1..16: note = synthetic [barcode part1]
  source 1..16: mol_type = other DNA
aggtagaggtgccact

SEQ ID NO: 5402 - DNA, 16 bp, synthetic construct
  misc_feature 1..16: note = synthetic [barcode part1]
  source 1..16: mol_type = other DNA
gtatcttaccaggttc

SEQ ID NO: 5403 - DNA, 16 bp, synthetic construct
  misc_feature 1..16: note = synthetic [barcode part1]
  source 1..16: mol_type = other DNA
atagtcgaaggagttc

SEQ ID NO: 5404 - DNA, 16 bp, synthetic construct
  misc_feature 1..16: note = synthetic [barcode part1]
  source 1..16: mol_type = other DNA
tctagagagttctggc

SEQ ID NO: 5405 - DNA, 16 bp, synthetic construct
  misc_feature 1..16: note = synthetic [barcode part1]
  source 1..16: mol_type = other DNA
gacagaatcaggtact

SEQ ID NO: 5406 - DNA, 16 bp, synthetic construct
  misc_feature 1..16: note = synthetic [barcode part1]
  source 1..16: mol_type = other DNA
agttgaacgccttacg

SEQ ID NO: 5407 - DNA, 16 bp, synthetic construct
  misc_feature 1..16: note = synthetic [barcode part1]
  source 1..16: mol_type = other DNA
ttcgccttatctgtcg

SEQ ID NO: 5408 - DNA, 16 bp, synthetic construct
  misc_feature 1..16: note = synthetic [barcode part1]
  source 1..16: mol_type = other DNA
tccactgactgttctc

SEQ ID NO: 5409 - DNA, 16 bp, synthetic construct
  misc_feature 1..16: note = synthetic [barcode part1]
  source 1..16: mol_type = other DNA
ttggatacactgcctt

SEQ ID NO: 5410 - DNA, 16 bp, synthetic construct
  misc_feature 1..16: note = synthetic [barcode part1]
  source 1..16: mol_type = other DNA
gttattctcgcagatc

SEQ ID NO: 5411 - DNA, 16 bp, synthetic construct
  misc_feature 1..16: note = synthetic [barcode part1]
  source 1..16: mol_type = other DNA
aggcaggcaggatctt

SEQ ID NO: 5412 - DNA, 16 bp, synthetic construct
  misc_feature 1..16: note = synthetic [barcode part1]
  source 1..16: mol_type = other DNA
tctaccgtaacctctc

SEQ ID NO: 5413 - DNA, 16 bp, synthetic construct
  misc_feature 1..16: note = synthetic [barcode part1]
  source 1..16: mol_type = other DNA
aagtctgaggccagac

SEQ ID NO: 5414 - DNA, 16 bp, synthetic construct
  misc_feature 1..16: note = synthetic [barcode part1]
  source 1..16: mol_type = other DNA
tcttgtgcaacaacct

SEQ ID NO: 5415 - DNA, 16 bp, synthetic construct
  misc_feature 1..16: note = synthetic [barcode part1]
  source 1..16: mol_type = other DNA
ttcgtcgtcctatcac

SEQ ID NO: 5416 - DNA, 16 bp, synthetic construct
  misc_feature 1..16: note = synthetic [barcode part1]
  source 1..16: mol_type = other DNA
ttaccagtggcctaag

SEQ ID NO: 5417 - DNA, 16 bp, synthetic construct
  misc_feature 1..16: note = synthetic [barcode part1]
  source 1..16: mol_type = other DNA
cgttactaacgacggt

SEQ ID NO: 5418 - DNA, 16 bp, synthetic construct
  misc_feature 1..16: note = synthetic [barcode part1]
  source 1..16: mol_type = other DNA
gactcttggcctacgt

SEQ ID NO: 5419 - DNA, 16 bp, synthetic construct
  misc_feature 1..16: note = synthetic [barcode part1]
  source 1..16: mol_type = other DNA
cacacaagaatcgaac

SEQ ID NO: 5420 - DNA, 16 bp, synthetic construct
  misc_feature 1..16: note = synthetic [barcode part1]
  source 1..16: mol_type = other DNA
gagacacgatcaccag

SEQ ID NO: 5421 - DNA, 16 bp, synthetic construct
  misc_feature 1..16: note = synthetic [barcode part1]
  source 1..16: mol_type = other DNA
tcgttcgaagtcctgc

SEQ ID NO: 5422 - DNA, 16 bp, synthetic construct
  misc_feature 1..16: note = synthetic [barcode part1]
  source 1..16: mol_type = other DNA
ttccagtaacctgtgt

SEQ ID NO: 5423 - DNA, 16 bp, synthetic construct
  misc_feature 1..16: note = synthetic [barcode part1]
  source 1..16: mol_type = other DNA
gtcgataatcctctac

SEQ ID NO: 5424 - DNA, 16 bp, synthetic construct
  misc_feature 1..16: note = synthetic [barcode part1]
  source 1..16: mol_type = other DNA
aacgttgcaactggtc

SEQ ID NO: 5425 - DNA, 16 bp, synthetic construct
  misc_feature 1..16: note = synthetic [barcode part1]
  source 1..16: mol_type = other DNA
gtgacttatcttcacg

SEQ ID NO: 5426 - DNA, 16 bp, synthetic construct
  misc_feature 1..16: note = synthetic [barcode part1]
  source 1..16: mol_type = other DNA
cgagttatacagagac

SEQ ID NO: 5427 - DNA, 16 bp, synthetic construct
  misc_feature 1..16: note = synthetic [barcode part1]
  source 1..16: mol_type = other DNA
tgaactctgtcgtccg

SEQ ID NO: 5428 - DNA, 16 bp, synthetic construct
  misc_feature 1..16: note = synthetic [barcode part1]
  source 1..16: mol_type = other DNA
tcttcggaactcttcc

SEQ ID NO: 5429 - DNA, 16 bp, synthetic construct
  misc_feature 1..16: note = synthetic [barcode part1]
  source 1..16: mol_type = other DNA
agttcagacgtcctcc

SEQ ID NO: 5430 - DNA, 16 bp, synthetic construct
  misc_feature 1..16: note = synthetic [barcode part1]
  source 1..16: mol_type = other DNA
tcggagtcaagtaagt

SEQ ID NO: 5431 - DNA, 16 bp, synthetic construct
  misc_feature 1..16: note = synthetic [barcode part1]
  source 1..16: mol_type = other DNA
gttaacggcaattgcc

SEQ ID NO: 5432 - DNA, 16 bp, synthetic construct
  misc_feature 1..16: note = synthetic [barcode part1]
  source 1..16: mol_type = other DNA
tcggcctcttacgagt

SEQ ID NO: 5433 - DNA, 16 bp, synthetic construct
  misc_feature 1..16: note = synthetic [barcode part1]
  source 1..16: mol_type = other DNA
agtctaccggaataag

SEQ ID NO: 5434 - DNA, 16 bp, synthetic construct
  misc_feature 1..16: note = synthetic [barcode part1]
  source 1..16: mol_type = other DNA
tattcaagaagtggcg

SEQ ID NO: 5435 - DNA, 16 bp, synthetic construct
  misc_feature 1..16: note = synthetic [barcode part1]
  source 1..16: mol_type = other DNA
tctccgattccaatcc

SEQ ID NO: 5436 - DNA, 16 bp, synthetic construct
  misc_feature 1..16: note = synthetic [barcode part1]
  source 1..16: mol_type = other DNA
gtaatcctcaccagag

SEQ ID NO: 5437 - DNA, 16 bp, synthetic construct
  misc_feature 1..16: note = synthetic [barcode part1]
  source 1..16: mol_type = other DNA
aacgtgcaatcaaggt

SEQ ID NO: 5438 - DNA, 16 bp, synthetic construct
  misc_feature 1..16: note = synthetic [barcode part1]
  source 1..16: mol_type = other DNA
aacgttggaggaagac

SEQ ID NO: 5439 - DNA, 16 bp, synthetic construct
  misc_feature 1..16: note = synthetic [barcode part1]
  source 1..16: mol_type = other DNA
aggtatattggaccag

SEQ ID NO: 5440 - DNA, 16 bp, synthetic construct
  misc_feature 1..16: note = synthetic [barcode part1]
  source 1..16: mol_type = other DNA
tgtaggtgtaggttcc

SEQ ID NO: 5441 - DNA, 16 bp, synthetic construct
  misc_feature 1..16: note = synthetic [barcode part1]
  source 1..16: mol_type = other DNA
cactcgccttacttgt

SEQ ID NO: 5442 - DNA, 16 bp, synthetic construct
  misc_feature 1..16: note = synthetic [barcode part1]
  source 1..16: mol_type = other DNA
acgaatcttccactac

SEQ ID NO: 5443 - DNA, 16 bp, synthetic construct
  misc_feature 1..16: note = synthetic [barcode part1]
  source 1..16: mol_type = other DNA
acctggacaaggcagt

SEQ ID NO: 5444 - DNA, 16 bp, synthetic construct
  misc_feature 1..16: note = synthetic [barcode part1]
  source 1..16: mol_type = other DNA
tctaggtggcgacaag

SEQ ID NO: 5445 - DNA, 16 bp, synthetic construct
  misc_feature 1..16: note = synthetic [barcode part1]
  source 1..16: mol_type = other DNA
actctgactaggatcg

SEQ ID NO: 5446 - DNA, 16 bp, synthetic construct
  misc_feature 1..16: note = synthetic [barcode part1]
  source 1..16: mol_type = other DNA
agtgttccactggtag

SEQ ID NO: 5447 - DNA, 16 bp, synthetic construct
  misc_feature 1..16: note = synthetic [barcode part1]
  source 1..16: mol_type = other DNA
aggcctagatacacct

SEQ ID NO: 5448 - DNA, 16 bp, synthetic construct
  misc_feature 1..16: note = synthetic [barcode part1]
  source 1..16: mol_type = other DNA
gcaactgcgtacgatt

SEQ ID NO: 5449 - DNA, 16 bp, synthetic construct
  misc_feature 1..16: note = synthetic [barcode part1]
  source 1..16: mol_type = other DNA
agagtcttctgttcac

SEQ ID NO: 5450 - DNA, 16 bp, synthetic construct
  misc_feature 1..16: note = synthetic [barcode part1]
  source 1..16: mol_type = other DNA
attcggaactctatcc

SEQ ID NO: 5451 - DNA, 16 bp, synthetic construct
  misc_feature 1..16: note = synthetic [barcode part1]
  source 1..16: mol_type = other DNA
caccttagtgacgagt

SEQ ID NO: 5452 - DNA, 16 bp, synthetic construct
  misc_feature 1..16: note = synthetic [barcode part1]
  source 1..16: mol_type = other DNA
taccgtacacacgtag

SEQ ID NO: 5453 - DNA, 16 bp, synthetic construct
  misc_feature 1..16: note = synthetic [barcode part1]
  source 1..16: mol_type = other DNA
gtgttccgtataggac

SEQ ID NO: 5454 - DNA, 16 bp, synthetic construct
  misc_feature 1..16: note = synthetic [barcode part1]
  source 1..16: mol_type = other DNA
cagacgcagagtagtc

SEQ ID NO: 5455 - DNA, 16 bp, synthetic construct
  misc_feature 1..16: note = synthetic [barcode part1]
  source 1..16: mol_type = other DNA
gatcggagacgataag

SEQ ID NO: 5456 - DNA, 16 bp, synthetic construct
  misc_feature 1..16: note = synthetic [barcode part1]
  source 1..16: mol_type = other DNA
tgccggtgttaatacg

SEQ ID NO: 5457 - DNA, 16 bp, synthetic construct
  misc_feature 1..16: note = synthetic [barcode part1]
  source 1..16: mol_type = other DNA
gaggtacggagtatag

SEQ ID NO: 5458 - DNA, 16 bp, synthetic construct
  misc_feature 1..16: note = synthetic [barcode part1]
  source 1..16: mol_type = other DNA
agtgaccgcgttcctt

SEQ ID NO: 5459 - DNA, 16 bp, synthetic construct
  misc_feature 1..16: note = synthetic [barcode part1]
  source 1..16: mol_type = other DNA
tcgaagttaagtggac

SEQ ID NO: 5460 - DNA, 16 bp, synthetic construct
  misc_feature 1..16: note = synthetic [barcode part1]
  source 1..16: mol_type = other DNA
gtaggtcgcacaatct

SEQ ID NO: 5461 - DNA, 16 bp, synthetic construct
  misc_feature 1..16: note = synthetic [barcode part1]
  source 1..16: mol_type = other DNA
tagtggtacgtagaac

SEQ ID NO: 5462 - DNA, 16 bp, synthetic construct
  misc_feature 1..16: note = synthetic [barcode part1]
  source 1..16: mol_type = other DNA
gaatctggtctggatc

SEQ ID NO: 5463 - DNA, 16 bp, synthetic construct
  misc_feature 1..16: note = synthetic [barcode part1]
  source 1..16: mol_type = other DNA
cggtggtaattcaacc

SEQ ID NO: 5464 - DNA, 16 bp, synthetic construct
  misc_feature 1..16: note = synthetic [barcode part1]
  source 1..16: mol_type = other DNA
tgcctgcggtattatt

SEQ ID NO: 5465 - DNA, 16 bp, synthetic construct
  misc_feature 1..16: note = synthetic [barcode part1]
  source 1..16: mol_type = other DNA
atctccgtggattatc

SEQ ID NO: 5466 - DNA, 16 bp, synthetic construct
  misc_feature 1..16: note = synthetic [barcode part1]
  source 1..16: mol_type = other DNA
tgtctcagttctgcct

SEQ ID NO: 5467 - DNA, 16 bp, synthetic construct
  misc_feature 1..16: note = synthetic [barcode part1]
  source 1..16: mol_type = other DNA
gcgattggaagttagt

SEQ ID NO: 5468 - DNA, 16 bp, synthetic construct
  misc_feature 1..16: note = synthetic [barcode part1]
  source 1..16: mol_type = other DNA
gtctaaggatatccgc

SEQ ID NO: 5469 - DNA, 16 bp, synthetic construct
  misc_feature 1..16: note = synthetic [barcode part1]
  source 1..16: mol_type = other DNA
agaggaaggtcttgag

SEQ ID NO: 5470 - DNA, 16 bp, synthetic construct
  misc_feature 1..16: note = synthetic [barcode part1]
  source 1..16: mol_type = other DNA
gactgactgactgact

SEQ ID NO: 5471 - DNA, 16 bp, synthetic construct
  misc_feature 1..16: note = synthetic [barcode part1]
  source 1..16: mol_type = other DNA
ttgataactcgcactc

SEQ ID NO: 5472 - DNA, 16 bp, synthetic construct
  misc_feature 1..16: note = synthetic [barcode part1]
  source 1..16: mol_type = other DNA
cgtggaaggtcgttag

SEQ ID NO: 5473 - DNA, 16 bp, synthetic construct
  misc_feature 1..16: note = synthetic [barcode part1]
  source 1..16: mol_type = other DNA
tcacgaactcgactcc

SEQ ID NO: 5474 - DNA, 16 bp, synthetic construct
  misc_feature 1..16: note = synthetic [barcode part1]
  source 1..16: mol_type = other DNA
ccttggtgtacctgac

SEQ ID NO: 5475 - DNA, 16 bp, synthetic construct
  misc_feature 1..16: note = synthetic [barcode part1]
  source 1..16: mol_type = other DNA
tataccttcgtcgaac

SEQ ID NO: 5476 - DNA, 16 bp, synthetic construct
  misc_feature 1..16: note = synthetic [barcode part1]
  source 1..16: mol_type = other DNA
gaccagtgtgttgtgt

SEQ ID NO: 5477 - DNA, 16 bp, synthetic construct
  misc_feature 1..16: note = synthetic [barcode part1]
  source 1..16: mol_type = other DNA
agtgcaggttcttgtg

SEQ ID NO: 5478 - DNA, 16 bp, synthetic construct
  misc_feature 1..16: note = synthetic [barcode part1]
  source 1..16: mol_type = other DNA
cctcgttatcctactg

SEQ ID NO: 5479 - DNA, 16 bp, synthetic construct
  misc_feature 1..16: note = synthetic [barcode part1]
  source 1..16: mol_type = other DNA
attcgacaccgttgag

SEQ ID NO: 5480 - DNA, 16 bp, synthetic construct
  misc_feature 1..16: note = synthetic [barcode part1]
  source 1..16: mol_type = other DNA
gcacgtagatcagtct

SEQ ID NO: 5481 - DNA, 16 bp, synthetic construct
  misc_feature 1..16: note = synthetic [barcode part1]
  source 1..16: mol_type = other DNA
gtaatcaggtctcctt

SEQ ID NO: 5482 - DNA, 16 bp, synthetic construct
  misc_feature 1..16: note = synthetic [barcode part1]
  source 1..16: mol_type = other DNA
tgtcaccacgattgcc

SEQ ID NO: 5483 - DNA, 16 bp, synthetic construct
  misc_feature 1..16: note = synthetic [barcode part1]
  source 1..16: mol_type = other DNA
cgtaggcctcactatc

SEQ ID NO: 5484 - DNA, 16 bp, synthetic construct
  misc_feature 1..16: note = synthetic [barcode part1]
  source 1..16: mol_type = other DNA
tcagaacacttgttcc

SEQ ID NO: 5485 - DNA, 16 bp, synthetic construct
  misc_feature 1..16: note = synthetic [barcode part1]
  source 1..16: mol_type = other DNA
taccgtaatcgtggtg

SEQ ID NO: 5486 - DNA, 16 bp, synthetic construct
  misc_feature 1..16: note = synthetic [barcode part1]
  source 1..16: mol_type = other DNA
ttgaacgtaggcactc

SEQ ID NO: 5487 - DNA, 16 bp, synthetic construct
  misc_feature 1..16: note = synthetic [barcode part1]
  source 1..16: mol_type = other DNA
cacagtacctaagacc

SEQ ID NO: 5488 - DNA, 16 bp, synthetic construct
  misc_feature 1..16: note = synthetic [barcode part1]
  source 1..16: mol_type = other DNA
caggccttgttacctg

SEQ ID NO: 5489 - DNA, 16 bp, synthetic construct
  misc_feature 1..16: note = synthetic [barcode part1]
  source 1..16: mol_type = other DNA
tgacacggtatctggt

SEQ ID NO: 5490 - DNA, 16 bp, synthetic construct
  misc_feature 1..16: note = synthetic [barcode part1]
  source 1..16: mol_type = other DNA
gtgtgagatctctgtg

SEQ ID NO: 5491 - DNA, 16 bp, synthetic construct
  misc_feature 1..16: note = synthetic [barcode part1]
  source 1..16: mol_type = other DNA
ttagaaggagacgacg

SEQ ID NO: 5492 - DNA, 16 bp, synthetic construct
  misc_feature 1..16: note = synthetic [barcode part1]
  source 1..16: mol_type = other DNA
gagtattgtctcgtct

SEQ ID NO: 5493 - DNA, 16 bp, synthetic construct
  misc_feature 1..16: note = synthetic [barcode part1]
  source 1..16: mol_type = other DNA
aacactgtgtggtacc

SEQ ID NO: 5494 - DNA, 16 bp, synthetic construct
  misc_feature 1..16: note = synthetic [barcode part1]
  source 1..16: mol_type = other DNA
tcaactgtggtaccag

SEQ ID NO: 5495 - DNA, 16 bp, synthetic construct
  misc_feature 1..16: note = synthetic [barcode part1]
  source 1..16: mol_type = other DNA
tctcggtagagattgc

SEQ ID NO: 5496 - DNA, 16 bp, synthetic construct
  misc_feature 1..16: note = synthetic [barcode part1]
  source 1..16: mol_type = other DNA
gcgttagtcaacacgt

SEQ ID NO: 5497 - DNA, 16 bp, synthetic construct
  misc_feature 1..16: note = synthetic [barcode part1]
  source 1..16: mol_type = other DNA
aggaagtaggcgcctt

SEQ ID NO: 5498 - DNA, 16 bp, synthetic construct
  misc_feature 1..16: note = synthetic [barcode part1]
  source 1..16: mol_type = other DNA
caactcacttgtgccg

SEQ ID NO: 5499 - DNA, 16 bp, synthetic construct
  misc_feature 1..16: note = synthetic [barcode part1]
  source 1..16: mol_type = other DNA
taggtcttgtctggag

SEQ ID NO: 5500 - DNA, 16 bp, synthetic construct
  misc_feature 1..16: note = synthetic [barcode part1]
  source 1..16: mol_type = other DNA
tataagtacctcgtcc

SEQ ID NO: 5501 - DNA, 16 bp, synthetic construct
  misc_feature 1..16: note = synthetic [barcode part1]
  source 1..16: mol_type = other DNA
gttaacaggtggcggt

SEQ ID NO: 5502 - DNA, 16 bp, synthetic construct
  misc_feature 1..16: note = synthetic [barcode part1]
  source 1..16: mol_type = other DNA
caatcagagtcggttc

SEQ ID NO: 5503 - DNA, 16 bp, synthetic construct
  misc_feature 1..16: note = synthetic [barcode part1]
  source 1..16: mol_type = other DNA
cagtactccacaacag

SEQ ID NO: 5504 - DNA, 16 bp, synthetic construct
  misc_feature 1..16: note = synthetic [barcode part1]
  source 1..16: mol_type = other DNA
gtgtaggatctgatag

SEQ ID NO: 5505 - DNA, 16 bp, synthetic construct
  misc_feature 1..16: note = synthetic [barcode part1]
  source 1..16: mol_type = other DNA
gccaagtggtgtaggt

SEQ ID NO: 5506 - DNA, 16 bp, synthetic construct
  misc_feature 1..16: note = synthetic [barcode part1]
  source 1..16: mol_type = other DNA
cgaagaggttatacac

SEQ ID NO: 5507 - DNA, 16 bp, synthetic construct
  misc_feature 1..16: note = synthetic [barcode part1]
  source 1..16: mol_type = other DNA
ttgattctgcctcgtc

SEQ ID NO: 5508 - DNA, 16 bp, synthetic construct
  misc_feature 1..16: note = synthetic [barcode part1]
  source 1..16: mol_type = other DNA
gattcggaggagtatt

SEQ ID NO: 5509 - DNA, 16 bp, synthetic construct
  misc_feature 1..16: note = synthetic [barcode part1]
  source 1..16: mol_type = other DNA
tgtagacgaacctgtc

SEQ ID NO: 5510 - DNA, 16 bp, synthetic construct
  misc_feature 1..16: note = synthetic [barcode part1]
  source 1..16: mol_type = other DNA
cgttgtcttcgattcc

SEQ ID NO: 5511 - DNA, 16 bp, synthetic construct
  misc_feature 1..16: note = synthetic [barcode part1]
  source 1..16: mol_type = other DNA
cctctgaacgtaccac

SEQ ID NO: 5512 - DNA, 16 bp, synthetic construct
  misc_feature 1..16: note = synthetic [barcode part1]
  source 1..16: mol_type = other DNA
gtagaagacgcctctt

SEQ ID NO: 5513 - DNA, 16 bp, synthetic construct
  misc_feature 1..16: note = synthetic [barcode part1]
  source 1..16: mol_type = other DNA
tgcggtacaaggttct

SEQ ID NO: 5514 - DNA, 16 bp, synthetic construct
  misc_feature 1..16: note = synthetic [barcode part1]
  source 1..16: mol_type = other DNA
caatcagtcagttggc

SEQ ID NO: 5515 - DNA, 16 bp, synthetic construct
  misc_feature 1..16: note = synthetic [barcode part1]
  source 1..16: mol_type = other DNA
ttcgcaataggacaag

SEQ ID NO: 5516 - DNA, 16 bp, synthetic construct
  misc_feature 1..16: note = synthetic [barcode part1]
  source 1..16: mol_type = other DNA
cggaacaataggacag

SEQ ID NO: 5517 - DNA, 16 bp, synthetic construct
  misc_feature 1..16: note = synthetic [barcode part1]
  source 1..16: mol_type = other DNA
acctcaatctcgagag

SEQ ID NO: 5518 - DNA, 16 bp, synthetic construct
  misc_feature 1..16: note = synthetic [barcode part1]
  source 1..16: mol_type = other DNA
gactggtgtacacgtt

SEQ ID NO: 5519 - DNA, 16 bp, synthetic construct
  misc_feature 1..16: note = synthetic [barcode part1]
  source 1..16: mol_type = other DNA
cggacactgacaagac

SEQ ID NO: 5520 - DNA, 16 bp, synthetic construct
  misc_feature 1..16: note = synthetic [barcode part1]
  source 1..16: mol_type = other DNA
acggttgatcgtgtgt

SEQ ID NO: 5521 - DNA, 16 bp, synthetic construct
  misc_feature 1..16: note = synthetic [barcode part1]
  source 1..16: mol_type = other DNA
ttatcaattccgtgcg

SEQ ID NO: 5522 - DNA, 16 bp, synthetic construct
  misc_feature 1..16: note = synthetic [barcode part1]
  source 1..16: mol_type = other DNA
tcgccgtattccactt

SEQ ID NO: 5523 - DNA, 16 bp, synthetic construct
  misc_feature 1..16: note = synthetic [barcode part1]
  source 1..16: mol_type = other DNA
gacaggtcagagttcg

SEQ ID NO: 5524 - DNA, 16 bp, synthetic construct
  misc_feature 1..16: note = synthetic [barcode part1]
  source 1..16: mol_type = other DNA
cggactgtcttacacc

SEQ ID NO: 5525 - DNA, 16 bp, synthetic construct
  misc_feature 1..16: note = synthetic [barcode part1]
  source 1..16: mol_type = other DNA
ataccgacttctggcc

SEQ ID NO: 5526 - DNA, 16 bp, synthetic construct
  misc_feature 1..16: note = synthetic [barcode part1]
  source 1..16: mol_type = other DNA
gtccgttctcaaggtc

SEQ ID NO: 5527 - DNA, 16 bp, synthetic construct
  misc_feature 1..16: note = synthetic [barcode part1]
  source 1..16: mol_type = other DNA
gccttctgttggtgtg

SEQ ID NO: 5528 - DNA, 16 bp, synthetic construct
  misc_feature 1..16: note = synthetic [barcode part1]
  source 1..16: mol_type = other DNA
ttggaactatcgcgac

SEQ ID NO: 5529 - DNA, 16 bp, synthetic construct
  misc_feature 1..16: note = synthetic [barcode part1]
  source 1..16: mol_type = other DNA
caattcggtctccgtg

SEQ ID NO: 5530 - DNA, 16 bp, synthetic construct
  misc_feature 1..16: note = synthetic [barcode part1]
  source 1..16: mol_type = other DNA
cctaattctccgatcc

SEQ ID NO: 5531 - DNA, 16 bp, synthetic construct
  misc_feature 1..16: note = synthetic [barcode part1]
  source 1..16: mol_type = other DNA
aagaacactcacgtcc

SEQ ID NO: 5532 - DNA, 16 bp, synthetic construct
  misc_feature 1..16: note = synthetic [barcode part1]
  source 1..16: mol_type = other DNA
gacaccgtaacactac

SEQ ID NO: 5533 - DNA, 16 bp, synthetic construct
  misc_feature 1..16: note = synthetic [barcode part1]
  source 1..16: mol_type = other DNA
gataccggttagtcgt

SEQ ID NO: 5534 - DNA, 16 bp, synthetic construct
  misc_feature 1..16: note = synthetic [barcode part1]
  source 1..16: mol_type = other DNA
agaccgttaggtcact

SEQ ID NO: 5535 - DNA, 16 bp, synthetic construct
  misc_feature 1..16: note = synthetic [barcode part1]
  source 1..16: mol_type = other DNA
ttcggttgtactgact

SEQ ID NO: 5536 - DNA, 16 bp, synthetic construct
  misc_feature 1..16: note = synthetic [barcode part1]
  source 1..16: mol_type = other DNA
ttgacacctgattctg

SEQ ID NO: 5537 - DNA, 16 bp, synthetic construct
  misc_feature 1..16: note = synthetic [barcode part1]
  source 1..16: mol_type = other DNA
atcttcacagactacc

SEQ ID NO: 5538 - DNA, 16 bp, synthetic construct
  misc_feature 1..16: note = synthetic [barcode part1]
  source 1..16: mol_type = other DNA
tacacaattgcgcggt

SEQ ID NO: 5539 - DNA, 16 bp, synthetic construct
  misc_feature 1..16: note = synthetic [barcode part1]
  source 1..16: mol_type = other DNA
caccactgaatattcc

SEQ ID NO: 5540 - DNA, 16 bp, synthetic construct
  misc_feature 1..16: note = synthetic [barcode part1]
  source 1..16: mol_type = other DNA
atcgccggttgttaag

SEQ ID NO: 5541 - DNA, 16 bp, synthetic construct
  misc_feature 1..16: note = synthetic [barcode part1]
  source 1..16: mol_type = other DNA
gtattccgcacttcct

SEQ ID NO: 5542 - DNA, 16 bp, synthetic construct
  misc_feature 1..16: note = synthetic [barcode part1]
  source 1..16: mol_type = other DNA
gtcgagacggtatacg

SEQ ID NO: 5543 - DNA, 16 bp, synthetic construct
  misc_feature 1..16: note = synthetic [barcode part1]
  source 1..16: mol_type = other DNA
gaatattccgcggatc

SEQ ID NO: 5544 - DNA, 16 bp, synthetic construct
  misc_feature 1..16: note = synthetic [barcode part1]
  source 1..16: mol_type = other DNA
tgtctgacacaagtcg

SEQ ID NO: 5545 - DNA, 16 bp, synthetic construct
  misc_feature 1..16: note = synthetic [barcode part1]
  source 1..16: mol_type = other DNA
cggatataccaagaac

SEQ ID NO: 5546 - DNA, 16 bp, synthetic construct
  misc_feature 1..16: note = synthetic [barcode part1]
  source 1..16: mol_type = other DNA
gattcctctaacgtgt

SEQ ID NO: 5547 - DNA, 16 bp, synthetic construct
  misc_feature 1..16: note = synthetic [barcode part1]
  source 1..16: mol_type = other DNA
gtatattgtggtcgcg

SEQ ID NO: 5548 - DNA, 16 bp, synthetic construct
  misc_feature 1..16: note = synthetic [barcode part1]
  source 1..16: mol_type = other DNA
accttgaccgattgag

SEQ ID NO: 5549 - DNA, 16 bp, synthetic construct
  misc_feature 1..16: note = synthetic [barcode part1]
  source 1..16: mol_type = other DNA
agtggactctgagacg

SEQ ID NO: 5550 - DNA, 16 bp, synthetic construct
  misc_feature 1..16: note = synthetic [barcode part1]
  source 1..16: mol_type = other DNA
ttccaagttactcacg

SEQ ID NO: 5551 - DNA, 16 bp, synthetic construct
  misc_feature 1..16: note = synthetic [barcode part1]
  source 1..16: mol_type = other DNA
gcctggaacagtagac

SEQ ID NO: 5552 - DNA, 16 bp, synthetic construct
  misc_feature 1..16: note = synthetic [barcode part1]
  source 1..16: mol_type = other DNA
atccaggttcgccgtt

SEQ ID NO: 5553 - DNA, 16 bp, synthetic construct
  misc_feature 1..16: note = synthetic [barcode part1]
  source 1..16: mol_type = other DNA
cgtaccggtatatcag

SEQ ID NO: 5554 - DNA, 16 bp, synthetic construct
  misc_feature 1..16: note = synthetic [barcode part1]
  source 1..16: mol_type = other DNA
tagtgaccgcgtcttc

SEQ ID NO: 5555 - DNA, 16 bp, synthetic construct
  misc_feature 1..16: note = synthetic [barcode part1]
  source 1..16: mol_type = other DNA
gatagatcggaattcg

SEQ ID NO: 5556 - DNA, 16 bp, synthetic construct
  misc_feature 1..16: note = synthetic [barcode part1]
  source 1..16: mol_type = other DNA
agtgcgtcggtatact

SEQ ID NO: 5557 - DNA, 16 bp, synthetic construct
  misc_feature 1..16: note = synthetic [barcode part1]
  source 1..16: mol_type = other DNA
ccaatccggtgtactc

SEQ ID NO: 5558 - DNA, 16 bp, synthetic construct
  misc_feature 1..16: note = synthetic [barcode part1]
  source 1..16: mol_type = other DNA
tcagtgtcgatcgtag

SEQ ID NO: 5559 - DNA, 16 bp, synthetic construct
  misc_feature 1..16: note = synthetic [barcode part1]
  source 1..16: mol_type = other DNA
gtaatccgaatcgtcg

SEQ ID NO: 5560 - DNA, 16 bp, synthetic construct
  misc_feature 1..16: note = synthetic [barcode part1]
  source 1..16: mol_type = other DNA
atcaaccgttgtggtg

SEQ ID NO: 5561 - DNA, 16 bp, synthetic construct
  misc_feature 1..16: note = synthetic [barcode part1]
  source 1..16: mol_type = other DNA
tacttactggaactcc

SEQ ID NO: 5562 - DNA, 16 bp, synthetic construct
  misc_feature 1..16: note = synthetic [barcode part1]
  source 1..16: mol_type = other DNA
attaggaccaggagag

SEQ ID NO: 5563 - DNA, 16 bp, synthetic construct
  misc_feature 1..16: note = synthetic [barcode part1]
  source 1..16: mol_type = other DNA
cgtgattctggatacg

SEQ ID NO: 5564 - DNA, 16 bp, synthetic construct
  misc_feature 1..16: note = synthetic [barcode part1]
  source 1..16: mol_type = other DNA
attcctaatccagtgc

SEQ ID NO: 5565 - DNA, 16 bp, synthetic construct
  misc_feature 1..16: note = synthetic [barcode part1]
  source 1..16: mol_type = other DNA
attaggcgcagttcac

SEQ ID NO: 5566 - DNA, 16 bp, synthetic construct
  misc_feature 1..16: note = synthetic [barcode part1]
  source 1..16: mol_type = other DNA
gactagtactagtcgc

SEQ ID NO: 5567 - DNA, 16 bp, synthetic construct
  misc_feature 1..16: note = synthetic [barcode part1]
  source 1..16: mol_type = other DNA
tccgcagtgaatactg

SEQ ID NO: 5568 - DNA, 16 bp, synthetic construct
  misc_feature 1..16: note = synthetic [barcode part1]
  source 1..16: mol_type = other DNA
cacgtcgagttgagag

SEQ ID NO: 5569 - DNA, 16 bp, synthetic construct
  misc_feature 1..16: note = synthetic [barcode part1]
  source 1..16: mol_type = other DNA
tataagtacctgcggc

SEQ ID NO: 5570 - DNA, 16 bp, synthetic construct
  misc_feature 1..16: note = synthetic [barcode part1]
  source 1..16: mol_type = other DNA
gagtgagtatcacggc

SEQ ID NO: 5571 - DNA, 16 bp, synthetic construct
  misc_feature 1..16: note = synthetic [barcode part1]
  source 1..16: mol_type = other DNA
gcggtgtactgattac

SEQ ID NO: 5572 - DNA, 16 bp, synthetic construct
  misc_feature 1..16: note = synthetic [barcode part1]
  source 1..16: mol_type = other DNA
cgcgttgtcttggttg

SEQ ID NO: 5573 - DNA, 16 bp, synthetic construct
  misc_feature 1..16: note = synthetic [barcode part1]
  source 1..16: mol_type = other DNA
atctcgtaccttccgt

SEQ ID NO: 5574 - DNA, 16 bp, synthetic construct
  misc_feature 1..16: note = synthetic [barcode part1]
  source 1..16: mol_type = other DNA
acggtgtctgactagt

SEQ ID NO: 5575 - DNA, 16 bp, synthetic construct
  misc_feature 1..16: note = synthetic [barcode part1]
  source 1..16: mol_type = other DNA
cacgtcgaacttctcg

SEQ ID NO: 5576 - DNA, 16 bp, synthetic construct
  misc_feature 1..16: note = synthetic [barcode part1]
  source 1..16: mol_type = other DNA
ataggtccttccggtc

SEQ ID NO: 5577 - DNA, 16 bp, synthetic construct
  misc_feature 1..16: note = synthetic [barcode part1]
  source 1..16: mol_type = other DNA
tcacagaagactgaac

SEQ ID NO: 5578 - DNA, 16 bp, synthetic construct
  misc_feature 1..16: note = synthetic [barcode part1]
  source 1..16: mol_type = other DNA
cgacaacagaagtact

SEQ ID NO: 5579 - DNA, 16 bp, synthetic construct
  misc_feature 1..16: note = synthetic [barcode part1]
  source 1..16: mol_type = other DNA
ttccgtgagagatacc

SEQ ID NO: 5580 - DNA, 16 bp, synthetic construct
  misc_feature 1..16: note = synthetic [barcode part1]
  source 1..16: mol_type = other DNA
aactgtaaggaccagt

SEQ ID NO: 5581 - DNA, 16 bp, synthetic construct
  misc_feature 1..16: note = synthetic [barcode part1]
  source 1..16: mol_type = other DNA
tccgattgtgccggtt

SEQ ID NO: 5582 - DNA, 16 bp, synthetic construct
  misc_feature 1..16: note = synthetic [barcode part1]
  source 1..16: mol_type = other DNA
gatagtatcgtgaacg

SEQ ID NO: 5583 - DNA, 16 bp, synthetic construct
  misc_feature 1..16: note = synthetic [barcode part1]
  source 1..16: mol_type = other DNA
ttgcgtaatcgcacag

SEQ ID NO: 5584 - DNA, 16 bp, synthetic construct
  misc_feature 1..16: note = synthetic [barcode part1]
  source 1..16: mol_type = other DNA
agtgactcgcgagaac

SEQ ID NO: 5585 - DNA, 16 bp, synthetic construct
  misc_feature 1..16: note = synthetic [barcode part1]
  source 1..16: mol_type = other DNA
acttggagtaggtctc

SEQ ID NO: 5586 - DNA, 16 bp, synthetic construct
  misc_feature 1..16: note = synthetic [barcode part1]
  source 1..16: mol_type = other DNA
acaatccttgcgtccg

SEQ ID NO: 5587 - DNA, 16 bp, synthetic construct
  misc_feature 1..16: note = synthetic [barcode part1]
  source 1..16: mol_type = other DNA
tgagacggatacgtcg

SEQ ID NO: 5588 - DNA, 16 bp, synthetic construct
  misc_feature 1..16: note = synthetic [barcode part1]
  source 1..16: mol_type = other DNA
tacgcgatcactatct

SEQ ID NO: 5589 - DNA, 16 bp, synthetic construct
  misc_feature 1..16: note = synthetic [barcode part1]
  source 1..16: mol_type = other DNA
aggcgagtagaatctt

SEQ ID NO: 5590 - DNA, 16 bp, synthetic construct
  misc_feature 1..16: note = synthetic [barcode part1]
  source 1..16: mol_type = other DNA
gatagattaaggcctg

SEQ ID NO: 5591 - DNA, 16 bp, synthetic construct
  misc_feature 1..16: note = synthetic [barcode part1]
  source 1..16: mol_type = other DNA
cacttagtgcgagttg

SEQ ID NO: 5592 - DNA, 16 bp, synthetic construct
  misc_feature 1..16: note = synthetic [barcode part1]
  source 1..16: mol_type = other DNA
agagagataactggcg

SEQ ID NO: 5593 - DNA, 16 bp, synthetic construct
  misc_feature 1..16: note = synthetic [barcode part1]
  source 1..16: mol_type = other DNA
aaccgccacaagagtg

SEQ ID NO: 5594 - DNA, 16 bp, synthetic construct
  misc_feature 1..16: note = synthetic [barcode part1]
  source 1..16: mol_type = other DNA
tacgtgagacaacaac

SEQ ID NO: 5595 - DNA, 16 bp, synthetic construct
  misc_feature 1..16: note = synthetic [barcode part1]
  source 1..16: mol_type = other DNA
aatacgcaactgagac

SEQ ID NO: 5596 - DNA, 16 bp, synthetic construct
  misc_feature 1..16: note = synthetic [barcode part1]
  source 1..16: mol_type = other DNA
ttacctgtcgcctact

SEQ ID NO: 5597 - DNA, 16 bp, synthetic construct
  misc_feature 1..16: note = synthetic [barcode part1]
  source 1..16: mol_type = other DNA
aagtcacgaatacgac

SEQ ID NO: 5598 - DNA, 16 bp, synthetic construct
  misc_feature 1..16: note = synthetic [barcode part1]
  source 1..16: mol_type = other DNA
agtgagacttccggtt

SEQ ID NO: 5599 - DNA, 16 bp, synthetic construct
  misc_feature 1..16: note = synthetic [barcode part1]
  source 1..16: mol_type = other DNA
tcagagtattccggac

SEQ ID NO: 5600 - DNA, 16 bp, synthetic construct
  misc_feature 1..16: note = synthetic [barcode part1]
  source 1..16: mol_type = other DNA
tgagtctactcacgag

SEQ ID NO: 5601 - DNA, 16 bp, synthetic construct
  misc_feature 1..16: note = synthetic [barcode part1]
  source 1..16: mol_type = other DNA
tgttaggatctgacgc

SEQ ID NO: 5602 - DNA, 16 bp, synthetic construct
  misc_feature 1..16: note = synthetic [barcode part1]
  source 1..16: mol_type = other DNA
gatacacttctgactc

SEQ ID NO: 5603 - DNA, 16 bp, synthetic construct
  misc_feature 1..16: note = synthetic [barcode part1]
  source 1..16: mol_type = other DNA
gacgtatctggtctcc

SEQ ID NO: 5604 - DNA, 16 bp, synthetic construct
  misc_feature 1..16: note = synthetic [barcode part1]
  source 1..16: mol_type = other DNA
tggtcttaccagtgtt

SEQ ID NO: 5605 - DNA, 16 bp, synthetic construct
  misc_feature 1..16: note = synthetic [barcode part1]
  source 1..16: mol_type = other DNA
gtggttgtaatcgcgt

SEQ ID NO: 5606 - DNA, 16 bp, synthetic construct
  misc_feature 1..16: note = synthetic [barcode part1]
  source 1..16: mol_type = other DNA
tgtgttgccaatcttg

SEQ ID NO: 5607 - DNA, 16 bp, synthetic construct
  misc_feature 1..16: note = synthetic [barcode part1]
  source 1..16: mol_type = other DNA
tcaggtgtgtccaagt

SEQ ID NO: 5608 - DNA, 16 bp, synthetic construct
  misc_feature 1..16: note = synthetic [barcode part1]
  source 1..16: mol_type = other DNA
ttacggatctgacttc

SEQ ID NO: 5609 - DNA, 16 bp, synthetic construct
  misc_feature 1..16: note = synthetic [barcode part1]
  source 1..16: mol_type = other DNA
atctcacagtacgtct

SEQ ID NO: 5610 - DNA, 16 bp, synthetic construct
  misc_feature 1..16: note = synthetic [barcode part1]
  source 1..16: mol_type = other DNA
cgcaggtagacttatc

SEQ ID NO: 5611 - DNA, 16 bp, synthetic construct
  misc_feature 1..16: note = synthetic [barcode part1]
  source 1..16: mol_type = other DNA
cgtactacggttgtag

SEQ ID NO: 5612 - DNA, 16 bp, synthetic construct
  misc_feature 1..16: note = synthetic [barcode part1]
  source 1..16: mol_type = other DNA
tagtgtgacacgatcc

SEQ ID NO: 5613 - DNA, 16 bp, synthetic construct
  misc_feature 1..16: note = synthetic [barcode part1]
  source 1..16: mol_type = other DNA
actagtggtcctccac

SEQ ID NO: 5614 - DNA, 16 bp, synthetic construct
  misc_feature 1..16: note = synthetic [barcode part1]
  source 1..16: mol_type = other DNA
aacttggacacaagac

SEQ ID NO: 5615 - DNA, 16 bp, synthetic construct
  misc_feature 1..16: note = synthetic [barcode part1]
  source 1..16: mol_type = other DNA
tagttcctcctggtct

SEQ ID NO: 5616 - DNA, 16 bp, synthetic construct
  misc_feature 1..16: note = synthetic [barcode part1]
  source 1..16: mol_type = other DNA
gcaattgttgatctcc

SEQ ID NO: 5617 - DNA, 16 bp, synthetic construct
  misc_feature 1..16: note = synthetic [barcode part1]
  source 1..16: mol_type = other DNA
cacgttcgttcggtac

SEQ ID NO: 5618 - DNA, 16 bp, synthetic construct
  misc_feature 1..16: note = synthetic [barcode part1]
  source 1..16: mol_type = other DNA
caagtcggtcgttagt

SEQ ID NO: 5619 - DNA, 16 bp, synthetic construct
  misc_feature 1..16: note = synthetic [barcode part1]
  source 1..16: mol_type = other DNA
cgcgttgttaacctcg

SEQ ID NO: 5620 - DNA, 16 bp, synthetic construct
  misc_feature 1..16: note = synthetic [barcode part1]
  source 1..16: mol_type = other DNA
agagtaactgtagacc

SEQ ID NO: 5621 - DNA, 16 bp, synthetic construct
  misc_feature 1..16: note = synthetic [barcode part1]
  source 1..16: mol_type = other DNA
gcgtcaataacctctt

SEQ ID NO: 5622 - DNA, 16 bp, synthetic construct
  misc_feature 1..16: note = synthetic [barcode part1]
  source 1..16: mol_type = other DNA
gactctcaactgtgcc

SEQ ID NO: 5623 - DNA, 16 bp, synthetic construct
  misc_feature 1..16: note = synthetic [barcode part1]
  source 1..16: mol_type = other DNA
cgccttggaatccact

SEQ ID NO: 5624 - DNA, 16 bp, synthetic construct
  misc_feature 1..16: note = synthetic [barcode part1]
  source 1..16: mol_type = other DNA
aacgaattcacggtag

SEQ ID NO: 5625 - DNA, 16 bp, synthetic construct
  misc_feature 1..16: note = synthetic [barcode part1]
  source 1..16: mol_type = other DNA
taattctgccgtgtgt

SEQ ID NO: 5626 - DNA, 16 bp, synthetic construct
  misc_feature 1..16: note = synthetic [barcode part1]
  source 1..16: mol_type = other DNA
aagaacgcgtcagatt

SEQ ID NO: 5627 - DNA, 16 bp, synthetic construct
  misc_feature 1..16: note = synthetic [barcode part1]
  source 1..16: mol_type = other DNA
cgtatcagacctcctg

SEQ ID NO: 5628 - DNA, 16 bp, synthetic construct
  misc_feature 1..16: note = synthetic [barcode part1]
  source 1..16: mol_type = other DNA
atctgtgtcaggtacg

SEQ ID NO: 5629 - DNA, 16 bp, synthetic construct
  misc_feature 1..16: note = synthetic [barcode part1]
  source 1..16: mol_type = other DNA
gttgagtagacgtggc

SEQ ID NO: 5630 - DNA, 16 bp, synthetic construct
  misc_feature 1..16: note = synthetic [barcode part1]
  source 1..16: mol_type = other DNA
tagaattgcgcgtgtc

SEQ ID NO: 5631 - DNA, 16 bp, synthetic construct
  misc_feature 1..16: note = synthetic [barcode part1]
  source 1..16: mol_type = other DNA
ttgtacgaaccaagag

SEQ ID NO: 5632 - DNA, 16 bp, synthetic construct
  misc_feature 1..16: note = synthetic [barcode part1]
  source 1..16: mol_type = other DNA
tcaatccgtctgagtt

SEQ ID NO: 5633 - DNA, 16 bp, synthetic construct
  misc_feature 1..16: note = synthetic [barcode part1]
  source 1..16: mol_type = other DNA
tccaagttcactactg

SEQ ID NO: 5634 - DNA, 16 bp, synthetic construct
  misc_feature 1..16: note = synthetic [barcode part1]
  source 1..16: mol_type = other DNA
atatcggaggacaatc

SEQ ID NO: 5635 - DNA, 16 bp, synthetic construct
  misc_feature 1..16: note = synthetic [barcode part1]
  source 1..16: mol_type = other DNA
tcggtaactgtcgaac

SEQ ID NO: 5636 - DNA, 16 bp, synthetic construct
  misc_feature 1..16: note = synthetic [barcode part1]
  source 1..16: mol_type = other DNA
agataggacagtgtct

SEQ ID NO: 5637 - DNA, 16 bp, synthetic construct
  misc_feature 1..16: note = synthetic [barcode part1]
  source 1..16: mol_type = other DNA
acaggtgtctggaacg

SEQ ID NO: 5638 - DNA, 16 bp, synthetic construct
  misc_feature 1..16: note = synthetic [barcode part1]
  source 1..16: mol_type = other DNA
tgtgtaggagtgtctc

SEQ ID NO: 5639 - DNA, 16 bp, synthetic construct
  misc_feature 1..16: note = synthetic [barcode part1]
  source 1..16: mol_type = other DNA
gataatccggtctggt

SEQ ID NO: 5640 - DNA, 16 bp, synthetic construct
  misc_feature 1..16: note = synthetic [barcode part1]
  source 1..16: mol_type = other DNA
tactcacggtgttgtt

SEQ ID NO: 5641 - DNA, 16 bp, synthetic construct
  misc_feature 1..16: note = synthetic [barcode part1]
  source 1..16: mol_type = other DNA
gacgcgtaactaggac

SEQ ID NO: 5642 - DNA, 16 bp, synthetic construct
  misc_feature 1..16: note = synthetic [barcode part1]
  source 1..16: mol_type = other DNA
aacacgcctggtcctt

SEQ ID NO: 5643 - DNA, 16 bp, synthetic construct
  misc_feature 1..16: note = synthetic [barcode part1]
  source 1..16: mol_type = other DNA
acggttgcctcgactt

SEQ ID NO: 5644 - DNA, 16 bp, synthetic construct
  misc_feature 1..16: note = synthetic [barcode part1]
  source 1..16: mol_type = other DNA
atcacactggttcttg

SEQ ID NO: 5645 - DNA, 16 bp, synthetic construct
  misc_feature 1..16: note = synthetic [barcode part1]
  source 1..16: mol_type = other DNA
cgatcaaggtcttgac

SEQ ID NO: 5646 - DNA, 16 bp, synthetic construct
  misc_feature 1..16: note = synthetic [barcode part1]
  source 1..16: mol_type = other DNA
acggttgttaagaggt

SEQ ID NO: 5647 - DNA, 16 bp, synthetic construct
  misc_feature 1..16: note = synthetic [barcode part1]
  source 1..16: mol_type = other DNA
aagttcaacgagacgt

SEQ ID NO: 5648 - DNA, 16 bp, synthetic construct
  misc_feature 1..16: note = synthetic [barcode part1]
  source 1..16: mol_type = other DNA
cacttgaatacggtcg

SEQ ID NO: 5649 - DNA, 16 bp, synthetic construct
  misc_feature 1..16: note = synthetic [barcode part1]
  source 1..16: mol_type = other DNA
gtctgaactgttctac

SEQ ID NO: 5650 - DNA, 16 bp, synthetic construct
  misc_feature 1..16: note = synthetic [barcode part1]
  source 1..16: mol_type = other DNA
tcaatagaggccacct

SEQ ID NO: 5651 - DNA, 16 bp, synthetic construct
  misc_feature 1..16: note = synthetic [barcode part1]
  source 1..16: mol_type = other DNA
gatacggttgcacttg

SEQ ID NO: 5652 - DNA, 16 bp, synthetic construct
  misc_feature 1..16: note = synthetic [barcode part1]
  source 1..16: mol_type = other DNA
acttcacgcgattgtt

SEQ ID NO: 5653 - DNA, 16 bp, synthetic construct
  misc_feature 1..16: note = synthetic [barcode part1]
  source 1..16: mol_type = other DNA
ttcgaacacttctcag

SEQ ID NO: 5654 - DNA, 16 bp, synthetic construct
  misc_feature 1..16: note = synthetic [barcode part1]
  source 1..16: mol_type = other DNA
gccagtatcacgtagt

SEQ ID NO: 5655 - DNA, 16 bp, synthetic construct
  misc_feature 1..16: note = synthetic [barcode part1]
  source 1..16: mol_type = other DNA
acgttagaccgaaggc

SEQ ID NO: 5656 - DNA, 16 bp, synthetic construct
  misc_feature 1..16: note = synthetic [barcode part1]
  source 1..16: mol_type = other DNA
cgattcctacacaatc

SEQ ID NO: 5657 - DNA, 16 bp, synthetic construct
  misc_feature 1..16: note = synthetic [barcode part1]
  source 1..16: mol_type = other DNA
ttgcactggaccacct

SEQ ID NO: 5658 - DNA, 16 bp, synthetic construct
  misc_feature 1..16: note = synthetic [barcode part1]
  source 1..16: mol_type = other DNA
aggtcgaaccacacag

SEQ ID NO: 5659 - DNA, 16 bp, synthetic construct
  misc_feature 1..16: note = synthetic [barcode part1]
  source 1..16: mol_type = other DNA
aacacgttggtgtgtc

SEQ ID NO: 5660 - DNA, 16 bp, synthetic construct
  misc_feature 1..16: note = synthetic [barcode part1]
  source 1..16: mol_type = other DNA
gtacctcactgttggc

SEQ ID NO: 5661 - DNA, 16 bp, synthetic construct
  misc_feature 1..16: note = synthetic [barcode part1]
  source 1..16: mol_type = other DNA
gtcaggcagatacgac

SEQ ID NO: 5662 - DNA, 16 bp, synthetic construct
  misc_feature 1..16: note = synthetic [barcode part1]
  source 1..16: mol_type = other DNA
taggcaccgacctctt

SEQ ID NO: 5663 - DNA, 16 bp, synthetic construct
  misc_feature 1..16: note = synthetic [barcode part1]
  source 1..16: mol_type = other DNA
cagtgaggagtagtag

SEQ ID NO: 5664 - DNA, 16 bp, synthetic construct
  misc_feature 1..16: note = synthetic [barcode part1]
  source 1..16: mol_type = other DNA
aggatctccgtgatac

SEQ ID NO: 5665 - DNA, 16 bp, synthetic construct
  misc_feature 1..16: note = synthetic [barcode part1]
  source 1..16: mol_type = other DNA
tgccaatcgtgtaacg

SEQ ID NO: 5666 - DNA, 16 bp, synthetic construct
  misc_feature 1..16: note = synthetic [barcode part1]
  source 1..16: mol_type = other DNA
tcttagtcgcaagttc

SEQ ID NO: 5667 - DNA, 16 bp, synthetic construct
  misc_feature 1..16: note = synthetic [barcode part1]
  source 1..16: mol_type = other DNA
gattacgaattcctcc

SEQ ID NO: 5668 - DNA, 16 bp, synthetic construct
  misc_feature 1..16: note = synthetic [barcode part1]
  source 1..16: mol_type = other DNA
gatctgtataggtccg

SEQ ID NO: 5669 - DNA, 16 bp, synthetic construct
  misc_feature 1..16: note = synthetic [barcode part1]
  source 1..16: mol_type = other DNA
atcgatatcgtgcggt

SEQ ID NO: 5670 - DNA, 16 bp, synthetic construct
  misc_feature 1..16: note = synthetic [barcode part1]
  source 1..16: mol_type = other DNA
ttgttcaccacctgtc

SEQ ID NO: 5671 - DNA, 16 bp, synthetic construct
  misc_feature 1..16: note = synthetic [barcode part1]
  source 1..16: mol_type = other DNA
tgtgtcacagtcacag

SEQ ID NO: 5672 - DNA, 16 bp, synthetic construct
  misc_feature 1..16: note = synthetic [barcode part1]
  source 1..16: mol_type = other DNA
ttgtggtgtacgtgtg

SEQ ID NO: 5673 - DNA, 16 bp, synthetic construct
  misc_feature 1..16: note = synthetic [barcode part1]
  source 1..16: mol_type = other DNA
atagagaactaggtcc

SEQ ID NO: 5674 - DNA, 16 bp, synthetic construct
  misc_feature 1..16: note = synthetic [barcode part1]
  source 1..16: mol_type = other DNA
cctgtgtagtctaatc

SEQ ID NO: 5675 - DNA, 16 bp, synthetic construct
  misc_feature 1..16: note = synthetic [barcode part1]
  source 1..16: mol_type = other DNA
cggtcactaaggaacg

SEQ ID NO: 5676 - DNA, 16 bp, synthetic construct
  misc_feature 1..16: note = synthetic [barcode part1]
  source 1..16: mol_type = other DNA
gcaccttaacttagtc

SEQ ID NO: 5677 - DNA, 16 bp, synthetic construct
  misc_feature 1..16: note = synthetic [barcode part1]
  source 1..16: mol_type = other DNA
ttagtgactgcgtctt

SEQ ID NO: 5678 - DNA, 16 bp, synthetic construct
  misc_feature 1..16: note = synthetic [barcode part1]
  source 1..16: mol_type = other DNA
tccttgcctaccagag

SEQ ID NO: 5679 - DNA, 16 bp, synthetic construct
  misc_feature 1..16: note = synthetic [barcode part1]
  source 1..16: mol_type = other DNA
cgccgcgtaatattag

SEQ ID NO: 5680 - DNA, 16 bp, synthetic construct
  misc_feature 1..16: note = synthetic [barcode part1]
  source 1..16: mol_type = other DNA
tcggaaccagataagt

SEQ ID NO: 5681 - DNA, 16 bp, synthetic construct
  misc_feature 1..16: note = synthetic [barcode part1]
  source 1..16: mol_type = other DNA
cactctagtagatcct

SEQ ID NO: 5682 - DNA, 16 bp, synthetic construct
  misc_feature 1..16: note = synthetic [barcode part1]
  source 1..16: mol_type = other DNA
cgagaagtgattacac

SEQ ID NO: 5683 - DNA, 16 bp, synthetic construct
  misc_feature 1..16: note = synthetic [barcode part1]
  source 1..16: mol_type = other DNA
gaagatacaggttacc

SEQ ID NO: 5684 - DNA, 16 bp, synthetic construct
  misc_feature 1..16: note = synthetic [barcode part1]
  source 1..16: mol_type = other DNA
aatacacctccggcct

SEQ ID NO: 5685 - DNA, 16 bp, synthetic construct
  misc_feature 1..16: note = synthetic [barcode part1]
  source 1..16: mol_type = other DNA
tatactatcggaggag

SEQ ID NO: 5686 - DNA, 16 bp, synthetic construct
  misc_feature 1..16: note = synthetic [barcode part1]
  source 1..16: mol_type = other DNA
tctcgtattggtgact

SEQ ID NO: 5687 - DNA, 16 bp, synthetic construct
  misc_feature 1..16: note = synthetic [barcode part1]
  source 1..16: mol_type = other DNA
ttgcgttacggcctgt

SEQ ID NO: 5688 - DNA, 16 bp, synthetic construct
  misc_feature 1..16: note = synthetic [barcode part1]
  source 1..16: mol_type = other DNA
cgttagtcttcagttg

SEQ ID NO: 5689 - DNA, 16 bp, synthetic construct
  misc_feature 1..16: note = synthetic [barcode part1]
  source 1..16: mol_type = other DNA
gtctaccagtaggtac

SEQ ID NO: 5690 - DNA, 16 bp, synthetic construct
  misc_feature 1..16: note = synthetic [barcode part1]
  source 1..16: mol_type = other DNA
caatcgagtcaactgc

SEQ ID NO: 5691 - DNA, 16 bp, synthetic construct
  misc_feature 1..16: note = synthetic [barcode part1]
  source 1..16: mol_type = other DNA
aggtggttgtgtcgag

SEQ ID NO: 5692 - DNA, 16 bp, synthetic construct
  misc_feature 1..16: note = synthetic [barcode part1]
  source 1..16: mol_type = other DNA
gcgtggcgattaaggt

SEQ ID NO: 5693 - DNA, 16 bp, synthetic construct
  misc_feature 1..16: note = synthetic [barcode part1]
  source 1..16: mol_type = other DNA
tattagtgaccaggag

SEQ ID NO: 5694 - DNA, 16 bp, synthetic construct
  misc_feature 1..16: note = synthetic [barcode part1]
  source 1..16: mol_type = other DNA
ttcctcgaggttgaag

SEQ ID NO: 5695 - DNA, 16 bp, synthetic construct
  misc_feature 1..16: note = synthetic [barcode part1]
  source 1..16: mol_type = other DNA
ccgagaacacaagtcg

SEQ ID NO: 5696 - DNA, 16 bp, synthetic construct
  misc_feature 1..16: note = synthetic [barcode part1]
  source 1..16: mol_type = other DNA
tgtggattatcgttcc

SEQ ID NO: 5697 - DNA, 16 bp, synthetic construct
  misc_feature 1..16: note = synthetic [barcode part1]
  source 1..16: mol_type = other DNA
gacttgtcagacactg

SEQ ID NO: 5698 - DNA, 16 bp, synthetic construct
  misc_feature 1..16: note = synthetic [barcode part1]
  source 1..16: mol_type = other DNA
cacacaagtcttccgc

SEQ ID NO: 5699 - DNA, 16 bp, synthetic construct
  misc_feature 1..16: note = synthetic [barcode part1]
  source 1..16: mol_type = other DNA
ttggtacagtctcttg

SEQ ID NO: 5700 - DNA, 16 bp, synthetic construct
  misc_feature 1..16: note = synthetic [barcode part1]
  source 1..16: mol_type = other DNA
cgaccggattaatcgt

SEQ ID NO: 5701 - DNA, 16 bp, synthetic construct
  misc_feature 1..16: note = synthetic [barcode part1]
  source 1..16: mol_type = other DNA
ccacttgatagtatcc

SEQ ID NO: 5702 - DNA, 16 bp, synthetic construct
  misc_feature 1..16: note = synthetic [barcode part1]
  source 1..16: mol_type = other DNA
agtactctagagagtg

SEQ ID NO: 5703 - DNA, 16 bp, synthetic construct
  misc_feature 1..16: note = synthetic [barcode part1]
  source 1..16: mol_type = other DNA
cctgtctaacaggtag

SEQ ID NO: 5704 - DNA, 16 bp, synthetic construct
  misc_feature 1..16: note = synthetic [barcode part1]
  source 1..16: mol_type = other DNA
tggccacaataacaag

SEQ ID NO: 5705 - DNA, 16 bp, synthetic construct
  misc_feature 1..16: note = synthetic [barcode part1]
  source 1..16: mol_type = other DNA
agactgcggattgtct

SEQ ID NO: 5706 - DNA, 16 bp, synthetic construct
  misc_feature 1..16: note = synthetic [barcode part1]
  source 1..16: mol_type = other DNA
gcgagtctacgaattc

SEQ ID NO: 5707 - DNA, 16 bp, synthetic construct
  misc_feature 1..16: note = synthetic [barcode part1]
  source 1..16: mol_type = other DNA
gttgtccaatatctgc

SEQ ID NO: 5708 - DNA, 16 bp, synthetic construct
  misc_feature 1..16: note = synthetic [barcode part1]
  source 1..16: mol_type = other DNA
ccgacgtgttgtatag

SEQ ID NO: 5709 - DNA, 16 bp, synthetic construct
  misc_feature 1..16: note = synthetic [barcode part1]
  source 1..16: mol_type = other DNA
aacacgcaatctcctt

SEQ ID NO: 5710 - DNA, 16 bp, synthetic construct
  misc_feature 1..16: note = synthetic [barcode part1]
  source 1..16: mol_type = other DNA
accggtgtcgttactc

SEQ ID NO: 5711 - DNA, 16 bp, synthetic construct
  misc_feature 1..16: note = synthetic [barcode part1]
  source 1..16: mol_type = other DNA
ccttaacacgcaatct

SEQ ID NO: 5712 - DNA, 16 bp, synthetic construct
  misc_feature 1..16: note = synthetic [barcode part1]
  source 1..16: mol_type = other DNA
ttggacagtccgtaac

SEQ ID NO: 5713 - DNA, 16 bp, synthetic construct
  misc_feature 1..16: note = synthetic [barcode part1]
  source 1..16: mol_type = other DNA
gaggttctaagtaggt

SEQ ID NO: 5714 - DNA, 16 bp, synthetic construct
  misc_feature 1..16: note = synthetic [barcode part1]
  source 1..16: mol_type = other DNA
agtcttcctggtgcgt

SEQ ID NO: 5715 - DNA, 16 bp, synthetic construct
  misc_feature 1..16: note = synthetic [barcode part1]
  source 1..16: mol_type = other DNA
tcacagttgtggtgtg

SEQ ID NO: 5716 - DNA, 16 bp, synthetic construct
  misc_feature 1..16: note = synthetic [barcode part1]
  source 1..16: mol_type = other DNA
caacacaactgaagac

SEQ ID NO: 5717 - DNA, 16 bp, synthetic construct
  misc_feature 1..16: note = synthetic [barcode part1]
  source 1..16: mol_type = other DNA
tggtctaagtgactcg

SEQ ID NO: 5718 - DNA, 16 bp, synthetic construct
  misc_feature 1..16: note = synthetic [barcode part1]
  source 1..16: mol_type = other DNA
tagacctgcgaatctg

SEQ ID NO: 5719 - DNA, 16 bp, synthetic construct
  misc_feature 1..16: note = synthetic [barcode part1]
  source 1..16: mol_type = other DNA
atcgcaatctacttgc

SEQ ID NO: 5720 - DNA, 16 bp, synthetic construct
  misc_feature 1..16: note = synthetic [barcode part1]
  source 1..16: mol_type = other DNA
actcaaggtgagttcc

SEQ ID NO: 5721 - DNA, 16 bp, synthetic construct
  misc_feature 1..16: note = synthetic [barcode part1]
  source 1..16: mol_type = other DNA
taacgtggccagagac

SEQ ID NO: 5722 - DNA, 16 bp, synthetic construct
  misc_feature 1..16: note = synthetic [barcode part1]
  source 1..16: mol_type = other DNA
gtctcaactggaactg

SEQ ID NO: 5723 - DNA, 16 bp, synthetic construct
  misc_feature 1..16: note = synthetic [barcode part1]
  source 1..16: mol_type = other DNA
attaggaaccggcgtg

SEQ ID NO: 5724 - DNA, 16 bp, synthetic construct
  misc_feature 1..16: note = synthetic [barcode part1]
  source 1..16: mol_type = other DNA
ataccttcaatctggc

SEQ ID NO: 5725 - DNA, 16 bp, synthetic construct
  misc_feature 1..16: note = synthetic [barcode part1]
  source 1..16: mol_type = other DNA
gccaagtatccaacgt

SEQ ID NO: 5726 - DNA, 16 bp, synthetic construct
  misc_feature 1..16: note = synthetic [barcode part1]
  source 1..16: mol_type = other DNA
tgacgcagttattcct

SEQ ID NO: 5727 - DNA, 16 bp, synthetic construct
  misc_feature 1..16: note = synthetic [barcode part1]
  source 1..16: mol_type = other DNA
taattacctcgacctg

SEQ ID NO: 5728 - DNA, 16 bp, synthetic construct
  misc_feature 1..16: note = synthetic [barcode part1]
  source 1..16: mol_type = other DNA
tctgtaccggcgactt

SEQ ID NO: 5729 - DNA, 16 bp, synthetic construct
  misc_feature 1..16: note = synthetic [barcode part1]
  source 1..16: mol_type = other DNA
aagattggcacaactg

SEQ ID NO: 5730 - DNA, 16 bp, synthetic construct
  misc_feature 1..16: note = synthetic [barcode part1]
  source 1..16: mol_type = other DNA
gccagaagtcacacag

SEQ ID NO: 5731 - DNA, 16 bp, synthetic construct
  misc_feature 1..16: note = synthetic [barcode part1]
  source 1..16: mol_type = other DNA
cgcaagtacaataggt

SEQ ID NO: 5732 - DNA, 16 bp, synthetic construct
  misc_feature 1..16: note = synthetic [barcode part1]
  source 1..16: mol_type = other DNA
acgttacgacaagtag

SEQ ID NO: 5733 - DNA, 16 bp, synthetic construct
  misc_feature 1..16: note = synthetic [barcode part1]
  source 1..16: mol_type = other DNA
aggtgttaggttcgtc

SEQ ID NO: 5734 - DNA, 16 bp, synthetic construct
  misc_feature 1..16: note = synthetic [barcode part1]
  source 1..16: mol_type = other DNA
tcacgagtcactactt

SEQ ID NO: 5735 - DNA, 16 bp, synthetic construct
  misc_feature 1..16: note = synthetic [barcode part1]
  source 1..16: mol_type = other DNA
tcgtctgcctattcac

SEQ ID NO: 5736 - DNA, 16 bp, synthetic construct
  misc_feature 1..16: note = synthetic [barcode part1]
  source 1..16: mol_type = other DNA
tacgtctaggccgtct

SEQ ID NO: 5737 - DNA, 16 bp, synthetic construct
  misc_feature 1..16: note = synthetic [barcode part1]
  source 1..16: mol_type = other DNA
ttacgtcgacacaggt

SEQ ID NO: 5738 - DNA, 16 bp, synthetic construct
  misc_feature 1..16: note = synthetic [barcode part1]
  source 1..16: mol_type = other DNA
gagttggacgtcagtg

SEQ ID NO: 5739 - DNA, 16 bp, synthetic construct
  misc_feature 1..16: note = synthetic [barcode part1]
  source 1..16: mol_type = other DNA
ttaatacgtcggcgtg

SEQ ID NO: 5740 - DNA, 16 bp, synthetic construct
  misc_feature 1..16: note = synthetic [barcode part1]
  source 1..16: mol_type = other DNA
cctgtcgatacaactt

SEQ ID NO: 5741 - DNA, 16 bp, synthetic construct
  misc_feature 1..16: note = synthetic [barcode part1]
  source 1..16: mol_type = other DNA
gtcgccaatacttccg

SEQ ID NO: 5742 - DNA, 16 bp, synthetic construct
  misc_feature 1..16: note = synthetic [barcode part1]
  source 1..16: mol_type = other DNA
caggattgtatcgtgc

SEQ ID NO: 5743 - DNA, 16 bp, synthetic construct
  misc_feature 1..16: note = synthetic [barcode part1]
  source 1..16: mol_type = other DNA
caatcactgtcggtag

SEQ ID NO: 5744 - DNA, 16 bp, synthetic construct
  misc_feature 1..16: note = synthetic [barcode part1]
  source 1..16: mol_type = other DNA
acgaaggtagttcaac

SEQ ID NO: 5745 - DNA, 16 bp, synthetic construct
  misc_feature 1..16: note = synthetic [barcode part1]
  source 1..16: mol_type = other DNA
gacactaattgaccgc

SEQ ID NO: 5746 - DNA, 16 bp, synthetic construct
  misc_feature 1..16: note = synthetic [barcode part1]
  source 1..16: mol_type = other DNA
cagacagtatcacaag

SEQ ID NO: 5747 - DNA, 16 bp, synthetic construct
  misc_feature 1..16: note = synthetic [barcode part1]
  source 1..16: mol_type = other DNA
tgagacgtctgacttg

SEQ ID NO: 5748 - DNA, 16 bp, synthetic construct
  misc_feature 1..16: note = synthetic [barcode part1]
  source 1..16: mol_type = other DNA
tcctataaccactgac

SEQ ID NO: 5749 - DNA, 16 bp, synthetic construct
  misc_feature 1..16: note = synthetic [barcode part1]
  source 1..16: mol_type = other DNA
tctagaaggttggcct

SEQ ID NO: 5750 - DNA, 16 bp, synthetic construct
  misc_feature 1..16: note = synthetic [barcode part1]
  source 1..16: mol_type = other DNA
agactaatagtcgcag

SEQ ID NO: 5751 - DNA, 16 bp, synthetic construct
  misc_feature 1..16: note = synthetic [barcode part1]
  source 1..16: mol_type = other DNA
tggtcctatacaccgc

SEQ ID NO: 5752 - DNA, 16 bp, synthetic construct
  misc_feature 1..16: note = synthetic [barcode part1]
  source 1..16: mol_type = other DNA
ccagaacttcaggact

SEQ ID NO: 5753 - DNA, 16 bp, synthetic construct
  misc_feature 1..16: note = synthetic [barcode part1]
  source 1..16: mol_type = other DNA
tgttgccaggttgaac

SEQ ID NO: 5754 - DNA, 16 bp, synthetic construct
  misc_feature 1..16: note = synthetic [barcode part1]
  source 1..16: mol_type = other DNA
gacgaactgccacaag

SEQ ID NO: 5755 - DNA, 16 bp, synthetic construct
  misc_feature 1..16: note = synthetic [barcode part1]
  source 1..16: mol_type = other DNA
acacggcactgatatc

SEQ ID NO: 5756 - DNA, 16 bp, synthetic construct
  misc_feature 1..16: note = synthetic [barcode part1]
  source 1..16: mol_type = other DNA
tcacacctatcggacc

SEQ ID NO: 5757 - DNA, 16 bp, synthetic construct
  misc_feature 1..16: note = synthetic [barcode part1]
  source 1..16: mol_type = other DNA
atacagagaaccgccg

SEQ ID NO: 5758 - DNA, 16 bp, synthetic construct
  misc_feature 1..16: note = synthetic [barcode part1]
  source 1..16: mol_type = other DNA
cacggactaaggcaac

SEQ ID NO: 5759 - DNA, 16 bp, synthetic construct
  misc_feature 1..16: note = synthetic [barcode part1]
  source 1..16: mol_type = other DNA
cgttagaactcttgtc

SEQ ID NO: 5760 - DNA, 16 bp, synthetic construct
  misc_feature 1..16: note = synthetic [barcode part1]
  source 1..16: mol_type = other DNA
aacagtccgatagtcc

SEQ ID NO: 5761 - DNA, 16 bp, synthetic construct
  misc_feature 1..16: note = synthetic [barcode part1]
  source 1..16: mol_type = other DNA
acctcgcgtgactgtt

SEQ ID NO: 5762 - DNA, 16 bp, synthetic construct
  misc_feature 1..16: note = synthetic [barcode part1]
  source 1..16: mol_type = other DNA
acagttctcgtgtccg

SEQ ID NO: 5763 - DNA, 16 bp, synthetic construct
  misc_feature 1..16: note = synthetic [barcode part1]
  source 1..16: mol_type = other DNA
cggacactcttactgc

SEQ ID NO: 5764 - DNA, 16 bp, synthetic construct
  misc_feature 1..16: note = synthetic [barcode part1]
  source 1..16: mol_type = other DNA
taactatcgtctcgtg

SEQ ID NO: 5765 - DNA, 16 bp, synthetic construct
  misc_feature 1..16: note = synthetic [barcode part1]
  source 1..16: mol_type = other DNA
aggttcgtctgatctt

SEQ ID NO: 5766 - DNA, 16 bp, synthetic construct
  misc_feature 1..16: note = synthetic [barcode part1]
  source 1..16: mol_type = other DNA
gcagtgtgtcacaact

SEQ ID NO: 5767 - DNA, 16 bp, synthetic construct
  misc_feature 1..16: note = synthetic [barcode part1]
  source 1..16: mol_type = other DNA
ataggaaggtctagtc

SEQ ID NO: 5768 - DNA, 16 bp, synthetic construct
  misc_feature 1..16: note = synthetic [barcode part1]
  source 1..16: mol_type = other DNA
cacttaggaagtggcg

SEQ ID NO: 5769 - DNA, 16 bp, synthetic construct
  misc_feature 1..16: note = synthetic [barcode part1]
  source 1..16: mol_type = other DNA
cgaatcacggtaactc

SEQ ID NO: 5770 - DNA, 16 bp, synthetic construct
  misc_feature 1..16: note = synthetic [barcode part1]
  source 1..16: mol_type = other DNA
ttatcgccaaggtggt

SEQ ID NO: 5771 - DNA, 16 bp, synthetic construct
  misc_feature 1..16: note = synthetic [barcode part1]
  source 1..16: mol_type = other DNA
agtagatacctgcctg

SEQ ID NO: 5772 - DNA, 16 bp, synthetic construct
  misc_feature 1..16: note = synthetic [barcode part1]
  source 1..16: mol_type = other DNA
cgattcctagttgcgc

SEQ ID NO: 5773 - DNA, 16 bp, synthetic construct
  misc_feature 1..16: note = synthetic [barcode part1]
  source 1..16: mol_type = other DNA
tggtcaacacgtacac

SEQ ID NO: 5774 - DNA, 16 bp, synthetic construct
  misc_feature 1..16: note = synthetic [barcode part1]
  source 1..16: mol_type = other DNA
agactcttggcgttag

SEQ ID NO: 5775 - DNA, 16 bp, synthetic construct
  misc_feature 1..16: note = synthetic [barcode part1]
  source 1..16: mol_type = other DNA
tcacaacagtcaaccg

SEQ ID NO: 5776 - DNA, 16 bp, synthetic construct
  misc_feature 1..16: note = synthetic [barcode part1]
  source 1..16: mol_type = other DNA
atagtcaggttctcct

SEQ ID NO: 5777 - DNA, 16 bp, synthetic construct
  misc_feature 1..16: note = synthetic [barcode part1]
  source 1..16: mol_type = other DNA
gagtcacggcaattct

SEQ ID NO: 5778 - DNA, 16 bp, synthetic construct
  misc_feature 1..16: note = synthetic [barcode part1]
  source 1..16: mol_type = other DNA
tactgtctcgtgtagt

SEQ ID NO: 5779 - DNA, 16 bp, synthetic construct
  misc_feature 1..16: note = synthetic [barcode part1]
  source 1..16: mol_type = other DNA
ttctactgtccgcgag

SEQ ID NO: 5780 - DNA, 16 bp, synthetic construct
  misc_feature 1..16: note = synthetic [barcode part1]
  source 1..16: mol_type = other DNA
tgagtactgacagaac

SEQ ID NO: 5781 - DNA, 16 bp, synthetic construct
  misc_feature 1..16: note = synthetic [barcode part1]
  source 1..16: mol_type = other DNA
gtagaataagtccgtg

SEQ ID NO: 5782 - DNA, 16 bp, synthetic construct
  misc_feature 1..16: note = synthetic [barcode part1]
  source 1..16: mol_type = other DNA
atactctgtcgagttc

SEQ ID NO: 5783 - DNA, 16 bp, synthetic construct
  misc_feature 1..16: note = synthetic [barcode part1]
  source 1..16: mol_type = other DNA
aaccacgaatctcctt

SEQ ID NO: 5784 - DNA, 16 bp, synthetic construct
  misc_feature 1..16: note = synthetic [barcode part1]
  source 1..16: mol_type = other DNA
gagaacacaggttgtt

SEQ ID NO: 5785 - DNA, 16 bp, synthetic construct
  misc_feature 1..16: note = synthetic [barcode part1]
  source 1..16: mol_type = other DNA
tgtggataggtgatac

SEQ ID NO: 5786 - DNA, 16 bp, synthetic construct
  misc_feature 1..16: note = synthetic [barcode part1]
  source 1..16: mol_type = other DNA
atatagtcttcctggc

SEQ ID NO: 5787 - DNA, 16 bp, synthetic construct
  misc_feature 1..16: note = synthetic [barcode part1]
  source 1..16: mol_type = other DNA
tatcctgacttcgcct

SEQ ID NO: 5788 - DNA, 16 bp, synthetic construct
  misc_feature 1..16: note = synthetic [barcode part1]
  source 1..16: mol_type = other DNA
aacttgcacctcgtcg

SEQ ID NO: 5789 - DNA, 16 bp, synthetic construct
  misc_feature 1..16: note = synthetic [barcode part1]
  source 1..16: mol_type = other DNA
gattggcgttagtcgt

SEQ ID NO: 5790 - DNA, 16 bp, synthetic construct
  misc_feature 1..16: note = synthetic [barcode part1]
  source 1..16: mol_type = other DNA
aatcaccacgaggacg

SEQ ID NO: 5791 - DNA, 16 bp, synthetic construct
  misc_feature 1..16: note = synthetic [barcode part1]
  source 1..16: mol_type = other DNA
ttctagtcttcgtcgc

SEQ ID NO: 5792 - DNA, 16 bp, synthetic construct
  misc_feature 1..16: note = synthetic [barcode part1]
  source 1..16: mol_type = other DNA
gttgatcgtcacagtg

SEQ ID NO: 5793 - DNA, 16 bp, synthetic construct
  misc_feature 1..16: note = synthetic [barcode part1]
  source 1..16: mol_type = other DNA
agttccactcaaggtg

SEQ ID NO: 5794 - DNA, 16 bp, synthetic construct
  misc_feature 1..16: note = synthetic [barcode part1]
  source 1..16: mol_type = other DNA
cgaattcctcgagtag

SEQ ID NO: 5795 - DNA, 16 bp, synthetic construct
  misc_feature 1..16: note = synthetic [barcode part1]
  source 1..16: mol_type = other DNA
gatatagtagaccacg

SEQ ID NO: 5796 - DNA, 16 bp, synthetic construct
  misc_feature 1..16: note = synthetic [barcode part1]
  source 1..16: mol_type = other DNA
tccacgtatcgaattc

SEQ ID NO: 5797 - DNA, 16 bp, synthetic construct
  misc_feature 1..16: note = synthetic [barcode part1]
  source 1..16: mol_type = other DNA
tgaggccagtcttaac

SEQ ID NO: 5798 - DNA, 16 bp, synthetic construct
  misc_feature 1..16: note = synthetic [barcode part1]
  source 1..16: mol_type = other DNA
gatacggatccaatag

SEQ ID NO: 5799 - DNA, 16 bp, synthetic construct
  misc_feature 1..16: note = synthetic [barcode part1]
  source 1..16: mol_type = other DNA
tctcgcgtggtgatct

SEQ ID NO: 5800 - DNA, 16 bp, synthetic construct
  misc_feature 1..16: note = synthetic [barcode part1]
  source 1..16: mol_type = other DNA
tcttgccttacggacg

SEQ ID NO: 5801 - DNA, 16 bp, synthetic construct
  misc_feature 1..16: note = synthetic [barcode part1]
  source 1..16: mol_type = other DNA
tcacgcgtcgatcttg

SEQ ID NO: 5802 - DNA, 16 bp, synthetic construct
  misc_feature 1..16: note = synthetic [barcode part1]
  source 1..16: mol_type = other DNA
actggttgttgtgacg

SEQ ID NO: 5803 - DNA, 16 bp, synthetic construct
  misc_feature 1..16: note = synthetic [barcode part1]
  source 1..16: mol_type = other DNA
agagttccggataggc

SEQ ID NO: 5804 - DNA, 16 bp, synthetic construct
  misc_feature 1..16: note = synthetic [barcode part1]
  source 1..16: mol_type = other DNA
tatagacgccttgtct

SEQ ID NO: 5805 - DNA, 16 bp, synthetic construct
  misc_feature 1..16: note = synthetic [barcode part1]
  source 1..16: mol_type = other DNA
caagtgtgaggtaatc

SEQ ID NO: 5806 - DNA, 16 bp, synthetic construct
  misc_feature 1..16: note = synthetic [barcode part1]
  source 1..16: mol_type = other DNA
agtgtgtcagtgtacc

SEQ ID NO: 5807 - DNA, 16 bp, synthetic construct
  misc_feature 1..16: note = synthetic [barcode part1]
  source 1..16: mol_type = other DNA
gcagattaccggagac

SEQ ID NO: 5808 - DNA, 16 bp, synthetic construct
  misc_feature 1..16: note = synthetic [barcode part1]
  source 1..16: mol_type = other DNA
tgagtcggagacgtgt

SEQ ID NO: 5809 - DNA, 16 bp, synthetic construct
  misc_feature 1..16: note = synthetic [barcode part1]
  source 1..16: mol_type = other DNA
actctcgatcttcacc

SEQ ID NO: 5810 - DNA, 16 bp, synthetic construct
  misc_feature 1..16: note = synthetic [barcode part1]
  source 1..16: mol_type = other DNA
cgtaggaagagtgtag

SEQ ID NO: 5811 - DNA, 16 bp, synthetic construct
  misc_feature 1..16: note = synthetic [barcode part1]
  source 1..16: mol_type = other DNA
acgaactgattgtgcc

SEQ ID NO: 5812 - DNA, 16 bp, synthetic construct
  misc_feature 1..16: note = synthetic [barcode part1]
  source 1..16: mol_type = other DNA
tgccgtctgagttcgt

SEQ ID NO: 5813 - DNA, 16 bp, synthetic construct
  misc_feature 1..16: note = synthetic [barcode part1]
  source 1..16: mol_type = other DNA
tctcctgcagactcag

SEQ ID NO: 5814 - DNA, 16 bp, synthetic construct
  misc_feature 1..16: note = synthetic [barcode part1]
  source 1..16: mol_type = other DNA
acgtgcagatcgactt

SEQ ID NO: 5815 - DNA, 16 bp, synthetic construct
  misc_feature 1..16: note = synthetic [barcode part1]
  source 1..16: mol_type = other DNA
tgaataccgcaggtct

SEQ ID NO: 5816 - DNA, 16 bp, synthetic construct
  misc_feature 1..16: note = synthetic [barcode part1]
  source 1..16: mol_type = other DNA
caagtaacaggatctg

SEQ ID NO: 5817 - DNA, 16 bp, synthetic construct
  misc_feature 1..16: note = synthetic [barcode part1]
  source 1..16: mol_type = other DNA
cgatagtggtctaacc

SEQ ID NO: 5818 - DNA, 16 bp, synthetic construct
  misc_feature 1..16: note = synthetic [barcode part1]
  source 1..16: mol_type = other DNA
gtagtctctacgcctg

SEQ ID NO: 5819 - DNA, 16 bp, synthetic construct
  misc_feature 1..16: note = synthetic [barcode part1]
  source 1..16: mol_type = other DNA
gtataatcctcggttc

SEQ ID NO: 5820 - DNA, 16 bp, synthetic construct
  misc_feature 1..16: note = synthetic [barcode part1]
  source 1..16: mol_type = other DNA
aagactcggtggacac

SEQ ID NO: 5821 - DNA, 16 bp, synthetic construct
  misc_feature 1..16: note = synthetic [barcode part1]
  source 1..16: mol_type = other DNA
tgtcgaacaccaagtc

SEQ ID NO: 5822 - DNA, 16 bp, synthetic construct
  misc_feature 1..16: note = synthetic [barcode part1]
  source 1..16: mol_type = other DNA
aacggtgtgaacaccg

SEQ ID NO: 5823 - DNA, 16 bp, synthetic construct
  misc_feature 1..16: note = synthetic [barcode part1]
  source 1..16: mol_type = other DNA
ttgaagtcgcctatct

SEQ ID NO: 5824 - DNA, 16 bp, synthetic construct
  misc_feature 1..16: note = synthetic [barcode part1]
  source 1..16: mol_type = other DNA
ttccttctctctctcc

SEQ ID NO: 5825 - DNA, 16 bp, synthetic construct
  misc_feature 1..16: note = synthetic [barcode part1]
  source 1..16: mol_type = other DNA
ccactcgacgaatagt

SEQ ID NO: 5826 - DNA, 16 bp, synthetic construct
  misc_feature 1..16: note = synthetic [barcode part1]
  source 1..16: mol_type = other DNA
tattaagtgtcctcgc

SEQ ID NO: 5827 - DNA, 16 bp, synthetic construct
  misc_feature 1..16: note = synthetic [barcode part1]
  source 1..16: mol_type = other DNA
tcaacaagttcggcgt

SEQ ID NO: 5828 - DNA, 16 bp, synthetic construct
  misc_feature 1..16: note = synthetic [barcode part1]
  source 1..16: mol_type = other DNA
atacgacagttgagac

SEQ ID NO: 5829 - DNA, 16 bp, synthetic construct
  misc_feature 1..16: note = synthetic [barcode part1]
  source 1..16: mol_type = other DNA
gcgtcgtagatagacg

SEQ ID NO: 5830 - DNA, 16 bp, synthetic construct
  misc_feature 1..16: note = synthetic [barcode part1]
  source 1..16: mol_type = other DNA
gtcgttcgacgttcac

SEQ ID NO: 5831 - DNA, 16 bp, synthetic construct
  misc_feature 1..16: note = synthetic [barcode part1]
  source 1..16: mol_type = other DNA
tacagactccgagtac

SEQ ID NO: 5832 - DNA, 16 bp, synthetic construct
  misc_feature 1..16: note = synthetic [barcode part1]
  source 1..16: mol_type = other DNA
atcctcgataaggacc

SEQ ID NO: 5833 - DNA, 16 bp, synthetic construct
  misc_feature 1..16: note = synthetic [barcode part1]
  source 1..16: mol_type = other DNA
tacgcaaccaccgttc

SEQ ID NO: 5834 - DNA, 16 bp, synthetic construct
  misc_feature 1..16: note = synthetic [barcode part1]
  source 1..16: mol_type = other DNA
acgaactagaggttac

SEQ ID NO: 5835 - DNA, 16 bp, synthetic construct
  misc_feature 1..16: note = synthetic [barcode part1]
  source 1..16: mol_type = other DNA
acacttgtctgttacg

SEQ ID NO: 5836 - DNA, 16 bp, synthetic construct
  misc_feature 1..16: note = synthetic [barcode part1]
  source 1..16: mol_type = other DNA
cgtcgcctagatctac

SEQ ID NO: 5837 - DNA, 16 bp, synthetic construct
  misc_feature 1..16: note = synthetic [barcode part1]
  source 1..16: mol_type = other DNA
tgcaactaaggcgacg

SEQ ID NO: 5838 - DNA, 16 bp, synthetic construct
  misc_feature 1..16: note = synthetic [barcode part1]
  source 1..16: mol_type = other DNA
aggtaggttacgatac

SEQ ID NO: 5839 - DNA, 16 bp, synthetic construct
  misc_feature 1..16: note = synthetic [barcode part1]
  source 1..16: mol_type = other DNA
taacctgtggactacg

SEQ ID NO: 5840 - DNA, 16 bp, synthetic construct
  misc_feature 1..16: note = synthetic [barcode part1]
  source 1..16: mol_type = other DNA
tgaggcactgtgcaag

SEQ ID NO: 5841 - DNA, 16 bp, synthetic construct
  misc_feature 1..16: note = synthetic [barcode part1]
  source 1..16: mol_type = other DNA
tctctctgttacggtc

SEQ ID NO: 5842 - DNA, 16 bp, synthetic construct
  misc_feature 1..16: note = synthetic [barcode part1]
  source 1..16: mol_type = other DNA
aaggtcctggaatcct

SEQ ID NO: 5843 - DNA, 16 bp, synthetic construct
  misc_feature 1..16: note = synthetic [barcode part1]
  source 1..16: mol_type = other DNA
tagttcgataggaacg

SEQ ID NO: 5844 - DNA, 16 bp, synthetic construct
  misc_feature 1..16: note = synthetic [barcode part1]
  source 1..16: mol_type = other DNA
ccaattgccttctctg

SEQ ID NO: 5845 - DNA, 16 bp, synthetic construct
  misc_feature 1..16: note = synthetic [barcode part1]
  source 1..16: mol_type = other DNA
gtcttcgacaagagtc

SEQ ID NO: 5846 - DNA, 16 bp, synthetic construct
  misc_feature 1..16: note = synthetic [barcode part1]
  source 1..16: mol_type = other DNA
tattgccagtgcgcct

SEQ ID NO: 5847 - DNA, 16 bp, synthetic construct
  misc_feature 1..16: note = synthetic [barcode part1]
  source 1..16: mol_type = other DNA
gaatctcgtcgtagtg

SEQ ID NO: 5848 - DNA, 16 bp, synthetic construct
  misc_feature 1..16: note = synthetic [barcode part1]
  source 1..16: mol_type = other DNA
atcagtgcgaattcgc

SEQ ID NO: 5849 - DNA, 16 bp, synthetic construct
  misc_feature 1..16: note = synthetic [barcode part1]
  source 1..16: mol_type = other DNA
tcctgtggttggactc

SEQ ID NO: 5850 - DNA, 16 bp, synthetic construct
  misc_feature 1..16: note = synthetic [barcode part1]
  source 1..16: mol_type = other DNA
gaactgtcactctcgc

SEQ ID NO: 5851 - DNA, 16 bp, synthetic construct
  misc_feature 1..16: note = synthetic [barcode part1]
  source 1..16: mol_type = other DNA
tgcggtcaggagttag

SEQ ID NO: 5852 - DNA, 16 bp, synthetic construct
  misc_feature 1..16: note = synthetic [barcode part1]
  source 1..16: mol_type = other DNA
tactataacacgcgcg

SEQ ID NO: 5853 - DNA, 16 bp, synthetic construct
  misc_feature 1..16: note = synthetic [barcode part1]
  source 1..16: mol_type = other DNA
cgcggtgttatagtgt

SEQ ID NO: 5854 - DNA, 16 bp, synthetic construct
  misc_feature 1..16: note = synthetic [barcode part1]
  source 1..16: mol_type = other DNA
atctgttcagacaggc

SEQ ID NO: 5855 - DNA, 16 bp, synthetic construct
  misc_feature 1..16: note = synthetic [barcode part1]
  source 1..16: mol_type = other DNA
agacgtcgcctatagt

SEQ ID NO: 5856 - DNA, 16 bp, synthetic construct
  misc_feature 1..16: note = synthetic [barcode part1]
  source 1..16: mol_type = other DNA
tactaccacggagtgt

SEQ ID NO: 5857 - DNA, 16 bp, synthetic construct
  misc_feature 1..16: note = synthetic [barcode part1]
  source 1..16: mol_type = other DNA
aatctgaggaggtgtt

SEQ ID NO: 5858 - DNA, 16 bp, synthetic construct
  misc_feature 1..16: note = synthetic [barcode part1]
  source 1..16: mol_type = other DNA
caggatcaccacagtt

SEQ ID NO: 5859 - DNA, 16 bp, synthetic construct
  misc_feature 1..16: note = synthetic [barcode part1]
  source 1..16: mol_type = other DNA
agttaatcgcgtgcac

SEQ ID NO: 5860 - DNA, 16 bp, synthetic construct
  misc_feature 1..16: note = synthetic [barcode part1]
  source 1..16: mol_type = other DNA
accttgcctacgtgac

SEQ ID NO: 5861 - DNA, 16 bp, synthetic construct
  misc_feature 1..16: note = synthetic [barcode part1]
  source 1..16: mol_type = other DNA
tatcacgtagtgccag

SEQ ID NO: 5862 - DNA, 16 bp, synthetic construct
  misc_feature 1..16: note = synthetic [barcode part1]
  source 1..16: mol_type = other DNA
tgaggtgtagatctag

SEQ ID NO: 5863 - DNA, 16 bp, synthetic construct
  misc_feature 1..16: note = synthetic [barcode part1]
  source 1..16: mol_type = other DNA
tagatatcctcgccgc

SEQ ID NO: 5864 - DNA, 16 bp, synthetic construct
  misc_feature 1..16: note = synthetic [barcode part1]
  source 1..16: mol_type = other DNA
tgtgtgtggttgactg

SEQ ID NO: 5865 - DNA, 16 bp, synthetic construct
  misc_feature 1..16: note = synthetic [barcode part1]
  source 1..16: mol_type = other DNA
acaccagtagttctct

SEQ ID NO: 5866 - DNA, 16 bp, synthetic construct
  misc_feature 1..16: note = synthetic [barcode part1]
  source 1..16: mol_type = other DNA
gttcacagatctgcag

SEQ ID NO: 5867 - DNA, 16 bp, synthetic construct
  misc_feature 1..16: note = synthetic [barcode part1]
  source 1..16: mol_type = other DNA
tcactccgatcgtacg

SEQ ID NO: 5868 - DNA, 16 bp, synthetic construct
  misc_feature 1..16: note = synthetic [barcode part1]
  source 1..16: mol_type = other DNA
taccgtctggactcac

SEQ ID NO: 5869 - DNA, 16 bp, synthetic construct
  misc_feature 1..16: note = synthetic [barcode part1]
  source 1..16: mol_type = other DNA
acagtcttaccgaacg

SEQ ID NO: 5870 - DNA, 16 bp, synthetic construct
  misc_feature 1..16: note = synthetic [barcode part1]
  source 1..16: mol_type = other DNA
ttccgaatccgaagtg

SEQ ID NO: 5871 - DNA, 16 bp, synthetic construct
  misc_feature 1..16: note = synthetic [barcode part1]
  source 1..16: mol_type = other DNA
actgtgacaccacaac

SEQ ID NO: 5872 - DNA, 16 bp, synthetic construct
  misc_feature 1..16: note = synthetic [barcode part1]
  source 1..16: mol_type = other DNA
agactgccagatcgtt

SEQ ID NO: 5873 - DNA, 16 bp, synthetic construct
  misc_feature 1..16: note = synthetic [barcode part1]
  source 1..16: mol_type = other DNA
cactgccttcagttct

SEQ ID NO: 5874 - DNA, 16 bp, synthetic construct
  misc_feature 1..16: note = synthetic [barcode part1]
  source 1..16: mol_type = other DNA
gaacaggtgtcgcaac

SEQ ID NO: 5875 - DNA, 16 bp, synthetic construct
  misc_feature 1..16: note = synthetic [barcode part1]
  source 1..16: mol_type = other DNA
ccttcagaattgaggc

SEQ ID NO: 5876 - DNA, 16 bp, synthetic construct
  misc_feature 1..16: note = synthetic [barcode part1]
  source 1..16: mol_type = other DNA
agtgtcaccaaggttc

SEQ ID NO: 5877 - DNA, 16 bp, synthetic construct
  misc_feature 1..16: note = synthetic [barcode part1]
  source 1..16: mol_type = other DNA
gtacttgcaggataag

SEQ ID NO: 5878 - DNA, 16 bp, synthetic construct
  misc_feature 1..16: note = synthetic [barcode part1]
  source 1..16: mol_type = other DNA
gcaatctatctccgcg

SEQ ID NO: 5879 - DNA, 16 bp, synthetic construct
  misc_feature 1..16: note = synthetic [barcode part1]
  source 1..16: mol_type = other DNA
aggcggactacttact

SEQ ID NO: 5880 - DNA, 16 bp, synthetic construct
  misc_feature 1..16: note = synthetic [barcode part1]
  source 1..16: mol_type = other DNA
ttcgagtctatcactg

SEQ ID NO: 5881 - DNA, 16 bp, synthetic construct
  misc_feature 1..16: note = synthetic [barcode part1]
  source 1..16: mol_type = other DNA
gtacagtcgtagttgc

SEQ ID NO: 5882 - DNA, 16 bp, synthetic construct
  misc_feature 1..16: note = synthetic [barcode part1]
  source 1..16: mol_type = other DNA
tctccgtaggtcgttg

SEQ ID NO: 5883 - DNA, 16 bp, synthetic construct
  misc_feature 1..16: note = synthetic [barcode part1]
  source 1..16: mol_type = other DNA
tagaactccgaggtct

SEQ ID NO: 5884 - DNA, 16 bp, synthetic construct
  misc_feature 1..16: note = synthetic [barcode part1]
  source 1..16: mol_type = other DNA
caacctattcgtgttg

SEQ ID NO: 5885 - DNA, 16 bp, synthetic construct
  misc_feature 1..16: note = synthetic [barcode part1]
  source 1..16: mol_type = other DNA
tccactcgcgatatcg

SEQ ID NO: 5886 - DNA, 16 bp, synthetic construct
  misc_feature 1..16: note = synthetic [barcode part1]
  source 1..16: mol_type = other DNA
tgcaaggactaagttg

SEQ ID NO: 5887 - DNA, 16 bp, synthetic construct
  misc_feature 1..16: note = synthetic [barcode part1]
  source 1..16: mol_type = other DNA
tcctcgatatacagtc

SEQ ID NO: 5888 - DNA, 16 bp, synthetic construct
  misc_feature 1..16: note = synthetic [barcode part1]
  source 1..16: mol_type = other DNA
gaggactactggtgtg

SEQ ID NO: 5889 - DNA, 16 bp, synthetic construct
  misc_feature 1..16: note = synthetic [barcode part1]
  source 1..16: mol_type = other DNA
tactgagtactcttgc

SEQ ID NO: 5890 - DNA, 16 bp, synthetic construct
  misc_feature 1..16: note = synthetic [barcode part1]
  source 1..16: mol_type = other DNA
caacgataccagatcc

SEQ ID NO: 5891 - DNA, 16 bp, synthetic construct
  misc_feature 1..16: note = synthetic [barcode part1]
  source 1..16: mol_type = other DNA
aacgtcaacgtacgtc

SEQ ID NO: 5892 - DNA, 16 bp, synthetic construct
  misc_feature 1..16: note = synthetic [barcode part1]
  source 1..16: mol_type = other DNA
cctacgttcgagtcac

SEQ ID NO: 5893 - DNA, 16 bp, synthetic construct
  misc_feature 1..16: note = synthetic [barcode part1]
  source 1..16: mol_type = other DNA
tgacctaatagagacg

SEQ ID NO: 5894 - DNA, 16 bp, synthetic construct
  misc_feature 1..16: note = synthetic [barcode part1]
  source 1..16: mol_type = other DNA
ttcgaaccgtcttgcg

SEQ ID NO: 5895 - DNA, 16 bp, synthetic construct
  misc_feature 1..16: note = synthetic [barcode part1]
  source 1..16: mol_type = other DNA
caggaccgttaattgc

SEQ ID NO: 5896 - DNA, 16 bp, synthetic construct
  misc_feature 1..16: note = synthetic [barcode part1]
  source 1..16: mol_type = other DNA
tacttcttggtggttg

SEQ ID NO: 5897 - DNA, 16 bp, synthetic construct
  misc_feature 1..16: note = synthetic [barcode part1]
  source 1..16: mol_type = other DNA
cgttagtcggttacag

SEQ ID NO: 5898 - DNA, 16 bp, synthetic construct
  misc_feature 1..16: note = synthetic [barcode part1]
  source 1..16: mol_type = other DNA
tgagaggaccagtgtc

SEQ ID NO: 5899 - DNA, 16 bp, synthetic construct
  misc_feature 1..16: note = synthetic [barcode part1]
  source 1..16: mol_type = other DNA
acagagacacggaagt

SEQ ID NO: 5900 - DNA, 16 bp, synthetic construct
  misc_feature 1..16: note = synthetic [barcode part1]
  source 1..16: mol_type = other DNA
ccaatctaacgacggt

SEQ ID NO: 5901 - DNA, 16 bp, synthetic construct
  misc_feature 1..16: note = synthetic [barcode part1]
  source 1..16: mol_type = other DNA
cagtggatatcactcg

SEQ ID NO: 5902 - DNA, 16 bp, synthetic construct
  misc_feature 1..16: note = synthetic [barcode part1]
  source 1..16: mol_type = other DNA
gcgatatactgcagtc

SEQ ID NO: 5903 - DNA, 16 bp, synthetic construct
  misc_feature 1..16: note = synthetic [barcode part1]
  source 1..16: mol_type = other DNA
gatatcggtgtgtacc

SEQ ID NO: 5904 - DNA, 16 bp, synthetic construct
  misc_feature 1..16: note = synthetic [barcode part1]
  source 1..16: mol_type = other DNA
ccgactcgataacagt

SEQ ID NO: 5905 - DNA, 16 bp, synthetic construct
  misc_feature 1..16: note = synthetic [barcode part1]
  source 1..16: mol_type = other DNA
ttaacagtccgcactt

SEQ ID NO: 5906 - DNA, 16 bp, synthetic construct
  misc_feature 1..16: note = synthetic [barcode part1]
  source 1..16: mol_type = other DNA
tcacaactacgcgtag

SEQ ID NO: 5907 - DNA, 16 bp, synthetic construct
  misc_feature 1..16: note = synthetic [barcode part1]
  source 1..16: mol_type = other DNA
tacggaccactcaagt

SEQ ID NO: 5908 - DNA, 16 bp, synthetic construct
  misc_feature 1..16: note = synthetic [barcode part1]
  source 1..16: mol_type = other DNA
gtgtgtaggtcaactc

SEQ ID NO: 5909 - DNA, 16 bp, synthetic construct
  misc_feature 1..16: note = synthetic [barcode part1]
  source 1..16: mol_type = other DNA
tgcgttagagatcaag

SEQ ID NO: 5910 - DNA, 16 bp, synthetic construct
  misc_feature 1..16: note = synthetic [barcode part1]
  source 1..16: mol_type = other DNA
tatcaccttgtcgcct

SEQ ID NO: 5911 - DNA, 16 bp, synthetic construct
  misc_feature 1..16: note = synthetic [barcode part1]
  source 1..16: mol_type = other DNA
accttgtcctggtctt

SEQ ID NO: 5912 - DNA, 16 bp, synthetic construct
  misc_feature 1..16: note = synthetic [barcode part1]
  source 1..16: mol_type = other DNA
gtgcgtcgcaagatag

SEQ ID NO: 5913 - DNA, 16 bp, synthetic construct
  misc_feature 1..16: note = synthetic [barcode part1]
  source 1..16: mol_type = other DNA
tccgtgtaccagatcc

SEQ ID NO: 5914 - DNA, 16 bp, synthetic construct
  misc_feature 1..16: note = synthetic [barcode part1]
  source 1..16: mol_type = other DNA
acctgcgtgattctcg

SEQ ID NO: 5915 - DNA, 16 bp, synthetic construct
  misc_feature 1..16: note = synthetic [barcode part1]
  source 1..16: mol_type = other DNA
gcgagaactgataatc

SEQ ID NO: 5916 - DNA, 16 bp, synthetic construct
  misc_feature 1..16: note = synthetic [barcode part1]
  source 1..16: mol_type = other DNA
tactctacttaggtgc

SEQ ID NO: 5917 - DNA, 16 bp, synthetic construct
  misc_feature 1..16: note = synthetic [barcode part1]
  source 1..16: mol_type = other DNA
cagttctcaacacact

SEQ ID NO: 5918 - DNA, 16 bp, synthetic construct
  misc_feature 1..16: note = synthetic [barcode part1]
  source 1..16: mol_type = other DNA
tcggtgacctgatagt

SEQ ID NO: 5919 - DNA, 16 bp, synthetic construct
  misc_feature 1..16: note = synthetic [barcode part1]
  source 1..16: mol_type = other DNA
cgtagagtaacggtcg

SEQ ID NO: 5920 - DNA, 16 bp, synthetic construct
  misc_feature 1..16: note = synthetic [barcode part1]
  source 1..16: mol_type = other DNA
tctgttgaacctgtgt

SEQ ID NO: 5921 - DNA, 16 bp, synthetic construct
  misc_feature 1..16: note = synthetic [barcode part1]
  source 1..16: mol_type = other DNA
cgaacgactataacag

SEQ ID NO: 5922 - DNA, 16 bp, synthetic construct
  misc_feature 1..16: note = synthetic [barcode part1]
  source 1..16: mol_type = other DNA
agacaatcacgaactg

SEQ ID NO: 5923 - DNA, 16 bp, synthetic construct
  misc_feature 1..16: note = synthetic [barcode part1]
  source 1..16: mol_type = other DNA
gaagagtaacggtggt

SEQ ID NO: 5924 - DNA, 16 bp, synthetic construct
  misc_feature 1..16: note = synthetic [barcode part1]
  source 1..16: mol_type = other DNA
cagtcggattgtaacc

SEQ ID NO: 5925 - DNA, 16 bp, synthetic construct
  misc_feature 1..16: note = synthetic [barcode part1]
  source 1..16: mol_type = other DNA
cgtaggattagactag

SEQ ID NO: 5926 - DNA, 16 bp, synthetic construct
  misc_feature 1..16: note = synthetic [barcode part1]
  source 1..16: mol_type = other DNA
tatctcgtggacactt

SEQ ID NO: 5927 - DNA, 16 bp, synthetic construct
  misc_feature 1..16: note = synthetic [barcode part1]
  source 1..16: mol_type = other DNA
tacgtgattgttgtcc

SEQ ID NO: 5928 - DNA, 16 bp, synthetic construct
  misc_feature 1..16: note = synthetic [barcode part1]
  source 1..16: mol_type = other DNA
tgtgttcctgtgtcct

SEQ ID NO: 5929 - DNA, 16 bp, synthetic construct
  misc_feature 1..16: note = synthetic [barcode part1]
  source 1..16: mol_type = other DNA
cgcaataacttcaggc

SEQ ID NO: 5930 - DNA, 16 bp, synthetic construct
  misc_feature 1..16: note = synthetic [barcode part1]
  source 1..16: mol_type = other DNA
acacggcgactagaac

SEQ ID NO: 5931 - DNA, 16 bp, synthetic construct
  misc_feature 1..16: note = synthetic [barcode part1]
  source 1..16: mol_type = other DNA
tctcagtgtacggcct

SEQ ID NO: 5932 - DNA, 16 bp, synthetic construct
  misc_feature 1..16: note = synthetic [barcode part1]
  source 1..16: mol_type = other DNA
tctatcgccggacact

SEQ ID NO: 5933 - DNA, 16 bp, synthetic construct
  misc_feature 1..16: note = synthetic [barcode part1]
  source 1..16: mol_type = other DNA
gagactcgtctgtcct

SEQ ID NO: 5934 - DNA, 16 bp, synthetic construct
  misc_feature 1..16: note = synthetic [barcode part1]
  source 1..16: mol_type = other DNA
gtgacagaggtgttcg

SEQ ID NO: 5935 - DNA, 16 bp, synthetic construct
  misc_feature 1..16: note = synthetic [barcode part1]
  source 1..16: mol_type = other DNA
actccgtgcggttatc

SEQ ID NO: 5936 - DNA, 16 bp, synthetic construct
  misc_feature 1..16: note = synthetic [barcode part1]
  source 1..16: mol_type = other DNA
cacggtataggactct

SEQ ID NO: 5937 - DNA, 16 bp, synthetic construct
  misc_feature 1..16: note = synthetic [barcode part1]
  source 1..16: mol_type = other DNA
acgttcagtcctattg

SEQ ID NO: 5938 - DNA, 16 bp, synthetic construct
  misc_feature 1..16: note = synthetic [barcode part1]
  source 1..16: mol_type = other DNA
gtagacgactctggag

SEQ ID NO: 5939 - DNA, 16 bp, synthetic construct
  misc_feature 1..16: note = synthetic [barcode part1]
  source 1..16: mol_type = other DNA
agataaccggttctcg

SEQ ID NO: 5940 - DNA, 16 bp, synthetic construct
  misc_feature 1..16: note = synthetic [barcode part1]
  source 1..16: mol_type = other DNA
gcagtcgtgatatacc

SEQ ID NO: 5941 - DNA, 16 bp, synthetic construct
  misc_feature 1..16: note = synthetic [barcode part1]
  source 1..16: mol_type = other DNA
agttggcgcgtgtatt

SEQ ID NO: 5942 - DNA, 16 bp, synthetic construct
  misc_feature 1..16: note = synthetic [barcode part1]
  source 1..16: mol_type = other DNA
gatctggccttcacgt

SEQ ID NO: 5943 - DNA, 16 bp, synthetic construct
  misc_feature 1..16: note = synthetic [barcode part1]
  source 1..16: mol_type = other DNA
tgtcgatagtcagaag

SEQ ID NO: 5944 - DNA, 16 bp, synthetic construct
  misc_feature 1..16: note = synthetic [barcode part1]
  source 1..16: mol_type = other DNA
taccacagacttcgag

SEQ ID NO: 5945 - DNA, 16 bp, synthetic construct
  misc_feature 1..16: note = synthetic [barcode part1]
  source 1..16: mol_type = other DNA
gattgacggagaagac

SEQ ID NO: 5946 - DNA, 16 bp, synthetic construct
  misc_feature 1..16: note = synthetic [barcode part1]
  source 1..16: mol_type = other DNA
gttgaggacaccagtg

SEQ ID NO: 5947 - DNA, 16 bp, synthetic construct
  misc_feature 1..16: note = synthetic [barcode part1]
  source 1..16: mol_type = other DNA
actccaattggagtcg

SEQ ID NO: 5948 - DNA, 16 bp, synthetic construct
  misc_feature 1..16: note = synthetic [barcode part1]
  source 1..16: mol_type = other DNA
tgacagtaagacgtac

SEQ ID NO: 5949 - DNA, 16 bp, synthetic construct
  misc_feature 1..16: note = synthetic [barcode part1]
  source 1..16: mol_type = other DNA
gtagatcgtgtagtcc

SEQ ID NO: 5950 - DNA, 16 bp, synthetic construct
  misc_feature 1..16: note = synthetic [barcode part1]
  source 1..16: mol_type = other DNA
gcgcgactgtatagtt

SEQ ID NO: 5951 - DNA, 16 bp, synthetic construct
  misc_feature 1..16: note = synthetic [barcode part1]
  source 1..16: mol_type = other DNA
gccgttcctacgaact

SEQ ID NO: 5952 - DNA, 16 bp, synthetic construct
  misc_feature 1..16: note = synthetic [barcode part1]
  source 1..16: mol_type = other DNA
tctcagttataccggt

SEQ ID NO: 5953 - DNA, 16 bp, synthetic construct
  misc_feature 1..16: note = synthetic [barcode part1]
  source 1..16: mol_type = other DNA
gaactacacctggtac

SEQ ID NO: 5954 - DNA, 16 bp, synthetic construct
  misc_feature 1..16: note = synthetic [barcode part1]
  source 1..16: mol_type = other DNA
gatactggaggttctc

SEQ ID NO: 5955 - DNA, 16 bp, synthetic construct
  misc_feature 1..16: note = synthetic [barcode part1]
  source 1..16: mol_type = other DNA
tccgcaggtctataag

SEQ ID NO: 5956 - DNA, 16 bp, synthetic construct
  misc_feature 1..16: note = synthetic [barcode part1]
  source 1..16: mol_type = other DNA
aggttaactgactccg

SEQ ID NO: 5957 - DNA, 16 bp, synthetic construct
  misc_feature 1..16: note = synthetic [barcode part1]
  source 1..16: mol_type = other DNA
ttaaggacggtaggag

SEQ ID NO: 5958 - DNA, 16 bp, synthetic construct
  misc_feature 1..16: note = synthetic [barcode part1]
  source 1..16: mol_type = other DNA
tccgttgtacgtcgac

SEQ ID NO: 5959 - DNA, 16 bp, synthetic construct
  misc_feature 1..16: note = synthetic [barcode part1]
  source 1..16: mol_type = other DNA
aacgtctgcgagacag

SEQ ID NO: 5960 - DNA, 16 bp, synthetic construct
  misc_feature 1..16: note = synthetic [barcode part1]
  source 1..16: mol_type = other DNA
cagttacagactgaag

SEQ ID NO: 5961 - DNA, 16 bp, synthetic construct
  misc_feature 1..16: note = synthetic [barcode part1]
  source 1..16: mol_type = other DNA
tggtgttggtattgcg

SEQ ID NO: 5962 - DNA, 16 bp, synthetic construct
  misc_feature 1..16: note = synthetic [barcode part1]
  source 1..16: mol_type = other DNA
gtgtggaatctctacg

SEQ ID NO: 5963 - DNA, 16 bp, synthetic construct
  misc_feature 1..16: note = synthetic [barcode part1]
  source 1..16: mol_type = other DNA
cgatacagaaggtcgc

SEQ ID NO: 5964 - DNA, 16 bp, synthetic construct
  misc_feature 1..16: note = synthetic [barcode part1]
  source 1..16: mol_type = other DNA
tatcgacgtatcggtg

SEQ ID NO: 5965 - DNA, 16 bp, synthetic construct
  misc_feature 1..16: note = synthetic [barcode part1]
  source 1..16: mol_type = other DNA
agtaccgtgatcggtt

SEQ ID NO: 5966 - DNA, 16 bp, synthetic construct
  misc_feature 1..16: note = synthetic [barcode part1]
  source 1..16: mol_type = other DNA
gaatccgaggtactct

SEQ ID NO: 5967 - DNA, 16 bp, synthetic construct
  misc_feature 1..16: note = synthetic [barcode part1]
  source 1..16: mol_type = other DNA
taccgaacacctccac

SEQ ID NO: 5968 - DNA, 16 bp, synthetic construct
  misc_feature 1..16: note = synthetic [barcode part1]
  source 1..16: mol_type = other DNA
tcgtagtctctggaag

SEQ ID NO: 5969 - DNA, 16 bp, synthetic construct
  misc_feature 1..16: note = synthetic [barcode part1]
  source 1..16: mol_type = other DNA
cgacttcgtatactac

SEQ ID NO: 5970 - DNA, 16 bp, synthetic construct
  misc_feature 1..16: note = synthetic [barcode part1]
  source 1..16: mol_type = other DNA
caggagaatacactac

SEQ ID NO: 5971 - DNA, 16 bp, synthetic construct
  misc_feature 1..16: note = synthetic [barcode part1]
  source 1..16: mol_type = other DNA
ttattcggacgtcgcc

SEQ ID NO: 5972 - DNA, 16 bp, synthetic construct
  misc_feature 1..16: note = synthetic [barcode part1]
  source 1..16: mol_type = other DNA
gtctgttacaggtggt

SEQ ID NO: 5973 - DNA, 16 bp, synthetic construct
  misc_feature 1..16: note = synthetic [barcode part1]
  source 1..16: mol_type = other DNA
gtacggttcctctggt

SEQ ID NO: 5974 - DNA, 16 bp, synthetic construct
  misc_feature 1..16: note = synthetic [barcode part1]
  source 1..16: mol_type = other DNA
tcggagtataagtggt

SEQ ID NO: 5975 - DNA, 16 bp, synthetic construct
  misc_feature 1..16: note = synthetic [barcode part1]
  source 1..16: mol_type = other DNA
gtgatcgtgcacgatt

SEQ ID NO: 5976 - DNA, 16 bp, synthetic construct
  misc_feature 1..16: note = synthetic [barcode part1]
  source 1..16: mol_type = other DNA
caagaatctgtcgaag

SEQ ID NO: 5977 - DNA, 16 bp, synthetic construct
  misc_feature 1..16: note = synthetic [barcode part1]
  source 1..16: mol_type = other DNA
tggtatcaacgaacag

SEQ ID NO: 5978 - DNA, 16 bp, synthetic construct
  misc_feature 1..16: note = synthetic [barcode part1]
  source 1..16: mol_type = other DNA
tccgactgatcaagac

SEQ ID NO: 5979 - DNA, 16 bp, synthetic construct
  misc_feature 1..16: note = synthetic [barcode part1]
  source 1..16: mol_type = other DNA
ccggttgaaccaattg

SEQ ID NO: 5980 - DNA, 16 bp, synthetic construct
  misc_feature 1..16: note = synthetic [barcode part1]
  source 1..16: mol_type = other DNA
agtgcacagttctctt

SEQ ID NO: 5981 - DNA, 16 bp, synthetic construct
  misc_feature 1..16: note = synthetic [barcode part1]
  source 1..16: mol_type = other DNA
aactgacaccagtcac

SEQ ID NO: 5982 - DNA, 16 bp, synthetic construct
  misc_feature 1..16: note = synthetic [barcode part1]
  source 1..16: mol_type = other DNA
tcaacgagtaggaatc

SEQ ID NO: 5983 - DNA, 16 bp, synthetic construct
  misc_feature 1..16: note = synthetic [barcode part1]
  source 1..16: mol_type = other DNA
tactactatctaggcc

SEQ ID NO: 5984 - DNA, 16 bp, synthetic construct
  misc_feature 1..16: note = synthetic [barcode part1]
  source 1..16: mol_type = other DNA
ttgttgccgttcaagt

SEQ ID NO: 5985 - DNA, 16 bp, synthetic construct
  misc_feature 1..16: note = synthetic [barcode part1]
  source 1..16: mol_type = other DNA
tctagttattggcgtc

SEQ ID NO: 5986 - DNA, 16 bp, synthetic construct
  misc_feature 1..16: note = synthetic [barcode part1]
  source 1..16: mol_type = other DNA
gtattggcgataagac

SEQ ID NO: 5987 - DNA, 16 bp, synthetic construct
  misc_feature 1..16: note = synthetic [barcode part1]
  source 1..16: mol_type = other DNA
agatccaacggagtgc

SEQ ID NO: 5988 - DNA, 16 bp, synthetic construct
  misc_feature 1..16: note = synthetic [barcode part1]
  source 1..16: mol_type = other DNA
atcgtcacgtaagaag

SEQ ID NO: 5989 - DNA, 16 bp, synthetic construct
  misc_feature 1..16: note = synthetic [barcode part1]
  source 1..16: mol_type = other DNA
gagtacgtcgacaacg

SEQ ID NO: 5990 - DNA, 16 bp, synthetic construct
  misc_feature 1..16: note = synthetic [barcode part1]
  source 1..16: mol_type = other DNA
gtccgtcgtagatagt

SEQ ID NO: 5991 - DNA, 16 bp, synthetic construct
  misc_feature 1..16: note = synthetic [barcode part1]
  source 1..16: mol_type = other DNA
aagtagtctggcgcag

SEQ ID NO: 5992 - DNA, 16 bp, synthetic construct
  misc_feature 1..16: note = synthetic [barcode part1]
  source 1..16: mol_type = other DNA
ccttaagactccagag

SEQ ID NO: 5993 - DNA, 16 bp, synthetic construct
  misc_feature 1..16: note = synthetic [barcode part1]
  source 1..16: mol_type = other DNA
tcgaatccgacaactg

SEQ ID NO: 5994 - DNA, 16 bp, synthetic construct
  misc_feature 1..16: note = synthetic [barcode part1]
  source 1..16: mol_type = other DNA
gcgtattctactgttg

SEQ ID NO: 5995 - DNA, 16 bp, synthetic construct
  misc_feature 1..16: note = synthetic [barcode part1]
  source 1..16: mol_type = other DNA
ttctgcgcaatagttc

SEQ ID NO: 5996 - DNA, 16 bp, synthetic construct
  misc_feature 1..16: note = synthetic [barcode part1]
  source 1..16: mol_type = other DNA
tctagtcgaggttggt

SEQ ID NO: 5997 - DNA, 16 bp, synthetic construct
  misc_feature 1..16: note = synthetic [barcode part1]
  source 1..16: mol_type = other DNA
gatactgtgaccgatc

SEQ ID NO: 5998 - DNA, 16 bp, synthetic construct
  misc_feature 1..16: note = synthetic [barcode part1]
  source 1..16: mol_type = other DNA
tgtctcaacctacagt

SEQ ID NO: 5999 - DNA, 16 bp, synthetic construct
  misc_feature 1..16: note = synthetic [barcode part1]
  source 1..16: mol_type = other DNA
cctgtactcttacgtc

SEQ ID NO: 6000 - DNA, 16 bp, synthetic construct
  misc_feature 1..16: note = synthetic [barcode part1]
  source 1..16: mol_type = other DNA
tagacggactctggag

SEQ ID NO: 6001 - DNA, 16 bp, synthetic construct
  misc_feature 1..16: note = synthetic [barcode part1]
  source 1..16: mol_type = other DNA
gcacagatctataccg

SEQ ID NO: 6002 - DNA, 16 bp, synthetic construct
  misc_feature 1..16: note = synthetic [barcode part1]
  source 1..16: mol_type = other DNA
acgaacggaacctcag

SEQ ID NO: 6003 - DNA, 16 bp, synthetic construct
  misc_feature 1..16: note = synthetic [barcode part1]
  source 1..16: mol_type = other DNA
tacctccttggtgacg

SEQ ID NO: 6004 - DNA, 16 bp, synthetic construct
  misc_feature 1..16: note = synthetic [barcode part1]
  source 1..16: mol_type = other DNA
acgtagtcttcctaac

SEQ ID NO: 6005 - DNA, 16 bp, synthetic construct
  misc_feature 1..16: note = synthetic [barcode part1]
  source 1..16: mol_type = other DNA
gtattcgtccagacag

SEQ ID NO: 6006 - DNA, 16 bp, synthetic construct
  misc_feature 1..16: note = synthetic [barcode part1]
  source 1..16: mol_type = other DNA
caacgtgccttcgact

SEQ ID NO: 6007 - DNA, 16 bp, synthetic construct
  misc_feature 1..16: note = synthetic [barcode part1]
  source 1..16: mol_type = other DNA
cggagaacagttatac

SEQ ID NO: 6008 - DNA, 16 bp, synthetic construct
  misc_feature 1..16: note = synthetic [barcode part1]
  source 1..16: mol_type = other DNA
ttccggtctctactac

SEQ ID NO: 6009 - DNA, 16 bp, synthetic construct
  misc_feature 1..16: note = synthetic [barcode part1]
  source 1..16: mol_type = other DNA
gtacacacgattggtc

SEQ ID NO: 6010 - DNA, 16 bp, synthetic construct
  misc_feature 1..16: note = synthetic [barcode part1]
  source 1..16: mol_type = other DNA
cgagaggtacgtaatt

SEQ ID NO: 6011 - DNA, 16 bp, synthetic construct
  misc_feature 1..16: note = synthetic [barcode part1]
  source 1..16: mol_type = other DNA
cactctataggtgtct

SEQ ID NO: 6012 - DNA, 16 bp, synthetic construct
  misc_feature 1..16: note = synthetic [barcode part1]
  source 1..16: mol_type = other DNA
gattggttggtcgatc

SEQ ID NO: 6013 - DNA, 16 bp, synthetic construct
  misc_feature 1..16: note = synthetic [barcode part1]
  source 1..16: mol_type = other DNA
actacgttcgaacgtg

SEQ ID NO: 6014 - DNA, 16 bp, synthetic construct
  misc_feature 1..16: note = synthetic [barcode part1]
  source 1..16: mol_type = other DNA
agagtggaagtccgtc

SEQ ID NO: 6015 - DNA, 16 bp, synthetic construct
  misc_feature 1..16: note = synthetic [barcode part1]
  source 1..16: mol_type = other DNA
aacctgacctctgcac

SEQ ID NO: 6016 - DNA, 16 bp, synthetic construct
  misc_feature 1..16: note = synthetic [barcode part1]
  source 1..16: mol_type = other DNA
taagttacgcacttcc

SEQ ID NO: 6017 - DNA, 16 bp, synthetic construct
  misc_feature 1..16: note = synthetic [barcode part1]
  source 1..16: mol_type = other DNA
cgtcacggtattacag

SEQ ID NO: 6018 - DNA, 16 bp, synthetic construct
  misc_feature 1..16: note = synthetic [barcode part1]
  source 1..16: mol_type = other DNA
cacagttcttctaacg

SEQ ID NO: 6019 - DNA, 16 bp, synthetic construct
  misc_feature 1..16: note = synthetic [barcode part1]
  source 1..16: mol_type = other DNA
cctagaagttgcgatc

SEQ ID NO: 6020 - DNA, 16 bp, synthetic construct
  misc_feature 1..16: note = synthetic [barcode part1]
  source 1..16: mol_type = other DNA
gtcacgacagagttct

SEQ ID NO: 6021 - DNA, 16 bp, synthetic construct
  misc_feature 1..16: note = synthetic [barcode part1]
  source 1..16: mol_type = other DNA
tatcggaacggtctac

SEQ ID NO: 6022 - DNA, 16 bp, synthetic construct
  misc_feature 1..16: note = synthetic [barcode part1]
  source 1..16: mol_type = other DNA
acttcgtcttgtgagt

SEQ ID NO: 6023 - DNA, 16 bp, synthetic construct
  misc_feature 1..16: note = synthetic [barcode part1]
  source 1..16: mol_type = other DNA
gtacaacacgtcgatc

SEQ ID NO: 6024 - DNA, 16 bp, synthetic construct
  misc_feature 1..16: note = synthetic [barcode part1]
  source 1..16: mol_type = other DNA
acgacaggtccaagtg

SEQ ID NO: 6025 - DNA, 16 bp, synthetic construct
  misc_feature 1..16: note = synthetic [barcode part1]
  source 1..16: mol_type = other DNA
ttgcagataggtccac

SEQ ID NO: 6026 - DNA, 16 bp, synthetic construct
  misc_feature 1..16: note = synthetic [barcode part1]
  source 1..16: mol_type = other DNA
cgtggaaccagatcag

SEQ ID NO: 6027 - DNA, 16 bp, synthetic construct
  misc_feature 1..16: note = synthetic [barcode part1]
  source 1..16: mol_type = other DNA
aagtattgtggtaggc

SEQ ID NO: 6028 - DNA, 16 bp, synthetic construct
  misc_feature 1..16: note = synthetic [barcode part1]
  source 1..16: mol_type = other DNA
gcctgaaggcagaact

SEQ ID NO: 6029 - DNA, 16 bp, synthetic construct
  misc_feature 1..16: note = synthetic [barcode part1]
  source 1..16: mol_type = other DNA
cctcttgagatcgaag

SEQ ID NO: 6030 - DNA, 16 bp, synthetic construct
  misc_feature 1..16: note = synthetic [barcode part1]
  source 1..16: mol_type = other DNA
attctcaatcctcgcc

SEQ ID NO: 6031 - DNA, 16 bp, synthetic construct
  misc_feature 1..16: note = synthetic [barcode part1]
  source 1..16: mol_type = other DNA
aataccggaccaatcc

SEQ ID NO: 6032 - DNA, 16 bp, synthetic construct
  misc_feature 1..16: note = synthetic [barcode part1]
  source 1..16: mol_type = other DNA
caatcactattccacg

SEQ ID NO: 6033 - DNA, 16 bp, synthetic construct
  misc_feature 1..16: note = synthetic [barcode part1]
  source 1..16: mol_type = other DNA
ttaagtgagacgacgt

SEQ ID NO: 6034 - DNA, 16 bp, synthetic construct
  misc_feature 1..16: note = synthetic [barcode part1]
  source 1..16: mol_type = other DNA
tcctgcgttgaattgt

SEQ ID NO: 6035 - DNA, 16 bp, synthetic construct
  misc_feature 1..16: note = synthetic [barcode part1]
  source 1..16: mol_type = other DNA
ttgtgcacagttgcag

SEQ ID NO: 6036 - DNA, 16 bp, synthetic construct
  misc_feature 1..16: note = synthetic [barcode part1]
  source 1..16: mol_type = other DNA
acacactaacaacgag

SEQ ID NO: 6037 - DNA, 16 bp, synthetic construct
  misc_feature 1..16: note = synthetic [barcode part1]
  source 1..16: mol_type = other DNA
ttcggttcagtgtact

SEQ ID NO: 6038 - DNA, 16 bp, synthetic construct
  misc_feature 1..16: note = synthetic [barcode part1]
  source 1..16: mol_type = other DNA
gccactcctgtaggtt

SEQ ID NO: 6039 - DNA, 16 bp, synthetic construct
  misc_feature 1..16: note = synthetic [barcode part1]
  source 1..16: mol_type = other DNA
gttcctcgtacaccag

SEQ ID NO: 6040 - DNA, 16 bp, synthetic construct
  misc_feature 1..16: note = synthetic [barcode part1]
  source 1..16: mol_type = other DNA
gtctattctcaagacc

SEQ ID NO: 6041 - DNA, 16 bp, synthetic construct
  misc_feature 1..16: note = synthetic [barcode part1]
  source 1..16: mol_type = other DNA
aaggttccttggaacc

SEQ ID NO: 6042 - DNA, 16 bp, synthetic construct
  misc_feature 1..16: note = synthetic [barcode part1]
  source 1..16: mol_type = other DNA
ataacagagtggcgag

SEQ ID NO: 6043 - DNA, 16 bp, synthetic construct
  misc_feature 1..16: note = synthetic [barcode part1]
  source 1..16: mol_type = other DNA
aacgtactaatcgcgc

SEQ ID NO: 6044 - DNA, 16 bp, synthetic construct
  misc_feature 1..16: note = synthetic [barcode part1]
  source 1..16: mol_type = other DNA
cagataagacactgtg

SEQ ID NO: 6045 - DNA, 16 bp, synthetic construct
  misc_feature 1..16: note = synthetic [barcode part1]
  source 1..16: mol_type = other DNA
cgagaggcgtataatt

SEQ ID NO: 6046 - DNA, 16 bp, synthetic construct
  misc_feature 1..16: note = synthetic [barcode part1]
  source 1..16: mol_type = other DNA
gaggtggtgtctgagt

SEQ ID NO: 6047 - DNA, 16 bp, synthetic construct
  misc_feature 1..16: note = synthetic [barcode part1]
  source 1..16: mol_type = other DNA
caggaggttaactcct

SEQ ID NO: 6048 - DNA, 16 bp, synthetic construct
  misc_feature 1..16: note = synthetic [barcode part1]
  source 1..16: mol_type = other DNA
agtactggtcacagtc

SEQ ID NO: 6049 - DNA, 16 bp, synthetic construct
  misc_feature 1..16: note = synthetic [barcode part1]
  source 1..16: mol_type = other DNA
gtggagattgaactac

SEQ ID NO: 6050 - DNA, 16 bp, synthetic construct
  misc_feature 1..16: note = synthetic [barcode part1]
  source 1..16: mol_type = other DNA
cgacaatcgacagttc

SEQ ID NO: 6051 - DNA, 16 bp, synthetic construct
  misc_feature 1..16: note = synthetic [barcode part1]
  source 1..16: mol_type = other DNA
gaagtcctccggaatt

SEQ ID NO: 6052 - DNA, 16 bp, synthetic construct
  misc_feature 1..16: note = synthetic [barcode part1]
  source 1..16: mol_type = other DNA
tcagacacaccgttcc

SEQ ID NO: 6053 - DNA, 16 bp, synthetic construct
  misc_feature 1..16: note = synthetic [barcode part1]
  source 1..16: mol_type = other DNA
accgtattcggtgtag

SEQ ID NO: 6054 - DNA, 16 bp, synthetic construct
  misc_feature 1..16: note = synthetic [barcode part1]
  source 1..16: mol_type = other DNA
tagtgtcacaagtgag

SEQ ID NO: 6055 - DNA, 16 bp, synthetic construct
  misc_feature 1..16: note = synthetic [barcode part1]
  source 1..16: mol_type = other DNA
tgtacaggtccgaatc

SEQ ID NO: 6056 - DNA, 16 bp, synthetic construct
  misc_feature 1..16: note = synthetic [barcode part1]
  source 1..16: mol_type = other DNA
gcacaatagagttgac

SEQ ID NO: 6057 - DNA, 16 bp, synthetic construct
  misc_feature 1..16: note = synthetic [barcode part1]
  source 1..16: mol_type = other DNA
taatctccgtgaccgc

SEQ ID NO: 6058 - DNA, 16 bp, synthetic construct
  misc_feature 1..16: note = synthetic [barcode part1]
  source 1..16: mol_type = other DNA
cagacactgtgagtct

SEQ ID NO: 6059 - DNA, 16 bp, synthetic construct
  misc_feature 1..16: note = synthetic [barcode part1]
  source 1..16: mol_type = other DNA
gtgcgtgaatcttgac

SEQ ID NO: 6060 - DNA, 16 bp, synthetic construct
  misc_feature 1..16: note = synthetic [barcode part1]
  source 1..16: mol_type = other DNA
tgcacctctgtcgaac

SEQ ID NO: 6061 - DNA, 16 bp, synthetic construct
  misc_feature 1..16: note = synthetic [barcode part1]
  source 1..16: mol_type = other DNA
caatctgtaccagacg

SEQ ID NO: 6062 - DNA, 16 bp, synthetic construct
  misc_feature 1..16: note = synthetic [barcode part1]
  source 1..16: mol_type = other DNA
acgcgtactaggactt

SEQ ID NO: 6063 - DNA, 16 bp, synthetic construct
  misc_feature 1..16: note = synthetic [barcode part1]
  source 1..16: mol_type = other DNA
caggagacacgtagtc

SEQ ID NO: 6064 - DNA, 16 bp, synthetic construct
  misc_feature 1..16: note = synthetic [barcode part1]
  source 1..16: mol_type = other DNA
ttgactctcacacagt

SEQ ID NO: 6065 - DNA, 16 bp, synthetic construct
  misc_feature 1..16: note = synthetic [barcode part1]
  source 1..16: mol_type = other DNA
gtcagatacaacctgc

SEQ ID NO: 6066 - DNA, 16 bp, synthetic construct
  misc_feature 1..16: note = synthetic [barcode part1]
  source 1..16: mol_type = other DNA
gacgaacttacctacg

SEQ ID NO: 6067 - DNA, 16 bp, synthetic construct
  misc_feature 1..16: note = synthetic [barcode part1]
  source 1..16: mol_type = other DNA
agatattggacggtac

SEQ ID NO: 6068 - DNA, 16 bp, synthetic construct
  misc_feature 1..16: note = synthetic [barcode part1]
  source 1..16: mol_type = other DNA
tccagtctataatcgc

SEQ ID NO: 6069 - DNA, 16 bp, synthetic construct
  misc_feature 1..16: note = synthetic [barcode part1]
  source 1..16: mol_type = other DNA
attaacggtcctctgt

SEQ ID NO: 6070 - DNA, 16 bp, synthetic construct
  misc_feature 1..16: note = synthetic [barcode part1]
  source 1..16: mol_type = other DNA
gttcaggtctgttgtt

SEQ ID NO: 6071 - DNA, 16 bp, synthetic construct
  misc_feature 1..16: note = synthetic [barcode part1]
  source 1..16: mol_type = other DNA
agtagagaccggaagt

SEQ ID NO: 6072 - DNA, 16 bp, synthetic construct
  misc_feature 1..16: note = synthetic [barcode part1]
  source 1..16: mol_type = other DNA
gattcgaatcgccaac

SEQ ID NO: 6073 - DNA, 16 bp, synthetic construct
  misc_feature 1..16: note = synthetic [barcode part1]
  source 1..16: mol_type = other DNA
cacacaagtggaatac

SEQ ID NO: 6074 - DNA, 16 bp, synthetic construct
  misc_feature 1..16: note = synthetic [barcode part1]
  source 1..16: mol_type = other DNA
taccacctacttcgtc

SEQ ID NO: 6075 - DNA, 16 bp, synthetic construct
  misc_feature 1..16: note = synthetic [barcode part1]
  source 1..16: mol_type = other DNA
cggacacagtctatac

SEQ ID NO: 6076 - DNA, 16 bp, synthetic construct
  misc_feature 1..16: note = synthetic [barcode part1]
  source 1..16: mol_type = other DNA
ccgtatcttgtactcc

SEQ ID NO: 6077 - DNA, 16 bp, synthetic construct
  misc_feature 1..16: note = synthetic [barcode part1]
  source 1..16: mol_type = other DNA
acgtcaatccttaacc

SEQ ID NO: 6078 - DNA, 16 bp, synthetic construct
  misc_feature 1..16: note = synthetic [barcode part1]
  source 1..16: mol_type = other DNA
attcttgacctgacac

SEQ ID NO: 6079 - DNA, 16 bp, synthetic construct
  misc_feature 1..16: note = synthetic [barcode part1]
  source 1..16: mol_type = other DNA
aacaccgaccgtaact

SEQ ID NO: 6080 - DNA, 16 bp, synthetic construct
  misc_feature 1..16: note = synthetic [barcode part1]
  source 1..16: mol_type = other DNA
tcgccgattgaatcag

SEQ ID NO: 6081 - DNA, 16 bp, synthetic construct
  misc_feature 1..16: note = synthetic [barcode part1]
  source 1..16: mol_type = other DNA
gcggaattcgtgaacg

SEQ ID NO: 6082 - DNA, 16 bp, synthetic construct
  misc_feature 1..16: note = synthetic [barcode part1]
  source 1..16: mol_type = other DNA
gtatcggtgtagacct

SEQ ID NO: 6083 - DNA, 16 bp, synthetic construct
  misc_feature 1..16: note = synthetic [barcode part1]
  source 1..16: mol_type = other DNA
tctaacgcgtctccag

SEQ ID NO: 6084 - DNA, 16 bp, synthetic construct
  misc_feature 1..16: note = synthetic [barcode part1]
  source 1..16: mol_type = other DNA
tctcaatacgcagttc

SEQ ID NO: 6085 - DNA, 16 bp, synthetic construct
  misc_feature 1..16: note = synthetic [barcode part1]
  source 1..16: mol_type = other DNA
attattcggcgttcgt

SEQ ID NO: 6086 - DNA, 16 bp, synthetic construct
  misc_feature 1..16: note = synthetic [barcode part1]
  source 1..16: mol_type = other DNA
cctcaatctggatact

SEQ ID NO: 6087 - DNA, 16 bp, synthetic construct
  misc_feature 1..16: note = synthetic [barcode part1]
  source 1..16: mol_type = other DNA
acacaacacactggtc

SEQ ID NO: 6088 - DNA, 16 bp, synthetic construct
  misc_feature 1..16: note = synthetic [barcode part1]
  source 1..16: mol_type = other DNA
gcactctcggtgattc

SEQ ID NO: 6089 - DNA, 16 bp, synthetic construct
  misc_feature 1..16: note = synthetic [barcode part1]
  source 1..16: mol_type = other DNA
cagagaggcaccaatc

SEQ ID NO: 6090 - DNA, 16 bp, synthetic construct
  misc_feature 1..16: note = synthetic [barcode part1]
  source 1..16: mol_type = other DNA
tcgagtacttggacac

SEQ ID NO: 6091 - DNA, 16 bp, synthetic construct
  misc_feature 1..16: note = synthetic [barcode part1]
  source 1..16: mol_type = other DNA
cggcctcgtactaatc

SEQ ID NO: 6092 - DNA, 16 bp, synthetic construct
  misc_feature 1..16: note = synthetic [barcode part1]
  source 1..16: mol_type = other DNA
attctaacacggtgcg

SEQ ID NO: 6093 - DNA, 16 bp, synthetic construct
  misc_feature 1..16: note = synthetic [barcode part1]
  source 1..16: mol_type = other DNA
ccttgtatctcgcgtt

SEQ ID NO: 6094 - DNA, 16 bp, synthetic construct
  misc_feature 1..16: note = synthetic [barcode part1]
  source 1..16: mol_type = other DNA
gtgcacgcaattagtc

SEQ ID NO: 6095 - DNA, 16 bp, synthetic construct
  misc_feature 1..16: note = synthetic [barcode part1]
  source 1..16: mol_type = other DNA
gttcttagtgacttgc

SEQ ID NO: 6096 - DNA, 16 bp, synthetic construct
  misc_feature 1..16: note = synthetic [barcode part1]
  source 1..16: mol_type = other DNA
tgcacttggattgtct

SEQ ID NO: 6097 - DNA, 16 bp, synthetic construct
  misc_feature 1..16: note = synthetic [barcode part1]
  source 1..16: mol_type = other DNA
tcggaagtgatcttcg

SEQ ID NO: 6098 - DNA, 16 bp, synthetic construct
  misc_feature 1..16: note = synthetic [barcode part1]
  source 1..16: mol_type = other DNA
gaggacgtaagttact

SEQ ID NO: 6099 - DNA, 16 bp, synthetic construct
  misc_feature 1..16: note = synthetic [barcode part1]
  source 1..16: mol_type = other DNA
tgatagttcggcgact

SEQ ID NO: 6100 - DNA, 16 bp, synthetic construct
  misc_feature 1..16: note = synthetic [barcode part1]
  source 1..16: mol_type = other DNA
ttagtcgatacgcgtg

SEQ ID NO: 6101 - DNA, 16 bp, synthetic construct
  misc_feature 1..16: note = synthetic [barcode part1]
  source 1..16: mol_type = other DNA
agtggactaagattcg

SEQ ID NO: 6102 - DNA, 16 bp, synthetic construct
  misc_feature 1..16: note = synthetic [barcode part1]
  source 1..16: mol_type = other DNA
tcggtgacagactact

SEQ ID NO: 6103 - DNA, 16 bp, synthetic construct
  misc_feature 1..16: note = synthetic [barcode part1]
  source 1..16: mol_type = other DNA
agaatacaaggcgcag

SEQ ID NO: 6104 - DNA, 16 bp, synthetic construct
  misc_feature 1..16: note = synthetic [barcode part1]
  source 1..16: mol_type = other DNA
acgcgatctgagaggt

SEQ ID NO: 6105 - DNA, 16 bp, synthetic construct
  misc_feature 1..16: note = synthetic [barcode part1]
  source 1..16: mol_type = other DNA
tgtctgagtacgactg

SEQ ID NO: 6106 - DNA, 16 bp, synthetic construct
  misc_feature 1..16: note = synthetic [barcode part1]
  source 1..16: mol_type = other DNA
gaactctgtatcgcag

SEQ ID NO: 6107 - DNA, 16 bp, synthetic construct
  misc_feature 1..16: note = synthetic [barcode part1]
  source 1..16: mol_type = other DNA
gttgtggacggacagt

SEQ ID NO: 6108 - DNA, 16 bp, synthetic construct
  misc_feature 1..16: note = synthetic [barcode part1]
  source 1..16: mol_type = other DNA
gcaagtgtaggtagag

SEQ ID NO: 6109 - DNA, 16 bp, synthetic construct
  misc_feature 1..16: note = synthetic [barcode part1]
  source 1..16: mol_type = other DNA
gttctcggcaattcgc

SEQ ID NO: 6110 - DNA, 16 bp, synthetic construct
  misc_feature 1..16: note = synthetic [barcode part1]
  source 1..16: mol_type = other DNA
agacggttgtaccgag

SEQ ID NO: 6111 - DNA, 16 bp, synthetic construct
  misc_feature 1..16: note = synthetic [barcode part1]
  source 1..16: mol_type = other DNA
ttggtgaaggttgtcc

SEQ ID NO: 6112 - DNA, 16 bp, synthetic construct
  misc_feature 1..16: note = synthetic [barcode part1]
  source 1..16: mol_type = other DNA
aattggcagagaaggc

SEQ ID NO: 6113 - DNA, 16 bp, synthetic construct
  misc_feature 1..16: note = synthetic [barcode part1]
  source 1..16: mol_type = other DNA
tcgaacaacaataggc

SEQ ID NO: 6114 - DNA, 16 bp, synthetic construct
  misc_feature 1..16: note = synthetic [barcode part1]
  source 1..16: mol_type = other DNA
ttccgatagtcacgtt

SEQ ID NO: 6115 - DNA, 16 bp, synthetic construct
  misc_feature 1..16: note = synthetic [barcode part1]
  source 1..16: mol_type = other DNA
cgtgaagatacggaag

SEQ ID NO: 6116 - DNA, 16 bp, synthetic construct
  misc_feature 1..16: note = synthetic [barcode part1]
  source 1..16: mol_type = other DNA
aattactctgccggag

SEQ ID NO: 6117 - DNA, 16 bp, synthetic construct
  misc_feature 1..16: note = synthetic [barcode part1]
  source 1..16: mol_type = other DNA
ttgttcgccgcagtgt

SEQ ID NO: 6118 - DNA, 16 bp, synthetic construct
  misc_feature 1..16: note = synthetic [barcode part1]
  source 1..16: mol_type = other DNA
tctgttatcggcgtgc

SEQ ID NO: 6119 - DNA, 16 bp, synthetic construct
  misc_feature 1..16: note = synthetic [barcode part1]
  source 1..16: mol_type = other DNA
cggtctctctcaatct

SEQ ID NO: 6120 - DNA, 16 bp, synthetic construct
  misc_feature 1..16: note = synthetic [barcode part1]
  source 1..16: mol_type = other DNA
gaccaaggcaactgtg

SEQ ID NO: 6121 - DNA, 16 bp, synthetic construct
  misc_feature 1..16: note = synthetic [barcode part1]
  source 1..16: mol_type = other DNA
atccgttggtgccact

SEQ ID NO: 6122 - DNA, 16 bp, synthetic construct
  misc_feature 1..16: note = synthetic [barcode part1]
  source 1..16: mol_type = other DNA
gtctgtaatacggtcg

SEQ ID NO: 6123 - DNA, 16 bp, synthetic construct
  misc_feature 1..16: note = synthetic [barcode part1]
  source 1..16: mol_type = other DNA
tccgtggtattattcg

SEQ ID NO: 6124 - DNA, 16 bp, synthetic construct
  misc_feature 1..16: note = synthetic [barcode part1]
  source 1..16: mol_type = other DNA
atctcgaccaatcgag

SEQ ID NO: 6125 - DNA, 16 bp, synthetic construct
  misc_feature 1..16: note = synthetic [barcode part1]
  source 1..16: mol_type = other DNA
aacaccgagagagagt

SEQ ID NO: 6126 - DNA, 16 bp, synthetic construct
  misc_feature 1..16: note = synthetic [barcode part1]
  source 1..16: mol_type = other DNA
cagtctccgtgtagtc

SEQ ID NO: 6127 - DNA, 16 bp, synthetic construct
  misc_feature 1..16: note = synthetic [barcode part1]
  source 1..16: mol_type = other DNA
ccggtggtcgtattct

SEQ ID NO: 6128 - DNA, 16 bp, synthetic construct
  misc_feature 1..16: note = synthetic [barcode part1]
  source 1..16: mol_type = other DNA
ttgttgcagatccact

SEQ ID NO: 6129 - DNA, 16 bp, synthetic construct
  misc_feature 1..16: note = synthetic [barcode part1]
  source 1..16: mol_type = other DNA
agtcaacgtaccacac

SEQ ID NO: 6130 - DNA, 16 bp, synthetic construct
  misc_feature 1..16: note = synthetic [barcode part1]
  source 1..16: mol_type = other DNA
gttgtcaagtcaccag

SEQ ID NO: 6131 - DNA, 16 bp, synthetic construct
  misc_feature 1..16: note = synthetic [barcode part1]
  source 1..16: mol_type = other DNA
aagaactattgcgcag

SEQ ID NO: 6132 - DNA, 16 bp, synthetic construct
  misc_feature 1..16: note = synthetic [barcode part1]
  source 1..16: mol_type = other DNA
agttctggatatcgcg

SEQ ID NO: 6133 - DNA, 16 bp, synthetic construct
  misc_feature 1..16: note = synthetic [barcode part1]
  source 1..16: mol_type = other DNA
aattgtggccgacact

SEQ ID NO: 6134 - DNA, 16 bp, synthetic construct
  misc_feature 1..16: note = synthetic [barcode part1]
  source 1..16: mol_type = other DNA
acgtcctctggattgc

SEQ ID NO: 6135 - DNA, 16 bp, synthetic construct
  misc_feature 1..16: note = synthetic [barcode part1]
  source 1..16: mol_type = other DNA
cctatacaatcaccgt

SEQ ID NO: 6136 - DNA, 16 bp, synthetic construct
  misc_feature 1..16: note = synthetic [barcode part1]
  source 1..16: mol_type = other DNA
agtccggtataagaac

SEQ ID NO: 6137 - DNA, 16 bp, synthetic construct
  misc_feature 1..16: note = synthetic [barcode part1]
  source 1..16: mol_type = other DNA
taccagttgacgtgtg

SEQ ID NO: 6138 - DNA, 16 bp, synthetic construct
  misc_feature 1..16: note = synthetic [barcode part1]
  source 1..16: mol_type = other DNA
ccggtacctagtcttg

SEQ ID NO: 6139 - DNA, 16 bp, synthetic construct
  misc_feature 1..16: note = synthetic [barcode part1]
  source 1..16: mol_type = other DNA
tactggaagacgtaac

SEQ ID NO: 6140 - DNA, 16 bp, synthetic construct
  misc_feature 1..16: note = synthetic [barcode part1]
  source 1..16: mol_type = other DNA
tcagttcggcaacagt

SEQ ID NO: 6141 - DNA, 16 bp, synthetic construct
  misc_feature 1..16: note = synthetic [barcode part1]
  source 1..16: mol_type = other DNA
gatctcaagtaccacg

SEQ ID NO: 6142 - DNA, 16 bp, synthetic construct
  misc_feature 1..16: note = synthetic [barcode part1]
  source 1..16: mol_type = other DNA
ccacctatattgtgac

SEQ ID NO: 6143 - DNA, 16 bp, synthetic construct
  misc_feature 1..16: note = synthetic [barcode part1]
  source 1..16: mol_type = other DNA
tgcgttaggaagattg

SEQ ID NO: 6144 - DNA, 16 bp, synthetic construct
  misc_feature 1..16: note = synthetic [barcode part1]
  source 1..16: mol_type = other DNA
tcgtaactctctcctg

SEQ ID NO: 6145 - DNA, 16 bp, synthetic construct
  misc_feature 1..16: note = synthetic [barcode part1]
  source 1..16: mol_type = other DNA
atcgtctataggtcct

SEQ ID NO: 6146 - DNA, 16 bp, synthetic construct
  misc_feature 1..16: note = synthetic [barcode part1]
  source 1..16: mol_type = other DNA
gtcagtgtccgactct

SEQ ID NO: 6147 - DNA, 16 bp, synthetic construct
  misc_feature 1..16: note = synthetic [barcode part1]
  source 1..16: mol_type = other DNA
tacaatacctgcctac

SEQ ID NO: 6148 - DNA, 16 bp, synthetic construct
  misc_feature 1..16: note = synthetic [barcode part1]
  source 1..16: mol_type = other DNA
gcgaacacctattcag

SEQ ID NO: 6149 - DNA, 16 bp, synthetic construct
  misc_feature 1..16: note = synthetic [barcode part1]
  source 1..16: mol_type = other DNA
atacttcaaggcgcac

SEQ ID NO: 6150 - DNA, 16 bp, synthetic construct
  misc_feature 1..16: note = synthetic [barcode part1]
  source 1..16: mol_type = other DNA
acttgaaggcaggatt

SEQ ID NO: 6151 - DNA, 16 bp, synthetic construct
  misc_feature 1..16: note = synthetic [barcode part1]
  source 1..16: mol_type = other DNA
cgaagtgccacacaag

SEQ ID NO: 6152 - DNA, 16 bp, synthetic construct
  misc_feature 1..16: note = synthetic [barcode part1]
  source 1..16: mol_type = other DNA
cacagtattcgttcac

SEQ ID NO: 6153 - DNA, 16 bp, synthetic construct
  misc_feature 1..16: note = synthetic [barcode part1]
  source 1..16: mol_type = other DNA
ttcctcgtctacggag

SEQ ID NO: 6154 - DNA, 16 bp, synthetic construct
  misc_feature 1..16: note = synthetic [barcode part1]
  source 1..16: mol_type = other DNA
gttcagaatctgtggc

SEQ ID NO: 6155 - DNA, 16 bp, synthetic construct
  misc_feature 1..16: note = synthetic [barcode part1]
  source 1..16: mol_type = other DNA
tgcggatccaccttgt

SEQ ID NO: 6156 - DNA, 16 bp, synthetic construct
  misc_feature 1..16: note = synthetic [barcode part1]
  source 1..16: mol_type = other DNA
gtatcttgccgagtcc

SEQ ID NO: 6157 - DNA, 16 bp, synthetic construct
  misc_feature 1..16: note = synthetic [barcode part1]
  source 1..16: mol_type = other DNA
tgtcgaggttcttgtt

SEQ ID NO: 6158 - DNA, 16 bp, synthetic construct
  misc_feature 1..16: note = synthetic [barcode part1]
  source 1..16: mol_type = other DNA
gagttgttatccttgc

SEQ ID NO: 6159 - DNA, 16 bp, synthetic construct
  misc_feature 1..16: note = synthetic [barcode part1]
  source 1..16: mol_type = other DNA
caattcctctcgacct

SEQ ID NO: 6160 - DNA, 16 bp, synthetic construct
  misc_feature 1..16: note = synthetic [barcode part1]
  source 1..16: mol_type = other DNA
tgagttcctacaggtg

SEQ ID NO: 6161 - DNA, 16 bp, synthetic construct
  misc_feature 1..16: note = synthetic [barcode part1]
  source 1..16: mol_type = other DNA
acgttgacgcaagttc

SEQ ID NO: 6162 - DNA, 16 bp, synthetic construct
  misc_feature 1..16: note = synthetic [barcode part1]
  source 1..16: mol_type = other DNA
agaacaggtcctacct

SEQ ID NO: 6163 - DNA, 16 bp, synthetic construct
  misc_feature 1..16: note = synthetic [barcode part1]
  source 1..16: mol_type = other DNA
tcggtagtgagtcact

SEQ ID NO: 6164 - DNA, 16 bp, synthetic construct
  misc_feature 1..16: note = synthetic [barcode part1]
  source 1..16: mol_type = other DNA
agaggtccaatacgcg

SEQ ID NO: 6165 - DNA, 16 bp, synthetic construct
  misc_feature 1..16: note = synthetic [barcode part1]
  source 1..16: mol_type = other DNA
tcggagtgaacgaatt

SEQ ID NO: 6166 - DNA, 16 bp, synthetic construct
  misc_feature 1..16: note = synthetic [barcode part1]
  source 1..16: mol_type = other DNA
cgacttataggagtag

SEQ ID NO: 6167 - DNA, 16 bp, synthetic construct
  misc_feature 1..16: note = synthetic [barcode part1]
  source 1..16: mol_type = other DNA
gcgcgtgaatcaactt

SEQ ID NO: 6168 - DNA, 16 bp, synthetic construct
  misc_feature 1..16: note = synthetic [barcode part1]
  source 1..16: mol_type = other DNA
tattcgttcgttcgcc

SEQ ID NO: 6169 - DNA, 16 bp, synthetic construct
  misc_feature 1..16: note = synthetic [barcode part1]
  source 1..16: mol_type = other DNA
actcggacttgttgtt

SEQ ID NO: 6170 - DNA, 16 bp, synthetic construct
  misc_feature 1..16: note = synthetic [barcode part1]
  source 1..16: mol_type = other DNA
actggtatctacggac

SEQ ID NO: 6171 - DNA, 16 bp, synthetic construct
  misc_feature 1..16: note = synthetic [barcode part1]
  source 1..16: mol_type = other DNA
ttaggacagtaccgtc

SEQ ID NO: 6172 - DNA, 16 bp, synthetic construct
  misc_feature 1..16: note = synthetic [barcode part1]
  source 1..16: mol_type = other DNA
gtctaggtggaatagt

SEQ ID NO: 6173 - DNA, 16 bp, synthetic construct
  misc_feature 1..16: note = synthetic [barcode part1]
  source 1..16: mol_type = other DNA
accgtatactatcctg

SEQ ID NO: 6174 - DNA, 16 bp, synthetic construct
  misc_feature 1..16: note = synthetic [barcode part1]
  source 1..16: mol_type = other DNA
cgacacggttaggaac

SEQ ID NO: 6175 - DNA, 16 bp, synthetic construct
  misc_feature 1..16: note = synthetic [barcode part1]
  source 1..16: mol_type = other DNA
tactatcctgcgtaac

SEQ ID NO: 6176 - DNA, 16 bp, synthetic construct
  misc_feature 1..16: note = synthetic [barcode part1]
  source 1..16: mol_type = other DNA
gtcacaacgcctgttc

SEQ ID NO: 6177 - DNA, 16 bp, synthetic construct
  misc_feature 1..16: note = synthetic [barcode part1]
  source 1..16: mol_type = other DNA
gttggtaatctaggcc

SEQ ID NO: 6178 - DNA, 16 bp, synthetic construct
  misc_feature 1..16: note = synthetic [barcode part1]
  source 1..16: mol_type = other DNA
cctatcgtacgtcgac

SEQ ID NO: 6179 - DNA, 16 bp, synthetic construct
  misc_feature 1..16: note = synthetic [barcode part1]
  source 1..16: mol_type = other DNA
tccgtaatcacttcag

SEQ ID NO: 6180 - DNA, 16 bp, synthetic construct
  misc_feature 1..16: note = synthetic [barcode part1]
  source 1..16: mol_type = other DNA
tctgtccttactcacg

SEQ ID NO: 6181 - DNA, 16 bp, synthetic construct
  misc_feature 1..16: note = synthetic [barcode part1]
  source 1..16: mol_type = other DNA
gacttgaggaacgtgc

SEQ ID NO: 6182 - DNA, 16 bp, synthetic construct
  misc_feature 1..16: note = synthetic [barcode part1]
  source 1..16: mol_type = other DNA
cgttccactacgagtc

SEQ ID NO: 6183 - DNA, 16 bp, synthetic construct
  misc_feature 1..16: note = synthetic [barcode part1]
  source 1..16: mol_type = other DNA
gagaacaaggcgtagt

SEQ ID NO: 6184 - DNA, 16 bp, synthetic construct
  misc_feature 1..16: note = synthetic [barcode part1]
  source 1..16: mol_type = other DNA
tcaccaactagtgacg

SEQ ID NO: 6185 - DNA, 16 bp, synthetic construct
  misc_feature 1..16: note = synthetic [barcode part1]
  source 1..16: mol_type = other DNA
atcaggtacagaagtc

SEQ ID NO: 6186 - DNA, 16 bp, synthetic construct
  misc_feature 1..16: note = synthetic [barcode part1]
  source 1..16: mol_type = other DNA
tccacgtgtcagatcc

SEQ ID NO: 6187 - DNA, 16 bp, synthetic construct
  misc_feature 1..16: note = synthetic [barcode part1]
  source 1..16: mol_type = other DNA
ttgccacgtccacaac

SEQ ID NO: 6188 - DNA, 16 bp, synthetic construct
  misc_feature 1..16: note = synthetic [barcode part1]
  source 1..16: mol_type = other DNA
gaactcagtggaacgc

SEQ ID NO: 6189 - DNA, 16 bp, synthetic construct
  misc_feature 1..16: note = synthetic [barcode part1]
  source 1..16: mol_type = other DNA
cgtgcgactcaattcc

SEQ ID NO: 6190 - DNA, 16 bp, synthetic construct
  misc_feature 1..16: note = synthetic [barcode part1]
  source 1..16: mol_type = other DNA
gaatattggtggagtc

SEQ ID NO: 6191 - DNA, 16 bp, synthetic construct
  misc_feature 1..16: note = synthetic [barcode part1]
  source 1..16: mol_type = other DNA
agtatcaccgactggt

SEQ ID NO: 6192 - DNA, 16 bp, synthetic construct
  misc_feature 1..16: note = synthetic [barcode part1]
  source 1..16: mol_type = other DNA
gagtatccaccactcc

SEQ ID NO: 6193 - DNA, 16 bp, synthetic construct
  misc_feature 1..16: note = synthetic [barcode part1]
  source 1..16: mol_type = other DNA
taccgccgatacacct

SEQ ID NO: 6194 - DNA, 16 bp, synthetic construct
  misc_feature 1..16: note = synthetic [barcode part1]
  source 1..16: mol_type = other DNA
attatcctccaggcgc

SEQ ID NO: 6195 - DNA, 16 bp, synthetic construct
  misc_feature 1..16: note = synthetic [barcode part1]
  source 1..16: mol_type = other DNA
aggtaatcgcgaattg

SEQ ID NO: 6196 - DNA, 16 bp, synthetic construct
  misc_feature 1..16: note = synthetic [barcode part1]
  source 1..16: mol_type = other DNA
gtcaacacctaattcc

SEQ ID NO: 6197 - DNA, 16 bp, synthetic construct
  misc_feature 1..16: note = synthetic [barcode part1]
  source 1..16: mol_type = other DNA
caacgcgtaataagac

SEQ ID NO: 6198 - DNA, 16 bp, synthetic construct
  misc_feature 1..16: note = synthetic [barcode part1]
  source 1..16: mol_type = other DNA
gaggagtccacgtaac

SEQ ID NO: 6199 - DNA, 16 bp, synthetic construct
  misc_feature 1..16: note = synthetic [barcode part1]
  source 1..16: mol_type = other DNA
atctcgagttgtggtg

SEQ ID NO: 6200 - DNA, 16 bp, synthetic construct
  misc_feature 1..16: note = synthetic [barcode part1]
  source 1..16: mol_type = other DNA
tattctcaggaacgcg

SEQ ID NO: 6201 - DNA, 16 bp, synthetic construct
  misc_feature 1..16: note = synthetic [barcode part1]
  source 1..16: mol_type = other DNA
gccagacgaacacaac

SEQ ID NO: 6202 - DNA, 16 bp, synthetic construct
  misc_feature 1..16: note = synthetic [barcode part1]
  source 1..16: mol_type = other DNA
gaatcggaaggtcaag

SEQ ID NO: 6203 - DNA, 16 bp, synthetic construct
  misc_feature 1..16: note = synthetic [barcode part1]
  source 1..16: mol_type = other DNA
tgaactccgagataag

SEQ ID NO: 6204 - DNA, 16 bp, synthetic construct
  misc_feature 1..16: note = synthetic [barcode part1]
  source 1..16: mol_type = other DNA
ttggccttatcgacgc

SEQ ID NO: 6205 - DNA, 16 bp, synthetic construct
  misc_feature 1..16: note = synthetic [barcode part1]
  source 1..16: mol_type = other DNA
aaggaatccgcgcaac

SEQ ID NO: 6206 - DNA, 16 bp, synthetic construct
  misc_feature 1..16: note = synthetic [barcode part1]
  source 1..16: mol_type = other DNA
tgtaatacgtcacggc

SEQ ID NO: 6207 - DNA, 16 bp, synthetic construct
  misc_feature 1..16: note = synthetic [barcode part1]
  source 1..16: mol_type = other DNA
ccgatctataatcgtc

SEQ ID NO: 6208 - DNA, 16 bp, synthetic construct
  misc_feature 1..16: note = synthetic [barcode part1]
  source 1..16: mol_type = other DNA
ccgattaggccttaag

SEQ ID NO: 6209 - DNA, 16 bp, synthetic construct
  misc_feature 1..16: note = synthetic [barcode part1]
  source 1..16: mol_type = other DNA
ttccggcgactgtgtt

SEQ ID NO: 6210 - DNA, 16 bp, synthetic construct
  misc_feature 1..16: note = synthetic [barcode part1]
  source 1..16: mol_type = other DNA
agttggtctaggactc

SEQ ID NO: 6211 - DNA, 16 bp, synthetic construct
  misc_feature 1..16: note = synthetic [barcode part1]
  source 1..16: mol_type = other DNA
agtgtggatagttcag

SEQ ID NO: 6212 - DNA, 16 bp, synthetic construct
  misc_feature 1..16: note = synthetic [barcode part1]
  source 1..16: mol_type = other DNA
gagacgagtgatagac

SEQ ID NO: 6213 - DNA, 16 bp, synthetic construct
  misc_feature 1..16: note = synthetic [barcode part1]
  source 1..16: mol_type = other DNA
tcgattgccttaggag

SEQ ID NO: 6214 - DNA, 16 bp, synthetic construct
  misc_feature 1..16: note = synthetic [barcode part1]
  source 1..16: mol_type = other DNA
cgtcaagtctatacct

SEQ ID NO: 6215 - DNA, 16 bp, synthetic construct
  misc_feature 1..16: note = synthetic [barcode part1]
  source 1..16: mol_type = other DNA
tactggacgaatcgtc

SEQ ID NO: 6216 - DNA, 16 bp, synthetic construct
  misc_feature 1..16: note = synthetic [barcode part1]
  source 1..16: mol_type = other DNA
tctaaccgatcctcct

SEQ ID NO: 6217 - DNA, 16 bp, synthetic construct
  misc_feature 1..16: note = synthetic [barcode part1]
  source 1..16: mol_type = other DNA
gttgtactacgtcgag

SEQ ID NO: 6218 - DNA, 16 bp, synthetic construct
  misc_feature 1..16: note = synthetic [barcode part1]
  source 1..16: mol_type = other DNA
ttctcgacaacacact

SEQ ID NO: 6219 - DNA, 16 bp, synthetic construct
  misc_feature 1..16: note = synthetic [barcode part1]
  source 1..16: mol_type = other DNA
ccagtagatctctact

SEQ ID NO: 6220 - DNA, 16 bp, synthetic construct
  misc_feature 1..16: note = synthetic [barcode part1]
  source 1..16: mol_type = other DNA
cgtgcctaataacctt

SEQ ID NO: 6221 - DNA, 16 bp, synthetic construct
  misc_feature 1..16: note = synthetic [barcode part1]
  source 1..16: mol_type = other DNA
tctccggatcggtgtt

SEQ ID NO: 6222 - DNA, 16 bp, synthetic construct
  misc_feature 1..16: note = synthetic [barcode part1]
  source 1..16: mol_type = other DNA
attcttcgacctcctg

SEQ ID NO: 6223 - DNA, 16 bp, synthetic construct
  misc_feature 1..16: note = synthetic [barcode part1]
  source 1..16: mol_type = other DNA
tcctacgtaatagtcc

SEQ ID NO: 6224 - DNA, 16 bp, synthetic construct
  misc_feature 1..16: note = synthetic [barcode part1]
  source 1..16: mol_type = other DNA
aggaatattaccaggc

SEQ ID NO: 6225 - DNA, 16 bp, synthetic construct
  misc_feature 1..16: note = synthetic [barcode part1]
  source 1..16: mol_type = other DNA
tactcaccgagatctt

SEQ ID NO: 6226 - DNA, 16 bp, synthetic construct
  misc_feature 1..16: note = synthetic [barcode part1]
  source 1..16: mol_type = other DNA
aggactgtgacaagag

SEQ ID NO: 6227 - DNA, 16 bp, synthetic construct
  misc_feature 1..16: note = synthetic [barcode part1]
  source 1..16: mol_type = other DNA
agagtcctaggactct

SEQ ID NO: 6228 - DNA, 16 bp, synthetic construct
  misc_feature 1..16: note = synthetic [barcode part1]
  source 1..16: mol_type = other DNA
ccacgttatagtctac

SEQ ID NO: 6229 - DNA, 16 bp, synthetic construct
  misc_feature 1..16: note = synthetic [barcode part1]
  source 1..16: mol_type = other DNA
gagtaggaacggatac

SEQ ID NO: 6230 - DNA, 16 bp, synthetic construct
  misc_feature 1..16: note = synthetic [barcode part1]
  source 1..16: mol_type = other DNA
gttgtacttggtgcag

SEQ ID NO: 6231 - DNA, 16 bp, synthetic construct
  misc_feature 1..16: note = synthetic [barcode part1]
  source 1..16: mol_type = other DNA
ttgacgtaagaagtcg

SEQ ID NO: 6232 - DNA, 16 bp, synthetic construct
  misc_feature 1..16: note = synthetic [barcode part1]
  source 1..16: mol_type = other DNA
tgcgaaccttactact

SEQ ID NO: 6233 - DNA, 16 bp, synthetic construct
  misc_feature 1..16: note = synthetic [barcode part1]
  source 1..16: mol_type = other DNA
agaatactggcagttg

SEQ ID NO: 6234 - DNA, 16 bp, synthetic construct
  misc_feature 1..16: note = synthetic [barcode part1]
  source 1..16: mol_type = other DNA
cacctaagtgcaactg

SEQ ID NO: 6235 - DNA, 16 bp, synthetic construct
  misc_feature 1..16: note = synthetic [barcode part1]
  source 1..16: mol_type = other DNA
tgattggcgtatacgc

SEQ ID NO: 6236 - DNA, 16 bp, synthetic construct
  misc_feature 1..16: note = synthetic [barcode part1]
  source 1..16: mol_type = other DNA
ttgtggttgaccagtg

SEQ ID NO: 6237 - DNA, 16 bp, synthetic construct
  misc_feature 1..16: note = synthetic [barcode part1]
  source 1..16: mol_type = other DNA
gcaggatatctgtaag

SEQ ID NO: 6238 - DNA, 16 bp, synthetic construct
  misc_feature 1..16: note = synthetic [barcode part1]
  source 1..16: mol_type = other DNA
cgagtatccgaatacc

SEQ ID NO: 6239 - DNA, 16 bp, synthetic construct
  misc_feature 1..16: note = synthetic [barcode part1]
  source 1..16: mol_type = other DNA
gttctgtcactccact

SEQ ID NO: 6240 - DNA, 16 bp, synthetic construct
  misc_feature 1..16: note = synthetic [barcode part1]
  source 1..16: mol_type = other DNA
ccttacgccaacaacc

SEQ ID NO: 6241 - DNA, 16 bp, synthetic construct
  misc_feature 1..16: note = synthetic [barcode part1]
  source 1..16: mol_type = other DNA
ataggccaagacaact

SEQ ID NO: 6242 - DNA, 16 bp, synthetic construct
  misc_feature 1..16: note = synthetic [barcode part1]
  source 1..16: mol_type = other DNA
tgtctagtgtgccaag

SEQ ID NO: 6243 - DNA, 16 bp, synthetic construct
  misc_feature 1..16: note = synthetic [barcode part1]
  source 1..16: mol_type = other DNA
tcgtatctaggtcgtt

SEQ ID NO: 6244 - DNA, 16 bp, synthetic construct
  misc_feature 1..16: note = synthetic [barcode part1]
  source 1..16: mol_type = other DNA
caaggaggtacactgc

SEQ ID NO: 6245 - DNA, 16 bp, synthetic construct
  misc_feature 1..16: note = synthetic [barcode part1]
  source 1..16: mol_type = other DNA
tctattggagacggtc

SEQ ID NO: 6246 - DNA, 16 bp, synthetic construct
  misc_feature 1..16: note = synthetic [barcode part1]
  source 1..16: mol_type = other DNA
ttgcaacaccaaccag

SEQ ID NO: 6247 - DNA, 16 bp, synthetic construct
  misc_feature 1..16: note = synthetic [barcode part1]
  source 1..16: mol_type = other DNA
gcgtggttcttctgac

SEQ ID NO: 6248 - DNA, 16 bp, synthetic construct
  misc_feature 1..16: note = synthetic [barcode part1]
  source 1..16: mol_type = other DNA
acgttagtgatcttcc

SEQ ID NO: 6249 - DNA, 16 bp, synthetic construct
  misc_feature 1..16: note = synthetic [barcode part1]
  source 1..16: mol_type = other DNA
tcactgtactccacct

SEQ ID NO: 6250 - DNA, 16 bp, synthetic construct
  misc_feature 1..16: note = synthetic [barcode part1]
  source 1..16: mol_type = other DNA
agttggtcagtgttgc

SEQ ID NO: 6251 - DNA, 16 bp, synthetic construct
  misc_feature 1..16: note = synthetic [barcode part1]
  source 1..16: mol_type = other DNA
gagagaactccagaag

SEQ ID NO: 6252 - DNA, 16 bp, synthetic construct
  misc_feature 1..16: note = synthetic [barcode part1]
  source 1..16: mol_type = other DNA
ccacgtgagttctctg

SEQ ID NO: 6253 - DNA, 16 bp, synthetic construct
  misc_feature 1..16: note = synthetic [barcode part1]
  source 1..16: mol_type = other DNA
cctaaccacacaccac

SEQ ID NO: 6254 - DNA, 16 bp, synthetic construct
  misc_feature 1..16: note = synthetic [barcode part1]
  source 1..16: mol_type = other DNA
taatcggccgaagttc

SEQ ID NO: 6255 - DNA, 16 bp, synthetic construct
  misc_feature 1..16: note = synthetic [barcode part1]
  source 1..16: mol_type = other DNA
ttggtgtacaccagtg

SEQ ID NO: 6256 - DNA, 16 bp, synthetic construct
  misc_feature 1..16: note = synthetic [barcode part1]
  source 1..16: mol_type = other DNA
accactccttggacac

SEQ ID NO: 6257 - DNA, 16 bp, synthetic construct
  misc_feature 1..16: note = synthetic [barcode part1]
  source 1..16: mol_type = other DNA
gacttacagtgtccag

SEQ ID NO: 6258 - DNA, 16 bp, synthetic construct
  misc_feature 1..16: note = synthetic [barcode part1]
  source 1..16: mol_type = other DNA
ccgcactgaattgcct

SEQ ID NO: 6259 - DNA, 16 bp, synthetic construct
  misc_feature 1..16: note = synthetic [barcode part1]
  source 1..16: mol_type = other DNA
cgtgcgattattgttc

SEQ ID NO: 6260 - DNA, 16 bp, synthetic construct
  misc_feature 1..16: note = synthetic [barcode part1]
  source 1..16: mol_type = other DNA
gaaggtccgtggttag

SEQ ID NO: 6261 - DNA, 16 bp, synthetic construct
  misc_feature 1..16: note = synthetic [barcode part1]
  source 1..16: mol_type = other DNA
tatccgttcgcggtgt

SEQ ID NO: 6262 - DNA, 16 bp, synthetic construct
  misc_feature 1..16: note = synthetic [barcode part1]
  source 1..16: mol_type = other DNA
atcacgtggaggtcag

SEQ ID NO: 6263 - DNA, 16 bp, synthetic construct
  misc_feature 1..16: note = synthetic [barcode part1]
  source 1..16: mol_type = other DNA
gacacttccaccactg

SEQ ID NO: 6264 - DNA, 16 bp, synthetic construct
  misc_feature 1..16: note = synthetic [barcode part1]
  source 1..16: mol_type = other DNA
ttgcaggactctccgt

SEQ ID NO: 6265 - DNA, 16 bp, synthetic construct
  misc_feature 1..16: note = synthetic [barcode part1]
  source 1..16: mol_type = other DNA
ttacctactacagtgc

SEQ ID NO: 6266 - DNA, 16 bp, synthetic construct
  misc_feature 1..16: note = synthetic [barcode part1]
  source 1..16: mol_type = other DNA
cagtaggacgaactcg

SEQ ID NO: 6267 - DNA, 16 bp, synthetic construct
  misc_feature 1..16: note = synthetic [barcode part1]
  source 1..16: mol_type = other DNA
gacactggttgtggtt

SEQ ID NO: 6268 - DNA, 16 bp, synthetic construct
  misc_feature 1..16: note = synthetic [barcode part1]
  source 1..16: mol_type = other DNA
aattaggagacgttcg

SEQ ID NO: 6269 - DNA, 16 bp, synthetic construct
  misc_feature 1..16: note = synthetic [barcode part1]
  source 1..16: mol_type = other DNA
cacaatcttcctaacg

SEQ ID NO: 6270 - DNA, 16 bp, synthetic construct
  misc_feature 1..16: note = synthetic [barcode part1]
  source 1..16: mol_type = other DNA
atagaggcaacgatct

SEQ ID NO: 6271 - DNA, 16 bp, synthetic construct
  misc_feature 1..16: note = synthetic [barcode part1]
  source 1..16: mol_type = other DNA
aaggtccgcctactct

SEQ ID NO: 6272 - DNA, 16 bp, synthetic construct
  misc_feature 1..16: note = synthetic [barcode part1]
  source 1..16: mol_type = other DNA
cctctgtatagaggtg

SEQ ID NO: 6273 - DNA, 16 bp, synthetic construct
  misc_feature 1..16: note = synthetic [barcode part1]
  source 1..16: mol_type = other DNA
gcaacacacgtgtact

SEQ ID NO: 6274 - DNA, 16 bp, synthetic construct
  misc_feature 1..16: note = synthetic [barcode part1]
  source 1..16: mol_type = other DNA
accactaccagtagtg

SEQ ID NO: 6275 - DNA, 16 bp, synthetic construct
  misc_feature 1..16: note = synthetic [barcode part1]
  source 1..16: mol_type = other DNA
gcggattatacgacct

SEQ ID NO: 6276 - DNA, 16 bp, synthetic construct
  misc_feature 1..16: note = synthetic [barcode part1]
  source 1..16: mol_type = other DNA
tcttatcctcgtcgtg

SEQ ID NO: 6277 - DNA, 16 bp, synthetic construct
  misc_feature 1..16: note = synthetic [barcode part1]
  source 1..16: mol_type = other DNA
ttgacgaacgaagatc

SEQ ID NO: 6278 - DNA, 16 bp, synthetic construct
  misc_feature 1..16: note = synthetic [barcode part1]
  source 1..16: mol_type = other DNA
tgtggagagaacacag

SEQ ID NO: 6279 - DNA, 16 bp, synthetic construct
  misc_feature 1..16: note = synthetic [barcode part1]
  source 1..16: mol_type = other DNA
gtcaccttcgttctac

SEQ ID NO: 6280 - DNA, 16 bp, synthetic construct
  misc_feature 1..16: note = synthetic [barcode part1]
  source 1..16: mol_type = other DNA
ttccttacgtcctgtg

SEQ ID NO: 6281 - DNA, 16 bp, synthetic construct
  misc_feature 1..16: note = synthetic [barcode part1]
  source 1..16: mol_type = other DNA
tcgcgcagagaagttg

SEQ ID NO: 6282 - DNA, 16 bp, synthetic construct
  misc_feature 1..16: note = synthetic [barcode part1]
  source 1..16: mol_type = other DNA
ccaagacgcggatagt

SEQ ID NO: 6283 - DNA, 16 bp, synthetic construct
  misc_feature 1..16: note = synthetic [barcode part1]
  source 1..16: mol_type = other DNA
taggactctagagtcc

SEQ ID NO: 6284 - DNA, 16 bp, synthetic construct
  misc_feature 1..16: note = synthetic [barcode part1]
  source 1..16: mol_type = other DNA
ttatcaccggaacgac

SEQ ID NO: 6285 - DNA, 16 bp, synthetic construct
  misc_feature 1..16: note = synthetic [barcode part1]
  source 1..16: mol_type = other DNA
ccttcttcgtacgtac

SEQ ID NO: 6286 - DNA, 16 bp, synthetic construct
  misc_feature 1..16: note = synthetic [barcode part1]
  source 1..16: mol_type = other DNA
aacagtctgacggttc

SEQ ID NO: 6287 - DNA, 16 bp, synthetic construct
  misc_feature 1..16: note = synthetic [barcode part1]
  source 1..16: mol_type = other DNA
tcggcaactatcgagt

SEQ ID NO: 6288 - DNA, 16 bp, synthetic construct
  misc_feature 1..16: note = synthetic [barcode part1]
  source 1..16: mol_type = other DNA
aaggttcactcacttc

SEQ ID NO: 6289 - DNA, 16 bp, synthetic construct
  misc_feature 1..16: note = synthetic [barcode part1]
  source 1..16: mol_type = other DNA
tagaatcgccacggtt

SEQ ID NO: 6290 - DNA, 16 bp, synthetic construct
  misc_feature 1..16: note = synthetic [barcode part1]
  source 1..16: mol_type = other DNA
ccagtctgacgtactc

SEQ ID NO: 6291 - DNA, 16 bp, synthetic construct
  misc_feature 1..16: note = synthetic [barcode part1]
  source 1..16: mol_type = other DNA
acgttggcagtcctct

SEQ ID NO: 6292 - DNA, 16 bp, synthetic construct
  misc_feature 1..16: note = synthetic [barcode part1]
  source 1..16: mol_type = other DNA
gtaagatcttgccgtg

SEQ ID NO: 6293 - DNA, 16 bp, synthetic construct
  misc_feature 1..16: note = synthetic [barcode part1]
  source 1..16: mol_type = other DNA
tacggactctgccact

SEQ ID NO: 6294 - DNA, 16 bp, synthetic construct
  misc_feature 1..16: note = synthetic [barcode part1]
  source 1..16: mol_type = other DNA
acgttcttggtccggt

SEQ ID NO: 6295 - DNA, 16 bp, synthetic construct
  misc_feature 1..16: note = synthetic [barcode part1]
  source 1..16: mol_type = other DNA
cgtatacgccaatcag

SEQ ID NO: 6296 - DNA, 16 bp, synthetic construct
  misc_feature 1..16: note = synthetic [barcode part1]
  source 1..16: mol_type = other DNA
ttgacttccgtgtaac

SEQ ID NO: 6297 - DNA, 16 bp, synthetic construct
  misc_feature 1..16: note = synthetic [barcode part1]
  source 1..16: mol_type = other DNA
ttacttctggcaggag

SEQ ID NO: 6298 - DNA, 16 bp, synthetic construct
  misc_feature 1..16: note = synthetic [barcode part1]
  source 1..16: mol_type = other DNA
agaggcactactaggc

SEQ ID NO: 6299 - DNA, 16 bp, synthetic construct
  misc_feature 1..16: note = synthetic [barcode part1]
  source 1..16: mol_type = other DNA
attccagagttgaccg

SEQ ID NO: 6300 - DNA, 16 bp, synthetic construct
  misc_feature 1..16: note = synthetic [barcode part1]
  source 1..16: mol_type = other DNA
acaattaagaaccggc

SEQ ID NO: 6301 - DNA, 16 bp, synthetic construct
  misc_feature 1..16: note = synthetic [barcode part1]
  source 1..16: mol_type = other DNA
gtgccggaagagttgt

SEQ ID NO: 6302 - DNA, 16 bp, synthetic construct
  misc_feature 1..16: note = synthetic [barcode part1]
  source 1..16: mol_type = other DNA
tcgttcggtctacttc

SEQ ID NO: 6303 - DNA, 16 bp, synthetic construct
  misc_feature 1..16: note = synthetic [barcode part1]
  source 1..16: mol_type = other DNA
caacgcggttgttctc

SEQ ID NO: 6304 - DNA, 16 bp, synthetic construct
  misc_feature 1..16: note = synthetic [barcode part1]
  source 1..16: mol_type = other DNA
atataacgccaacgcc

SEQ ID NO: 6305 - DNA, 16 bp, synthetic construct
  misc_feature 1..16: note = synthetic [barcode part1]
  source 1..16: mol_type = other DNA
gtgagtcctccgttgt

SEQ ID NO: 6306 - DNA, 16 bp, synthetic construct
  misc_feature 1..16: note = synthetic [barcode part1]
  source 1..16: mol_type = other DNA
tcgtggaccgtatagt

SEQ ID NO: 6307 - DNA, 16 bp, synthetic construct
  misc_feature 1..16: note = synthetic [barcode part1]
  source 1..16: mol_type = other DNA
atccgaatatcgttcc

SEQ ID NO: 6308 - DNA, 16 bp, synthetic construct
  misc_feature 1..16: note = synthetic [barcode part1]
  source 1..16: mol_type = other DNA
atctagaggacagtgt

SEQ ID NO: 6309 - DNA, 16 bp, synthetic construct
  misc_feature 1..16: note = synthetic [barcode part1]
  source 1..16: mol_type = other DNA
tgcaactgtcgttccg

SEQ ID NO: 6310 - DNA, 16 bp, synthetic construct
  misc_feature 1..16: note = synthetic [barcode part1]
  source 1..16: mol_type = other DNA
cgcagtgattcactcc

SEQ ID NO: 6311 - DNA, 16 bp, synthetic construct
  misc_feature 1..16: note = synthetic [barcode part1]
  source 1..16: mol_type = other DNA
cgtggacttattccgc

SEQ ID NO: 6312 - DNA, 16 bp, synthetic construct
  misc_feature 1..16: note = synthetic [barcode part1]
  source 1..16: mol_type = other DNA
gttacttgcctacggc

SEQ ID NO: 6313 - DNA, 16 bp, synthetic construct
  misc_feature 1..16: note = synthetic [barcode part1]
  source 1..16: mol_type = other DNA
gaagtgaagtgtctgt

SEQ ID NO: 6314 - DNA, 16 bp, synthetic construct
  misc_feature 1..16: note = synthetic [barcode part1]
  source 1..16: mol_type = other DNA
gtcctcacactcttac

SEQ ID NO: 6315 - DNA, 16 bp, synthetic construct
  misc_feature 1..16: note = synthetic [barcode part1]
  source 1..16: mol_type = other DNA
gcgttcttcgacgatc

SEQ ID NO: 6316 - DNA, 16 bp, synthetic construct
  misc_feature 1..16: note = synthetic [barcode part1]
  source 1..16: mol_type = other DNA
tacgtctctcaacagt

SEQ ID NO: 6317 - DNA, 16 bp, synthetic construct
  misc_feature 1..16: note = synthetic [barcode part1]
  source 1..16: mol_type = other DNA
cgtggtacgaagttct

SEQ ID NO: 6318 - DNA, 16 bp, synthetic construct
  misc_feature 1..16: note = synthetic [barcode part1]
  source 1..16: mol_type = other DNA
caaggagacacaccac

SEQ ID NO: 6319 - DNA, 16 bp, synthetic construct
  misc_feature 1..16: note = synthetic [barcode part1]
  source 1..16: mol_type = other DNA
tcagtcctatcaacac

SEQ ID NO: 6320 - DNA, 16 bp, synthetic construct
  misc_feature 1..16: note = synthetic [barcode part1]
  source 1..16: mol_type = other DNA
gaatctcgagagagag

SEQ ID NO: 6321 - DNA, 16 bp, synthetic construct
  misc_feature 1..16: note = synthetic [barcode part1]
  source 1..16: mol_type = other DNA
taagaccgaccaactc

SEQ ID NO: 6322 - DNA, 16 bp, synthetic construct
  misc_feature 1..16: note = synthetic [barcode part1]
  source 1..16: mol_type = other DNA
aatagagaaggaccgc

SEQ ID NO: 6323 - DNA, 16 bp, synthetic construct
  misc_feature 1..16: note = synthetic [barcode part1]
  source 1..16: mol_type = other DNA
tgcgtagtgagaagtt

SEQ ID NO: 6324 - DNA, 16 bp, synthetic construct
  misc_feature 1..16: note = synthetic [barcode part1]
  source 1..16: mol_type = other DNA
gcacttccaattcggc

SEQ ID NO: 6325 - DNA, 16 bp, synthetic construct
  misc_feature 1..16: note = synthetic [barcode part1]
  source 1..16: mol_type = other DNA
ttggcaactcgacaac

SEQ ID NO: 6326 - DNA, 16 bp, synthetic construct
  misc_feature 1..16: note = synthetic [barcode part1]
  source 1..16: mol_type = other DNA
aggaggcagtagtagt

SEQ ID NO: 6327 - DNA, 16 bp, synthetic construct
  misc_feature 1..16: note = synthetic [barcode part1]
  source 1..16: mol_type = other DNA
ttgaagttcgtccgtt

SEQ ID NO: 6328 - DNA, 16 bp, synthetic construct
  misc_feature 1..16: note = synthetic [barcode part1]
  source 1..16: mol_type = other DNA
tctaccaggttacgtt

SEQ ID NO: 6329 - DNA, 16 bp, synthetic construct
  misc_feature 1..16: note = synthetic [barcode part1]
  source 1..16: mol_type = other DNA
gaggttccaggcaagt

SEQ ID NO: 6330 - DNA, 16 bp, synthetic construct
  misc_feature 1..16: note = synthetic [barcode part1]
  source 1..16: mol_type = other DNA
tcgcaaggtgactgtt

SEQ ID NO: 6331 - DNA, 16 bp, synthetic construct
  misc_feature 1..16: note = synthetic [barcode part1]
  source 1..16: mol_type = other DNA
actcctccacaattag

SEQ ID NO: 6332 - DNA, 16 bp, synthetic construct
  misc_feature 1..16: note = synthetic [barcode part1]
  source 1..16: mol_type = other DNA
ttccggtgcacagttc

SEQ ID NO: 6333 - DNA, 16 bp, synthetic construct
  misc_feature 1..16: note = synthetic [barcode part1]
  source 1..16: mol_type = other DNA
ttgagacgtaggtaac

SEQ ID NO: 6334 - DNA, 16 bp, synthetic construct
  misc_feature 1..16: note = synthetic [barcode part1]
  source 1..16: mol_type = other DNA
attgtctcgttcgaac

SEQ ID NO: 6335 - DNA, 16 bp, synthetic construct
  misc_feature 1..16: note = synthetic [barcode part1]
  source 1..16: mol_type = other DNA
tacgcggtactagtac

SEQ ID NO: 6336 - DNA, 16 bp, synthetic construct
  misc_feature 1..16: note = synthetic [barcode part1]
  source 1..16: mol_type = other DNA
tacggtagtaggcgac

SEQ ID NO: 6337 - DNA, 16 bp, synthetic construct
  misc_feature 1..16: note = synthetic [barcode part1]
  source 1..16: mol_type = other DNA
ttcgcaagaacagtag

SEQ ID NO: 6338 - DNA, 16 bp, synthetic construct
  misc_feature 1..16: note = synthetic [barcode part1]
  source 1..16: mol_type = other DNA
taccaccgagtgttcc

SEQ ID NO: 6339 - DNA, 16 bp, synthetic construct
  misc_feature 1..16: note = synthetic [barcode part1]
  source 1..16: mol_type = other DNA
tctcggtaggatagtc

SEQ ID NO: 6340 - DNA, 16 bp, synthetic construct
  misc_feature 1..16: note = synthetic [barcode part1]
  source 1..16: mol_type = other DNA
ccttacgcggcaattc

SEQ ID NO: 6341 - DNA, 16 bp, synthetic construct
  misc_feature 1..16: note = synthetic [barcode part1]
  source 1..16: mol_type = other DNA
gtcgtctggacaatac

SEQ ID NO: 6342 - DNA, 16 bp, synthetic construct
  misc_feature 1..16: note = synthetic [barcode part1]
  source 1..16: mol_type = other DNA
gagtaatagtcgcgcg

SEQ ID NO: 6343 - DNA, 16 bp, synthetic construct
  misc_feature 1..16: note = synthetic [barcode part1]
  source 1..16: mol_type = other DNA
taggacgtaagttcag

SEQ ID NO: 6344 - DNA, 16 bp, synthetic construct
  misc_feature 1..16: note = synthetic [barcode part1]
  source 1..16: mol_type = other DNA
acactaacgacgaagt

SEQ ID NO: 6345 - DNA, 16 bp, synthetic construct
  misc_feature 1..16: note = synthetic [barcode part1]
  source 1..16: mol_type = other DNA
cggaactgagagaagt

SEQ ID NO: 6346 - DNA, 16 bp, synthetic construct
  misc_feature 1..16: note = synthetic [barcode part1]
  source 1..16: mol_type = other DNA
gtcaaggttccttgag

SEQ ID NO: 6347 - DNA, 16 bp, synthetic construct
  misc_feature 1..16: note = synthetic [barcode part1]
  source 1..16: mol_type = other DNA
tgactggagttggtct

SEQ ID NO: 6348 - DNA, 16 bp, synthetic construct
  misc_feature 1..16: note = synthetic [barcode part1]
  source 1..16: mol_type = other DNA
agtctggaccgaatct

SEQ ID NO: 6349 - DNA, 16 bp, synthetic construct
  misc_feature 1..16: note = synthetic [barcode part1]
  source 1..16: mol_type = other DNA
cagaccggattatcac

SEQ ID NO: 6350 - DNA, 16 bp, synthetic construct
  misc_feature 1..16: note = synthetic [barcode part1]
  source 1..16: mol_type = other DNA
aataacgccgtaagtg

SEQ ID NO: 6351 - DNA, 16 bp, synthetic construct
  misc_feature 1..16: note = synthetic [barcode part1]
  source 1..16: mol_type = other DNA
ttcagttccgactctc

SEQ ID NO: 6352 - DNA, 16 bp, synthetic construct
  misc_feature 1..16: note = synthetic [barcode part1]
  source 1..16: mol_type = other DNA
tcgtgaactgttactc

SEQ ID NO: 6353 - DNA, 16 bp, synthetic construct
  misc_feature 1..16: note = synthetic [barcode part1]
  source 1..16: mol_type = other DNA
tattctgaagtctgcc

SEQ ID NO: 6354 - DNA, 16 bp, synthetic construct
  misc_feature 1..16: note = synthetic [barcode part1]
  source 1..16: mol_type = other DNA
atctaatcggcggttg

SEQ ID NO: 6355 - DNA, 16 bp, synthetic construct
  misc_feature 1..16: note = synthetic [barcode part1]
  source 1..16: mol_type = other DNA
actacaattcgcctgt

SEQ ID NO: 6356 - DNA, 16 bp, synthetic construct
  misc_feature 1..16: note = synthetic [barcode part1]
  source 1..16: mol_type = other DNA
caacacaatcgcctcc

SEQ ID NO: 6357 - DNA, 16 bp, synthetic construct
  misc_feature 1..16: note = synthetic [barcode part1]
  source 1..16: mol_type = other DNA
taggagacgcagtcgt

SEQ ID NO: 6358 - DNA, 16 bp, synthetic construct
  misc_feature 1..16: note = synthetic [barcode part1]
  source 1..16: mol_type = other DNA
ttcgttagaagaccgc

SEQ ID NO: 6359 - DNA, 16 bp, synthetic construct
  misc_feature 1..16: note = synthetic [barcode part1]
  source 1..16: mol_type = other DNA
attgttcctacgaacc

SEQ ID NO: 6360 - DNA, 16 bp, synthetic construct
  misc_feature 1..16: note = synthetic [barcode part1]
  source 1..16: mol_type = other DNA
gcctgacagaagtacg

SEQ ID NO: 6361 - DNA, 16 bp, synthetic construct
  misc_feature 1..16: note = synthetic [barcode part1]
  source 1..16: mol_type = other DNA
gcgtctcttgacaatt

SEQ ID NO: 6362 - DNA, 16 bp, synthetic construct
  misc_feature 1..16: note = synthetic [barcode part1]
  source 1..16: mol_type = other DNA
tccacaatctgttacg

SEQ ID NO: 6363 - DNA, 16 bp, synthetic construct
  misc_feature 1..16: note = synthetic [barcode part1]
  source 1..16: mol_type = other DNA
ttctgacggagtggtt

SEQ ID NO: 6364 - DNA, 16 bp, synthetic construct
  misc_feature 1..16: note = synthetic [barcode part1]
  source 1..16: mol_type = other DNA
gcgattactccttggc

SEQ ID NO: 6365 - DNA, 16 bp, synthetic construct
  misc_feature 1..16: note = synthetic [barcode part1]
  source 1..16: mol_type = other DNA
tcggaaggttactctg

SEQ ID NO: 6366 - DNA, 16 bp, synthetic construct
  misc_feature 1..16: note = synthetic [barcode part1]
  source 1..16: mol_type = other DNA
gtagtgtagaagaggc

SEQ ID NO: 6367 - DNA, 16 bp, synthetic construct
  misc_feature 1..16: note = synthetic [barcode part1]
  source 1..16: mol_type = other DNA
caatacggtgtagtcc

SEQ ID NO: 6368 - DNA, 16 bp, synthetic construct
  misc_feature 1..16: note = synthetic [barcode part1]
  source 1..16: mol_type = other DNA
ccaacttgtaggacgt

SEQ ID NO: 6369 - DNA, 16 bp, synthetic construct
  misc_feature 1..16: note = synthetic [barcode part1]
  source 1..16: mol_type = other DNA
gcgtgtcaagtcgaag

SEQ ID NO: 6370 - DNA, 16 bp, synthetic construct
  misc_feature 1..16: note = synthetic [barcode part1]
  source 1..16: mol_type = other DNA
ttaagtatcgtcctgc

SEQ ID NO: 6371 - DNA, 16 bp, synthetic construct
  misc_feature 1..16: note = synthetic [barcode part1]
  source 1..16: mol_type = other DNA
gcacttcttagtaacc

SEQ ID NO: 6372 - DNA, 16 bp, synthetic construct
  misc_feature 1..16: note = synthetic [barcode part1]
  source 1..16: mol_type = other DNA
tccgtacaccaagtcc

SEQ ID NO: 6373 - DNA, 16 bp, synthetic construct
  misc_feature 1..16: note = synthetic [barcode part1]
  source 1..16: mol_type = other DNA
agacgcaatactctcg

SEQ ID NO: 6374 - DNA, 16 bp, synthetic construct
  misc_feature 1..16: note = synthetic [barcode part1]
  source 1..16: mol_type = other DNA
gaccttcttcctaacc

SEQ ID NO: 6375 - DNA, 16 bp, synthetic construct
  misc_feature 1..16: note = synthetic [barcode part1]
  source 1..16: mol_type = other DNA
tacaggcggacaacgt

SEQ ID NO: 6376 - DNA, 16 bp, synthetic construct
  misc_feature 1..16: note = synthetic [barcode part1]
  source 1..16: mol_type = other DNA
tcgataccacgtaacg

SEQ ID NO: 6377 - DNA, 16 bp, synthetic construct
  misc_feature 1..16: note = synthetic [barcode part1]
  source 1..16: mol_type = other DNA
cctgattcacgaccgt

SEQ ID NO: 6378 - DNA, 16 bp, synthetic construct
  misc_feature 1..16: note = synthetic [barcode part1]
  source 1..16: mol_type = other DNA
acgactaccagaaggc

SEQ ID NO: 6379 - DNA, 16 bp, synthetic construct
  misc_feature 1..16: note = synthetic [barcode part1]
  source 1..16: mol_type = other DNA
gtatccacactatctg

SEQ ID NO: 6380 - DNA, 16 bp, synthetic construct
  misc_feature 1..16: note = synthetic [barcode part1]
  source 1..16: mol_type = other DNA
actaccaacgtctccg

SEQ ID NO: 6381 - DNA, 16 bp, synthetic construct
  misc_feature 1..16: note = synthetic [barcode part1]
  source 1..16: mol_type = other DNA
gccgtggatagtactt

SEQ ID NO: 6382 - DNA, 16 bp, synthetic construct
  misc_feature 1..16: note = synthetic [barcode part1]
  source 1..16: mol_type = other DNA
tcagtgaagacacggc

SEQ ID NO: 6383 - DNA, 16 bp, synthetic construct
  misc_feature 1..16: note = synthetic [barcode part1]
  source 1..16: mol_type = other DNA
agtccgacgcactctt

SEQ ID NO: 6384 - DNA, 16 bp, synthetic construct
  misc_feature 1..16: note = synthetic [barcode part1]
  source 1..16: mol_type = other DNA
taactgcggatatccg

SEQ ID NO: 6385 - DNA, 16 bp, synthetic construct
  misc_feature 1..16: note = synthetic [barcode part1]
  source 1..16: mol_type = other DNA
gaactgccgaatcgtt

SEQ ID NO: 6386 - DNA, 16 bp, synthetic construct
  misc_feature 1..16: note = synthetic [barcode part1]
  source 1..16: mol_type = other DNA
tgacaatccgacggtt

SEQ ID NO: 6387 - DNA, 16 bp, synthetic construct
  misc_feature 1..16: note = synthetic [barcode part1]
  source 1..16: mol_type = other DNA
tgtaggtataacggac

SEQ ID NO: 6388 - DNA, 16 bp, synthetic construct
  misc_feature 1..16: note = synthetic [barcode part1]
  source 1..16: mol_type = other DNA
actaggttggaggcac

SEQ ID NO: 6389 - DNA, 16 bp, synthetic construct
  misc_feature 1..16: note = synthetic [barcode part1]
  source 1..16: mol_type = other DNA
cagaatctaaccgacc

SEQ ID NO: 6390 - DNA, 16 bp, synthetic construct
  misc_feature 1..16: note = synthetic [barcode part1]
  source 1..16: mol_type = other DNA
taggacctcctaaggt

SEQ ID NO: 6391 - DNA, 16 bp, synthetic construct
  misc_feature 1..16: note = synthetic [barcode part1]
  source 1..16: mol_type = other DNA
gattcgtaccttactg

SEQ ID NO: 6392 - DNA, 16 bp, synthetic construct
  misc_feature 1..16: note = synthetic [barcode part1]
  source 1..16: mol_type = other DNA
tctagtgacttggcag

SEQ ID NO: 6393 - DNA, 16 bp, synthetic construct
  misc_feature 1..16: note = synthetic [barcode part1]
  source 1..16: mol_type = other DNA
gcgttcttcgaatcgc

SEQ ID NO: 6394 - DNA, 16 bp, synthetic construct
  misc_feature 1..16: note = synthetic [barcode part1]
  source 1..16: mol_type = other DNA
acggaccgagaattgc

SEQ ID NO: 6395 - DNA, 16 bp, synthetic construct
  misc_feature 1..16: note = synthetic [barcode part1]
  source 1..16: mol_type = other DNA
gtatctctcggcggtt

SEQ ID NO: 6396 - DNA, 16 bp, synthetic construct
  misc_feature 1..16: note = synthetic [barcode part1]
  source 1..16: mol_type = other DNA
cactcaacgcagattg

SEQ ID NO: 6397 - DNA, 16 bp, synthetic construct
  misc_feature 1..16: note = synthetic [barcode part1]
  source 1..16: mol_type = other DNA
tgcacagagactaagt

SEQ ID NO: 6398 - DNA, 16 bp, synthetic construct
  misc_feature 1..16: note = synthetic [barcode part1]
  source 1..16: mol_type = other DNA
acgcaagtgttaagtg

SEQ ID NO: 6399 - DNA, 16 bp, synthetic construct
  misc_feature 1..16: note = synthetic [barcode part1]
  source 1..16: mol_type = other DNA
attgccactctgcacg

SEQ ID NO: 6400 - DNA, 16 bp, synthetic construct
  misc_feature 1..16: note = synthetic [barcode part1]
  source 1..16: mol_type = other DNA
cagattggttaccgac

SEQ ID NO: 6401 - DNA, 16 bp, synthetic construct
  misc_feature 1..16: note = synthetic [barcode part1]
  source 1..16: mol_type = other DNA
gtccggtgttatcaag

SEQ ID NO: 6402 - DNA, 16 bp, synthetic construct
  misc_feature 1..16: note = synthetic [barcode part1]
  source 1..16: mol_type = other DNA
caattccgtgccaatt

SEQ ID NO: 6403 - DNA, 16 bp, synthetic construct
  misc_feature 1..16: note = synthetic [barcode part1]
  source 1..16: mol_type = other DNA
tgatcggcaataccgt

SEQ ID NO: 6404 - DNA, 16 bp, synthetic construct
  misc_feature 1..16: note = synthetic [barcode part1]
  source 1..16: mol_type = other DNA
tccgatcgtcaacgtc

SEQ ID NO: 6405 - DNA, 16 bp, synthetic construct
  misc_feature 1..16: note = synthetic [barcode part1]
  source 1..16: mol_type = other DNA
ccgtaatctccttctg

SEQ ID NO: 6406 - DNA, 16 bp, synthetic construct
  misc_feature 1..16: note = synthetic [barcode part1]
  source 1..16: mol_type = other DNA
caataactggcggtct

SEQ ID NO: 6407 - DNA, 16 bp, synthetic construct
  misc_feature 1..16: note = synthetic [barcode part1]
  source 1..16: mol_type = other DNA
gaactcagtctggatc

SEQ ID NO: 6408 - DNA, 16 bp, synthetic construct
  misc_feature 1..16: note = synthetic [barcode part1]
  source 1..16: mol_type = other DNA
gtacggatctgtgttg

SEQ ID NO: 6409 - DNA, 16 bp, synthetic construct
  misc_feature 1..16: note = synthetic [barcode part1]
  source 1..16: mol_type = other DNA
tgtgtgacctggttcc

SEQ ID NO: 6410 - DNA, 16 bp, synthetic construct
  misc_feature 1..16: note = synthetic [barcode part1]
  source 1..16: mol_type = other DNA
atcttggccaaccaag

SEQ ID NO: 6411 - DNA, 16 bp, synthetic construct
  misc_feature 1..16: note = synthetic [barcode part1]
  source 1..16: mol_type = other DNA
gaccaaccagtgttgt

SEQ ID NO: 6412 - DNA, 16 bp, synthetic construct
  misc_feature 1..16: note = synthetic [barcode part1]
  source 1..16: mol_type = other DNA
acagtctataggaacg

SEQ ID NO: 6413 - DNA, 16 bp, synthetic construct
  misc_feature 1..16: note = synthetic [barcode part1]
  source 1..16: mol_type = other DNA
gagttctgaggaagag

SEQ ID NO: 6414 - DNA, 16 bp, synthetic construct
  misc_feature 1..16: note = synthetic [barcode part1]
  source 1..16: mol_type = other DNA
gatcacgtgtaaccgt

SEQ ID NO: 6415 - DNA, 16 bp, synthetic construct
  misc_feature 1..16: note = synthetic [barcode part1]
  source 1..16: mol_type = other DNA
cacgattaaggtaacg

SEQ ID NO: 6416 - DNA, 16 bp, synthetic construct
  misc_feature 1..16: note = synthetic [barcode part1]
  source 1..16: mol_type = other DNA
aggacaagacgcctgt

SEQ ID NO: 6417 - DNA, 16 bp, synthetic construct
  misc_feature 1..16: note = synthetic [barcode part1]
  source 1..16: mol_type = other DNA
tcgccagtgtatctcg

SEQ ID NO: 6418 - DNA, 16 bp, synthetic construct
  misc_feature 1..16: note = synthetic [barcode part1]
  source 1..16: mol_type = other DNA
actaacactaccacct

SEQ ID NO: 6419 - DNA, 16 bp, synthetic construct
  misc_feature 1..16: note = synthetic [barcode part1]
  source 1..16: mol_type = other DNA
tgtcttaggattcacc

SEQ ID NO: 6420 - DNA, 16 bp, synthetic construct
  misc_feature 1..16: note = synthetic [barcode part1]
  source 1..16: mol_type = other DNA
gcgaggacttcgtatt

SEQ ID NO: 6421 - DNA, 16 bp, synthetic construct
  misc_feature 1..16: note = synthetic [barcode part1]
  source 1..16: mol_type = other DNA
caatagaggtggagtg

SEQ ID NO: 6422 - DNA, 16 bp, synthetic construct
  misc_feature 1..16: note = synthetic [barcode part1]
  source 1..16: mol_type = other DNA
ttctgcctactcggag

SEQ ID NO: 6423 - DNA, 16 bp, synthetic construct
  misc_feature 1..16: note = synthetic [barcode part1]
  source 1..16: mol_type = other DNA
agtcacagatctcttc

SEQ ID NO: 6424 - DNA, 16 bp, synthetic construct
  misc_feature 1..16: note = synthetic [barcode part1]
  source 1..16: mol_type = other DNA
ttgagtgacagacctc

SEQ ID NO: 6425 - DNA, 16 bp, synthetic construct
  misc_feature 1..16: note = synthetic [barcode part1]
  source 1..16: mol_type = other DNA
attacggaagtgagtc

SEQ ID NO: 6426 - DNA, 16 bp, synthetic construct
  misc_feature 1..16: note = synthetic [barcode part1]
  source 1..16: mol_type = other DNA
atattgaggtcacgcc

SEQ ID NO: 6427 - DNA, 16 bp, synthetic construct
  misc_feature 1..16: note = synthetic [barcode part1]
  source 1..16: mol_type = other DNA
aggaccacaacaagag

SEQ ID NO: 6428 - DNA, 16 bp, synthetic construct
  misc_feature 1..16: note = synthetic [barcode part1]
  source 1..16: mol_type = other DNA
aagaactgttagtgcg

SEQ ID NO: 6429 - DNA, 16 bp, synthetic construct
  misc_feature 1..16: note = synthetic [barcode part1]
  source 1..16: mol_type = other DNA
gaacttggtggaatac

SEQ ID NO: 6430 - DNA, 16 bp, synthetic construct
  misc_feature 1..16: note = synthetic [barcode part1]
  source 1..16: mol_type = other DNA
tgtggaggatctggtg

SEQ ID NO: 6431 - DNA, 16 bp, synthetic construct
  misc_feature 1..16: note = synthetic [barcode part1]
  source 1..16: mol_type = other DNA
gtgttagtaactctcc

SEQ ID NO: 6432 - DNA, 16 bp, synthetic construct
  misc_feature 1..16: note = synthetic [barcode part1]
  source 1..16: mol_type = other DNA
atacagatcgcactcg

SEQ ID NO: 6433 - DNA, 16 bp, synthetic construct
  misc_feature 1..16: note = synthetic [barcode part1]
  source 1..16: mol_type = other DNA
cggtagtctggtgatt

SEQ ID NO: 6434 - DNA, 16 bp, synthetic construct
  misc_feature 1..16: note = synthetic [barcode part1]
  source 1..16: mol_type = other DNA
agttcgttccagacag

SEQ ID NO: 6435 - DNA, 16 bp, synthetic construct
  misc_feature 1..16: note = synthetic [barcode part1]
  source 1..16: mol_type = other DNA
gagataagaactcgtc

SEQ ID NO: 6436 - DNA, 16 bp, synthetic construct
  misc_feature 1..16: note = synthetic [barcode part1]
  source 1..16: mol_type = other DNA
ttaggtgtcgtctcgc

SEQ ID NO: 6437 - DNA, 16 bp, synthetic construct
  misc_feature 1..16: note = synthetic [barcode part1]
  source 1..16: mol_type = other DNA
taactctccaggagac

SEQ ID NO: 6438 - DNA, 16 bp, synthetic construct
  misc_feature 1..16: note = synthetic [barcode part1]
  source 1..16: mol_type = other DNA
gcgtaactcaatctct

SEQ ID NO: 6439 - DNA, 16 bp, synthetic construct
  misc_feature 1..16: note = synthetic [barcode part1]
  source 1..16: mol_type = other DNA
cgttggaccacgttct

SEQ ID NO: 6440 - DNA, 16 bp, synthetic construct
  misc_feature 1..16: note = synthetic [barcode part1]
  source 1..16: mol_type = other DNA
cctagagttgactggt

SEQ ID NO: 6441 - DNA, 16 bp, synthetic construct
  misc_feature 1..16: note = synthetic [barcode part1]
  source 1..16: mol_type = other DNA
taatccggcctctgtg

SEQ ID NO: 6442 - DNA, 16 bp, synthetic construct
  misc_feature 1..16: note = synthetic [barcode part1]
  source 1..16: mol_type = other DNA
ttgtcgttacctaggt

SEQ ID NO: 6443 - DNA, 16 bp, synthetic construct
  misc_feature 1..16: note = synthetic [barcode part1]
  source 1..16: mol_type = other DNA
tatcgagatccttgtc

SEQ ID NO: 6444 - DNA, 16 bp, synthetic construct
  misc_feature 1..16: note = synthetic [barcode part1]
  source 1..16: mol_type = other DNA
tgatcttgcgcgtcac

SEQ ID NO: 6445 - DNA, 16 bp, synthetic construct
  misc_feature 1..16: note = synthetic [barcode part1]
  source 1..16: mol_type = other DNA
caacgccaagtgaacg

SEQ ID NO: 6446 - DNA, 16 bp, synthetic construct
  misc_feature 1..16: note = synthetic [barcode part1]
  source 1..16: mol_type = other DNA
tgtctcaggacttact

SEQ ID NO: 6447 - DNA, 16 bp, synthetic construct
  misc_feature 1..16: note = synthetic [barcode part1]
  source 1..16: mol_type = other DNA
ccgtctatactgcgac

SEQ ID NO: 6448 - DNA, 16 bp, synthetic construct
  misc_feature 1..16: note = synthetic [barcode part1]
  source 1..16: mol_type = other DNA
agtgtataccgcgtgt

SEQ ID NO: 6449 - DNA, 16 bp, synthetic construct
  misc_feature 1..16: note = synthetic [barcode part1]
  source 1..16: mol_type = other DNA
cgtattgtctcgaccg

SEQ ID NO: 6450 - DNA, 16 bp, synthetic construct
  misc_feature 1..16: note = synthetic [barcode part1]
  source 1..16: mol_type = other DNA
cgaccaaggagttctt

SEQ ID NO: 6451 - DNA, 16 bp, synthetic construct
  misc_feature 1..16: note = synthetic [barcode part1]
  source 1..16: mol_type = other DNA
ttacaggaacacgtcc

SEQ ID NO: 6452 - DNA, 16 bp, synthetic construct
  misc_feature 1..16: note = synthetic [barcode part1]
  source 1..16: mol_type = other DNA
cacagacgacaggact

SEQ ID NO: 6453 - DNA, 16 bp, synthetic construct
  misc_feature 1..16: note = synthetic [barcode part1]
  source 1..16: mol_type = other DNA
acggaagaccgaatcc

SEQ ID NO: 6454 - DNA, 16 bp, synthetic construct
  misc_feature 1..16: note = synthetic [barcode part1]
  source 1..16: mol_type = other DNA
agaaggacacgtacag

SEQ ID NO: 6455 - DNA, 16 bp, synthetic construct
  misc_feature 1..16: note = synthetic [barcode part1]
  source 1..16: mol_type = other DNA
ttgaacgtactgtctc

SEQ ID NO: 6456 - DNA, 16 bp, synthetic construct
  misc_feature 1..16: note = synthetic [barcode part1]
  source 1..16: mol_type = other DNA
tcaccgtagacctgtc

SEQ ID NO: 6457 - DNA, 16 bp, synthetic construct
  misc_feature 1..16: note = synthetic [barcode part1]
  source 1..16: mol_type = other DNA
gagtgaggcaacactc

SEQ ID NO: 6458 - DNA, 16 bp, synthetic construct
  misc_feature 1..16: note = synthetic [barcode part1]
  source 1..16: mol_type = other DNA
tatagttacgcggtcg

SEQ ID NO: 6459 - DNA, 16 bp, synthetic construct
  misc_feature 1..16: note = synthetic [barcode part1]
  source 1..16: mol_type = other DNA
ttgtaggagtgcgttc

SEQ ID NO: 6460 - DNA, 16 bp, synthetic construct
  misc_feature 1..16: note = synthetic [barcode part1]
  source 1..16: mol_type = other DNA
gaagtggttcgagtgc

SEQ ID NO: 6461 - DNA, 16 bp, synthetic construct
  misc_feature 1..16: note = synthetic [barcode part1]
  source 1..16: mol_type = other DNA
gcgagttccttcgact

SEQ ID NO: 6462 - DNA, 16 bp, synthetic construct
  misc_feature 1..16: note = synthetic [barcode part1]
  source 1..16: mol_type = other DNA
tcgttacgccttgtct

SEQ ID NO: 6463 - DNA, 16 bp, synthetic construct
  misc_feature 1..16: note = synthetic [barcode part1]
  source 1..16: mol_type = other DNA
ccggtacgactagaag

SEQ ID NO: 6464 - DNA, 16 bp, synthetic construct
  misc_feature 1..16: note = synthetic [barcode part1]
  source 1..16: mol_type = other DNA
gcaactgatcgtacgt

SEQ ID NO: 6465 - DNA, 16 bp, synthetic construct
  misc_feature 1..16: note = synthetic [barcode part1]
  source 1..16: mol_type = other DNA
cactgaagacgcgaac

SEQ ID NO: 6466 - DNA, 16 bp, synthetic construct
  misc_feature 1..16: note = synthetic [barcode part1]
  source 1..16: mol_type = other DNA
cgcgtcttgtcaggtt

SEQ ID NO: 6467 - DNA, 16 bp, synthetic construct
  misc_feature 1..16: note = synthetic [barcode part1]
  source 1..16: mol_type = other DNA
tcgcctattcgtctac

SEQ ID NO: 6468 - DNA, 16 bp, synthetic construct
  misc_feature 1..16: note = synthetic [barcode part1]
  source 1..16: mol_type = other DNA
tagtaagacctgcaag

SEQ ID NO: 6469 - DNA, 16 bp, synthetic construct
  misc_feature 1..16: note = synthetic [barcode part1]
  source 1..16: mol_type = other DNA
tcgccgttactgttct

SEQ ID NO: 6470 - DNA, 16 bp, synthetic construct
  misc_feature 1..16: note = synthetic [barcode part1]
  source 1..16: mol_type = other DNA
gtctccaggtgacttc

SEQ ID NO: 6471 - DNA, 16 bp, synthetic construct
  misc_feature 1..16: note = synthetic [barcode part1]
  source 1..16: mol_type = other DNA
ccagttattgaccgag

SEQ ID NO: 6472 - DNA, 16 bp, synthetic construct
  misc_feature 1..16: note = synthetic [barcode part1]
  source 1..16: mol_type = other DNA
aacgaatctgtggtag

SEQ ID NO: 6473 - DNA, 16 bp, synthetic construct
  misc_feature 1..16: note = synthetic [barcode part1]
  source 1..16: mol_type = other DNA
tccacaagtaagtccg

SEQ ID NO: 6474 - DNA, 16 bp, synthetic construct
  misc_feature 1..16: note = synthetic [barcode part1]
  source 1..16: mol_type = other DNA
tacttctggttcaacg

SEQ ID NO: 6475 - DNA, 16 bp, synthetic construct
  misc_feature 1..16: note = synthetic [barcode part1]
  source 1..16: mol_type = other DNA
tagacactgcagactc

SEQ ID NO: 6476 - DNA, 16 bp, synthetic construct
  misc_feature 1..16: note = synthetic [barcode part1]
  source 1..16: mol_type = other DNA
caccaagtgccttcgt

SEQ ID NO: 6477 - DNA, 16 bp, synthetic construct
  misc_feature 1..16: note = synthetic [barcode part1]
  source 1..16: mol_type = other DNA
cgtgaacttacggact

SEQ ID NO: 6478 - DNA, 16 bp, synthetic construct
  misc_feature 1..16: note = synthetic [barcode part1]
  source 1..16: mol_type = other DNA
atacaatcggtcgtgc

SEQ ID NO: 6479 - DNA, 16 bp, synthetic construct
  misc_feature 1..16: note = synthetic [barcode part1]
  source 1..16: mol_type = other DNA
tctccagttgacttcc

SEQ ID NO: 6480 - DNA, 16 bp, synthetic construct
  misc_feature 1..16: note = synthetic [barcode part1]
  source 1..16: mol_type = other DNA
gtccgagtaagtactc

SEQ ID NO: 6481 - DNA, 16 bp, synthetic construct
  misc_feature 1..16: note = synthetic [barcode part1]
  source 1..16: mol_type = other DNA
tctccaagactcctct

SEQ ID NO: 6482 - DNA, 16 bp, synthetic construct
  misc_feature 1..16: note = synthetic [barcode part1]
  source 1..16: mol_type = other DNA
gtaagtcgatctgcac

SEQ ID NO: 6483 - DNA, 16 bp, synthetic construct
  misc_feature 1..16: note = synthetic [barcode part1]
  source 1..16: mol_type = other DNA
tgtgtaaggcacacct

SEQ ID NO: 6484 - DNA, 16 bp, synthetic construct
  misc_feature 1..16: note = synthetic [barcode part1]
  source 1..16: mol_type = other DNA
aatcacgatcacgtgc

SEQ ID NO: 6485 - DNA, 16 bp, synthetic construct
  misc_feature 1..16: note = synthetic [barcode part1]
  source 1..16: mol_type = other DNA
tgtcttgactctgcct

SEQ ID NO: 6486 - DNA, 16 bp, synthetic construct
  misc_feature 1..16: note = synthetic [barcode part1]
  source 1..16: mol_type = other DNA
tctcacggaccgttac

SEQ ID NO: 6487 - DNA, 16 bp, synthetic construct
  misc_feature 1..16: note = synthetic [barcode part1]
  source 1..16: mol_type = other DNA
cacgacacctgaagtt

SEQ ID NO: 6488 - DNA, 16 bp, synthetic construct
  misc_feature 1..16: note = synthetic [barcode part1]
  source 1..16: mol_type = other DNA
tctcgatcctctgact

SEQ ID NO: 6489 - DNA, 16 bp, synthetic construct
  misc_feature 1..16: note = synthetic [barcode part1]
  source 1..16: mol_type = other DNA
attctgttagatccgc

SEQ ID NO: 6490 - DNA, 16 bp, synthetic construct
  misc_feature 1..16: note = synthetic [barcode part1]
  source 1..16: mol_type = other DNA
tcttacaccttgcacc

SEQ ID NO: 6491 - DNA, 16 bp, synthetic construct
  misc_feature 1..16: note = synthetic [barcode part1]
  source 1..16: mol_type = other DNA
tcctaatctgagtgtc

SEQ ID NO: 6492 - DNA, 16 bp, synthetic construct
  misc_feature 1..16: note = synthetic [barcode part1]
  source 1..16: mol_type = other DNA
caggtgccaatctctc

SEQ ID NO: 6493 - DNA, 16 bp, synthetic construct
  misc_feature 1..16: note = synthetic [barcode part1]
  source 1..16: mol_type = other DNA
attggcaatagtcgcc

SEQ ID NO: 6494 - DNA, 16 bp, synthetic construct
  misc_feature 1..16: note = synthetic [barcode part1]
  source 1..16: mol_type = other DNA
gataattggccaccac

SEQ ID NO: 6495 - DNA, 16 bp, synthetic construct
  misc_feature 1..16: note = synthetic [barcode part1]
  source 1..16: mol_type = other DNA
atagaggcgataacct

SEQ ID NO: 6496 - DNA, 16 bp, synthetic construct
  misc_feature 1..16: note = synthetic [barcode part1]
  source 1..16: mol_type = other DNA
gagtaggtctaagatc

SEQ ID NO: 6497 - DNA, 16 bp, synthetic construct
  misc_feature 1..16: note = synthetic [barcode part1]
  source 1..16: mol_type = other DNA
acacttctctccacgt

SEQ ID NO: 6498 - DNA, 16 bp, synthetic construct
  misc_feature 1..16: note = synthetic [barcode part1]
  source 1..16: mol_type = other DNA
ttcgacagtcctcgtg

SEQ ID NO: 6499 - DNA, 16 bp, synthetic construct
  misc_feature 1..16: note = synthetic [barcode part1]
  source 1..16: mol_type = other DNA
tgcgttatacacggtg

SEQ ID NO: 6500 - DNA, 16 bp, synthetic construct
  misc_feature 1..16: note = synthetic [barcode part1]
  source 1..16: mol_type = other DNA
tgaagaactaggaggc

SEQ ID NO: 6501 - DNA, 16 bp, synthetic construct
  misc_feature 1..16: note = synthetic [barcode part1]
  source 1..16: mol_type = other DNA
ttgttcaaggtggacc

SEQ ID NO: 6502 - DNA, 16 bp, synthetic construct
  misc_feature 1..16: note = synthetic [barcode part1]
  source 1..16: mol_type = other DNA
gcactaggtcacctct

SEQ ID NO: 6503 - DNA, 16 bp, synthetic construct
  misc_feature 1..16: note = synthetic [barcode part1]
  source 1..16: mol_type = other DNA
gaccaatcaatcgacc

SEQ ID NO: 6504 - DNA, 16 bp, synthetic construct
  misc_feature 1..16: note = synthetic [barcode part1]
  source 1..16: mol_type = other DNA
tctccaagaggagtct

SEQ ID NO: 6505 - DNA, 16 bp, synthetic construct
  misc_feature 1..16: note = synthetic [barcode part1]
  source 1..16: mol_type = other DNA
cagaactgagaggaac

SEQ ID NO: 6506 - DNA, 16 bp, synthetic construct
  misc_feature 1..16: note = synthetic [barcode part1]
  source 1..16: mol_type = other DNA
tgtacagtgttccgcc

SEQ ID NO: 6507 - DNA, 16 bp, synthetic construct
  misc_feature 1..16: note = synthetic [barcode part1]
  source 1..16: mol_type = other DNA
gtgagaaggttgttgt

SEQ ID NO: 6508 - DNA, 16 bp, synthetic construct
  misc_feature 1..16: note = synthetic [barcode part1]
  source 1..16: mol_type = other DNA
ccgataagagtacggc

SEQ ID NO: 6509 - DNA, 16 bp, synthetic construct
  misc_feature 1..16: note = synthetic [barcode part1]
  source 1..16: mol_type = other DNA
attcggatcactctac

SEQ ID NO: 6510 - DNA, 16 bp, synthetic construct
  misc_feature 1..16: note = synthetic [barcode part1]
  source 1..16: mol_type = other DNA
ccttggtcgatagaac

SEQ ID NO: 6511 - DNA, 16 bp, synthetic construct
  misc_feature 1..16: note = synthetic [barcode part1]
  source 1..16: mol_type = other DNA
tgcaactgagaactag

SEQ ID NO: 6512 - DNA, 16 bp, synthetic construct
  misc_feature 1..16: note = synthetic [barcode part1]
  source 1..16: mol_type = other DNA
gttacagttgtccgcc

SEQ ID NO: 6513 - DNA, 16 bp, synthetic construct
  misc_feature 1..16: note = synthetic [barcode part1]
  source 1..16: mol_type = other DNA
taaggtccgtgtgtac

SEQ ID NO: 6514 - DNA, 16 bp, synthetic construct
  misc_feature 1..16: note = synthetic [barcode part1]
  source 1..16: mol_type = other DNA
gaactacgttcaacgc

SEQ ID NO: 6515 - DNA, 16 bp, synthetic construct
  misc_feature 1..16: note = synthetic [barcode part1]
  source 1..16: mol_type = other DNA
cactaccgttcgaacc

SEQ ID NO: 6516 - DNA, 16 bp, synthetic construct
  misc_feature 1..16: note = synthetic [barcode part1]
  source 1..16: mol_type = other DNA
gattggcaggatctct

SEQ ID NO: 6517 - DNA, 16 bp, synthetic construct
  misc_feature 1..16: note = synthetic [barcode part1]
  source 1..16: mol_type = other DNA
tgccttgactcgcaac

SEQ ID NO: 6518 - DNA, 16 bp, synthetic construct
  misc_feature 1..16: note = synthetic [barcode part1]
  source 1..16: mol_type = other DNA
caactgactagagtcc

SEQ ID NO: 6519 - DNA, 16 bp, synthetic construct
  misc_feature 1..16: note = synthetic [barcode part1]
  source 1..16: mol_type = other DNA
gaagtgcaccggattg

SEQ ID NO: 6520 - DNA, 16 bp, synthetic construct
  misc_feature 1..16: note = synthetic [barcode part1]
  source 1..16: mol_type = other DNA
gcaattgtcctagttc

SEQ ID NO: 6521 - DNA, 16 bp, synthetic construct
  misc_feature 1..16: note = synthetic [barcode part1]
  source 1..16: mol_type = other DNA
tcgtattgcaggaacc

SEQ ID NO: 6522 - DNA, 16 bp, synthetic construct
  misc_feature 1..16: note = synthetic [barcode part1]
  source 1..16: mol_type = other DNA
acagttgagaaggttc

SEQ ID NO: 6523 - DNA, 16 bp, synthetic construct
  misc_feature 1..16: note = synthetic [barcode part1]
  source 1..16: mol_type = other DNA
tcctgtgccaacagtc

SEQ ID NO: 6524 - DNA, 16 bp, synthetic construct
  misc_feature 1..16: note = synthetic [barcode part1]
  source 1..16: mol_type = other DNA
ttggatacgagacagt

SEQ ID NO: 6525 - DNA, 16 bp, synthetic construct
  misc_feature 1..16: note = synthetic [barcode part1]
  source 1..16: mol_type = other DNA
tccaccttgtctgttg

SEQ ID NO: 6526 - DNA, 16 bp, synthetic construct
  misc_feature 1..16: note = synthetic [barcode part1]
  source 1..16: mol_type = other DNA
cgtacaggaacgttct

SEQ ID NO: 6527 - DNA, 16 bp, synthetic construct
  misc_feature 1..16: note = synthetic [barcode part1]
  source 1..16: mol_type = other DNA
gtcttgcactcgagtc

SEQ ID NO: 6528 - DNA, 16 bp, synthetic construct
  misc_feature 1..16: note = synthetic [barcode part1]
  source 1..16: mol_type = other DNA
cagtacgatcgttctt

SEQ ID NO: 6529 - DNA, 16 bp, synthetic construct
  misc_feature 1..16: note = synthetic [barcode part1]
  source 1..16: mol_type = other DNA
tcgaacgtatccgagt

SEQ ID NO: 6530 - DNA, 16 bp, synthetic construct
  misc_feature 1..16: note = synthetic [barcode part1]
  source 1..16: mol_type = other DNA
tagagaggcactgatt

SEQ ID NO: 6531 - DNA, 16 bp, synthetic construct
  misc_feature 1..16: note = synthetic [barcode part1]
  source 1..16: mol_type = other DNA
tcacagatatcctacc

SEQ ID NO: 6532 - DNA, 16 bp, synthetic construct
  misc_feature 1..16: note = synthetic [barcode part1]
  source 1..16: mol_type = other DNA
atcgcaggaatctcgt

SEQ ID NO: 6533 - DNA, 16 bp, synthetic construct
  misc_feature 1..16: note = synthetic [barcode part1]
  source 1..16: mol_type = other DNA
cgttccgatcttgtct

SEQ ID NO: 6534 - DNA, 16 bp, synthetic construct
  misc_feature 1..16: note = synthetic [barcode part1]
  source 1..16: mol_type = other DNA
cgagtgaatctactcg

SEQ ID NO: 6535 - DNA, 16 bp, synthetic construct
  misc_feature 1..16: note = synthetic [barcode part1]
  source 1..16: mol_type = other DNA
ccttctctaacgtcgt

SEQ ID NO: 6536 - DNA, 16 bp, synthetic construct
  misc_feature 1..16: note = synthetic [barcode part1]
  source 1..16: mol_type = other DNA
cagacgagtcctagag

SEQ ID NO: 6537 - DNA, 16 bp, synthetic construct
  misc_feature 1..16: note = synthetic [barcode part1]
  source 1..16: mol_type = other DNA
ttgactgtacgcgtag

SEQ ID NO: 6538 - DNA, 16 bp, synthetic construct
  misc_feature 1..16: note = synthetic [barcode part1]
  source 1..16: mol_type = other DNA
cgttcgtgtcttggac

SEQ ID NO: 6539 - DNA, 16 bp, synthetic construct
  misc_feature 1..16: note = synthetic [barcode part1]
  source 1..16: mol_type = other DNA
agttgtgcacacaacc

SEQ ID NO: 6540 - DNA, 16 bp, synthetic construct
  misc_feature 1..16: note = synthetic [barcode part1]
  source 1..16: mol_type = other DNA
gatatagttcggcaag

SEQ ID NO: 6541 - DNA, 16 bp, synthetic construct
  misc_feature 1..16: note = synthetic [barcode part1]
  source 1..16: mol_type = other DNA
tcgacgcagagtcaag

SEQ ID NO: 6542 - DNA, 16 bp, synthetic construct
  misc_feature 1..16: note = synthetic [barcode part1]
  source 1..16: mol_type = other DNA
acacacttcactgccg

SEQ ID NO: 6543 - DNA, 16 bp, synthetic construct
  misc_feature 1..16: note = synthetic [barcode part1]
  source 1..16: mol_type = other DNA
aactcgacaacttggc

SEQ ID NO: 6544 - DNA, 16 bp, synthetic construct
  misc_feature 1..16: note = synthetic [barcode part1]
  source 1..16: mol_type = other DNA
tattcgcaggttctgt

SEQ ID NO: 6545 - DNA, 16 bp, synthetic construct
  misc_feature 1..16: note = synthetic [barcode part1]
  source 1..16: mol_type = other DNA
tcttcagagtcggagt

SEQ ID NO: 6546 - DNA, 16 bp, synthetic construct
  misc_feature 1..16: note = synthetic [barcode part1]
  source 1..16: mol_type = other DNA
gacaatacttaggcag

SEQ ID NO: 6547 - DNA, 16 bp, synthetic construct
  misc_feature 1..16: note = synthetic [barcode part1]
  source 1..16: mol_type = other DNA
tctgacaacttggcag

SEQ ID NO: 6548 - DNA, 16 bp, synthetic construct
  misc_feature 1..16: note = synthetic [barcode part1]
  source 1..16: mol_type = other DNA
gagtcgttattctcgt

SEQ ID NO: 6549 - DNA, 16 bp, synthetic construct
  misc_feature 1..16: note = synthetic [barcode part1]
  source 1..16: mol_type = other DNA
aagatccgataccacc

SEQ ID NO: 6550 - DNA, 16 bp, synthetic construct
  misc_feature 1..16: note = synthetic [barcode part1]
  source 1..16: mol_type = other DNA
gcgccttgtcgaactt

SEQ ID NO: 6551 - DNA, 16 bp, synthetic construct
  misc_feature 1..16: note = synthetic [barcode part1]
  source 1..16: mol_type = other DNA
cgagtgcgaagtaacc

SEQ ID NO: 6552 - DNA, 16 bp, synthetic construct
  misc_feature 1..16: note = synthetic [barcode part1]
  source 1..16: mol_type = other DNA
aatctcgtacttaccg

SEQ ID NO: 6553 - DNA, 16 bp, synthetic construct
  misc_feature 1..16: note = synthetic [barcode part1]
  source 1..16: mol_type = other DNA
tgcagatcctaggtac

SEQ ID NO: 6554 - DNA, 16 bp, synthetic construct
  misc_feature 1..16: note = synthetic [barcode part1]
  source 1..16: mol_type = other DNA
atctaggtccgtcacc

SEQ ID NO: 6555 - DNA, 16 bp, synthetic construct
  misc_feature 1..16: note = synthetic [barcode part1]
  source 1..16: mol_type = other DNA
gtaatcggttgtgtgc

SEQ ID NO: 6556 - DNA, 16 bp, synthetic construct
  misc_feature 1..16: note = synthetic [barcode part1]
  source 1..16: mol_type = other DNA
gcgtgatccagtcctt

SEQ ID NO: 6557 - DNA, 16 bp, synthetic construct
  misc_feature 1..16: note = synthetic [barcode part1]
  source 1..16: mol_type = other DNA
ccgagaatcagtatag

SEQ ID NO: 6558 - DNA, 16 bp, synthetic construct
  misc_feature 1..16: note = synthetic [barcode part1]
  source 1..16: mol_type = other DNA
agagttcggtgagtgc

SEQ ID NO: 6559 - DNA, 16 bp, synthetic construct
  misc_feature 1..16: note = synthetic [barcode part1]
  source 1..16: mol_type = other DNA
tgttatcgtgatcacc

SEQ ID NO: 6560 - DNA, 16 bp, synthetic construct
  misc_feature 1..16: note = synthetic [barcode part1]
  source 1..16: mol_type = other DNA
aacttggtcaggtcac

SEQ ID NO: 6561 - DNA, 16 bp, synthetic construct
  misc_feature 1..16: note = synthetic [barcode part1]
  source 1..16: mol_type = other DNA
ttgtatctctagtggc

SEQ ID NO: 6562 - DNA, 16 bp, synthetic construct
  misc_feature 1..16: note = synthetic [barcode part1]
  source 1..16: mol_type = other DNA
ccagaatctgtctatc

SEQ ID NO: 6563 - DNA, 16 bp, synthetic construct
  misc_feature 1..16: note = synthetic [barcode part1]
  source 1..16: mol_type = other DNA
agtacaaggtgcagag

SEQ ID NO: 6564 - DNA, 16 bp, synthetic construct
  misc_feature 1..16: note = synthetic [barcode part1]
  source 1..16: mol_type = other DNA
gttcgtaagaacggcg

SEQ ID NO: 6565 - DNA, 16 bp, synthetic construct
  misc_feature 1..16: note = synthetic [barcode part1]
  source 1..16: mol_type = other DNA
tcggattgattcggtg

SEQ ID NO: 6566 - DNA, 16 bp, synthetic construct
  misc_feature 1..16: note = synthetic [barcode part1]
  source 1..16: mol_type = other DNA
actccactcgcacaac

SEQ ID NO: 6567 - DNA, 16 bp, synthetic construct
  misc_feature 1..16: note = synthetic [barcode part1]
  source 1..16: mol_type = other DNA
cgtctctaggatacag

SEQ ID NO: 6568 - DNA, 16 bp, synthetic construct
  misc_feature 1..16: note = synthetic [barcode part1]
  source 1..16: mol_type = other DNA
tgccaataggactaag

SEQ ID NO: 6569 - DNA, 16 bp, synthetic construct
  misc_feature 1..16: note = synthetic [barcode part1]
  source 1..16: mol_type = other DNA
tgtcgtcctatacaac

SEQ ID NO: 6570 - DNA, 16 bp, synthetic construct
  misc_feature 1..16: note = synthetic [barcode part1]
  source 1..16: mol_type = other DNA
gataagatcgaacacc

SEQ ID NO: 6571 - DNA, 16 bp, synthetic construct
  misc_feature 1..16: note = synthetic [barcode part1]
  source 1..16: mol_type = other DNA
gtaggcaagatagacg

SEQ ID NO: 6572 - DNA, 16 bp, synthetic construct
  misc_feature 1..16: note = synthetic [barcode part1]
  source 1..16: mol_type = other DNA
agttcttctgatacgc

SEQ ID NO: 6573 - DNA, 16 bp, synthetic construct
  misc_feature 1..16: note = synthetic [barcode part1]
  source 1..16: mol_type = other DNA
ttggcgacctacacct

SEQ ID NO: 6574 - DNA, 16 bp, synthetic construct
  misc_feature 1..16: note = synthetic [barcode part1]
  source 1..16: mol_type = other DNA
gtcgtcggattactag

SEQ ID NO: 6575 - DNA, 16 bp, synthetic construct
  misc_feature 1..16: note = synthetic [barcode part1]
  source 1..16: mol_type = other DNA
attggcaacctagacc

SEQ ID NO: 6576 - DNA, 16 bp, synthetic construct
  misc_feature 1..16: note = synthetic [barcode part1]
  source 1..16: mol_type = other DNA
tacgcgatctggcctt

SEQ ID NO: 6577 - DNA, 16 bp, synthetic construct
  misc_feature 1..16: note = synthetic [barcode part1]
  source 1..16: mol_type = other DNA
tgtaacacaggtgagt

SEQ ID NO: 6578 - DNA, 16 bp, synthetic construct
  misc_feature 1..16: note = synthetic [barcode part1]
  source 1..16: mol_type = other DNA
gagtgagagacttcgc

SEQ ID NO: 6579 - DNA, 16 bp, synthetic construct
  misc_feature 1..16: note = synthetic [barcode part1]
  source 1..16: mol_type = other DNA
tccacaacttgttgtg

SEQ ID NO: 6580 - DNA, 16 bp, synthetic construct
  misc_feature 1..16: note = synthetic [barcode part1]
  source 1..16: mol_type = other DNA
attatccaacactcgc

SEQ ID NO: 6581 - DNA, 16 bp, synthetic construct
  misc_feature 1..16: note = synthetic [barcode part1]
  source 1..16: mol_type = other DNA
ttggtccggtacgttc

SEQ ID NO: 6582 - DNA, 16 bp, synthetic construct
  misc_feature 1..16: note = synthetic [barcode part1]
  source 1..16: mol_type = other DNA
ccgacgtagtcagaag

SEQ ID NO: 6583 - DNA, 16 bp, synthetic construct
  misc_feature 1..16: note = synthetic [barcode part1]
  source 1..16: mol_type = other DNA
gataattgatccggcc

SEQ ID NO: 6584 - DNA, 16 bp, synthetic construct
  misc_feature 1..16: note = synthetic [barcode part1]
  source 1..16: mol_type = other DNA
tctgattgcaccggtc

SEQ ID NO: 6585 - DNA, 16 bp, synthetic construct
  misc_feature 1..16: note = synthetic [barcode part1]
  source 1..16: mol_type = other DNA
tagtgcggtgcaactt

SEQ ID NO: 6586 - DNA, 16 bp, synthetic construct
  misc_feature 1..16: note = synthetic [barcode part1]
  source 1..16: mol_type = other DNA
cgattggtcgagatct

SEQ ID NO: 6587 - DNA, 16 bp, synthetic construct
  misc_feature 1..16: note = synthetic [barcode part1]
  source 1..16: mol_type = other DNA
tcagtccggattagac

SEQ ID NO: 6588 - DNA, 16 bp, synthetic construct
  misc_feature 1..16: note = synthetic [barcode part1]
  source 1..16: mol_type = other DNA
taattgtccacgcgag

SEQ ID NO: 6589 - DNA, 16 bp, synthetic construct
  misc_feature 1..16: note = synthetic [barcode part1]
  source 1..16: mol_type = other DNA
aactggtgttggttgc

SEQ ID NO: 6590 - DNA, 16 bp, synthetic construct
  misc_feature 1..16: note = synthetic [barcode part1]
  source 1..16: mol_type = other DNA
gagaccttctggaact

SEQ ID NO: 6591 - DNA, 16 bp, synthetic construct
  misc_feature 1..16: note = synthetic [barcode part1]
  source 1..16: mol_type = other DNA
ttccaagtactcgccg

SEQ ID NO: 6592 - DNA, 16 bp, synthetic construct
  misc_feature 1..16: note = synthetic [barcode part1]
  source 1..16: mol_type = other DNA
gtaccttgcacagagt

SEQ ID NO: 6593 - DNA, 16 bp, synthetic construct
  misc_feature 1..16: note = synthetic [barcode part1]
  source 1..16: mol_type = other DNA
atcgtgattactcgtc

SEQ ID NO: 6594 - DNA, 16 bp, synthetic construct
  misc_feature 1..16: note = synthetic [barcode part1]
  source 1..16: mol_type = other DNA
cgtaacaagattccgc

SEQ ID NO: 6595 - DNA, 16 bp, synthetic construct
  misc_feature 1..16: note = synthetic [barcode part1]
  source 1..16: mol_type = other DNA
taagtcgttcctgcgc

SEQ ID NO: 6596 - DNA, 16 bp, synthetic construct
  misc_feature 1..16: note = synthetic [barcode part1]
  source 1..16: mol_type = other DNA
tcctccacttgatctg

SEQ ID NO: 6597 - DNA, 16 bp, synthetic construct
  misc_feature 1..16: note = synthetic [barcode part1]
  source 1..16: mol_type = other DNA
accgttaggtcactag

SEQ ID NO: 6598 - DNA, 16 bp, synthetic construct
  misc_feature 1..16: note = synthetic [barcode part1]
  source 1..16: mol_type = other DNA
cacaagtcgagtactc

SEQ ID NO: 6599 - DNA, 16 bp, synthetic construct
  misc_feature 1..16: note = synthetic [barcode part1]
  source 1..16: mol_type = other DNA
cactaagtgtcgaacc

SEQ ID NO: 6600 - DNA, 16 bp, synthetic construct
  misc_feature 1..16: note = synthetic [barcode part1]
  source 1..16: mol_type = other DNA
tctatcgtacgtcagt

SEQ ID NO: 6601 - DNA, 16 bp, synthetic construct
  misc_feature 1..16: note = synthetic [barcode part1]
  source 1..16: mol_type = other DNA
caggtaccgatctcct

SEQ ID NO: 6602 - DNA, 16 bp, synthetic construct
  misc_feature 1..16: note = synthetic [barcode part1]
  source 1..16: mol_type = other DNA
taccgccgtaattgtt

SEQ ID NO: 6603 - DNA, 16 bp, synthetic construct
  misc_feature 1..16: note = synthetic [barcode part1]
  source 1..16: mol_type = other DNA
atagttgtcttggcct

SEQ ID NO: 6604 - DNA, 16 bp, synthetic construct
  misc_feature 1..16: note = synthetic [barcode part1]
  source 1..16: mol_type = other DNA
aggaccagttgaagag

SEQ ID NO: 6605 - DNA, 16 bp, synthetic construct
  misc_feature 1..16: note = synthetic [barcode part1]
  source 1..16: mol_type = other DNA
tctcgatcgtatcagt

SEQ ID NO: 6606 - DNA, 16 bp, synthetic construct
  misc_feature 1..16: note = synthetic [barcode part1]
  source 1..16: mol_type = other DNA
gcacagaattcggcag

SEQ ID NO: 6607 - DNA, 16 bp, synthetic construct
  misc_feature 1..16: note = synthetic [barcode part1]
  source 1..16: mol_type = other DNA
gtagttcctgtgcctg

SEQ ID NO: 6608 - DNA, 16 bp, synthetic construct
  misc_feature 1..16: note = synthetic [barcode part1]
  source 1..16: mol_type = other DNA
tactctatccgtcgtc

SEQ ID NO: 6609 - DNA, 16 bp, synthetic construct
  misc_feature 1..16: note = synthetic [barcode part1]
  source 1..16: mol_type = other DNA
aacctcacgcctatcg

SEQ ID NO: 6610 - DNA, 16 bp, synthetic construct
  misc_feature 1..16: note = synthetic [barcode part1]
  source 1..16: mol_type = other DNA
actacggtaagtgagt

SEQ ID NO: 6611 - DNA, 16 bp, synthetic construct
  misc_feature 1..16: note = synthetic [barcode part1]
  source 1..16: mol_type = other DNA
gtgacttcgtctccag

SEQ ID NO: 6612 - DNA, 16 bp, synthetic construct
  misc_feature 1..16: note = synthetic [barcode part1]
  source 1..16: mol_type = other DNA
agaagtggagtgtggt

SEQ ID NO: 6613 - DNA, 16 bp, synthetic construct
  misc_feature 1..16: note = synthetic [barcode part1]
  source 1..16: mol_type = other DNA
tggcgacgttatcaac

SEQ ID NO: 6614 - DNA, 16 bp, synthetic construct
  misc_feature 1..16: note = synthetic [barcode part1]
  source 1..16: mol_type = other DNA
tcaacacacactggtg

SEQ ID NO: 6615 - DNA, 16 bp, synthetic construct
  misc_feature 1..16: note = synthetic [barcode part1]
  source 1..16: mol_type = other DNA
aattgacggcctcagt

SEQ ID NO: 6616 - DNA, 16 bp, synthetic construct
  misc_feature 1..16: note = synthetic [barcode part1]
  source 1..16: mol_type = other DNA
acggttatcctgattc

SEQ ID NO: 6617 - DNA, 16 bp, synthetic construct
  misc_feature 1..16: note = synthetic [barcode part1]
  source 1..16: mol_type = other DNA
gactatcagtgtagag

SEQ ID NO: 6618 - DNA, 16 bp, synthetic construct
  misc_feature 1..16: note = synthetic [barcode part1]
  source 1..16: mol_type = other DNA
agttaccacctccgtg

SEQ ID NO: 6619 - DNA, 16 bp, synthetic construct
  misc_feature 1..16: note = synthetic [barcode part1]
  source 1..16: mol_type = other DNA
tgattgcggactggag

SEQ ID NO: 6620 - DNA, 16 bp, synthetic construct
  misc_feature 1..16: note = synthetic [barcode part1]
  source 1..16: mol_type = other DNA
acaatcaaggatcggt

SEQ ID NO: 6621 - DNA, 16 bp, synthetic construct
  misc_feature 1..16: note = synthetic [barcode part1]
  source 1..16: mol_type = other DNA
cacctcgtactgtctt

SEQ ID NO: 6622 - DNA, 16 bp, synthetic construct
  misc_feature 1..16: note = synthetic [barcode part1]
  source 1..16: mol_type = other DNA
acgtgcctactgatag

SEQ ID NO: 6623 - DNA, 16 bp, synthetic construct
  misc_feature 1..16: note = synthetic [barcode part1]
  source 1..16: mol_type = other DNA
cagttgtaatacgccg

SEQ ID NO: 6624 - DNA, 16 bp, synthetic construct
  misc_feature 1..16: note = synthetic [barcode part1]
  source 1..16: mol_type = other DNA
acgtatcctcgtagag

SEQ ID NO: 6625 - DNA, 16 bp, synthetic construct
  misc_feature 1..16: note = synthetic [barcode part1]
  source 1..16: mol_type = other DNA
actacgactatccgcc

SEQ ID NO: 6626 - DNA, 16 bp, synthetic construct
  misc_feature 1..16: note = synthetic [barcode part1]
  source 1..16: mol_type = other DNA
cgaaggacgcacaatc

SEQ ID NO: 6627 - DNA, 16 bp, synthetic construct
  misc_feature 1..16: note = synthetic [barcode part1]
  source 1..16: mol_type = other DNA
gaggacgtaccaggtt

SEQ ID NO: 6628 - DNA, 16 bp, synthetic construct
  misc_feature 1..16: note = synthetic [barcode part1]
  source 1..16: mol_type = other DNA
cacgtaggaacacctt

SEQ ID NO: 6629 - DNA, 16 bp, synthetic construct
  misc_feature 1..16: note = synthetic [barcode part1]
  source 1..16: mol_type = other DNA
tctgcgcgactcaact

SEQ ID NO: 6630 - DNA, 16 bp, synthetic construct
  misc_feature 1..16: note = synthetic [barcode part1]
  source 1..16: mol_type = other DNA
ccaagagtgcgttgag

SEQ ID NO: 6631 - DNA, 16 bp, synthetic construct
  misc_feature 1..16: note = synthetic [barcode part1]
  source 1..16: mol_type = other DNA
tacacacacgtgtgtg

SEQ ID NO: 6632 - DNA, 16 bp, synthetic construct
  misc_feature 1..16: note = synthetic [barcode part1]
  source 1..16: mol_type = other DNA
actacggtcgtctatt

SEQ ID NO: 6633 - DNA, 16 bp, synthetic construct
  misc_feature 1..16: note = synthetic [barcode part1]
  source 1..16: mol_type = other DNA
atcgtgagtgagtggc

SEQ ID NO: 6634 - DNA, 16 bp, synthetic construct
  misc_feature 1..16: note = synthetic [barcode part1]
  source 1..16: mol_type = other DNA
aggcgtagactaccag

SEQ ID NO: 6635 - DNA, 16 bp, synthetic construct
  misc_feature 1..16: note = synthetic [barcode part1]
  source 1..16: mol_type = other DNA
gtgaaggttgatagtc

SEQ ID NO: 6636 - DNA, 16 bp, synthetic construct
  misc_feature 1..16: note = synthetic [barcode part1]
  source 1..16: mol_type = other DNA
tgacttgtcgtgcctg

SEQ ID NO: 6637 - DNA, 16 bp, synthetic construct
  misc_feature 1..16: note = synthetic [barcode part1]
  source 1..16: mol_type = other DNA
caggactgtcaactgt

SEQ ID NO: 6638 - DNA, 16 bp, synthetic construct
  misc_feature 1..16: note = synthetic [barcode part1]
  source 1..16: mol_type = other DNA
ccttgtgaccactgac

SEQ ID NO: 6639 - DNA, 16 bp, synthetic construct
  misc_feature 1..16: note = synthetic [barcode part1]
  source 1..16: mol_type = other DNA
accttccttgagagag

SEQ ID NO: 6640 - DNA, 16 bp, synthetic construct
  misc_feature 1..16: note = synthetic [barcode part1]
  source 1..16: mol_type = other DNA
cgaggagtggttacgt

SEQ ID NO: 6641 - DNA, 16 bp, synthetic construct
  misc_feature 1..16: note = synthetic [barcode part1]
  source 1..16: mol_type = other DNA
tctcggttacaccgac

SEQ ID NO: 6642 - DNA, 16 bp, synthetic construct
  misc_feature 1..16: note = synthetic [barcode part1]
  source 1..16: mol_type = other DNA
tgaggaaccagtcctt

SEQ ID NO: 6643 - DNA, 16 bp, synthetic construct
  misc_feature 1..16: note = synthetic [barcode part1]
  source 1..16: mol_type = other DNA
caggactaaccttggt

SEQ ID NO: 6644 - DNA, 16 bp, synthetic construct
  misc_feature 1..16: note = synthetic [barcode part1]
  source 1..16: mol_type = other DNA
acctgcgaaggactag

SEQ ID NO: 6645 - DNA, 16 bp, synthetic construct
  misc_feature 1..16: note = synthetic [barcode part1]
  source 1..16: mol_type = other DNA
actcaagtgttactcc

SEQ ID NO: 6646 - DNA, 16 bp, synthetic construct
  misc_feature 1..16: note = synthetic [barcode part1]
  source 1..16: mol_type = other DNA
tgcgtcgtagtatacg

SEQ ID NO: 6647 - DNA, 16 bp, synthetic construct
  misc_feature 1..16: note = synthetic [barcode part1]
  source 1..16: mol_type = other DNA
tcttctaaggtgttcg

SEQ ID NO: 6648 - DNA, 16 bp, synthetic construct
  misc_feature 1..16: note = synthetic [barcode part1]
  source 1..16: mol_type = other DNA
gcaaggactggtagtc

SEQ ID NO: 6649 - DNA, 16 bp, synthetic construct
  misc_feature 1..16: note = synthetic [barcode part1]
  source 1..16: mol_type = other DNA
acagtcaaccagtacc

SEQ ID NO: 6650 - DNA, 16 bp, synthetic construct
  misc_feature 1..16: note = synthetic [barcode part1]
  source 1..16: mol_type = other DNA
tagtggtccaagttgc

SEQ ID NO: 6651 - DNA, 16 bp, synthetic construct
  misc_feature 1..16: note = synthetic [barcode part1]
  source 1..16: mol_type = other DNA
gataagaccaatacgc

SEQ ID NO: 6652 - DNA, 16 bp, synthetic construct
  misc_feature 1..16: note = synthetic [barcode part1]
  source 1..16: mol_type = other DNA
tgacacgttaggcact

SEQ ID NO: 6653 - DNA, 16 bp, synthetic construct
  misc_feature 1..16: note = synthetic [barcode part1]
  source 1..16: mol_type = other DNA
gtaactaggtcgaagt

SEQ ID NO: 6654 - DNA, 16 bp, synthetic construct
  misc_feature 1..16: note = synthetic [barcode part1]
  source 1..16: mol_type = other DNA
cctacctcctagagtg

SEQ ID NO: 6655 - DNA, 16 bp, synthetic construct
  misc_feature 1..16: note = synthetic [barcode part1]
  source 1..16: mol_type = other DNA
gagataaggcgcctac

SEQ ID NO: 6656 - DNA, 16 bp, synthetic construct
  misc_feature 1..16: note = synthetic [barcode part1]
  source 1..16: mol_type = other DNA
tgagatatcacgtgag

SEQ ID NO: 6657 - DNA, 16 bp, synthetic construct
  misc_feature 1..16: note = synthetic [barcode part1]
  source 1..16: mol_type = other DNA
tggcgtcttgtagtag

SEQ ID NO: 6658 - DNA, 16 bp, synthetic construct
  misc_feature 1..16: note = synthetic [barcode part1]
  source 1..16: mol_type = other DNA
agtcaataccgcgact

SEQ ID NO: 6659 - DNA, 16 bp, synthetic construct
  misc_feature 1..16: note = synthetic [barcode part1]
  source 1..16: mol_type = other DNA
tcgagaccagaatcct

SEQ ID NO: 6660 - DNA, 16 bp, synthetic construct
  misc_feature 1..16: note = synthetic [barcode part1]
  source 1..16: mol_type = other DNA
cgtactactcttcaag

SEQ ID NO: 6661 - DNA, 16 bp, synthetic construct
  misc_feature 1..16: note = synthetic [barcode part1]
  source 1..16: mol_type = other DNA
cgttgattcaatctcg

SEQ ID NO: 6662 - DNA, 16 bp, synthetic construct
  misc_feature 1..16: note = synthetic [barcode part1]
  source 1..16: mol_type = other DNA
tcggtgacagaggtgt

SEQ ID NO: 6663 - DNA, 16 bp, synthetic construct
  misc_feature 1..16: note = synthetic [barcode part1]
  source 1..16: mol_type = other DNA
caacctcaagaggttc

SEQ ID NO: 6664 - DNA, 16 bp, synthetic construct
  misc_feature 1..16: note = synthetic [barcode part1]
  source 1..16: mol_type = other DNA
gcacaagtgaggatag

SEQ ID NO: 6665 - DNA, 16 bp, synthetic construct
  misc_feature 1..16: note = synthetic [barcode part1]
  source 1..16: mol_type = other DNA
cgtggatctgcaagtt

SEQ ID NO: 6666 - DNA, 16 bp, synthetic construct
  misc_feature 1..16: note = synthetic [barcode part1]
  source 1..16: mol_type = other DNA
tggagtgacttaagtg

SEQ ID NO: 6667 - DNA, 16 bp, synthetic construct
  misc_feature 1..16: note = synthetic [barcode part1]
  source 1..16: mol_type = other DNA
cgatcgatacgacgtt

SEQ ID NO: 6668 - DNA, 16 bp, synthetic construct
  misc_feature 1..16: note = synthetic [barcode part1]
  source 1..16: mol_type = other DNA
tcgaacacctaccacc

SEQ ID NO: 6669 - DNA, 16 bp, synthetic construct
  misc_feature 1..16: note = synthetic [barcode part1]
  source 1..16: mol_type = other DNA
ccaatccaagtgcctc

SEQ ID NO: 6670 - DNA, 16 bp, synthetic construct
  misc_feature 1..16: note = synthetic [barcode part1]
  source 1..16: mol_type = other DNA
aggacgtggttcaacg

SEQ ID NO: 6671 - DNA, 16 bp, synthetic construct
  misc_feature 1..16: note = synthetic [barcode part1]
  source 1..16: mol_type = other DNA
atcaaccgtgtacgtg

SEQ ID NO: 6672 - DNA, 16 bp, synthetic construct
  misc_feature 1..16: note = synthetic [barcode part1]
  source 1..16: mol_type = other DNA
aggcaacgtacaaccg

SEQ ID NO: 6673 - DNA, 16 bp, synthetic construct
  misc_feature 1..16: note = synthetic [barcode part1]
  source 1..16: mol_type = other DNA
acgagttgttatctcc

SEQ ID NO: 6674 - DNA, 16 bp, synthetic construct
  misc_feature 1..16: note = synthetic [barcode part1]
  source 1..16: mol_type = other DNA
aacactgtgcagtgtc

SEQ ID NO: 6675 - DNA, 16 bp, synthetic construct
  misc_feature 1..16: note = synthetic [barcode part1]
  source 1..16: mol_type = other DNA
aacaccgaactctggt

SEQ ID NO: 6676 - DNA, 16 bp, synthetic construct
  misc_feature 1..16: note = synthetic [barcode part1]
  source 1..16: mol_type = other DNA
cagatacctcttagtc

SEQ ID NO: 6677 - DNA, 16 bp, synthetic construct
  misc_feature 1..16: note = synthetic [barcode part1]
  source 1..16: mol_type = other DNA
tcaagacacttcaggc

SEQ ID NO: 6678 - DNA, 16 bp, synthetic construct
  misc_feature 1..16: note = synthetic [barcode part1]
  source 1..16: mol_type = other DNA
gttgtctggcaagact

SEQ ID NO: 6679 - DNA, 16 bp, synthetic construct
  misc_feature 1..16: note = synthetic [barcode part1]
  source 1..16: mol_type = other DNA
ccagagtgtagtgtct

SEQ ID NO: 6680 - DNA, 16 bp, synthetic construct
  misc_feature 1..16: note = synthetic [barcode part1]
  source 1..16: mol_type = other DNA
tatctggcacgttgag

SEQ ID NO: 6681 - DNA, 16 bp, synthetic construct
  misc_feature 1..16: note = synthetic [barcode part1]
  source 1..16: mol_type = other DNA
aagtccggtagtcact

SEQ ID NO: 6682 - DNA, 16 bp, synthetic construct
  misc_feature 1..16: note = synthetic [barcode part1]
  source 1..16: mol_type = other DNA
tcggtctgttcaggtc

SEQ ID NO: 6683 - DNA, 16 bp, synthetic construct
  misc_feature 1..16: note = synthetic [barcode part1]
  source 1..16: mol_type = other DNA
cactaagtaagtcgcc

SEQ ID NO: 6684 - DNA, 16 bp, synthetic construct
  misc_feature 1..16: note = synthetic [barcode part1]
  source 1..16: mol_type = other DNA
tctagaggaccaatcc

SEQ ID NO: 6685 - DNA, 16 bp, synthetic construct
  misc_feature 1..16: note = synthetic [barcode part1]
  source 1..16: mol_type = other DNA
cctgagataaccgact

SEQ ID NO: 6686 - DNA, 16 bp, synthetic construct
  misc_feature 1..16: note = synthetic [barcode part1]
  source 1..16: mol_type = other DNA
aacgcaccaatcacgt

SEQ ID NO: 6687 - DNA, 16 bp, synthetic construct
  misc_feature 1..16: note = synthetic [barcode part1]
  source 1..16: mol_type = other DNA
gacaggtcttacctag

SEQ ID NO: 6688 - DNA, 16 bp, synthetic construct
  misc_feature 1..16: note = synthetic [barcode part1]
  source 1..16: mol_type = other DNA
cctcgcgtatatcttc

SEQ ID NO: 6689 - DNA, 16 bp, synthetic construct
  misc_feature 1..16: note = synthetic [barcode part1]
  source 1..16: mol_type = other DNA
cgtgtgattgtacggt

SEQ ID NO: 6690 - DNA, 16 bp, synthetic construct
  misc_feature 1..16: note = synthetic [barcode part1]
  source 1..16: mol_type = other DNA
tgaccagaactggtct

SEQ ID NO: 6691 - DNA, 16 bp, synthetic construct
  misc_feature 1..16: note = synthetic [barcode part1]
  source 1..16: mol_type = other DNA
ccggaaccacctattc

SEQ ID NO: 6692 - DNA, 16 bp, synthetic construct
  misc_feature 1..16: note = synthetic [barcode part1]
  source 1..16: mol_type = other DNA
aataactcgtgtctcc

SEQ ID NO: 6693 - DNA, 16 bp, synthetic construct
  misc_feature 1..16: note = synthetic [barcode part1]
  source 1..16: mol_type = other DNA
cacgtcgactatacag

SEQ ID NO: 6694 - DNA, 16 bp, synthetic construct
  misc_feature 1..16: note = synthetic [barcode part1]
  source 1..16: mol_type = other DNA
tctgtacgccgagtct

SEQ ID NO: 6695 - DNA, 16 bp, synthetic construct
  misc_feature 1..16: note = synthetic [barcode part1]
  source 1..16: mol_type = other DNA
gagttgtcgtcaagtc

SEQ ID NO: 6696 - DNA, 16 bp, synthetic construct
  misc_feature 1..16: note = synthetic [barcode part1]
  source 1..16: mol_type = other DNA
acaaggacgcacttct

SEQ ID NO: 6697 - DNA, 16 bp, synthetic construct
  misc_feature 1..16: note = synthetic [barcode part1]
  source 1..16: mol_type = other DNA
gcacgacagttaaggc

SEQ ID NO: 6698 - DNA, 16 bp, synthetic construct
  misc_feature 1..16: note = synthetic [barcode part1]
  source 1..16: mol_type = other DNA
cgttcacagtactgcc

SEQ ID NO: 6699 - DNA, 16 bp, synthetic construct
  misc_feature 1..16: note = synthetic [barcode part1]
  source 1..16: mol_type = other DNA
gaacgactcctgttag

SEQ ID NO: 6700 - DNA, 16 bp, synthetic construct
  misc_feature 1..16: note = synthetic [barcode part1]
  source 1..16: mol_type = other DNA
tccgaatataggacag

SEQ ID NO: 6701 - DNA, 16 bp, synthetic construct
  misc_feature 1..16: note = synthetic [barcode part1]
  source 1..16: mol_type = other DNA
cctatagactccaccg

SEQ ID NO: 6702 - DNA, 16 bp, synthetic construct
  misc_feature 1..16: note = synthetic [barcode part1]
  source 1..16: mol_type = other DNA
tacacgtgacttcgag

SEQ ID NO: 6703 - DNA, 16 bp, synthetic construct
  misc_feature 1..16: note = synthetic [barcode part1]
  source 1..16: mol_type = other DNA
atcagaccagactacc

SEQ ID NO: 6704 - DNA, 16 bp, synthetic construct
  misc_feature 1..16: note = synthetic [barcode part1]
  source 1..16: mol_type = other DNA
tgttgttgcggtcacc

SEQ ID NO: 6705 - DNA, 16 bp, synthetic construct
  misc_feature 1..16: note = synthetic [barcode part1]
  source 1..16: mol_type = other DNA
aagatagttcgagtgc

SEQ ID NO: 6706 - DNA, 16 bp, synthetic construct
  misc_feature 1..16: note = synthetic [barcode part1]
  source 1..16: mol_type = other DNA
acgaattcgatcctct

SEQ ID NO: 6707 - DNA, 16 bp, synthetic construct
  misc_feature 1..16: note = synthetic [barcode part1]
  source 1..16: mol_type = other DNA
gccgtctagtaggatt

SEQ ID NO: 6708 - DNA, 16 bp, synthetic construct
  misc_feature 1..16: note = synthetic [barcode part1]
  source 1..16: mol_type = other DNA
tctaggtcacctcgtg

SEQ ID NO: 6709 - DNA, 16 bp, synthetic construct
  misc_feature 1..16: note = synthetic [barcode part1]
  source 1..16: mol_type = other DNA
ccaccagtccttacag

SEQ ID NO: 6710 - DNA, 16 bp, synthetic construct
  misc_feature 1..16: note = synthetic [barcode part1]
  source 1..16: mol_type = other DNA
cactatcacgactact

SEQ ID NO: 6711 - DNA, 16 bp, synthetic construct
  misc_feature 1..16: note = synthetic [barcode part1]
  source 1..16: mol_type = other DNA
ttctactcgtcactcg

SEQ ID NO: 6712 - DNA, 16 bp, synthetic construct
  misc_feature 1..16: note = synthetic [barcode part1]
  source 1..16: mol_type = other DNA
ttcttcaacagtcacg

SEQ ID NO: 6713 - DNA, 16 bp, synthetic construct
  misc_feature 1..16: note = synthetic [barcode part1]
  source 1..16: mol_type = other DNA
ttctgatagttcacgc

SEQ ID NO: 6714 - DNA, 16 bp, synthetic construct
  misc_feature 1..16: note = synthetic [barcode part1]
  source 1..16: mol_type = other DNA
gaattcactcggtctt

SEQ ID NO: 6715 - DNA, 16 bp, synthetic construct
  misc_feature 1..16: note = synthetic [barcode part1]
  source 1..16: mol_type = other DNA
tcaactgcaacaccag

SEQ ID NO: 6716 - DNA, 16 bp, synthetic construct
  misc_feature 1..16: note = synthetic [barcode part1]
  source 1..16: mol_type = other DNA
tcactatattcacggc

SEQ ID NO: 6717 - DNA, 16 bp, synthetic construct
  misc_feature 1..16: note = synthetic [barcode part1]
  source 1..16: mol_type = other DNA
ccggtctgtctaggtt

SEQ ID NO: 6718 - DNA, 16 bp, synthetic construct
  misc_feature 1..16: note = synthetic [barcode part1]
  source 1..16: mol_type = other DNA
agatccagtggttgtc

SEQ ID NO: 6719 - DNA, 16 bp, synthetic construct
  misc_feature 1..16: note = synthetic [barcode part1]
  source 1..16: mol_type = other DNA
ttagtgccgtgtaacg

SEQ ID NO: 6720 - DNA, 16 bp, synthetic construct
  misc_feature 1..16: note = synthetic [barcode part1]
  source 1..16: mol_type = other DNA
gataactccaggtcgt

SEQ ID NO: 6721 - DNA, 16 bp, synthetic construct
  misc_feature 1..16: note = synthetic [barcode part1]
  source 1..16: mol_type = other DNA
aaccacgttagttcct

SEQ ID NO: 6722 - DNA, 16 bp, synthetic construct
  misc_feature 1..16: note = synthetic [barcode part1]
  source 1..16: mol_type = other DNA
tctctgcagtgactcg

SEQ ID NO: 6723 - DNA, 16 bp, synthetic construct
  misc_feature 1..16: note = synthetic [barcode part1]
  source 1..16: mol_type = other DNA
agaggcagtctagtgc

SEQ ID NO: 6724 - DNA, 16 bp, synthetic construct
  misc_feature 1..16: note = synthetic [barcode part1]
  source 1..16: mol_type = other DNA
acactggcacgaatct

SEQ ID NO: 6725 - DNA, 16 bp, synthetic construct
  misc_feature 1..16: note = synthetic [barcode part1]
  source 1..16: mol_type = other DNA
cgtgtgattacgtggt

SEQ ID NO: 6726 - DNA, 16 bp, synthetic construct
  misc_feature 1..16: note = synthetic [barcode part1]
  source 1..16: mol_type = other DNA
cggcaatcttcgcact

SEQ ID NO: 6727 - DNA, 16 bp, synthetic construct
  misc_feature 1..16: note = synthetic [barcode part1]
  source 1..16: mol_type = other DNA
atccaggttgcgaact

SEQ ID NO: 6728 - DNA, 16 bp, synthetic construct
  misc_feature 1..16: note = synthetic [barcode part1]
  source 1..16: mol_type = other DNA
gacggagttggacgtt

SEQ ID NO: 6729 - DNA, 16 bp, synthetic construct
  misc_feature 1..16: note = synthetic [barcode part1]
  source 1..16: mol_type = other DNA
aagacgcgtatctctg

SEQ ID NO: 6730 - DNA, 16 bp, synthetic construct
  misc_feature 1..16: note = synthetic [barcode part1]
  source 1..16: mol_type = other DNA
cggccaattctagaac

SEQ ID NO: 6731 - DNA, 16 bp, synthetic construct
  misc_feature 1..16: note = synthetic [barcode part1]
  source 1..16: mol_type = other DNA
tctataacagacgccg

SEQ ID NO: 6732 - DNA, 16 bp, synthetic construct
  misc_feature 1..16: note = synthetic [barcode part1]
  source 1..16: mol_type = other DNA
tcgcctattatctgcc

SEQ ID NO: 6733 - DNA, 16 bp, synthetic construct
  misc_feature 1..16: note = synthetic [barcode part1]
  source 1..16: mol_type = other DNA
cctcaactataccggc

SEQ ID NO: 6734 - DNA, 16 bp, synthetic construct
  misc_feature 1..16: note = synthetic [barcode part1]
  source 1..16: mol_type = other DNA
agagaaccgtcctact

SEQ ID NO: 6735 - DNA, 16 bp, synthetic construct
  misc_feature 1..16: note = synthetic [barcode part1]
  source 1..16: mol_type = other DNA
gtgagagtagttcaac

SEQ ID NO: 6736 - DNA, 16 bp, synthetic construct
  misc_feature 1..16: note = synthetic [barcode part1]
  source 1..16: mol_type = other DNA
tgtatccagtagtcct

SEQ ID NO: 6737 - DNA, 16 bp, synthetic construct
  misc_feature 1..16: note = synthetic [barcode part1]
  source 1..16: mol_type = other DNA
tcaccgtcagaacaac

SEQ ID NO: 6738 - DNA, 16 bp, synthetic construct
  misc_feature 1..16: note = synthetic [barcode part1]
  source 1..16: mol_type = other DNA
tacgtacgtgtgtgtg

SEQ ID NO: 6739 - DNA, 16 bp, synthetic construct
  misc_feature 1..16: note = synthetic [barcode part1]
  source 1..16: mol_type = other DNA
ttcctaagaccgagac

SEQ ID NO: 6740 - DNA, 16 bp, synthetic construct
  misc_feature 1..16: note = synthetic [barcode part1]
  source 1..16: mol_type = other DNA
agagtaaggtggaacc

SEQ ID NO: 6741 - DNA, 16 bp, synthetic construct
  misc_feature 1..16: note = synthetic [barcode part1]
  source 1..16: mol_type = other DNA
acgaggtatcttgtcg

SEQ ID NO: 6742 - DNA, 16 bp, synthetic construct
  misc_feature 1..16: note = synthetic [barcode part1]
  source 1..16: mol_type = other DNA
acaacaaggaccagag

SEQ ID NO: 6743 - DNA, 16 bp, synthetic construct
  misc_feature 1..16: note = synthetic [barcode part1]
  source 1..16: mol_type = other DNA
tccgtaataccgcctg

SEQ ID NO: 6744 - DNA, 16 bp, synthetic construct
  misc_feature 1..16: note = synthetic [barcode part1]
  source 1..16: mol_type = other DNA
cacctctgacctagtg

SEQ ID NO: 6745 - DNA, 16 bp, synthetic construct
  misc_feature 1..16: note = synthetic [barcode part1]
  source 1..16: mol_type = other DNA
tccagtactgtgtccg

SEQ ID NO: 6746 - DNA, 16 bp, synthetic construct
  misc_feature 1..16: note = synthetic [barcode part1]
  source 1..16: mol_type = other DNA
tcgtctcaggagttag

SEQ ID NO: 6747 - DNA, 16 bp, synthetic construct
  misc_feature 1..16: note = synthetic [barcode part1]
  source 1..16: mol_type = other DNA
tctccgtcgaagatag

SEQ ID NO: 6748 - DNA, 16 bp, synthetic construct
  misc_feature 1..16: note = synthetic [barcode part1]
  source 1..16: mol_type = other DNA
cagtcagtcgactagt

SEQ ID NO: 6749 - DNA, 16 bp, synthetic construct
  misc_feature 1..16: note = synthetic [barcode part1]
  source 1..16: mol_type = other DNA
tctgtacggttgttgt

SEQ ID NO: 6750 - DNA, 16 bp, synthetic construct
  misc_feature 1..16: note = synthetic [barcode part1]
  source 1..16: mol_type = other DNA
caccggagatacagac

SEQ ID NO: 6751 - DNA, 16 bp, synthetic construct
  misc_feature 1..16: note = synthetic [barcode part1]
  source 1..16: mol_type = other DNA
tccacgcctggtgatt

SEQ ID NO: 6752 - DNA, 16 bp, synthetic construct
  misc_feature 1..16: note = synthetic [barcode part1]
  source 1..16: mol_type = other DNA
attcgaacaccactct

SEQ ID NO: 6753 - DNA, 16 bp, synthetic construct
  misc_feature 1..16: note = synthetic [barcode part1]
  source 1..16: mol_type = other DNA
aggcgtctatctgaac

SEQ ID NO: 6754 - DNA, 16 bp, synthetic construct
  misc_feature 1..16: note = synthetic [barcode part1]
  source 1..16: mol_type = other DNA
ttactcgtatccgcct

SEQ ID NO: 6755 - DNA, 16 bp, synthetic construct
  misc_feature 1..16: note = synthetic [barcode part1]
  source 1..16: mol_type = other DNA
acggaggactggatct

SEQ ID NO: 6756 - DNA, 16 bp, synthetic construct
  misc_feature 1..16: note = synthetic [barcode part1]
  source 1..16: mol_type = other DNA
gtggaaccaagacaag

SEQ ID NO: 6757 - DNA, 16 bp, synthetic construct
  misc_feature 1..16: note = synthetic [barcode part1]
  source 1..16: mol_type = other DNA
tccaccagatcacacc

SEQ ID NO: 6758 - DNA, 16 bp, synthetic construct
  misc_feature 1..16: note = synthetic [barcode part1]
  source 1..16: mol_type = other DNA
gaactactctggtgac

SEQ ID NO: 6759 - DNA, 16 bp, synthetic construct
  misc_feature 1..16: note = synthetic [barcode part1]
  source 1..16: mol_type = other DNA
acacaacggaggactc

SEQ ID NO: 6760 - DNA, 16 bp, synthetic construct
  misc_feature 1..16: note = synthetic [barcode part1]
  source 1..16: mol_type = other DNA
gataatcaaggcgtgt

SEQ ID NO: 6761 - DNA, 16 bp, synthetic construct
  misc_feature 1..16: note = synthetic [barcode part1]
  source 1..16: mol_type = other DNA
agtgtgttcttccggc

SEQ ID NO: 6762 - DNA, 16 bp, synthetic construct
  misc_feature 1..16: note = synthetic [barcode part1]
  source 1..16: mol_type = other DNA
tcggtgacgtcagatt

SEQ ID NO: 6763 - DNA, 16 bp, synthetic construct
  misc_feature 1..16: note = synthetic [barcode part1]
  source 1..16: mol_type = other DNA
cagacgaacagtaccg

SEQ ID NO: 6764 - DNA, 16 bp, synthetic construct
  misc_feature 1..16: note = synthetic [barcode part1]
  source 1..16: mol_type = other DNA
ccacttctgcgaactg

SEQ ID NO: 6765 - DNA, 16 bp, synthetic construct
  misc_feature 1..16: note = synthetic [barcode part1]
  source 1..16: mol_type = other DNA
atctcagtgcaacacg

SEQ ID NO: 6766 - DNA, 16 bp, synthetic construct
  misc_feature 1..16: note = synthetic [barcode part1]
  source 1..16: mol_type = other DNA
caacgactccttgcgt

SEQ ID NO: 6767 - DNA, 16 bp, synthetic construct
  misc_feature 1..16: note = synthetic [barcode part1]
  source 1..16: mol_type = other DNA
gttgatcgaggtcttg

SEQ ID NO: 6768 - DNA, 16 bp, synthetic construct
  misc_feature 1..16: note = synthetic [barcode part1]
  source 1..16: mol_type = other DNA
ccgtgcaactgtatag

SEQ ID NO: 6769 - DNA, 16 bp, synthetic construct
  misc_feature 1..16: note = synthetic [barcode part1]
  source 1..16: mol_type = other DNA
cgagaactaggaacag

SEQ ID NO: 6770 - DNA, 16 bp, synthetic construct
  misc_feature 1..16: note = synthetic [barcode part1]
  source 1..16: mol_type = other DNA
caggttacgcaccttc

SEQ ID NO: 6771 - DNA, 16 bp, synthetic construct
  misc_feature 1..16: note = synthetic [barcode part1]
  source 1..16: mol_type = other DNA
actggtagaactgaac

SEQ ID NO: 6772 - DNA, 16 bp, synthetic construct
  misc_feature 1..16: note = synthetic [barcode part1]
  source 1..16: mol_type = other DNA
aacggaaggtcgtatt

SEQ ID NO: 6773 - DNA, 16 bp, synthetic construct
  misc_feature 1..16: note = synthetic [barcode part1]
  source 1..16: mol_type = other DNA
tatacggtagatccgc

SEQ ID NO: 6774 - DNA, 16 bp, synthetic construct
  misc_feature 1..16: note = synthetic [barcode part1]
  source 1..16: mol_type = other DNA
tgtcagtacgtgtcag

SEQ ID NO: 6775 - DNA, 16 bp, synthetic construct
  misc_feature 1..16: note = synthetic [barcode part1]
  source 1..16: mol_type = other DNA
agtgtacgtgtgtcac

SEQ ID NO: 6776 - DNA, 16 bp, synthetic construct
  misc_feature 1..16: note = synthetic [barcode part1]
  source 1..16: mol_type = other DNA
acacgcgacgttatac

SEQ ID NO: 6777 - DNA, 16 bp, synthetic construct
  misc_feature 1..16: note = synthetic [barcode part1]
  source 1..16: mol_type = other DNA
accgaacttgtgttct

SEQ ID NO: 6778 - DNA, 16 bp, synthetic construct
  misc_feature 1..16: note = synthetic [barcode part1]
  source 1..16: mol_type = other DNA
aacgactcctctacgc

SEQ ID NO: 6779 - DNA, 16 bp, synthetic construct
  misc_feature 1..16: note = synthetic [barcode part1]
  source 1..16: mol_type = other DNA
taactggaggaaggac

SEQ ID NO: 6780 - DNA, 16 bp, synthetic construct
  misc_feature 1..16: note = synthetic [barcode part1]
  source 1..16: mol_type = other DNA
gattcgagatccgatc

SEQ ID NO: 6781 - DNA, 16 bp, synthetic construct
  misc_feature 1..16: note = synthetic [barcode part1]
  source 1..16: mol_type = other DNA
taagtgcaggagttac

SEQ ID NO: 6782 - DNA, 16 bp, synthetic construct
  misc_feature 1..16: note = synthetic [barcode part1]
  source 1..16: mol_type = other DNA
gatatagactcctgcg

SEQ ID NO: 6783 - DNA, 16 bp, synthetic construct
  misc_feature 1..16: note = synthetic [barcode part1]
  source 1..16: mol_type = other DNA
gaccaactacgtacgt

SEQ ID NO: 6784 - DNA, 16 bp, synthetic construct
  misc_feature 1..16: note = synthetic [barcode part1]
  source 1..16: mol_type = other DNA
gtagtgcaaggagagt

SEQ ID NO: 6785 - DNA, 16 bp, synthetic construct
  misc_feature 1..16: note = synthetic [barcode part1]
  source 1..16: mol_type = other DNA
atcgaattagaggcgt

SEQ ID NO: 6786 - DNA, 16 bp, synthetic construct
  misc_feature 1..16: note = synthetic [barcode part1]
  source 1..16: mol_type = other DNA
acttccggtccttatc

SEQ ID NO: 6787 - DNA, 16 bp, synthetic construct
  misc_feature 1..16: note = synthetic [barcode part1]
  source 1..16: mol_type = other DNA
tcaatcctaagtccgt

SEQ ID NO: 6788 - DNA, 16 bp, synthetic construct
  misc_feature 1..16: note = synthetic [barcode part1]
  source 1..16: mol_type = other DNA
caagacctcaagacct

SEQ ID NO: 6789 - DNA, 16 bp, synthetic construct
  misc_feature 1..16: note = synthetic [barcode part1]
  source 1..16: mol_type = other DNA
gtgcctgacagtgaag

SEQ ID NO: 6790 - DNA, 16 bp, synthetic construct
  misc_feature 1..16: note = synthetic [barcode part1]
  source 1..16: mol_type = other DNA
cacgttaccgaaggag

SEQ ID NO: 6791 - DNA, 16 bp, synthetic construct
  misc_feature 1..16: note = synthetic [barcode part1]
  source 1..16: mol_type = other DNA
ttgcaacacacacgtg

SEQ ID NO: 6792 - DNA, 16 bp, synthetic construct
  misc_feature 1..16: note = synthetic [barcode part1]
  source 1..16: mol_type = other DNA
cctagattcgttactg

SEQ ID NO: 6793 - DNA, 16 bp, synthetic construct
  misc_feature 1..16: note = synthetic [barcode part1]
  source 1..16: mol_type = other DNA
tcacgccgttcttgtt

SEQ ID NO: 6794 - DNA, 16 bp, synthetic construct
  misc_feature 1..16: note = synthetic [barcode part1]
  source 1..16: mol_type = other DNA
gatcgatcctctcttc

SEQ ID NO: 6795 - DNA, 16 bp, synthetic construct
  misc_feature 1..16: note = synthetic [barcode part1]
  source 1..16: mol_type = other DNA
tgttggtactggtgtg

SEQ ID NO: 6796 - DNA, 16 bp, synthetic construct
  misc_feature 1..16: note = synthetic [barcode part1]
  source 1..16: mol_type = other DNA
ttcaccaatcgcctct

SEQ ID NO: 6797 - DNA, 16 bp, synthetic construct
  misc_feature 1..16: note = synthetic [barcode part1]
  source 1..16: mol_type = other DNA
atcagacaacgcaggc

SEQ ID NO: 6798 - DNA, 16 bp, synthetic construct
  misc_feature 1..16: note = synthetic [barcode part1]
  source 1..16: mol_type = other DNA
gaattgatagtgcgtg

SEQ ID NO: 6799 - DNA, 16 bp, synthetic construct
  misc_feature 1..16: note = synthetic [barcode part1]
  source 1..16: mol_type = other DNA
caccacctaggaagtt

SEQ ID NO: 6800 - DNA, 16 bp, synthetic construct
  misc_feature 1..16: note = synthetic [barcode part1]
  source 1..16: mol_type = other DNA
acgacttgcctagtag

SEQ ID NO: 6801 - DNA, 16 bp, synthetic construct
  misc_feature 1..16: note = synthetic [barcode part1]
  source 1..16: mol_type = other DNA
ttcgcgtgattattgc

SEQ ID NO: 6802 - DNA, 16 bp, synthetic construct
  misc_feature 1..16: note = synthetic [barcode part1]
  source 1..16: mol_type = other DNA
aagtagtgtcgaggag

SEQ ID NO: 6803 - DNA, 16 bp, synthetic construct
  misc_feature 1..16: note = synthetic [barcode part1]
  source 1..16: mol_type = other DNA
ttcgagatcggagttc

SEQ ID NO: 6804 - DNA, 16 bp, synthetic construct
  misc_feature 1..16: note = synthetic [barcode part1]
  source 1..16: mol_type = other DNA
tgtgttctaccaggtt

SEQ ID NO: 6805 - DNA, 16 bp, synthetic construct
  misc_feature 1..16: note = synthetic [barcode part1]
  source 1..16: mol_type = other DNA
gacttgagtgcaggac

SEQ ID NO: 6806 - DNA, 16 bp, synthetic construct
  misc_feature 1..16: note = synthetic [barcode part1]
  source 1..16: mol_type = other DNA
gaacgtgaggatacag

SEQ ID NO: 6807 - DNA, 16 bp, synthetic construct
  misc_feature 1..16: note = synthetic [barcode part1]
  source 1..16: mol_type = other DNA
tacgacacttacctac

SEQ ID NO: 6808 - DNA, 16 bp, synthetic construct
  misc_feature 1..16: note = synthetic [barcode part1]
  source 1..16: mol_type = other DNA
tgagtaataccgcaag

SEQ ID NO: 6809 - DNA, 16 bp, synthetic construct
  misc_feature 1..16: note = synthetic [barcode part1]
  source 1..16: mol_type = other DNA
agaagacgagtcaggt

SEQ ID NO: 6810 - DNA, 16 bp, synthetic construct
  misc_feature 1..16: note = synthetic [barcode part1]
  source 1..16: mol_type = other DNA
agtgttctcgtacgag

SEQ ID NO: 6811 - DNA, 16 bp, synthetic construct
  misc_feature 1..16: note = synthetic [barcode part1]
  source 1..16: mol_type = other DNA
gtaactgccaacctcc

SEQ ID NO: 6812 - DNA, 16 bp, synthetic construct
  misc_feature 1..16: note = synthetic [barcode part1]
  source 1..16: mol_type = other DNA
tccagatctcacagag

SEQ ID NO: 6813 - DNA, 16 bp, synthetic construct
  misc_feature 1..16: note = synthetic [barcode part1]
  source 1..16: mol_type = other DNA
gcgagatagattcgcg

SEQ ID NO: 6814 - DNA, 16 bp, synthetic construct
  misc_feature 1..16: note = synthetic [barcode part1]
  source 1..16: mol_type = other DNA
tctaggttaggaggcg

SEQ ID NO: 6815 - DNA, 16 bp, synthetic construct
  misc_feature 1..16: note = synthetic [barcode part1]
  source 1..16: mol_type = other DNA
ccggaaccttacttgc

SEQ ID NO: 6816 - DNA, 16 bp, synthetic construct
  misc_feature 1..16: note = synthetic [barcode part1]
  source 1..16: mol_type = other DNA
acgtgattcctagttc

SEQ ID NO: 6817 - DNA, 16 bp, synthetic construct
  misc_feature 1..16: note = synthetic [barcode part1]
  source 1..16: mol_type = other DNA
gtactccaattactgc

SEQ ID NO: 6818 - DNA, 16 bp, synthetic construct
  misc_feature 1..16: note = synthetic [barcode part1]
  source 1..16: mol_type = other DNA
gagattagactcgtag

SEQ ID NO: 6819 - DNA, 16 bp, synthetic construct
  misc_feature 1..16: note = synthetic [barcode part1]
  source 1..16: mol_type = other DNA
gttcctggaacgtaac

SEQ ID NO: 6820 - DNA, 16 bp, synthetic construct
  misc_feature 1..16: note = synthetic [barcode part1]
  source 1..16: mol_type = other DNA
tatctgcgtaggtggt

SEQ ID NO: 6821 - DNA, 16 bp, synthetic construct
  misc_feature 1..16: note = synthetic [barcode part1]
  source 1..16: mol_type = other DNA
cgcaataggcgagtac

SEQ ID NO: 6822 - DNA, 16 bp, synthetic construct
  misc_feature 1..16: note = synthetic [barcode part1]
  source 1..16: mol_type = other DNA
aaggtggtcacagacc

SEQ ID NO: 6823 - DNA, 16 bp, synthetic construct
  misc_feature 1..16: note = synthetic [barcode part1]
  source 1..16: mol_type = other DNA
aaccactatccgacag

SEQ ID NO: 6824 - DNA, 16 bp, synthetic construct
  misc_feature 1..16: note = synthetic [barcode part1]
  source 1..16: mol_type = other DNA
ccacactactcctatc

SEQ ID NO: 6825 - DNA, 16 bp, synthetic construct
  misc_feature 1..16: note = synthetic [barcode part1]
  source 1..16: mol_type = other DNA
gttatcttgcctgaac

SEQ ID NO: 6826 - DNA, 16 bp, synthetic construct
  misc_feature 1..16: note = synthetic [barcode part1]
  source 1..16: mol_type = other DNA
aggcagattacctgtc

SEQ ID NO: 6827 - DNA, 16 bp, synthetic construct
  misc_feature 1..16: note = synthetic [barcode part1]
  source 1..16: mol_type = other DNA
tccgttatctcaccgt

SEQ ID NO: 6828 - DNA, 16 bp, synthetic construct
  misc_feature 1..16: note = synthetic [barcode part1]
  source 1..16: mol_type = other DNA
gaccgcaagttaaggc

SEQ ID NO: 6829 - DNA, 16 bp, synthetic construct
  misc_feature 1..16: note = synthetic [barcode part1]
  source 1..16: mol_type = other DNA
attgtcctgttcgagt

SEQ ID NO: 6830 - DNA, 16 bp, synthetic construct
  misc_feature 1..16: note = synthetic [barcode part1]
  source 1..16: mol_type = other DNA
gccgaattctgtgcct

SEQ ID NO: 6831 - DNA, 16 bp, synthetic construct
  misc_feature 1..16: note = synthetic [barcode part1]
  source 1..16: mol_type = other DNA
gatctggaaggcgtgt

SEQ ID NO: 6832 - DNA, 16 bp, synthetic construct
  misc_feature 1..16: note = synthetic [barcode part1]
  source 1..16: mol_type = other DNA
gttacacgactgtgtg

SEQ ID NO: 6833 - DNA, 16 bp, synthetic construct
  misc_feature 1..16: note = synthetic [barcode part1]
  source 1..16: mol_type = other DNA
atcaagtctacgtcct

SEQ ID NO: 6834 - DNA, 16 bp, synthetic construct
  misc_feature 1..16: note = synthetic [barcode part1]
  source 1..16: mol_type = other DNA
actctgttgtcggcgt

SEQ ID NO: 6835 - DNA, 16 bp, synthetic construct
  misc_feature 1..16: note = synthetic [barcode part1]
  source 1..16: mol_type = other DNA
aacgttctaccttgtg

SEQ ID NO: 6836 - DNA, 16 bp, synthetic construct
  misc_feature 1..16: note = synthetic [barcode part1]
  source 1..16: mol_type = other DNA
accttcggtaacttac

SEQ ID NO: 6837 - DNA, 16 bp, synthetic construct
  misc_feature 1..16: note = synthetic [barcode part1]
  source 1..16: mol_type = other DNA
tgtcctcaattaccag

SEQ ID NO: 6838 - DNA, 16 bp, synthetic construct
  misc_feature 1..16: note = synthetic [barcode part1]
  source 1..16: mol_type = other DNA
atacttctcaacgacc

SEQ ID NO: 6839 - DNA, 16 bp, synthetic construct
  misc_feature 1..16: note = synthetic [barcode part1]
  source 1..16: mol_type = other DNA
ttctctacgtcctacg

SEQ ID NO: 6840 - DNA, 16 bp, synthetic construct
  misc_feature 1..16: note = synthetic [barcode part1]
  source 1..16: mol_type = other DNA
tactctgaagtccact

SEQ ID NO: 6841 - DNA, 16 bp, synthetic construct
  misc_feature 1..16: note = synthetic [barcode part1]
  source 1..16: mol_type = other DNA
tccggtcgattctctt

SEQ ID NO: 6842 - DNA, 16 bp, synthetic construct
  misc_feature 1..16: note = synthetic [barcode part1]
  source 1..16: mol_type = other DNA
attccacaatacgcct

SEQ ID NO: 6843 - DNA, 16 bp, synthetic construct
  misc_feature 1..16: note = synthetic [barcode part1]
  source 1..16: mol_type = other DNA
caactgatacgcgtac

SEQ ID NO: 6844 - DNA, 16 bp, synthetic construct
  misc_feature 1..16: note = synthetic [barcode part1]
  source 1..16: mol_type = other DNA
tctcgtggtatcttcc

SEQ ID NO: 6845 - DNA, 16 bp, synthetic construct
  misc_feature 1..16: note = synthetic [barcode part1]
  source 1..16: mol_type = other DNA
gtgactggttgacgtt

SEQ ID NO: 6846 - DNA, 16 bp, synthetic construct
  misc_feature 1..16: note = synthetic [barcode part1]
  source 1..16: mol_type = other DNA
ttgcgtcacagtccac

SEQ ID NO: 6847 - DNA, 16 bp, synthetic construct
  misc_feature 1..16: note = synthetic [barcode part1]
  source 1..16: mol_type = other DNA
cagtgttgcctgttcg

SEQ ID NO: 6848 - DNA, 16 bp, synthetic construct
  misc_feature 1..16: note = synthetic [barcode part1]
  source 1..16: mol_type = other DNA
cagtgtgtgacgaggt

SEQ ID NO: 6849 - DNA, 16 bp, synthetic construct
  misc_feature 1..16: note = synthetic [barcode part1]
  source 1..16: mol_type = other DNA
tgtcggatacctccgt

SEQ ID NO: 6850 - DNA, 16 bp, synthetic construct
  misc_feature 1..16: note = synthetic [barcode part1]
  source 1..16: mol_type = other DNA
tacacggttcggcctt

SEQ ID NO: 6851 - DNA, 16 bp, synthetic construct
  misc_feature 1..16: note = synthetic [barcode part1]
  source 1..16: mol_type = other DNA
cagtaactcctgcgtc

SEQ ID NO: 6852 - DNA, 16 bp, synthetic construct
  misc_feature 1..16: note = synthetic [barcode part1]
  source 1..16: mol_type = other DNA
gcaggaactggcaatc

SEQ ID NO: 6853 - DNA, 16 bp, synthetic construct
  misc_feature 1..16: note = synthetic [barcode part1]
  source 1..16: mol_type = other DNA
gtgattggcgttagtc

SEQ ID NO: 6854 - DNA, 16 bp, synthetic construct
  misc_feature 1..16: note = synthetic [barcode part1]
  source 1..16: mol_type = other DNA
gatcctctgtgttggc

SEQ ID NO: 6855 - DNA, 16 bp, synthetic construct
  misc_feature 1..16: note = synthetic [barcode part1]
  source 1..16: mol_type = other DNA
actcagtctagtggtg

SEQ ID NO: 6856 - DNA, 16 bp, synthetic construct
  misc_feature 1..16: note = synthetic [barcode part1]
  source 1..16: mol_type = other DNA
ccaggcgtactacctt

SEQ ID NO: 6857 - DNA, 16 bp, synthetic construct
  misc_feature 1..16: note = synthetic [barcode part1]
  source 1..16: mol_type = other DNA
tgagacttggttggtc

SEQ ID NO: 6858 - DNA, 16 bp, synthetic construct
  misc_feature 1..16: note = synthetic [barcode part1]
  source 1..16: mol_type = other DNA
accttgccttgtggac

SEQ ID NO: 6859 - DNA, 16 bp, synthetic construct
  misc_feature 1..16: note = synthetic [barcode part1]
  source 1..16: mol_type = other DNA
cgtgaacgaactcact

SEQ ID NO: 6860 - DNA, 16 bp, synthetic construct
  misc_feature 1..16: note = synthetic [barcode part1]
  source 1..16: mol_type = other DNA
gaatctgcctaatctc

SEQ ID NO: 6861 - DNA, 16 bp, synthetic construct
  misc_feature 1..16: note = synthetic [barcode part1]
  source 1..16: mol_type = other DNA
tgcgttcgtggttcac

SEQ ID NO: 6862 - DNA, 16 bp, synthetic construct
  misc_feature 1..16: note = synthetic [barcode part1]
  source 1..16: mol_type = other DNA
gcggacgatagtatcg

SEQ ID NO: 6863 - DNA, 16 bp, synthetic construct
  misc_feature 1..16: note = synthetic [barcode part1]
  source 1..16: mol_type = other DNA
gtgtaggagactattg

SEQ ID NO: 6864 - DNA, 16 bp, synthetic construct
  misc_feature 1..16: note = synthetic [barcode part1]
  source 1..16: mol_type = other DNA
tgtctcgaacgaagtc

SEQ ID NO: 6865 - DNA, 16 bp, synthetic construct
  misc_feature 1..16: note = synthetic [barcode part1]
  source 1..16: mol_type = other DNA
ccgtctaccgtaacac

SEQ ID NO: 6866 - DNA, 16 bp, synthetic construct
  misc_feature 1..16: note = synthetic [barcode part1]
  source 1..16: mol_type = other DNA
tagtggcggtctgatt

SEQ ID NO: 6867 - DNA, 16 bp, synthetic construct
  misc_feature 1..16: note = synthetic [barcode part1]
  source 1..16: mol_type = other DNA
tgaaccggcgtgaagt

SEQ ID NO: 6868 - DNA, 16 bp, synthetic construct
  misc_feature 1..16: note = synthetic [barcode part1]
  source 1..16: mol_type = other DNA
cggacacaagagtcac

SEQ ID NO: 6869 - DNA, 16 bp, synthetic construct
  misc_feature 1..16: note = synthetic [barcode part1]
  source 1..16: mol_type = other DNA
cacaggtgaacctact

SEQ ID NO: 6870 - DNA, 16 bp, synthetic construct
  misc_feature 1..16: note = synthetic [barcode part1]
  source 1..16: mol_type = other DNA
ccacgagtaagtctac

SEQ ID NO: 6871 - DNA, 16 bp, synthetic construct
  misc_feature 1..16: note = synthetic [barcode part1]
  source 1..16: mol_type = other DNA
atagaactgttcggag

SEQ ID NO: 6872 - DNA, 16 bp, synthetic construct
  misc_feature 1..16: note = synthetic [barcode part1]
  source 1..16: mol_type = other DNA
gcgttggtaataagac

SEQ ID NO: 6873 - DNA, 16 bp, synthetic construct
  misc_feature 1..16: note = synthetic [barcode part1]
  source 1..16: mol_type = other DNA
tgtcgaggtctccgtt

SEQ ID NO: 6874 - DNA, 16 bp, synthetic construct
  misc_feature 1..16: note = synthetic [barcode part1]
  source 1..16: mol_type = other DNA
aatagtctgtgcctct

SEQ ID NO: 6875 - DNA, 16 bp, synthetic construct
  misc_feature 1..16: note = synthetic [barcode part1]
  source 1..16: mol_type = other DNA
gatcttccacggacct

SEQ ID NO: 6876 - DNA, 16 bp, synthetic construct
  misc_feature 1..16: note = synthetic [barcode part1]
  source 1..16: mol_type = other DNA
gagacacgtcaagtcg

SEQ ID NO: 6877 - DNA, 16 bp, synthetic construct
  misc_feature 1..16: note = synthetic [barcode part1]
  source 1..16: mol_type = other DNA
aacactgacgtcacac

SEQ ID NO: 6878 - DNA, 16 bp, synthetic construct
  misc_feature 1..16: note = synthetic [barcode part1]
  source 1..16: mol_type = other DNA
cagtactcctgaagtg

SEQ ID NO: 6879 - DNA, 16 bp, synthetic construct
  misc_feature 1..16: note = synthetic [barcode part1]
  source 1..16: mol_type = other DNA
tatcgacgcgtgttag

SEQ ID NO: 6880 - DNA, 16 bp, synthetic construct
  misc_feature 1..16: note = synthetic [barcode part1]
  source 1..16: mol_type = other DNA
gtaaggaagttcgact

SEQ ID NO: 6881 - DNA, 16 bp, synthetic construct
  misc_feature 1..16: note = synthetic [barcode part1]
  source 1..16: mol_type = other DNA
cactcgtcggaattcc

SEQ ID NO: 6882 - DNA, 16 bp, synthetic construct
  misc_feature 1..16: note = synthetic [barcode part1]
  source 1..16: mol_type = other DNA
cggacctgatagaacg

SEQ ID NO: 6883 - DNA, 16 bp, synthetic construct
  misc_feature 1..16: note = synthetic [barcode part1]
  source 1..16: mol_type = other DNA
actgtgtcgtagatcg

SEQ ID NO: 6884 - DNA, 16 bp, synthetic construct
  misc_feature 1..16: note = synthetic [barcode part1]
  source 1..16: mol_type = other DNA
tctattgaactacgcc

SEQ ID NO: 6885 - DNA, 16 bp, synthetic construct
  misc_feature 1..16: note = synthetic [barcode part1]
  source 1..16: mol_type = other DNA
ttgcctaactcgcctt

SEQ ID NO: 6886 - DNA, 16 bp, synthetic construct
  misc_feature 1..16: note = synthetic [barcode part1]
  source 1..16: mol_type = other DNA
tgtctatctgcggtgc

SEQ ID NO: 6887 - DNA, 16 bp, synthetic construct
  misc_feature 1..16: note = synthetic [barcode part1]
  source 1..16: mol_type = other DNA
accagagattgtgtag

SEQ ID NO: 6888 - DNA, 16 bp, synthetic construct
  misc_feature 1..16: note = synthetic [barcode part1]
  source 1..16: mol_type = other DNA
gcggatacgttataag

SEQ ID NO: 6889 - DNA, 16 bp, synthetic construct
  misc_feature 1..16: note = synthetic [barcode part1]
  source 1..16: mol_type = other DNA
ttaggaccaggattcc

SEQ ID NO: 6890 - DNA, 16 bp, synthetic construct
  misc_feature 1..16: note = synthetic [barcode part1]
  source 1..16: mol_type = other DNA
gaacactacggattcc

SEQ ID NO: 6891 - DNA, 16 bp, synthetic construct
  misc_feature 1..16: note = synthetic [barcode part1]
  source 1..16: mol_type = other DNA
cctccaataatcacac

SEQ ID NO: 6892 - DNA, 16 bp, synthetic construct
  misc_feature 1..16: note = synthetic [barcode part1]
  source 1..16: mol_type = other DNA
gaggagttgccagtac

SEQ ID NO: 6893 - DNA, 16 bp, synthetic construct
  misc_feature 1..16: note = synthetic [barcode part1]
  source 1..16: mol_type = other DNA
cacaacactcagagtc

SEQ ID NO: 6894 - DNA, 16 bp, synthetic construct
  misc_feature 1..16: note = synthetic [barcode part1]
  source 1..16: mol_type = other DNA
gtcctgtgcgattgtc

SEQ ID NO: 6895 - DNA, 16 bp, synthetic construct
  misc_feature 1..16: note = synthetic [barcode part1]
  source 1..16: mol_type = other DNA
gcagactaaccgtgtt

SEQ ID NO: 6896 - DNA, 16 bp, synthetic construct
  misc_feature 1..16: note = synthetic [barcode part1]
  source 1..16: mol_type = other DNA
tatacctcaggccgtc

SEQ ID NO: 6897 - DNA, 16 bp, synthetic construct
  misc_feature 1..16: note = synthetic [barcode part1]
  source 1..16: mol_type = other DNA
cctactcgtaatactg

SEQ ID NO: 6898 - DNA, 16 bp, synthetic construct
  misc_feature 1..16: note = synthetic [barcode part1]
  source 1..16: mol_type = other DNA
attgacgtattccgtc

SEQ ID NO: 6899 - DNA, 16 bp, synthetic construct
  misc_feature 1..16: note = synthetic [barcode part1]
  source 1..16: mol_type = other DNA
acagattgcgtctggt

SEQ ID NO: 6900 - DNA, 16 bp, synthetic construct
  misc_feature 1..16: note = synthetic [barcode part1]
  source 1..16: mol_type = other DNA
agagagtcgtctcact

SEQ ID NO: 6901 - DNA, 16 bp, synthetic construct
  misc_feature 1..16: note = synthetic [barcode part1]
  source 1..16: mol_type = other DNA
tacttgtaataccgcc

SEQ ID NO: 6902 - DNA, 16 bp, synthetic construct
  misc_feature 1..16: note = synthetic [barcode part1]
  source 1..16: mol_type = other DNA
ttagtaagacgcagac

SEQ ID NO: 6903 - DNA, 16 bp, synthetic construct
  misc_feature 1..16: note = synthetic [barcode part1]
  source 1..16: mol_type = other DNA
ttaacctgacggtgac

SEQ ID NO: 6904 - DNA, 16 bp, synthetic construct
  misc_feature 1..16: note = synthetic [barcode part1]
  source 1..16: mol_type = other DNA
cgcaaccgttgaagag

SEQ ID NO: 6905 - DNA, 16 bp, synthetic construct
  misc_feature 1..16: note = synthetic [barcode part1]
  source 1..16: mol_type = other DNA
gagagtcttggtcttg

SEQ ID NO: 6906 - DNA, 16 bp, synthetic construct
  misc_feature 1..16: note = synthetic [barcode part1]
  source 1..16: mol_type = other DNA
aactgtctgaaggtag

SEQ ID NO: 6907 - DNA, 16 bp, synthetic construct
  misc_feature 1..16: note = synthetic [barcode part1]
  source 1..16: mol_type = other DNA
gttcgtccaaggtctc

SEQ ID NO: 6908 - DNA, 16 bp, synthetic construct
  misc_feature 1..16: note = synthetic [barcode part1]
  source 1..16: mol_type = other DNA
tcaacctcgccttgtt

SEQ ID NO: 6909 - DNA, 16 bp, synthetic construct
  misc_feature 1..16: note = synthetic [barcode part1]
  source 1..16: mol_type = other DNA
gaggttggtgtgatcg

SEQ ID NO: 6910 - DNA, 16 bp, synthetic construct
  misc_feature 1..16: note = synthetic [barcode part1]
  source 1..16: mol_type = other DNA
cacctgcggtactact

SEQ ID NO: 6911 - DNA, 16 bp, synthetic construct
  misc_feature 1..16: note = synthetic [barcode part1]
  source 1..16: mol_type = other DNA
tcgttgtccacgaatt

SEQ ID NO: 6912 - DNA, 16 bp, synthetic construct
  misc_feature 1..16: note = synthetic [barcode part1]
  source 1..16: mol_type = other DNA
agaagactatcggtgt

SEQ ID NO: 6913 - DNA, 16 bp, synthetic construct
  misc_feature 1..16: note = synthetic [barcode part1]
  source 1..16: mol_type = other DNA
gcaagtcaaccacact

SEQ ID NO: 6914 - DNA, 16 bp, synthetic construct
  misc_feature 1..16: note = synthetic [barcode part1]
  source 1..16: mol_type = other DNA
agtccagatacaaggt

SEQ ID NO: 6915 - DNA, 16 bp, synthetic construct
  misc_feature 1..16: note = synthetic [barcode part1]
  source 1..16: mol_type = other DNA
tacctcaggtgaggtt

SEQ ID NO: 6916 - DNA, 16 bp, synthetic construct
  misc_feature 1..16: note = synthetic [barcode part1]
  source 1..16: mol_type = other DNA
caacctccagtatatc

SEQ ID NO: 6917 - DNA, 16 bp, synthetic construct
  misc_feature 1..16: note = synthetic [barcode part1]
  source 1..16: mol_type = other DNA
acacgtggttagtcgt

SEQ ID NO: 6918 - DNA, 16 bp, synthetic construct
  misc_feature 1..16: note = synthetic [barcode part1]
  source 1..16: mol_type = other DNA
agtgacgtgaatatcg

SEQ ID NO: 6919 - DNA, 16 bp, synthetic construct
  misc_feature 1..16: note = synthetic [barcode part1]
  source 1..16: mol_type = other DNA
caccactgcagttacc

SEQ ID NO: 6920 - DNA, 16 bp, synthetic construct
  misc_feature 1..16: note = synthetic [barcode part1]
  source 1..16: mol_type = other DNA
gacaacttgtatcctc

SEQ ID NO: 6921 - DNA, 16 bp, synthetic construct
  misc_feature 1..16: note = synthetic [barcode part1]
  source 1..16: mol_type = other DNA
cagtgattggcaatcc

SEQ ID NO: 6922 - DNA, 16 bp, synthetic construct
  misc_feature 1..16: note = synthetic [barcode part1]
  source 1..16: mol_type = other DNA
ttaagttcgacgaccg

SEQ ID NO: 6923 - DNA, 16 bp, synthetic construct
  misc_feature 1..16: note = synthetic [barcode part1]
  source 1..16: mol_type = other DNA
ccttctcttgaccagt

SEQ ID NO: 6924 - DNA, 16 bp, synthetic construct
  misc_feature 1..16: note = synthetic [barcode part1]
  source 1..16: mol_type = other DNA
gaatacaccgataacg

SEQ ID NO: 6925 - DNA, 16 bp, synthetic construct
  misc_feature 1..16: note = synthetic [barcode part1]
  source 1..16: mol_type = other DNA
tacgacgcaggattct

SEQ ID NO: 6926 - DNA, 16 bp, synthetic construct
  misc_feature 1..16: note = synthetic [barcode part1]
  source 1..16: mol_type = other DNA
ttactcttgtaccgag

SEQ ID NO: 6927 - DNA, 16 bp, synthetic construct
  misc_feature 1..16: note = synthetic [barcode part1]
  source 1..16: mol_type = other DNA
cggatagtagaattcg

SEQ ID NO: 6928 - DNA, 16 bp, synthetic construct
  misc_feature 1..16: note = synthetic [barcode part1]
  source 1..16: mol_type = other DNA
ttcaacgccgtgtctg

SEQ ID NO: 6929 - DNA, 16 bp, synthetic construct
  misc_feature 1..16: note = synthetic [barcode part1]
  source 1..16: mol_type = other DNA
ttgagtgagtgaagtc

SEQ ID NO: 6930 - DNA, 16 bp, synthetic construct
  misc_feature 1..16: note = synthetic [barcode part1]
  source 1..16: mol_type = other DNA
tctcacctactcggag

SEQ ID NO: 6931 - DNA, 16 bp, synthetic construct
  misc_feature 1..16: note = synthetic [barcode part1]
  source 1..16: mol_type = other DNA
gtgatctcagaggcag

SEQ ID NO: 6932 - DNA, 16 bp, synthetic construct
  misc_feature 1..16: note = synthetic [barcode part1]
  source 1..16: mol_type = other DNA
atccaaggcctcgttc

SEQ ID NO: 6933 - DNA, 16 bp, synthetic construct
  misc_feature 1..16: note = synthetic [barcode part1]
  source 1..16: mol_type = other DNA
tagtgtagtcgtcctt

SEQ ID NO: 6934 - DNA, 16 bp, synthetic construct
  misc_feature 1..16: note = synthetic [barcode part1]
  source 1..16: mol_type = other DNA
cacacgattcaactct

SEQ ID NO: 6935 - DNA, 16 bp, synthetic construct
  misc_feature 1..16: note = synthetic [barcode part1]
  source 1..16: mol_type = other DNA
attgcggagacaagtt

SEQ ID NO: 6936 - DNA, 16 bp, synthetic construct
  misc_feature 1..16: note = synthetic [barcode part1]
  source 1..16: mol_type = other DNA
gtgacaggaacgttcg

SEQ ID NO: 6937 - DNA, 16 bp, synthetic construct
  misc_feature 1..16: note = synthetic [barcode part1]
  source 1..16: mol_type = other DNA
tgcgcaacctgacctt

SEQ ID NO: 6938 - DNA, 16 bp, synthetic construct
  misc_feature 1..16: note = synthetic [barcode part1]
  source 1..16: mol_type = other DNA
attggaataacgcacg

SEQ ID NO: 6939 - DNA, 16 bp, synthetic construct
  misc_feature 1..16: note = synthetic [barcode part1]
  source 1..16: mol_type = other DNA
tccgccgaattgtgtc

SEQ ID NO: 6940 - DNA, 16 bp, synthetic construct
  misc_feature 1..16: note = synthetic [barcode part1]
  source 1..16: mol_type = other DNA
gacgtccttgtgtaag

SEQ ID NO: 6941 - DNA, 16 bp, synthetic construct
  misc_feature 1..16: note = synthetic [barcode part1]
  source 1..16: mol_type = other DNA
gcagtaggcaatcgtg

SEQ ID NO: 6942 - DNA, 16 bp, synthetic construct
  misc_feature 1..16: note = synthetic [barcode part1]
  source 1..16: mol_type = other DNA
gacgcgcagaattggt

SEQ ID NO: 6943 - DNA, 16 bp, synthetic construct
  misc_feature 1..16: note = synthetic [barcode part1]
  source 1..16: mol_type = other DNA
tgtacgacctggtctc

SEQ ID NO: 6944 - DNA, 16 bp, synthetic construct
  misc_feature 1..16: note = synthetic [barcode part1]
  source 1..16: mol_type = other DNA
ttcctggtgcgatcac

SEQ ID NO: 6945 - DNA, 16 bp, synthetic construct
  misc_feature 1..16: note = synthetic [barcode part1]
  source 1..16: mol_type = other DNA
acctctgatagtccgc

SEQ ID NO: 6946 - DNA, 16 bp, synthetic construct
  misc_feature 1..16: note = synthetic [barcode part1]
  source 1..16: mol_type = other DNA
ttcaccgagagtgatc

SEQ ID NO: 6947 - DNA, 16 bp, synthetic construct
  misc_feature 1..16: note = synthetic [barcode part1]
  source 1..16: mol_type = other DNA
gactgtatcaatctcc

SEQ ID NO: 6948 - DNA, 16 bp, synthetic construct
  misc_feature 1..16: note = synthetic [barcode part1]
  source 1..16: mol_type = other DNA
gttgtactataggccg

SEQ ID NO: 6949 - DNA, 16 bp, synthetic construct
  misc_feature 1..16: note = synthetic [barcode part1]
  source 1..16: mol_type = other DNA
tgtcaagtgccagatc

SEQ ID NO: 6950 - DNA, 16 bp, synthetic construct
  misc_feature 1..16: note = synthetic [barcode part1]
  source 1..16: mol_type = other DNA
gtgttggcgtagatct

SEQ ID NO: 6951 - DNA, 16 bp, synthetic construct
  misc_feature 1..16: note = synthetic [barcode part1]
  source 1..16: mol_type = other DNA
tattagtccgaaggag

SEQ ID NO: 6952 - DNA, 16 bp, synthetic construct
  misc_feature 1..16: note = synthetic [barcode part1]
  source 1..16: mol_type = other DNA
aacacctggcaacgag

SEQ ID NO: 6953 - DNA, 16 bp, synthetic construct
  misc_feature 1..16: note = synthetic [barcode part1]
  source 1..16: mol_type = other DNA
atcaacacgttccact

SEQ ID NO: 6954 - DNA, 16 bp, synthetic construct
  misc_feature 1..16: note = synthetic [barcode part1]
  source 1..16: mol_type = other DNA
tctggtcgcactgatc

SEQ ID NO: 6955 - DNA, 16 bp, synthetic construct
  misc_feature 1..16: note = synthetic [barcode part1]
  source 1..16: mol_type = other DNA
gtgtgattcctggtcc

SEQ ID NO: 6956 - DNA, 16 bp, synthetic construct
  misc_feature 1..16: note = synthetic [barcode part1]
  source 1..16: mol_type = other DNA
tgactaaccgactggt

SEQ ID NO: 6957 - DNA, 16 bp, synthetic construct
  misc_feature 1..16: note = synthetic [barcode part1]
  source 1..16: mol_type = other DNA
ttgtatactccggccg

SEQ ID NO: 6958 - DNA, 16 bp, synthetic construct
  misc_feature 1..16: note = synthetic [barcode part1]
  source 1..16: mol_type = other DNA
gttgaggactggtgtg

SEQ ID NO: 6959 - DNA, 16 bp, synthetic construct
  misc_feature 1..16: note = synthetic [barcode part1]
  source 1..16: mol_type = other DNA
taacacgtggcgagac

SEQ ID NO: 6960 - DNA, 16 bp, synthetic construct
  misc_feature 1..16: note = synthetic [barcode part1]
  source 1..16: mol_type = other DNA
actaacgcagaaggcc

SEQ ID NO: 6961 - DNA, 16 bp, synthetic construct
  misc_feature 1..16: note = synthetic [barcode part1]
  source 1..16: mol_type = other DNA
aacagaggaaggtcgt

SEQ ID NO: 6962 - DNA, 16 bp, synthetic construct
  misc_feature 1..16: note = synthetic [barcode part1]
  source 1..16: mol_type = other DNA
tgtggttcacaccaag

SEQ ID NO: 6963 - DNA, 16 bp, synthetic construct
  misc_feature 1..16: note = synthetic [barcode part1]
  source 1..16: mol_type = other DNA
gtcggcagataataac

SEQ ID NO: 6964 - DNA, 16 bp, synthetic construct
  misc_feature 1..16: note = synthetic [barcode part1]
  source 1..16: mol_type = other DNA
gtgcagtctgacctct

SEQ ID NO: 6965 - DNA, 16 bp, synthetic construct
  misc_feature 1..16: note = synthetic [barcode part1]
  source 1..16: mol_type = other DNA
taacctgttgtatccg

SEQ ID NO: 6966 - DNA, 16 bp, synthetic construct
  misc_feature 1..16: note = synthetic [barcode part1]
  source 1..16: mol_type = other DNA
tgacaggttgccttag

SEQ ID NO: 6967 - DNA, 16 bp, synthetic construct
  misc_feature 1..16: note = synthetic [barcode part1]
  source 1..16: mol_type = other DNA
tcacttggtggtgcct

SEQ ID NO: 6968 - DNA, 16 bp, synthetic construct
  misc_feature 1..16: note = synthetic [barcode part1]
  source 1..16: mol_type = other DNA
atcttggaaccaaccg

SEQ ID NO: 6969 - DNA, 16 bp, synthetic construct
  misc_feature 1..16: note = synthetic [barcode part1]
  source 1..16: mol_type = other DNA
atctgtcgataccgtt

SEQ ID NO: 6970 - DNA, 16 bp, synthetic construct
  misc_feature 1..16: note = synthetic [barcode part1]
  source 1..16: mol_type = other DNA
cgcgatacaggtgagt

SEQ ID NO: 6971 - DNA, 16 bp, synthetic construct
  misc_feature 1..16: note = synthetic [barcode part1]
  source 1..16: mol_type = other DNA
actcttggtctaacgt

SEQ ID NO: 6972 - DNA, 16 bp, synthetic construct
  misc_feature 1..16: note = synthetic [barcode part1]
  source 1..16: mol_type = other DNA
gtcgataagatcagac

SEQ ID NO: 6973 - DNA, 16 bp, synthetic construct
  misc_feature 1..16: note = synthetic [barcode part1]
  source 1..16: mol_type = other DNA
acacgtacgattggtc

SEQ ID NO: 6974 - DNA, 16 bp, synthetic construct
  misc_feature 1..16: note = synthetic [barcode part1]
  source 1..16: mol_type = other DNA
ttggtctgcgattact

SEQ ID NO: 6975 - DNA, 16 bp, synthetic construct
  misc_feature 1..16: note = synthetic [barcode part1]
  source 1..16: mol_type = other DNA
gttagtgtatcctgtc

SEQ ID NO: 6976 - DNA, 16 bp, synthetic construct
  misc_feature 1..16: note = synthetic [barcode part1]
  source 1..16: mol_type = other DNA
caataccttatctgcg

SEQ ID NO: 6977 - DNA, 16 bp, synthetic construct
  misc_feature 1..16: note = synthetic [barcode part1]
  source 1..16: mol_type = other DNA
tgcaatatatccgcct

SEQ ID NO: 6978 - DNA, 16 bp, synthetic construct
  misc_feature 1..16: note = synthetic [barcode part1]
  source 1..16: mol_type = other DNA
caacgtagtcagaggc

SEQ ID NO: 6979 - DNA, 16 bp, synthetic construct
  misc_feature 1..16: note = synthetic [barcode part1]
  source 1..16: mol_type = other DNA
cgtggtgtaagatctc

SEQ ID NO: 6980 - DNA, 16 bp, synthetic construct
  misc_feature 1..16: note = synthetic [barcode part1]
  source 1..16: mol_type = other DNA
tagttaacggccgatc

SEQ ID NO: 6981 - DNA, 16 bp, synthetic construct
  misc_feature 1..16: note = synthetic [barcode part1]
  source 1..16: mol_type = other DNA
gtcagagtctcttgag

SEQ ID NO: 6982 - DNA, 16 bp, synthetic construct
  misc_feature 1..16: note = synthetic [barcode part1]
  source 1..16: mol_type = other DNA
agatcactcgtatctc

SEQ ID NO: 6983 - DNA, 16 bp, synthetic construct
  misc_feature 1..16: note = synthetic [barcode part1]
  source 1..16: mol_type = other DNA
gtaccaagtcagaggc

SEQ ID NO: 6984 - DNA, 16 bp, synthetic construct
  misc_feature 1..16: note = synthetic [barcode part1]
  source 1..16: mol_type = other DNA
tatcgagtcacacttc

SEQ ID NO: 6985 - DNA, 16 bp, synthetic construct
  misc_feature 1..16: note = synthetic [barcode part1]
  source 1..16: mol_type = other DNA
cagaacgacagaacag

SEQ ID NO: 6986 - DNA, 16 bp, synthetic construct
  misc_feature 1..16: note = synthetic [barcode part1]
  source 1..16: mol_type = other DNA
actcgaattgtcctac

SEQ ID NO: 6987 - DNA, 16 bp, synthetic construct
  misc_feature 1..16: note = synthetic [barcode part1]
  source 1..16: mol_type = other DNA
taggtaccacagactc

SEQ ID NO: 6988 - DNA, 16 bp, synthetic construct
  misc_feature 1..16: note = synthetic [barcode part1]
  source 1..16: mol_type = other DNA
agtctaaccttgcact

SEQ ID NO: 6989 - DNA, 16 bp, synthetic construct
  misc_feature 1..16: note = synthetic [barcode part1]
  source 1..16: mol_type = other DNA
cgcctagtcttcaacg

SEQ ID NO: 6990 - DNA, 16 bp, synthetic construct
  misc_feature 1..16: note = synthetic [barcode part1]
  source 1..16: mol_type = other DNA
tcgaaggagagactag

SEQ ID NO: 6991 - DNA, 16 bp, synthetic construct
  misc_feature 1..16: note = synthetic [barcode part1]
  source 1..16: mol_type = other DNA
ccaagtgtgccgttct

SEQ ID NO: 6992 - DNA, 16 bp, synthetic construct
  misc_feature 1..16: note = synthetic [barcode part1]
  source 1..16: mol_type = other DNA
ttgtgaactaccacct

SEQ ID NO: 6993 - DNA, 16 bp, synthetic construct
  misc_feature 1..16: note = synthetic [barcode part1]
  source 1..16: mol_type = other DNA
aatcgtgtagtacgcc

SEQ ID NO: 6994 - DNA, 16 bp, synthetic construct
  misc_feature 1..16: note = synthetic [barcode part1]
  source 1..16: mol_type = other DNA
agtcttgcggaatctg

SEQ ID NO: 6995 - DNA, 16 bp, synthetic construct
  misc_feature 1..16: note = synthetic [barcode part1]
  source 1..16: mol_type = other DNA
cgaactaccgataacc

SEQ ID NO: 6996 - DNA, 16 bp, synthetic construct
  misc_feature 1..16: note = synthetic [barcode part1]
  source 1..16: mol_type = other DNA
tgttctgaacacctgt

SEQ ID NO: 6997 - DNA, 16 bp, synthetic construct
  misc_feature 1..16: note = synthetic [barcode part1]
  source 1..16: mol_type = other DNA
aagtcaacaatacgcg

SEQ ID NO: 6998 - DNA, 16 bp, synthetic construct
  misc_feature 1..16: note = synthetic [barcode part1]
  source 1..16: mol_type = other DNA
ttcaactcaatcgcac

SEQ ID NO: 6999 - DNA, 16 bp, synthetic construct
  misc_feature 1..16: note = synthetic [barcode part1]
  source 1..16: mol_type = other DNA
cagtctcgtattgatc

SEQ ID NO: 7000 - DNA, 16 bp, synthetic construct
  misc_feature 1..16: note = synthetic [barcode part1]
  source 1..16: mol_type = other DNA
aattcgcgaacggcag

SEQ ID NO: 7001 - DNA, 16 bp, synthetic construct
  misc_feature 1..16: note = synthetic [barcode part1]
  source 1..16: mol_type = other DNA
caatcggtgcgatact

SEQ ID NO: 7002 - DNA, 16 bp, synthetic construct
  misc_feature 1..16: note = synthetic [barcode part1]
  source 1..16: mol_type = other DNA
gagactgcgattcttg

SEQ ID NO: 7003 - DNA, 16 bp, synthetic construct
  misc_feature 1..16: note = synthetic [barcode part1]
  source 1..16: mol_type = other DNA
gcgaaccactgaagac

SEQ ID NO: 7004 - DNA, 16 bp, synthetic construct
  misc_feature 1..16: note = synthetic [barcode part1]
  source 1..16: mol_type = other DNA
agaccaggcacgttag

SEQ ID NO: 7005 - DNA, 16 bp, synthetic construct
  misc_feature 1..16: note = synthetic [barcode part1]
  source 1..16: mol_type = other DNA
agatacagagagtgcg

SEQ ID NO: 7006 - DNA, 16 bp, synthetic construct
  misc_feature 1..16: note = synthetic [barcode part1]
  source 1..16: mol_type = other DNA
gtctagagatactcgc

SEQ ID NO: 7007 - DNA, 16 bp, synthetic construct
  misc_feature 1..16: note = synthetic [barcode part1]
  source 1..16: mol_type = other DNA
acctattgacgttgtc

SEQ ID NO: 7008 - DNA, 16 bp, synthetic construct
  misc_feature 1..16: note = synthetic [barcode part1]
  source 1..16: mol_type = other DNA
cgtataggcgaggtac

SEQ ID NO: 7009 - DNA, 16 bp, synthetic construct
  misc_feature 1..16: note = synthetic [barcode part1]
  source 1..16: mol_type = other DNA
ttctctaccgtcactg

SEQ ID NO: 7010 - DNA, 16 bp, synthetic construct
  misc_feature 1..16: note = synthetic [barcode part1]
  source 1..16: mol_type = other DNA
gtagtaccaaccgatc

SEQ ID NO: 7011 - DNA, 16 bp, synthetic construct
  misc_feature 1..16: note = synthetic [barcode part1]
  source 1..16: mol_type = other DNA
tctggttacgtcaact

SEQ ID NO: 7012 - DNA, 16 bp, synthetic construct
  misc_feature 1..16: note = synthetic [barcode part1]
  source 1..16: mol_type = other DNA
ttatctgcactgcggc

SEQ ID NO: 7013 - DNA, 16 bp, synthetic construct
  misc_feature 1..16: note = synthetic [barcode part1]
  source 1..16: mol_type = other DNA
tgtgaacgagtctgtc

SEQ ID NO: 7014 - DNA, 16 bp, synthetic construct
  misc_feature 1..16: note = synthetic [barcode part1]
  source 1..16: mol_type = other DNA
agtagaagtacctgac

SEQ ID NO: 7015 - DNA, 16 bp, synthetic construct
  misc_feature 1..16: note = synthetic [barcode part1]
  source 1..16: mol_type = other DNA
tcgtgccgcaagaatt

SEQ ID NO: 7016 - DNA, 16 bp, synthetic construct
  misc_feature 1..16: note = synthetic [barcode part1]
  source 1..16: mol_type = other DNA
ttcgccttaggactcg

SEQ ID NO: 7017 - DNA, 16 bp, synthetic construct
  misc_feature 1..16: note = synthetic [barcode part1]
  source 1..16: mol_type = other DNA
tgtacacgtgtacacg

SEQ ID NO: 7018 - DNA, 16 bp, synthetic construct
  misc_feature 1..16: note = synthetic [barcode part1]
  source 1..16: mol_type = other DNA
tatatccgcaggagtc

SEQ ID NO: 7019 - DNA, 16 bp, synthetic construct
  misc_feature 1..16: note = synthetic [barcode part1]
  source 1..16: mol_type = other DNA
gtaactcctgtcgaag

SEQ ID NO: 7020 - DNA, 16 bp, synthetic construct
  misc_feature 1..16: note = synthetic [barcode part1]
  source 1..16: mol_type = other DNA
gtgcggtgtatactac

SEQ ID NO: 7021 - DNA, 16 bp, synthetic construct
  misc_feature 1..16: note = synthetic [barcode part1]
  source 1..16: mol_type = other DNA
gttctccacgtattag

SEQ ID NO: 7022 - DNA, 16 bp, synthetic construct
  misc_feature 1..16: note = synthetic [barcode part1]
  source 1..16: mol_type = other DNA
gattgcacgtacagtc

SEQ ID NO: 7023 - DNA, 16 bp, synthetic construct
  misc_feature 1..16: note = synthetic [barcode part1]
  source 1..16: mol_type = other DNA
gcgagaacggcaattc

SEQ ID NO: 7024 - DNA, 16 bp, synthetic construct
  misc_feature 1..16: note = synthetic [barcode part1]
  source 1..16: mol_type = other DNA
gtcgtaacggaacttc

SEQ ID NO: 7025 - DNA, 16 bp, synthetic construct
  misc_feature 1..16: note = synthetic [barcode part1]
  source 1..16: mol_type = other DNA
taaggattatcggacg

SEQ ID NO: 7026 - DNA, 16 bp, synthetic construct
  misc_feature 1..16: note = synthetic [barcode part1]
  source 1..16: mol_type = other DNA
cctcctagttcttcag

SEQ ID NO: 7027 - DNA, 16 bp, synthetic construct
  misc_feature 1..16: note = synthetic [barcode part1]
  source 1..16: mol_type = other DNA
gttaggtgtagagatc

SEQ ID NO: 7028 - DNA, 16 bp, synthetic construct
  misc_feature 1..16: note = synthetic [barcode part1]
  source 1..16: mol_type = other DNA
cgtgtggtcactgttc

SEQ ID NO: 7029 - DNA, 16 bp, synthetic construct
  misc_feature 1..16: note = synthetic [barcode part1]
  source 1..16: mol_type = other DNA
tacgtaccgcgtatag

SEQ ID NO: 7030 - DNA, 16 bp, synthetic construct
  misc_feature 1..16: note = synthetic [barcode part1]
  source 1..16: mol_type = other DNA
cacgtctgacgatctc

SEQ ID NO: 7031 - DNA, 16 bp, synthetic construct
  misc_feature 1..16: note = synthetic [barcode part1]
  source 1..16: mol_type = other DNA
tatctcgacttgtggt

SEQ ID NO: 7032 - DNA, 16 bp, synthetic construct
  misc_feature 1..16: note = synthetic [barcode part1]
  source 1..16: mol_type = other DNA
gcaagaccagagtaag

SEQ ID NO: 7033 - DNA, 16 bp, synthetic construct
  misc_feature 1..16: note = synthetic [barcode part1]
  source 1..16: mol_type = other DNA
atactaatctccgacc

SEQ ID NO: 7034 - DNA, 16 bp, synthetic construct
  misc_feature 1..16: note = synthetic [barcode part1]
  source 1..16: mol_type = other DNA
gatctaattcctgcgt

SEQ ID NO: 7035 - DNA, 16 bp, synthetic construct
  misc_feature 1..16: note = synthetic [barcode part1]
  source 1..16: mol_type = other DNA
cgatagtccagtgatc

SEQ ID NO: 7036 - DNA, 16 bp, synthetic construct
  misc_feature 1..16: note = synthetic [barcode part1]
  source 1..16: mol_type = other DNA
attcctagttcctgcc

SEQ ID NO: 7037 - DNA, 16 bp, synthetic construct
  misc_feature 1..16: note = synthetic [barcode part1]
  source 1..16: mol_type = other DNA
acaccggcgtattaac

SEQ ID NO: 7038 - DNA, 16 bp, synthetic construct
  misc_feature 1..16: note = synthetic [barcode part1]
  source 1..16: mol_type = other DNA
tgttgcagttgtgacg

SEQ ID NO: 7039 - DNA, 16 bp, synthetic construct
  misc_feature 1..16: note = synthetic [barcode part1]
  source 1..16: mol_type = other DNA
atcggttccaatcgag

SEQ ID NO: 7040 - DNA, 16 bp, synthetic construct
  misc_feature 1..16: note = synthetic [barcode part1]
  source 1..16: mol_type = other DNA
gtaggaatcctgcgtt

SEQ ID NO: 7041 - DNA, 16 bp, synthetic construct
  misc_feature 1..16: note = synthetic [barcode part1]
  source 1..16: mol_type = other DNA
gtgtagtagttcttcc

SEQ ID NO: 7042 - DNA, 16 bp, synthetic construct
  misc_feature 1..16: note = synthetic [barcode part1]
  source 1..16: mol_type = other DNA
gtcttatacctcctgc

SEQ ID NO: 7043 - DNA, 16 bp, synthetic construct
  misc_feature 1..16: note = synthetic [barcode part1]
  source 1..16: mol_type = other DNA
agaagtaggcacagac

SEQ ID NO: 7044 - DNA, 16 bp, synthetic construct
  misc_feature 1..16: note = synthetic [barcode part1]
  source 1..16: mol_type = other DNA
cgtccaggttaaggag

SEQ ID NO: 7045 - DNA, 16 bp, synthetic construct
  misc_feature 1..16: note = synthetic [barcode part1]
  source 1..16: mol_type = other DNA
taatctccgacgtgcc

SEQ ID NO: 7046 - DNA, 16 bp, synthetic construct
  misc_feature 1..16: note = synthetic [barcode part1]
  source 1..16: mol_type = other DNA
gaccttaggtatcgtg

SEQ ID NO: 7047 - DNA, 16 bp, synthetic construct
  misc_feature 1..16: note = synthetic [barcode part1]
  source 1..16: mol_type = other DNA
attgtgatcgcctact

SEQ ID NO: 7048 - DNA, 16 bp, synthetic construct
  misc_feature 1..16: note = synthetic [barcode part1]
  source 1..16: mol_type = other DNA
aggactcgcgaacagt

SEQ ID NO: 7049 - DNA, 16 bp, synthetic construct
  misc_feature 1..16: note = synthetic [barcode part1]
  source 1..16: mol_type = other DNA
caagtcgtgtaagagt

SEQ ID NO: 7050 - DNA, 16 bp, synthetic construct
  misc_feature 1..16: note = synthetic [barcode part1]
  source 1..16: mol_type = other DNA
ttgtgttgagttgtcc

SEQ ID NO: 7051 - DNA, 16 bp, synthetic construct
  misc_feature 1..16: note = synthetic [barcode part1]
  source 1..16: mol_type = other DNA
acaacgtacgtgtacc

SEQ ID NO: 7052 - DNA, 16 bp, synthetic construct
  misc_feature 1..16: note = synthetic [barcode part1]
  source 1..16: mol_type = other DNA
cctaccagatctacgc

SEQ ID NO: 7053 - DNA, 16 bp, synthetic construct
  misc_feature 1..16: note = synthetic [barcode part1]
  source 1..16: mol_type = other DNA
gaatctgcgttccacc

SEQ ID NO: 7054 - DNA, 16 bp, synthetic construct
  misc_feature 1..16: note = synthetic [barcode part1]
  source 1..16: mol_type = other DNA
taaggtcgttacgacc

SEQ ID NO: 7055 - DNA, 16 bp, synthetic construct
  misc_feature 1..16: note = synthetic [barcode part1]
  source 1..16: mol_type = other DNA
gacctcttgataaggc

SEQ ID NO: 7056 - DNA, 16 bp, synthetic construct
  misc_feature 1..16: note = synthetic [barcode part1]
  source 1..16: mol_type = other DNA
tgacagtgttggatcc

SEQ ID NO: 7057 - DNA, 16 bp, synthetic construct
  misc_feature 1..16: note = synthetic [barcode part1]
  source 1..16: mol_type = other DNA
tgagttggaggtgcac

SEQ ID NO: 7058 - DNA, 16 bp, synthetic construct
  misc_feature 1..16: note = synthetic [barcode part1]
  source 1..16: mol_type = other DNA
acgcggtgagaagttc

SEQ ID NO: 7059 - DNA, 16 bp, synthetic construct
  misc_feature 1..16: note = synthetic [barcode part1]
  source 1..16: mol_type = other DNA
gaatacacgacgattg

SEQ ID NO: 7060 - DNA, 16 bp, synthetic construct
  misc_feature 1..16: note = synthetic [barcode part1]
  source 1..16: mol_type = other DNA
taatcaacgacgtcgc

SEQ ID NO: 7061 - DNA, 16 bp, synthetic construct
  misc_feature 1..16: note = synthetic [barcode part1]
  source 1..16: mol_type = other DNA
gcaagtgagtgtcacg

SEQ ID NO: 7062 - DNA, 16 bp, synthetic construct
  misc_feature 1..16: note = synthetic [barcode part1]
  source 1..16: mol_type = other DNA
gaataccgataggatc

SEQ ID NO: 7063 - DNA, 16 bp, synthetic construct
  misc_feature 1..16: note = synthetic [barcode part1]
  source 1..16: mol_type = other DNA
gtccgtgcaattctcg

SEQ ID NO: 7064 - DNA, 16 bp, synthetic construct
  misc_feature 1..16: note = synthetic [barcode part1]
  source 1..16: mol_type = other DNA
ttacttctcggcgcag

SEQ ID NO: 7065 - DNA, 16 bp, synthetic construct
  misc_feature 1..16: note = synthetic [barcode part1]
  source 1..16: mol_type = other DNA
gtgcaatctaactctc

SEQ ID NO: 7066 - DNA, 16 bp, synthetic construct
  misc_feature 1..16: note = synthetic [barcode part1]
  source 1..16: mol_type = other DNA
agtcctaacaacgtcg

SEQ ID NO: 7067 - DNA, 16 bp, synthetic construct
  misc_feature 1..16: note = synthetic [barcode part1]
  source 1..16: mol_type = other DNA
attgacaccacacggt

SEQ ID NO: 7068 - DNA, 16 bp, synthetic construct
  misc_feature 1..16: note = synthetic [barcode part1]
  source 1..16: mol_type = other DNA
attggacaagtgcggc

SEQ ID NO: 7069 - DNA, 16 bp, synthetic construct
  misc_feature 1..16: note = synthetic [barcode part1]
  source 1..16: mol_type = other DNA
tagttcgatccttgtg

SEQ ID NO: 7070 - DNA, 16 bp, synthetic construct
  misc_feature 1..16: note = synthetic [barcode part1]
  source 1..16: mol_type = other DNA
gagtcgtagattgcct

SEQ ID NO: 7071 - DNA, 16 bp, synthetic construct
  misc_feature 1..16: note = synthetic [barcode part1]
  source 1..16: mol_type = other DNA
taactctgtcgcgcac

SEQ ID NO: 7072 - DNA, 16 bp, synthetic construct
  misc_feature 1..16: note = synthetic [barcode part1]
  source 1..16: mol_type = other DNA
tgtcgtaccaagactg

SEQ ID NO: 7073 - DNA, 16 bp, synthetic construct
  misc_feature 1..16: note = synthetic [barcode part1]
  source 1..16: mol_type = other DNA
gtactgaatcgttctc

SEQ ID NO: 7074 - DNA, 16 bp, synthetic construct
  misc_feature 1..16: note = synthetic [barcode part1]
  source 1..16: mol_type = other DNA
atacgtgatcagtcgc

SEQ ID NO: 7075 - DNA, 16 bp, synthetic construct
  misc_feature 1..16: note = synthetic [barcode part1]
  source 1..16: mol_type = other DNA
acaggtcgtgcaatct

SEQ ID NO: 7076 - DNA, 16 bp, synthetic construct
  misc_feature 1..16: note = synthetic [barcode part1]
  source 1..16: mol_type = other DNA
ttaggatccgttcgtt

SEQ ID NO: 7077 - DNA, 16 bp, synthetic construct
  misc_feature 1..16: note = synthetic [barcode part1]
  source 1..16: mol_type = other DNA
cacgtctctgttggac

SEQ ID NO: 7078 - DNA, 16 bp, synthetic construct
  misc_feature 1..16: note = synthetic [barcode part1]
  source 1..16: mol_type = other DNA
tgcagacagtgttcgt

SEQ ID NO: 7079 - DNA, 16 bp, synthetic construct
  misc_feature 1..16: note = synthetic [barcode part1]
  source 1..16: mol_type = other DNA
tcaaggcgacgagtgt

SEQ ID NO: 7080 - DNA, 16 bp, synthetic construct
  misc_feature 1..16: note = synthetic [barcode part1]
  source 1..16: mol_type = other DNA
acactggccagatact

SEQ ID NO: 7081 - DNA, 16 bp, synthetic construct
  misc_feature 1..16: note = synthetic [barcode part1]
  source 1..16: mol_type = other DNA
gtcacctcacttaggc

SEQ ID NO: 7082 - DNA, 16 bp, synthetic construct
  misc_feature 1..16: note = synthetic [barcode part1]
  source 1..16: mol_type = other DNA
ttccgcaattgagttc

SEQ ID NO: 7083 - DNA, 16 bp, synthetic construct
  misc_feature 1..16: note = synthetic [barcode part1]
  source 1..16: mol_type = other DNA
caataccggacgagtg

SEQ ID NO: 7084 - DNA, 16 bp, synthetic construct
  misc_feature 1..16: note = synthetic [barcode part1]
  source 1..16: mol_type = other DNA
tgcggattaggatagt

SEQ ID NO: 7085 - DNA, 16 bp, synthetic construct
  misc_feature 1..16: note = synthetic [barcode part1]
  source 1..16: mol_type = other DNA
gttgacgaacacacct

SEQ ID NO: 7086 - DNA, 16 bp, synthetic construct
  misc_feature 1..16: note = synthetic [barcode part1]
  source 1..16: mol_type = other DNA
actcgttgaatctcgt

SEQ ID NO: 7087 - DNA, 16 bp, synthetic construct
  misc_feature 1..16: note = synthetic [barcode part1]
  source 1..16: mol_type = other DNA
cgcaataagactctgc

SEQ ID NO: 7088 - DNA, 16 bp, synthetic construct
  misc_feature 1..16: note = synthetic [barcode part1]
  source 1..16: mol_type = other DNA
tacttggaacctgcag

SEQ ID NO: 7089 - DNA, 16 bp, synthetic construct
  misc_feature 1..16: note = synthetic [barcode part1]
  source 1..16: mol_type = other DNA
atccagagacaggacc

SEQ ID NO: 7090 - DNA, 16 bp, synthetic construct
  misc_feature 1..16: note = synthetic [barcode part1]
  source 1..16: mol_type = other DNA
cgatatccagaactcg

SEQ ID NO: 7091 - DNA, 16 bp, synthetic construct
  misc_feature 1..16: note = synthetic [barcode part1]
  source 1..16: mol_type = other DNA
aagtaacagttgtgcg

SEQ ID NO: 7092 - DNA, 16 bp, synthetic construct
  misc_feature 1..16: note = synthetic [barcode part1]
  source 1..16: mol_type = other DNA
acagaattctgtcgcg

SEQ ID NO: 7093 - DNA, 16 bp, synthetic construct
  misc_feature 1..16: note = synthetic [barcode part1]
  source 1..16: mol_type = other DNA
acgtgttagtgtaccg

SEQ ID NO: 7094 - DNA, 16 bp, synthetic construct
  misc_feature 1..16: note = synthetic [barcode part1]
  source 1..16: mol_type = other DNA
gacttctcgcgagtct

SEQ ID NO: 7095 - DNA, 16 bp, synthetic construct
  misc_feature 1..16: note = synthetic [barcode part1]
  source 1..16: mol_type = other DNA
cgtgttcaagtacgac

SEQ ID NO: 7096 - DNA, 16 bp, synthetic construct
  misc_feature 1..16: note = synthetic [barcode part1]
  source 1..16: mol_type = other DNA
agtgatcagtccgatc

SEQ ID NO: 7097 - DNA, 16 bp, synthetic construct
  misc_feature 1..16: note = synthetic [barcode part1]
  source 1..16: mol_type = other DNA
cgattgtacgattgcg

SEQ ID NO: 7098 - DNA, 16 bp, synthetic construct
  misc_feature 1..16: note = synthetic [barcode part1]
  source 1..16: mol_type = other DNA
tcgatacctggtctcg

SEQ ID NO: 7099 - DNA, 16 bp, synthetic construct
  misc_feature 1..16: note = synthetic [barcode part1]
  source 1..16: mol_type = other DNA
agagaacgtaggacgt

SEQ ID NO: 7100 - DNA, 16 bp, synthetic construct
  misc_feature 1..16: note = synthetic [barcode part1]
  source 1..16: mol_type = other DNA
tgtaggtgtgacaggc

SEQ ID NO: 7101 - DNA, 16 bp, synthetic construct
  misc_feature 1..16: note = synthetic [barcode part1]
  source 1..16: mol_type = other DNA
aacctcactacgacag

SEQ ID NO: 7102 - DNA, 16 bp, synthetic construct
  misc_feature 1..16: note = synthetic [barcode part1]
  source 1..16: mol_type = other DNA
tccgtaccgatctgac

SEQ ID NO: 7103 - DNA, 16 bp, synthetic construct
  misc_feature 1..16: note = synthetic [barcode part1]
  source 1..16: mol_type = other DNA
atccaacaagaacacg

SEQ ID NO: 7104 - DNA, 16 bp, synthetic construct
  misc_feature 1..16: note = synthetic [barcode part1]
  source 1..16: mol_type = other DNA
ccgcgaattactgtcc

SEQ ID NO: 7105 - DNA, 16 bp, synthetic construct
  misc_feature 1..16: note = synthetic [barcode part1]
  source 1..16: mol_type = other DNA
cagtcgactagtcagt

SEQ ID NO: 7106 - DNA, 16 bp, synthetic construct
  misc_feature 1..16: note = synthetic [barcode part1]
  source 1..16: mol_type = other DNA
aaggaattcacacgac

SEQ ID NO: 7107 - DNA, 16 bp, synthetic construct
  misc_feature 1..16: note = synthetic [barcode part1]
  source 1..16: mol_type = other DNA
actcttattcaacggc

SEQ ID NO: 7108 - DNA, 16 bp, synthetic construct
  misc_feature 1..16: note = synthetic [barcode part1]
  source 1..16: mol_type = other DNA
aggtcgaactgtgcag

SEQ ID NO: 7109 - DNA, 16 bp, synthetic construct
  misc_feature 1..16: note = synthetic [barcode part1]
  source 1..16: mol_type = other DNA
gatctgtgttcgcaag

SEQ ID NO: 7110 - DNA, 16 bp, synthetic construct
  misc_feature 1..16: note = synthetic [barcode part1]
  source 1..16: mol_type = other DNA
tgcgatatctgaggtc

SEQ ID NO: 7111 - DNA, 16 bp, synthetic construct
  misc_feature 1..16: note = synthetic [barcode part1]
  source 1..16: mol_type = other DNA
acagttgacacaccac

SEQ ID NO: 7112 - DNA, 16 bp, synthetic construct
  misc_feature 1..16: note = synthetic [barcode part1]
  source 1..16: mol_type = other DNA
gtatacctaaggagtg

SEQ ID NO: 7113 - DNA, 16 bp, synthetic construct
  misc_feature 1..16: note = synthetic [barcode part1]
  source 1..16: mol_type = other DNA
ccttcggtcctaatct

SEQ ID NO: 7114 - DNA, 16 bp, synthetic construct
  misc_feature 1..16: note = synthetic [barcode part1]
  source 1..16: mol_type = other DNA
attcactggacagacc

SEQ ID NO: 7115 - DNA, 16 bp, synthetic construct
  misc_feature 1..16: note = synthetic [barcode part1]
  source 1..16: mol_type = other DNA
agaagttacgccggtg

SEQ ID NO: 7116 - DNA, 16 bp, synthetic construct
  misc_feature 1..16: note = synthetic [barcode part1]
  source 1..16: mol_type = other DNA
tgttgttcaccttgcc

SEQ ID NO: 7117 - DNA, 16 bp, synthetic construct
  misc_feature 1..16: note = synthetic [barcode part1]
  source 1..16: mol_type = other DNA
caaggagtgacacgtc

SEQ ID NO: 7118 - DNA, 16 bp, synthetic construct
  misc_feature 1..16: note = synthetic [barcode part1]
  source 1..16: mol_type = other DNA
ccgttattcacaggtt

SEQ ID NO: 7119 - DNA, 16 bp, synthetic construct
  misc_feature 1..16: note = synthetic [barcode part1]
  source 1..16: mol_type = other DNA
cggactagtgcagagt

SEQ ID NO: 7120 - DNA, 16 bp, synthetic construct
  misc_feature 1..16: note = synthetic [barcode part1]
  source 1..16: mol_type = other DNA
cactcctagttgccag

SEQ ID NO: 7121 - DNA, 16 bp, synthetic construct
  misc_feature 1..16: note = synthetic [barcode part1]
  source 1..16: mol_type = other DNA
acttcgtgttcctcgt

SEQ ID NO: 7122 - DNA, 16 bp, synthetic construct
  misc_feature 1..16: note = synthetic [barcode part1]
  source 1..16: mol_type = other DNA
taaggaactggaaggc

SEQ ID NO: 7123 - DNA, 16 bp, synthetic construct
  misc_feature 1..16: note = synthetic [barcode part1]
  source 1..16: mol_type = other DNA
cgcaatactcgttcgc

SEQ ID NO: 7124 - DNA, 16 bp, synthetic construct
  misc_feature 1..16: note = synthetic [barcode part1]
  source 1..16: mol_type = other DNA
tgaactgtgacgactc

SEQ ID NO: 7125 - DNA, 16 bp, synthetic construct
  misc_feature 1..16: note = synthetic [barcode part1]
  source 1..16: mol_type = other DNA
acggtgaacttctcag

SEQ ID NO: 7126 - DNA, 16 bp, synthetic construct
  misc_feature 1..16: note = synthetic [barcode part1]
  source 1..16: mol_type = other DNA
aggcaggtcacctatt

SEQ ID NO: 7127 - DNA, 16 bp, synthetic construct
  misc_feature 1..16: note = synthetic [barcode part1]
  source 1..16: mol_type = other DNA
gactaaccgactaacc

SEQ ID NO: 7128 - DNA, 16 bp, synthetic construct
  misc_feature 1..16: note = synthetic [barcode part1]
  source 1..16: mol_type = other DNA
gtcacgcaaggtaacg

SEQ ID NO: 7129 - DNA, 16 bp, synthetic construct
  misc_feature 1..16: note = synthetic [barcode part1]
  source 1..16: mol_type = other DNA
agagtcctactgtggt

SEQ ID NO: 7130 - DNA, 16 bp, synthetic construct
  misc_feature 1..16: note = synthetic [barcode part1]
  source 1..16: mol_type = other DNA
tcgaggccacttgttc

SEQ ID NO: 7131 - DNA, 16 bp, synthetic construct
  misc_feature 1..16: note = synthetic [barcode part1]
  source 1..16: mol_type = other DNA
aaggttcgatatcgcc

SEQ ID NO: 7132 - DNA, 16 bp, synthetic construct
  misc_feature 1..16: note = synthetic [barcode part1]
  source 1..16: mol_type = other DNA
gtggttgttaaggagt

SEQ ID NO: 7133 - DNA, 16 bp, synthetic construct
  misc_feature 1..16: note = synthetic [barcode part1]
  source 1..16: mol_type = other DNA
gcgtagattatcgaag

SEQ ID NO: 7134 - DNA, 16 bp, synthetic construct
  misc_feature 1..16: note = synthetic [barcode part1]
  source 1..16: mol_type = other DNA
agaccgtattctcgtt

SEQ ID NO: 7135 - DNA, 16 bp, synthetic construct
  misc_feature 1..16: note = synthetic [barcode part1]
  source 1..16: mol_type = other DNA
attggacgtggaggtc

SEQ ID NO: 7136 - DNA, 16 bp, synthetic construct
  misc_feature 1..16: note = synthetic [barcode part1]
  source 1..16: mol_type = other DNA
acctggagtagatcct

SEQ ID NO: 7137 - DNA, 16 bp, synthetic construct
  misc_feature 1..16: note = synthetic [barcode part1]
  source 1..16: mol_type = other DNA
atatacacgtgtgcgc

SEQ ID NO: 7138 - DNA, 16 bp, synthetic construct
  misc_feature 1..16: note = synthetic [barcode part1]
  source 1..16: mol_type = other DNA
tgttctgtagacgtct

SEQ ID NO: 7139 - DNA, 16 bp, synthetic construct
  misc_feature 1..16: note = synthetic [barcode part1]
  source 1..16: mol_type = other DNA
gtagaatcaggcaccg

SEQ ID NO: 7140 - DNA, 16 bp, synthetic construct
  misc_feature 1..16: note = synthetic [barcode part1]
  source 1..16: mol_type = other DNA
gttagtgagtggtaac

SEQ ID NO: 7141 - DNA, 16 bp, synthetic construct
  misc_feature 1..16: note = synthetic [barcode part1]
  source 1..16: mol_type = other DNA
tcgatccggacacttc

SEQ ID NO: 7142 - DNA, 16 bp, synthetic construct
  misc_feature 1..16: note = synthetic [barcode part1]
  source 1..16: mol_type = other DNA
gactacaaccggtatc

SEQ ID NO: 7143 - DNA, 16 bp, synthetic construct
  misc_feature 1..16: note = synthetic [barcode part1]
  source 1..16: mol_type = other DNA
agagaccgcacactag

SEQ ID NO: 7144 - DNA, 16 bp, synthetic construct
  misc_feature 1..16: note = synthetic [barcode part1]
  source 1..16: mol_type = other DNA
accttgttctacgagt

SEQ ID NO: 7145 - DNA, 16 bp, synthetic construct
  misc_feature 1..16: note = synthetic [barcode part1]
  source 1..16: mol_type = other DNA
gaatcaagttacgcag

SEQ ID NO: 7146 - DNA, 16 bp, synthetic construct
  misc_feature 1..16: note = synthetic [barcode part1]
  source 1..16: mol_type = other DNA
cacctgcaacgtcgtt

SEQ ID NO: 7147 - DNA, 16 bp, synthetic construct
  misc_feature 1..16: note = synthetic [barcode part1]
  source 1..16: mol_type = other DNA
actgtcagtgtctccg

SEQ ID NO: 7148 - DNA, 16 bp, synthetic construct
  misc_feature 1..16: note = synthetic [barcode part1]
  source 1..16: mol_type = other DNA
gccgtggttatctatt

SEQ ID NO: 7149 - DNA, 16 bp, synthetic construct
  misc_feature 1..16: note = synthetic [barcode part1]
  source 1..16: mol_type = other DNA
gtgtctatatcgtctg

SEQ ID NO: 7150 - DNA, 16 bp, synthetic construct
  misc_feature 1..16: note = synthetic [barcode part1]
  source 1..16: mol_type = other DNA
gagttggtggttgcag

SEQ ID NO: 7151 - DNA, 16 bp, synthetic construct
  misc_feature 1..16: note = synthetic [barcode part1]
  source 1..16: mol_type = other DNA
tagtacgacacctgac

SEQ ID NO: 7152 - DNA, 16 bp, synthetic construct
  misc_feature 1..16: note = synthetic [barcode part1]
  source 1..16: mol_type = other DNA
gaagaccttccaatcg

SEQ ID NO: 7153 - DNA, 16 bp, synthetic construct
  misc_feature 1..16: note = synthetic [barcode part1]
  source 1..16: mol_type = other DNA
ccagagataactctcg

SEQ ID NO: 7154 - DNA, 16 bp, synthetic construct
  misc_feature 1..16: note = synthetic [barcode part1]
  source 1..16: mol_type = other DNA
tggaggttgccaagtg

SEQ ID NO: 7155 - DNA, 16 bp, synthetic construct
  misc_feature 1..16: note = synthetic [barcode part1]
  source 1..16: mol_type = other DNA
tggaacgaacgtattg

SEQ ID NO: 7156 - DNA, 16 bp, synthetic construct
  misc_feature 1..16: note = synthetic [barcode part1]
  source 1..16: mol_type = other DNA
accagagagttaggag

SEQ ID NO: 7157 - DNA, 16 bp, synthetic construct
  misc_feature 1..16: note = synthetic [barcode part1]
  source 1..16: mol_type = other DNA
atcggagtggttgcag

SEQ ID NO: 7158 - DNA, 16 bp, synthetic construct
  misc_feature 1..16: note = synthetic [barcode part1]
  source 1..16: mol_type = other DNA
acaactggtgttgacc

SEQ ID NO: 7159 - DNA, 16 bp, synthetic construct
  misc_feature 1..16: note = synthetic [barcode part1]
  source 1..16: mol_type = other DNA
gccagaatcgaagaag

SEQ ID NO: 7160 - DNA, 16 bp, synthetic construct
  misc_feature 1..16: note = synthetic [barcode part1]
  source 1..16: mol_type = other DNA
gtcggacgtctaatac

SEQ ID NO: 7161 - DNA, 16 bp, synthetic construct
  misc_feature 1..16: note = synthetic [barcode part1]
  source 1..16: mol_type = other DNA
atctatcgcctactcc

SEQ ID NO: 7162 - DNA, 16 bp, synthetic construct
  misc_feature 1..16: note = synthetic [barcode part1]
  source 1..16: mol_type = other DNA
cacgttaaccgtacag

SEQ ID NO: 7163 - DNA, 16 bp, synthetic construct
  misc_feature 1..16: note = synthetic [barcode part1]
  source 1..16: mol_type = other DNA
agaatcctccacttac

SEQ ID NO: 7164 - DNA, 16 bp, synthetic construct
  misc_feature 1..16: note = synthetic [barcode part1]
  source 1..16: mol_type = other DNA
agaggaattccggaag

SEQ ID NO: 7165 - DNA, 16 bp, synthetic construct
  misc_feature 1..16: note = synthetic [barcode part1]
  source 1..16: mol_type = other DNA
agacactgcagatctc

SEQ ID NO: 7166 - DNA, 16 bp, synthetic construct
  misc_feature 1..16: note = synthetic [barcode part1]
  source 1..16: mol_type = other DNA
ttcttctctgaggcct

SEQ ID NO: 7167 - DNA, 16 bp, synthetic construct
  misc_feature 1..16: note = synthetic [barcode part1]
  source 1..16: mol_type = other DNA
cgttagtataccggtg

SEQ ID NO: 7168 - DNA, 16 bp, synthetic construct
  misc_feature 1..16: note = synthetic [barcode part1]
  source 1..16: mol_type = other DNA
cgcactgatataccag

SEQ ID NO: 7169 - DNA, 16 bp, synthetic construct
  misc_feature 1..16: note = synthetic [barcode part1]
  source 1..16: mol_type = other DNA
aacctgagaggacacc

SEQ ID NO: 7170 - DNA, 16 bp, synthetic construct
  misc_feature 1..16: note = synthetic [barcode part1]
  source 1..16: mol_type = other DNA
cacgaagtagttcaag

SEQ ID NO: 7171 - DNA, 16 bp, synthetic construct
  misc_feature 1..16: note = synthetic [barcode part1]
  source 1..16: mol_type = other DNA
gttcctgtatcggacc

SEQ ID NO: 7172 - DNA, 16 bp, synthetic construct
  misc_feature 1..16: note = synthetic [barcode part1]
  source 1..16: mol_type = other DNA
gacgaagatcacttcc

SEQ ID NO: 7173 - DNA, 16 bp, synthetic construct
  misc_feature 1..16: note = synthetic [barcode part1]
  source 1..16: mol_type = other DNA
gacagttcgcactctc

SEQ ID NO: 7174 - DNA, 16 bp, synthetic construct
  misc_feature 1..16: note = synthetic [barcode part1]
  source 1..16: mol_type = other DNA
actgtggaacaggcgt

SEQ ID NO: 7175 - DNA, 16 bp, synthetic construct
  misc_feature 1..16: note = synthetic [barcode part1]
  source 1..16: mol_type = other DNA
gatcttgtcgtggtag

SEQ ID NO: 7176 - DNA, 16 bp, synthetic construct
  misc_feature 1..16: note = synthetic [barcode part1]
  source 1..16: mol_type = other DNA
ttgttatccgcagact

SEQ ID NO: 7177 - DNA, 16 bp, synthetic construct
  misc_feature 1..16: note = synthetic [barcode part1]
  source 1..16: mol_type = other DNA
cgattactatcggcag

SEQ ID NO: 7178 - DNA, 16 bp, synthetic construct
  misc_feature 1..16: note = synthetic [barcode part1]
  source 1..16: mol_type = other DNA
gttattacctcgcgcg

SEQ ID NO: 7179 - DNA, 16 bp, synthetic construct
  misc_feature 1..16: note = synthetic [barcode part1]
  source 1..16: mol_type = other DNA
gagacggcactcaagt

SEQ ID NO: 7180 - DNA, 16 bp, synthetic construct
  misc_feature 1..16: note = synthetic [barcode part1]
  source 1..16: mol_type = other DNA
tgcagatacggacttc

SEQ ID NO: 7181 - DNA, 16 bp, synthetic construct
  misc_feature 1..16: note = synthetic [barcode part1]
  source 1..16: mol_type = other DNA
aataaggaaggcggtc

SEQ ID NO: 7182 - DNA, 16 bp, synthetic construct
  misc_feature 1..16: note = synthetic [barcode part1]
  source 1..16: mol_type = other DNA
tctactacttcgccac

SEQ ID NO: 7183 - DNA, 16 bp, synthetic construct
  misc_feature 1..16: note = synthetic [barcode part1]
  source 1..16: mol_type = other DNA
gcactgacctctggtt

SEQ ID NO: 7184 - DNA, 16 bp, synthetic construct
  misc_feature 1..16: note = synthetic [barcode part1]
  source 1..16: mol_type = other DNA
cgagaggaccaacgtt

SEQ ID NO: 7185 - DNA, 16 bp, synthetic construct
  misc_feature 1..16: note = synthetic [barcode part1]
  source 1..16: mol_type = other DNA
ttccaccaggttcacg

SEQ ID NO: 7186 - DNA, 16 bp, synthetic construct
  misc_feature 1..16: note = synthetic [barcode part1]
  source 1..16: mol_type = other DNA
gttgcaggtctatctt

SEQ ID NO: 7187 - DNA, 16 bp, synthetic construct
  misc_feature 1..16: note = synthetic [barcode part1]
  source 1..16: mol_type = other DNA
aaggattaccggcgtg

SEQ ID NO: 7188 - DNA, 16 bp, synthetic construct
  misc_feature 1..16: note = synthetic [barcode part1]
  source 1..16: mol_type = other DNA
cctcgacggtcgtatt

SEQ ID NO: 7189 - DNA, 16 bp, synthetic construct
  misc_feature 1..16: note = synthetic [barcode part1]
  source 1..16: mol_type = other DNA
aattcctaggaaccgc

SEQ ID NO: 7190 - DNA, 16 bp, synthetic construct
  misc_feature 1..16: note = synthetic [barcode part1]
  source 1..16: mol_type = other DNA
gtgtcaagtgcctaac

SEQ ID NO: 7191 - DNA, 16 bp, synthetic construct
  misc_feature 1..16: note = synthetic [barcode part1]
  source 1..16: mol_type = other DNA
attcgttacctgcctc

SEQ ID NO: 7192 - DNA, 16 bp, synthetic construct
  misc_feature 1..16: note = synthetic [barcode part1]
  source 1..16: mol_type = other DNA
ttctatctgttcggag

SEQ ID NO: 7193 - DNA, 16 bp, synthetic construct
  misc_feature 1..16: note = synthetic [barcode part1]
  source 1..16: mol_type = other DNA
tactctgacggcaagt

SEQ ID NO: 7194 - DNA, 16 bp, synthetic construct
  misc_feature 1..16: note = synthetic [barcode part1]
  source 1..16: mol_type = other DNA
tatcttctcggcgacg

SEQ ID NO: 7195 - DNA, 16 bp, synthetic construct
  misc_feature 1..16: note = synthetic [barcode part1]
  source 1..16: mol_type = other DNA
acggttattgacttcc

SEQ ID NO: 7196 - DNA, 16 bp, synthetic construct
  misc_feature 1..16: note = synthetic [barcode part1]
  source 1..16: mol_type = other DNA
tggaatcctctcttcc

SEQ ID NO: 7197 - DNA, 16 bp, synthetic construct
  misc_feature 1..16: note = synthetic [barcode part1]
  source 1..16: mol_type = other DNA
aactaccgtctgacag

SEQ ID NO: 7198 - DNA, 16 bp, synthetic construct
  misc_feature 1..16: note = synthetic [barcode part1]
  source 1..16: mol_type = other DNA
taccgttgttcagact

SEQ ID NO: 7199 - DNA, 16 bp, synthetic construct
  misc_feature 1..16: note = synthetic [barcode part1]
  source 1..16: mol_type = other DNA
gttcggattcgagtgt

SEQ ID NO: 7200 - DNA, 16 bp, synthetic construct
  misc_feature 1..16: note = synthetic [barcode part1]
  source 1..16: mol_type = other DNA
gccgacacaaggaatc

SEQ ID NO: 7201 - DNA, 16 bp, synthetic construct
  misc_feature 1..16: note = synthetic [barcode part1]
  source 1..16: mol_type = other DNA
gtgtgattcaatctcc

SEQ ID NO: 7202 - DNA, 16 bp, synthetic construct
  misc_feature 1..16: note = synthetic [barcode part1]
  source 1..16: mol_type = other DNA
acgagtcagtcacgtt

SEQ ID NO: 7203 - DNA, 16 bp, synthetic construct
  misc_feature 1..16: note = synthetic [barcode part1]
  source 1..16: mol_type = other DNA
cggaatcaaggtctct

SEQ ID NO: 7204 - DNA, 16 bp, synthetic construct
  misc_feature 1..16: note = synthetic [barcode part1]
  source 1..16: mol_type = other DNA
cgacaattgattcggc

SEQ ID NO: 7205 - DNA, 16 bp, synthetic construct
  misc_feature 1..16: note = synthetic [barcode part1]
  source 1..16: mol_type = other DNA
gtacgattgtgaccac

SEQ ID NO: 7206 - DNA, 16 bp, synthetic construct
  misc_feature 1..16: note = synthetic [barcode part1]
  source 1..16: mol_type = other DNA
ttacttcaaggcgacg

SEQ ID NO: 7207 - DNA, 16 bp, synthetic construct
  misc_feature 1..16: note = synthetic [barcode part1]
  source 1..16: mol_type = other DNA
actaggttccgacaac

SEQ ID NO: 7208 - DNA, 16 bp, synthetic construct
  misc_feature 1..16: note = synthetic [barcode part1]
  source 1..16: mol_type = other DNA
gacactagaagaggac

SEQ ID NO: 7209 - DNA, 16 bp, synthetic construct
  misc_feature 1..16: note = synthetic [barcode part1]
  source 1..16: mol_type = other DNA
gagtatcaggtctgtc

SEQ ID NO: 7210 - DNA, 16 bp, synthetic construct
  misc_feature 1..16: note = synthetic [barcode part1]
  source 1..16: mol_type = other DNA
aactacgcagttacgc

SEQ ID NO: 7211 - DNA, 16 bp, synthetic construct
  misc_feature 1..16: note = synthetic [barcode part1]
  source 1..16: mol_type = other DNA
atcacgaagacaagtc

SEQ ID NO: 7212 - DNA, 16 bp, synthetic construct
  misc_feature 1..16: note = synthetic [barcode part1]
  source 1..16: mol_type = other DNA
cacaggaactagattg

SEQ ID NO: 7213 - DNA, 16 bp, synthetic construct
  misc_feature 1..16: note = synthetic [barcode part1]
  source 1..16: mol_type = other DNA
accgtcttcgtaggtc

SEQ ID NO: 7214 - DNA, 16 bp, synthetic construct
  misc_feature 1..16: note = synthetic [barcode part1]
  source 1..16: mol_type = other DNA
caggtatccagtacac

SEQ ID NO: 7215 - DNA, 16 bp, synthetic construct
  misc_feature 1..16: note = synthetic [barcode part1]
  source 1..16: mol_type = other DNA
aacaattgttgccggc

SEQ ID NO: 7216 - DNA, 16 bp, synthetic construct
  misc_feature 1..16: note = synthetic [barcode part1]
  source 1..16: mol_type = other DNA
cagtactccacctacg

SEQ ID NO: 7217 - DNA, 16 bp, synthetic construct
  misc_feature 1..16: note = synthetic [barcode part1]
  source 1..16: mol_type = other DNA
acttccaagatcgtct

SEQ ID NO: 7218 - DNA, 16 bp, synthetic construct
  misc_feature 1..16: note = synthetic [barcode part1]
  source 1..16: mol_type = other DNA
caagaatagattgccg

SEQ ID NO: 7219 - DNA, 16 bp, synthetic construct
  misc_feature 1..16: note = synthetic [barcode part1]
  source 1..16: mol_type = other DNA
gaccacggagagattc

SEQ ID NO: 7220 - DNA, 16 bp, synthetic construct
  misc_feature 1..16: note = synthetic [barcode part1]
  source 1..16: mol_type = other DNA
accgcgtggaataacg

SEQ ID NO: 7221 - DNA, 16 bp, synthetic construct
  misc_feature 1..16: note = synthetic [barcode part1]
  source 1..16: mol_type = other DNA
atcagtgccaccgttc

SEQ ID NO: 7222 - DNA, 16 bp, synthetic construct
  misc_feature 1..16: note = synthetic [barcode part1]
  source 1..16: mol_type = other DNA
tctcaatcggtctctc

SEQ ID NO: 7223 - DNA, 16 bp, synthetic construct
  misc_feature 1..16: note = synthetic [barcode part1]
  source 1..16: mol_type = other DNA
acgttgtggcgaacag

SEQ ID NO: 7224 - DNA, 16 bp, synthetic construct
  misc_feature 1..16: note = synthetic [barcode part1]
  source 1..16: mol_type = other DNA
gtctctgagattatcc

SEQ ID NO: 7225 - DNA, 16 bp, synthetic construct
  misc_feature 1..16: note = synthetic [barcode part1]
  source 1..16: mol_type = other DNA
ccacgtcggattgtct

SEQ ID NO: 7226 - DNA, 16 bp, synthetic construct
  misc_feature 1..16: note = synthetic [barcode part1]
  source 1..16: mol_type = other DNA
gcaccagttagtgtac

SEQ ID NO: 7227 - DNA, 16 bp, synthetic construct
  misc_feature 1..16: note = synthetic [barcode part1]
  source 1..16: mol_type = other DNA
atcttcggcagtccgt

SEQ ID NO: 7228 - DNA, 16 bp, synthetic construct
  misc_feature 1..16: note = synthetic [barcode part1]
  source 1..16: mol_type = other DNA
ccttcgattcttcgac

SEQ ID NO: 7229 - DNA, 16 bp, synthetic construct
  misc_feature 1..16: note = synthetic [barcode part1]
  source 1..16: mol_type = other DNA
aaggttagaaggccag

SEQ ID NO: 7230 - DNA, 16 bp, synthetic construct
  misc_feature 1..16: note = synthetic [barcode part1]
  source 1..16: mol_type = other DNA
gcgactattccaactt

SEQ ID NO: 7231 - DNA, 16 bp, synthetic construct
  misc_feature 1..16: note = synthetic [barcode part1]
  source 1..16: mol_type = other DNA
tcttagttctcgtcgc

SEQ ID NO: 7232 - DNA, 16 bp, synthetic construct
  misc_feature 1..16: note = synthetic [barcode part1]
  source 1..16: mol_type = other DNA
gttacttgcctcactc

SEQ ID NO: 7233 - DNA, 16 bp, synthetic construct
  misc_feature 1..16: note = synthetic [barcode part1]
  source 1..16: mol_type = other DNA
agacctgtctaatcct

SEQ ID NO: 7234 - DNA, 16 bp, synthetic construct
  misc_feature 1..16: note = synthetic [barcode part1]
  source 1..16: mol_type = other DNA
aatcaagacgatcacg

SEQ ID NO: 7235 - DNA, 16 bp, synthetic construct
  misc_feature 1..16: note = synthetic [barcode part1]
  source 1..16: mol_type = other DNA
agataacgtatccgag

SEQ ID NO: 7236 - DNA, 16 bp, synthetic construct
  misc_feature 1..16: note = synthetic [barcode part1]
  source 1..16: mol_type = other DNA
tctgatccggcgtgtt

SEQ ID NO: 7237 - DNA, 16 bp, synthetic construct
  misc_feature 1..16: note = synthetic [barcode part1]
  source 1..16: mol_type = other DNA
tcggcacagagagttg

SEQ ID NO: 7238 - DNA, 16 bp, synthetic construct
  misc_feature 1..16: note = synthetic [barcode part1]
  source 1..16: mol_type = other DNA
gtacaacagtcgaggc

SEQ ID NO: 7239 - DNA, 16 bp, synthetic construct
  misc_feature 1..16: note = synthetic [barcode part1]
  source 1..16: mol_type = other DNA
gtccggttacagagag

SEQ ID NO: 7240 - DNA, 16 bp, synthetic construct
  misc_feature 1..16: note = synthetic [barcode part1]
  source 1..16: mol_type = other DNA
atcacaggaactctgc

SEQ ID NO: 7241 - DNA, 16 bp, synthetic construct
  misc_feature 1..16: note = synthetic [barcode part1]
  source 1..16: mol_type = other DNA
ttagttccgttggcgc

SEQ ID NO: 7242 - DNA, 16 bp, synthetic construct
  misc_feature 1..16: note = synthetic [barcode part1]
  source 1..16: mol_type = other DNA
acaatcagagactggt

SEQ ID NO: 7243 - DNA, 16 bp, synthetic construct
  misc_feature 1..16: note = synthetic [barcode part1]
  source 1..16: mol_type = other DNA
gaggactacacgtcag

SEQ ID NO: 7244 - DNA, 16 bp, synthetic construct
  misc_feature 1..16: note = synthetic [barcode part1]
  source 1..16: mol_type = other DNA
gtaggcactgtggtag

SEQ ID NO: 7245 - DNA, 16 bp, synthetic construct
  misc_feature 1..16: note = synthetic [barcode part1]
  source 1..16: mol_type = other DNA
tctgtgttgacctagt

SEQ ID NO: 7246 - DNA, 16 bp, synthetic construct
  misc_feature 1..16: note = synthetic [barcode part1]
  source 1..16: mol_type = other DNA
acggactgttgcctct

SEQ ID NO: 7247 - DNA, 16 bp, synthetic construct
  misc_feature 1..16: note = synthetic [barcode part1]
  source 1..16: mol_type = other DNA
tctaccgaaggtaacc

SEQ ID NO: 7248 - DNA, 16 bp, synthetic construct
  misc_feature 1..16: note = synthetic [barcode part1]
  source 1..16: mol_type = other DNA
tcgtctctctctagtg

SEQ ID NO: 7249 - DNA, 16 bp, synthetic construct
  misc_feature 1..16: note = synthetic [barcode part1]
  source 1..16: mol_type = other DNA
ccagtccggtaatagt

SEQ ID NO: 7250 - DNA, 16 bp, synthetic construct
  misc_feature 1..16: note = synthetic [barcode part1]
  source 1..16: mol_type = other DNA
ttctgcacaacctagt

SEQ ID NO: 7251 - DNA, 16 bp, synthetic construct
  misc_feature 1..16: note = synthetic [barcode part1]
  source 1..16: mol_type = other DNA
cgtacaattcgatctc

SEQ ID NO: 7252 - DNA, 16 bp, synthetic construct
  misc_feature 1..16: note = synthetic [barcode part1]
  source 1..16: mol_type = other DNA
actctcggtccgatac

SEQ ID NO: 7253 - DNA, 16 bp, synthetic construct
  misc_feature 1..16: note = synthetic [barcode part1]
  source 1..16: mol_type = other DNA
gtataagtcactggag

SEQ ID NO: 7254 - DNA, 16 bp, synthetic construct
  misc_feature 1..16: note = synthetic [barcode part1]
  source 1..16: mol_type = other DNA
ttgccacaggttcgtc

SEQ ID NO: 7255 - DNA, 16 bp, synthetic construct
  misc_feature 1..16: note = synthetic [barcode part1]
  source 1..16: mol_type = other DNA
aatactgcgcggtgtt

SEQ ID NO: 7256 - DNA, 16 bp, synthetic construct
  misc_feature 1..16: note = synthetic [barcode part1]
  source 1..16: mol_type = other DNA
cgagttaacgcggaac

SEQ ID NO: 7257 - DNA, 16 bp, synthetic construct
  misc_feature 1..16: note = synthetic [barcode part1]
  source 1..16: mol_type = other DNA
ttatccgccgtctgtt

SEQ ID NO: 7258 - DNA, 16 bp, synthetic construct
  misc_feature 1..16: note = synthetic [barcode part1]
  source 1..16: mol_type = other DNA
tcgtaccacaaggatc

SEQ ID NO: 7259 - DNA, 16 bp, synthetic construct
  misc_feature 1..16: note = synthetic [barcode part1]
  source 1..16: mol_type = other DNA
aagtggagtgatacct

SEQ ID NO: 7260 - DNA, 16 bp, synthetic construct
  misc_feature 1..16: note = synthetic [barcode part1]
  source 1..16: mol_type = other DNA
aatccggacgtgaggt

SEQ ID NO: 7261 - DNA, 16 bp, synthetic construct
  misc_feature 1..16: note = synthetic [barcode part1]
  source 1..16: mol_type = other DNA
aacacgtactgtgtgc

SEQ ID NO: 7262 - DNA, 16 bp, synthetic construct
  misc_feature 1..16: note = synthetic [barcode part1]
  source 1..16: mol_type = other DNA
tgagtacgacttgcac

SEQ ID NO: 7263 - DNA, 16 bp, synthetic construct
  misc_feature 1..16: note = synthetic [barcode part1]
  source 1..16: mol_type = other DNA
ataagtgccacagtag

SEQ ID NO: 7264 - DNA, 16 bp, synthetic construct
  misc_feature 1..16: note = synthetic [barcode part1]
  source 1..16: mol_type = other DNA
aacgactctagtgacc

SEQ ID NO: 7265 - DNA, 16 bp, synthetic construct
  misc_feature 1..16: note = synthetic [barcode part1]
  source 1..16: mol_type = other DNA
caggaggcagttgtgt

SEQ ID NO: 7266 - DNA, 16 bp, synthetic construct
  misc_feature 1..16: note = synthetic [barcode part1]
  source 1..16: mol_type = other DNA
tctccagtcctgattc

SEQ ID NO: 7267 - DNA, 16 bp, synthetic construct
  misc_feature 1..16: note = synthetic [barcode part1]
  source 1..16: mol_type = other DNA
ccaacagattctcgtt

SEQ ID NO: 7268 - DNA, 16 bp, synthetic construct
  misc_feature 1..16: note = synthetic [barcode part1]
  source 1..16: mol_type = other DNA
tggtcctcaatatacc

SEQ ID NO: 7269 - DNA, 16 bp, synthetic construct
  misc_feature 1..16: note = synthetic [barcode part1]
  source 1..16: mol_type = other DNA
tgtgaacctcgttgcc

SEQ ID NO: 7270 - DNA, 16 bp, synthetic construct
  misc_feature 1..16: note = synthetic [barcode part1]
  source 1..16: mol_type = other DNA
cgttagaacctgacac

SEQ ID NO: 7271 - DNA, 16 bp, synthetic construct
  misc_feature 1..16: note = synthetic [barcode part1]
  source 1..16: mol_type = other DNA
aggacgtgtgtaagag

SEQ ID NO: 7272 - DNA, 16 bp, synthetic construct
  misc_feature 1..16: note = synthetic [barcode part1]
  source 1..16: mol_type = other DNA
tggtcttgtcagtact

SEQ ID NO: 7273 - DNA, 16 bp, synthetic construct
  misc_feature 1..16: note = synthetic [barcode part1]
  source 1..16: mol_type = other DNA
cgtgtctatccttgtc

SEQ ID NO: 7274 - DNA, 16 bp, synthetic construct
  misc_feature 1..16: note = synthetic [barcode part1]
  source 1..16: mol_type = other DNA
gaatccacgttgacac

SEQ ID NO: 7275 - DNA, 16 bp, synthetic construct
  misc_feature 1..16: note = synthetic [barcode part1]
  source 1..16: mol_type = other DNA
tcgagagttgatacag

SEQ ID NO: 7276 - DNA, 16 bp, synthetic construct
  misc_feature 1..16: note = synthetic [barcode part1]
  source 1..16: mol_type = other DNA
cggttgattgatcggt

SEQ ID NO: 7277 - DNA, 16 bp, synthetic construct
  misc_feature 1..16: note = synthetic [barcode part1]
  source 1..16: mol_type = other DNA
aacgttgtcgattggc

SEQ ID NO: 7278 - DNA, 16 bp, synthetic construct
  misc_feature 1..16: note = synthetic [barcode part1]
  source 1..16: mol_type = other DNA
acctacaatcacttcg

SEQ ID NO: 7279 - DNA, 16 bp, synthetic construct
  misc_feature 1..16: note = synthetic [barcode part1]
  source 1..16: mol_type = other DNA
tgttactgtagtcacc

SEQ ID NO: 7280 - DNA, 16 bp, synthetic construct
  misc_feature 1..16: note = synthetic [barcode part1]
  source 1..16: mol_type = other DNA
acaactctccacaccg

SEQ ID NO: 7281 - DNA, 16 bp, synthetic construct
  misc_feature 1..16: note = synthetic [barcode part1]
  source 1..16: mol_type = other DNA
gatatcaccgaccagt

SEQ ID NO: 7282 - DNA, 16 bp, synthetic construct
  misc_feature 1..16: note = synthetic [barcode part1]
  source 1..16: mol_type = other DNA
acgttaggttactctc

SEQ ID NO: 7283 - DNA, 16 bp, synthetic construct
  misc_feature 1..16: note = synthetic [barcode part1]
  source 1..16: mol_type = other DNA
aacgaaggcactcggt

SEQ ID NO: 7284 - DNA, 16 bp, synthetic construct
  misc_feature 1..16: note = synthetic [barcode part1]
  source 1..16: mol_type = other DNA
aacctaggactcagtc

SEQ ID NO: 7285 - DNA, 16 bp, synthetic construct
  misc_feature 1..16: note = synthetic [barcode part1]
  source 1..16: mol_type = other DNA
gagaatagtccaacac

SEQ ID NO: 7286 - DNA, 16 bp, synthetic construct
  misc_feature 1..16: note = synthetic [barcode part1]
  source 1..16: mol_type = other DNA
agatagagtctcgaac

SEQ ID NO: 7287 - DNA, 16 bp, synthetic construct
  misc_feature 1..16: note = synthetic [barcode part1]
  source 1..16: mol_type = other DNA
tgagaggcagttgtgc

SEQ ID NO: 7288 - DNA, 16 bp, synthetic construct
  misc_feature 1..16: note = synthetic [barcode part1]
  source 1..16: mol_type = other DNA
tcgtgattaaccggtg

SEQ ID NO: 7289 - DNA, 16 bp, synthetic construct
  misc_feature 1..16: note = synthetic [barcode part1]
  source 1..16: mol_type = other DNA
atcggtagagtactcc

SEQ ID NO: 7290 - DNA, 16 bp, synthetic construct
  misc_feature 1..16: note = synthetic [barcode part1]
  source 1..16: mol_type = other DNA
ttgttctcgtagactg

SEQ ID NO: 7291 - DNA, 16 bp, synthetic construct
  misc_feature 1..16: note = synthetic [barcode part1]
  source 1..16: mol_type = other DNA
ttcttacctcggtaag

SEQ ID NO: 7292 - DNA, 16 bp, synthetic construct
  misc_feature 1..16: note = synthetic [barcode part1]
  source 1..16: mol_type = other DNA
gtctaactgtaggaag

SEQ ID NO: 7293 - DNA, 16 bp, synthetic construct
  misc_feature 1..16: note = synthetic [barcode part1]
  source 1..16: mol_type = other DNA
gtgttggaaccgtgtt

SEQ ID NO: 7294 - DNA, 16 bp, synthetic construct
  misc_feature 1..16: note = synthetic [barcode part1]
  source 1..16: mol_type = other DNA
caccgaagacacgagt

SEQ ID NO: 7295 - DNA, 16 bp, synthetic construct
  misc_feature 1..16: note = synthetic [barcode part1]
  source 1..16: mol_type = other DNA
tacagatctactccgt

SEQ ID NO: 7296 - DNA, 16 bp, synthetic construct
  misc_feature 1..16: note = synthetic [barcode part1]
  source 1..16: mol_type = other DNA
aaggtccagtggacgt

SEQ ID NO: 7297 - DNA, 16 bp, synthetic construct
  misc_feature 1..16: note = synthetic [barcode part1]
  source 1..16: mol_type = other DNA
tggtcttgaggaacct

SEQ ID NO: 7298 - DNA, 16 bp, synthetic construct
  misc_feature 1..16: note = synthetic [barcode part1]
  source 1..16: mol_type = other DNA
cctaattacgtcaacc

SEQ ID NO: 7299 - DNA, 16 bp, synthetic construct
  misc_feature 1..16: note = synthetic [barcode part1]
  source 1..16: mol_type = other DNA
atctataccggcacag

SEQ ID NO: 7300 - DNA, 16 bp, synthetic construct
  misc_feature 1..16: note = synthetic [barcode part1]
  source 1..16: mol_type = other DNA
aggttggtgcaattag

SEQ ID NO: 7301 - DNA, 16 bp, synthetic construct
  misc_feature 1..16: note = synthetic [barcode part1]
  source 1..16: mol_type = other DNA
tggttgttggactcag

SEQ ID NO: 7302 - DNA, 16 bp, synthetic construct
  misc_feature 1..16: note = synthetic [barcode part1]
  source 1..16: mol_type = other DNA
acgacttaggttaccg

SEQ ID NO: 7303 - DNA, 16 bp, synthetic construct
  misc_feature 1..16: note = synthetic [barcode part1]
  source 1..16: mol_type = other DNA
aataagacgcggatct

SEQ ID NO: 7304 - DNA, 16 bp, synthetic construct
  misc_feature 1..16: note = synthetic [barcode part1]
  source 1..16: mol_type = other DNA
gaacggtaacttgtag

SEQ ID NO: 7305 - DNA, 16 bp, synthetic construct
  misc_feature 1..16: note = synthetic [barcode part1]
  source 1..16: mol_type = other DNA
ttcaaggtcaactggc

SEQ ID NO: 7306 - DNA, 16 bp, synthetic construct
  misc_feature 1..16: note = synthetic [barcode part1]
  source 1..16: mol_type = other DNA
aggcctgataattgcc

SEQ ID NO: 7307 - DNA, 16 bp, synthetic construct
  misc_feature 1..16: note = synthetic [barcode part1]
  source 1..16: mol_type = other DNA
ttggaacgtcctgaac

SEQ ID NO: 7308 - DNA, 16 bp, synthetic construct
  misc_feature 1..16: note = synthetic [barcode part1]
  source 1..16: mol_type = other DNA
aacgtgcaatctctct

SEQ ID NO: 7309 - DNA, 16 bp, synthetic construct
  misc_feature 1..16: note = synthetic [barcode part1]
  source 1..16: mol_type = other DNA
cctgaatcgttctgcg

SEQ ID NO: 7310 - DNA, 16 bp, synthetic construct
  misc_feature 1..16: note = synthetic [barcode part1]
  source 1..16: mol_type = other DNA
cagaaggcaattgcgc

SEQ ID NO: 7311 - DNA, 16 bp, synthetic construct
  misc_feature 1..16: note = synthetic [barcode part1]
  source 1..16: mol_type = other DNA
gtactacttcggaacg

SEQ ID NO: 7312 - DNA, 16 bp, synthetic construct
  misc_feature 1..16: note = synthetic [barcode part1]
  source 1..16: mol_type = other DNA
tagtcaaccagtcggt

SEQ ID NO: 7313 - DNA, 16 bp, synthetic construct
  misc_feature 1..16: note = synthetic [barcode part1]
  source 1..16: mol_type = other DNA
ttggcagtacctccgt

SEQ ID NO: 7314 - DNA, 16 bp, synthetic construct
  misc_feature 1..16: note = synthetic [barcode part1]
  source 1..16: mol_type = other DNA
gttacggtccaagact

SEQ ID NO: 7315 - DNA, 16 bp, synthetic construct
  misc_feature 1..16: note = synthetic [barcode part1]
  source 1..16: mol_type = other DNA
caactacgtcttctag

SEQ ID NO: 7316 - DNA, 16 bp, synthetic construct
  misc_feature 1..16: note = synthetic [barcode part1]
  source 1..16: mol_type = other DNA
tcctaccgttctactg

SEQ ID NO: 7317 - DNA, 16 bp, synthetic construct
  misc_feature 1..16: note = synthetic [barcode part1]
  source 1..16: mol_type = other DNA
tacggtagacaagtac

SEQ ID NO: 7318 - DNA, 16 bp, synthetic construct
  misc_feature 1..16: note = synthetic [barcode part1]
  source 1..16: mol_type = other DNA
gaataacgattgcacg

SEQ ID NO: 7319 - DNA, 16 bp, synthetic construct
  misc_feature 1..16: note = synthetic [barcode part1]
  source 1..16: mol_type = other DNA
agaggacactcgagtc

SEQ ID NO: 7320 - DNA, 16 bp, synthetic construct
  misc_feature 1..16: note = synthetic [barcode part1]
  source 1..16: mol_type = other DNA
cagtaacaactcggtc

SEQ ID NO: 7321 - DNA, 16 bp, synthetic construct
  misc_feature 1..16: note = synthetic [barcode part1]
  source 1..16: mol_type = other DNA
tacgtctcggattact

SEQ ID NO: 7322 - DNA, 16 bp, synthetic construct
  misc_feature 1..16: note = synthetic [barcode part1]
  source 1..16: mol_type = other DNA
caccgttacaaccgtc

SEQ ID NO: 7323 - DNA, 16 bp, synthetic construct
  misc_feature 1..16: note = synthetic [barcode part1]
  source 1..16: mol_type = other DNA
tctagtccgtagttgt

SEQ ID NO: 7324 - DNA, 16 bp, synthetic construct
  misc_feature 1..16: note = synthetic [barcode part1]
  source 1..16: mol_type = other DNA
tctccgatacaattgc

SEQ ID NO: 7325 - DNA, 16 bp, synthetic construct
  misc_feature 1..16: note = synthetic [barcode part1]
  source 1..16: mol_type = other DNA
taacagacgaacgccg

SEQ ID NO: 7326 - DNA, 16 bp, synthetic construct
  misc_feature 1..16: note = synthetic [barcode part1]
  source 1..16: mol_type = other DNA
aattctcgcgtctaac

SEQ ID NO: 7327 - DNA, 16 bp, synthetic construct
  misc_feature 1..16: note = synthetic [barcode part1]
  source 1..16: mol_type = other DNA
gaacacgtagtaatcg

SEQ ID NO: 7328 - DNA, 16 bp, synthetic construct
  misc_feature 1..16: note = synthetic [barcode part1]
  source 1..16: mol_type = other DNA
cgatacgaacctgtgt

SEQ ID NO: 7329 - DNA, 16 bp, synthetic construct
  misc_feature 1..16: note = synthetic [barcode part1]
  source 1..16: mol_type = other DNA
cgagagtgaaccactg

SEQ ID NO: 7330 - DNA, 16 bp, synthetic construct
  misc_feature 1..16: note = synthetic [barcode part1]
  source 1..16: mol_type = other DNA
tgcgtgcgattaatcg

SEQ ID NO: 7331 - DNA, 16 bp, synthetic construct
  misc_feature 1..16: note = synthetic [barcode part1]
  source 1..16: mol_type = other DNA
gaacagagtgacactt

SEQ ID NO: 7332 - DNA, 16 bp, synthetic construct
  misc_feature 1..16: note = synthetic [barcode part1]
  source 1..16: mol_type = other DNA
gcaatacttccggaac

SEQ ID NO: 7333 - DNA, 16 bp, synthetic construct
  misc_feature 1..16: note = synthetic [barcode part1]
  source 1..16: mol_type = other DNA
cgtccagaaggatcag

SEQ ID NO: 7334 - DNA, 16 bp, synthetic construct
  misc_feature 1..16: note = synthetic [barcode part1]
  source 1..16: mol_type = other DNA
ttcgatccaactacgt

SEQ ID NO: 7335 - DNA, 16 bp, synthetic construct
  misc_feature 1..16: note = synthetic [barcode part1]
  source 1..16: mol_type = other DNA
tcgtgcggattcttcg

SEQ ID NO: 7336 - DNA, 16 bp, synthetic construct
  misc_feature 1..16: note = synthetic [barcode part1]
  source 1..16: mol_type = other DNA
atactccggttactgt

SEQ ID NO: 7337 - DNA, 16 bp, synthetic construct
  misc_feature 1..16: note = synthetic [barcode part1]
  source 1..16: mol_type = other DNA
agagttcggtgttacc

SEQ ID NO: 7338 - DNA, 16 bp, synthetic construct
  misc_feature 1..16: note = synthetic [barcode part1]
  source 1..16: mol_type = other DNA
taaggtctccttctcc

SEQ ID NO: 7339 - DNA, 16 bp, synthetic construct
  misc_feature 1..16: note = synthetic [barcode part1]
  source 1..16: mol_type = other DNA
cctcggtaatcgtatt

SEQ ID NO: 7340 - DNA, 16 bp, synthetic construct
  misc_feature 1..16: note = synthetic [barcode part1]
  source 1..16: mol_type = other DNA
ttctctccaatcgacc

SEQ ID NO: 7341 - DNA, 16 bp, synthetic construct
  misc_feature 1..16: note = synthetic [barcode part1]
  source 1..16: mol_type = other DNA
gtcctcgattctcgtt

SEQ ID NO: 7342 - DNA, 16 bp, synthetic construct
  misc_feature 1..16: note = synthetic [barcode part1]
  source 1..16: mol_type = other DNA
gcaactaagttgagac

SEQ ID NO: 7343 - DNA, 16 bp, synthetic construct
  misc_feature 1..16: note = synthetic [barcode part1]
  source 1..16: mol_type = other DNA
cacaacacttgaggtc

SEQ ID NO: 7344 - DNA, 16 bp, synthetic construct
  misc_feature 1..16: note = synthetic [barcode part1]
  source 1..16: mol_type = other DNA
gccggacaacaatctt

SEQ ID NO: 7345 - DNA, 16 bp, synthetic construct
  misc_feature 1..16: note = synthetic [barcode part1]
  source 1..16: mol_type = other DNA
aagaggtgaacacctt

SEQ ID NO: 7346 - DNA, 16 bp, synthetic construct
  misc_feature 1..16: note = synthetic [barcode part1]
  source 1..16: mol_type = other DNA
tatcactgtaaccgtc

SEQ ID NO: 7347 - DNA, 16 bp, synthetic construct
  misc_feature 1..16: note = synthetic [barcode part1]
  source 1..16: mol_type = other DNA
tgtacggtagacctgt

SEQ ID NO: 7348 - DNA, 16 bp, synthetic construct
  misc_feature 1..16: note = synthetic [barcode part1]
  source 1..16: mol_type = other DNA
ttgcaccgagttgtcc

SEQ ID NO: 7349 - DNA, 16 bp, synthetic construct
  misc_feature 1..16: note = synthetic [barcode part1]
  source 1..16: mol_type = other DNA
cggtcctatcagtatt

SEQ ID NO: 7350 - DNA, 16 bp, synthetic construct
  misc_feature 1..16: note = synthetic [barcode part1]
  source 1..16: mol_type = other DNA
tgtccacgcaatattc

SEQ ID NO: 7351 - DNA, 16 bp, synthetic construct
  misc_feature 1..16: note = synthetic [barcode part1]
  source 1..16: mol_type = other DNA
tcggatactacttcac

SEQ ID NO: 7352 - DNA, 16 bp, synthetic construct
  misc_feature 1..16: note = synthetic [barcode part1]
  source 1..16: mol_type = other DNA
taactcgtggaagtag

SEQ ID NO: 7353 - DNA, 16 bp, synthetic construct
  misc_feature 1..16: note = synthetic [barcode part1]
  source 1..16: mol_type = other DNA
atctatcgacaccgcc

SEQ ID NO: 7354 - DNA, 16 bp, synthetic construct
  misc_feature 1..16: note = synthetic [barcode part1]
  source 1..16: mol_type = other DNA
acaggtcttaggcgtt

SEQ ID NO: 7355 - DNA, 16 bp, synthetic construct
  misc_feature 1..16: note = synthetic [barcode part1]
  source 1..16: mol_type = other DNA
tctcgtatcagatcgt

SEQ ID NO: 7356 - DNA, 16 bp, synthetic construct
  misc_feature 1..16: note = synthetic [barcode part1]
  source 1..16: mol_type = other DNA
tcgcgagtagaagacc

SEQ ID NO: 7357 - DNA, 16 bp, synthetic construct
  misc_feature 1..16: note = synthetic [barcode part1]
  source 1..16: mol_type = other DNA
tcaatccttcgtgagt

SEQ ID NO: 7358 - DNA, 16 bp, synthetic construct
  misc_feature 1..16: note = synthetic [barcode part1]
  source 1..16: mol_type = other DNA
tggattgaccgaactc

SEQ ID NO: 7359 - DNA, 16 bp, synthetic construct
  misc_feature 1..16: note = synthetic [barcode part1]
  source 1..16: mol_type = other DNA
agtactgcacaacacc

SEQ ID NO: 7360 - DNA, 16 bp, synthetic construct
  misc_feature 1..16: note = synthetic [barcode part1]
  source 1..16: mol_type = other DNA
tcggtatctctgattg

SEQ ID NO: 7361 - DNA, 16 bp, synthetic construct
  misc_feature 1..16: note = synthetic [barcode part1]
  source 1..16: mol_type = other DNA
cgatcctgtgcgttac

SEQ ID NO: 7362 - DNA, 16 bp, synthetic construct
  misc_feature 1..16: note = synthetic [barcode part1]
  source 1..16: mol_type = other DNA
gttggatctatacctc

SEQ ID NO: 7363 - DNA, 16 bp, synthetic construct
  misc_feature 1..16: note = synthetic [barcode part1]
  source 1..16: mol_type = other DNA
cgcagacgacagaatc

SEQ ID NO: 7364 - DNA, 16 bp, synthetic construct
  misc_feature 1..16: note = synthetic [barcode part1]
  source 1..16: mol_type = other DNA
cgttgttacgagacgt

SEQ ID NO: 7365 - DNA, 16 bp, synthetic construct
  misc_feature 1..16: note = synthetic [barcode part1]
  source 1..16: mol_type = other DNA
gtacttccggtctggt

SEQ ID NO: 7366 - DNA, 16 bp, synthetic construct
  misc_feature 1..16: note = synthetic [barcode part1]
  source 1..16: mol_type = other DNA
gtactggtcctcggtt

SEQ ID NO: 7367 - DNA, 16 bp, synthetic construct
  misc_feature 1..16: note = synthetic [barcode part1]
  source 1..16: mol_type = other DNA
taaccagtcggttgac

SEQ ID NO: 7368 - DNA, 16 bp, synthetic construct
  misc_feature 1..16: note = synthetic [barcode part1]
  source 1..16: mol_type = other DNA
cagtctcactacacgc

SEQ ID NO: 7369 - DNA, 16 bp, synthetic construct
  misc_feature 1..16: note = synthetic [barcode part1]
  source 1..16: mol_type = other DNA
agagtgcctcttgtag

SEQ ID NO: 7370 - DNA, 16 bp, synthetic construct
  misc_feature 1..16: note = synthetic [barcode part1]
  source 1..16: mol_type = other DNA
aagtacaatcaggtcg

SEQ ID NO: 7371 - DNA, 16 bp, synthetic construct
  misc_feature 1..16: note = synthetic [barcode part1]
  source 1..16: mol_type = other DNA
agtattgcggtcgact

SEQ ID NO: 7372 - DNA, 16 bp, synthetic construct
  misc_feature 1..16: note = synthetic [barcode part1]
  source 1..16: mol_type = other DNA
gaagtcggcacaactg

SEQ ID NO: 7373 - DNA, 16 bp, synthetic construct
  misc_feature 1..16: note = synthetic [barcode part1]
  source 1..16: mol_type = other DNA
gagtaattacggactg

SEQ ID NO: 7374 - DNA, 16 bp, synthetic construct
  misc_feature 1..16: note = synthetic [barcode part1]
  source 1..16: mol_type = other DNA
acacggactcaataag

SEQ ID NO: 7375 - DNA, 16 bp, synthetic construct
  misc_feature 1..16: note = synthetic [barcode part1]
  source 1..16: mol_type = other DNA
cacttcgaacaggatc

SEQ ID NO: 7376 - DNA, 16 bp, synthetic construct
  misc_feature 1..16: note = synthetic [barcode part1]
  source 1..16: mol_type = other DNA
tctcctgacagtcgtg

SEQ ID NO: 7377 - DNA, 16 bp, synthetic construct
  misc_feature 1..16: note = synthetic [barcode part1]
  source 1..16: mol_type = other DNA
cgttccagaatctgcc

SEQ ID NO: 7378 - DNA, 16 bp, synthetic construct
  misc_feature 1..16: note = synthetic [barcode part1]
  source 1..16: mol_type = other DNA
gagaacgccactagac

SEQ ID NO: 7379 - DNA, 16 bp, synthetic construct
  misc_feature 1..16: note = synthetic [barcode part1]
  source 1..16: mol_type = other DNA
gtagacgcggaatctg

SEQ ID NO: 7380 - DNA, 16 bp, synthetic construct
  misc_feature 1..16: note = synthetic [barcode part1]
  source 1..16: mol_type = other DNA
gatcacggccaatact

SEQ ID NO: 7381 - DNA, 16 bp, synthetic construct
  misc_feature 1..16: note = synthetic [barcode part1]
  source 1..16: mol_type = other DNA
tgcgtaacttgattcc

SEQ ID NO: 7382 - DNA, 16 bp, synthetic construct
  misc_feature 1..16: note = synthetic [barcode part1]
  source 1..16: mol_type = other DNA
gcacaacactgacact

SEQ ID NO: 7383 - DNA, 16 bp, synthetic construct
  misc_feature 1..16: note = synthetic [barcode part1]
  source 1..16: mol_type = other DNA
acgtcttctgaactgt

SEQ ID NO: 7384 - DNA, 16 bp, synthetic construct
  misc_feature 1..16: note = synthetic [barcode part1]
  source 1..16: mol_type = other DNA
tcacagtcaaccaacg

SEQ ID NO: 7385 - DNA, 16 bp, synthetic construct
  misc_feature 1..16: note = synthetic [barcode part1]
  source 1..16: mol_type = other DNA
tccgtgtaattgccgc

SEQ ID NO: 7386 - DNA, 16 bp, synthetic construct
  misc_feature 1..16: note = synthetic [barcode part1]
  source 1..16: mol_type = other DNA
tctgccgagaacaact

SEQ ID NO: 7387 - DNA, 16 bp, synthetic construct
  misc_feature 1..16: note = synthetic [barcode part1]
  source 1..16: mol_type = other DNA
cagagagtagttgtac

SEQ ID NO: 7388 - DNA, 16 bp, synthetic construct
  misc_feature 1..16: note = synthetic [barcode part1]
  source 1..16: mol_type = other DNA
gaggcgaacggattct

SEQ ID NO: 7389 - DNA, 16 bp, synthetic construct
  misc_feature 1..16: note = synthetic [barcode part1]
  source 1..16: mol_type = other DNA
tgtgtacgtgtcacag

SEQ ID NO: 7390 - DNA, 16 bp, synthetic construct
  misc_feature 1..16: note = synthetic [barcode part1]
  source 1..16: mol_type = other DNA
atctggatcgcgaatc

SEQ ID NO: 7391 - DNA, 16 bp, synthetic construct
  misc_feature 1..16: note = synthetic [barcode part1]
  source 1..16: mol_type = other DNA
taactcgtccgcgttg

SEQ ID NO: 7392 - DNA, 16 bp, synthetic construct
  misc_feature 1..16: note = synthetic [barcode part1]
  source 1..16: mol_type = other DNA
cgacttccttcgattc

SEQ ID NO: 7393 - DNA, 16 bp, synthetic construct
  misc_feature 1..16: note = synthetic [barcode part1]
  source 1..16: mol_type = other DNA
agttccaggacaggtg

SEQ ID NO: 7394 - DNA, 16 bp, synthetic construct
  misc_feature 1..16: note = synthetic [barcode part1]
  source 1..16: mol_type = other DNA
ttattgaggtctggcg

SEQ ID NO: 7395 - DNA, 16 bp, synthetic construct
  misc_feature 1..16: note = synthetic [barcode part1]
  source 1..16: mol_type = other DNA
ccaatacctaattccg

SEQ ID NO: 7396 - DNA, 16 bp, synthetic construct
  misc_feature 1..16: note = synthetic [barcode part1]
  source 1..16: mol_type = other DNA
tagtgcgtgatctctt

SEQ ID NO: 7397 - DNA, 16 bp, synthetic construct
  misc_feature 1..16: note = synthetic [barcode part1]
  source 1..16: mol_type = other DNA
atcggccttaaggttg

SEQ ID NO: 7398 - DNA, 16 bp, synthetic construct
  misc_feature 1..16: note = synthetic [barcode part1]
  source 1..16: mol_type = other DNA
tacgagtgagttcacc

SEQ ID NO: 7399 - DNA, 16 bp, synthetic construct
  misc_feature 1..16: note = synthetic [barcode part1]
  source 1..16: mol_type = other DNA
ccggtaacgagaacgt

SEQ ID NO: 7400 - DNA, 16 bp, synthetic construct
  misc_feature 1..16: note = synthetic [barcode part1]
  source 1..16: mol_type = other DNA
agttggtcgtatacgc

SEQ ID NO: 7401 - DNA, 16 bp, synthetic construct
  misc_feature 1..16: note = synthetic [barcode part1]
  source 1..16: mol_type = other DNA
ttctcctgattccgac

SEQ ID NO: 7402 - DNA, 16 bp, synthetic construct
  misc_feature 1..16: note = synthetic [barcode part1]
  source 1..16: mol_type = other DNA
caacgttcctatctag

SEQ ID NO: 7403 - DNA, 16 bp, synthetic construct
  misc_feature 1..16: note = synthetic [barcode part1]
  source 1..16: mol_type = other DNA
gtcgtctgtggatctc

SEQ ID NO: 7404 - DNA, 16 bp, synthetic construct
  misc_feature 1..16: note = synthetic [barcode part1]
  source 1..16: mol_type = other DNA
tcaagtgttcaggcac

SEQ ID NO: 7405 - DNA, 16 bp, synthetic construct
  misc_feature 1..16: note = synthetic [barcode part1]
  source 1..16: mol_type = other DNA
acgttgaagttgcacc

SEQ ID NO: 7406 - DNA, 16 bp, synthetic construct
  misc_feature 1..16: note = synthetic [barcode part1]
  source 1..16: mol_type = other DNA
acacactgttctctag

SEQ ID NO: 7407 - DNA, 16 bp, synthetic construct
  misc_feature 1..16: note = synthetic [barcode part1]
  source 1..16: mol_type = other DNA
aacttaactcctgtgc

SEQ ID NO: 7408 - DNA, 16 bp, synthetic construct
  misc_feature 1..16: note = synthetic [barcode part1]
  source 1..16: mol_type = other DNA
taggactaccacagtc

SEQ ID NO: 7409 - DNA, 16 bp, synthetic construct
  misc_feature 1..16: note = synthetic [barcode part1]
  source 1..16: mol_type = other DNA
atctatcgcctgtctc

SEQ ID NO: 7410 - DNA, 16 bp, synthetic construct
  misc_feature 1..16: note = synthetic [barcode part1]
  source 1..16: mol_type = other DNA
gaattccagagtctcg

SEQ ID NO: 7411 - DNA, 16 bp, synthetic construct
  misc_feature 1..16: note = synthetic [barcode part1]
  source 1..16: mol_type = other DNA
agagatacaggaacgc

SEQ ID NO: 7412 - DNA, 16 bp, synthetic construct
  misc_feature 1..16: note = synthetic [barcode part1]
  source 1..16: mol_type = other DNA
cggactaactaccagt

SEQ ID NO: 7413 - DNA, 16 bp, synthetic construct
  misc_feature 1..16: note = synthetic [barcode part1]
  source 1..16: mol_type = other DNA
cagtacaactagagac

SEQ ID NO: 7414 - DNA, 16 bp, synthetic construct
  misc_feature 1..16: note = synthetic [barcode part1]
  source 1..16: mol_type = other DNA
acacgtaggccaattc

SEQ ID NO: 7415 - DNA, 16 bp, synthetic construct
  misc_feature 1..16: note = synthetic [barcode part1]
  source 1..16: mol_type = other DNA
ccagtctagtacgtcc

SEQ ID NO: 7416 - DNA, 16 bp, synthetic construct
  misc_feature 1..16: note = synthetic [barcode part1]
  source 1..16: mol_type = other DNA
tcaacaccacagtcag

SEQ ID NO: 7417 - DNA, 16 bp, synthetic construct
  misc_feature 1..16: note = synthetic [barcode part1]
  source 1..16: mol_type = other DNA
tgattccgtcggcgtt

SEQ ID NO: 7418 - DNA, 16 bp, synthetic construct
  misc_feature 1..16: note = synthetic [barcode part1]
  source 1..16: mol_type = other DNA
tgtaaccacgtccaag

SEQ ID NO: 7419 - DNA, 16 bp, synthetic construct
  misc_feature 1..16: note = synthetic [barcode part1]
  source 1..16: mol_type = other DNA
ttgattcgtgatcgtc

SEQ ID NO: 7420 - DNA, 16 bp, synthetic construct
  misc_feature 1..16: note = synthetic [barcode part1]
  source 1..16: mol_type = other DNA
tgtaaccgatccacag

SEQ ID NO: 7421 - DNA, 16 bp, synthetic construct
  misc_feature 1..16: note = synthetic [barcode part1]
  source 1..16: mol_type = other DNA
gccacagtgttcgttc

SEQ ID NO: 7422 - DNA, 16 bp, synthetic construct
  misc_feature 1..16: note = synthetic [barcode part1]
  source 1..16: mol_type = other DNA
ccttagtgtgcctggt

SEQ ID NO: 7423 - DNA, 16 bp, synthetic construct
  misc_feature 1..16: note = synthetic [barcode part1]
  source 1..16: mol_type = other DNA
taggtcagtcagatcc

SEQ ID NO: 7424 - DNA, 16 bp, synthetic construct
  misc_feature 1..16: note = synthetic [barcode part1]
  source 1..16: mol_type = other DNA
tccggtccggtatact

SEQ ID NO: 7425 - DNA, 16 bp, synthetic construct
  misc_feature 1..16: note = synthetic [barcode part1]
  source 1..16: mol_type = other DNA
tagtagtcgacctggt

SEQ ID NO: 7426 - DNA, 16 bp, synthetic construct
  misc_feature 1..16: note = synthetic [barcode part1]
  source 1..16: mol_type = other DNA
ttctcctgaccgattc

SEQ ID NO: 7427 - DNA, 16 bp, synthetic construct
  misc_feature 1..16: note = synthetic [barcode part1]
  source 1..16: mol_type = other DNA
tcacttgtctgaggtt

SEQ ID NO: 7428 - DNA, 16 bp, synthetic construct
  misc_feature 1..16: note = synthetic [barcode part1]
  source 1..16: mol_type = other DNA
acgtgccaatagtaag

SEQ ID NO: 7429 - DNA, 16 bp, synthetic construct
  misc_feature 1..16: note = synthetic [barcode part1]
  source 1..16: mol_type = other DNA
acctgaggtgaatcct

SEQ ID NO: 7430 - DNA, 16 bp, synthetic construct
  misc_feature 1..16: note = synthetic [barcode part1]
  source 1..16: mol_type = other DNA
ttgtaccagatcacct

SEQ ID NO: 7431 - DNA, 16 bp, synthetic construct
  misc_feature 1..16: note = synthetic [barcode part1]
  source 1..16: mol_type = other DNA
cacaagttctgccgtc

SEQ ID NO: 7432 - DNA, 16 bp, synthetic construct
  misc_feature 1..16: note = synthetic [barcode part1]
  source 1..16: mol_type = other DNA
tgacgcactaacgtgt

SEQ ID NO: 7433 - DNA, 16 bp, synthetic construct
  misc_feature 1..16: note = synthetic [barcode part1]
  source 1..16: mol_type = other DNA
tggaatacctgacctg

SEQ ID NO: 7434 - DNA, 16 bp, synthetic construct
  misc_feature 1..16: note = synthetic [barcode part1]
  source 1..16: mol_type = other DNA
cagattgaggagtatc

SEQ ID NO: 7435 - DNA, 16 bp, synthetic construct
  misc_feature 1..16: note = synthetic [barcode part1]
  source 1..16: mol_type = other DNA
agagtcgacgcaatcg

SEQ ID NO: 7436 - DNA, 16 bp, synthetic construct
  misc_feature 1..16: note = synthetic [barcode part1]
  source 1..16: mol_type = other DNA
gaggacttcagagaag

SEQ ID NO: 7437 - DNA, 16 bp, synthetic construct
  misc_feature 1..16: note = synthetic [barcode part1]
  source 1..16: mol_type = other DNA
aatccggatcgaacct

SEQ ID NO: 7438 - DNA, 16 bp, synthetic construct
  misc_feature 1..16: note = synthetic [barcode part1]
  source 1..16: mol_type = other DNA
cacctcgcctgttatt

SEQ ID NO: 7439 - DNA, 16 bp, synthetic construct
  misc_feature 1..16: note = synthetic [barcode part1]
  source 1..16: mol_type = other DNA
tacgtacgtaccacag

SEQ ID NO: 7440 - DNA, 16 bp, synthetic construct
  misc_feature 1..16: note = synthetic [barcode part1]
  source 1..16: mol_type = other DNA
cgacgataacctggtt

SEQ ID NO: 7441 - DNA, 16 bp, synthetic construct
  misc_feature 1..16: note = synthetic [barcode part1]
  source 1..16: mol_type = other DNA
caatccagacgattcg

SEQ ID NO: 7442 - DNA, 16 bp, synthetic construct
  misc_feature 1..16: note = synthetic [barcode part1]
  source 1..16: mol_type = other DNA
tcacacaggccagaag

SEQ ID NO: 7443 - DNA, 16 bp, synthetic construct
  misc_feature 1..16: note = synthetic [barcode part1]
  source 1..16: mol_type = other DNA
gcctggagtcctattc

SEQ ID NO: 7444 - DNA, 16 bp, synthetic construct
  misc_feature 1..16: note = synthetic [barcode part1]
  source 1..16: mol_type = other DNA
gaggacaatcttcacc

SEQ ID NO: 7445 - DNA, 16 bp, synthetic construct
  misc_feature 1..16: note = synthetic [barcode part1]
  source 1..16: mol_type = other DNA
aagaacggagttacct

SEQ ID NO: 7446 - DNA, 16 bp, synthetic construct
  misc_feature 1..16: note = synthetic [barcode part1]
  source 1..16: mol_type = other DNA
ccggacgatcctactt

SEQ ID NO: 7447 - DNA, 16 bp, synthetic construct
  misc_feature 1..16: note = synthetic [barcode part1]
  source 1..16: mol_type = other DNA
ccaacctcgagttcac

SEQ ID NO: 7448 - DNA, 16 bp, synthetic construct
  misc_feature 1..16: note = synthetic [barcode part1]
  source 1..16: mol_type = other DNA
ccaccacttcactgtt

SEQ ID NO: 7449 - DNA, 16 bp, synthetic construct
  misc_feature 1..16: note = synthetic [barcode part1]
  source 1..16: mol_type = other DNA
tctcctggtgatcgtg

SEQ ID NO: 7450 - DNA, 16 bp, synthetic construct
  misc_feature 1..16: note = synthetic [barcode part1]
  source 1..16: mol_type = other DNA
gactcaggttgttggt

SEQ ID NO: 7451 - DNA, 16 bp, synthetic construct
  misc_feature 1..16: note = synthetic [barcode part1]
  source 1..16: mol_type = other DNA
cgtccttctaataacg

SEQ ID NO: 7452 - DNA, 16 bp, synthetic construct
  misc_feature 1..16: note = synthetic [barcode part1]
  source 1..16: mol_type = other DNA
tagtacgtcgagtacc

SEQ ID NO: 7453 - DNA, 16 bp, synthetic construct
  misc_feature 1..16: note = synthetic [barcode part1]
  source 1..16: mol_type = other DNA
gccttcacaagttgcc

SEQ ID NO: 7454 - DNA, 16 bp, synthetic construct
  misc_feature 1..16: note = synthetic [barcode part1]
  source 1..16: mol_type = other DNA
agtggagtataggttc

SEQ ID NO: 7455 - DNA, 16 bp, synthetic construct
  misc_feature 1..16: note = synthetic [barcode part1]
  source 1..16: mol_type = other DNA
gactcaggatcgttgt

SEQ ID NO: 7456 - DNA, 16 bp, synthetic construct
  misc_feature 1..16: note = synthetic [barcode part1]
  source 1..16: mol_type = other DNA
atcctatccacgtaac

SEQ ID NO: 7457 - DNA, 16 bp, synthetic construct
  misc_feature 1..16: note = synthetic [barcode part1]
  source 1..16: mol_type = other DNA
tgaagataagtcaccg

SEQ ID NO: 7458 - DNA, 16 bp, synthetic construct
  misc_feature 1..16: note = synthetic [barcode part1]
  source 1..16: mol_type = other DNA
gtcggtacgtctcgtt

SEQ ID NO: 7459 - DNA, 16 bp, synthetic construct
  misc_feature 1..16: note = synthetic [barcode part1]
  source 1..16: mol_type = other DNA
tctccggtaattgtgt

SEQ ID NO: 7460 - DNA, 16 bp, synthetic construct
  misc_feature 1..16: note = synthetic [barcode part1]
  source 1..16: mol_type = other DNA
cgtcttaccgtagatt

SEQ ID NO: 7461 - DNA, 16 bp, synthetic construct
  misc_feature 1..16: note = synthetic [barcode part1]
  source 1..16: mol_type = other DNA
tgtgacaacttcaggc

SEQ ID NO: 7462 - DNA, 16 bp, synthetic construct
  misc_feature 1..16: note = synthetic [barcode part1]
  source 1..16: mol_type = other DNA
gaagagtgagtatcct

SEQ ID NO: 7463 - DNA, 16 bp, synthetic construct
  misc_feature 1..16: note = synthetic [barcode part1]
  source 1..16: mol_type = other DNA
tgccaatccgatcctg

SEQ ID NO: 7464 - DNA, 16 bp, synthetic construct
  misc_feature 1..16: note = synthetic [barcode part1]
  source 1..16: mol_type = other DNA
tgactaggatcgactc

SEQ ID NO: 7465 - DNA, 16 bp, synthetic construct
  misc_feature 1..16: note = synthetic [barcode part1]
  source 1..16: mol_type = other DNA
gccacacgttgagaag

SEQ ID NO: 7466 - DNA, 16 bp, synthetic construct
  misc_feature 1..16: note = synthetic [barcode part1]
  source 1..16: mol_type = other DNA
ttacaaggtcctctgt

SEQ ID NO: 7467 - DNA, 16 bp, synthetic construct
  misc_feature 1..16: note = synthetic [barcode part1]
  source 1..16: mol_type = other DNA
caacacgaccggaagt

SEQ ID NO: 7468 - DNA, 16 bp, synthetic construct
  misc_feature 1..16: note = synthetic [barcode part1]
  source 1..16: mol_type = other DNA
ttcttagacgcactac

SEQ ID NO: 7469 - DNA, 16 bp, synthetic construct
  misc_feature 1..16: note = synthetic [barcode part1]
  source 1..16: mol_type = other DNA
taagagtggcggtctg

SEQ ID NO: 7470 - DNA, 16 bp, synthetic construct
  misc_feature 1..16: note = synthetic [barcode part1]
  source 1..16: mol_type = other DNA
acctattaggcgaacc

SEQ ID NO: 7471 - DNA, 16 bp, synthetic construct
  misc_feature 1..16: note = synthetic [barcode part1]
  source 1..16: mol_type = other DNA
gacctctgcacagttc

SEQ ID NO: 7472 - DNA, 16 bp, synthetic construct
  misc_feature 1..16: note = synthetic [barcode part1]
  source 1..16: mol_type = other DNA
tgtaccaacactgacg

SEQ ID NO: 7473 - DNA, 16 bp, synthetic construct
  misc_feature 1..16: note = synthetic [barcode part1]
  source 1..16: mol_type = other DNA
tgaatcggactatcgc

SEQ ID NO: 7474 - DNA, 16 bp, synthetic construct
  misc_feature 1..16: note = synthetic [barcode part1]
  source 1..16: mol_type = other DNA
cctgttccaggatctg

SEQ ID NO: 7475 - DNA, 16 bp, synthetic construct
  misc_feature 1..16: note = synthetic [barcode part1]
  source 1..16: mol_type = other DNA
gtagaaggttactggt

SEQ ID NO: 7476 - DNA, 16 bp, synthetic construct
  misc_feature 1..16: note = synthetic [barcode part1]
  source 1..16: mol_type = other DNA
agaatcaaccgaggag

SEQ ID NO: 7477 - DNA, 16 bp, synthetic construct
  misc_feature 1..16: note = synthetic [barcode part1]
  source 1..16: mol_type = other DNA
ttctataccggtggtt

SEQ ID NO: 7478 - DNA, 16 bp, synthetic construct
  misc_feature 1..16: note = synthetic [barcode part1]
  source 1..16: mol_type = other DNA
aataacgcctgtcgtg

SEQ ID NO: 7479 - DNA, 16 bp, synthetic construct
  misc_feature 1..16: note = synthetic [barcode part1]
  source 1..16: mol_type = other DNA
tgtgtagacttcctac

SEQ ID NO: 7480 - DNA, 16 bp, synthetic construct
  misc_feature 1..16: note = synthetic [barcode part1]
  source 1..16: mol_type = other DNA
tcacgatctgatcgag

SEQ ID NO: 7481 - DNA, 16 bp, synthetic construct
  misc_feature 1..16: note = synthetic [barcode part1]
  source 1..16: mol_type = other DNA
tatcgttgcgaagtgc

SEQ ID NO: 7482 - DNA, 16 bp, synthetic construct
  misc_feature 1..16: note = synthetic [barcode part1]
  source 1..16: mol_type = other DNA
tcgtgaattgcacgac

SEQ ID NO: 7483 - DNA, 16 bp, synthetic construct
  misc_feature 1..16: note = synthetic [barcode part1]
  source 1..16: mol_type = other DNA
gtgacgataggtccag

SEQ ID NO: 7484 - DNA, 16 bp, synthetic construct
  misc_feature 1..16: note = synthetic [barcode part1]
  source 1..16: mol_type = other DNA
attcttgcaggttgtc

SEQ ID NO: 7485 - DNA, 16 bp, synthetic construct
  misc_feature 1..16: note = synthetic [barcode part1]
  source 1..16: mol_type = other DNA
cctctgagtgtcagtc

SEQ ID NO: 7486 - DNA, 16 bp, synthetic construct
  misc_feature 1..16: note = synthetic [barcode part1]
  source 1..16: mol_type = other DNA
tgcgcacaactctaag

SEQ ID NO: 7487 - DNA, 16 bp, synthetic construct
  misc_feature 1..16: note = synthetic [barcode part1]
  source 1..16: mol_type = other DNA
cgtaactggaagttag

SEQ ID NO: 7488 - DNA, 16 bp, synthetic construct
  misc_feature 1..16: note = synthetic [barcode part1]
  source 1..16: mol_type = other DNA
taacggttcctgtgcc

SEQ ID NO: 7489 - DNA, 16 bp, synthetic construct
  misc_feature 1..16: note = synthetic [barcode part1]
  source 1..16: mol_type = other DNA
aggcagatctattcgc

SEQ ID NO: 7490 - DNA, 16 bp, synthetic construct
  misc_feature 1..16: note = synthetic [barcode part1]
  source 1..16: mol_type = other DNA
ccagagatcggtacag

SEQ ID NO: 7491 - DNA, 16 bp, synthetic construct
  misc_feature 1..16: note = synthetic [barcode part1]
  source 1..16: mol_type = other DNA
acctgttccgtgacgt

SEQ ID NO: 7492 - DNA, 16 bp, synthetic construct
  misc_feature 1..16: note = synthetic [barcode part1]
  source 1..16: mol_type = other DNA
cgccagtatattggtg

SEQ ID NO: 7493 - DNA, 16 bp, synthetic construct
  misc_feature 1..16: note = synthetic [barcode part1]
  source 1..16: mol_type = other DNA
gtcgatagataacgac

SEQ ID NO: 7494 - DNA, 16 bp, synthetic construct
  misc_feature 1..16: note = synthetic [barcode part1]
  source 1..16: mol_type = other DNA
acggtcgaactaggac

SEQ ID NO: 7495 - DNA, 16 bp, synthetic construct
  misc_feature 1..16: note = synthetic [barcode part1]
  source 1..16: mol_type = other DNA
gccaggtacttgatac

SEQ ID NO: 7496 - DNA, 16 bp, synthetic construct
  misc_feature 1..16: note = synthetic [barcode part1]
  source 1..16: mol_type = other DNA
cgttgccttcacaggt

SEQ ID NO: 7497 - DNA, 16 bp, synthetic construct
  misc_feature 1..16: note = synthetic [barcode part1]
  source 1..16: mol_type = other DNA
agtgtgtgttgacacc

SEQ ID NO: 7498 - DNA, 16 bp, synthetic construct
  misc_feature 1..16: note = synthetic [barcode part1]
  source 1..16: mol_type = other DNA
gtaggaagtcgccagt

SEQ ID NO: 7499 - DNA, 16 bp, synthetic construct
  misc_feature 1..16: note = synthetic [barcode part1]
  source 1..16: mol_type = other DNA
tctattctcgcaacag

SEQ ID NO: 7500 - DNA, 16 bp, synthetic construct
  misc_feature 1..16: note = synthetic [barcode part1]
  source 1..16: mol_type = other DNA
gattcgtcctattgtg

SEQ ID NO: 7501 - DNA, 16 bp, synthetic construct
  misc_feature 1..16: note = synthetic [barcode part1]
  source 1..16: mol_type = other DNA
aactctcgcgtgacct

SEQ ID NO: 7502 - DNA, 16 bp, synthetic construct
  misc_feature 1..16: note = synthetic [barcode part1]
  source 1..16: mol_type = other DNA
aacaccaactgtgacc

SEQ ID NO: 7503 - DNA, 16 bp, synthetic construct
  misc_feature 1..16: note = synthetic [barcode part1]
  source 1..16: mol_type = other DNA
ttacgtctgaggacgt

SEQ ID NO: 7504 - DNA, 16 bp, synthetic construct
  misc_feature 1..16: note = synthetic [barcode part1]
  source 1..16: mol_type = other DNA
gtagttcactcgacag

SEQ ID NO: 7505 - DNA, 16 bp, synthetic construct
  misc_feature 1..16: note = synthetic [barcode part1]
  source 1..16: mol_type = other DNA
tgatacctctgtctag

SEQ ID NO: 7506 - DNA, 16 bp, synthetic construct
  misc_feature 1..16: note = synthetic [barcode part1]
  source 1..16: mol_type = other DNA
tcgtctgaagtctcgc

SEQ ID NO: 7507 - DNA, 16 bp, synthetic construct
  misc_feature 1..16: note = synthetic [barcode part1]
  source 1..16: mol_type = other DNA
tcgtagagttccttac

SEQ ID NO: 7508 - DNA, 16 bp, synthetic construct
  misc_feature 1..16: note = synthetic [barcode part1]
  source 1..16: mol_type = other DNA
tcacaggactcctcgt

SEQ ID NO: 7509 - DNA, 16 bp, synthetic construct
  misc_feature 1..16: note = synthetic [barcode part1]
  source 1..16: mol_type = other DNA
cgttaagtcgttaggc

SEQ ID NO: 7510 - DNA, 16 bp, synthetic construct
  misc_feature 1..16: note = synthetic [barcode part1]
  source 1..16: mol_type = other DNA
cctgactcagtcgtac

SEQ ID NO: 7511 - DNA, 16 bp, synthetic construct
  misc_feature 1..16: note = synthetic [barcode part1]
  source 1..16: mol_type = other DNA
tataactcggttctcg

SEQ ID NO: 7512 - DNA, 16 bp, synthetic construct
  misc_feature 1..16: note = synthetic [barcode part1]
  source 1..16: mol_type = other DNA
aggtgtcgtggtaggt

SEQ ID NO: 7513 - DNA, 16 bp, synthetic construct
  misc_feature 1..16: note = synthetic [barcode part1]
  source 1..16: mol_type = other DNA
acactgtgtggacgag

SEQ ID NO: 7514 - DNA, 16 bp, synthetic construct
  misc_feature 1..16: note = synthetic [barcode part1]
  source 1..16: mol_type = other DNA
gacgattggtctagtc

SEQ ID NO: 7515 - DNA, 16 bp, synthetic construct
  misc_feature 1..16: note = synthetic [barcode part1]
  source 1..16: mol_type = other DNA
ttggtcctgaggaatc

SEQ ID NO: 7516 - DNA, 16 bp, synthetic construct
  misc_feature 1..16: note = synthetic [barcode part1]
  source 1..16: mol_type = other DNA
aatacacgatcgaggt

SEQ ID NO: 7517 - DNA, 16 bp, synthetic construct
  misc_feature 1..16: note = synthetic [barcode part1]
  source 1..16: mol_type = other DNA
caatcagtggtcagtc

SEQ ID NO: 7518 - DNA, 16 bp, synthetic construct
  misc_feature 1..16: note = synthetic [barcode part1]
  source 1..16: mol_type = other DNA
cgattcactcgtattg

SEQ ID NO: 7519 - DNA, 16 bp, synthetic construct
  misc_feature 1..16: note = synthetic [barcode part1]
  source 1..16: mol_type = other DNA
atactattccgaggcg

SEQ ID NO: 7520 - DNA, 16 bp, synthetic construct
  misc_feature 1..16: note = synthetic [barcode part1]
  source 1..16: mol_type = other DNA
tataggcaagtccgtc

SEQ ID NO: 7521 - DNA, 16 bp, synthetic construct
  misc_feature 1..16: note = synthetic [barcode part1]
  source 1..16: mol_type = other DNA
gccaggtagacacaac

SEQ ID NO: 7522 - DNA, 16 bp, synthetic construct
  misc_feature 1..16: note = synthetic [barcode part1]
  source 1..16: mol_type = other DNA
gattcacaagttcgcg

SEQ ID NO: 7523 - DNA, 16 bp, synthetic construct
  misc_feature 1..16: note = synthetic [barcode part1]
  source 1..16: mol_type = other DNA
agttgactgacgtcac

SEQ ID NO: 7524 - DNA, 16 bp, synthetic construct
  misc_feature 1..16: note = synthetic [barcode part1]
  source 1..16: mol_type = other DNA
gtcgaatcaggttacc

SEQ ID NO: 7525 - DNA, 16 bp, synthetic construct
  misc_feature 1..16: note = synthetic [barcode part1]
  source 1..16: mol_type = other DNA
gtggatcggttgtgtt

SEQ ID NO: 7526 - DNA, 16 bp, synthetic construct
  misc_feature 1..16: note = synthetic [barcode part1]
  source 1..16: mol_type = other DNA
ccaatcttgcctcact

SEQ ID NO: 7527 - DNA, 16 bp, synthetic construct
  misc_feature 1..16: note = synthetic [barcode part1]
  source 1..16: mol_type = other DNA
cgaagagtgcgtagtc

SEQ ID NO: 7528 - DNA, 16 bp, synthetic construct
  misc_feature 1..16: note = synthetic [barcode part1]
  source 1..16: mol_type = other DNA
cgttcactctggagtc

SEQ ID NO: 7529 - DNA, 16 bp, synthetic construct
  misc_feature 1..16: note = synthetic [barcode part1]
  source 1..16: mol_type = other DNA
aggaagaagtcctgag

SEQ ID NO: 7530 - DNA, 16 bp, synthetic construct
  misc_feature 1..16: note = synthetic [barcode part1]
  source 1..16: mol_type = other DNA
ttcaggtcgtcgatag

SEQ ID NO: 7531 - DNA, 16 bp, synthetic construct
  misc_feature 1..16: note = synthetic [barcode part1]
  source 1..16: mol_type = other DNA
tgagtgttacgtcgac

SEQ ID NO: 7532 - DNA, 16 bp, synthetic construct
  misc_feature 1..16: note = synthetic [barcode part1]
  source 1..16: mol_type = other DNA
tagtggtctagatcgc

SEQ ID NO: 7533 - DNA, 16 bp, synthetic construct
  misc_feature 1..16: note = synthetic [barcode part1]
  source 1..16: mol_type = other DNA
aactacaacgcgtcgt

SEQ ID NO: 7534 - DNA, 16 bp, synthetic construct
  misc_feature 1..16: note = synthetic [barcode part1]
  source 1..16: mol_type = other DNA
ttatagaggcagtgac

SEQ ID NO: 7535 - DNA, 16 bp, synthetic construct
  misc_feature 1..16: note = synthetic [barcode part1]
  source 1..16: mol_type = other DNA
atacaccagactagag

SEQ ID NO: 7536 - DNA, 16 bp, synthetic construct
  misc_feature 1..16: note = synthetic [barcode part1]
  source 1..16: mol_type = other DNA
gaatctcctctctctg

SEQ ID NO: 7537 - DNA, 16 bp, synthetic construct
  misc_feature 1..16: note = synthetic [barcode part1]
  source 1..16: mol_type = other DNA
acgatcggatcggagt

SEQ ID NO: 7538 - DNA, 16 bp, synthetic construct
  misc_feature 1..16: note = synthetic [barcode part1]
  source 1..16: mol_type = other DNA
tacctagtaatctccg

SEQ ID NO: 7539 - DNA, 16 bp, synthetic construct
  misc_feature 1..16: note = synthetic [barcode part1]
  source 1..16: mol_type = other DNA
gagttcgactcggatt

SEQ ID NO: 7540 - DNA, 16 bp, synthetic construct
  misc_feature 1..16: note = synthetic [barcode part1]
  source 1..16: mol_type = other DNA
tcaatctgtgatcgtc

SEQ ID NO: 7541 - DNA, 16 bp, synthetic construct
  misc_feature 1..16: note = synthetic [barcode part1]
  source 1..16: mol_type = other DNA
tggtctctgcgtaacc

SEQ ID NO: 7542 - DNA, 16 bp, synthetic construct
  misc_feature 1..16: note = synthetic [barcode part1]
  source 1..16: mol_type = other DNA
cgagtcgagttattgc

SEQ ID NO: 7543 - DNA, 16 bp, synthetic construct
  misc_feature 1..16: note = synthetic [barcode part1]
  source 1..16: mol_type = other DNA
aggttgtacttggtgc

SEQ ID NO: 7544 - DNA, 16 bp, synthetic construct
  misc_feature 1..16: note = synthetic [barcode part1]
  source 1..16: mol_type = other DNA
tcggttcgtaaccgtc

SEQ ID NO: 7545 - DNA, 16 bp, synthetic construct
  misc_feature 1..16: note = synthetic [barcode part1]
  source 1..16: mol_type = other DNA
tgttgcaacacgtgtg

SEQ ID NO: 7546 - DNA, 16 bp, synthetic construct
  misc_feature 1..16: note = synthetic [barcode part1]
  source 1..16: mol_type = other DNA
tgcagtgaacgtcact

SEQ ID NO: 7547 - DNA, 16 bp, synthetic construct
  misc_feature 1..16: note = synthetic [barcode part1]
  source 1..16: mol_type = other DNA
aataccacacacgcgt

SEQ ID NO: 7548 - DNA, 16 bp, synthetic construct
  misc_feature 1..16: note = synthetic [barcode part1]
  source 1..16: mol_type = other DNA
ccgaagtaagttccgt

SEQ ID NO: 7549 - DNA, 16 bp, synthetic construct
  misc_feature 1..16: note = synthetic [barcode part1]
  source 1..16: mol_type = other DNA
ccaagtacctaccgtc

SEQ ID NO: 7550 - DNA, 16 bp, synthetic construct
  misc_feature 1..16: note = synthetic [barcode part1]
  source 1..16: mol_type = other DNA
tctgagatcaaccgac

SEQ ID NO: 7551 - DNA, 16 bp, synthetic construct
  misc_feature 1..16: note = synthetic [barcode part1]
  source 1..16: mol_type = other DNA
ttgacactgtgcaacg

SEQ ID NO: 7552 - DNA, 16 bp, synthetic construct
  misc_feature 1..16: note = synthetic [barcode part1]
  source 1..16: mol_type = other DNA
agtaggcacaatatcg

SEQ ID NO: 7553 - DNA, 16 bp, synthetic construct
  misc_feature 1..16: note = synthetic [barcode part1]
  source 1..16: mol_type = other DNA
gaagattgttagtgcg

SEQ ID NO: 7554 - DNA, 16 bp, synthetic construct
  misc_feature 1..16: note = synthetic [barcode part1]
  source 1..16: mol_type = other DNA
gtgttggtcttactgt

SEQ ID NO: 7555 - DNA, 16 bp, synthetic construct
  misc_feature 1..16: note = synthetic [barcode part1]
  source 1..16: mol_type = other DNA
cacacctcttgacgac

SEQ ID NO: 7556 - DNA, 16 bp, synthetic construct
  misc_feature 1..16: note = synthetic [barcode part1]
  source 1..16: mol_type = other DNA
tagtgatccttgcact

SEQ ID NO: 7557 - DNA, 16 bp, synthetic construct
  misc_feature 1..16: note = synthetic [barcode part1]
  source 1..16: mol_type = other DNA
tattggcgcactaacg

SEQ ID NO: 7558 - DNA, 16 bp, synthetic construct
  misc_feature 1..16: note = synthetic [barcode part1]
  source 1..16: mol_type = other DNA
aacaaggaaggaccgt

SEQ ID NO: 7559 - DNA, 16 bp, synthetic construct
  misc_feature 1..16: note = synthetic [barcode part1]
  source 1..16: mol_type = other DNA
tcggcctacgattatt

SEQ ID NO: 7560 - DNA, 16 bp, synthetic construct
  misc_feature 1..16: note = synthetic [barcode part1]
  source 1..16: mol_type = other DNA
ttgacgtctagagaag

SEQ ID NO: 7561 - DNA, 16 bp, synthetic construct
  misc_feature 1..16: note = synthetic [barcode part1]
  source 1..16: mol_type = other DNA
tagaccgtgattcggt

SEQ ID NO: 7562 - DNA, 16 bp, synthetic construct
  misc_feature 1..16: note = synthetic [barcode part1]
  source 1..16: mol_type = other DNA
ttgtggaacttcctac

SEQ ID NO: 7563 - DNA, 16 bp, synthetic construct
  misc_feature 1..16: note = synthetic [barcode part1]
  source 1..16: mol_type = other DNA
ccgtggaacagaacac

SEQ ID NO: 7564 - DNA, 16 bp, synthetic construct
  misc_feature 1..16: note = synthetic [barcode part1]
  source 1..16: mol_type = other DNA
ttacggtcttccttcg

SEQ ID NO: 7565 - DNA, 16 bp, synthetic construct
  misc_feature 1..16: note = synthetic [barcode part1]
  source 1..16: mol_type = other DNA
ccaatactgcggttag

SEQ ID NO: 7566 - DNA, 16 bp, synthetic construct
  misc_feature 1..16: note = synthetic [barcode part1]
  source 1..16: mol_type = other DNA
tggtggagaacaacag

SEQ ID NO: 7567 - DNA, 16 bp, synthetic construct
  misc_feature 1..16: note = synthetic [barcode part1]
  source 1..16: mol_type = other DNA
agagtggatagatctc

SEQ ID NO: 7568 - DNA, 16 bp, synthetic construct
  misc_feature 1..16: note = synthetic [barcode part1]
  source 1..16: mol_type = other DNA
gtgaggaaccggattc

SEQ ID NO: 7569 - DNA, 16 bp, synthetic construct
  misc_feature 1..16: note = synthetic [barcode part1]
  source 1..16: mol_type = other DNA
ttctggaggtagatag

SEQ ID NO: 7570 - DNA, 16 bp, synthetic construct
  misc_feature 1..16: note = synthetic [barcode part1]
  source 1..16: mol_type = other DNA
tctccttgaccaatcc

SEQ ID NO: 7571 - DNA, 16 bp, synthetic construct
  misc_feature 1..16: note = synthetic [barcode part1]
  source 1..16: mol_type = other DNA
ttccagtacgtaacct

SEQ ID NO: 7572 - DNA, 16 bp, synthetic construct
  misc_feature 1..16: note = synthetic [barcode part1]
  source 1..16: mol_type = other DNA
gccggatcgaattatc

SEQ ID NO: 7573 - DNA, 16 bp, synthetic construct
  misc_feature 1..16: note = synthetic [barcode part1]
  source 1..16: mol_type = other DNA
gatagagacgcctggt

SEQ ID NO: 7574 - DNA, 16 bp, synthetic construct
  misc_feature 1..16: note = synthetic [barcode part1]
  source 1..16: mol_type = other DNA
ttgtcacacctgtagt

SEQ ID NO: 7575 - DNA, 16 bp, synthetic construct
  misc_feature 1..16: note = synthetic [barcode part1]
  source 1..16: mol_type = other DNA
gtaagttcgtggacct

SEQ ID NO: 7576 - DNA, 16 bp, synthetic construct
  misc_feature 1..16: note = synthetic [barcode part1]
  source 1..16: mol_type = other DNA
aataggacgtgttgac

SEQ ID NO: 7577 - DNA, 16 bp, synthetic construct
  misc_feature 1..16: note = synthetic [barcode part1]
  source 1..16: mol_type = other DNA
gactgcgtctcctaac

SEQ ID NO: 7578 - DNA, 16 bp, synthetic construct
  misc_feature 1..16: note = synthetic [barcode part1]
  source 1..16: mol_type = other DNA
gacctatcaaggcgag

SEQ ID NO: 7579 - DNA, 16 bp, synthetic construct
  misc_feature 1..16: note = synthetic [barcode part1]
  source 1..16: mol_type = other DNA
ttgtgccgaactgtcc

SEQ ID NO: 7580 - DNA, 16 bp, synthetic construct
  misc_feature 1..16: note = synthetic [barcode part1]
  source 1..16: mol_type = other DNA
cgattcagtgacctag

SEQ ID NO: 7581 - DNA, 16 bp, synthetic construct
  misc_feature 1..16: note = synthetic [barcode part1]
  source 1..16: mol_type = other DNA
cctctagaccaacacc

SEQ ID NO: 7582 - DNA, 16 bp, synthetic construct
  misc_feature 1..16: note = synthetic [barcode part1]
  source 1..16: mol_type = other DNA
cgaaggataacgtgcc

SEQ ID NO: 7583 - DNA, 16 bp, synthetic construct
  misc_feature 1..16: note = synthetic [barcode part1]
  source 1..16: mol_type = other DNA
aacgtgttgacgtgtc

SEQ ID NO: 7584 - DNA, 16 bp, synthetic construct
  misc_feature 1..16: note = synthetic [barcode part1]
  source 1..16: mol_type = other DNA
gtgacacttaaggcct

SEQ ID NO: 7585 - DNA, 16 bp, synthetic construct
  misc_feature 1..16: note = synthetic [barcode part1]
  source 1..16: mol_type = other DNA
cgagtcagatctgact

SEQ ID NO: 7586 - DNA, 16 bp, synthetic construct
  misc_feature 1..16: note = synthetic [barcode part1]
  source 1..16: mol_type = other DNA
tgcgttatctcgattg

SEQ ID NO: 7587 - DNA, 16 bp, synthetic construct
  misc_feature 1..16: note = synthetic [barcode part1]
  source 1..16: mol_type = other DNA
gttatcgtcttgtgtg

SEQ ID NO: 7588 - DNA, 16 bp, synthetic construct
  misc_feature 1..16: note = synthetic [barcode part1]
  source 1..16: mol_type = other DNA
acctaactcggatcag

SEQ ID NO: 7589 - DNA, 16 bp, synthetic construct
  misc_feature 1..16: note = synthetic [barcode part1]
  source 1..16: mol_type = other DNA
gaccgcggtgttaatt

SEQ ID NO: 7590 - DNA, 16 bp, synthetic construct
  misc_feature 1..16: note = synthetic [barcode part1]
  source 1..16: mol_type = other DNA
atagattcggtgagac

SEQ ID NO: 7591 - DNA, 16 bp, synthetic construct
  misc_feature 1..16: note = synthetic [barcode part1]
  source 1..16: mol_type = other DNA
aacgccagaccaatct

SEQ ID NO: 7592 - DNA, 16 bp, synthetic construct
  misc_feature 1..16: note = synthetic [barcode part1]
  source 1..16: mol_type = other DNA
atcagtggtgatcgtc

SEQ ID NO: 7593 - DNA, 16 bp, synthetic construct
  misc_feature 1..16: note = synthetic [barcode part1]
  source 1..16: mol_type = other DNA
tcctcggacgccaatt

SEQ ID NO: 7594 - DNA, 16 bp, synthetic construct
  misc_feature 1..16: note = synthetic [barcode part1]
  source 1..16: mol_type = other DNA
gacgcgtagttcttcc

SEQ ID NO: 7595 - DNA, 16 bp, synthetic construct
  misc_feature 1..16: note = synthetic [barcode part1]
  source 1..16: mol_type = other DNA
taaccgttggaggacg

SEQ ID NO: 7596 - DNA, 16 bp, synthetic construct
  misc_feature 1..16: note = synthetic [barcode part1]
  source 1..16: mol_type = other DNA
caagaggactgcgtac

SEQ ID NO: 7597 - DNA, 16 bp, synthetic construct
  misc_feature 1..16: note = synthetic [barcode part1]
  source 1..16: mol_type = other DNA
ttaggactcgtaacgc

SEQ ID NO: 7598 - DNA, 16 bp, synthetic construct
  misc_feature 1..16: note = synthetic [barcode part1]
  source 1..16: mol_type = other DNA
aattcgcgtaggtctg

SEQ ID NO: 7599 - DNA, 16 bp, synthetic construct
  misc_feature 1..16: note = synthetic [barcode part1]
  source 1..16: mol_type = other DNA
gtggtgattgttgtcg

SEQ ID NO: 7600 - DNA, 16 bp, synthetic construct
  misc_feature 1..16: note = synthetic [barcode part1]
  source 1..16: mol_type = other DNA
tgaattacgcgcctcc

SEQ ID NO: 7601 - DNA, 16 bp, synthetic construct
  misc_feature 1..16: note = synthetic [barcode part1]
  source 1..16: mol_type = other DNA
tgaatacgcgtctggt

SEQ ID NO: 7602 - DNA, 16 bp, synthetic construct
  misc_feature 1..16: note = synthetic [barcode part1]
  source 1..16: mol_type = other DNA
acgatcggttgtgtgt

SEQ ID NO: 7603 - DNA, 16 bp, synthetic construct
  misc_feature 1..16: note = synthetic [barcode part1]
  source 1..16: mol_type = other DNA
tctgcaatcgcctcag

SEQ ID NO: 7604 - DNA, 16 bp, synthetic construct
  misc_feature 1..16: note = synthetic [barcode part1]
  source 1..16: mol_type = other DNA
ttcagttcggtgcacc

SEQ ID NO: 7605 - DNA, 16 bp, synthetic construct
  misc_feature 1..16: note = synthetic [barcode part1]
  source 1..16: mol_type = other DNA
tgtcgtcagtgtattc

SEQ ID NO: 7606 - DNA, 16 bp, synthetic construct
  misc_feature 1..16: note = synthetic [barcode part1]
  source 1..16: mol_type = other DNA
gtcgccttgttatcct

SEQ ID NO: 7607 - DNA, 16 bp, synthetic construct
  misc_feature 1..16: note = synthetic [barcode part1]
  source 1..16: mol_type = other DNA
tagagaggaccgaagt

SEQ ID NO: 7608 - DNA, 16 bp, synthetic construct
  misc_feature 1..16: note = synthetic [barcode part1]
  source 1..16: mol_type = other DNA
gtagactcacagactc

SEQ ID NO: 7609 - DNA, 16 bp, synthetic construct
  misc_feature 1..16: note = synthetic [barcode part1]
  source 1..16: mol_type = other DNA
cctgagaacgcgtatt

SEQ ID NO: 7610 - DNA, 16 bp, synthetic construct
  misc_feature 1..16: note = synthetic [barcode part1]
  source 1..16: mol_type = other DNA
aggtgaggagttctgc

SEQ ID NO: 7611 - DNA, 16 bp, synthetic construct
  misc_feature 1..16: note = synthetic [barcode part1]
  source 1..16: mol_type = other DNA
cgtatagttgcgtgac

SEQ ID NO: 7612 - DNA, 16 bp, synthetic construct
  misc_feature 1..16: note = synthetic [barcode part1]
  source 1..16: mol_type = other DNA
gaatcaccggattgtc

SEQ ID NO: 7613 - DNA, 16 bp, synthetic construct
  misc_feature 1..16: note = synthetic [barcode part1]
  source 1..16: mol_type = other DNA
gcacagttggtgtgtt

SEQ ID NO: 7614 - DNA, 16 bp, synthetic construct
  misc_feature 1..16: note = synthetic [barcode part1]
  source 1..16: mol_type = other DNA
taagaacagactaccg

SEQ ID NO: 7615 - DNA, 16 bp, synthetic construct
  misc_feature 1..16: note = synthetic [barcode part1]
  source 1..16: mol_type = other DNA
cacgaagtcaacgacg

SEQ ID NO: 7616 - DNA, 16 bp, synthetic construct
  misc_feature 1..16: note = synthetic [barcode part1]
  source 1..16: mol_type = other DNA
cgatctccttcagttc

SEQ ID NO: 7617 - DNA, 16 bp, synthetic construct
  misc_feature 1..16: note = synthetic [barcode part1]
  source 1..16: mol_type = other DNA
ttggacagagtaacac

SEQ ID NO: 7618 - DNA, 16 bp, synthetic construct
  misc_feature 1..16: note = synthetic [barcode part1]
  source 1..16: mol_type = other DNA
cgcgttggactagaag

SEQ ID NO: 7619 - DNA, 16 bp, synthetic construct
  misc_feature 1..16: note = synthetic [barcode part1]
  source 1..16: mol_type = other DNA
caagataacggccgtg

SEQ ID NO: 7620 - DNA, 16 bp, synthetic construct
  misc_feature 1..16: note = synthetic [barcode part1]
  source 1..16: mol_type = other DNA
tatcggtagttccttg

SEQ ID NO: 7621 - DNA, 16 bp, synthetic construct
  misc_feature 1..16: note = synthetic [barcode part1]
  source 1..16: mol_type = other DNA
cgcctcagtggatctt

SEQ ID NO: 7622 - DNA, 16 bp, synthetic construct
  misc_feature 1..16: note = synthetic [barcode part1]
  source 1..16: mol_type = other DNA
tgtatatcaaccggcg

SEQ ID NO: 7623 - DNA, 16 bp, synthetic construct
  misc_feature 1..16: note = synthetic [barcode part1]
  source 1..16: mol_type = other DNA
cgacgtatcgagtact

SEQ ID NO: 7624 - DNA, 16 bp, synthetic construct
  misc_feature 1..16: note = synthetic [barcode part1]
  source 1..16: mol_type = other DNA
acaacgcctggaatct

SEQ ID NO: 7625 - DNA, 16 bp, synthetic construct
  misc_feature 1..16: note = synthetic [barcode part1]
  source 1..16: mol_type = other DNA
gtacactatagtcgcg

SEQ ID NO: 7626 - DNA, 16 bp, synthetic construct
  misc_feature 1..16: note = synthetic [barcode part1]
  source 1..16: mol_type = other DNA
tcgtcgttccactatc

SEQ ID NO: 7627 - DNA, 16 bp, synthetic construct
  misc_feature 1..16: note = synthetic [barcode part1]
  source 1..16: mol_type = other DNA
tgttctaccgtcctac

SEQ ID NO: 7628 - DNA, 16 bp, synthetic construct
  misc_feature 1..16: note = synthetic [barcode part1]
  source 1..16: mol_type = other DNA
gacagtcctccgtgtt

SEQ ID NO: 7629 - DNA, 16 bp, synthetic construct
  misc_feature 1..16: note = synthetic [barcode part1]
  source 1..16: mol_type = other DNA
gtagaccaatctgcgt

SEQ ID NO: 7630 - DNA, 16 bp, synthetic construct
  misc_feature 1..16: note = synthetic [barcode part1]
  source 1..16: mol_type = other DNA
gtcaagtgcagttcac

SEQ ID NO: 7631 - DNA, 16 bp, synthetic construct
  misc_feature 1..16: note = synthetic [barcode part1]
  source 1..16: mol_type = other DNA
gactgacacgtgtgtt

SEQ ID NO: 7632 - DNA, 16 bp, synthetic construct
  misc_feature 1..16: note = synthetic [barcode part1]
  source 1..16: mol_type = other DNA
accgaccaatctcaag

SEQ ID NO: 7633 - DNA, 16 bp, synthetic construct
  misc_feature 1..16: note = synthetic [barcode part1]
  source 1..16: mol_type = other DNA
cctagaggttagtcgt

SEQ ID NO: 7634 - DNA, 16 bp, synthetic construct
  misc_feature 1..16: note = synthetic [barcode part1]
  source 1..16: mol_type = other DNA
cacaatcaccgtctcg

SEQ ID NO: 7635 - DNA, 16 bp, synthetic construct
  misc_feature 1..16: note = synthetic [barcode part1]
  source 1..16: mol_type = other DNA
tatcgagtaccgaacc

SEQ ID NO: 7636 - DNA, 16 bp, synthetic construct
  misc_feature 1..16: note = synthetic [barcode part1]
  source 1..16: mol_type = other DNA
tgaggtgagatcagag

SEQ ID NO: 7637 - DNA, 16 bp, synthetic construct
  misc_feature 1..16: note = synthetic [barcode part1]
  source 1..16: mol_type = other DNA
attggtggataacgac

SEQ ID NO: 7638 - DNA, 16 bp, synthetic construct
  misc_feature 1..16: note = synthetic [barcode part1]
  source 1..16: mol_type = other DNA
gagataacaccgttcc

SEQ ID NO: 7639 - DNA, 16 bp, synthetic construct
  misc_feature 1..16: note = synthetic [barcode part1]
  source 1..16: mol_type = other DNA
ttattgaagaggcacg

SEQ ID NO: 7640 - DNA, 16 bp, synthetic construct
  misc_feature 1..16: note = synthetic [barcode part1]
  source 1..16: mol_type = other DNA
gtgaggtcaagacaag

SEQ ID NO: 7641 - DNA, 16 bp, synthetic construct
  misc_feature 1..16: note = synthetic [barcode part1]
  source 1..16: mol_type = other DNA
atctccgtatctctgc

SEQ ID NO: 7642 - DNA, 16 bp, synthetic construct
  misc_feature 1..16: note = synthetic [barcode part1]
  source 1..16: mol_type = other DNA
aagaacgcagactact

SEQ ID NO: 7643 - DNA, 16 bp, synthetic construct
  misc_feature 1..16: note = synthetic [barcode part1]
  source 1..16: mol_type = other DNA
tccggaattccaaggt

SEQ ID NO: 7644 - DNA, 16 bp, synthetic construct
  misc_feature 1..16: note = synthetic [barcode part1]
  source 1..16: mol_type = other DNA
tcttggcgagacaatc

SEQ ID NO: 7645 - DNA, 16 bp, synthetic construct
  misc_feature 1..16: note = synthetic [barcode part1]
  source 1..16: mol_type = other DNA
gtgtcggaacttgtac

SEQ ID NO: 7646 - DNA, 16 bp, synthetic construct
  misc_feature 1..16: note = synthetic [barcode part1]
  source 1..16: mol_type = other DNA
tggtcgcagactgaag

SEQ ID NO: 7647 - DNA, 16 bp, synthetic construct
  misc_feature 1..16: note = synthetic [barcode part1]
  source 1..16: mol_type = other DNA
tgagactgatcggttc

SEQ ID NO: 7648 - DNA, 16 bp, synthetic construct
  misc_feature 1..16: note = synthetic [barcode part1]
  source 1..16: mol_type = other DNA
tggcacaatcgcctct

SEQ ID NO: 7649 - DNA, 16 bp, synthetic construct
  misc_feature 1..16: note = synthetic [barcode part1]
  source 1..16: mol_type = other DNA
cgacaattctctgtac

SEQ ID NO: 7650 - DNA, 16 bp, synthetic construct
  misc_feature 1..16: note = synthetic [barcode part1]
  source 1..16: mol_type = other DNA
acctgaggcaagtctt

SEQ ID NO: 7651 - DNA, 16 bp, synthetic construct
  misc_feature 1..16: note = synthetic [barcode part1]
  source 1..16: mol_type = other DNA
actgtcacaacggttg

SEQ ID NO: 7652 - DNA, 16 bp, synthetic construct
  misc_feature 1..16: note = synthetic [barcode part1]
  source 1..16: mol_type = other DNA
taagtcgtcaacgacc

SEQ ID NO: 7653 - DNA, 16 bp, synthetic construct
  misc_feature 1..16: note = synthetic [barcode part1]
  source 1..16: mol_type = other DNA
gagagaatcgagatcg

SEQ ID NO: 7654 - DNA, 16 bp, synthetic construct
  misc_feature 1..16: note = synthetic [barcode part1]
  source 1..16: mol_type = other DNA
taagaccagttggtcc

SEQ ID NO: 7655 - DNA, 16 bp, synthetic construct
  misc_feature 1..16: note = synthetic [barcode part1]
  source 1..16: mol_type = other DNA
gcaagaaggccgttgt

SEQ ID NO: 7656 - DNA, 16 bp, synthetic construct
  misc_feature 1..16: note = synthetic [barcode part1]
  source 1..16: mol_type = other DNA
tagttggacgtgtgtc

SEQ ID NO: 7657 - DNA, 16 bp, synthetic construct
  misc_feature 1..16: note = synthetic [barcode part1]
  source 1..16: mol_type = other DNA
tactcgattctaccag

SEQ ID NO: 7658 - DNA, 16 bp, synthetic construct
  misc_feature 1..16: note = synthetic [barcode part1]
  source 1..16: mol_type = other DNA
gttctcaacctagtgt

SEQ ID NO: 7659 - DNA, 16 bp, synthetic construct
  misc_feature 1..16: note = synthetic [barcode part1]
  source 1..16: mol_type = other DNA
tatacgatccgcaggt

SEQ ID NO: 7660 - DNA, 16 bp, synthetic construct
  misc_feature 1..16: note = synthetic [barcode part1]
  source 1..16: mol_type = other DNA
tgattggtacgtacgc

SEQ ID NO: 7661 - DNA, 16 bp, synthetic construct
  misc_feature 1..16: note = synthetic [barcode part1]
  source 1..16: mol_type = other DNA
ttcttccttgactggc

SEQ ID NO: 7662 - DNA, 16 bp, synthetic construct
  misc_feature 1..16: note = synthetic [barcode part1]
  source 1..16: mol_type = other DNA
tctgtcacgtattggt

SEQ ID NO: 7663 - DNA, 16 bp, synthetic construct
  misc_feature 1..16: note = synthetic [barcode part1]
  source 1..16: mol_type = other DNA
ccgaatacaccacctc

SEQ ID NO: 7664 - DNA, 16 bp, synthetic construct
  misc_feature 1..16: note = synthetic [barcode part1]
  source 1..16: mol_type = other DNA
gaggcaatccggatac

SEQ ID NO: 7665 - DNA, 16 bp, synthetic construct
  misc_feature 1..16: note = synthetic [barcode part1]
  source 1..16: mol_type = other DNA
ataacaccggcactgt

SEQ ID NO: 7666 - DNA, 16 bp, synthetic construct
  misc_feature 1..16: note = synthetic [barcode part1]
  source 1..16: mol_type = other DNA
gcaacgagtaggatag

SEQ ID NO: 7667 - DNA, 16 bp, synthetic construct
  misc_feature 1..16: note = synthetic [barcode part1]
  source 1..16: mol_type = other DNA
gtgcctgttgtaagtg

SEQ ID NO: 7668 - DNA, 16 bp, synthetic construct
  misc_feature 1..16: note = synthetic [barcode part1]
  source 1..16: mol_type = other DNA
gaccacctgaggatag

SEQ ID NO: 7669 - DNA, 16 bp, synthetic construct
  misc_feature 1..16: note = synthetic [barcode part1]
  source 1..16: mol_type = other DNA
cctatagtattgcctg

SEQ ID NO: 7670 - DNA, 16 bp, synthetic construct
  misc_feature 1..16: note = synthetic [barcode part1]
  source 1..16: mol_type = other DNA
gcagaacacagactcg

SEQ ID NO: 7671 - DNA, 16 bp, synthetic construct
  misc_feature 1..16: note = synthetic [barcode part1]
  source 1..16: mol_type = other DNA
gcgagaagatccaacc

SEQ ID NO: 7672 - DNA, 16 bp, synthetic construct
  misc_feature 1..16: note = synthetic [barcode part1]
  source 1..16: mol_type = other DNA
tgtggcagtctcaagt

SEQ ID NO: 7673 - DNA, 16 bp, synthetic construct
  misc_feature 1..16: note = synthetic [barcode part1]
  source 1..16: mol_type = other DNA
ttgtaccgtggaggtt

SEQ ID NO: 7674 - DNA, 16 bp, synthetic construct
  misc_feature 1..16: note = synthetic [barcode part1]
  source 1..16: mol_type = other DNA
tattcggtgcggattg

SEQ ID NO: 7675 - DNA, 16 bp, synthetic construct
  misc_feature 1..16: note = synthetic [barcode part1]
  source 1..16: mol_type = other DNA
gaaggactagacctgc

SEQ ID NO: 7676 - DNA, 16 bp, synthetic construct
  misc_feature 1..16: note = synthetic [barcode part1]
  source 1..16: mol_type = other DNA
cgaatcacttcgcgtc

SEQ ID NO: 7677 - DNA, 16 bp, synthetic construct
  misc_feature 1..16: note = synthetic [barcode part1]
  source 1..16: mol_type = other DNA
tctgtacgatccgatt

SEQ ID NO: 7678 - DNA, 16 bp, synthetic construct
  misc_feature 1..16: note = synthetic [barcode part1]
  source 1..16: mol_type = other DNA
aagtgcgattggaccg

SEQ ID NO: 7679 - DNA, 16 bp, synthetic construct
  misc_feature 1..16: note = synthetic [barcode part1]
  source 1..16: mol_type = other DNA
tggcggtcttcgtatc

SEQ ID NO: 7680 - DNA, 16 bp, synthetic construct
  misc_feature 1..16: note = synthetic [barcode part1]
  source 1..16: mol_type = other DNA
cgacttccacgtgatc

SEQ ID NO: 7681 - DNA, 16 bp, synthetic construct
  misc_feature 1..16: note = synthetic [barcode part1]
  source 1..16: mol_type = other DNA
ttgccactgagacaac

SEQ ID NO: 7682 - DNA, 16 bp, synthetic construct
  misc_feature 1..16: note = synthetic [barcode part1]
  source 1..16: mol_type = other DNA
attggactgaaccgtc

SEQ ID NO: 7683 - DNA, 16 bp, synthetic construct
  misc_feature 1..16: note = synthetic [barcode part1]
  source 1..16: mol_type = other DNA
gtgacactcagagtct

SEQ ID NO: 7684 - DNA, 16 bp, synthetic construct
  misc_feature 1..16: note = synthetic [barcode part1]
  source 1..16: mol_type = other DNA
ttgagtcactgaaccg

SEQ ID NO: 7685 - DNA, 16 bp, synthetic construct
  misc_feature 1..16: note = synthetic [barcode part1]
  source 1..16: mol_type = other DNA
gcgttggtgtgttaac

SEQ ID NO: 7686 - DNA, 16 bp, synthetic construct
  misc_feature 1..16: note = synthetic [barcode part1]
  source 1..16: mol_type = other DNA
tgccttcactattgag

SEQ ID NO: 7687 - DNA, 16 bp, synthetic construct
  misc_feature 1..16: note = synthetic [barcode part1]
  source 1..16: mol_type = other DNA
cgagtcggtatcttcc

SEQ ID NO: 7688 - DNA, 16 bp, synthetic construct
  misc_feature 1..16: note = synthetic [barcode part1]
  source 1..16: mol_type = other DNA
cacgttcacaaggatc

SEQ ID NO: 7689 - DNA, 16 bp, synthetic construct
  misc_feature 1..16: note = synthetic [barcode part1]
  source 1..16: mol_type = other DNA
actgcagtcacagtgt

SEQ ID NO: 7690 - DNA, 16 bp, synthetic construct
  misc_feature 1..16: note = synthetic [barcode part1]
  source 1..16: mol_type = other DNA
caccttctaacgaccg

SEQ ID NO: 7691 - DNA, 16 bp, synthetic construct
  misc_feature 1..16: note = synthetic [barcode part1]
  source 1..16: mol_type = other DNA
gatctgacgtacctcc

SEQ ID NO: 7692 - DNA, 16 bp, synthetic construct
  misc_feature 1..16: note = synthetic [barcode part1]
  source 1..16: mol_type = other DNA
tggagaagactgaggt

SEQ ID NO: 7693 - DNA, 16 bp, synthetic construct
  misc_feature 1..16: note = synthetic [barcode part1]
  source 1..16: mol_type = other DNA
taggtcgccagtagtt

SEQ ID NO: 7694 - DNA, 16 bp, synthetic construct
  misc_feature 1..16: note = synthetic [barcode part1]
  source 1..16: mol_type = other DNA
gtatcgttgtctactg

SEQ ID NO: 7695 - DNA, 16 bp, synthetic construct
  misc_feature 1..16: note = synthetic [barcode part1]
  source 1..16: mol_type = other DNA
acctagacggaacgac

SEQ ID NO: 7696 - DNA, 16 bp, synthetic construct
  misc_feature 1..16: note = synthetic [barcode part1]
  source 1..16: mol_type = other DNA
agtcgttgcagtctag

SEQ ID NO: 7697 - DNA, 16 bp, synthetic construct
  misc_feature 1..16: note = synthetic [barcode part1]
  source 1..16: mol_type = other DNA
agattgccgttcctgc

SEQ ID NO: 7698 - DNA, 16 bp, synthetic construct
  misc_feature 1..16: note = synthetic [barcode part1]
  source 1..16: mol_type = other DNA
atcctcaatccagtgt

SEQ ID NO: 7699 - DNA, 16 bp, synthetic construct
  misc_feature 1..16: note = synthetic [barcode part1]
  source 1..16: mol_type = other DNA
tgttctataggtgtcc

SEQ ID NO: 7700 - DNA, 16 bp, synthetic construct
  misc_feature 1..16: note = synthetic [barcode part1]
  source 1..16: mol_type = other DNA
atcagtcggagtcttg

SEQ ID NO: 7701 - DNA, 16 bp, synthetic construct
  misc_feature 1..16: note = synthetic [barcode part1]
  source 1..16: mol_type = other DNA
cggtcaaggaactctt

SEQ ID NO: 7702 - DNA, 16 bp, synthetic construct
  misc_feature 1..16: note = synthetic [barcode part1]
  source 1..16: mol_type = other DNA
tctattccgtccactg

SEQ ID NO: 7703 - DNA, 16 bp, synthetic construct
  misc_feature 1..16: note = synthetic [barcode part1]
  source 1..16: mol_type = other DNA
cagtcttcggcgtgtt

SEQ ID NO: 7704 - DNA, 16 bp, synthetic construct
  misc_feature 1..16: note = synthetic [barcode part1]
  source 1..16: mol_type = other DNA
gtgtcctgagaatacc

SEQ ID NO: 7705 - DNA, 16 bp, synthetic construct
  misc_feature 1..16: note = synthetic [barcode part1]
  source 1..16: mol_type = other DNA
actcaactacgttctg

SEQ ID NO: 7706 - DNA, 16 bp, synthetic construct
  misc_feature 1..16: note = synthetic [barcode part1]
  source 1..16: mol_type = other DNA
gcggtgttgtgatatc

SEQ ID NO: 7707 - DNA, 16 bp, synthetic construct
  misc_feature 1..16: note = synthetic [barcode part1]
  source 1..16: mol_type = other DNA
tgttgtcggcagtagt

SEQ ID NO: 7708 - DNA, 16 bp, synthetic construct
  misc_feature 1..16: note = synthetic [barcode part1]
  source 1..16: mol_type = other DNA
gcacaatcttctcggc

SEQ ID NO: 7709 - DNA, 16 bp, synthetic construct
  misc_feature 1..16: note = synthetic [barcode part1]
  source 1..16: mol_type = other DNA
ccacacgactatacag

SEQ ID NO: 7710 - DNA, 16 bp, synthetic construct
  misc_feature 1..16: note = synthetic [barcode part1]
  source 1..16: mol_type = other DNA
caccttctagtgattg

SEQ ID NO: 7711 - DNA, 16 bp, synthetic construct
  misc_feature 1..16: note = synthetic [barcode part1]
  source 1..16: mol_type = other DNA
tgtactcttcgcgtct

SEQ ID NO: 7712 - DNA, 16 bp, synthetic construct
  misc_feature 1..16: note = synthetic [barcode part1]
  source 1..16: mol_type = other DNA
ccgtaggtgaggaatc

SEQ ID NO: 7713 - DNA, 16 bp, synthetic construct
  misc_feature 1..16: note = synthetic [barcode part1]
  source 1..16: mol_type = other DNA
caatcctcacgcggtt

SEQ ID NO: 7714 - DNA, 16 bp, synthetic construct
  misc_feature 1..16: note = synthetic [barcode part1]
  source 1..16: mol_type = other DNA
gtactgaactgaagac

SEQ ID NO: 7715 - DNA, 16 bp, synthetic construct
  misc_feature 1..16: note = synthetic [barcode part1]
  source 1..16: mol_type = other DNA
gtcagttaggactctg

SEQ ID NO: 7716 - DNA, 16 bp, synthetic construct
  misc_feature 1..16: note = synthetic [barcode part1]
  source 1..16: mol_type = other DNA
acttccgttacactcc

SEQ ID NO: 7717 - DNA, 16 bp, synthetic construct
  misc_feature 1..16: note = synthetic [barcode part1]
  source 1..16: mol_type = other DNA
tcagttgagtcggttg

SEQ ID NO: 7718 - DNA, 16 bp, synthetic construct
  misc_feature 1..16: note = synthetic [barcode part1]
  source 1..16: mol_type = other DNA
agaaggtaacgtacct

SEQ ID NO: 7719 - DNA, 16 bp, synthetic construct
  misc_feature 1..16: note = synthetic [barcode part1]
  source 1..16: mol_type = other DNA
accaggcagtacgaac

SEQ ID NO: 7720 - DNA, 16 bp, synthetic construct
  misc_feature 1..16: note = synthetic [barcode part1]
  source 1..16: mol_type = other DNA
agaatcaacgcgattg

SEQ ID NO: 7721 - DNA, 16 bp, synthetic construct
  misc_feature 1..16: note = synthetic [barcode part1]
  source 1..16: mol_type = other DNA
ttccacctgttactcg

SEQ ID NO: 7722 - DNA, 16 bp, synthetic construct
  misc_feature 1..16: note = synthetic [barcode part1]
  source 1..16: mol_type = other DNA
cacgtcttgaatcgcc

SEQ ID NO: 7723 - DNA, 16 bp, synthetic construct
  misc_feature 1..16: note = synthetic [barcode part1]
  source 1..16: mol_type = other DNA
acgaggatcaacaatc

SEQ ID NO: 7724 - DNA, 16 bp, synthetic construct
  misc_feature 1..16: note = synthetic [barcode part1]
  source 1..16: mol_type = other DNA
acgaccgttagaaggc

SEQ ID NO: 7725 - DNA, 16 bp, synthetic construct
  misc_feature 1..16: note = synthetic [barcode part1]
  source 1..16: mol_type = other DNA
tgtaggtggtagaatc

SEQ ID NO: 7726 - DNA, 16 bp, synthetic construct
  misc_feature 1..16: note = synthetic [barcode part1]
  source 1..16: mol_type = other DNA
tctgcggttcagatag

SEQ ID NO: 7727 - DNA, 16 bp, synthetic construct
  misc_feature 1..16: note = synthetic [barcode part1]
  source 1..16: mol_type = other DNA
ttctgcggaccgttac

SEQ ID NO: 7728 - DNA, 16 bp, synthetic construct
  misc_feature 1..16: note = synthetic [barcode part1]
  source 1..16: mol_type = other DNA
tctctgagtgttggtt

SEQ ID NO: 7729 - DNA, 16 bp, synthetic construct
  misc_feature 1..16: note = synthetic [barcode part1]
  source 1..16: mol_type = other DNA
aggcgaacttatccac

SEQ ID NO: 7730 - DNA, 16 bp, synthetic construct
  misc_feature 1..16: note = synthetic [barcode part1]
  source 1..16: mol_type = other DNA
aggtataactgagtcg

SEQ ID NO: 7731 - DNA, 16 bp, synthetic construct
  misc_feature 1..16: note = synthetic [barcode part1]
  source 1..16: mol_type = other DNA
agtcctattgcgacag

SEQ ID NO: 7732 - DNA, 16 bp, synthetic construct
  misc_feature 1..16: note = synthetic [barcode part1]
  source 1..16: mol_type = other DNA
tgtatcttgcctccac

SEQ ID NO: 7733 - DNA, 16 bp, synthetic construct
  misc_feature 1..16: note = synthetic [barcode part1]
  source 1..16: mol_type = other DNA
gtcgacagtagtcgtt

SEQ ID NO: 7734 - DNA, 16 bp, synthetic construct
  misc_feature 1..16: note = synthetic [barcode part1]
  source 1..16: mol_type = other DNA
tgtaggtgagttcacc

SEQ ID NO: 7735 - DNA, 16 bp, synthetic construct
  misc_feature 1..16: note = synthetic [barcode part1]
  source 1..16: mol_type = other DNA
atcggacttcgtactt

SEQ ID NO: 7736 - DNA, 16 bp, synthetic construct
  misc_feature 1..16: note = synthetic [barcode part1]
  source 1..16: mol_type = other DNA
cacaatctgatcttcg

SEQ ID NO: 7737 - DNA, 16 bp, synthetic construct
  misc_feature 1..16: note = synthetic [barcode part1]
  source 1..16: mol_type = other DNA
cgtgtcttaccaggtc

SEQ ID NO: 7738 - DNA, 16 bp, synthetic construct
  misc_feature 1..16: note = synthetic [barcode part1]
  source 1..16: mol_type = other DNA
gcacggtaggactaac

SEQ ID NO: 7739 - DNA, 16 bp, synthetic construct
  misc_feature 1..16: note = synthetic [barcode part1]
  source 1..16: mol_type = other DNA
gtataacgtcgcgtgt

SEQ ID NO: 7740 - DNA, 16 bp, synthetic construct
  misc_feature 1..16: note = synthetic [barcode part1]
  source 1..16: mol_type = other DNA
aagatacttccacgcg

SEQ ID NO: 7741 - DNA, 16 bp, synthetic construct
  misc_feature 1..16: note = synthetic [barcode part1]
  source 1..16: mol_type = other DNA
acgtgcctatcagtag

SEQ ID NO: 7742 - DNA, 16 bp, synthetic construct
  misc_feature 1..16: note = synthetic [barcode part1]
  source 1..16: mol_type = other DNA
cgttagtagagaatcg

SEQ ID NO: 7743 - DNA, 16 bp, synthetic construct
  misc_feature 1..16: note = synthetic [barcode part1]
  source 1..16: mol_type = other DNA
tgtgacgtagagtcct

SEQ ID NO: 7744 - DNA, 16 bp, synthetic construct
  misc_feature 1..16: note = synthetic [barcode part1]
  source 1..16: mol_type = other DNA
tctaccggtatccgac

SEQ ID NO: 7745 - DNA, 16 bp, synthetic construct
  misc_feature 1..16: note = synthetic [barcode part1]
  source 1..16: mol_type = other DNA
ttggatcgtgttcttg

SEQ ID NO: 7746 - DNA, 16 bp, synthetic construct
  misc_feature 1..16: note = synthetic [barcode part1]
  source 1..16: mol_type = other DNA
gtccagacgtctaagt

SEQ ID NO: 7747 - DNA, 16 bp, synthetic construct
  misc_feature 1..16: note = synthetic [barcode part1]
  source 1..16: mol_type = other DNA
acactcagtggacttg

SEQ ID NO: 7748 - DNA, 16 bp, synthetic construct
  misc_feature 1..16: note = synthetic [barcode part1]
  source 1..16: mol_type = other DNA
aagttcacctggttct

SEQ ID NO: 7749 - DNA, 16 bp, synthetic construct
  misc_feature 1..16: note = synthetic [barcode part1]
  source 1..16: mol_type = other DNA
tggcgatactggactt

SEQ ID NO: 7750 - DNA, 16 bp, synthetic construct
  misc_feature 1..16: note = synthetic [barcode part1]
  source 1..16: mol_type = other DNA
cctacaagttctactg

SEQ ID NO: 7751 - DNA, 16 bp, synthetic construct
  misc_feature 1..16: note = synthetic [barcode part1]
  source 1..16: mol_type = other DNA
tgcgaccactatctcg

SEQ ID NO: 7752 - DNA, 16 bp, synthetic construct
  misc_feature 1..16: note = synthetic [barcode part1]
  source 1..16: mol_type = other DNA
gatcgatccaatcgac

SEQ ID NO: 7753 - DNA, 16 bp, synthetic construct
  misc_feature 1..16: note = synthetic [barcode part1]
  source 1..16: mol_type = other DNA
cgcgtcttgaattgtt

SEQ ID NO: 7754 - DNA, 16 bp, synthetic construct
  misc_feature 1..16: note = synthetic [barcode part1]
  source 1..16: mol_type = other DNA
gcagtagtactggcag

SEQ ID NO: 7755 - DNA, 16 bp, synthetic construct
  misc_feature 1..16: note = synthetic [barcode part1]
  source 1..16: mol_type = other DNA
taattgtgcctaggcg

SEQ ID NO: 7756 - DNA, 16 bp, synthetic construct
  misc_feature 1..16: note = synthetic [barcode part1]
  source 1..16: mol_type = other DNA
accagagaaggtcaag

SEQ ID NO: 7757 - DNA, 16 bp, synthetic construct
  misc_feature 1..16: note = synthetic [barcode part1]
  source 1..16: mol_type = other DNA
ccagttcagtatatcc

SEQ ID NO: 7758 - DNA, 16 bp, synthetic construct
  misc_feature 1..16: note = synthetic [barcode part1]
  source 1..16: mol_type = other DNA
tctacgagaacaacag

SEQ ID NO: 7759 - DNA, 16 bp, synthetic construct
  misc_feature 1..16: note = synthetic [barcode part1]
  source 1..16: mol_type = other DNA
tccttgcgtaatctag

SEQ ID NO: 7760 - DNA, 16 bp, synthetic construct
  misc_feature 1..16: note = synthetic [barcode part1]
  source 1..16: mol_type = other DNA
gcaccttgaccactac

SEQ ID NO: 7761 - DNA, 16 bp, synthetic construct
  misc_feature 1..16: note = synthetic [barcode part1]
  source 1..16: mol_type = other DNA
tggtgcctatctattg

SEQ ID NO: 7762 - DNA, 16 bp, synthetic construct
  misc_feature 1..16: note = synthetic [barcode part1]
  source 1..16: mol_type = other DNA
tagttggcagtcagtc

SEQ ID NO: 7763 - DNA, 16 bp, synthetic construct
  misc_feature 1..16: note = synthetic [barcode part1]
  source 1..16: mol_type = other DNA
ccagttcagattaggc

SEQ ID NO: 7764 - DNA, 16 bp, synthetic construct
  misc_feature 1..16: note = synthetic [barcode part1]
  source 1..16: mol_type = other DNA
cctaattgtacgttgc

SEQ ID NO: 7765 - DNA, 16 bp, synthetic construct
  misc_feature 1..16: note = synthetic [barcode part1]
  source 1..16: mol_type = other DNA
acgtaggttcaacaag

SEQ ID NO: 7766 - DNA, 16 bp, synthetic construct
  misc_feature 1..16: note = synthetic [barcode part1]
  source 1..16: mol_type = other DNA
tcgttagtcctacgcg

SEQ ID NO: 7767 - DNA, 16 bp, synthetic construct
  misc_feature 1..16: note = synthetic [barcode part1]
  source 1..16: mol_type = other DNA
tcgccttacgcaatcg

SEQ ID NO: 7768 - DNA, 16 bp, synthetic construct
  misc_feature 1..16: note = synthetic [barcode part1]
  source 1..16: mol_type = other DNA
actgaacgtcctcgtc

SEQ ID NO: 7769 - DNA, 16 bp, synthetic construct
  misc_feature 1..16: note = synthetic [barcode part1]
  source 1..16: mol_type = other DNA
tgtgccgttggttctg

SEQ ID NO: 7770 - DNA, 16 bp, synthetic construct
  misc_feature 1..16: note = synthetic [barcode part1]
  source 1..16: mol_type = other DNA
ttaggtagacaggact

SEQ ID NO: 7771 - DNA, 16 bp, synthetic construct
  misc_feature 1..16: note = synthetic [barcode part1]
  source 1..16: mol_type = other DNA
cgatctcaccggtatc

SEQ ID NO: 7772 - DNA, 16 bp, synthetic construct
  misc_feature 1..16: note = synthetic [barcode part1]
  source 1..16: mol_type = other DNA
aacggaagtattcggt

SEQ ID NO: 7773 - DNA, 16 bp, synthetic construct
  misc_feature 1..16: note = synthetic [barcode part1]
  source 1..16: mol_type = other DNA
acgacgacaagaagtg

SEQ ID NO: 7774 - DNA, 16 bp, synthetic construct
  misc_feature 1..16: note = synthetic [barcode part1]
  source 1..16: mol_type = other DNA
caacgttcaggcagag

SEQ ID NO: 7775 - DNA, 16 bp, synthetic construct
  misc_feature 1..16: note = synthetic [barcode part1]
  source 1..16: mol_type = other DNA
gtattccgttaggtct

SEQ ID NO: 7776 - DNA, 16 bp, synthetic construct
  misc_feature 1..16: note = synthetic [barcode part1]
  source 1..16: mol_type = other DNA
gagaacgcctgtattc

SEQ ID NO: 7777 - DNA, 16 bp, synthetic construct
  misc_feature 1..16: note = synthetic [barcode part1]
  source 1..16: mol_type = other DNA
tcaggtgcactcaagt

SEQ ID NO: 7778 - DNA, 16 bp, synthetic construct
  misc_feature 1..16: note = synthetic [barcode part1]
  source 1..16: mol_type = other DNA
tggtgatccttacgcc

SEQ ID NO: 7779 - DNA, 16 bp, synthetic construct
  misc_feature 1..16: note = synthetic [barcode part1]
  source 1..16: mol_type = other DNA
tagttccgaccgaagt

SEQ ID NO: 7780 - DNA, 16 bp, synthetic construct
  misc_feature 1..16: note = synthetic [barcode part1]
  source 1..16: mol_type = other DNA
tacagtgagactccac

SEQ ID NO: 7781 - DNA, 16 bp, synthetic construct
  misc_feature 1..16: note = synthetic [barcode part1]
  source 1..16: mol_type = other DNA
gtgtcgcgacaagtag

SEQ ID NO: 7782 - DNA, 16 bp, synthetic construct
  misc_feature 1..16: note = synthetic [barcode part1]
  source 1..16: mol_type = other DNA
aaccgatctagtcgac

SEQ ID NO: 7783 - DNA, 16 bp, synthetic construct
  misc_feature 1..16: note = synthetic [barcode part1]
  source 1..16: mol_type = other DNA
ttgtattatccggcgt

SEQ ID NO: 7784 - DNA, 16 bp, synthetic construct
  misc_feature 1..16: note = synthetic [barcode part1]
  source 1..16: mol_type = other DNA
tcaccacggatagtac

SEQ ID NO: 7785 - DNA, 16 bp, synthetic construct
  misc_feature 1..16: note = synthetic [barcode part1]
  source 1..16: mol_type = other DNA
ttcggtaattcggcag

SEQ ID NO: 7786 - DNA, 16 bp, synthetic construct
  misc_feature 1..16: note = synthetic [barcode part1]
  source 1..16: mol_type = other DNA
ttaggtgagatagtgc

SEQ ID NO: 7787 - DNA, 16 bp, synthetic construct
  misc_feature 1..16: note = synthetic [barcode part1]
  source 1..16: mol_type = other DNA
tacgtcaacaccagtg

SEQ ID NO: 7788 - DNA, 16 bp, synthetic construct
  misc_feature 1..16: note = synthetic [barcode part1]
  source 1..16: mol_type = other DNA
acacaaccacaactgc

SEQ ID NO: 7789 - DNA, 16 bp, synthetic construct
  misc_feature 1..16: note = synthetic [barcode part1]
  source 1..16: mol_type = other DNA
gacttctgtactcagt

SEQ ID NO: 7790 - DNA, 16 bp, synthetic construct
  misc_feature 1..16: note = synthetic [barcode part1]
  source 1..16: mol_type = other DNA
taggttctcacgaacg

SEQ ID NO: 7791 - DNA, 16 bp, synthetic construct
  misc_feature 1..16: note = synthetic [barcode part1]
  source 1..16: mol_type = other DNA
cagtgttggtactgtg

SEQ ID NO: 7792 - DNA, 16 bp, synthetic construct
  misc_feature 1..16: note = synthetic [barcode part1]
  source 1..16: mol_type = other DNA
tcggttcttcgtggac

SEQ ID NO: 7793 - DNA, 16 bp, synthetic construct
  misc_feature 1..16: note = synthetic [barcode part1]
  source 1..16: mol_type = other DNA
acttggaggatagtac

SEQ ID NO: 7794 - DNA, 16 bp, synthetic construct
  misc_feature 1..16: note = synthetic [barcode part1]
  source 1..16: mol_type = other DNA
ttgacgagtccagtac

SEQ ID NO: 7795 - DNA, 16 bp, synthetic construct
  misc_feature 1..16: note = synthetic [barcode part1]
  source 1..16: mol_type = other DNA
cgagttgtgacgactt

SEQ ID NO: 7796 - DNA, 16 bp, synthetic construct
  misc_feature 1..16: note = synthetic [barcode part1]
  source 1..16: mol_type = other DNA
caatcagtcgagactc

SEQ ID NO: 7797 - DNA, 16 bp, synthetic construct
  misc_feature 1..16: note = synthetic [barcode part1]
  source 1..16: mol_type = other DNA
actaacgtatcctgtc

SEQ ID NO: 7798 - DNA, 16 bp, synthetic construct
  misc_feature 1..16: note = synthetic [barcode part1]
  source 1..16: mol_type = other DNA
gcggttagaagtcggt

SEQ ID NO: 7799 - DNA, 16 bp, synthetic construct
  misc_feature 1..16: note = synthetic [barcode part1]
  source 1..16: mol_type = other DNA
tgactcaactcgacag

SEQ ID NO: 7800 - DNA, 16 bp, synthetic construct
  misc_feature 1..16: note = synthetic [barcode part1]
  source 1..16: mol_type = other DNA
tgagaagtggcgcgtt

SEQ ID NO: 7801 - DNA, 16 bp, synthetic construct
  misc_feature 1..16: note = synthetic [barcode part1]
  source 1..16: mol_type = other DNA
cgaatactggcgagac

SEQ ID NO: 7802 - DNA, 16 bp, synthetic construct
  misc_feature 1..16: note = synthetic [barcode part1]
  source 1..16: mol_type = other DNA
tgacttggttcttacg

SEQ ID NO: 7803 - DNA, 16 bp, synthetic construct
  misc_feature 1..16: note = synthetic [barcode part1]
  source 1..16: mol_type = other DNA
ttgcagaaggtcaggc

SEQ ID NO: 7804 - DNA, 16 bp, synthetic construct
  misc_feature 1..16: note = synthetic [barcode part1]
  source 1..16: mol_type = other DNA
ccgacctctgttactt

SEQ ID NO: 7805 - DNA, 16 bp, synthetic construct
  misc_feature 1..16: note = synthetic [barcode part1]
  source 1..16: mol_type = other DNA
ttaccaggcgtaggag

SEQ ID NO: 7806 - DNA, 16 bp, synthetic construct
  misc_feature 1..16: note = synthetic [barcode part1]
  source 1..16: mol_type = other DNA
tgagacttcgagatcc

SEQ ID NO: 7807 - DNA, 16 bp, synthetic construct
  misc_feature 1..16: note = synthetic [barcode part1]
  source 1..16: mol_type = other DNA
taggaggacaccagtc

SEQ ID NO: 7808 - DNA, 16 bp, synthetic construct
  misc_feature 1..16: note = synthetic [barcode part1]
  source 1..16: mol_type = other DNA
gcagtaccgatcgatt

SEQ ID NO: 7809 - DNA, 16 bp, synthetic construct
  misc_feature 1..16: note = synthetic [barcode part1]
  source 1..16: mol_type = other DNA
tgccgagtcgtacttc

SEQ ID NO: 7810 - DNA, 16 bp, synthetic construct
  misc_feature 1..16: note = synthetic [barcode part1]
  source 1..16: mol_type = other DNA
ccaagacacgaacggt

SEQ ID NO: 7811 - DNA, 16 bp, synthetic construct
  misc_feature 1..16: note = synthetic [barcode part1]
  source 1..16: mol_type = other DNA
atatctcctggtaacc

SEQ ID NO: 7812 - DNA, 16 bp, synthetic construct
  misc_feature 1..16: note = synthetic [barcode part1]
  source 1..16: mol_type = other DNA
agtcctcacacggttc

SEQ ID NO: 7813 - DNA, 16 bp, synthetic construct
  misc_feature 1..16: note = synthetic [barcode part1]
  source 1..16: mol_type = other DNA
tgtccgtagactctgc

SEQ ID NO: 7814 - DNA, 16 bp, synthetic construct
  misc_feature 1..16: note = synthetic [barcode part1]
  source 1..16: mol_type = other DNA
tgcgtattacacgcag

SEQ ID NO: 7815 - DNA, 16 bp, synthetic construct
  misc_feature 1..16: note = synthetic [barcode part1]
  source 1..16: mol_type = other DNA
caacgtaactggaggc

SEQ ID NO: 7816 - DNA, 16 bp, synthetic construct
  misc_feature 1..16: note = synthetic [barcode part1]
  source 1..16: mol_type = other DNA
aaccgaccggttagtt

SEQ ID NO: 7817 - DNA, 16 bp, synthetic construct
  misc_feature 1..16: note = synthetic [barcode part1]
  source 1..16: mol_type = other DNA
gtgaactctctaccgc

SEQ ID NO: 7818 - DNA, 16 bp, synthetic construct
  misc_feature 1..16: note = synthetic [barcode part1]
  source 1..16: mol_type = other DNA
gtgattcacttctacg

SEQ ID NO: 7819 - DNA, 16 bp, synthetic construct
  misc_feature 1..16: note = synthetic [barcode part1]
  source 1..16: mol_type = other DNA
cggaaggtgtacggtt

SEQ ID NO: 7820 - DNA, 16 bp, synthetic construct
  misc_feature 1..16: note = synthetic [barcode part1]
  source 1..16: mol_type = other DNA
gcaatcggtaccgatt

SEQ ID NO: 7821 - DNA, 16 bp, synthetic construct
  misc_feature 1..16: note = synthetic [barcode part1]
  source 1..16: mol_type = other DNA
tgtgtactaatcggcg

SEQ ID NO: 7822 - DNA, 16 bp, synthetic construct
  misc_feature 1..16: note = synthetic [barcode part1]
  source 1..16: mol_type = other DNA
gaatctcgagaccttg

SEQ ID NO: 7823 - DNA, 16 bp, synthetic construct
  misc_feature 1..16: note = synthetic [barcode part1]
  source 1..16: mol_type = other DNA
tatcctgtgaggcagt

SEQ ID NO: 7824 - DNA, 16 bp, synthetic construct
  misc_feature 1..16: note = synthetic [barcode part1]
  source 1..16: mol_type = other DNA
aacggaccttgttcag

SEQ ID NO: 7825 - DNA, 16 bp, synthetic construct
  misc_feature 1..16: note = synthetic [barcode part1]
  source 1..16: mol_type = other DNA
aggcctatccaattct

SEQ ID NO: 7826 - DNA, 16 bp, synthetic construct
  misc_feature 1..16: note = synthetic [barcode part1]
  source 1..16: mol_type = other DNA
gcctgtctccagaact

SEQ ID NO: 7827 - DNA, 16 bp, synthetic construct
  misc_feature 1..16: note = synthetic [barcode part1]
  source 1..16: mol_type = other DNA
cgatatcttacctgtg

SEQ ID NO: 7828 - DNA, 16 bp, synthetic construct
  misc_feature 1..16: note = synthetic [barcode part1]
  source 1..16: mol_type = other DNA
agatccggtgactgtt

SEQ ID NO: 7829 - DNA, 16 bp, synthetic construct
  misc_feature 1..16: note = synthetic [barcode part1]
  source 1..16: mol_type = other DNA
ccgcactcactagact

SEQ ID NO: 7830 - DNA, 16 bp, synthetic construct
  misc_feature 1..16: note = synthetic [barcode part1]
  source 1..16: mol_type = other DNA
gtggaagtgatccgac

SEQ ID NO: 7831 - DNA, 16 bp, synthetic construct
  misc_feature 1..16: note = synthetic [barcode part1]
  source 1..16: mol_type = other DNA
taagaaggtgcgttac

SEQ ID NO: 7832 - DNA, 16 bp, synthetic construct
  misc_feature 1..16: note = synthetic [barcode part1]
  source 1..16: mol_type = other DNA
ttatccggaaccttgt

SEQ ID NO: 7833 - DNA, 16 bp, synthetic construct
  misc_feature 1..16: note = synthetic [barcode part1]
  source 1..16: mol_type = other DNA
taacgcgaagacgatt

SEQ ID NO: 7834 - DNA, 16 bp, synthetic construct
  misc_feature 1..16: note = synthetic [barcode part1]
  source 1..16: mol_type = other DNA
acagacctgtagacct

SEQ ID NO: 7835 - DNA, 16 bp, synthetic construct
  misc_feature 1..16: note = synthetic [barcode part1]
  source 1..16: mol_type = other DNA
ccgtacctcaccaagt

SEQ ID NO: 7836 - DNA, 16 bp, synthetic construct
  misc_feature 1..16: note = synthetic [barcode part1]
  source 1..16: mol_type = other DNA
cgttctaccgtgaatt

SEQ ID NO: 7837 - DNA, 16 bp, synthetic construct
  misc_feature 1..16: note = synthetic [barcode part1]
  source 1..16: mol_type = other DNA
gatagtcaccagactc

SEQ ID NO: 7838 - DNA, 16 bp, synthetic construct
  misc_feature 1..16: note = synthetic [barcode part1]
  source 1..16: mol_type = other DNA
acagtgtgtacacacc

SEQ ID NO: 7839 - DNA, 16 bp, synthetic construct
  misc_feature 1..16: note = synthetic [barcode part1]
  source 1..16: mol_type = other DNA
cggcaattacactctt

SEQ ID NO: 7840 - DNA, 16 bp, synthetic construct
  misc_feature 1..16: note = synthetic [barcode part1]
  source 1..16: mol_type = other DNA
tggaagacgcgtaatt

SEQ ID NO: 7841 - DNA, 16 bp, synthetic construct
  misc_feature 1..16: note = synthetic [barcode part1]
  source 1..16: mol_type = other DNA
attccgtgagtcaggt

SEQ ID NO: 7842 - DNA, 16 bp, synthetic construct
  misc_feature 1..16: note = synthetic [barcode part1]
  source 1..16: mol_type = other DNA
actcttagagtcactc

SEQ ID NO: 7843 - DNA, 16 bp, synthetic construct
  misc_feature 1..16: note = synthetic [barcode part1]
  source 1..16: mol_type = other DNA
ttgcagttacgcgtag

SEQ ID NO: 7844 - DNA, 16 bp, synthetic construct
  misc_feature 1..16: note = synthetic [barcode part1]
  source 1..16: mol_type = other DNA
agtatcgttggagtcc

SEQ ID NO: 7845 - DNA, 16 bp, synthetic construct
  misc_feature 1..16: note = synthetic [barcode part1]
  source 1..16: mol_type = other DNA
ccttgcgaatccgact

SEQ ID NO: 7846 - DNA, 16 bp, synthetic construct
  misc_feature 1..16: note = synthetic [barcode part1]
  source 1..16: mol_type = other DNA
acttgcagtcactccg

SEQ ID NO: 7847 - DNA, 16 bp, synthetic construct
  misc_feature 1..16: note = synthetic [barcode part1]
  source 1..16: mol_type = other DNA
caaccagtctcgaagt

SEQ ID NO: 7848 - DNA, 16 bp, synthetic construct
  misc_feature 1..16: note = synthetic [barcode part1]
  source 1..16: mol_type = other DNA
gcgtgacctagaagac

SEQ ID NO: 7849 - DNA, 16 bp, synthetic construct
  misc_feature 1..16: note = synthetic [barcode part1]
  source 1..16: mol_type = other DNA
ccggtagtctagtaac

SEQ ID NO: 7850 - DNA, 16 bp, synthetic construct
  misc_feature 1..16: note = synthetic [barcode part1]
  source 1..16: mol_type = other DNA
ccacgtcaataacctt

SEQ ID NO: 7851 - DNA, 16 bp, synthetic construct
  misc_feature 1..16: note = synthetic [barcode part1]
  source 1..16: mol_type = other DNA
taaggaagaccaggac

SEQ ID NO: 7852 - DNA, 16 bp, synthetic construct
  misc_feature 1..16: note = synthetic [barcode part1]
  source 1..16: mol_type = other DNA
ataaccgaatcgagac

SEQ ID NO: 7853 - DNA, 16 bp, synthetic construct
  misc_feature 1..16: note = synthetic [barcode part1]
  source 1..16: mol_type = other DNA
accgaacggtaatcct

SEQ ID NO: 7854 - DNA, 16 bp, synthetic construct
  misc_feature 1..16: note = synthetic [barcode part1]
  source 1..16: mol_type = other DNA
tcttatcgaacttgcg

SEQ ID NO: 7855 - DNA, 16 bp, synthetic construct
  misc_feature 1..16: note = synthetic [barcode part1]
  source 1..16: mol_type = other DNA
gcgattgcgtgcaatt

SEQ ID NO: 7856 - DNA, 16 bp, synthetic construct
  misc_feature 1..16: note = synthetic [barcode part1]
  source 1..16: mol_type = other DNA
atctcgcaggtacctc

SEQ ID NO: 7857 - DNA, 16 bp, synthetic construct
  misc_feature 1..16: note = synthetic [barcode part1]
  source 1..16: mol_type = other DNA
tccacaccacaagaac

SEQ ID NO: 7858 - DNA, 16 bp, synthetic construct
  misc_feature 1..16: note = synthetic [barcode part1]
  source 1..16: mol_type = other DNA
ttgaccagatctcgag

SEQ ID NO: 7859 - DNA, 16 bp, synthetic construct
  misc_feature 1..16: note = synthetic [barcode part1]
  source 1..16: mol_type = other DNA
actggagtcttccaag

SEQ ID NO: 7860 - DNA, 16 bp, synthetic construct
  misc_feature 1..16: note = synthetic [barcode part1]
  source 1..16: mol_type = other DNA
ccagaacctcgttcgt

SEQ ID NO: 7861 - DNA, 16 bp, synthetic construct
  misc_feature 1..16: note = synthetic [barcode part1]
  source 1..16: mol_type = other DNA
aggactgacacaaccg

SEQ ID NO: 7862 - DNA, 16 bp, synthetic construct
  misc_feature 1..16: note = synthetic [barcode part1]
  source 1..16: mol_type = other DNA
ttccagtggccacact

SEQ ID NO: 7863 - DNA, 16 bp, synthetic construct
  misc_feature 1..16: note = synthetic [barcode part1]
  source 1..16: mol_type = other DNA
ccagtccgtagttatt

SEQ ID NO: 7864 - DNA, 16 bp, synthetic construct
  misc_feature 1..16: note = synthetic [barcode part1]
  source 1..16: mol_type = other DNA
actattcgcctgtggc

SEQ ID NO: 7865 - DNA, 16 bp, synthetic construct
  misc_feature 1..16: note = synthetic [barcode part1]
  source 1..16: mol_type = other DNA
aattcgccagagtaag

SEQ ID NO: 7866 - DNA, 16 bp, synthetic construct
  misc_feature 1..16: note = synthetic [barcode part1]
  source 1..16: mol_type = other DNA
gtcgaattgaagacac

SEQ ID NO: 7867 - DNA, 16 bp, synthetic construct
  misc_feature 1..16: note = synthetic [barcode part1]
  source 1..16: mol_type = other DNA
aatactaccgatcggc

SEQ ID NO: 7868 - DNA, 16 bp, synthetic construct
  misc_feature 1..16: note = synthetic [barcode part1]
  source 1..16: mol_type = other DNA
cgtgacctctctaacg

SEQ ID NO: 7869 - DNA, 16 bp, synthetic construct
  misc_feature 1..16: note = synthetic [barcode part1]
  source 1..16: mol_type = other DNA
tcactagaccaagtcg

SEQ ID NO: 7870 - DNA, 16 bp, synthetic construct
  misc_feature 1..16: note = synthetic [barcode part1]
  source 1..16: mol_type = other DNA
gaccttcaaggcaatc

SEQ ID NO: 7871 - DNA, 16 bp, synthetic construct
  misc_feature 1..16: note = synthetic [barcode part1]
  source 1..16: mol_type = other DNA
tgtaggtacagactcc

SEQ ID NO: 7872 - DNA, 16 bp, synthetic construct
  misc_feature 1..16: note = synthetic [barcode part1]
  source 1..16: mol_type = other DNA
ttctcaaccaggagac

SEQ ID NO: 7873 - DNA, 16 bp, synthetic construct
  misc_feature 1..16: note = synthetic [barcode part1]
  source 1..16: mol_type = other DNA
cgtatactagtgccag

SEQ ID NO: 7874 - DNA, 16 bp, synthetic construct
  misc_feature 1..16: note = synthetic [barcode part1]
  source 1..16: mol_type = other DNA
accagagtgcgatcag

SEQ ID NO: 7875 - DNA, 16 bp, synthetic construct
  misc_feature 1..16: note = synthetic [barcode part1]
  source 1..16: mol_type = other DNA
tgaagatactcggtag

SEQ ID NO: 7876 - DNA, 16 bp, synthetic construct
  misc_feature 1..16: note = synthetic [barcode part1]
  source 1..16: mol_type = other DNA
ttcgccaatcaccttc

SEQ ID NO: 7877 - DNA, 16 bp, synthetic construct
  misc_feature 1..16: note = synthetic [barcode part1]
  source 1..16: mol_type = other DNA
tcgattcaggtgtctt

SEQ ID NO: 7878 - DNA, 16 bp, synthetic construct
  misc_feature 1..16: note = synthetic [barcode part1]
  source 1..16: mol_type = other DNA
atctgttgacaggcac

SEQ ID NO: 7879 - DNA, 16 bp, synthetic construct
  misc_feature 1..16: note = synthetic [barcode part1]
  source 1..16: mol_type = other DNA
gactcggtgtacttcc

SEQ ID NO: 7880 - DNA, 16 bp, synthetic construct
  misc_feature 1..16: note = synthetic [barcode part1]
  source 1..16: mol_type = other DNA
actggtaattctctgc

SEQ ID NO: 7881 - DNA, 16 bp, synthetic construct
  misc_feature 1..16: note = synthetic [barcode part1]
  source 1..16: mol_type = other DNA
tacggtacgtcgtaac

SEQ ID NO: 7882 - DNA, 16 bp, synthetic construct
  misc_feature 1..16: note = synthetic [barcode part1]
  source 1..16: mol_type = other DNA
aggttgtacgactcac

SEQ ID NO: 7883 - DNA, 16 bp, synthetic construct
  misc_feature 1..16: note = synthetic [barcode part1]
  source 1..16: mol_type = other DNA
tacttacggcgttgcc

SEQ ID NO: 7884 - DNA, 16 bp, synthetic construct
  misc_feature 1..16: note = synthetic [barcode part1]
  source 1..16: mol_type = other DNA
tctgacctgcgactac

SEQ ID NO: 7885 - DNA, 16 bp, synthetic construct
  misc_feature 1..16: note = synthetic [barcode part1]
  source 1..16: mol_type = other DNA
taaccttgcactagtc

SEQ ID NO: 7886 - DNA, 16 bp, synthetic construct
  misc_feature 1..16: note = synthetic [barcode part1]
  source 1..16: mol_type = other DNA
tgactaccaggagacg

SEQ ID NO: 7887 - DNA, 16 bp, synthetic construct
  misc_feature 1..16: note = synthetic [barcode part1]
  source 1..16: mol_type = other DNA
ttcgagttgcctcacg

SEQ ID NO: 7888 - DNA, 16 bp, synthetic construct
  misc_feature 1..16: note = synthetic [barcode part1]
  source 1..16: mol_type = other DNA
accactccggaataac

SEQ ID NO: 7889 - DNA, 16 bp, synthetic construct
  misc_feature 1..16: note = synthetic [barcode part1]
  source 1..16: mol_type = other DNA
tacgactacgttcgag

SEQ ID NO: 7890 - DNA, 16 bp, synthetic construct
  misc_feature 1..16: note = synthetic [barcode part1]
  source 1..16: mol_type = other DNA
cgagacttggtcagtt

SEQ ID NO: 7891 - DNA, 16 bp, synthetic construct
  misc_feature 1..16: note = synthetic [barcode part1]
  source 1..16: mol_type = other DNA
tgttgtggtactgcag

SEQ ID NO: 7892 - DNA, 16 bp, synthetic construct
  misc_feature 1..16: note = synthetic [barcode part1]
  source 1..16: mol_type = other DNA
aacactgtgtgcacac

SEQ ID NO: 7893 - DNA, 16 bp, synthetic construct
  misc_feature 1..16: note = synthetic [barcode part1]
  source 1..16: mol_type = other DNA
aatagtgcctgagtag

SEQ ID NO: 7894 - DNA, 16 bp, synthetic construct
  misc_feature 1..16: note = synthetic [barcode part1]
  source 1..16: mol_type = other DNA
tgattcgcctacgtcg

SEQ ID NO: 7895 - DNA, 16 bp, synthetic construct
  misc_feature 1..16: note = synthetic [barcode part1]
  source 1..16: mol_type = other DNA
caagtgttcttaccac

SEQ ID NO: 7896 - DNA, 16 bp, synthetic construct
  misc_feature 1..16: note = synthetic [barcode part1]
  source 1..16: mol_type = other DNA
cacctggagagtaacg

SEQ ID NO: 7897 - DNA, 16 bp, synthetic construct
  misc_feature 1..16: note = synthetic [barcode part1]
  source 1..16: mol_type = other DNA
atcgccttgcctagac

SEQ ID NO: 7898 - DNA, 16 bp, synthetic construct
  misc_feature 1..16: note = synthetic [barcode part1]
  source 1..16: mol_type = other DNA
cgcctattactgcgac

SEQ ID NO: 7899 - DNA, 16 bp, synthetic construct
  misc_feature 1..16: note = synthetic [barcode part1]
  source 1..16: mol_type = other DNA
ttgtggatatcctacc

SEQ ID NO: 7900 - DNA, 16 bp, synthetic construct
  misc_feature 1..16: note = synthetic [barcode part1]
  source 1..16: mol_type = other DNA
tcaacctaacacacct

SEQ ID NO: 7901 - DNA, 16 bp, synthetic construct
  misc_feature 1..16: note = synthetic [barcode part1]
  source 1..16: mol_type = other DNA
agacactgaattcgcc

SEQ ID NO: 7902 - DNA, 16 bp, synthetic construct
  misc_feature 1..16: note = synthetic [barcode part1]
  source 1..16: mol_type = other DNA
gcgcacagtactatac

SEQ ID NO: 7903 - DNA, 16 bp, synthetic construct
  misc_feature 1..16: note = synthetic [barcode part1]
  source 1..16: mol_type = other DNA
aaggacggcgattcac

SEQ ID NO: 7904 - DNA, 16 bp, synthetic construct
  misc_feature 1..16: note = synthetic [barcode part1]
  source 1..16: mol_type = other DNA
aggaatactcgcgttc

SEQ ID NO: 7905 - DNA, 16 bp, synthetic construct
  misc_feature 1..16: note = synthetic [barcode part1]
  source 1..16: mol_type = other DNA
tcaatccgacgtgcct

SEQ ID NO: 7906 - DNA, 16 bp, synthetic construct
  misc_feature 1..16: note = synthetic [barcode part1]
  source 1..16: mol_type = other DNA
cacgaaggccactaag

SEQ ID NO: 7907 - DNA, 16 bp, synthetic construct
  misc_feature 1..16: note = synthetic [barcode part1]
  source 1..16: mol_type = other DNA
tcagacttggtaaccg

SEQ ID NO: 7908 - DNA, 16 bp, synthetic construct
  misc_feature 1..16: note = synthetic [barcode part1]
  source 1..16: mol_type = other DNA
cgttctggcagatctc

SEQ ID NO: 7909 - DNA, 16 bp, synthetic construct
  misc_feature 1..16: note = synthetic [barcode part1]
  source 1..16: mol_type = other DNA
taaggtagagtgttcg

SEQ ID NO: 7910 - DNA, 16 bp, synthetic construct
  misc_feature 1..16: note = synthetic [barcode part1]
  source 1..16: mol_type = other DNA
ttatcgcgcggatcct

SEQ ID NO: 7911 - DNA, 16 bp, synthetic construct
  misc_feature 1..16: note = synthetic [barcode part1]
  source 1..16: mol_type = other DNA
acgagagtccttgtac

SEQ ID NO: 7912 - DNA, 16 bp, synthetic construct
  misc_feature 1..16: note = synthetic [barcode part1]
  source 1..16: mol_type = other DNA
ttagattcacgtcctg

SEQ ID NO: 7913 - DNA, 16 bp, synthetic construct
  misc_feature 1..16: note = synthetic [barcode part1]
  source 1..16: mol_type = other DNA
cgttaacggaaccgag

SEQ ID NO: 7914 - DNA, 16 bp, synthetic construct
  misc_feature 1..16: note = synthetic [barcode part1]
  source 1..16: mol_type = other DNA
agttgaattgccgtcg

SEQ ID NO: 7915 - DNA, 16 bp, synthetic construct
  misc_feature 1..16: note = synthetic [barcode part1]
  source 1..16: mol_type = other DNA
tcgcgaaccaccactt

SEQ ID NO: 7916 - DNA, 16 bp, synthetic construct
  misc_feature 1..16: note = synthetic [barcode part1]
  source 1..16: mol_type = other DNA
atcgagtaacggtctc

SEQ ID NO: 7917 - DNA, 16 bp, synthetic construct
  misc_feature 1..16: note = synthetic [barcode part1]
  source 1..16: mol_type = other DNA
tatcgacgattccttg

SEQ ID NO: 7918 - DNA, 16 bp, synthetic construct
  misc_feature 1..16: note = synthetic [barcode part1]
  source 1..16: mol_type = other DNA
taaccgaatcacggtc

SEQ ID NO: 7919 - DNA, 16 bp, synthetic construct
  misc_feature 1..16: note = synthetic [barcode part1]
  source 1..16: mol_type = other DNA
gcctcagaattctgag

SEQ ID NO: 7920 - DNA, 16 bp, synthetic construct
  misc_feature 1..16: note = synthetic [barcode part1]
  source 1..16: mol_type = other DNA
gtgattggtcggtatc

SEQ ID NO: 7921 - DNA, 16 bp, synthetic construct
  misc_feature 1..16: note = synthetic [barcode part1]
  source 1..16: mol_type = other DNA
gtgagagaacttaacc

SEQ ID NO: 7922 - DNA, 16 bp, synthetic construct
  misc_feature 1..16: note = synthetic [barcode part1]
  source 1..16: mol_type = other DNA
aacgtgttgactgcac

SEQ ID NO: 7923 - DNA, 16 bp, synthetic construct
  misc_feature 1..16: note = synthetic [barcode part1]
  source 1..16: mol_type = other DNA
gccttcactattagac

SEQ ID NO: 7924 - DNA, 16 bp, synthetic construct
  misc_feature 1..16: note = synthetic [barcode part1]
  source 1..16: mol_type = other DNA
tagtcgttcactatcg

SEQ ID NO: 7925 - DNA, 16 bp, synthetic construct
  misc_feature 1..16: note = synthetic [barcode part1]
  source 1..16: mol_type = other DNA
tcttgagtgaggtctg

SEQ ID NO: 7926 - DNA, 16 bp, synthetic construct
  misc_feature 1..16: note = synthetic [barcode part1]
  source 1..16: mol_type = other DNA
atcctgtcgagaggtt

SEQ ID NO: 7927 - DNA, 16 bp, synthetic construct
  misc_feature 1..16: note = synthetic [barcode part1]
  source 1..16: mol_type = other DNA
acgttactggaatccg

SEQ ID NO: 7928 - DNA, 16 bp, synthetic construct
  misc_feature 1..16: note = synthetic [barcode part1]
  source 1..16: mol_type = other DNA
ttagattctctgtgcg

SEQ ID NO: 7929 - DNA, 16 bp, synthetic construct
  misc_feature 1..16: note = synthetic [barcode part1]
  source 1..16: mol_type = other DNA
tgtggatcctgttatc

SEQ ID NO: 7930 - DNA, 16 bp, synthetic construct
  misc_feature 1..16: note = synthetic [barcode part1]
  source 1..16: mol_type = other DNA
gatccttgcgtccagt

SEQ ID NO: 7931 - DNA, 16 bp, synthetic construct
  misc_feature 1..16: note = synthetic [barcode part1]
  source 1..16: mol_type = other DNA
acttcgagtcacaacg

SEQ ID NO: 7932 - DNA, 16 bp, synthetic construct
  misc_feature 1..16: note = synthetic [barcode part1]
  source 1..16: mol_type = other DNA
attggtgcactccacc

SEQ ID NO: 7933 - DNA, 16 bp, synthetic construct
  misc_feature 1..16: note = synthetic [barcode part1]
  source 1..16: mol_type = other DNA
tgcacttcttagtggt

SEQ ID NO: 7934 - DNA, 16 bp, synthetic construct
  misc_feature 1..16: note = synthetic [barcode part1]
  source 1..16: mol_type = other DNA
gaggcaattacctcac

SEQ ID NO: 7935 - DNA, 16 bp, synthetic construct
  misc_feature 1..16: note = synthetic [barcode part1]
  source 1..16: mol_type = other DNA
tcttaggcagaatccg

SEQ ID NO: 7936 - DNA, 16 bp, synthetic construct
  misc_feature 1..16: note = synthetic [barcode part1]
  source 1..16: mol_type = other DNA
ttctctagtgattgcg

SEQ ID NO: 7937 - DNA, 16 bp, synthetic construct
  misc_feature 1..16: note = synthetic [barcode part1]
  source 1..16: mol_type = other DNA
tctgcctggattccag

SEQ ID NO: 7938 - DNA, 16 bp, synthetic construct
  misc_feature 1..16: note = synthetic [barcode part1]
  source 1..16: mol_type = other DNA
taacctcgcgcgttgt

SEQ ID NO: 7939 - DNA, 16 bp, synthetic construct
  misc_feature 1..16: note = synthetic [barcode part1]
  source 1..16: mol_type = other DNA
taggcgacctaaggtg

SEQ ID NO: 7940 - DNA, 16 bp, synthetic construct
  misc_feature 1..16: note = synthetic [barcode part1]
  source 1..16: mol_type = other DNA
ccaagtgccaccttgt

SEQ ID NO: 7941 - DNA, 16 bp, synthetic construct
  misc_feature 1..16: note = synthetic [barcode part1]
  source 1..16: mol_type = other DNA
aacgtgtctgattctc

SEQ ID NO: 7942 - DNA, 16 bp, synthetic construct
  misc_feature 1..16: note = synthetic [barcode part1]
  source 1..16: mol_type = other DNA
cctgactaaccaagac

SEQ ID NO: 7943 - DNA, 16 bp, synthetic construct
  misc_feature 1..16: note = synthetic [barcode part1]
  source 1..16: mol_type = other DNA
gtcagattcgtattcc

SEQ ID NO: 7944 - DNA, 16 bp, synthetic construct
  misc_feature 1..16: note = synthetic [barcode part1]
  source 1..16: mol_type = other DNA
acagtctcttgtgttg

SEQ ID NO: 7945 - DNA, 16 bp, synthetic construct
  misc_feature 1..16: note = synthetic [barcode part1]
  source 1..16: mol_type = other DNA
gtacctaacaagtccg

SEQ ID NO: 7946 - DNA, 16 bp, synthetic construct
  misc_feature 1..16: note = synthetic [barcode part1]
  source 1..16: mol_type = other DNA
tacctcggcaagtctc

SEQ ID NO: 7947 - DNA, 16 bp, synthetic construct
  misc_feature 1..16: note = synthetic [barcode part1]
  source 1..16: mol_type = other DNA
aacctcactacttacg

SEQ ID NO: 7948 - DNA, 16 bp, synthetic construct
  misc_feature 1..16: note = synthetic [barcode part1]
  source 1..16: mol_type = other DNA
tggtgcaaccaggagt

SEQ ID NO: 7949 - DNA, 16 bp, synthetic construct
  misc_feature 1..16: note = synthetic [barcode part1]
  source 1..16: mol_type = other DNA
actgtaacactgcggt

SEQ ID NO: 7950 - DNA, 16 bp, synthetic construct
  misc_feature 1..16: note = synthetic [barcode part1]
  source 1..16: mol_type = other DNA
gttacctaccttgcct

SEQ ID NO: 7951 - DNA, 16 bp, synthetic construct
  misc_feature 1..16: note = synthetic [barcode part1]
  source 1..16: mol_type = other DNA
aagacctagatctcgc

SEQ ID NO: 7952 - DNA, 16 bp, synthetic construct
  misc_feature 1..16: note = synthetic [barcode part1]
  source 1..16: mol_type = other DNA
gcgaaggtaacaatct

SEQ ID NO: 7953 - DNA, 16 bp, synthetic construct
  misc_feature 1..16: note = synthetic [barcode part1]
  source 1..16: mol_type = other DNA
attctcagacgcagac

SEQ ID NO: 7954 - DNA, 16 bp, synthetic construct
  misc_feature 1..16: note = synthetic [barcode part1]
  source 1..16: mol_type = other DNA
tgaacaacactacgag

SEQ ID NO: 7955 - DNA, 16 bp, synthetic construct
  misc_feature 1..16: note = synthetic [barcode part1]
  source 1..16: mol_type = other DNA
ttctgtggactcgatt

SEQ ID NO: 7956 - DNA, 16 bp, synthetic construct
  misc_feature 1..16: note = synthetic [barcode part1]
  source 1..16: mol_type = other DNA
acagtcactgacctcc

SEQ ID NO: 7957 - DNA, 16 bp, synthetic construct
  misc_feature 1..16: note = synthetic [barcode part1]
  source 1..16: mol_type = other DNA
tgccggatattgagtc

SEQ ID NO: 7958 - DNA, 16 bp, synthetic construct
  misc_feature 1..16: note = synthetic [barcode part1]
  source 1..16: mol_type = other DNA
ttggccgttaaccaag

SEQ ID NO: 7959 - DNA, 16 bp, synthetic construct
  misc_feature 1..16: note = synthetic [barcode part1]
  source 1..16: mol_type = other DNA
agtgccgtatagtgtc

SEQ ID NO: 7960 - DNA, 16 bp, synthetic construct
  misc_feature 1..16: note = synthetic [barcode part1]
  source 1..16: mol_type = other DNA
acacaactgcacaacc

SEQ ID NO: 7961 - DNA, 16 bp, synthetic construct
  misc_feature 1..16: note = synthetic [barcode part1]
  source 1..16: mol_type = other DNA
tctcgtcagacttgcg

SEQ ID NO: 7962 - DNA, 16 bp, synthetic construct
  misc_feature 1..16: note = synthetic [barcode part1]
  source 1..16: mol_type = other DNA
cacgcacactagttag

SEQ ID NO: 7963 - DNA, 16 bp, synthetic construct
  misc_feature 1..16: note = synthetic [barcode part1]
  source 1..16: mol_type = other DNA
agtctccgcgcaattc

SEQ ID NO: 7964 - DNA, 16 bp, synthetic construct
  misc_feature 1..16: note = synthetic [barcode part1]
  source 1..16: mol_type = other DNA
ataccttactaggtcc

SEQ ID NO: 7965 - DNA, 16 bp, synthetic construct
  misc_feature 1..16: note = synthetic [barcode part1]
  source 1..16: mol_type = other DNA
tggatattgacgaggt

SEQ ID NO: 7966 - DNA, 16 bp, synthetic construct
  misc_feature 1..16: note = synthetic [barcode part1]
  source 1..16: mol_type = other DNA
gttgacttggtcagtg

SEQ ID NO: 7967 - DNA, 16 bp, synthetic construct
  misc_feature 1..16: note = synthetic [barcode part1]
  source 1..16: mol_type = other DNA
gagtcgaatattggtg

SEQ ID NO: 7968 - DNA, 16 bp, synthetic construct
  misc_feature 1..16: note = synthetic [barcode part1]
  source 1..16: mol_type = other DNA
acgttacagtgagtag

SEQ ID NO: 7969 - DNA, 16 bp, synthetic construct
  misc_feature 1..16: note = synthetic [barcode part1]
  source 1..16: mol_type = other DNA
atccgaagaacttgcc

SEQ ID NO: 7970 - DNA, 16 bp, synthetic construct
  misc_feature 1..16: note = synthetic [barcode part1]
  source 1..16: mol_type = other DNA
tacggtatcgcaacac

SEQ ID NO: 7971 - DNA, 16 bp, synthetic construct
  misc_feature 1..16: note = synthetic [barcode part1]
  source 1..16: mol_type = other DNA
gcgaatccgactcctt

SEQ ID NO: 7972 - DNA, 16 bp, synthetic construct
  misc_feature 1..16: note = synthetic [barcode part1]
  source 1..16: mol_type = other DNA
ttgtaatccggccaag

SEQ ID NO: 7973 - DNA, 16 bp, synthetic construct
  misc_feature 1..16: note = synthetic [barcode part1]
  source 1..16: mol_type = other DNA
cactccgtatcgtctt

SEQ ID NO: 7974 - DNA, 16 bp, synthetic construct
  misc_feature 1..16: note = synthetic [barcode part1]
  source 1..16: mol_type = other DNA
tagtaacgaagtgcgt

SEQ ID NO: 7975 - DNA, 16 bp, synthetic construct
  misc_feature 1..16: note = synthetic [barcode part1]
  source 1..16: mol_type = other DNA
gttacagaggtaggcc

SEQ ID NO: 7976 - DNA, 16 bp, synthetic construct
  misc_feature 1..16: note = synthetic [barcode part1]
  source 1..16: mol_type = other DNA
gcagactacacaacct

SEQ ID NO: 7977 - DNA, 16 bp, synthetic construct
  misc_feature 1..16: note = synthetic [barcode part1]
  source 1..16: mol_type = other DNA
gtaattgtctctcggt

SEQ ID NO: 7978 - DNA, 16 bp, synthetic construct
  misc_feature 1..16: note = synthetic [barcode part1]
  source 1..16: mol_type = other DNA
gttcactgcgacgtct

SEQ ID NO: 7979 - DNA, 16 bp, synthetic construct
  misc_feature 1..16: note = synthetic [barcode part1]
  source 1..16: mol_type = other DNA
acctcacaagtcgaac

SEQ ID NO: 7980 - DNA, 16 bp, synthetic construct
  misc_feature 1..16: note = synthetic [barcode part1]
  source 1..16: mol_type = other DNA
tctccggattaacgtt

SEQ ID NO: 7981 - DNA, 16 bp, synthetic construct
  misc_feature 1..16: note = synthetic [barcode part1]
  source 1..16: mol_type = other DNA
gatcctatacctatcg

SEQ ID NO: 7982 - DNA, 16 bp, synthetic construct
  misc_feature 1..16: note = synthetic [barcode part1]
  source 1..16: mol_type = other DNA
tcaccacagtgaagtc

SEQ ID NO: 7983 - DNA, 16 bp, synthetic construct
  misc_feature 1..16: note = synthetic [barcode part1]
  source 1..16: mol_type = other DNA
gagagaagatcaaccg

SEQ ID NO: 7984 - DNA, 16 bp, synthetic construct
  misc_feature 1..16: note = synthetic [barcode part1]
  source 1..16: mol_type = other DNA
aagattggcgttcaag

SEQ ID NO: 7985 - DNA, 16 bp, synthetic construct
  misc_feature 1..16: note = synthetic [barcode part1]
  source 1..16: mol_type = other DNA
gtgtaatccggttctt

SEQ ID NO: 7986 - DNA, 16 bp, synthetic construct
  misc_feature 1..16: note = synthetic [barcode part1]
  source 1..16: mol_type = other DNA
ttgtagaacggagtgt

SEQ ID NO: 7987 - DNA, 16 bp, synthetic construct
  misc_feature 1..16: note = synthetic [barcode part1]
  source 1..16: mol_type = other DNA
tcgacggtaagaacgc

SEQ ID NO: 7988 - DNA, 16 bp, synthetic construct
  misc_feature 1..16: note = synthetic [barcode part1]
  source 1..16: mol_type = other DNA
aatccgaccagattgc

SEQ ID NO: 7989 - DNA, 16 bp, synthetic construct
  misc_feature 1..16: note = synthetic [barcode part1]
  source 1..16: mol_type = other DNA
tggtcttgtgttggtt

SEQ ID NO: 7990 - DNA, 16 bp, synthetic construct
  misc_feature 1..16: note = synthetic [barcode part1]
  source 1..16: mol_type = other DNA
caacttcggtccttct

SEQ ID NO: 7991 - DNA, 16 bp, synthetic construct
  misc_feature 1..16: note = synthetic [barcode part1]
  source 1..16: mol_type = other DNA
tagttggacacgtacc

SEQ ID NO: 7992 - DNA, 16 bp, synthetic construct
  misc_feature 1..16: note = synthetic [barcode part1]
  source 1..16: mol_type = other DNA
ttccttactgccgttg

SEQ ID NO: 7993 - DNA, 16 bp, synthetic construct
  misc_feature 1..16: note = synthetic [barcode part1]
  source 1..16: mol_type = other DNA
gcacagtagtcctcct

SEQ ID NO: 7994 - DNA, 16 bp, synthetic construct
  misc_feature 1..16: note = synthetic [barcode part1]
  source 1..16: mol_type = other DNA
gttcacaccaagtgtg

SEQ ID NO: 7995 - DNA, 16 bp, synthetic construct
  misc_feature 1..16: note = synthetic [barcode part1]
  source 1..16: mol_type = other DNA
gtctaacctcttgtag

SEQ ID NO: 7996 - DNA, 16 bp, synthetic construct
  misc_feature 1..16: note = synthetic [barcode part1]
  source 1..16: mol_type = other DNA
tgatcaacgaccggtt

SEQ ID NO: 7997 - DNA, 16 bp, synthetic construct
  misc_feature 1..16: note = synthetic [barcode part1]
  source 1..16: mol_type = other DNA
gacgaagtgcgttgac

SEQ ID NO: 7998 - DNA, 16 bp, synthetic construct
  misc_feature 1..16: note = synthetic [barcode part1]
  source 1..16: mol_type = other DNA
actcaccagaccttgc

SEQ ID NO: 7999 - DNA, 16 bp, synthetic construct
  misc_feature 1..16: note = synthetic [barcode part1]
  source 1..16: mol_type = other DNA
cgagatcaaccgatct

SEQ ID NO: 8000 - DNA, 16 bp, synthetic construct
  misc_feature 1..16: note = synthetic [barcode part1]
  source 1..16: mol_type = other DNA
tgaactggatccaacc

SEQ ID NO: 8001 - DNA, 16 bp, synthetic construct
  misc_feature 1..16: note = synthetic [barcode part1]
  source 1..16: mol_type = other DNA
ttgatatactggcgcg

SEQ ID NO: 8002 - DNA, 16 bp, synthetic construct
  misc_feature 1..16: note = synthetic [barcode part1]
  source 1..16: mol_type = other DNA
ccttccttgatcgact

SEQ ID NO: 8003 - DNA, 16 bp, synthetic construct
  misc_feature 1..16: note = synthetic [barcode part1]
  source 1..16: mol_type = other DNA
cgttcgtggtgttacc

SEQ ID NO: 8004 - DNA, 16 bp, synthetic construct
  misc_feature 1..16: note = synthetic [barcode part1]
  source 1..16: mol_type = other DNA
tgtgacaagacggacc

SEQ ID NO: 8005 - DNA, 16 bp, synthetic construct
  misc_feature 1..16: note = synthetic [barcode part1]
  source 1..16: mol_type = other DNA
tattggatccggtggt

SEQ ID NO: 8006 - DNA, 16 bp, synthetic construct
  misc_feature 1..16: note = synthetic [barcode part1]
  source 1..16: mol_type = other DNA
aaggagtctgcgcagt

SEQ ID NO: 8007 - DNA, 16 bp, synthetic construct
  misc_feature 1..16: note = synthetic [barcode part1]
  source 1..16: mol_type = other DNA
gttagtctgcaacacg

SEQ ID NO: 8008 - DNA, 16 bp, synthetic construct
  misc_feature 1..16: note = synthetic [barcode part1]
  source 1..16: mol_type = other DNA
ttactcagacgccgtc

SEQ ID NO: 8009 - DNA, 16 bp, synthetic construct
  misc_feature 1..16: note = synthetic [barcode part1]
  source 1..16: mol_type = other DNA
cgtctgtcgttgcaac

SEQ ID NO: 8010 - DNA, 16 bp, synthetic construct
  misc_feature 1..16: note = synthetic [barcode part1]
  source 1..16: mol_type = other DNA
tctagttcacgtggcc

SEQ ID NO: 8011 - DNA, 16 bp, synthetic construct
  misc_feature 1..16: note = synthetic [barcode part1]
  source 1..16: mol_type = other DNA
caaccaatacggtacc

SEQ ID NO: 8012 - DNA, 16 bp, synthetic construct
  misc_feature 1..16: note = synthetic [barcode part1]
  source 1..16: mol_type = other DNA
tcgaggttggacgagt

SEQ ID NO: 8013 - DNA, 16 bp, synthetic construct
  misc_feature 1..16: note = synthetic [barcode part1]
  source 1..16: mol_type = other DNA
ccagtagacgattcgt

SEQ ID NO: 8014 - DNA, 16 bp, synthetic construct
  misc_feature 1..16: note = synthetic [barcode part1]
  source 1..16: mol_type = other DNA
atctgactgacggttg

SEQ ID NO: 8015 - DNA, 16 bp, synthetic construct
  misc_feature 1..16: note = synthetic [barcode part1]
  source 1..16: mol_type = other DNA
aacgttgactgcagtc

SEQ ID NO: 8016 - DNA, 16 bp, synthetic construct
  misc_feature 1..16: note = synthetic [barcode part1]
  source 1..16: mol_type = other DNA
aatactaaccggtcgc

SEQ ID NO: 8017 - DNA, 16 bp, synthetic construct
  misc_feature 1..16: note = synthetic [barcode part1]
  source 1..16: mol_type = other DNA
cctcacgttgaaccgt

SEQ ID NO: 8018 - DNA, 16 bp, synthetic construct
  misc_feature 1..16: note = synthetic [barcode part1]
  source 1..16: mol_type = other DNA
gaactaccactcttac

SEQ ID NO: 8019 - DNA, 16 bp, synthetic construct
  misc_feature 1..16: note = synthetic [barcode part1]
  source 1..16: mol_type = other DNA
tgcaagtcggagtgac

SEQ ID NO: 8020 - DNA, 16 bp, synthetic construct
  misc_feature 1..16: note = synthetic [barcode part1]
  source 1..16: mol_type = other DNA
atcgttcgcaggtcct

SEQ ID NO: 8021 - DNA, 16 bp, synthetic construct
  misc_feature 1..16: note = synthetic [barcode part1]
  source 1..16: mol_type = other DNA
gtatcgatcgagtacc

SEQ ID NO: 8022 - DNA, 16 bp, synthetic construct
  misc_feature 1..16: note = synthetic [barcode part1]
  source 1..16: mol_type = other DNA
gttcgaagaactcgtc

SEQ ID NO: 8023 - DNA, 16 bp, synthetic construct
  misc_feature 1..16: note = synthetic [barcode part1]
  source 1..16: mol_type = other DNA
gccttctaccagtgtg

SEQ ID NO: 8024 - DNA, 16 bp, synthetic construct
  misc_feature 1..16: note = synthetic [barcode part1]
  source 1..16: mol_type = other DNA
ttaggtcttcctgtag

SEQ ID NO: 8025 - DNA, 16 bp, synthetic construct
  misc_feature 1..16: note = synthetic [barcode part1]
  source 1..16: mol_type = other DNA
tctaacgtacttccag

SEQ ID NO: 8026 - DNA, 16 bp, synthetic construct
  misc_feature 1..16: note = synthetic [barcode part1]
  source 1..16: mol_type = other DNA
tgccgacctaaggaag

SEQ ID NO: 8027 - DNA, 16 bp, synthetic construct
  misc_feature 1..16: note = synthetic [barcode part1]
  source 1..16: mol_type = other DNA
caactacggtggtgag

SEQ ID NO: 8028 - DNA, 16 bp, synthetic construct
  misc_feature 1..16: note = synthetic [barcode part1]
  source 1..16: mol_type = other DNA
atccagaagacaacac

SEQ ID NO: 8029 - DNA, 16 bp, synthetic construct
  misc_feature 1..16: note = synthetic [barcode part1]
  source 1..16: mol_type = other DNA
ttgtaggattcttcgc

SEQ ID NO: 8030 - DNA, 16 bp, synthetic construct
  misc_feature 1..16: note = synthetic [barcode part1]
  source 1..16: mol_type = other DNA
tgtaacaggtgccact

SEQ ID NO: 8031 - DNA, 16 bp, synthetic construct
  misc_feature 1..16: note = synthetic [barcode part1]
  source 1..16: mol_type = other DNA
tagtgcagatccacac

SEQ ID NO: 8032 - DNA, 16 bp, synthetic construct
  misc_feature 1..16: note = synthetic [barcode part1]
  source 1..16: mol_type = other DNA
caccagacagagacgt

SEQ ID NO: 8033 - DNA, 16 bp, synthetic construct
  misc_feature 1..16: note = synthetic [barcode part1]
  source 1..16: mol_type = other DNA
aaggacgaacaacttc

SEQ ID NO: 8034 - DNA, 16 bp, synthetic construct
  misc_feature 1..16: note = synthetic [barcode part1]
  source 1..16: mol_type = other DNA
gacttgaagaggtatc

SEQ ID NO: 8035 - DNA, 16 bp, synthetic construct
  misc_feature 1..16: note = synthetic [barcode part1]
  source 1..16: mol_type = other DNA
gcacaacgtgttgact

SEQ ID NO: 8036 - DNA, 16 bp, synthetic construct
  misc_feature 1..16: note = synthetic [barcode part1]
  source 1..16: mol_type = other DNA
gcctattagtaccgtt

SEQ ID NO: 8037 - DNA, 16 bp, synthetic construct
  misc_feature 1..16: note = synthetic [barcode part1]
  source 1..16: mol_type = other DNA
attgacgcaggtctac

SEQ ID NO: 8038 - DNA, 16 bp, synthetic construct
  misc_feature 1..16: note = synthetic [barcode part1]
  source 1..16: mol_type = other DNA
cacttgagattgtgcg

SEQ ID NO: 8039 - DNA, 16 bp, synthetic construct
  misc_feature 1..16: note = synthetic [barcode part1]
  source 1..16: mol_type = other DNA
ccttgtgattagatcc

SEQ ID NO: 8040 - DNA, 16 bp, synthetic construct
  misc_feature 1..16: note = synthetic [barcode part1]
  source 1..16: mol_type = other DNA
gtcaacaaggccgaac

SEQ ID NO: 8041 - DNA, 16 bp, synthetic construct
  misc_feature 1..16: note = synthetic [barcode part1]
  source 1..16: mol_type = other DNA
acgtaacgtcgatacc

SEQ ID NO: 8042 - DNA, 16 bp, synthetic construct
  misc_feature 1..16: note = synthetic [barcode part1]
  source 1..16: mol_type = other DNA
attccactggattcgt

SEQ ID NO: 8043 - DNA, 16 bp, synthetic construct
  misc_feature 1..16: note = synthetic [barcode part1]
  source 1..16: mol_type = other DNA
aacgatacctaccacg

SEQ ID NO: 8044 - DNA, 16 bp, synthetic construct
  misc_feature 1..16: note = synthetic [barcode part1]
  source 1..16: mol_type = other DNA
gagactgcacagatcg

SEQ ID NO: 8045 - DNA, 16 bp, synthetic construct
  misc_feature 1..16: note = synthetic [barcode part1]
  source 1..16: mol_type = other DNA
tagtagatacctggag

SEQ ID NO: 8046 - DNA, 16 bp, synthetic construct
  misc_feature 1..16: note = synthetic [barcode part1]
  source 1..16: mol_type = other DNA
aacaacacgagtactg

SEQ ID NO: 8047 - DNA, 16 bp, synthetic construct
  misc_feature 1..16: note = synthetic [barcode part1]
  source 1..16: mol_type = other DNA
gagagacacttagatc

SEQ ID NO: 8048 - DNA, 16 bp, synthetic construct
  misc_feature 1..16: note = synthetic [barcode part1]
  source 1..16: mol_type = other DNA
tatacggcgttctatc

SEQ ID NO: 8049 - DNA, 16 bp, synthetic construct
  misc_feature 1..16: note = synthetic [barcode part1]
  source 1..16: mol_type = other DNA
ttcacgcaaggatacc

SEQ ID NO: 8050 - DNA, 16 bp, synthetic construct
  misc_feature 1..16: note = synthetic [barcode part1]
  source 1..16: mol_type = other DNA
caaccgaccttaaggt

SEQ ID NO: 8051 - DNA, 16 bp, synthetic construct
  misc_feature 1..16: note = synthetic [barcode part1]
  source 1..16: mol_type = other DNA
ttcttcctgataccgc

SEQ ID NO: 8052 - DNA, 16 bp, synthetic construct
  misc_feature 1..16: note = synthetic [barcode part1]
  source 1..16: mol_type = other DNA
atacaaccggcacgtt

SEQ ID NO: 8053 - DNA, 16 bp, synthetic construct
  misc_feature 1..16: note = synthetic [barcode part1]
  source 1..16: mol_type = other DNA
tccaatcgtgccaatt

SEQ ID NO: 8054 - DNA, 16 bp, synthetic construct
  misc_feature 1..16: note = synthetic [barcode part1]
  source 1..16: mol_type = other DNA
ttaggattggacaggt

SEQ ID NO: 8055 - DNA, 16 bp, synthetic construct
  misc_feature 1..16: note = synthetic [barcode part1]
  source 1..16: mol_type = other DNA
tggaccacagttcagt

SEQ ID NO: 8056 - DNA, 16 bp, synthetic construct
  misc_feature 1..16: note = synthetic [barcode part1]
  source 1..16: mol_type = other DNA
tctaatctgcgtaacc

SEQ ID NO: 8057 - DNA, 16 bp, synthetic construct
  misc_feature 1..16: note = synthetic [barcode part1]
  source 1..16: mol_type = other DNA
gagaacagttcagtgt

SEQ ID NO: 8058 - DNA, 16 bp, synthetic construct
  misc_feature 1..16: note = synthetic [barcode part1]
  source 1..16: mol_type = other DNA
agtatcgttctgaggc

SEQ ID NO: 8059 - DNA, 16 bp, synthetic construct
  misc_feature 1..16: note = synthetic [barcode part1]
  source 1..16: mol_type = other DNA
ttggtgaattcctacc

SEQ ID NO: 8060 - DNA, 16 bp, synthetic construct
  misc_feature 1..16: note = synthetic [barcode part1]
  source 1..16: mol_type = other DNA
aacgaggaaccacgtc

SEQ ID NO: 8061 - DNA, 16 bp, synthetic construct
  misc_feature 1..16: note = synthetic [barcode part1]
  source 1..16: mol_type = other DNA
atagagactggcaatc

SEQ ID NO: 8062 - DNA, 16 bp, synthetic construct
  misc_feature 1..16: note = synthetic [barcode part1]
  source 1..16: mol_type = other DNA
gatcggtcacgatact

SEQ ID NO: 8063 - DNA, 16 bp, synthetic construct
  misc_feature 1..16: note = synthetic [barcode part1]
  source 1..16: mol_type = other DNA
tcgtaaggttcggatc

SEQ ID NO: 8064 - DNA, 16 bp, synthetic construct
  misc_feature 1..16: note = synthetic [barcode part1]
  source 1..16: mol_type = other DNA
aacaaccgactactgc

SEQ ID NO: 8065 - DNA, 16 bp, synthetic construct
  misc_feature 1..16: note = synthetic [barcode part1]
  source 1..16: mol_type = other DNA
gccgttctcgtaggtt

SEQ ID NO: 8066 - DNA, 16 bp, synthetic construct
  misc_feature 1..16: note = synthetic [barcode part1]
  source 1..16: mol_type = other DNA
ttcagtccggcgtgtt

SEQ ID NO: 8067 - DNA, 16 bp, synthetic construct
  misc_feature 1..16: note = synthetic [barcode part1]
  source 1..16: mol_type = other DNA
agacaatccaggcacg

SEQ ID NO: 8068 - DNA, 16 bp, synthetic construct
  misc_feature 1..16: note = synthetic [barcode part1]
  source 1..16: mol_type = other DNA
tgttccaggcacctgt

SEQ ID NO: 8069 - DNA, 16 bp, synthetic construct
  misc_feature 1..16: note = synthetic [barcode part1]
  source 1..16: mol_type = other DNA
acgtcaagttaaggac

SEQ ID NO: 8070 - DNA, 16 bp, synthetic construct
  misc_feature 1..16: note = synthetic [barcode part1]
  source 1..16: mol_type = other DNA
gtagaaggaaggcact

SEQ ID NO: 8071 - DNA, 16 bp, synthetic construct
  misc_feature 1..16: note = synthetic [barcode part1]
  source 1..16: mol_type = other DNA
ttactcttacaggtcg

SEQ ID NO: 8072 - DNA, 16 bp, synthetic construct
  misc_feature 1..16: note = synthetic [barcode part1]
  source 1..16: mol_type = other DNA
ttgtgtgcaacacacg

SEQ ID NO: 8073 - DNA, 16 bp, synthetic construct
  misc_feature 1..16: note = synthetic [barcode part1]
  source 1..16: mol_type = other DNA
agtgcgtattggcgtt

SEQ ID NO: 8074 - DNA, 16 bp, synthetic construct
  misc_feature 1..16: note = synthetic [barcode part1]
  source 1..16: mol_type = other DNA
gcgtgtaatcacgact

SEQ ID NO: 8075 - DNA, 16 bp, synthetic construct
  misc_feature 1..16: note = synthetic [barcode part1]
  source 1..16: mol_type = other DNA
ataggcgcaccgtaag

SEQ ID NO: 8076 - DNA, 16 bp, synthetic construct
  misc_feature 1..16: note = synthetic [barcode part1]
  source 1..16: mol_type = other DNA
attccttggtctctcg

SEQ ID NO: 8077 - DNA, 16 bp, synthetic construct
  misc_feature 1..16: note = synthetic [barcode part1]
  source 1..16: mol_type = other DNA
tgtacaccacagtacg

SEQ ID NO: 8078 - DNA, 16 bp, synthetic construct
  misc_feature 1..16: note = synthetic [barcode part1]
  source 1..16: mol_type = other DNA
aagaacgccgtatcct

SEQ ID NO: 8079 - DNA, 16 bp, synthetic construct
  misc_feature 1..16: note = synthetic [barcode part1]
  source 1..16: mol_type = other DNA
gcgttcgaacagagtg

SEQ ID NO: 8080 - DNA, 16 bp, synthetic construct
  misc_feature 1..16: note = synthetic [barcode part1]
  source 1..16: mol_type = other DNA
gttcggagtggattct

SEQ ID NO: 8081 - DNA, 16 bp, synthetic construct
  misc_feature 1..16: note = synthetic [barcode part1]
  source 1..16: mol_type = other DNA
gcgagtacttgaggtg

SEQ ID NO: 8082 - DNA, 16 bp, synthetic construct
  misc_feature 1..16: note = synthetic [barcode part1]
  source 1..16: mol_type = other DNA
cctacctcgagacttg

SEQ ID NO: 8083 - DNA, 16 bp, synthetic construct
  misc_feature 1..16: note = synthetic [barcode part1]
  source 1..16: mol_type = other DNA
gtccgtctgagtaagt

SEQ ID NO: 8084 - DNA, 16 bp, synthetic construct
  misc_feature 1..16: note = synthetic [barcode part1]
  source 1..16: mol_type = other DNA
ttgttcttgtgaaccg

SEQ ID NO: 8085 - DNA, 16 bp, synthetic construct
  misc_feature 1..16: note = synthetic [barcode part1]
  source 1..16: mol_type = other DNA
tgtcaccggtatattc

SEQ ID NO: 8086 - DNA, 16 bp, synthetic construct
  misc_feature 1..16: note = synthetic [barcode part1]
  source 1..16: mol_type = other DNA
aggattctctatccac

SEQ ID NO: 8087 - DNA, 16 bp, synthetic construct
  misc_feature 1..16: note = synthetic [barcode part1]
  source 1..16: mol_type = other DNA
gactcaatctccacgc

SEQ ID NO: 8088 - DNA, 16 bp, synthetic construct
  misc_feature 1..16: note = synthetic [barcode part1]
  source 1..16: mol_type = other DNA
gtgagagtccttacac

SEQ ID NO: 8089 - DNA, 16 bp, synthetic construct
  misc_feature 1..16: note = synthetic [barcode part1]
  source 1..16: mol_type = other DNA
ttcgagattagtcggc

SEQ ID NO: 8090 - DNA, 16 bp, synthetic construct
  misc_feature 1..16: note = synthetic [barcode part1]
  source 1..16: mol_type = other DNA
aactcttcggcaagac

SEQ ID NO: 8091 - DNA, 16 bp, synthetic construct
  misc_feature 1..16: note = synthetic [barcode part1]
  source 1..16: mol_type = other DNA
tggtcgatcgattggt

SEQ ID NO: 8092 - DNA, 16 bp, synthetic construct
  misc_feature 1..16: note = synthetic [barcode part1]
  source 1..16: mol_type = other DNA
cgagtcgttgaatcac

SEQ ID NO: 8093 - DNA, 16 bp, synthetic construct
  misc_feature 1..16: note = synthetic [barcode part1]
  source 1..16: mol_type = other DNA
aggtcttccaatcgag

SEQ ID NO: 8094 - DNA, 16 bp, synthetic construct
  misc_feature 1..16: note = synthetic [barcode part1]
  source 1..16: mol_type = other DNA
gaagtatcgcaggaag

SEQ ID NO: 8095 - DNA, 16 bp, synthetic construct
  misc_feature 1..16: note = synthetic [barcode part1]
  source 1..16: mol_type = other DNA
aacactcgtggaatag

SEQ ID NO: 8096 - DNA, 16 bp, synthetic construct
  misc_feature 1..16: note = synthetic [barcode part1]
  source 1..16: mol_type = other DNA
ttggaggtcttaccag

SEQ ID NO: 8097 - DNA, 16 bp, synthetic construct
  misc_feature 1..16: note = synthetic [barcode part1]
  source 1..16: mol_type = other DNA
cacgttagtatcggtg

SEQ ID NO: 8098 - DNA, 16 bp, synthetic construct
  misc_feature 1..16: note = synthetic [barcode part1]
  source 1..16: mol_type = other DNA
tgtattccacctccac

SEQ ID NO: 8099 - DNA, 16 bp, synthetic construct
  misc_feature 1..16: note = synthetic [barcode part1]
  source 1..16: mol_type = other DNA
aacaaccttggcaacc

SEQ ID NO: 8100 - DNA, 16 bp, synthetic construct
  misc_feature 1..16: note = synthetic [barcode part1]
  source 1..16: mol_type = other DNA
acgaatcagagtgatc

SEQ ID NO: 8101 - DNA, 16 bp, synthetic construct
  misc_feature 1..16: note = synthetic [barcode part1]
  source 1..16: mol_type = other DNA
tggaccgtcaatagtc

SEQ ID NO: 8102 - DNA, 16 bp, synthetic construct
  misc_feature 1..16: note = synthetic [barcode part1]
  source 1..16: mol_type = other DNA
tctctccacgtacact

SEQ ID NO: 8103 - DNA, 16 bp, synthetic construct
  misc_feature 1..16: note = synthetic [barcode part1]
  source 1..16: mol_type = other DNA
ttgtgacacgtcacag

SEQ ID NO: 8104 - DNA, 16 bp, synthetic construct
  misc_feature 1..16: note = synthetic [barcode part1]
  source 1..16: mol_type = other DNA
gatatccaacagtgag

SEQ ID NO: 8105 - DNA, 16 bp, synthetic construct
  misc_feature 1..16: note = synthetic [barcode part1]
  source 1..16: mol_type = other DNA
gaacagatccggaatt

SEQ ID NO: 8106 - DNA, 16 bp, synthetic construct
  misc_feature 1..16: note = synthetic [barcode part1]
  source 1..16: mol_type = other DNA
gagtatcgaacctgtc

SEQ ID NO: 8107 - DNA, 16 bp, synthetic construct
  misc_feature 1..16: note = synthetic [barcode part1]
  source 1..16: mol_type = other DNA
tgaccgaagagttcct

SEQ ID NO: 8108 - DNA, 16 bp, synthetic construct
  misc_feature 1..16: note = synthetic [barcode part1]
  source 1..16: mol_type = other DNA
gttacgttgtgagtcg

SEQ ID NO: 8109 - DNA, 16 bp, synthetic construct
  misc_feature 1..16: note = synthetic [barcode part1]
  source 1..16: mol_type = other DNA
cgatcaagacctcaac

SEQ ID NO: 8110 - DNA, 16 bp, synthetic construct
  misc_feature 1..16: note = synthetic [barcode part1]
  source 1..16: mol_type = other DNA
agagttatcaagtgcg

SEQ ID NO: 8111 - DNA, 16 bp, synthetic construct
  misc_feature 1..16: note = synthetic [barcode part1]
  source 1..16: mol_type = other DNA
tcggttcaagtattcc

SEQ ID NO: 8112 - DNA, 16 bp, synthetic construct
  misc_feature 1..16: note = synthetic [barcode part1]
  source 1..16: mol_type = other DNA
caagacctctcagagt

SEQ ID NO: 8113 - DNA, 16 bp, synthetic construct
  misc_feature 1..16: note = synthetic [barcode part1]
  source 1..16: mol_type = other DNA
ataccgttatccactg

SEQ ID NO: 8114 - DNA, 16 bp, synthetic construct
  misc_feature 1..16: note = synthetic [barcode part1]
  source 1..16: mol_type = other DNA
taagtccttgtggacg

SEQ ID NO: 8115 - DNA, 16 bp, synthetic construct
  misc_feature 1..16: note = synthetic [barcode part1]
  source 1..16: mol_type = other DNA
tgcaatctaacctctg

SEQ ID NO: 8116 - DNA, 16 bp, synthetic construct
  misc_feature 1..16: note = synthetic [barcode part1]
  source 1..16: mol_type = other DNA
ttggttggtcacagtg

SEQ ID NO: 8117 - DNA, 16 bp, synthetic construct
  misc_feature 1..16: note = synthetic [barcode part1]
  source 1..16: mol_type = other DNA
cgccaagtaggttatc

SEQ ID NO: 8118 - DNA, 16 bp, synthetic construct
  misc_feature 1..16: note = synthetic [barcode part1]
  source 1..16: mol_type = other DNA
gatacgtctccaattc

SEQ ID NO: 8119 - DNA, 16 bp, synthetic construct
  misc_feature 1..16: note = synthetic [barcode part1]
  source 1..16: mol_type = other DNA
tagtagtgtcgccagt

SEQ ID NO: 8120 - DNA, 16 bp, synthetic construct
  misc_feature 1..16: note = synthetic [barcode part1]
  source 1..16: mol_type = other DNA
cgtagagttagtggcg

SEQ ID NO: 8121 - DNA, 16 bp, synthetic construct
  misc_feature 1..16: note = synthetic [barcode part1]
  source 1..16: mol_type = other DNA
tcagacacaagacggc

SEQ ID NO: 8122 - DNA, 16 bp, synthetic construct
  misc_feature 1..16: note = synthetic [barcode part1]
  source 1..16: mol_type = other DNA
attattgccttgtgcg

SEQ ID NO: 8123 - DNA, 16 bp, synthetic construct
  misc_feature 1..16: note = synthetic [barcode part1]
  source 1..16: mol_type = other DNA
agtggagaattgcgcc

SEQ ID NO: 8124 - DNA, 16 bp, synthetic construct
  misc_feature 1..16: note = synthetic [barcode part1]
  source 1..16: mol_type = other DNA
cggttcctcaattcct

SEQ ID NO: 8125 - DNA, 16 bp, synthetic construct
  misc_feature 1..16: note = synthetic [barcode part1]
  source 1..16: mol_type = other DNA
aatagtcgtcaccggt

SEQ ID NO: 8126 - DNA, 16 bp, synthetic construct
  misc_feature 1..16: note = synthetic [barcode part1]
  source 1..16: mol_type = other DNA
acagtactcgagactc

SEQ ID NO: 8127 - DNA, 16 bp, synthetic construct
  misc_feature 1..16: note = synthetic [barcode part1]
  source 1..16: mol_type = other DNA
gtacgttcgagaggtg

SEQ ID NO: 8128 - DNA, 16 bp, synthetic construct
  misc_feature 1..16: note = synthetic [barcode part1]
  source 1..16: mol_type = other DNA
gtgtcaggactgtgtt

SEQ ID NO: 8129 - DNA, 16 bp, synthetic construct
  misc_feature 1..16: note = synthetic [barcode part1]
  source 1..16: mol_type = other DNA
tggcgtcctattcacg

SEQ ID NO: 8130 - DNA, 16 bp, synthetic construct
  misc_feature 1..16: note = synthetic [barcode part1]
  source 1..16: mol_type = other DNA
ttctgataatcgcacc

SEQ ID NO: 8131 - DNA, 16 bp, synthetic construct
  misc_feature 1..16: note = synthetic [barcode part1]
  source 1..16: mol_type = other DNA
aatctccgcgcagtct

SEQ ID NO: 8132 - DNA, 16 bp, synthetic construct
  misc_feature 1..16: note = synthetic [barcode part1]
  source 1..16: mol_type = other DNA
gttagtcaccacagtg

SEQ ID NO: 8133 - DNA, 16 bp, synthetic construct
  misc_feature 1..16: note = synthetic [barcode part1]
  source 1..16: mol_type = other DNA
gaatagtgaccgcacg

SEQ ID NO: 8134 - DNA, 16 bp, synthetic construct
  misc_feature 1..16: note = synthetic [barcode part1]
  source 1..16: mol_type = other DNA
agtcagttcgagatcc

SEQ ID NO: 8135 - DNA, 16 bp, synthetic construct
  misc_feature 1..16: note = synthetic [barcode part1]
  source 1..16: mol_type = other DNA
gtgacgattactgtcg

SEQ ID NO: 8136 - DNA, 16 bp, synthetic construct
  misc_feature 1..16: note = synthetic [barcode part1]
  source 1..16: mol_type = other DNA
actgcagacaacacct

SEQ ID NO: 8137 - DNA, 16 bp, synthetic construct
  misc_feature 1..16: note = synthetic [barcode part1]
  source 1..16: mol_type = other DNA
ttctccgaatataccg

SEQ ID NO: 8138 - DNA, 16 bp, synthetic construct
  misc_feature 1..16: note = synthetic [barcode part1]
  source 1..16: mol_type = other DNA
actgcaacgtcacaac

SEQ ID NO: 8139 - DNA, 16 bp, synthetic construct
  misc_feature 1..16: note = synthetic [barcode part1]
  source 1..16: mol_type = other DNA
tgtcctacacttaggt

SEQ ID NO: 8140 - DNA, 16 bp, synthetic construct
  misc_feature 1..16: note = synthetic [barcode part1]
  source 1..16: mol_type = other DNA
gaaggaacgacactag

SEQ ID NO: 8141 - DNA, 16 bp, synthetic construct
  misc_feature 1..16: note = synthetic [barcode part1]
  source 1..16: mol_type = other DNA
ttctgtggtacggagt

SEQ ID NO: 8142 - DNA, 16 bp, synthetic construct
  misc_feature 1..16: note = synthetic [barcode part1]
  source 1..16: mol_type = other DNA
aattcaacttccgtgc

SEQ ID NO: 8143 - DNA, 16 bp, synthetic construct
  misc_feature 1..16: note = synthetic [barcode part1]
  source 1..16: mol_type = other DNA
tattgtccactgacac

SEQ ID NO: 8144 - DNA, 16 bp, synthetic construct
  misc_feature 1..16: note = synthetic [barcode part1]
  source 1..16: mol_type = other DNA
gttggcagacgacagt

SEQ ID NO: 8145 - DNA, 16 bp, synthetic construct
  misc_feature 1..16: note = synthetic [barcode part1]
  source 1..16: mol_type = other DNA
ttccgtcacgaatccg

SEQ ID NO: 8146 - DNA, 16 bp, synthetic construct
  misc_feature 1..16: note = synthetic [barcode part1]
  source 1..16: mol_type = other DNA
gtcttactccggtctt

SEQ ID NO: 8147 - DNA, 16 bp, synthetic construct
  misc_feature 1..16: note = synthetic [barcode part1]
  source 1..16: mol_type = other DNA
ccgttgtattccactc

SEQ ID NO: 8148 - DNA, 16 bp, synthetic construct
  misc_feature 1..16: note = synthetic [barcode part1]
  source 1..16: mol_type = other DNA
tctattcgcggcactg

SEQ ID NO: 8149 - DNA, 16 bp, synthetic construct
  misc_feature 1..16: note = synthetic [barcode part1]
  source 1..16: mol_type = other DNA
gagactgactgagaag

SEQ ID NO: 8150 - DNA, 16 bp, synthetic construct
  misc_feature 1..16: note = synthetic [barcode part1]
  source 1..16: mol_type = other DNA
tgtctcacgagtactt

SEQ ID NO: 8151 - DNA, 16 bp, synthetic construct
  misc_feature 1..16: note = synthetic [barcode part1]
  source 1..16: mol_type = other DNA
tggtacggtacttggt

SEQ ID NO: 8152 - DNA, 16 bp, synthetic construct
  misc_feature 1..16: note = synthetic [barcode part1]
  source 1..16: mol_type = other DNA
atcctgtctacgtagt

SEQ ID NO: 8153 - DNA, 16 bp, synthetic construct
  misc_feature 1..16: note = synthetic [barcode part1]
  source 1..16: mol_type = other DNA
gtagtaagttcagacg

SEQ ID NO: 8154 - DNA, 16 bp, synthetic construct
  misc_feature 1..16: note = synthetic [barcode part1]
  source 1..16: mol_type = other DNA
acagacttaatcctcc

SEQ ID NO: 8155 - DNA, 16 bp, synthetic construct
  misc_feature 1..16: note = synthetic [barcode part1]
  source 1..16: mol_type = other DNA
aggtcgtcctatatct

SEQ ID NO: 8156 - DNA, 16 bp, synthetic construct
  misc_feature 1..16: note = synthetic [barcode part1]
  source 1..16: mol_type = other DNA
cgagttggaggacgtt

SEQ ID NO: 8157 - DNA, 16 bp, synthetic construct
  misc_feature 1..16: note = synthetic [barcode part1]
  source 1..16: mol_type = other DNA
tccaggagagagaagt

SEQ ID NO: 8158 - DNA, 16 bp, synthetic construct
  misc_feature 1..16: note = synthetic [barcode part1]
  source 1..16: mol_type = other DNA
agttacgtacgtggtc

SEQ ID NO: 8159 - DNA, 16 bp, synthetic construct
  misc_feature 1..16: note = synthetic [barcode part1]
  source 1..16: mol_type = other DNA
acaggaccgttattcg

SEQ ID NO: 8160 - DNA, 16 bp, synthetic construct
  misc_feature 1..16: note = synthetic [barcode part1]
  source 1..16: mol_type = other DNA
aggtggtgtgtaattg

SEQ ID NO: 8161 - DNA, 16 bp, synthetic construct
  misc_feature 1..16: note = synthetic [barcode part1]
  source 1..16: mol_type = other DNA
gcggttatcctgacct

SEQ ID NO: 8162 - DNA, 16 bp, synthetic construct
  misc_feature 1..16: note = synthetic [barcode part1]
  source 1..16: mol_type = other DNA
taaccacttgtgcgag

SEQ ID NO: 8163 - DNA, 16 bp, synthetic construct
  misc_feature 1..16: note = synthetic [barcode part1]
  source 1..16: mol_type = other DNA
tcttgcctacttagag

SEQ ID NO: 8164 - DNA, 16 bp, synthetic construct
  misc_feature 1..16: note = synthetic [barcode part1]
  source 1..16: mol_type = other DNA
acttcgacgtacgtag

SEQ ID NO: 8165 - DNA, 16 bp, synthetic construct
  misc_feature 1..16: note = synthetic [barcode part1]
  source 1..16: mol_type = other DNA
actcacaggttcacag

SEQ ID NO: 8166 - DNA, 16 bp, synthetic construct
  misc_feature 1..16: note = synthetic [barcode part1]
  source 1..16: mol_type = other DNA
cgaactacaattcggc

SEQ ID NO: 8167 - DNA, 16 bp, synthetic construct
  misc_feature 1..16: note = synthetic [barcode part1]
  source 1..16: mol_type = other DNA
gtacttcgtgcgaagt

SEQ ID NO: 8168 - DNA, 16 bp, synthetic construct
  misc_feature 1..16: note = synthetic [barcode part1]
  source 1..16: mol_type = other DNA
gcgtcttatcggactc

SEQ ID NO: 8169 - DNA, 16 bp, synthetic construct
  misc_feature 1..16: note = synthetic [barcode part1]
  source 1..16: mol_type = other DNA
ttagtctacggagtgc

SEQ ID NO: 8170 - DNA, 16 bp, synthetic construct
  misc_feature 1..16: note = synthetic [barcode part1]
  source 1..16: mol_type = other DNA
aattgttcaccggacg

SEQ ID NO: 8171 - DNA, 16 bp, synthetic construct
  misc_feature 1..16: note = synthetic [barcode part1]
  source 1..16: mol_type = other DNA
gcgtgattcggttcct

SEQ ID NO: 8172 - DNA, 16 bp, synthetic construct
  misc_feature 1..16: note = synthetic [barcode part1]
  source 1..16: mol_type = other DNA
ccactacagatctatc

SEQ ID NO: 8173 - DNA, 16 bp, synthetic construct
  misc_feature 1..16: note = synthetic [barcode part1]
  source 1..16: mol_type = other DNA
atcgaacacagaagtc

SEQ ID NO: 8174 - DNA, 16 bp, synthetic construct
  misc_feature 1..16: note = synthetic [barcode part1]
  source 1..16: mol_type = other DNA
acgtgatagagaatcc

SEQ ID NO: 8175 - DNA, 16 bp, synthetic construct
  misc_feature 1..16: note = synthetic [barcode part1]
  source 1..16: mol_type = other DNA
tctgactgtcacgcgt

SEQ ID NO: 8176 - DNA, 16 bp, synthetic construct
  misc_feature 1..16: note = synthetic [barcode part1]
  source 1..16: mol_type = other DNA
gtaggaatcggcggtt

SEQ ID NO: 8177 - DNA, 16 bp, synthetic construct
  misc_feature 1..16: note = synthetic [barcode part1]
  source 1..16: mol_type = other DNA
ttgagtacggaacagt

SEQ ID NO: 8178 - DNA, 16 bp, synthetic construct
  misc_feature 1..16: note = synthetic [barcode part1]
  source 1..16: mol_type = other DNA
cagagagaactctctc

SEQ ID NO: 8179 - DNA, 16 bp, synthetic construct
  misc_feature 1..16: note = synthetic [barcode part1]
  source 1..16: mol_type = other DNA
tcgcctaggacttcac

SEQ ID NO: 8180 - DNA, 16 bp, synthetic construct
  misc_feature 1..16: note = synthetic [barcode part1]
  source 1..16: mol_type = other DNA
accggacactcttgtc

SEQ ID NO: 8181 - DNA, 16 bp, synthetic construct
  misc_feature 1..16: note = synthetic [barcode part1]
  source 1..16: mol_type = other DNA
ccaccacgtaggttct

SEQ ID NO: 8182 - DNA, 16 bp, synthetic construct
  misc_feature 1..16: note = synthetic [barcode part1]
  source 1..16: mol_type = other DNA
taggaggcagtacacc

SEQ ID NO: 8183 - DNA, 16 bp, synthetic construct
  misc_feature 1..16: note = synthetic [barcode part1]
  source 1..16: mol_type = other DNA
ttcaggtcagaggacg

SEQ ID NO: 8184 - DNA, 16 bp, synthetic construct
  misc_feature 1..16: note = synthetic [barcode part1]
  source 1..16: mol_type = other DNA
caataccgttctggag

SEQ ID NO: 8185 - DNA, 16 bp, synthetic construct
  misc_feature 1..16: note = synthetic [barcode part1]
  source 1..16: mol_type = other DNA
cgaagtcacacgtgtt

SEQ ID NO: 8186 - DNA, 16 bp, synthetic construct
  misc_feature 1..16: note = synthetic [barcode part1]
  source 1..16: mol_type = other DNA
ccttacgaccaccaac

SEQ ID NO: 8187 - DNA, 16 bp, synthetic construct
  misc_feature 1..16: note = synthetic [barcode part1]
  source 1..16: mol_type = other DNA
gcctgtgttcttgacg

SEQ ID NO: 8188 - DNA, 16 bp, synthetic construct
  misc_feature 1..16: note = synthetic [barcode part1]
  source 1..16: mol_type = other DNA
gaagatatcgttaggc

SEQ ID NO: 8189 - DNA, 16 bp, synthetic construct
  misc_feature 1..16: note = synthetic [barcode part1]
  source 1..16: mol_type = other DNA
gagacacgacttgacg

SEQ ID NO: 8190 - DNA, 16 bp, synthetic construct
  misc_feature 1..16: note = synthetic [barcode part1]
  source 1..16: mol_type = other DNA
tccgagaactacgact

SEQ ID NO: 8191 - DNA, 16 bp, synthetic construct
  misc_feature 1..16: note = synthetic [barcode part1]
  source 1..16: mol_type = other DNA
cctactccacttactg

SEQ ID NO: 8192 - DNA, 16 bp, synthetic construct
  misc_feature 1..16: note = synthetic [barcode part1]
  source 1..16: mol_type = other DNA
tgttcaggactgtacg

SEQ ID NO: 8193 - DNA, 16 bp, synthetic construct
  misc_feature 1..16: note = synthetic [barcode part1]
  source 1..16: mol_type = other DNA
cagaactccagaactc

SEQ ID NO: 8194 - DNA, 16 bp, synthetic construct
  misc_feature 1..16: note = synthetic [barcode part1]
  source 1..16: mol_type = other DNA
cgattcttggtacgtt

SEQ ID NO: 8195 - DNA, 16 bp, synthetic construct
  misc_feature 1..16: note = synthetic [barcode part1]
  source 1..16: mol_type = other DNA
gcaagttccagtgtac

SEQ ID NO: 8196 - DNA, 16 bp, synthetic construct
  misc_feature 1..16: note = synthetic [barcode part1]
  source 1..16: mol_type = other DNA
ccacctaagtaagtgc

SEQ ID NO: 8197 - DNA, 16 bp, synthetic construct
  misc_feature 1..16: note = synthetic [barcode part1]
  source 1..16: mol_type = other DNA
gaacgcctaaggcaac

SEQ ID NO: 8198 - DNA, 16 bp, synthetic construct
  misc_feature 1..16: note = synthetic [barcode part1]
  source 1..16: mol_type = other DNA
ttctatcaggtccgcg

SEQ ID NO: 8199 - DNA, 16 bp, synthetic construct
  misc_feature 1..16: note = synthetic [barcode part1]
  source 1..16: mol_type = other DNA
tcgcgttacaactcgc

SEQ ID NO: 8200 - DNA, 16 bp, synthetic construct
  misc_feature 1..16: note = synthetic [barcode part1]
  source 1..16: mol_type = other DNA
ataccttaatcaccgc

SEQ ID NO: 8201 - DNA, 16 bp, synthetic construct
  misc_feature 1..16: note = synthetic [barcode part1]
  source 1..16: mol_type = other DNA
agttgaccagtgtcac

SEQ ID NO: 8202 - DNA, 16 bp, synthetic construct
  misc_feature 1..16: note = synthetic [barcode part1]
  source 1..16: mol_type = other DNA
aatctgagtgtctcct

SEQ ID NO: 8203 - DNA, 16 bp, synthetic construct
  misc_feature 1..16: note = synthetic [barcode part1]
  source 1..16: mol_type = other DNA
caccttggtggacttc

SEQ ID NO: 8204 - DNA, 16 bp, synthetic construct
  misc_feature 1..16: note = synthetic [barcode part1]
  source 1..16: mol_type = other DNA
acaacacaaccttggc

SEQ ID NO: 8205 - DNA, 16 bp, synthetic construct
  misc_feature 1..16: note = synthetic [barcode part1]
  source 1..16: mol_type = other DNA
acggtaggtagtcgtg

SEQ ID NO: 8206 - DNA, 16 bp, synthetic construct
  misc_feature 1..16: note = synthetic [barcode part1]
  source 1..16: mol_type = other DNA
tcgtctaataacgcct

SEQ ID NO: 8207 - DNA, 16 bp, synthetic construct
  misc_feature 1..16: note = synthetic [barcode part1]
  source 1..16: mol_type = other DNA
aagtctggatagtgac

SEQ ID NO: 8208 - DNA, 16 bp, synthetic construct
  misc_feature 1..16: note = synthetic [barcode part1]
  source 1..16: mol_type = other DNA
tgtgcaggcgactatt

SEQ ID NO: 8209 - DNA, 16 bp, synthetic construct
  misc_feature 1..16: note = synthetic [barcode part1]
  source 1..16: mol_type = other DNA
tctcgaacacctattg

SEQ ID NO: 8210 - DNA, 16 bp, synthetic construct
  misc_feature 1..16: note = synthetic [barcode part1]
  source 1..16: mol_type = other DNA
ttgtagaatcctccgt

SEQ ID NO: 8211 - DNA, 16 bp, synthetic construct
  misc_feature 1..16: note = synthetic [barcode part1]
  source 1..16: mol_type = other DNA
caccagaagactgtct

SEQ ID NO: 8212 - DNA, 16 bp, synthetic construct
  misc_feature 1..16: note = synthetic [barcode part1]
  source 1..16: mol_type = other DNA
cggtacgtgtgttaac

SEQ ID NO: 8213 - DNA, 16 bp, synthetic construct
  misc_feature 1..16: note = synthetic [barcode part1]
  source 1..16: mol_type = other DNA
acactggtagtagagt

SEQ ID NO: 8214 - DNA, 16 bp, synthetic construct
  misc_feature 1..16: note = synthetic [barcode part1]
  source 1..16: mol_type = other DNA
ttgtattcgccggatt

SEQ ID NO: 8215 - DNA, 16 bp, synthetic construct
  misc_feature 1..16: note = synthetic [barcode part1]
  source 1..16: mol_type = other DNA
acgcgtagactaacct

SEQ ID NO: 8216 - DNA, 16 bp, synthetic construct
  misc_feature 1..16: note = synthetic [barcode part1]
  source 1..16: mol_type = other DNA
acgaatcttcctgatc

SEQ ID NO: 8217 - DNA, 16 bp, synthetic construct
  misc_feature 1..16: note = synthetic [barcode part1]
  source 1..16: mol_type = other DNA
tatagtactgtccacc

SEQ ID NO: 8218 - DNA, 16 bp, synthetic construct
  misc_feature 1..16: note = synthetic [barcode part1]
  source 1..16: mol_type = other DNA
aggcgcgttaagtcag

SEQ ID NO: 8219 - DNA, 16 bp, synthetic construct
  misc_feature 1..16: note = synthetic [barcode part1]
  source 1..16: mol_type = other DNA
tcaatctaacggtggc

SEQ ID NO: 8220 - DNA, 16 bp, synthetic construct
  misc_feature 1..16: note = synthetic [barcode part1]
  source 1..16: mol_type = other DNA
gcaggagaagatacgt

SEQ ID NO: 8221 - DNA, 16 bp, synthetic construct
  misc_feature 1..16: note = synthetic [barcode part1]
  source 1..16: mol_type = other DNA
aatcacaggttggagt

SEQ ID NO: 8222 - DNA, 16 bp, synthetic construct
  misc_feature 1..16: note = synthetic [barcode part1]
  source 1..16: mol_type = other DNA
ccactcactacgacac

SEQ ID NO: 8223 - DNA, 16 bp, synthetic construct
  misc_feature 1..16: note = synthetic [barcode part1]
  source 1..16: mol_type = other DNA
gtgttaggtgcgattc

SEQ ID NO: 8224 - DNA, 16 bp, synthetic construct
  misc_feature 1..16: note = synthetic [barcode part1]
  source 1..16: mol_type = other DNA
tgaggttatcgactgc

SEQ ID NO: 8225 - DNA, 16 bp, synthetic construct
  misc_feature 1..16: note = synthetic [barcode part1]
  source 1..16: mol_type = other DNA
acaagatcggaacgag

SEQ ID NO: 8226 - DNA, 16 bp, synthetic construct
  misc_feature 1..16: note = synthetic [barcode part1]
  source 1..16: mol_type = other DNA
acacctcggttaccac

SEQ ID NO: 8227 - DNA, 16 bp, synthetic construct
  misc_feature 1..16: note = synthetic [barcode part1]
  source 1..16: mol_type = other DNA
gtgtacacttcgagac

SEQ ID NO: 8228 - DNA, 16 bp, synthetic construct
  misc_feature 1..16: note = synthetic [barcode part1]
  source 1..16: mol_type = other DNA
tgcaatcagttacgcg

SEQ ID NO: 8229 - DNA, 16 bp, synthetic construct
  misc_feature 1..16: note = synthetic [barcode part1]
  source 1..16: mol_type = other DNA
cgactgcggtaacaag

SEQ ID NO: 8230 - DNA, 16 bp, synthetic construct
  misc_feature 1..16: note = synthetic [barcode part1]
  source 1..16: mol_type = other DNA
ttaccgcggtgttcac

SEQ ID NO: 8231 - DNA, 16 bp, synthetic construct
  misc_feature 1..16: note = synthetic [barcode part1]
  source 1..16: mol_type = other DNA
tggtcaggactctagt

SEQ ID NO: 8232 - DNA, 16 bp, synthetic construct
  misc_feature 1..16: note = synthetic [barcode part1]
  source 1..16: mol_type = other DNA
tctggtaaggtcactg

SEQ ID NO: 8233 - DNA, 16 bp, synthetic construct
  misc_feature 1..16: note = synthetic [barcode part1]
  source 1..16: mol_type = other DNA
atactatccgtctgtg

SEQ ID NO: 8234 - DNA, 16 bp, synthetic construct
  misc_feature 1..16: note = synthetic [barcode part1]
  source 1..16: mol_type = other DNA
ccgtcagtcttgtgtg

SEQ ID NO: 8235 - DNA, 16 bp, synthetic construct
  misc_feature 1..16: note = synthetic [barcode part1]
  source 1..16: mol_type = other DNA
cgcggcctatattaag

SEQ ID NO: 8236 - DNA, 16 bp, synthetic construct
  misc_feature 1..16: note = synthetic [barcode part1]
  source 1..16: mol_type = other DNA
ttacacggattcttcg

SEQ ID NO: 8237 - DNA, 16 bp, synthetic construct
  misc_feature 1..16: note = synthetic [barcode part1]
  source 1..16: mol_type = other DNA
tgtggatcttatcacc

SEQ ID NO: 8238 - DNA, 16 bp, synthetic construct
  misc_feature 1..16: note = synthetic [barcode part1]
  source 1..16: mol_type = other DNA
taggagaccttccagt

SEQ ID NO: 8239 - DNA, 16 bp, synthetic construct
  misc_feature 1..16: note = synthetic [barcode part1]
  source 1..16: mol_type = other DNA
agtctgagtacgaggc

SEQ ID NO: 8240 - DNA, 16 bp, synthetic construct
  misc_feature 1..16: note = synthetic [barcode part1]
  source 1..16: mol_type = other DNA
cctcaaccgtattggc

SEQ ID NO: 8241 - DNA, 16 bp, synthetic construct
  misc_feature 1..16: note = synthetic [barcode part1]
  source 1..16: mol_type = other DNA
accacgaggtatcgtt

SEQ ID NO: 8242 - DNA, 16 bp, synthetic construct
  misc_feature 1..16: note = synthetic [barcode part1]
  source 1..16: mol_type = other DNA
cagtgcacctccaact

SEQ ID NO: 8243 - DNA, 16 bp, synthetic construct
  misc_feature 1..16: note = synthetic [barcode part1]
  source 1..16: mol_type = other DNA
aattctaccgtctacg

SEQ ID NO: 8244 - DNA, 16 bp, synthetic construct
  misc_feature 1..16: note = synthetic [barcode part1]
  source 1..16: mol_type = other DNA
agagacacctggtggt

SEQ ID NO: 8245 - DNA, 16 bp, synthetic construct
  misc_feature 1..16: note = synthetic [barcode part1]
  source 1..16: mol_type = other DNA
gtaacgtccaagatcc

SEQ ID NO: 8246 - DNA, 16 bp, synthetic construct
  misc_feature 1..16: note = synthetic [barcode part1]
  source 1..16: mol_type = other DNA
tgatacgagaacgatc

SEQ ID NO: 8247 - DNA, 16 bp, synthetic construct
  misc_feature 1..16: note = synthetic [barcode part1]
  source 1..16: mol_type = other DNA
accttaccgaacttgt

SEQ ID NO: 8248 - DNA, 16 bp, synthetic construct
  misc_feature 1..16: note = synthetic [barcode part1]
  source 1..16: mol_type = other DNA
aggcagttgactcttg

SEQ ID NO: 8249 - DNA, 16 bp, synthetic construct
  misc_feature 1..16: note = synthetic [barcode part1]
  source 1..16: mol_type = other DNA
acttcttgatcctccg

SEQ ID NO: 8250 - DNA, 16 bp, synthetic construct
  misc_feature 1..16: note = synthetic [barcode part1]
  source 1..16: mol_type = other DNA
tactactctatacggc

SEQ ID NO: 8251 - DNA, 16 bp, synthetic construct
  misc_feature 1..16: note = synthetic [barcode part1]
  source 1..16: mol_type = other DNA
tggccgacaatcaatc

SEQ ID NO: 8252 - DNA, 16 bp, synthetic construct
  misc_feature 1..16: note = synthetic [barcode part1]
  source 1..16: mol_type = other DNA
tcggacgttcgaatac

SEQ ID NO: 8253 - DNA, 16 bp, synthetic construct
  misc_feature 1..16: note = synthetic [barcode part1]
  source 1..16: mol_type = other DNA
aacaactcgtgagagt

SEQ ID NO: 8254 - DNA, 16 bp, synthetic construct
  misc_feature 1..16: note = synthetic [barcode part1]
  source 1..16: mol_type = other DNA
tatatcctgtctccgc

SEQ ID NO: 8255 - DNA, 16 bp, synthetic construct
  misc_feature 1..16: note = synthetic [barcode part1]
  source 1..16: mol_type = other DNA
gtagaggaattatcgc

SEQ ID NO: 8256 - DNA, 16 bp, synthetic construct
  misc_feature 1..16: note = synthetic [barcode part1]
  source 1..16: mol_type = other DNA
aagtccacaggagacc

SEQ ID NO: 8257 - DNA, 16 bp, synthetic construct
  misc_feature 1..16: note = synthetic [barcode part1]
  source 1..16: mol_type = other DNA
acaaccaggaggactc

SEQ ID NO: 8258 - DNA, 16 bp, synthetic construct
  misc_feature 1..16: note = synthetic [barcode part1]
  source 1..16: mol_type = other DNA
gcggtaacaggttcag

SEQ ID NO: 8259 - DNA, 16 bp, synthetic construct
  misc_feature 1..16: note = synthetic [barcode part1]
  source 1..16: mol_type = other DNA
taggttgagtctgacc

SEQ ID NO: 8260 - DNA, 16 bp, synthetic construct
  misc_feature 1..16: note = synthetic [barcode part1]
  source 1..16: mol_type = other DNA
tgaggcctgactaatc

SEQ ID NO: 8261 - DNA, 16 bp, synthetic construct
  misc_feature 1..16: note = synthetic [barcode part1]
  source 1..16: mol_type = other DNA
cgcacagaataacggc

SEQ ID NO: 8262 - DNA, 16 bp, synthetic construct
  misc_feature 1..16: note = synthetic [barcode part1]
  source 1..16: mol_type = other DNA
gtcttcaggcggtctt

SEQ ID NO: 8263 - DNA, 16 bp, synthetic construct
  misc_feature 1..16: note = synthetic [barcode part1]
  source 1..16: mol_type = other DNA
ccaagatcggacagac

SEQ ID NO: 8264 - DNA, 16 bp, synthetic construct
  misc_feature 1..16: note = synthetic [barcode part1]
  source 1..16: mol_type = other DNA
accaaggtagtgcacg

SEQ ID NO: 8265 - DNA, 16 bp, synthetic construct
  misc_feature 1..16: note = synthetic [barcode part1]
  source 1..16: mol_type = other DNA
tcgcaggaagtatctc

SEQ ID NO: 8266 - DNA, 16 bp, synthetic construct
  misc_feature 1..16: note = synthetic [barcode part1]
  source 1..16: mol_type = other DNA
cctaccgaatcgcgtt

SEQ ID NO: 8267 - DNA, 16 bp, synthetic construct
  misc_feature 1..16: note = synthetic [barcode part1]
  source 1..16: mol_type = other DNA
aacttgacgcactctt

SEQ ID NO: 8268 - DNA, 16 bp, synthetic construct
  misc_feature 1..16: note = synthetic [barcode part1]
  source 1..16: mol_type = other DNA
gttaccaatcgaaccg

SEQ ID NO: 8269 - DNA, 16 bp, synthetic construct
  misc_feature 1..16: note = synthetic [barcode part1]
  source 1..16: mol_type = other DNA
aagatccgtggtatcc

SEQ ID NO: 8270 - DNA, 16 bp, synthetic construct
  misc_feature 1..16: note = synthetic [barcode part1]
  source 1..16: mol_type = other DNA
actacctcaggcgtct

SEQ ID NO: 8271 - DNA, 16 bp, synthetic construct
  misc_feature 1..16: note = synthetic [barcode part1]
  source 1..16: mol_type = other DNA
aggtacggttgttaag

SEQ ID NO: 8272 - DNA, 16 bp, synthetic construct
  misc_feature 1..16: note = synthetic [barcode part1]
  source 1..16: mol_type = other DNA
acactagacgtagtcc

SEQ ID NO: 8273 - DNA, 16 bp, synthetic construct
  misc_feature 1..16: note = synthetic [barcode part1]
  source 1..16: mol_type = other DNA
agactcggtgatcgtt

SEQ ID NO: 8274 - DNA, 16 bp, synthetic construct
  misc_feature 1..16: note = synthetic [barcode part1]
  source 1..16: mol_type = other DNA
aaggaaggcactgtag

SEQ ID NO: 8275 - DNA, 16 bp, synthetic construct
  misc_feature 1..16: note = synthetic [barcode part1]
  source 1..16: mol_type = other DNA
gttctccttctccaag

SEQ ID NO: 8276 - DNA, 16 bp, synthetic construct
  misc_feature 1..16: note = synthetic [barcode part1]
  source 1..16: mol_type = other DNA
agaccagttccagttg

SEQ ID NO: 8277 - DNA, 16 bp, synthetic construct
  misc_feature 1..16: note = synthetic [barcode part1]
  source 1..16: mol_type = other DNA
taagtagtccgcctag

SEQ ID NO: 8278 - DNA, 16 bp, synthetic construct
  misc_feature 1..16: note = synthetic [barcode part1]
  source 1..16: mol_type = other DNA
ttggatctcgacaacg

SEQ ID NO: 8279 - DNA, 16 bp, synthetic construct
  misc_feature 1..16: note = synthetic [barcode part1]
  source 1..16: mol_type = other DNA
aggtggttcgacacag

SEQ ID NO: 8280 - DNA, 16 bp, synthetic construct
  misc_feature 1..16: note = synthetic [barcode part1]
  source 1..16: mol_type = other DNA
tcacctctgcaggttg

SEQ ID NO: 8281 - DNA, 16 bp, synthetic construct
  misc_feature 1..16: note = synthetic [barcode part1]
  source 1..16: mol_type = other DNA
tatccgcacctacttc

SEQ ID NO: 8282 - DNA, 16 bp, synthetic construct
  misc_feature 1..16: note = synthetic [barcode part1]
  source 1..16: mol_type = other DNA
cgcgttcagatcacct

SEQ ID NO: 8283 - DNA, 16 bp, synthetic construct
  misc_feature 1..16: note = synthetic [barcode part1]
  source 1..16: mol_type = other DNA
cgtctgtgttctggac

SEQ ID NO: 8284 - DNA, 16 bp, synthetic construct
  misc_feature 1..16: note = synthetic [barcode part1]
  source 1..16: mol_type = other DNA
atcaggtgacacggac

SEQ ID NO: 8285 - DNA, 16 bp, synthetic construct
  misc_feature 1..16: note = synthetic [barcode part1]
  source 1..16: mol_type = other DNA
aatcaaggtccggacg

SEQ ID NO: 8286 - DNA, 16 bp, synthetic construct
  misc_feature 1..16: note = synthetic [barcode part1]
  source 1..16: mol_type = other DNA
tctccgacggttacac

SEQ ID NO: 8287 - DNA, 16 bp, synthetic construct
  misc_feature 1..16: note = synthetic [barcode part1]
  source 1..16: mol_type = other DNA
ttgtcacttgcctcgt

SEQ ID NO: 8288 - DNA, 16 bp, synthetic construct
  misc_feature 1..16: note = synthetic [barcode part1]
  source 1..16: mol_type = other DNA
agtcacaacacactgc

SEQ ID NO: 8289 - DNA, 16 bp, synthetic construct
  misc_feature 1..16: note = synthetic [barcode part1]
  source 1..16: mol_type = other DNA
atcacttgtgaacctc

SEQ ID NO: 8290 - DNA, 16 bp, synthetic construct
  misc_feature 1..16: note = synthetic [barcode part1]
  source 1..16: mol_type = other DNA
gcggtctagattgttg

SEQ ID NO: 8291 - DNA, 16 bp, synthetic construct
  misc_feature 1..16: note = synthetic [barcode part1]
  source 1..16: mol_type = other DNA
actcacttgtcgcggt

SEQ ID NO: 8292 - DNA, 16 bp, synthetic construct
  misc_feature 1..16: note = synthetic [barcode part1]
  source 1..16: mol_type = other DNA
agtgcgacactgaacg

SEQ ID NO: 8293 - DNA, 16 bp, synthetic construct
  misc_feature 1..16: note = synthetic [barcode part1]
  source 1..16: mol_type = other DNA
tggaaggcgcacaatc

SEQ ID NO: 8294 - DNA, 16 bp, synthetic construct
  misc_feature 1..16: note = synthetic [barcode part1]
  source 1..16: mol_type = other DNA
tggatcactctacgcc

SEQ ID NO: 8295 - DNA, 16 bp, synthetic construct
  misc_feature 1..16: note = synthetic [barcode part1]
  source 1..16: mol_type = other DNA
aagtctgtctgattcc

SEQ ID NO: 8296 - DNA, 16 bp, synthetic construct
  misc_feature 1..16: note = synthetic [barcode part1]
  source 1..16: mol_type = other DNA
ccggtagtactagatc

SEQ ID NO: 8297 - DNA, 16 bp, synthetic construct
  misc_feature 1..16: note = synthetic [barcode part1]
  source 1..16: mol_type = other DNA
cgacctgttacgttcg

SEQ ID NO: 8298 - DNA, 16 bp, synthetic construct
  misc_feature 1..16: note = synthetic [barcode part1]
  source 1..16: mol_type = other DNA
tctctgcgagttgtcg

SEQ ID NO: 8299 - DNA, 16 bp, synthetic construct
  misc_feature 1..16: note = synthetic [barcode part1]
  source 1..16: mol_type = other DNA
acttgttgtccgttcc

SEQ ID NO: 8300 - DNA, 16 bp, synthetic construct
  misc_feature 1..16: note = synthetic [barcode part1]
  source 1..16: mol_type = other DNA
tgtgtgattcagttcc

SEQ ID NO: 8301 - DNA, 16 bp, synthetic construct
  misc_feature 1..16: note = synthetic [barcode part1]
  source 1..16: mol_type = other DNA
tattccgtggagtggt

SEQ ID NO: 8302 - DNA, 16 bp, synthetic construct
  misc_feature 1..16: note = synthetic [barcode part1]
  source 1..16: mol_type = other DNA
caattcgcaggttacg

SEQ ID NO: 8303 - DNA, 16 bp, synthetic construct
  misc_feature 1..16: note = synthetic [barcode part1]
  source 1..16: mol_type = other DNA
aggcgattatatcgag

SEQ ID NO: 8304 - DNA, 16 bp, synthetic construct
  misc_feature 1..16: note = synthetic [barcode part1]
  source 1..16: mol_type = other DNA
ttgttcttcgaacgtg

SEQ ID NO: 8305 - DNA, 16 bp, synthetic construct
  misc_feature 1..16: note = synthetic [barcode part1]
  source 1..16: mol_type = other DNA
cgcctagaagaaccag

SEQ ID NO: 8306 - DNA, 16 bp, synthetic construct
  misc_feature 1..16: note = synthetic [barcode part1]
  source 1..16: mol_type = other DNA
attcacttgtcgtgac

SEQ ID NO: 8307 - DNA, 16 bp, synthetic construct
  misc_feature 1..16: note = synthetic [barcode part1]
  source 1..16: mol_type = other DNA
ccttcgaacgtactgc

SEQ ID NO: 8308 - DNA, 16 bp, synthetic construct
  misc_feature 1..16: note = synthetic [barcode part1]
  source 1..16: mol_type = other DNA
tcacagtgtcagtcag

SEQ ID NO: 8309 - DNA, 16 bp, synthetic construct
  misc_feature 1..16: note = synthetic [barcode part1]
  source 1..16: mol_type = other DNA
atagactccggacact

SEQ ID NO: 8310 - DNA, 16 bp, synthetic construct
  misc_feature 1..16: note = synthetic [barcode part1]
  source 1..16: mol_type = other DNA
gccacaactacagtgt

SEQ ID NO: 8311 - DNA, 16 bp, synthetic construct
  misc_feature 1..16: note = synthetic [barcode part1]
  source 1..16: mol_type = other DNA
tggtcagacgtacgtt

SEQ ID NO: 8312 - DNA, 16 bp, synthetic construct
  misc_feature 1..16: note = synthetic [barcode part1]
  source 1..16: mol_type = other DNA
cgttgtctaagttcac

SEQ ID NO: 8313 - DNA, 16 bp, synthetic construct
  misc_feature 1..16: note = synthetic [barcode part1]
  source 1..16: mol_type = other DNA
tgtactgtggtacacg

SEQ ID NO: 8314 - DNA, 16 bp, synthetic construct
  misc_feature 1..16: note = synthetic [barcode part1]
  source 1..16: mol_type = other DNA
gttgcagttgcagtgt

SEQ ID NO: 8315 - DNA, 16 bp, synthetic construct
  misc_feature 1..16: note = synthetic [barcode part1]
  source 1..16: mol_type = other DNA
tctccagttagtctcc

SEQ ID NO: 8316 - DNA, 16 bp, synthetic construct
  misc_feature 1..16: note = synthetic [barcode part1]
  source 1..16: mol_type = other DNA
tcagaatcactcgtct

SEQ ID NO: 8317 - DNA, 16 bp, synthetic construct
  misc_feature 1..16: note = synthetic [barcode part1]
  source 1..16: mol_type = other DNA
tcagtgaagactgtcc

SEQ ID NO: 8318 - DNA, 16 bp, synthetic construct
  misc_feature 1..16: note = synthetic [barcode part1]
  source 1..16: mol_type = other DNA
gtacttgataggtccg

SEQ ID NO: 8319 - DNA, 16 bp, synthetic construct
  misc_feature 1..16: note = synthetic [barcode part1]
  source 1..16: mol_type = other DNA
gcggtcagtgtattac

SEQ ID NO: 8320 - DNA, 16 bp, synthetic construct
  misc_feature 1..16: note = synthetic [barcode part1]
  source 1..16: mol_type = other DNA
acaactgcagtgtgtc

SEQ ID NO: 8321 - DNA, 16 bp, synthetic construct
  misc_feature 1..16: note = synthetic [barcode part1]
  source 1..16: mol_type = other DNA
accttactccgatcct

SEQ ID NO: 8322 - DNA, 16 bp, synthetic construct
  misc_feature 1..16: note = synthetic [barcode part1]
  source 1..16: mol_type = other DNA
acgcgtatatacgcgt

SEQ ID NO: 8323 - DNA, 16 bp, synthetic construct
  misc_feature 1..16: note = synthetic [barcode part1]
  source 1..16: mol_type = other DNA
gcgaagttcaccttag

SEQ ID NO: 8324 - DNA, 16 bp, synthetic construct
  misc_feature 1..16: note = synthetic [barcode part1]
  source 1..16: mol_type = other DNA
taattacgcggagtag

SEQ ID NO: 8325 - DNA, 16 bp, synthetic construct
  misc_feature 1..16: note = synthetic [barcode part1]
  source 1..16: mol_type = other DNA
taggcacttcctgatt

SEQ ID NO: 8326 - DNA, 16 bp, synthetic construct
  misc_feature 1..16: note = synthetic [barcode part1]
  source 1..16: mol_type = other DNA
gtcggtgtattccacc

SEQ ID NO: 8327 - DNA, 16 bp, synthetic construct
  misc_feature 1..16: note = synthetic [barcode part1]
  source 1..16: mol_type = other DNA
agagagtggatatcct

SEQ ID NO: 8328 - DNA, 16 bp, synthetic construct
  misc_feature 1..16: note = synthetic [barcode part1]
  source 1..16: mol_type = other DNA
caggtagttcacctag

SEQ ID NO: 8329 - DNA, 16 bp, synthetic construct
  misc_feature 1..16: note = synthetic [barcode part1]
  source 1..16: mol_type = other DNA
cctcaataactgcact

SEQ ID NO: 8330 - DNA, 16 bp, synthetic construct
  misc_feature 1..16: note = synthetic [barcode part1]
  source 1..16: mol_type = other DNA
gacgaaggtatagttc

SEQ ID NO: 8331 - DNA, 16 bp, synthetic construct
  misc_feature 1..16: note = synthetic [barcode part1]
  source 1..16: mol_type = other DNA
aaccgccgttcttacg

SEQ ID NO: 8332 - DNA, 16 bp, synthetic construct
  misc_feature 1..16: note = synthetic [barcode part1]
  source 1..16: mol_type = other DNA
gtgcgaatctaacaag

SEQ ID NO: 8333 - DNA, 16 bp, synthetic construct
  misc_feature 1..16: note = synthetic [barcode part1]
  source 1..16: mol_type = other DNA
tacagtctcgagtacg

SEQ ID NO: 8334 - DNA, 16 bp, synthetic construct
  misc_feature 1..16: note = synthetic [barcode part1]
  source 1..16: mol_type = other DNA
aattggactcgtgaag

SEQ ID NO: 8335 - DNA, 16 bp, synthetic construct
  misc_feature 1..16: note = synthetic [barcode part1]
  source 1..16: mol_type = other DNA
tataccgcacgactag

SEQ ID NO: 8336 - DNA, 16 bp, synthetic construct
  misc_feature 1..16: note = synthetic [barcode part1]
  source 1..16: mol_type = other DNA
acacttctggcctggt

SEQ ID NO: 8337 - DNA, 16 bp, synthetic construct
  misc_feature 1..16: note = synthetic [barcode part1]
  source 1..16: mol_type = other DNA
acactacggtgttacg

SEQ ID NO: 8338 - DNA, 16 bp, synthetic construct
  misc_feature 1..16: note = synthetic [barcode part1]
  source 1..16: mol_type = other DNA
gacagtcactgtcagt

SEQ ID NO: 8339 - DNA, 16 bp, synthetic construct
  misc_feature 1..16: note = synthetic [barcode part1]
  source 1..16: mol_type = other DNA
agaggacacaaccgtc

SEQ ID NO: 8340 - DNA, 16 bp, synthetic construct
  misc_feature 1..16: note = synthetic [barcode part1]
  source 1..16: mol_type = other DNA
atacggcgtcaacact

SEQ ID NO: 8341 - DNA, 16 bp, synthetic construct
  misc_feature 1..16: note = synthetic [barcode part1]
  source 1..16: mol_type = other DNA
ataagtggcctgttcg

SEQ ID NO: 8342 - DNA, 16 bp, synthetic construct
  misc_feature 1..16: note = synthetic [barcode part1]
  source 1..16: mol_type = other DNA
tgtgtaaggcagtagt

SEQ ID NO: 8343 - DNA, 16 bp, synthetic construct
  misc_feature 1..16: note = synthetic [barcode part1]
  source 1..16: mol_type = other DNA
gaaggcaagtacgaac

SEQ ID NO: 8344 - DNA, 16 bp, synthetic construct
  misc_feature 1..16: note = synthetic [barcode part1]
  source 1..16: mol_type = other DNA
gtgtactctatcactg

SEQ ID NO: 8345 - DNA, 16 bp, synthetic construct
  misc_feature 1..16: note = synthetic [barcode part1]
  source 1..16: mol_type = other DNA
tgaccttggtcaaggt

SEQ ID NO: 8346 - DNA, 16 bp, synthetic construct
  misc_feature 1..16: note = synthetic [barcode part1]
  source 1..16: mol_type = other DNA
tacctgtctgtagtgt

SEQ ID NO: 8347 - DNA, 16 bp, synthetic construct
  misc_feature 1..16: note = synthetic [barcode part1]
  source 1..16: mol_type = other DNA
gcaacttccgtactcg

SEQ ID NO: 8348 - DNA, 16 bp, synthetic construct
  misc_feature 1..16: note = synthetic [barcode part1]
  source 1..16: mol_type = other DNA
aactgaacggagagtg

SEQ ID NO: 8349 - DNA, 16 bp, synthetic construct
  misc_feature 1..16: note = synthetic [barcode part1]
  source 1..16: mol_type = other DNA
tacaccagtcacacag

SEQ ID NO: 8350 - DNA, 16 bp, synthetic construct
  misc_feature 1..16: note = synthetic [barcode part1]
  source 1..16: mol_type = other DNA
accgtccagtggaatt

SEQ ID NO: 8351 - DNA, 16 bp, synthetic construct
  misc_feature 1..16: note = synthetic [barcode part1]
  source 1..16: mol_type = other DNA
gtccgaacgtcgttct

SEQ ID NO: 8352 - DNA, 16 bp, synthetic construct
  misc_feature 1..16: note = synthetic [barcode part1]
  source 1..16: mol_type = other DNA
atacctgacgatagag

SEQ ID NO: 8353 - DNA, 16 bp, synthetic construct
  misc_feature 1..16: note = synthetic [barcode part1]
  source 1..16: mol_type = other DNA
agatacacgcactctg

SEQ ID NO: 8354 - DNA, 16 bp, synthetic construct
  misc_feature 1..16: note = synthetic [barcode part1]
  source 1..16: mol_type = other DNA
tcagacggataagact

SEQ ID NO: 8355 - DNA, 16 bp, synthetic construct
  misc_feature 1..16: note = synthetic [barcode part1]
  source 1..16: mol_type = other DNA
cagttgtattcctcag

SEQ ID NO: 8356 - DNA, 16 bp, synthetic construct
  misc_feature 1..16: note = synthetic [barcode part1]
  source 1..16: mol_type = other DNA
tcgagtacgagtatcc

SEQ ID NO: 8357 - DNA, 16 bp, synthetic construct
  misc_feature 1..16: note = synthetic [barcode part1]
  source 1..16: mol_type = other DNA
gacggagagtcgtgtt

SEQ ID NO: 8358 - DNA, 16 bp, synthetic construct
  misc_feature 1..16: note = synthetic [barcode part1]
  source 1..16: mol_type = other DNA
cggaagtcactcttag

SEQ ID NO: 8359 - DNA, 16 bp, synthetic construct
  misc_feature 1..16: note = synthetic [barcode part1]
  source 1..16: mol_type = other DNA
atcgaaccagactgtc

SEQ ID NO: 8360 - DNA, 16 bp, synthetic construct
  misc_feature 1..16: note = synthetic [barcode part1]
  source 1..16: mol_type = other DNA
gtggtcaacactgact

SEQ ID NO: 8361 - DNA, 16 bp, synthetic construct
  misc_feature 1..16: note = synthetic [barcode part1]
  source 1..16: mol_type = other DNA
actcaggtccactatt

SEQ ID NO: 8362 - DNA, 16 bp, synthetic construct
  misc_feature 1..16: note = synthetic [barcode part1]
  source 1..16: mol_type = other DNA
tgtgcaatctagttcc

SEQ ID NO: 8363 - DNA, 16 bp, synthetic construct
  misc_feature 1..16: note = synthetic [barcode part1]
  source 1..16: mol_type = other DNA
tatatccgacggcctc

SEQ ID NO: 8364 - DNA, 16 bp, synthetic construct
  misc_feature 1..16: note = synthetic [barcode part1]
  source 1..16: mol_type = other DNA
cctgtaattgcgaacg

SEQ ID NO: 8365 - DNA, 16 bp, synthetic construct
  misc_feature 1..16: note = synthetic [barcode part1]
  source 1..16: mol_type = other DNA
gcagtccttacgtctg

SEQ ID NO: 8366 - DNA, 16 bp, synthetic construct
  misc_feature 1..16: note = synthetic [barcode part1]
  source 1..16: mol_type = other DNA
ttagttcttcgcagac

SEQ ID NO: 8367 - DNA, 16 bp, synthetic construct
  misc_feature 1..16: note = synthetic [barcode part1]
  source 1..16: mol_type = other DNA
gattgtgagaagatcc

SEQ ID NO: 8368 - DNA, 16 bp, synthetic construct
  misc_feature 1..16: note = synthetic [barcode part1]
  source 1..16: mol_type = other DNA
acgccaacagtgaggt

SEQ ID NO: 8369 - DNA, 16 bp, synthetic construct
  misc_feature 1..16: note = synthetic [barcode part1]
  source 1..16: mol_type = other DNA
gcgtgacacactaatc

SEQ ID NO: 8370 - DNA, 16 bp, synthetic construct
  misc_feature 1..16: note = synthetic [barcode part1]
  source 1..16: mol_type = other DNA
ccacaagtatcggtgt

SEQ ID NO: 8371 - DNA, 16 bp, synthetic construct
  misc_feature 1..16: note = synthetic [barcode part1]
  source 1..16: mol_type = other DNA
aaggaagtcggtcaag

SEQ ID NO: 8372 - DNA, 16 bp, synthetic construct
  misc_feature 1..16: note = synthetic [barcode part1]
  source 1..16: mol_type = other DNA
tgagactaccacaacc

SEQ ID NO: 8373 - DNA, 16 bp, synthetic construct
  misc_feature 1..16: note = synthetic [barcode part1]
  source 1..16: mol_type = other DNA
tacttgtgtgaacggc

SEQ ID NO: 8374 - DNA, 16 bp, synthetic construct
  misc_feature 1..16: note = synthetic [barcode part1]
  source 1..16: mol_type = other DNA
acgtggcctctagttc

SEQ ID NO: 8375 - DNA, 16 bp, synthetic construct
  misc_feature 1..16: note = synthetic [barcode part1]
  source 1..16: mol_type = other DNA
gattgaagtctagacg

SEQ ID NO: 8376 - DNA, 16 bp, synthetic construct
  misc_feature 1..16: note = synthetic [barcode part1]
  source 1..16: mol_type = other DNA
cctaccgtacactggt

SEQ ID NO: 8377 - DNA, 16 bp, synthetic construct
  misc_feature 1..16: note = synthetic [barcode part1]
  source 1..16: mol_type = other DNA
cgccttgagtagagtt

SEQ ID NO: 8378 - DNA, 16 bp, synthetic construct
  misc_feature 1..16: note = synthetic [barcode part1]
  source 1..16: mol_type = other DNA
ttgcctctcgagtacg

SEQ ID NO: 8379 - DNA, 16 bp, synthetic construct
  misc_feature 1..16: note = synthetic [barcode part1]
  source 1..16: mol_type = other DNA
ttggtccgtagttatc

SEQ ID NO: 8380 - DNA, 16 bp, synthetic construct
  misc_feature 1..16: note = synthetic [barcode part1]
  source 1..16: mol_type = other DNA
caagttggttgtcgac

SEQ ID NO: 8381 - DNA, 16 bp, synthetic construct
  misc_feature 1..16: note = synthetic [barcode part1]
  source 1..16: mol_type = other DNA
cgaagagtgcgatcac

SEQ ID NO: 8382 - DNA, 16 bp, synthetic construct
  misc_feature 1..16: note = synthetic [barcode part1]
  source 1..16: mol_type = other DNA
acagtaatcgtcaccg

SEQ ID NO: 8383 - DNA, 16 bp, synthetic construct
  misc_feature 1..16: note = synthetic [barcode part1]
  source 1..16: mol_type = other DNA
gacaaggtagtgagac

SEQ ID NO: 8384 - DNA, 16 bp, synthetic construct
  misc_feature 1..16: note = synthetic [barcode part1]
  source 1..16: mol_type = other DNA
cgattggcgcgatatt

SEQ ID NO: 8385 - DNA, 16 bp, synthetic construct
  misc_feature 1..16: note = synthetic [barcode part1]
  source 1..16: mol_type = other DNA
aggagtggtgactcac

SEQ ID NO: 8386 - DNA, 16 bp, synthetic construct
  misc_feature 1..16: note = synthetic [barcode part1]
  source 1..16: mol_type = other DNA
ccgatatcacagtcag

SEQ ID NO: 8387 - DNA, 16 bp, synthetic construct
  misc_feature 1..16: note = synthetic [barcode part1]
  source 1..16: mol_type = other DNA
acaccttgcacctctt

SEQ ID NO: 8388 - DNA, 16 bp, synthetic construct
  misc_feature 1..16: note = synthetic [barcode part1]
  source 1..16: mol_type = other DNA
aggcgagatagtatct

SEQ ID NO: 8389 - DNA, 16 bp, synthetic construct
  misc_feature 1..16: note = synthetic [barcode part1]
  source 1..16: mol_type = other DNA
tcaagtgttactccac

SEQ ID NO: 8390 - DNA, 16 bp, synthetic construct
  misc_feature 1..16: note = synthetic [barcode part1]
  source 1..16: mol_type = other DNA
gtactacttatccgtg

SEQ ID NO: 8391 - DNA, 16 bp, synthetic construct
  misc_feature 1..16: note = synthetic [barcode part1]
  source 1..16: mol_type = other DNA
ccaaggactggtacag

SEQ ID NO: 8392 - DNA, 16 bp, synthetic construct
  misc_feature 1..16: note = synthetic [barcode part1]
  source 1..16: mol_type = other DNA
gtcgacctagttaacg

SEQ ID NO: 8393 - DNA, 16 bp, synthetic construct
  misc_feature 1..16: note = synthetic [barcode part1]
  source 1..16: mol_type = other DNA
acaagaagtcactgac

SEQ ID NO: 8394 - DNA, 16 bp, synthetic construct
  misc_feature 1..16: note = synthetic [barcode part1]
  source 1..16: mol_type = other DNA
acggtgcgattctaac

SEQ ID NO: 8395 - DNA, 16 bp, synthetic construct
  misc_feature 1..16: note = synthetic [barcode part1]
  source 1..16: mol_type = other DNA
atctcgttagacctgt

SEQ ID NO: 8396 - DNA, 16 bp, synthetic construct
  misc_feature 1..16: note = synthetic [barcode part1]
  source 1..16: mol_type = other DNA
gaacttaccgtacggt

SEQ ID NO: 8397 - DNA, 16 bp, synthetic construct
  misc_feature 1..16: note = synthetic [barcode part1]
  source 1..16: mol_type = other DNA
tacggtgtccacctgt

SEQ ID NO: 8398 - DNA, 16 bp, synthetic construct
  misc_feature 1..16: note = synthetic [barcode part1]
  source 1..16: mol_type = other DNA
tcagtaaggactgcct

SEQ ID NO: 8399 - DNA, 16 bp, synthetic construct
  misc_feature 1..16: note = synthetic [barcode part1]
  source 1..16: mol_type = other DNA
cctggttactggtacc

SEQ ID NO: 8400 - DNA, 16 bp, synthetic construct
  misc_feature 1..16: note = synthetic [barcode part1]
  source 1..16: mol_type = other DNA
tgcaggagttactaag

SEQ ID NO: 8401 - DNA, 16 bp, synthetic construct
  misc_feature 1..16: note = synthetic [barcode part1]
  source 1..16: mol_type = other DNA
acggccaaggagattc

SEQ ID NO: 8402 - DNA, 16 bp, synthetic construct
  misc_feature 1..16: note = synthetic [barcode part1]
  source 1..16: mol_type = other DNA
cgacacgattggagac

SEQ ID NO: 8403 - DNA, 16 bp, synthetic construct
  misc_feature 1..16: note = synthetic [barcode part1]
  source 1..16: mol_type = other DNA
tctgtcgcacggattc

SEQ ID NO: 8404 - DNA, 16 bp, synthetic construct
  misc_feature 1..16: note = synthetic [barcode part1]
  source 1..16: mol_type = other DNA
taacctcttggcctct

SEQ ID NO: 8405 - DNA, 16 bp, synthetic construct
  misc_feature 1..16: note = synthetic [barcode part1]
  source 1..16: mol_type = other DNA
tggcgcgattactcct

SEQ ID NO: 8406 - DNA, 16 bp, synthetic construct
  misc_feature 1..16: note = synthetic [barcode part1]
  source 1..16: mol_type = other DNA
cgcgagtaataggacc

SEQ ID NO: 8407 - DNA, 16 bp, synthetic construct
  misc_feature 1..16: note = synthetic [barcode part1]
  source 1..16: mol_type = other DNA
ttctgcgatactcctc

SEQ ID NO: 8408 - DNA, 16 bp, synthetic construct
  misc_feature 1..16: note = synthetic [barcode part1]
  source 1..16: mol_type = other DNA
gactaattgcacgcgt

SEQ ID NO: 8409 - DNA, 16 bp, synthetic construct
  misc_feature 1..16: note = synthetic [barcode part1]
  source 1..16: mol_type = other DNA
cgaattcgtaggtctg

SEQ ID NO: 8410 - DNA, 16 bp, synthetic construct
  misc_feature 1..16: note = synthetic [barcode part1]
  source 1..16: mol_type = other DNA
gtaggttgccgttctc

SEQ ID NO: 8411 - DNA, 16 bp, synthetic construct
  misc_feature 1..16: note = synthetic [barcode part1]
  source 1..16: mol_type = other DNA
tgcgttagttaacgcg

SEQ ID NO: 8412 - DNA, 16 bp, synthetic construct
  misc_feature 1..16: note = synthetic [barcode part1]
  source 1..16: mol_type = other DNA
agacgttgaatagtgc

SEQ ID NO: 8413 - DNA, 16 bp, synthetic construct
  misc_feature 1..16: note = synthetic [barcode part1]
  source 1..16: mol_type = other DNA
gaacttcggtcctaag

SEQ ID NO: 8414 - DNA, 16 bp, synthetic construct
  misc_feature 1..16: note = synthetic [barcode part1]
  source 1..16: mol_type = other DNA
gactacagttacacgc

SEQ ID NO: 8415 - DNA, 16 bp, synthetic construct
  misc_feature 1..16: note = synthetic [barcode part1]
  source 1..16: mol_type = other DNA
gcctgagaatatccac

SEQ ID NO: 8416 - DNA, 16 bp, synthetic construct
  misc_feature 1..16: note = synthetic [barcode part1]
  source 1..16: mol_type = other DNA
ttaacgatcgccaggt

SEQ ID NO: 8417 - DNA, 16 bp, synthetic construct
  misc_feature 1..16: note = synthetic [barcode part1]
  source 1..16: mol_type = other DNA
aagtaagaggcgaacc

SEQ ID NO: 8418 - DNA, 16 bp, synthetic construct
  misc_feature 1..16: note = synthetic [barcode part1]
  source 1..16: mol_type = other DNA
gcctccacactaggtt

SEQ ID NO: 8419 - DNA, 16 bp, synthetic construct
  misc_feature 1..16: note = synthetic [barcode part1]
  source 1..16: mol_type = other DNA
accgcaatctattcgt

SEQ ID NO: 8420 - DNA, 16 bp, synthetic construct
  misc_feature 1..16: note = synthetic [barcode part1]
  source 1..16: mol_type = other DNA
tcggcgattcgtatcc

SEQ ID NO: 8421 - DNA, 16 bp, synthetic construct
  misc_feature 1..16: note = synthetic [barcode part1]
  source 1..16: mol_type = other DNA
tcgtctggtggataac

SEQ ID NO: 8422 - DNA, 16 bp, synthetic construct
  misc_feature 1..16: note = synthetic [barcode part1]
  source 1..16: mol_type = other DNA
cctagatctcaattcg

SEQ ID NO: 8423 - DNA, 16 bp, synthetic construct
  misc_feature 1..16: note = synthetic [barcode part1]
  source 1..16: mol_type = other DNA
ccagtcctggaagatt

SEQ ID NO: 8424 - DNA, 16 bp, synthetic construct
  misc_feature 1..16: note = synthetic [barcode part1]
  source 1..16: mol_type = other DNA
gcacagacgaactacg

SEQ ID NO: 8425 - DNA, 16 bp, synthetic construct
  misc_feature 1..16: note = synthetic [barcode part1]
  source 1..16: mol_type = other DNA
tctgttactggcgcac

SEQ ID NO: 8426 - DNA, 16 bp, synthetic construct
  misc_feature 1..16: note = synthetic [barcode part1]
  source 1..16: mol_type = other DNA
aacttaagatccggcc

SEQ ID NO: 8427 - DNA, 16 bp, synthetic construct
  misc_feature 1..16: note = synthetic [barcode part1]
  source 1..16: mol_type = other DNA
gtacctacttgttacg

SEQ ID NO: 8428 - DNA, 16 bp, synthetic construct
  misc_feature 1..16: note = synthetic [barcode part1]
  source 1..16: mol_type = other DNA
gtcaggtctatcaggt

SEQ ID NO: 8429 - DNA, 16 bp, synthetic construct
  misc_feature 1..16: note = synthetic [barcode part1]
  source 1..16: mol_type = other DNA
gttagatcgccgagtt

SEQ ID NO: 8430 - DNA, 16 bp, synthetic construct
  misc_feature 1..16: note = synthetic [barcode part1]
  source 1..16: mol_type = other DNA
aacagtcaaccactgc

SEQ ID NO: 8431 - DNA, 16 bp, synthetic construct
  misc_feature 1..16: note = synthetic [barcode part1]
  source 1..16: mol_type = other DNA
gagtactccgtcttgc

SEQ ID NO: 8432 - DNA, 16 bp, synthetic construct
  misc_feature 1..16: note = synthetic [barcode part1]
  source 1..16: mol_type = other DNA
cacgcgactgttactc

SEQ ID NO: 8433 - DNA, 16 bp, synthetic construct
  misc_feature 1..16: note = synthetic [barcode part1]
  source 1..16: mol_type = other DNA
gcaggttgtcacctct

SEQ ID NO: 8434 - DNA, 16 bp, synthetic construct
  misc_feature 1..16: note = synthetic [barcode part1]
  source 1..16: mol_type = other DNA
ccgtagacttgtgagt

SEQ ID NO: 8435 - DNA, 16 bp, synthetic construct
  misc_feature 1..16: note = synthetic [barcode part1]
  source 1..16: mol_type = other DNA
actcagattgttctgc

SEQ ID NO: 8436 - DNA, 16 bp, synthetic construct
  misc_feature 1..16: note = synthetic [barcode part1]
  source 1..16: mol_type = other DNA
gatacctctaccgtcg

SEQ ID NO: 8437 - DNA, 16 bp, synthetic construct
  misc_feature 1..16: note = synthetic [barcode part1]
  source 1..16: mol_type = other DNA
acaccaggaagaccgt

SEQ ID NO: 8438 - DNA, 16 bp, synthetic construct
  misc_feature 1..16: note = synthetic [barcode part1]
  source 1..16: mol_type = other DNA
tcaagtggaacggtgc

SEQ ID NO: 8439 - DNA, 16 bp, synthetic construct
  misc_feature 1..16: note = synthetic [barcode part1]
  source 1..16: mol_type = other DNA
tgttgtcgtctggatt

SEQ ID NO: 8440 - DNA, 16 bp, synthetic construct
  misc_feature 1..16: note = synthetic [barcode part1]
  source 1..16: mol_type = other DNA
ataaccgccagtctcc

SEQ ID NO: 8441 - DNA, 16 bp, synthetic construct
  misc_feature 1..16: note = synthetic [barcode part1]
  source 1..16: mol_type = other DNA
agtctgttaaggcaag

SEQ ID NO: 8442 - DNA, 16 bp, synthetic construct
  misc_feature 1..16: note = synthetic [barcode part1]
  source 1..16: mol_type = other DNA
aatcacacctcagtct

SEQ ID NO: 8443 - DNA, 16 bp, synthetic construct
  misc_feature 1..16: note = synthetic [barcode part1]
  source 1..16: mol_type = other DNA
tcaaggcagtaccgtt

SEQ ID NO: 8444 - DNA, 16 bp, synthetic construct
  misc_feature 1..16: note = synthetic [barcode part1]
  source 1..16: mol_type = other DNA
aggcagagagttctgc

SEQ ID NO: 8445 - DNA, 16 bp, synthetic construct
  misc_feature 1..16: note = synthetic [barcode part1]
  source 1..16: mol_type = other DNA
tctctgacgtaatcgt

SEQ ID NO: 8446 - DNA, 16 bp, synthetic construct
  misc_feature 1..16: note = synthetic [barcode part1]
  source 1..16: mol_type = other DNA
agaggactaagtccgc

SEQ ID NO: 8447 - DNA, 16 bp, synthetic construct
  misc_feature 1..16: note = synthetic [barcode part1]
  source 1..16: mol_type = other DNA
cgtgtattccttctcg

SEQ ID NO: 8448 - DNA, 16 bp, synthetic construct
  misc_feature 1..16: note = synthetic [barcode part1]
  source 1..16: mol_type = other DNA
cgttcctattgttgag

SEQ ID NO: 8449 - DNA, 16 bp, synthetic construct
  misc_feature 1..16: note = synthetic [barcode part1]
  source 1..16: mol_type = other DNA
cctactactctcggtt

SEQ ID NO: 8450 - DNA, 16 bp, synthetic construct
  misc_feature 1..16: note = synthetic [barcode part1]
  source 1..16: mol_type = other DNA
agacacgttgaatcag

SEQ ID NO: 8451 - DNA, 16 bp, synthetic construct
  misc_feature 1..16: note = synthetic [barcode part1]
  source 1..16: mol_type = other DNA
aattccgtgaggtctg

SEQ ID NO: 8452 - DNA, 16 bp, synthetic construct
  misc_feature 1..16: note = synthetic [barcode part1]
  source 1..16: mol_type = other DNA
ttgtgtggtcacacag

SEQ ID NO: 8453 - DNA, 16 bp, synthetic construct
  misc_feature 1..16: note = synthetic [barcode part1]
  source 1..16: mol_type = other DNA
aaggttcactccagac

SEQ ID NO: 8454 - DNA, 16 bp, synthetic construct
  misc_feature 1..16: note = synthetic [barcode part1]
  source 1..16: mol_type = other DNA
tattggacgtcttcgt

SEQ ID NO: 8455 - DNA, 16 bp, synthetic construct
  misc_feature 1..16: note = synthetic [barcode part1]
  source 1..16: mol_type = other DNA
tctctgcggattaccg

SEQ ID NO: 8456 - DNA, 16 bp, synthetic construct
  misc_feature 1..16: note = synthetic [barcode part1]
  source 1..16: mol_type = other DNA
gagatctcctgaagtc

SEQ ID NO: 8457 - DNA, 16 bp, synthetic construct
  misc_feature 1..16: note = synthetic [barcode part1]
  source 1..16: mol_type = other DNA
atcggtaataaggcac

SEQ ID NO: 8458 - DNA, 16 bp, synthetic construct
  misc_feature 1..16: note = synthetic [barcode part1]
  source 1..16: mol_type = other DNA
accgtgaccacttatt

SEQ ID NO: 8459 - DNA, 16 bp, synthetic construct
  misc_feature 1..16: note = synthetic [barcode part1]
  source 1..16: mol_type = other DNA
gccttcttatacggcg

SEQ ID NO: 8460 - DNA, 16 bp, synthetic construct
  misc_feature 1..16: note = synthetic [barcode part1]
  source 1..16: mol_type = other DNA
agaacagattcgtggt

SEQ ID NO: 8461 - DNA, 16 bp, synthetic construct
  misc_feature 1..16: note = synthetic [barcode part1]
  source 1..16: mol_type = other DNA
ccgagaagtacttaag

SEQ ID NO: 8462 - DNA, 16 bp, synthetic construct
  misc_feature 1..16: note = synthetic [barcode part1]
  source 1..16: mol_type = other DNA
gttccgtcagagaatc

SEQ ID NO: 8463 - DNA, 16 bp, synthetic construct
  misc_feature 1..16: note = synthetic [barcode part1]
  source 1..16: mol_type = other DNA
tacacgattcaacctc

SEQ ID NO: 8464 - DNA, 16 bp, synthetic construct
  misc_feature 1..16: note = synthetic [barcode part1]
  source 1..16: mol_type = other DNA
gccaataacttcttgc

SEQ ID NO: 8465 - DNA, 16 bp, synthetic construct
  misc_feature 1..16: note = synthetic [barcode part1]
  source 1..16: mol_type = other DNA
actacgattgtggcac

SEQ ID NO: 8466 - DNA, 16 bp, synthetic construct
  misc_feature 1..16: note = synthetic [barcode part1]
  source 1..16: mol_type = other DNA
gcactcttaacttgac

SEQ ID NO: 8467 - DNA, 16 bp, synthetic construct
  misc_feature 1..16: note = synthetic [barcode part1]
  source 1..16: mol_type = other DNA
aattgccaggttaccg

SEQ ID NO: 8468 - DNA, 16 bp, synthetic construct
  misc_feature 1..16: note = synthetic [barcode part1]
  source 1..16: mol_type = other DNA
tgttgacacactggtg

SEQ ID NO: 8469 - DNA, 16 bp, synthetic construct
  misc_feature 1..16: note = synthetic [barcode part1]
  source 1..16: mol_type = other DNA
gatcgatctccagaac

SEQ ID NO: 8470 - DNA, 16 bp, synthetic construct
  misc_feature 1..16: note = synthetic [barcode part1]
  source 1..16: mol_type = other DNA
cgcgtgaatctagatc

SEQ ID NO: 8471 - DNA, 16 bp, synthetic construct
  misc_feature 1..16: note = synthetic [barcode part1]
  source 1..16: mol_type = other DNA
gacggtccaataactc

SEQ ID NO: 8472 - DNA, 16 bp, synthetic construct
  misc_feature 1..16: note = synthetic [barcode part1]
  source 1..16: mol_type = other DNA
tgttaggttgtcggac

SEQ ID NO: 8473 - DNA, 16 bp, synthetic construct
  misc_feature 1..16: note = synthetic [barcode part1]
  source 1..16: mol_type = other DNA
aagaataccaccgagt

SEQ ID NO: 8474 - DNA, 16 bp, synthetic construct
  misc_feature 1..16: note = synthetic [barcode part1]
  source 1..16: mol_type = other DNA
taattgtacgaggcag

SEQ ID NO: 8475 - DNA, 16 bp, synthetic construct
  misc_feature 1..16: note = synthetic [barcode part1]
  source 1..16: mol_type = other DNA
cgtgtagtactctact

SEQ ID NO: 8476 - DNA, 16 bp, synthetic construct
  misc_feature 1..16: note = synthetic [barcode part1]
  source 1..16: mol_type = other DNA
cgtctatcaagatcct

SEQ ID NO: 8477 - DNA, 16 bp, synthetic construct
  misc_feature 1..16: note = synthetic [barcode part1]
  source 1..16: mol_type = other DNA
tataggaatcaccgag

SEQ ID NO: 8478 - DNA, 16 bp, synthetic construct
  misc_feature 1..16: note = synthetic [barcode part1]
  source 1..16: mol_type = other DNA
gttaggtatcttcgtc

SEQ ID NO: 8479 - DNA, 16 bp, synthetic construct
  misc_feature 1..16: note = synthetic [barcode part1]
  source 1..16: mol_type = other DNA
ttccttcgcactgtac

SEQ ID NO: 8480 - DNA, 16 bp, synthetic construct
  misc_feature 1..16: note = synthetic [barcode part1]
  source 1..16: mol_type = other DNA
tgtcagaagtgcaggc

SEQ ID NO: 8481 - DNA, 16 bp, synthetic construct
  misc_feature 1..16: note = synthetic [barcode part1]
  source 1..16: mol_type = other DNA
tcaacagttcacactc

SEQ ID NO: 8482 - DNA, 16 bp, synthetic construct
  misc_feature 1..16: note = synthetic [barcode part1]
  source 1..16: mol_type = other DNA
cgtagtgaggttctgt

SEQ ID NO: 8483 - DNA, 16 bp, synthetic construct
  misc_feature 1..16: note = synthetic [barcode part1]
  source 1..16: mol_type = other DNA
gagtaattacgagtcg

SEQ ID NO: 8484 - DNA, 16 bp, synthetic construct
  misc_feature 1..16: note = synthetic [barcode part1]
  source 1..16: mol_type = other DNA
gcgccggatataattc

SEQ ID NO: 8485 - DNA, 16 bp, synthetic construct
  misc_feature 1..16: note = synthetic [barcode part1]
  source 1..16: mol_type = other DNA
tatacggactcgaacc

SEQ ID NO: 8486 - DNA, 16 bp, synthetic construct
  misc_feature 1..16: note = synthetic [barcode part1]
  source 1..16: mol_type = other DNA
ttgacagtggaagtac

SEQ ID NO: 8487 - DNA, 16 bp, synthetic construct
  misc_feature 1..16: note = synthetic [barcode part1]
  source 1..16: mol_type = other DNA
acctacaaccggagag

SEQ ID NO: 8488 - DNA, 16 bp, synthetic construct
  misc_feature 1..16: note = synthetic [barcode part1]
  source 1..16: mol_type = other DNA
gtactgttgtctatcg

SEQ ID NO: 8489 - DNA, 16 bp, synthetic construct
  misc_feature 1..16: note = synthetic [barcode part1]
  source 1..16: mol_type = other DNA
gattctgcctattcag

SEQ ID NO: 8490 - DNA, 16 bp, synthetic construct
  misc_feature 1..16: note = synthetic [barcode part1]
  source 1..16: mol_type = other DNA
aggacgattcactgtc

SEQ ID NO: 8491 - DNA, 16 bp, synthetic construct
  misc_feature 1..16: note = synthetic [barcode part1]
  source 1..16: mol_type = other DNA
agacgtcgcggtaagt

SEQ ID NO: 8492 - DNA, 16 bp, synthetic construct
  misc_feature 1..16: note = synthetic [barcode part1]
  source 1..16: mol_type = other DNA
agttcagaccaccaac

SEQ ID NO: 8493 - DNA, 16 bp, synthetic construct
  misc_feature 1..16: note = synthetic [barcode part1]
  source 1..16: mol_type = other DNA
tctctgaacgttgact

SEQ ID NO: 8494 - DNA, 16 bp, synthetic construct
  misc_feature 1..16: note = synthetic [barcode part1]
  source 1..16: mol_type = other DNA
aggttctctccaagag

SEQ ID NO: 8495 - DNA, 16 bp, synthetic construct
  misc_feature 1..16: note = synthetic [barcode part1]
  source 1..16: mol_type = other DNA
ttgaacgacttgcgac

SEQ ID NO: 8496 - DNA, 16 bp, synthetic construct
  misc_feature 1..16: note = synthetic [barcode part1]
  source 1..16: mol_type = other DNA
ccacaattcggtcaag

SEQ ID NO: 8497 - DNA, 16 bp, synthetic construct
  misc_feature 1..16: note = synthetic [barcode part1]
  source 1..16: mol_type = other DNA
tagtgcgactatctct

SEQ ID NO: 8498 - DNA, 16 bp, synthetic construct
  misc_feature 1..16: note = synthetic [barcode part1]
  source 1..16: mol_type = other DNA
agacctaactcggatc

SEQ ID NO: 8499 - DNA, 16 bp, synthetic construct
  misc_feature 1..16: note = synthetic [barcode part1]
  source 1..16: mol_type = other DNA
acgtgcactagtcagt

SEQ ID NO: 8500 - DNA, 16 bp, synthetic construct
  misc_feature 1..16: note = synthetic [barcode part1]
  source 1..16: mol_type = other DNA
tgtcgaaggtagtctc

SEQ ID NO: 8501 - DNA, 16 bp, synthetic construct
  misc_feature 1..16: note = synthetic [barcode part1]
  source 1..16: mol_type = other DNA
gttacctcggatatct

SEQ ID NO: 8502 - DNA, 16 bp, synthetic construct
  misc_feature 1..16: note = synthetic [barcode part1]
  source 1..16: mol_type = other DNA
taaccaaccggttggt

SEQ ID NO: 8503 - DNA, 16 bp, synthetic construct
  misc_feature 1..16: note = synthetic [barcode part1]
  source 1..16: mol_type = other DNA
ataaggtgcggacctg

SEQ ID NO: 8504 - DNA, 16 bp, synthetic construct
  misc_feature 1..16: note = synthetic [barcode part1]
  source 1..16: mol_type = other DNA
gccttcgtagattact

SEQ ID NO: 8505 - DNA, 16 bp, synthetic construct
  misc_feature 1..16: note = synthetic [barcode part1]
  source 1..16: mol_type = other DNA
tctattggcacgattc

SEQ ID NO: 8506 - DNA, 16 bp, synthetic construct
  misc_feature 1..16: note = synthetic [barcode part1]
  source 1..16: mol_type = other DNA
agtacgcgcactgatt

SEQ ID NO: 8507 - DNA, 16 bp, synthetic construct
  misc_feature 1..16: note = synthetic [barcode part1]
  source 1..16: mol_type = other DNA
tgagtaaggacgagtg

SEQ ID NO: 8508 - DNA, 16 bp, synthetic construct
  misc_feature 1..16: note = synthetic [barcode part1]
  source 1..16: mol_type = other DNA
aacagttggtccgact

SEQ ID NO: 8509 - DNA, 16 bp, synthetic construct
  misc_feature 1..16: note = synthetic [barcode part1]
  source 1..16: mol_type = other DNA
ttcctggagaggattc

SEQ ID NO: 8510 - DNA, 16 bp, synthetic construct
  misc_feature 1..16: note = synthetic [barcode part1]
  source 1..16: mol_type = other DNA
gaccgatcctcttctt

SEQ ID NO: 8511 - DNA, 16 bp, synthetic construct
  misc_feature 1..16: note = synthetic [barcode part1]
  source 1..16: mol_type = other DNA
tacagaccagagtggc

SEQ ID NO: 8512 - DNA, 16 bp, synthetic construct
  misc_feature 1..16: note = synthetic [barcode part1]
  source 1..16: mol_type = other DNA
caccggtgattctctg

SEQ ID NO: 8513 - DNA, 16 bp, synthetic construct
  misc_feature 1..16: note = synthetic [barcode part1]
  source 1..16: mol_type = other DNA
aacgcgaatccggtag

SEQ ID NO: 8514 - DNA, 16 bp, synthetic construct
  misc_feature 1..16: note = synthetic [barcode part1]
  source 1..16: mol_type = other DNA
ttgacgaattcctgtc

SEQ ID NO: 8515 - DNA, 16 bp, synthetic construct
  misc_feature 1..16: note = synthetic [barcode part1]
  source 1..16: mol_type = other DNA
gaccgtacgtacaact

SEQ ID NO: 8516 - DNA, 16 bp, synthetic construct
  misc_feature 1..16: note = synthetic [barcode part1]
  source 1..16: mol_type = other DNA
gtgacgtactggttgt

SEQ ID NO: 8517 - DNA, 16 bp, synthetic construct
  misc_feature 1..16: note = synthetic [barcode part1]
  source 1..16: mol_type = other DNA
caatagagacgtctag

SEQ ID NO: 8518 - DNA, 16 bp, synthetic construct
  misc_feature 1..16: note = synthetic [barcode part1]
  source 1..16: mol_type = other DNA
tgaccgcagatatctg

SEQ ID NO: 8519 - DNA, 16 bp, synthetic construct
  misc_feature 1..16: note = synthetic [barcode part1]
  source 1..16: mol_type = other DNA
aggcgagacaacacct

SEQ ID NO: 8520 - DNA, 16 bp, synthetic construct
  misc_feature 1..16: note = synthetic [barcode part1]
  source 1..16: mol_type = other DNA
acgtgttgcaagatag

SEQ ID NO: 8521 - DNA, 16 bp, synthetic construct
  misc_feature 1..16: note = synthetic [barcode part1]
  source 1..16: mol_type = other DNA
gtaactctgtcaggtg

SEQ ID NO: 8522 - DNA, 16 bp, synthetic construct
  misc_feature 1..16: note = synthetic [barcode part1]
  source 1..16: mol_type = other DNA
aggatatagtcaccag

SEQ ID NO: 8523 - DNA, 16 bp, synthetic construct
  misc_feature 1..16: note = synthetic [barcode part1]
  source 1..16: mol_type = other DNA
tacacgtgtgtacacg

SEQ ID NO: 8524 - DNA, 16 bp, synthetic construct
  misc_feature 1..16: note = synthetic [barcode part1]
  source 1..16: mol_type = other DNA
tggaacctgactgact

SEQ ID NO: 8525 - DNA, 16 bp, synthetic construct
  misc_feature 1..16: note = synthetic [barcode part1]
  source 1..16: mol_type = other DNA
gaattcgaagtcgaac

SEQ ID NO: 8526 - DNA, 16 bp, synthetic construct
  misc_feature 1..16: note = synthetic [barcode part1]
  source 1..16: mol_type = other DNA
atcaagtggtggtcct

SEQ ID NO: 8527 - DNA, 16 bp, synthetic construct
  misc_feature 1..16: note = synthetic [barcode part1]
  source 1..16: mol_type = other DNA
aacgatactcactgcg

SEQ ID NO: 8528 - DNA, 16 bp, synthetic construct
  misc_feature 1..16: note = synthetic [barcode part1]
  source 1..16: mol_type = other DNA
agttcaggtacttctc

SEQ ID NO: 8529 - DNA, 16 bp, synthetic construct
  misc_feature 1..16: note = synthetic [barcode part1]
  source 1..16: mol_type = other DNA
aggactggtacaattg

SEQ ID NO: 8530 - DNA, 16 bp, synthetic construct
  misc_feature 1..16: note = synthetic [barcode part1]
  source 1..16: mol_type = other DNA
caatcactcactgccg

SEQ ID NO: 8531 - DNA, 16 bp, synthetic construct
  misc_feature 1..16: note = synthetic [barcode part1]
  source 1..16: mol_type = other DNA
aaggtatccagtaacg

SEQ ID NO: 8532 - DNA, 16 bp, synthetic construct
  misc_feature 1..16: note = synthetic [barcode part1]
  source 1..16: mol_type = other DNA
cggaagtacaatctag

SEQ ID NO: 8533 - DNA, 16 bp, synthetic construct
  misc_feature 1..16: note = synthetic [barcode part1]
  source 1..16: mol_type = other DNA
taacggttgcgtcctc

SEQ ID NO: 8534 - DNA, 16 bp, synthetic construct
  misc_feature 1..16: note = synthetic [barcode part1]
  source 1..16: mol_type = other DNA
agtacggttcggcaag

SEQ ID NO: 8535 - DNA, 16 bp, synthetic construct
  misc_feature 1..16: note = synthetic [barcode part1]
  source 1..16: mol_type = other DNA
cgcagaactagattag

SEQ ID NO: 8536 - DNA, 16 bp, synthetic construct
  misc_feature 1..16: note = synthetic [barcode part1]
  source 1..16: mol_type = other DNA
gtcacaatcacctatc

SEQ ID NO: 8537 - DNA, 16 bp, synthetic construct
  misc_feature 1..16: note = synthetic [barcode part1]
  source 1..16: mol_type = other DNA
ttgaccagtgtcacag

SEQ ID NO: 8538 - DNA, 16 bp, synthetic construct
  misc_feature 1..16: note = synthetic [barcode part1]
  source 1..16: mol_type = other DNA
ccaacttcgtcctact

SEQ ID NO: 8539 - DNA, 16 bp, synthetic construct
  misc_feature 1..16: note = synthetic [barcode part1]
  source 1..16: mol_type = other DNA
atcaaccgtcacagtg

SEQ ID NO: 8540 - DNA, 16 bp, synthetic construct
  misc_feature 1..16: note = synthetic [barcode part1]
  source 1..16: mol_type = other DNA
agacaggttgcaacgc

SEQ ID NO: 8541 - DNA, 16 bp, synthetic construct
  misc_feature 1..16: note = synthetic [barcode part1]
  source 1..16: mol_type = other DNA
tgtgccttgccaagtc

SEQ ID NO: 8542 - DNA, 16 bp, synthetic construct
  misc_feature 1..16: note = synthetic [barcode part1]
  source 1..16: mol_type = other DNA
tagatcgtaatccggc

SEQ ID NO: 8543 - DNA, 16 bp, synthetic construct
  misc_feature 1..16: note = synthetic [barcode part1]
  source 1..16: mol_type = other DNA
tattgtcctacgcggc

SEQ ID NO: 8544 - DNA, 16 bp, synthetic construct
  misc_feature 1..16: note = synthetic [barcode part1]
  source 1..16: mol_type = other DNA
tagatcgtggtggttc

SEQ ID NO: 8545 - DNA, 16 bp, synthetic construct
  misc_feature 1..16: note = synthetic [barcode part1]
  source 1..16: mol_type = other DNA
gccggtgtccaattct

SEQ ID NO: 8546 - DNA, 16 bp, synthetic construct
  misc_feature 1..16: note = synthetic [barcode part1]
  source 1..16: mol_type = other DNA
cacaggtgaacggtgt

SEQ ID NO: 8547 - DNA, 16 bp, synthetic construct
  misc_feature 1..16: note = synthetic [barcode part1]
  source 1..16: mol_type = other DNA
gaggaatctcacaagt

SEQ ID NO: 8548 - DNA, 16 bp, synthetic construct
  misc_feature 1..16: note = synthetic [barcode part1]
  source 1..16: mol_type = other DNA
ttgtaggtactgacgc

SEQ ID NO: 8549 - DNA, 16 bp, synthetic construct
  misc_feature 1..16: note = synthetic [barcode part1]
  source 1..16: mol_type = other DNA
gcagaacaatacctag

SEQ ID NO: 8550 - DNA, 16 bp, synthetic construct
  misc_feature 1..16: note = synthetic [barcode part1]
  source 1..16: mol_type = other DNA
gtaccagtctcgtcgt

SEQ ID NO: 8551 - DNA, 16 bp, synthetic construct
  misc_feature 1..16: note = synthetic [barcode part1]
  source 1..16: mol_type = other DNA
tagacacagtctgcac

SEQ ID NO: 8552 - DNA, 16 bp, synthetic construct
  misc_feature 1..16: note = synthetic [barcode part1]
  source 1..16: mol_type = other DNA
gattgcggagaggtct

SEQ ID NO: 8553 - DNA, 16 bp, synthetic construct
  misc_feature 1..16: note = synthetic [barcode part1]
  source 1..16: mol_type = other DNA
tctgaagactaaccgc

SEQ ID NO: 8554 - DNA, 16 bp, synthetic construct
  misc_feature 1..16: note = synthetic [barcode part1]
  source 1..16: mol_type = other DNA
acttacgtgtgagtcg

SEQ ID NO: 8555 - DNA, 16 bp, synthetic construct
  misc_feature 1..16: note = synthetic [barcode part1]
  source 1..16: mol_type = other DNA
accacaatcacgacac

SEQ ID NO: 8556 - DNA, 16 bp, synthetic construct
  misc_feature 1..16: note = synthetic [barcode part1]
  source 1..16: mol_type = other DNA
tgttcttagtcgtcag

SEQ ID NO: 8557 - DNA, 16 bp, synthetic construct
  misc_feature 1..16: note = synthetic [barcode part1]
  source 1..16: mol_type = other DNA
tagttcctagttgcgt

SEQ ID NO: 8558 - DNA, 16 bp, synthetic construct
  misc_feature 1..16: note = synthetic [barcode part1]
  source 1..16: mol_type = other DNA
actgccgcacaagaag

SEQ ID NO: 8559 - DNA, 16 bp, synthetic construct
  misc_feature 1..16: note = synthetic [barcode part1]
  source 1..16: mol_type = other DNA
tatcgtcgcaatcact

SEQ ID NO: 8560 - DNA, 16 bp, synthetic construct
  misc_feature 1..16: note = synthetic [barcode part1]
  source 1..16: mol_type = other DNA
agtaagtactcgtccg

SEQ ID NO: 8561 - DNA, 16 bp, synthetic construct
  misc_feature 1..16: note = synthetic [barcode part1]
  source 1..16: mol_type = other DNA
tgttgtcctactgcct

SEQ ID NO: 8562 - DNA, 16 bp, synthetic construct
  misc_feature 1..16: note = synthetic [barcode part1]
  source 1..16: mol_type = other DNA
cgacaatatacgagac

SEQ ID NO: 8563 - DNA, 16 bp, synthetic construct
  misc_feature 1..16: note = synthetic [barcode part1]
  source 1..16: mol_type = other DNA
cgcctacaacactatt

SEQ ID NO: 8564 - DNA, 16 bp, synthetic construct
  misc_feature 1..16: note = synthetic [barcode part1]
  source 1..16: mol_type = other DNA
tggttacgagttagag

SEQ ID NO: 8565 - DNA, 16 bp, synthetic construct
  misc_feature 1..16: note = synthetic [barcode part1]
  source 1..16: mol_type = other DNA
gtgagtctcgagtact

SEQ ID NO: 8566 - DNA, 16 bp, synthetic construct
  misc_feature 1..16: note = synthetic [barcode part1]
  source 1..16: mol_type = other DNA
cagtgattcggactac

SEQ ID NO: 8567 - DNA, 16 bp, synthetic construct
  misc_feature 1..16: note = synthetic [barcode part1]
  source 1..16: mol_type = other DNA
taggcgaatcctggag

SEQ ID NO: 8568 - DNA, 16 bp, synthetic construct
  misc_feature 1..16: note = synthetic [barcode part1]
  source 1..16: mol_type = other DNA
aggataatccgtcgtc

SEQ ID NO: 8569 - DNA, 16 bp, synthetic construct
  misc_feature 1..16: note = synthetic [barcode part1]
  source 1..16: mol_type = other DNA
agaattggcgtctaag

SEQ ID NO: 8570 - DNA, 16 bp, synthetic construct
  misc_feature 1..16: note = synthetic [barcode part1]
  source 1..16: mol_type = other DNA
taggaccactacggtt

SEQ ID NO: 8571 - DNA, 16 bp, synthetic construct
  misc_feature 1..16: note = synthetic [barcode part1]
  source 1..16: mol_type = other DNA
cggacacagaacgatc

SEQ ID NO: 8572 - DNA, 16 bp, synthetic construct
  misc_feature 1..16: note = synthetic [barcode part1]
  source 1..16: mol_type = other DNA
tccggtggataacttg

SEQ ID NO: 8573 - DNA, 16 bp, synthetic construct
  misc_feature 1..16: note = synthetic [barcode part1]
  source 1..16: mol_type = other DNA
cgttccaagattcgcc

SEQ ID NO: 8574 - DNA, 16 bp, synthetic construct
  misc_feature 1..16: note = synthetic [barcode part1]
  source 1..16: mol_type = other DNA
ccggtacaacctcttg

SEQ ID NO: 8575 - DNA, 16 bp, synthetic construct
  misc_feature 1..16: note = synthetic [barcode part1]
  source 1..16: mol_type = other DNA
gtcgaataacacgaac

SEQ ID NO: 8576 - DNA, 16 bp, synthetic construct
  misc_feature 1..16: note = synthetic [barcode part1]
  source 1..16: mol_type = other DNA
ttgaccaacacgtacg

SEQ ID NO: 8577 - DNA, 16 bp, synthetic construct
  misc_feature 1..16: note = synthetic [barcode part1]
  source 1..16: mol_type = other DNA
gacttgatcctcgcac

SEQ ID NO: 8578 - DNA, 16 bp, synthetic construct
  misc_feature 1..16: note = synthetic [barcode part1]
  source 1..16: mol_type = other DNA
aggcgatacgtgatcg

SEQ ID NO: 8579 - DNA, 16 bp, synthetic construct
  misc_feature 1..16: note = synthetic [barcode part1]
  source 1..16: mol_type = other DNA
tatcttgcgcctggac

SEQ ID NO: 8580 - DNA, 16 bp, synthetic construct
  misc_feature 1..16: note = synthetic [barcode part1]
  source 1..16: mol_type = other DNA
caacgcaggtcgtatt

SEQ ID NO: 8581 - DNA, 16 bp, synthetic construct
  misc_feature 1..16: note = synthetic [barcode part1]
  source 1..16: mol_type = other DNA
tccttaacagtgtgtc

SEQ ID NO: 8582 - DNA, 16 bp, synthetic construct
  misc_feature 1..16: note = synthetic [barcode part1]
  source 1..16: mol_type = other DNA
tattccactacggatc

SEQ ID NO: 8583 - DNA, 16 bp, synthetic construct
  misc_feature 1..16: note = synthetic [barcode part1]
  source 1..16: mol_type = other DNA
cacttatagatcctgc

SEQ ID NO: 8584 - DNA, 16 bp, synthetic construct
  misc_feature 1..16: note = synthetic [barcode part1]
  source 1..16: mol_type = other DNA
gaaggacgtaactgcc

SEQ ID NO: 8585 - DNA, 16 bp, synthetic construct
  misc_feature 1..16: note = synthetic [barcode part1]
  source 1..16: mol_type = other DNA
gtcaaggaactcttcg

SEQ ID NO: 8586 - DNA, 16 bp, synthetic construct
  misc_feature 1..16: note = synthetic [barcode part1]
  source 1..16: mol_type = other DNA
cgttcgtcacttgttc

SEQ ID NO: 8587 - DNA, 16 bp, synthetic construct
  misc_feature 1..16: note = synthetic [barcode part1]
  source 1..16: mol_type = other DNA
actcttgtgtcggatt

SEQ ID NO: 8588 - DNA, 16 bp, synthetic construct
  misc_feature 1..16: note = synthetic [barcode part1]
  source 1..16: mol_type = other DNA
attcttccgtgcggtg

SEQ ID NO: 8589 - DNA, 16 bp, synthetic construct
  misc_feature 1..16: note = synthetic [barcode part1]
  source 1..16: mol_type = other DNA
gttggtgcactagtgt

SEQ ID NO: 8590 - DNA, 16 bp, synthetic construct
  misc_feature 1..16: note = synthetic [barcode part1]
  source 1..16: mol_type = other DNA
tcactgttcgtgagtt

SEQ ID NO: 8591 - DNA, 16 bp, synthetic construct
  misc_feature 1..16: note = synthetic [barcode part1]
  source 1..16: mol_type = other DNA
gattgtcagattgccg

SEQ ID NO: 8592 - DNA, 16 bp, synthetic construct
  misc_feature 1..16: note = synthetic [barcode part1]
  source 1..16: mol_type = other DNA
aagtaagacaacgtcc

SEQ ID NO: 8593 - DNA, 16 bp, synthetic construct
  misc_feature 1..16: note = synthetic [barcode part1]
  source 1..16: mol_type = other DNA
tggcaatctaacggtc

SEQ ID NO: 8594 - DNA, 16 bp, synthetic construct
  misc_feature 1..16: note = synthetic [barcode part1]
  source 1..16: mol_type = other DNA
tctctctccagagttc

SEQ ID NO: 8595 - DNA, 16 bp, synthetic construct
  misc_feature 1..16: note = synthetic [barcode part1]
  source 1..16: mol_type = other DNA
actcaggatccacagt

SEQ ID NO: 8596 - DNA, 16 bp, synthetic construct
  misc_feature 1..16: note = synthetic [barcode part1]
  source 1..16: mol_type = other DNA
aatctgcagtgtccag

SEQ ID NO: 8597 - DNA, 16 bp, synthetic construct
  misc_feature 1..16: note = synthetic [barcode part1]
  source 1..16: mol_type = other DNA
acgcggttcaatcctc

SEQ ID NO: 8598 - DNA, 16 bp, synthetic construct
  misc_feature 1..16: note = synthetic [barcode part1]
  source 1..16: mol_type = other DNA
cgtatcacaatacgcg

SEQ ID NO: 8599 - DNA, 16 bp, synthetic construct
  misc_feature 1..16: note = synthetic [barcode part1]
  source 1..16: mol_type = other DNA
gcctcacacaattgtt

SEQ ID NO: 8600 - DNA, 16 bp, synthetic construct
  misc_feature 1..16: note = synthetic [barcode part1]
  source 1..16: mol_type = other DNA
aaggttccgttgcaac

SEQ ID NO: 8601 - DNA, 16 bp, synthetic construct
  misc_feature 1..16: note = synthetic [barcode part1]
  source 1..16: mol_type = other DNA
acgacagtctagtctg

SEQ ID NO: 8602 - DNA, 16 bp, synthetic construct
  misc_feature 1..16: note = synthetic [barcode part1]
  source 1..16: mol_type = other DNA
gactgcaagtcctcct

SEQ ID NO: 8603 - DNA, 16 bp, synthetic construct
  misc_feature 1..16: note = synthetic [barcode part1]
  source 1..16: mol_type = other DNA
aatacgaggattgtcg

SEQ ID NO: 8604 - DNA, 16 bp, synthetic construct
  misc_feature 1..16: note = synthetic [barcode part1]
  source 1..16: mol_type = other DNA
cagttgtattcggacg

SEQ ID NO: 8605 - DNA, 16 bp, synthetic construct
  misc_feature 1..16: note = synthetic [barcode part1]
  source 1..16: mol_type = other DNA
gaactggattggtgcg

SEQ ID NO: 8606 - DNA, 16 bp, synthetic construct
  misc_feature 1..16: note = synthetic [barcode part1]
  source 1..16: mol_type = other DNA
cctatagactctgttg

SEQ ID NO: 8607 - DNA, 16 bp, synthetic construct
  misc_feature 1..16: note = synthetic [barcode part1]
  source 1..16: mol_type = other DNA
aatcgcactaatcctc

SEQ ID NO: 8608 - DNA, 16 bp, synthetic construct
  misc_feature 1..16: note = synthetic [barcode part1]
  source 1..16: mol_type = other DNA
ttggtgaaggtcactc

SEQ ID NO: 8609 - DNA, 16 bp, synthetic construct
  misc_feature 1..16: note = synthetic [barcode part1]
  source 1..16: mol_type = other DNA
tgagatcacgtgtacc

SEQ ID NO: 8610 - DNA, 16 bp, synthetic construct
  misc_feature 1..16: note = synthetic [barcode part1]
  source 1..16: mol_type = other DNA
gtctggagtgagttct

SEQ ID NO: 8611 - DNA, 16 bp, synthetic construct
  misc_feature 1..16: note = synthetic [barcode part1]
  source 1..16: mol_type = other DNA
aaggtgacacctaagt

SEQ ID NO: 8612 - DNA, 16 bp, synthetic construct
  misc_feature 1..16: note = synthetic [barcode part1]
  source 1..16: mol_type = other DNA
gaacaaggcggatagt

SEQ ID NO: 8613 - DNA, 16 bp, synthetic construct
  misc_feature 1..16: note = synthetic [barcode part1]
  source 1..16: mol_type = other DNA
cgtctattccgaagtt

SEQ ID NO: 8614 - DNA, 16 bp, synthetic construct
  misc_feature 1..16: note = synthetic [barcode part1]
  source 1..16: mol_type = other DNA
tgactagtacgtgcac

SEQ ID NO: 8615 - DNA, 16 bp, synthetic construct
  misc_feature 1..16: note = synthetic [barcode part1]
  source 1..16: mol_type = other DNA
ttgtactctcgcactc

SEQ ID NO: 8616 - DNA, 16 bp, synthetic construct
  misc_feature 1..16: note = synthetic [barcode part1]
  source 1..16: mol_type = other DNA
tccagtccagttgcac

SEQ ID NO: 8617 - DNA, 16 bp, synthetic construct
  misc_feature 1..16: note = synthetic [barcode part1]
  source 1..16: mol_type = other DNA
tcagtactggtacgtg

SEQ ID NO: 8618 - DNA, 16 bp, synthetic construct
  misc_feature 1..16: note = synthetic [barcode part1]
  source 1..16: mol_type = other DNA
gccaagttcacgcctt

SEQ ID NO: 8619 - DNA, 16 bp, synthetic construct
  misc_feature 1..16: note = synthetic [barcode part1]
  source 1..16: mol_type = other DNA
aaggaattgtcctgcc

SEQ ID NO: 8620 - DNA, 16 bp, synthetic construct
  misc_feature 1..16: note = synthetic [barcode part1]
  source 1..16: mol_type = other DNA
attacgcacgcaatcg

SEQ ID NO: 8621 - DNA, 16 bp, synthetic construct
  misc_feature 1..16: note = synthetic [barcode part1]
  source 1..16: mol_type = other DNA
cgttgaactcagtgac

SEQ ID NO: 8622 - DNA, 16 bp, synthetic construct
  misc_feature 1..16: note = synthetic [barcode part1]
  source 1..16: mol_type = other DNA
actctagtgtggtacg

SEQ ID NO: 8623 - DNA, 16 bp, synthetic construct
  misc_feature 1..16: note = synthetic [barcode part1]
  source 1..16: mol_type = other DNA
gcctgccaatactgtc

SEQ ID NO: 8624 - DNA, 16 bp, synthetic construct
  misc_feature 1..16: note = synthetic [barcode part1]
  source 1..16: mol_type = other DNA
tcgactctattaacgc

SEQ ID NO: 8625 - DNA, 16 bp, synthetic construct
  misc_feature 1..16: note = synthetic [barcode part1]
  source 1..16: mol_type = other DNA
accaactcttcgagag

SEQ ID NO: 8626 - DNA, 16 bp, synthetic construct
  misc_feature 1..16: note = synthetic [barcode part1]
  source 1..16: mol_type = other DNA
gcgtctcgtcgttagt

SEQ ID NO: 8627 - DNA, 16 bp, synthetic construct
  misc_feature 1..16: note = synthetic [barcode part1]
  source 1..16: mol_type = other DNA
aggcgtcgaacagtac

SEQ ID NO: 8628 - DNA, 16 bp, synthetic construct
  misc_feature 1..16: note = synthetic [barcode part1]
  source 1..16: mol_type = other DNA
gcacgattgtgatcgt

SEQ ID NO: 8629 - DNA, 16 bp, synthetic construct
  misc_feature 1..16: note = synthetic [barcode part1]
  source 1..16: mol_type = other DNA
gcctctaacagtccac

SEQ ID NO: 8630 - DNA, 16 bp, synthetic construct
  misc_feature 1..16: note = synthetic [barcode part1]
  source 1..16: mol_type = other DNA
agatcaatctcgaccg

SEQ ID NO: 8631 - DNA, 16 bp, synthetic construct
  misc_feature 1..16: note = synthetic [barcode part1]
  source 1..16: mol_type = other DNA
tgatcacgtggttgtg

SEQ ID NO: 8632 - DNA, 16 bp, synthetic construct
  misc_feature 1..16: note = synthetic [barcode part1]
  source 1..16: mol_type = other DNA
agactgtgacgacttc

SEQ ID NO: 8633 - DNA, 16 bp, synthetic construct
  misc_feature 1..16: note = synthetic [barcode part1]
  source 1..16: mol_type = other DNA
aacaacaggcaaggtg

SEQ ID NO: 8634 - DNA, 16 bp, synthetic construct
  misc_feature 1..16: note = synthetic [barcode part1]
  source 1..16: mol_type = other DNA
accacgagaacagatt

SEQ ID NO: 8635 - DNA, 16 bp, synthetic construct
  misc_feature 1..16: note = synthetic [barcode part1]
  source 1..16: mol_type = other DNA
tacgtaacggagagtt

SEQ ID NO: 8636 - DNA, 16 bp, synthetic construct
  misc_feature 1..16: note = synthetic [barcode part1]
  source 1..16: mol_type = other DNA
aatcctgcaagtagag

SEQ ID NO: 8637 - DNA, 16 bp, synthetic construct
  misc_feature 1..16: note = synthetic [barcode part1]
  source 1..16: mol_type = other DNA
tcttgcagatcgccgt

SEQ ID NO: 8638 - DNA, 16 bp, synthetic construct
  misc_feature 1..16: note = synthetic [barcode part1]
  source 1..16: mol_type = other DNA
acgattgagttgagac

SEQ ID NO: 8639 - DNA, 16 bp, synthetic construct
  misc_feature 1..16: note = synthetic [barcode part1]
  source 1..16: mol_type = other DNA
ccagattaatccgacg

SEQ ID NO: 8640 - DNA, 16 bp, synthetic construct
  misc_feature 1..16: note = synthetic [barcode part1]
  source 1..16: mol_type = other DNA
tcacctcggttacacg

SEQ ID NO: 8641 - DNA, 16 bp, synthetic construct
  misc_feature 1..16: note = synthetic [barcode part1]
  source 1..16: mol_type = other DNA
agatcgtcgagaatac

SEQ ID NO: 8642 - DNA, 16 bp, synthetic construct
  misc_feature 1..16: note = synthetic [barcode part1]
  source 1..16: mol_type = other DNA
tgagtcttctgccgtg

SEQ ID NO: 8643 - DNA, 16 bp, synthetic construct
  misc_feature 1..16: note = synthetic [barcode part1]
  source 1..16: mol_type = other DNA
ccttacgcagtgactc

SEQ ID NO: 8644 - DNA, 16 bp, synthetic construct
  misc_feature 1..16: note = synthetic [barcode part1]
  source 1..16: mol_type = other DNA
gaccacctctatattg

SEQ ID NO: 8645 - DNA, 16 bp, synthetic construct
  misc_feature 1..16: note = synthetic [barcode part1]
  source 1..16: mol_type = other DNA
cagtaactgcgccttc

SEQ ID NO: 8646 - DNA, 16 bp, synthetic construct
  misc_feature 1..16: note = synthetic [barcode part1]
  source 1..16: mol_type = other DNA
ccagtcgtaacactag

SEQ ID NO: 8647 - DNA, 16 bp, synthetic construct
  misc_feature 1..16: note = synthetic [barcode part1]
  source 1..16: mol_type = other DNA
ccgtctggttctaggt

SEQ ID NO: 8648 - DNA, 16 bp, synthetic construct
  misc_feature 1..16: note = synthetic [barcode part1]
  source 1..16: mol_type = other DNA
gcctcacggtgtactt

SEQ ID NO: 8649 - DNA, 16 bp, synthetic construct
  misc_feature 1..16: note = synthetic [barcode part1]
  source 1..16: mol_type = other DNA
cgactgactagtcagt

SEQ ID NO: 8650 - DNA, 16 bp, synthetic construct
  misc_feature 1..16: note = synthetic [barcode part1]
  source 1..16: mol_type = other DNA
gtcgaacgacacgagt

SEQ ID NO: 8651 - DNA, 16 bp, synthetic construct
  misc_feature 1..16: note = synthetic [barcode part1]
  source 1..16: mol_type = other DNA
gcgttgaacgcaactt

SEQ ID NO: 8652 - DNA, 16 bp, synthetic construct
  misc_feature 1..16: note = synthetic [barcode part1]
  source 1..16: mol_type = other DNA
acgcctcctgacgatt

SEQ ID NO: 8653 - DNA, 16 bp, synthetic construct
  misc_feature 1..16: note = synthetic [barcode part1]
  source 1..16: mol_type = other DNA
aggtccaacaaggcgt

SEQ ID NO: 8654 - DNA, 16 bp, synthetic construct
  misc_feature 1..16: note = synthetic [barcode part1]
  source 1..16: mol_type = other DNA
ttgtgcactccgatcg

SEQ ID NO: 8655 - DNA, 16 bp, synthetic construct
  misc_feature 1..16: note = synthetic [barcode part1]
  source 1..16: mol_type = other DNA
gtaactcacctgacag

SEQ ID NO: 8656 - DNA, 16 bp, synthetic construct
  misc_feature 1..16: note = synthetic [barcode part1]
  source 1..16: mol_type = other DNA
tccaattctccggttc

SEQ ID NO: 8657 - DNA, 16 bp, synthetic construct
  misc_feature 1..16: note = synthetic [barcode part1]
  source 1..16: mol_type = other DNA
ttctctatatcggcag

SEQ ID NO: 8658 - DNA, 16 bp, synthetic construct
  misc_feature 1..16: note = synthetic [barcode part1]
  source 1..16: mol_type = other DNA
gatcagtggagtcttc

SEQ ID NO: 8659 - DNA, 16 bp, synthetic construct
  misc_feature 1..16: note = synthetic [barcode part1]
  source 1..16: mol_type = other DNA
cgtctctcgacttgag

SEQ ID NO: 8660 - DNA, 16 bp, synthetic construct
  misc_feature 1..16: note = synthetic [barcode part1]
  source 1..16: mol_type = other DNA
gacacgccttcaactc

SEQ ID NO: 8661 - DNA, 16 bp, synthetic construct
  misc_feature 1..16: note = synthetic [barcode part1]
  source 1..16: mol_type = other DNA
cctcacgtagttcggt

SEQ ID NO: 8662 - DNA, 16 bp, synthetic construct
  misc_feature 1..16: note = synthetic [barcode part1]
  source 1..16: mol_type = other DNA
accactcctacaggtc

SEQ ID NO: 8663 - DNA, 16 bp, synthetic construct
  misc_feature 1..16: note = synthetic [barcode part1]
  source 1..16: mol_type = other DNA
atactctacgcgagac

SEQ ID NO: 8664 - DNA, 16 bp, synthetic construct
  misc_feature 1..16: note = synthetic [barcode part1]
  source 1..16: mol_type = other DNA
agagatactcaacgac

SEQ ID NO: 8665 - DNA, 16 bp, synthetic construct
  misc_feature 1..16: note = synthetic [barcode part1]
  source 1..16: mol_type = other DNA
tgtccggaattgtacg

SEQ ID NO: 8666 - DNA, 16 bp, synthetic construct
  misc_feature 1..16: note = synthetic [barcode part1]
  source 1..16: mol_type = other DNA
gtacagtagaattggc

SEQ ID NO: 8667 - DNA, 16 bp, synthetic construct
  misc_feature 1..16: note = synthetic [barcode part1]
  source 1..16: mol_type = other DNA
gtataccttcgattcg

SEQ ID NO: 8668 - DNA, 16 bp, synthetic construct
  misc_feature 1..16: note = synthetic [barcode part1]
  source 1..16: mol_type = other DNA
acaggttagaagttgc

SEQ ID NO: 8669 - DNA, 16 bp, synthetic construct
  misc_feature 1..16: note = synthetic [barcode part1]
  source 1..16: mol_type = other DNA
caattagtcggccagt

SEQ ID NO: 8670 - DNA, 16 bp, synthetic construct
  misc_feature 1..16: note = synthetic [barcode part1]
  source 1..16: mol_type = other DNA
cggaattgtacgtgtc

SEQ ID NO: 8671 - DNA, 16 bp, synthetic construct
  misc_feature 1..16: note = synthetic [barcode part1]
  source 1..16: mol_type = other DNA
tacgtacgatcctgag

SEQ ID NO: 8672 - DNA, 16 bp, synthetic construct
  misc_feature 1..16: note = synthetic [barcode part1]
  source 1..16: mol_type = other DNA
gcaagtgttacctgtg

SEQ ID NO: 8673 - DNA, 16 bp, synthetic construct
  misc_feature 1..16: note = synthetic [barcode part1]
  source 1..16: mol_type = other DNA
cctaggcagatcagag

SEQ ID NO: 8674 - DNA, 16 bp, synthetic construct
  misc_feature 1..16: note = synthetic [barcode part1]
  source 1..16: mol_type = other DNA
gcgtcgttctgtctag

SEQ ID NO: 8675 - DNA, 16 bp, synthetic construct
  misc_feature 1..16: note = synthetic [barcode part1]
  source 1..16: mol_type = other DNA
cgtgaatcacttaggc

SEQ ID NO: 8676 - DNA, 16 bp, synthetic construct
  misc_feature 1..16: note = synthetic [barcode part1]
  source 1..16: mol_type = other DNA
cacacaggtccgaatt

SEQ ID NO: 8677 - DNA, 16 bp, synthetic construct
  misc_feature 1..16: note = synthetic [barcode part1]
  source 1..16: mol_type = other DNA
taaggcctcttcctct

SEQ ID NO: 8678 - DNA, 16 bp, synthetic construct
  misc_feature 1..16: note = synthetic [barcode part1]
  source 1..16: mol_type = other DNA
gccaggttactcttgc

SEQ ID NO: 8679 - DNA, 16 bp, synthetic construct
  misc_feature 1..16: note = synthetic [barcode part1]
  source 1..16: mol_type = other DNA
tgttaatctgactccg

SEQ ID NO: 8680 - DNA, 16 bp, synthetic construct
  misc_feature 1..16: note = synthetic [barcode part1]
  source 1..16: mol_type = other DNA
cacctgtgcagtatcc

SEQ ID NO: 8681 - DNA, 16 bp, synthetic construct
  misc_feature 1..16: note = synthetic [barcode part1]
  source 1..16: mol_type = other DNA
tagtagacggaacgag

SEQ ID NO: 8682 - DNA, 16 bp, synthetic construct
  misc_feature 1..16: note = synthetic [barcode part1]
  source 1..16: mol_type = other DNA
tcctgcaccaagttgc

SEQ ID NO: 8683 - DNA, 16 bp, synthetic construct
  misc_feature 1..16: note = synthetic [barcode part1]
  source 1..16: mol_type = other DNA
cgtacaaggaccagac

SEQ ID NO: 8684 - DNA, 16 bp, synthetic construct
  misc_feature 1..16: note = synthetic [barcode part1]
  source 1..16: mol_type = other DNA
gtctaactcctgtgcg

SEQ ID NO: 8685 - DNA, 16 bp, synthetic construct
  misc_feature 1..16: note = synthetic [barcode part1]
  source 1..16: mol_type = other DNA
accgagttatctctgt

SEQ ID NO: 8686 - DNA, 16 bp, synthetic construct
  misc_feature 1..16: note = synthetic [barcode part1]
  source 1..16: mol_type = other DNA
atacggtggtccttcc

SEQ ID NO: 8687 - DNA, 16 bp, synthetic construct
  misc_feature 1..16: note = synthetic [barcode part1]
  source 1..16: mol_type = other DNA
cacgcctacagaagtt

SEQ ID NO: 8688 - DNA, 16 bp, synthetic construct
  misc_feature 1..16: note = synthetic [barcode part1]
  source 1..16: mol_type = other DNA
accactccttgagtgc

SEQ ID NO: 8689 - DNA, 16 bp, synthetic construct
  misc_feature 1..16: note = synthetic [barcode part1]
  source 1..16: mol_type = other DNA
tctcgtggtcgaatcc

SEQ ID NO: 8690 - DNA, 16 bp, synthetic construct
  misc_feature 1..16: note = synthetic [barcode part1]
  source 1..16: mol_type = other DNA
cggagatcactgaacg

SEQ ID NO: 8691 - DNA, 16 bp, synthetic construct
  misc_feature 1..16: note = synthetic [barcode part1]
  source 1..16: mol_type = other DNA
taggccacgtgtctct

SEQ ID NO: 8692 - DNA, 16 bp, synthetic construct
  misc_feature 1..16: note = synthetic [barcode part1]
  source 1..16: mol_type = other DNA
cggtgtatcggatact

SEQ ID NO: 8693 - DNA, 16 bp, synthetic construct
  misc_feature 1..16: note = synthetic [barcode part1]
  source 1..16: mol_type = other DNA
aagagttccgattccg

SEQ ID NO: 8694 - DNA, 16 bp, synthetic construct
  misc_feature 1..16: note = synthetic [barcode part1]
  source 1..16: mol_type = other DNA
gtagactagtccacac

SEQ ID NO: 8695 - DNA, 16 bp, synthetic construct
  misc_feature 1..16: note = synthetic [barcode part1]
  source 1..16: mol_type = other DNA
tctaggatcggagttc

SEQ ID NO: 8696 - DNA, 16 bp, synthetic construct
  misc_feature 1..16: note = synthetic [barcode part1]
  source 1..16: mol_type = other DNA
tgttcgtctcaagact

SEQ ID NO: 8697 - DNA, 16 bp, synthetic construct
  misc_feature 1..16: note = synthetic [barcode part1]
  source 1..16: mol_type = other DNA
gtatcgagaggtaatc

SEQ ID NO: 8698 - DNA, 16 bp, synthetic construct
  misc_feature 1..16: note = synthetic [barcode part1]
  source 1..16: mol_type = other DNA
tcgaactgaagtgtag

SEQ ID NO: 8699 - DNA, 16 bp, synthetic construct
  misc_feature 1..16: note = synthetic [barcode part1]
  source 1..16: mol_type = other DNA
ccttcacctactggag

SEQ ID NO: 8700 - DNA, 16 bp, synthetic construct
  misc_feature 1..16: note = synthetic [barcode part1]
  source 1..16: mol_type = other DNA
ttgttggacacaagag

SEQ ID NO: 8701 - DNA, 16 bp, synthetic construct
  misc_feature 1..16: note = synthetic [barcode part1]
  source 1..16: mol_type = other DNA
tccgcgtaactcggtt

SEQ ID NO: 8702 - DNA, 16 bp, synthetic construct
  misc_feature 1..16: note = synthetic [barcode part1]
  source 1..16: mol_type = other DNA
aattggaaggtcggag

SEQ ID NO: 8703 - DNA, 16 bp, synthetic construct
  misc_feature 1..16: note = synthetic [barcode part1]
  source 1..16: mol_type = other DNA
gaactactaccaggtc

SEQ ID NO: 8704 - DNA, 16 bp, synthetic construct
  misc_feature 1..16: note = synthetic [barcode part1]
  source 1..16: mol_type = other DNA
gtctcgtactccttac

SEQ ID NO: 8705 - DNA, 16 bp, synthetic construct
  misc_feature 1..16: note = synthetic [barcode part1]
  source 1..16: mol_type = other DNA
acctccttgattgtag

SEQ ID NO: 8706 - DNA, 16 bp, synthetic construct
  misc_feature 1..16: note = synthetic [barcode part1]
  source 1..16: mol_type = other DNA
cggttctcaaccgtac

SEQ ID NO: 8707 - DNA, 16 bp, synthetic construct
  misc_feature 1..16: note = synthetic [barcode part1]
  source 1..16: mol_type = other DNA
aacacgtgttgtgcac

SEQ ID NO: 8708 - DNA, 16 bp, synthetic construct
  misc_feature 1..16: note = synthetic [barcode part1]
  source 1..16: mol_type = other DNA
tgtaggtgtagacctc

SEQ ID NO: 8709 - DNA, 16 bp, synthetic construct
  misc_feature 1..16: note = synthetic [barcode part1]
  source 1..16: mol_type = other DNA
aagtaaccgcaggtcg

SEQ ID NO: 8710 - DNA, 16 bp, synthetic construct
  misc_feature 1..16: note = synthetic [barcode part1]
  source 1..16: mol_type = other DNA
agatccgagactaagt

SEQ ID NO: 8711 - DNA, 16 bp, synthetic construct
  misc_feature 1..16: note = synthetic [barcode part1]
  source 1..16: mol_type = other DNA
gacacactaatcgcgt

SEQ ID NO: 8712 - DNA, 16 bp, synthetic construct
  misc_feature 1..16: note = synthetic [barcode part1]
  source 1..16: mol_type = other DNA
agagttccttggagtc

SEQ ID NO: 8713 - DNA, 16 bp, synthetic construct
  misc_feature 1..16: note = synthetic [barcode part1]
  source 1..16: mol_type = other DNA
tgcaggacgacgattg

SEQ ID NO: 8714 - DNA, 16 bp, synthetic construct
  misc_feature 1..16: note = synthetic [barcode part1]
  source 1..16: mol_type = other DNA
tcgacaggacaatcct

SEQ ID NO: 8715 - DNA, 16 bp, synthetic construct
  misc_feature 1..16: note = synthetic [barcode part1]
  source 1..16: mol_type = other DNA
aacaagagttggaggc

SEQ ID NO: 8716 - DNA, 16 bp, synthetic construct
  misc_feature 1..16: note = synthetic [barcode part1]
  source 1..16: mol_type = other DNA
tgaacggtaccgcaag

SEQ ID NO: 8717 - DNA, 16 bp, synthetic construct
  misc_feature 1..16: note = synthetic [barcode part1]
  source 1..16: mol_type = other DNA
tccaagatacgacacc

SEQ ID NO: 8718 - DNA, 16 bp, synthetic construct
  misc_feature 1..16: note = synthetic [barcode part1]
  source 1..16: mol_type = other DNA
ttgagatcgccacagt

SEQ ID NO: 8719 - DNA, 16 bp, synthetic construct
  misc_feature 1..16: note = synthetic [barcode part1]
  source 1..16: mol_type = other DNA
tcaactctgaactcgt

SEQ ID NO: 8720 - DNA, 16 bp, synthetic construct
  misc_feature 1..16: note = synthetic [barcode part1]
  source 1..16: mol_type = other DNA
caatctgactctcgcg

SEQ ID NO: 8721 - DNA, 16 bp, synthetic construct
  misc_feature 1..16: note = synthetic [barcode part1]
  source 1..16: mol_type = other DNA
tcgactatctcgagag

SEQ ID NO: 8722 - DNA, 16 bp, synthetic construct
  misc_feature 1..16: note = synthetic [barcode part1]
  source 1..16: mol_type = other DNA
tcgtagagtggaacgc

SEQ ID NO: 8723 - DNA, 16 bp, synthetic construct
  misc_feature 1..16: note = synthetic [barcode part1]
  source 1..16: mol_type = other DNA
ttgacgaataaggacc

SEQ ID NO: 8724 - DNA, 16 bp, synthetic construct
  misc_feature 1..16: note = synthetic [barcode part1]
  source 1..16: mol_type = other DNA
tcaattcgtgactgtc

SEQ ID NO: 8725 - DNA, 16 bp, synthetic construct
  misc_feature 1..16: note = synthetic [barcode part1]
  source 1..16: mol_type = other DNA
gagagtctaatcgtag

SEQ ID NO: 8726 - DNA, 16 bp, synthetic construct
  misc_feature 1..16: note = synthetic [barcode part1]
  source 1..16: mol_type = other DNA
ttctggattcaggacg

SEQ ID NO: 8727 - DNA, 16 bp, synthetic construct
  misc_feature 1..16: note = synthetic [barcode part1]
  source 1..16: mol_type = other DNA
gaagtgaagacctact

SEQ ID NO: 8728 - DNA, 16 bp, synthetic construct
  misc_feature 1..16: note = synthetic [barcode part1]
  source 1..16: mol_type = other DNA
gtccggactacttcac

SEQ ID NO: 8729 - DNA, 16 bp, synthetic construct
  misc_feature 1..16: note = synthetic [barcode part1]
  source 1..16: mol_type = other DNA
ttgttgtccgttccac

SEQ ID NO: 8730 - DNA, 16 bp, synthetic construct
  misc_feature 1..16: note = synthetic [barcode part1]
  source 1..16: mol_type = other DNA
tattaacttccgaccg

SEQ ID NO: 8731 - DNA, 16 bp, synthetic construct
  misc_feature 1..16: note = synthetic [barcode part1]
  source 1..16: mol_type = other DNA
tggtaacaccgaactc

SEQ ID NO: 8732 - DNA, 16 bp, synthetic construct
  misc_feature 1..16: note = synthetic [barcode part1]
  source 1..16: mol_type = other DNA
ccaatccgttcgagtc

SEQ ID NO: 8733 - DNA, 16 bp, synthetic construct
  misc_feature 1..16: note = synthetic [barcode part1]
  source 1..16: mol_type = other DNA
cgtagttcggtctctg

SEQ ID NO: 8734 - DNA, 16 bp, synthetic construct
  misc_feature 1..16: note = synthetic [barcode part1]
  source 1..16: mol_type = other DNA
gcaaggatccttacac

SEQ ID NO: 8735 - DNA, 16 bp, synthetic construct
  misc_feature 1..16: note = synthetic [barcode part1]
  source 1..16: mol_type = other DNA
tgtatccacggcctgt

SEQ ID NO: 8736 - DNA, 16 bp, synthetic construct
  misc_feature 1..16: note = synthetic [barcode part1]
  source 1..16: mol_type = other DNA
caatcgttaccttgtg

SEQ ID NO: 8737 - DNA, 16 bp, synthetic construct
  misc_feature 1..16: note = synthetic [barcode part1]
  source 1..16: mol_type = other DNA
tacgcctggtaactcc

SEQ ID NO: 8738 - DNA, 16 bp, synthetic construct
  misc_feature 1..16: note = synthetic [barcode part1]
  source 1..16: mol_type = other DNA
cactattaggccagac

SEQ ID NO: 8739 - DNA, 16 bp, synthetic construct
  misc_feature 1..16: note = synthetic [barcode part1]
  source 1..16: mol_type = other DNA
taatctcgcgttggcc

SEQ ID NO: 8740 - DNA, 16 bp, synthetic construct
  misc_feature 1..16: note = synthetic [barcode part1]
  source 1..16: mol_type = other DNA
tatcggacggattgtc

SEQ ID NO: 8741 - DNA, 16 bp, synthetic construct
  misc_feature 1..16: note = synthetic [barcode part1]
  source 1..16: mol_type = other DNA
agaacctggacgaacc

SEQ ID NO: 8742 - DNA, 16 bp, synthetic construct
  misc_feature 1..16: note = synthetic [barcode part1]
  source 1..16: mol_type = other DNA
gacagttccagtgatc

SEQ ID NO: 8743 - DNA, 16 bp, synthetic construct
  misc_feature 1..16: note = synthetic [barcode part1]
  source 1..16: mol_type = other DNA
gtccactgaatagacc

SEQ ID NO: 8744 - DNA, 16 bp, synthetic construct
  misc_feature 1..16: note = synthetic [barcode part1]
  source 1..16: mol_type = other DNA
caggtcgaacttgatc

SEQ ID NO: 8745 - DNA, 16 bp, synthetic construct
  misc_feature 1..16: note = synthetic [barcode part1]
  source 1..16: mol_type = other DNA
actgatctcgactgag

SEQ ID NO: 8746 - DNA, 16 bp, synthetic construct
  misc_feature 1..16: note = synthetic [barcode part1]
  source 1..16: mol_type = other DNA
acaccagactattcct

SEQ ID NO: 8747 - DNA, 16 bp, synthetic construct
  misc_feature 1..16: note = synthetic [barcode part1]
  source 1..16: mol_type = other DNA
ttacctaatccgcctc

SEQ ID NO: 8748 - DNA, 16 bp, synthetic construct
  misc_feature 1..16: note = synthetic [barcode part1]
  source 1..16: mol_type = other DNA
gccttggatatcgtag

SEQ ID NO: 8749 - DNA, 16 bp, synthetic construct
  misc_feature 1..16: note = synthetic [barcode part1]
  source 1..16: mol_type = other DNA
gactggtcagtcaact

SEQ ID NO: 8750 - DNA, 16 bp, synthetic construct
  misc_feature 1..16: note = synthetic [barcode part1]
  source 1..16: mol_type = other DNA
tcttcgagttgacgtt

SEQ ID NO: 8751 - DNA, 16 bp, synthetic construct
  misc_feature 1..16: note = synthetic [barcode part1]
  source 1..16: mol_type = other DNA
agttctcgattgcgtt

SEQ ID NO: 8752 - DNA, 16 bp, synthetic construct
  misc_feature 1..16: note = synthetic [barcode part1]
  source 1..16: mol_type = other DNA
tcgttgttactcaggt

SEQ ID NO: 8753 - DNA, 16 bp, synthetic construct
  misc_feature 1..16: note = synthetic [barcode part1]
  source 1..16: mol_type = other DNA
actgtccttactccac

SEQ ID NO: 8754 - DNA, 16 bp, synthetic construct
  misc_feature 1..16: note = synthetic [barcode part1]
  source 1..16: mol_type = other DNA
aaggtgaccacagatt

SEQ ID NO: 8755 - DNA, 16 bp, synthetic construct
  misc_feature 1..16: note = synthetic [barcode part1]
  source 1..16: mol_type = other DNA
tacagtggtccacctc

SEQ ID NO: 8756 - DNA, 16 bp, synthetic construct
  misc_feature 1..16: note = synthetic [barcode part1]
  source 1..16: mol_type = other DNA
gtatacgtgaccaacc

SEQ ID NO: 8757 - DNA, 16 bp, synthetic construct
  misc_feature 1..16: note = synthetic [barcode part1]
  source 1..16: mol_type = other DNA
tcaccgttcgcgaatc

SEQ ID NO: 8758 - DNA, 16 bp, synthetic construct
  misc_feature 1..16: note = synthetic [barcode part1]
  source 1..16: mol_type = other DNA
aaggacagtccgacgt

SEQ ID NO: 8759 - DNA, 16 bp, synthetic construct
  misc_feature 1..16: note = synthetic [barcode part1]
  source 1..16: mol_type = other DNA
attaccttgtctggac

SEQ ID NO: 8760 - DNA, 16 bp, synthetic construct
  misc_feature 1..16: note = synthetic [barcode part1]
  source 1..16: mol_type = other DNA
gactgatcggtcaatc

SEQ ID NO: 8761 - DNA, 16 bp, synthetic construct
  misc_feature 1..16: note = synthetic [barcode part1]
  source 1..16: mol_type = other DNA
ttcaactgtcgatacc

SEQ ID NO: 8762 - DNA, 16 bp, synthetic construct
  misc_feature 1..16: note = synthetic [barcode part1]
  source 1..16: mol_type = other DNA
tgtctagagaagtcag

SEQ ID NO: 8763 - DNA, 16 bp, synthetic construct
  misc_feature 1..16: note = synthetic [barcode part1]
  source 1..16: mol_type = other DNA
ttctggcgattacgcc

SEQ ID NO: 8764 - DNA, 16 bp, synthetic construct
  misc_feature 1..16: note = synthetic [barcode part1]
  source 1..16: mol_type = other DNA
gactatcagaccgttg

SEQ ID NO: 8765 - DNA, 16 bp, synthetic construct
  misc_feature 1..16: note = synthetic [barcode part1]
  source 1..16: mol_type = other DNA
atcagtggtgaggtgc

SEQ ID NO: 8766 - DNA, 16 bp, synthetic construct
  misc_feature 1..16: note = synthetic [barcode part1]
  source 1..16: mol_type = other DNA
cacgtaactcaacttc

SEQ ID NO: 8767 - DNA, 16 bp, synthetic construct
  misc_feature 1..16: note = synthetic [barcode part1]
  source 1..16: mol_type = other DNA
tcgcagagtccaagtt

SEQ ID NO: 8768 - DNA, 16 bp, synthetic construct
  misc_feature 1..16: note = synthetic [barcode part1]
  source 1..16: mol_type = other DNA
aagtctcctaagaccg

SEQ ID NO: 8769 - DNA, 16 bp, synthetic construct
  misc_feature 1..16: note = synthetic [barcode part1]
  source 1..16: mol_type = other DNA
gaatcacgacgcgaac

SEQ ID NO: 8770 - DNA, 16 bp, synthetic construct
  misc_feature 1..16: note = synthetic [barcode part1]
  source 1..16: mol_type = other DNA
actgtgaacagtgtcc

SEQ ID NO: 8771 - DNA, 16 bp, synthetic construct
  misc_feature 1..16: note = synthetic [barcode part1]
  source 1..16: mol_type = other DNA
tgtctagagtcgtgtg

SEQ ID NO: 8772 - DNA, 16 bp, synthetic construct
  misc_feature 1..16: note = synthetic [barcode part1]
  source 1..16: mol_type = other DNA
ttcagagtagtgccac

SEQ ID NO: 8773 - DNA, 16 bp, synthetic construct
  misc_feature 1..16: note = synthetic [barcode part1]
  source 1..16: mol_type = other DNA
aggaacacgccagact

SEQ ID NO: 8774 - DNA, 16 bp, synthetic construct
  misc_feature 1..16: note = synthetic [barcode part1]
  source 1..16: mol_type = other DNA
tggcgtattctcagtt

SEQ ID NO: 8775 - DNA, 16 bp, synthetic construct
  misc_feature 1..16: note = synthetic [barcode part1]
  source 1..16: mol_type = other DNA
atattgaagaggccac

SEQ ID NO: 8776 - DNA, 16 bp, synthetic construct
  misc_feature 1..16: note = synthetic [barcode part1]
  source 1..16: mol_type = other DNA
acctgagacagatcct

SEQ ID NO: 8777 - DNA, 16 bp, synthetic construct
  misc_feature 1..16: note = synthetic [barcode part1]
  source 1..16: mol_type = other DNA
acctccaagattgttc

SEQ ID NO: 8778 - DNA, 16 bp, synthetic construct
  misc_feature 1..16: note = synthetic [barcode part1]
  source 1..16: mol_type = other DNA
gtgttagaggaactac

SEQ ID NO: 8779 - DNA, 16 bp, synthetic construct
  misc_feature 1..16: note = synthetic [barcode part1]
  source 1..16: mol_type = other DNA
tgattagacgcgcact

SEQ ID NO: 8780 - DNA, 16 bp, synthetic construct
  misc_feature 1..16: note = synthetic [barcode part1]
  source 1..16: mol_type = other DNA
tgtctgaaccaagaag

SEQ ID NO: 8781 - DNA, 16 bp, synthetic construct
  misc_feature 1..16: note = synthetic [barcode part1]
  source 1..16: mol_type = other DNA
gtggcgttgatcaatc

SEQ ID NO: 8782 - DNA, 16 bp, synthetic construct
  misc_feature 1..16: note = synthetic [barcode part1]
  source 1..16: mol_type = other DNA
tcctcggaccggtatt

SEQ ID NO: 8783 - DNA, 16 bp, synthetic construct
  misc_feature 1..16: note = synthetic [barcode part1]
  source 1..16: mol_type = other DNA
ccttctcgaccttagt

SEQ ID NO: 8784 - DNA, 16 bp, synthetic construct
  misc_feature 1..16: note = synthetic [barcode part1]
  source 1..16: mol_type = other DNA
aggtatccgaagtaac

SEQ ID NO: 8785 - DNA, 16 bp, synthetic construct
  misc_feature 1..16: note = synthetic [barcode part1]
  source 1..16: mol_type = other DNA
gtaagaagaggtgcac

SEQ ID NO: 8786 - DNA, 16 bp, synthetic construct
  misc_feature 1..16: note = synthetic [barcode part1]
  source 1..16: mol_type = other DNA
tgtacggtcacgtagt

SEQ ID NO: 8787 - DNA, 16 bp, synthetic construct
  misc_feature 1..16: note = synthetic [barcode part1]
  source 1..16: mol_type = other DNA
taaggtcctcttcctc

SEQ ID NO: 8788 - DNA, 16 bp, synthetic construct
  misc_feature 1..16: note = synthetic [barcode part1]
  source 1..16: mol_type = other DNA
tacaggcggacctatt

SEQ ID NO: 8789 - DNA, 16 bp, synthetic construct
  misc_feature 1..16: note = synthetic [barcode part1]
  source 1..16: mol_type = other DNA
gccacgtaacctatag

SEQ ID NO: 8790 - DNA, 16 bp, synthetic construct
  misc_feature 1..16: note = synthetic [barcode part1]
  source 1..16: mol_type = other DNA
tggaaggtgtatagtc

SEQ ID NO: 8791 - DNA, 16 bp, synthetic construct
  misc_feature 1..16: note = synthetic [barcode part1]
  source 1..16: mol_type = other DNA
ccgttaatacgaagag

SEQ ID NO: 8792 - DNA, 16 bp, synthetic construct
  misc_feature 1..16: note = synthetic [barcode part1]
  source 1..16: mol_type = other DNA
gttacacactgagaag

SEQ ID NO: 8793 - DNA, 16 bp, synthetic construct
  misc_feature 1..16: note = synthetic [barcode part1]
  source 1..16: mol_type = other DNA
actccgcgttcgagtt

SEQ ID NO: 8794 - DNA, 16 bp, synthetic construct
  misc_feature 1..16: note = synthetic [barcode part1]
  source 1..16: mol_type = other DNA
ttcgttgtgacctcct

SEQ ID NO: 8795 - DNA, 16 bp, synthetic construct
  misc_feature 1..16: note = synthetic [barcode part1]
  source 1..16: mol_type = other DNA
taactggtagtgtcgc

SEQ ID NO: 8796 - DNA, 16 bp, synthetic construct
  misc_feature 1..16: note = synthetic [barcode part1]
  source 1..16: mol_type = other DNA
tcggttatagtcggtg

SEQ ID NO: 8797 - DNA, 16 bp, synthetic construct
  misc_feature 1..16: note = synthetic [barcode part1]
  source 1..16: mol_type = other DNA
aaccacgcacgtagtt

SEQ ID NO: 8798 - DNA, 16 bp, synthetic construct
  misc_feature 1..16: note = synthetic [barcode part1]
  source 1..16: mol_type = other DNA
ttccgcaccgataacc

SEQ ID NO: 8799 - DNA, 16 bp, synthetic construct
  misc_feature 1..16: note = synthetic [barcode part1]
  source 1..16: mol_type = other DNA
taagtcgccagactac

SEQ ID NO: 8800 - DNA, 16 bp, synthetic construct
  misc_feature 1..16: note = synthetic [barcode part1]
  source 1..16: mol_type = other DNA
gaagtgccgacaactg

SEQ ID NO: 8801 - DNA, 16 bp, synthetic construct
  misc_feature 1..16: note = synthetic [barcode part1]
  source 1..16: mol_type = other DNA
cgccgtacgatattag

SEQ ID NO: 8802 - DNA, 16 bp, synthetic construct
  misc_feature 1..16: note = synthetic [barcode part1]
  source 1..16: mol_type = other DNA
cctcaatctctcgact

SEQ ID NO: 8803 - DNA, 16 bp, synthetic construct
  misc_feature 1..16: note = synthetic [barcode part1]
  source 1..16: mol_type = other DNA
taaggccaccagttgt

SEQ ID NO: 8804 - DNA, 16 bp, synthetic construct
  misc_feature 1..16: note = synthetic [barcode part1]
  source 1..16: mol_type = other DNA
tacaagtcgcctaggt

SEQ ID NO: 8805 - DNA, 16 bp, synthetic construct
  misc_feature 1..16: note = synthetic [barcode part1]
  source 1..16: mol_type = other DNA
tcctctgactcgagtg

SEQ ID NO: 8806 - DNA, 16 bp, synthetic construct
  misc_feature 1..16: note = synthetic [barcode part1]
  source 1..16: mol_type = other DNA
taattcactgcgtctg

SEQ ID NO: 8807 - DNA, 16 bp, synthetic construct
  misc_feature 1..16: note = synthetic [barcode part1]
  source 1..16: mol_type = other DNA
gtaggtgagtattacg

SEQ ID NO: 8808 - DNA, 16 bp, synthetic construct
  misc_feature 1..16: note = synthetic [barcode part1]
  source 1..16: mol_type = other DNA
gagtcgatcagaagag

SEQ ID NO: 8809 - DNA, 16 bp, synthetic construct
  misc_feature 1..16: note = synthetic [barcode part1]
  source 1..16: mol_type = other DNA
tagacacaattgcgcc

SEQ ID NO: 8810 - DNA, 16 bp, synthetic construct
  misc_feature 1..16: note = synthetic [barcode part1]
  source 1..16: mol_type = other DNA
tatacctgtctccgtc

SEQ ID NO: 8811 - DNA, 16 bp, synthetic construct
  misc_feature 1..16: note = synthetic [barcode part1]
  source 1..16: mol_type = other DNA
cgttggaggtacgagt

SEQ ID NO: 8812 - DNA, 16 bp, synthetic construct
  misc_feature 1..16: note = synthetic [barcode part1]
  source 1..16: mol_type = other DNA
gtcctcttagtgtgcg

SEQ ID NO: 8813 - DNA, 16 bp, synthetic construct
  misc_feature 1..16: note = synthetic [barcode part1]
  source 1..16: mol_type = other DNA
tgaaggcaagtgtgag

SEQ ID NO: 8814 - DNA, 16 bp, synthetic construct
  misc_feature 1..16: note = synthetic [barcode part1]
  source 1..16: mol_type = other DNA
gtgtacgtacgacgtt

SEQ ID NO: 8815 - DNA, 16 bp, synthetic construct
  misc_feature 1..16: note = synthetic [barcode part1]
  source 1..16: mol_type = other DNA
tatatctggatcgcct

SEQ ID NO: 8816 - DNA, 16 bp, synthetic construct
  misc_feature 1..16: note = synthetic [barcode part1]
  source 1..16: mol_type = other DNA
tgtattctggaggtgc

SEQ ID NO: 8817 - DNA, 16 bp, synthetic construct
  misc_feature 1..16: note = synthetic [barcode part1]
  source 1..16: mol_type = other DNA
gactgacgttggttgt

SEQ ID NO: 8818 - DNA, 16 bp, synthetic construct
  misc_feature 1..16: note = synthetic [barcode part1]
  source 1..16: mol_type = other DNA
tgtagaacagtggttg

SEQ ID NO: 8819 - DNA, 16 bp, synthetic construct
  misc_feature 1..16: note = synthetic [barcode part1]
  source 1..16: mol_type = other DNA
cggcgcagttatcctt

SEQ ID NO: 8820 - DNA, 16 bp, synthetic construct
  misc_feature 1..16: note = synthetic [barcode part1]
  source 1..16: mol_type = other DNA
cagacacctagtacgt

SEQ ID NO: 8821 - DNA, 16 bp, synthetic construct
  misc_feature 1..16: note = synthetic [barcode part1]
  source 1..16: mol_type = other DNA
taagtcggcacaaggc

SEQ ID NO: 8822 - DNA, 16 bp, synthetic construct
  misc_feature 1..16: note = synthetic [barcode part1]
  source 1..16: mol_type = other DNA
gttagtcctagagtcg

SEQ ID NO: 8823 - DNA, 16 bp, synthetic construct
  misc_feature 1..16: note = synthetic [barcode part1]
  source 1..16: mol_type = other DNA
tcgcgactaacgttag

SEQ ID NO: 8824 - DNA, 16 bp, synthetic construct
  misc_feature 1..16: note = synthetic [barcode part1]
  source 1..16: mol_type = other DNA
ccgaattaacctggtg

SEQ ID NO: 8825 - DNA, 16 bp, synthetic construct
  misc_feature 1..16: note = synthetic [barcode part1]
  source 1..16: mol_type = other DNA
gcggtcggtattgatt

SEQ ID NO: 8826 - DNA, 16 bp, synthetic construct
  misc_feature 1..16: note = synthetic [barcode part1]
  source 1..16: mol_type = other DNA
cctccgagtattgatt

SEQ ID NO: 8827 - DNA, 16 bp, synthetic construct
  misc_feature 1..16: note = synthetic [barcode part1]
  source 1..16: mol_type = other DNA
gataggaaccgtctct

SEQ ID NO: 8828 - DNA, 16 bp, synthetic construct
  misc_feature 1..16: note = synthetic [barcode part1]
  source 1..16: mol_type = other DNA
cgtcttacctggacgt

SEQ ID NO: 8829 - DNA, 16 bp, synthetic construct
  misc_feature 1..16: note = synthetic [barcode part1]
  source 1..16: mol_type = other DNA
gacaaccaccaagtct

SEQ ID NO: 8830 - DNA, 16 bp, synthetic construct
  misc_feature 1..16: note = synthetic [barcode part1]
  source 1..16: mol_type = other DNA
cgacaactgtggaggt

SEQ ID NO: 8831 - DNA, 16 bp, synthetic construct
  misc_feature 1..16: note = synthetic [barcode part1]
  source 1..16: mol_type = other DNA
gtatccaggcacttag

SEQ ID NO: 8832 - DNA, 16 bp, synthetic construct
  misc_feature 1..16: note = synthetic [barcode part1]
  source 1..16: mol_type = other DNA
gacgatcagaatacgt

SEQ ID NO: 8833 - DNA, 16 bp, synthetic construct
  misc_feature 1..16: note = synthetic [barcode part1]
  source 1..16: mol_type = other DNA
cgtgtccaacgtaagt

SEQ ID NO: 8834 - DNA, 16 bp, synthetic construct
  misc_feature 1..16: note = synthetic [barcode part1]
  source 1..16: mol_type = other DNA
caccgtgaatcagttg

SEQ ID NO: 8835 - DNA, 16 bp, synthetic construct
  misc_feature 1..16: note = synthetic [barcode part1]
  source 1..16: mol_type = other DNA
taggtcacgcgaagac

SEQ ID NO: 8836 - DNA, 16 bp, synthetic construct
  misc_feature 1..16: note = synthetic [barcode part1]
  source 1..16: mol_type = other DNA
gactaattgacgccgt

SEQ ID NO: 8837 - DNA, 16 bp, synthetic construct
  misc_feature 1..16: note = synthetic [barcode part1]
  source 1..16: mol_type = other DNA
aagaagtgttcagacc

SEQ ID NO: 8838 - DNA, 16 bp, synthetic construct
  misc_feature 1..16: note = synthetic [barcode part1]
  source 1..16: mol_type = other DNA
gattcaacttcgcact

SEQ ID NO: 8839 - DNA, 16 bp, synthetic construct
  misc_feature 1..16: note = synthetic [barcode part1]
  source 1..16: mol_type = other DNA
cgccttagtagtgaac

SEQ ID NO: 8840 - DNA, 16 bp, synthetic construct
  misc_feature 1..16: note = synthetic [barcode part1]
  source 1..16: mol_type = other DNA
acgtgcggttagttac

SEQ ID NO: 8841 - DNA, 16 bp, synthetic construct
  misc_feature 1..16: note = synthetic [barcode part1]
  source 1..16: mol_type = other DNA
tcgtagtgagattccg

SEQ ID NO: 8842 - DNA, 16 bp, synthetic construct
  misc_feature 1..16: note = synthetic [barcode part1]
  source 1..16: mol_type = other DNA
gtataccgttctctag

SEQ ID NO: 8843 - DNA, 16 bp, synthetic construct
  misc_feature 1..16: note = synthetic [barcode part1]
  source 1..16: mol_type = other DNA
aagtacctgtctaggc

SEQ ID NO: 8844 - DNA, 16 bp, synthetic construct
  misc_feature 1..16: note = synthetic [barcode part1]
  source 1..16: mol_type = other DNA
actctgactccttctg

SEQ ID NO: 8845 - DNA, 16 bp, synthetic construct
  misc_feature 1..16: note = synthetic [barcode part1]
  source 1..16: mol_type = other DNA
tctctggaactctctc

SEQ ID NO: 8846 - DNA, 16 bp, synthetic construct
  misc_feature 1..16: note = synthetic [barcode part1]
  source 1..16: mol_type = other DNA
gcacaagaggtgtaag

SEQ ID NO: 8847 - DNA, 16 bp, synthetic construct
  misc_feature 1..16: note = synthetic [barcode part1]
  source 1..16: mol_type = other DNA
tacaccacaactgcag

SEQ ID NO: 8848 - DNA, 16 bp, synthetic construct
  misc_feature 1..16: note = synthetic [barcode part1]
  source 1..16: mol_type = other DNA
acctctgcactaggtc

SEQ ID NO: 8849 - DNA, 16 bp, synthetic construct
  misc_feature 1..16: note = synthetic [barcode part1]
  source 1..16: mol_type = other DNA
cggccaattggttaac

SEQ ID NO: 8850 - DNA, 16 bp, synthetic construct
  misc_feature 1..16: note = synthetic [barcode part1]
  source 1..16: mol_type = other DNA
accaatcgacctcaag

SEQ ID NO: 8851 - DNA, 16 bp, synthetic construct
  misc_feature 1..16: note = synthetic [barcode part1]
  source 1..16: mol_type = other DNA
gtaataccacggcgtt

SEQ ID NO: 8852 - DNA, 16 bp, synthetic construct
  misc_feature 1..16: note = synthetic [barcode part1]
  source 1..16: mol_type = other DNA
cgcgaatacctacagt

SEQ ID NO: 8853 - DNA, 16 bp, synthetic construct
  misc_feature 1..16: note = synthetic [barcode part1]
  source 1..16: mol_type = other DNA
actacacgtcactccg

SEQ ID NO: 8854 - DNA, 16 bp, synthetic construct
  misc_feature 1..16: note = synthetic [barcode part1]
  source 1..16: mol_type = other DNA
ccgtcgttcgtggatt

SEQ ID NO: 8855 - DNA, 16 bp, synthetic construct
  misc_feature 1..16: note = synthetic [barcode part1]
  source 1..16: mol_type = other DNA
gttgcgcaagacaacg

SEQ ID NO: 8856 - DNA, 16 bp, synthetic construct
  misc_feature 1..16: note = synthetic [barcode part1]
  source 1..16: mol_type = other DNA
gagactcggacgagtt

SEQ ID NO: 8857 - DNA, 16 bp, synthetic construct
  misc_feature 1..16: note = synthetic [barcode part1]
  source 1..16: mol_type = other DNA
tgcggaaggtctagtg

SEQ ID NO: 8858 - DNA, 16 bp, synthetic construct
  misc_feature 1..16: note = synthetic [barcode part1]
  source 1..16: mol_type = other DNA
acctcctattggcacg

SEQ ID NO: 8859 - DNA, 16 bp, synthetic construct
  misc_feature 1..16: note = synthetic [barcode part1]
  source 1..16: mol_type = other DNA
aataacgtgccacctg

SEQ ID NO: 8860 - DNA, 16 bp, synthetic construct
  misc_feature 1..16: note = synthetic [barcode part1]
  source 1..16: mol_type = other DNA
gaacgccgatacttac

SEQ ID NO: 8861 - DNA, 16 bp, synthetic construct
  misc_feature 1..16: note = synthetic [barcode part1]
  source 1..16: mol_type = other DNA
gacgtcacacaacact

SEQ ID NO: 8862 - DNA, 16 bp, synthetic construct
  misc_feature 1..16: note = synthetic [barcode part1]
  source 1..16: mol_type = other DNA
acgaggactctgtatc

SEQ ID NO: 8863 - DNA, 16 bp, synthetic construct
  misc_feature 1..16: note = synthetic [barcode part1]
  source 1..16: mol_type = other DNA
cgttcgcaacgtcgtt

SEQ ID NO: 8864 - DNA, 16 bp, synthetic construct
  misc_feature 1..16: note = synthetic [barcode part1]
  source 1..16: mol_type = other DNA
caacttccacgtaact

SEQ ID NO: 8865 - DNA, 16 bp, synthetic construct
  misc_feature 1..16: note = synthetic [barcode part1]
  source 1..16: mol_type = other DNA
tgagtctggcaaggtg

SEQ ID NO: 8866 - DNA, 16 bp, synthetic construct
  misc_feature 1..16: note = synthetic [barcode part1]
  source 1..16: mol_type = other DNA
tgtctgtcactcacct

SEQ ID NO: 8867 - DNA, 16 bp, synthetic construct
  misc_feature 1..16: note = synthetic [barcode part1]
  source 1..16: mol_type = other DNA
gtacttcgagacacgt

SEQ ID NO: 8868 - DNA, 16 bp, synthetic construct
  misc_feature 1..16: note = synthetic [barcode part1]
  source 1..16: mol_type = other DNA
aatacgaacgactcag

SEQ ID NO: 8869 - DNA, 16 bp, synthetic construct
  misc_feature 1..16: note = synthetic [barcode part1]
  source 1..16: mol_type = other DNA
ccactgcaataggact

SEQ ID NO: 8870 - DNA, 16 bp, synthetic construct
  misc_feature 1..16: note = synthetic [barcode part1]
  source 1..16: mol_type = other DNA
gacacgtgttggtact

SEQ ID NO: 8871 - DNA, 16 bp, synthetic construct
  misc_feature 1..16: note = synthetic [barcode part1]
  source 1..16: mol_type = other DNA
tggtgtgtcttcagtt

SEQ ID NO: 8872 - DNA, 16 bp, synthetic construct
  misc_feature 1..16: note = synthetic [barcode part1]
  source 1..16: mol_type = other DNA
atactctgcgtctctc

SEQ ID NO: 8873 - DNA, 16 bp, synthetic construct
  misc_feature 1..16: note = synthetic [barcode part1]
  source 1..16: mol_type = other DNA
gcaacttacgacctag

SEQ ID NO: 8874 - DNA, 16 bp, synthetic construct
  misc_feature 1..16: note = synthetic [barcode part1]
  source 1..16: mol_type = other DNA
gcaccactacttaccg

SEQ ID NO: 8875 - DNA, 16 bp, synthetic construct
  misc_feature 1..16: note = synthetic [barcode part1]
  source 1..16: mol_type = other DNA
aagtgtaccgaatcag

SEQ ID NO: 8876 - DNA, 16 bp, synthetic construct
  misc_feature 1..16: note = synthetic [barcode part1]
  source 1..16: mol_type = other DNA
gtatattaggcgcctg

SEQ ID NO: 8877 - DNA, 16 bp, synthetic construct
  misc_feature 1..16: note = synthetic [barcode part1]
  source 1..16: mol_type = other DNA
cgcacgtatatacgtg

SEQ ID NO: 8878 - DNA, 16 bp, synthetic construct
  misc_feature 1..16: note = synthetic [barcode part1]
  source 1..16: mol_type = other DNA
tagtacgtcgacacac

SEQ ID NO: 8879 - DNA, 16 bp, synthetic construct
  misc_feature 1..16: note = synthetic [barcode part1]
  source 1..16: mol_type = other DNA
ttgtctgaacaccgtt

SEQ ID NO: 8880 - DNA, 16 bp, synthetic construct
  misc_feature 1..16: note = synthetic [barcode part1]
  source 1..16: mol_type = other DNA
gaacaatctctgccag

SEQ ID NO: 8881 - DNA, 16 bp, synthetic construct
  misc_feature 1..16: note = synthetic [barcode part1]
  source 1..16: mol_type = other DNA
tcctcgttcgtattcg

SEQ ID NO: 8882 - DNA, 16 bp, synthetic construct
  misc_feature 1..16: note = synthetic [barcode part1]
  source 1..16: mol_type = other DNA
ttctaggcgtctgtcg

SEQ ID NO: 8883 - DNA, 16 bp, synthetic construct
  misc_feature 1..16: note = synthetic [barcode part1]
  source 1..16: mol_type = other DNA
gttcaggacctcacct

SEQ ID NO: 8884 - DNA, 16 bp, synthetic construct
  misc_feature 1..16: note = synthetic [barcode part1]
  source 1..16: mol_type = other DNA
aacagaggaccgtatt

SEQ ID NO: 8885 - DNA, 16 bp, synthetic construct
  misc_feature 1..16: note = synthetic [barcode part1]
  source 1..16: mol_type = other DNA
tgaacgccttccaatt

SEQ ID NO: 8886 - DNA, 16 bp, synthetic construct
  misc_feature 1..16: note = synthetic [barcode part1]
  source 1..16: mol_type = other DNA
ttgtggtggagagaag

SEQ ID NO: 8887 - DNA, 16 bp, synthetic construct
  misc_feature 1..16: note = synthetic [barcode part1]
  source 1..16: mol_type = other DNA
agtggtgaagtccacg

SEQ ID NO: 8888 - DNA, 16 bp, synthetic construct
  misc_feature 1..16: note = synthetic [barcode part1]
  source 1..16: mol_type = other DNA
gagttacaggtacggc

SEQ ID NO: 8889 - DNA, 16 bp, synthetic construct
  misc_feature 1..16: note = synthetic [barcode part1]
  source 1..16: mol_type = other DNA
gaggtgttggtccaag

SEQ ID NO: 8890 - DNA, 16 bp, synthetic construct
  misc_feature 1..16: note = synthetic [barcode part1]
  source 1..16: mol_type = other DNA
gtacactctgttatcg

SEQ ID NO: 8891 - DNA, 16 bp, synthetic construct
  misc_feature 1..16: note = synthetic [barcode part1]
  source 1..16: mol_type = other DNA
cgagagtaggttgtcg

SEQ ID NO: 8892 - DNA, 16 bp, synthetic construct
  misc_feature 1..16: note = synthetic [barcode part1]
  source 1..16: mol_type = other DNA
ccgcacttgtcagact

SEQ ID NO: 8893 - DNA, 16 bp, synthetic construct
  misc_feature 1..16: note = synthetic [barcode part1]
  source 1..16: mol_type = other DNA
ttgtcacgatactcgt

SEQ ID NO: 8894 - DNA, 16 bp, synthetic construct
  misc_feature 1..16: note = synthetic [barcode part1]
  source 1..16: mol_type = other DNA
gtattaacctccaacc

SEQ ID NO: 8895 - DNA, 16 bp, synthetic construct
  misc_feature 1..16: note = synthetic [barcode part1]
  source 1..16: mol_type = other DNA
ttaaccgccagaactg

SEQ ID NO: 8896 - DNA, 16 bp, synthetic construct
  misc_feature 1..16: note = synthetic [barcode part1]
  source 1..16: mol_type = other DNA
tacacgttggtgtcag

SEQ ID NO: 8897 - DNA, 16 bp, synthetic construct
  misc_feature 1..16: note = synthetic [barcode part1]
  source 1..16: mol_type = other DNA
tgtggtaagtgttgcc

SEQ ID NO: 8898 - DNA, 16 bp, synthetic construct
  misc_feature 1..16: note = synthetic [barcode part1]
  source 1..16: mol_type = other DNA
acgcaagtaggagtag

SEQ ID NO: 8899 - DNA, 16 bp, synthetic construct
  misc_feature 1..16: note = synthetic [barcode part1]
  source 1..16: mol_type = other DNA
cgaagtcgtcacaact

SEQ ID NO: 8900 - DNA, 16 bp, synthetic construct
  misc_feature 1..16: note = synthetic [barcode part1]
  source 1..16: mol_type = other DNA
cgcgcctataatctgc

SEQ ID NO: 8901 - DNA, 16 bp, synthetic construct
  misc_feature 1..16: note = synthetic [barcode part1]
  source 1..16: mol_type = other DNA
tgcgttagattggaag

SEQ ID NO: 8902 - DNA, 16 bp, synthetic construct
  misc_feature 1..16: note = synthetic [barcode part1]
  source 1..16: mol_type = other DNA
actgttgactgtcgag

SEQ ID NO: 8903 - DNA, 16 bp, synthetic construct
  misc_feature 1..16: note = synthetic [barcode part1]
  source 1..16: mol_type = other DNA
cagttagaaggaaggc

SEQ ID NO: 8904 - DNA, 16 bp, synthetic construct
  misc_feature 1..16: note = synthetic [barcode part1]
  source 1..16: mol_type = other DNA
gttctcaaggcgtagt

SEQ ID NO: 8905 - DNA, 16 bp, synthetic construct
  misc_feature 1..16: note = synthetic [barcode part1]
  source 1..16: mol_type = other DNA
gaatattcttgccacc

SEQ ID NO: 8906 - DNA, 16 bp, synthetic construct
  misc_feature 1..16: note = synthetic [barcode part1]
  source 1..16: mol_type = other DNA
tcggaccgtatcttcg

SEQ ID NO: 8907 - DNA, 16 bp, synthetic construct
  misc_feature 1..16: note = synthetic [barcode part1]
  source 1..16: mol_type = other DNA
tatacgcaccgactag

SEQ ID NO: 8908 - DNA, 16 bp, synthetic construct
  misc_feature 1..16: note = synthetic [barcode part1]
  source 1..16: mol_type = other DNA
gtcaaggcaatatacg

SEQ ID NO: 8909 - DNA, 16 bp, synthetic construct
  misc_feature 1..16: note = synthetic [barcode part1]
  source 1..16: mol_type = other DNA
acacagtctgacctcc

SEQ ID NO: 8910 - DNA, 16 bp, synthetic construct
  misc_feature 1..16: note = synthetic [barcode part1]
  source 1..16: mol_type = other DNA
tggattctgttcggag

SEQ ID NO: 8911 - DNA, 16 bp, synthetic construct
  misc_feature 1..16: note = synthetic [barcode part1]
  source 1..16: mol_type = other DNA
aggttggaagaggttg

SEQ ID NO: 8912 - DNA, 16 bp, synthetic construct
  misc_feature 1..16: note = synthetic [barcode part1]
  source 1..16: mol_type = other DNA
gtggttgtacgcgatt

SEQ ID NO: 8913 - DNA, 16 bp, synthetic construct
  misc_feature 1..16: note = synthetic [barcode part1]
  source 1..16: mol_type = other DNA
tcaacttaggtgttcc

SEQ ID NO: 8914 - DNA, 16 bp, synthetic construct
  misc_feature 1..16: note = synthetic [barcode part1]
  source 1..16: mol_type = other DNA
cgtcttgttatctcgc

SEQ ID NO: 8915 - DNA, 16 bp, synthetic construct
  misc_feature 1..16: note = synthetic [barcode part1]
  source 1..16: mol_type = other DNA
gtagtacgtactacgc

SEQ ID NO: 8916 - DNA, 16 bp, synthetic construct
  misc_feature 1..16: note = synthetic [barcode part1]
  source 1..16: mol_type = other DNA
ccagatacctattgtc

SEQ ID NO: 8917 - DNA, 16 bp, synthetic construct
  misc_feature 1..16: note = synthetic [barcode part1]
  source 1..16: mol_type = other DNA
aacttccaactcgtgt

SEQ ID NO: 8918 - DNA, 16 bp, synthetic construct
  misc_feature 1..16: note = synthetic [barcode part1]
  source 1..16: mol_type = other DNA
agtgatcaagaacgtc

SEQ ID NO: 8919 - DNA, 16 bp, synthetic construct
  misc_feature 1..16: note = synthetic [barcode part1]
  source 1..16: mol_type = other DNA
tagtagaccgcgaacg

SEQ ID NO: 8920 - DNA, 16 bp, synthetic construct
  misc_feature 1..16: note = synthetic [barcode part1]
  source 1..16: mol_type = other DNA
accaacaatagtcgcc

SEQ ID NO: 8921 - DNA, 16 bp, synthetic construct
  misc_feature 1..16: note = synthetic [barcode part1]
  source 1..16: mol_type = other DNA
tctgtccaacgttgcg

SEQ ID NO: 8922 - DNA, 16 bp, synthetic construct
  misc_feature 1..16: note = synthetic [barcode part1]
  source 1..16: mol_type = other DNA
gtctcggttagagttg

SEQ ID NO: 8923 - DNA, 16 bp, synthetic construct
  misc_feature 1..16: note = synthetic [barcode part1]
  source 1..16: mol_type = other DNA
acgactgtgcacgatt

SEQ ID NO: 8924 - DNA, 16 bp, synthetic construct
  misc_feature 1..16: note = synthetic [barcode part1]
  source 1..16: mol_type = other DNA
attgcaccgactcctg

SEQ ID NO: 8925 - DNA, 16 bp, synthetic construct
  misc_feature 1..16: note = synthetic [barcode part1]
  source 1..16: mol_type = other DNA
tacacctggtgtgagt

SEQ ID NO: 8926 - DNA, 16 bp, synthetic construct
  misc_feature 1..16: note = synthetic [barcode part1]
  source 1..16: mol_type = other DNA
gtgtgtgccaatcagt

SEQ ID NO: 8927 - DNA, 16 bp, synthetic construct
  misc_feature 1..16: note = synthetic [barcode part1]
  source 1..16: mol_type = other DNA
gtagagagacctaact

SEQ ID NO: 8928 - DNA, 16 bp, synthetic construct
  misc_feature 1..16: note = synthetic [barcode part1]
  source 1..16: mol_type = other DNA
acctgcgtacagattg

SEQ ID NO: 8929 - DNA, 16 bp, synthetic construct
  misc_feature 1..16: note = synthetic [barcode part1]
  source 1..16: mol_type = other DNA
attaggacggtacgcg

SEQ ID NO: 8930 - DNA, 16 bp, synthetic construct
  misc_feature 1..16: note = synthetic [barcode part1]
  source 1..16: mol_type = other DNA
cggtcagttaactgac

SEQ ID NO: 8931 - DNA, 16 bp, synthetic construct
  misc_feature 1..16: note = synthetic [barcode part1]
  source 1..16: mol_type = other DNA
aggtgttccacctcac

SEQ ID NO: 8932 - DNA, 16 bp, synthetic construct
  misc_feature 1..16: note = synthetic [barcode part1]
  source 1..16: mol_type = other DNA
tagtataggagtgacc

SEQ ID NO: 8933 - DNA, 16 bp, synthetic construct
  misc_feature 1..16: note = synthetic [barcode part1]
  source 1..16: mol_type = other DNA
cagacgtcctcactgt

SEQ ID NO: 8934 - DNA, 16 bp, synthetic construct
  misc_feature 1..16: note = synthetic [barcode part1]
  source 1..16: mol_type = other DNA
tcgaacgacagactct

SEQ ID NO: 8935 - DNA, 16 bp, synthetic construct
  misc_feature 1..16: note = synthetic [barcode part1]
  source 1..16: mol_type = other DNA
gcgttaatcagtacgc

SEQ ID NO: 8936 - DNA, 16 bp, synthetic construct
  misc_feature 1..16: note = synthetic [barcode part1]
  source 1..16: mol_type = other DNA
tcacgtctactgaatc

SEQ ID NO: 8937 - DNA, 16 bp, synthetic construct
  misc_feature 1..16: note = synthetic [barcode part1]
  source 1..16: mol_type = other DNA
cagtgattgtaggaac

SEQ ID NO: 8938 - DNA, 16 bp, synthetic construct
  misc_feature 1..16: note = synthetic [barcode part1]
  source 1..16: mol_type = other DNA
tgttactgtgaggtgc

SEQ ID NO: 8939 - DNA, 16 bp, synthetic construct
  misc_feature 1..16: note = synthetic [barcode part1]
  source 1..16: mol_type = other DNA
tggttccaggatcaac

SEQ ID NO: 8940 - DNA, 16 bp, synthetic construct
  misc_feature 1..16: note = synthetic [barcode part1]
  source 1..16: mol_type = other DNA
tcgattcagtgtgtct

SEQ ID NO: 8941 - DNA, 16 bp, synthetic construct
  misc_feature 1..16: note = synthetic [barcode part1]
  source 1..16: mol_type = other DNA
gttcagatatcactcc

SEQ ID NO: 8942 - DNA, 16 bp, synthetic construct
  misc_feature 1..16: note = synthetic [barcode part1]
  source 1..16: mol_type = other DNA
gatactctcgtgcaag

SEQ ID NO: 8943 - DNA, 16 bp, synthetic construct
  misc_feature 1..16: note = synthetic [barcode part1]
  source 1..16: mol_type = other DNA
taaggaatcggtcctc

SEQ ID NO: 8944 - DNA, 16 bp, synthetic construct
  misc_feature 1..16: note = synthetic [barcode part1]
  source 1..16: mol_type = other DNA
ttcgttggtcaggagt

SEQ ID NO: 8945 - DNA, 16 bp, synthetic construct
  misc_feature 1..16: note = synthetic [barcode part1]
  source 1..16: mol_type = other DNA
tccaagttccaattcg

SEQ ID NO: 8946 - DNA, 16 bp, synthetic construct
  misc_feature 1..16: note = synthetic [barcode part1]
  source 1..16: mol_type = other DNA
gaagttacgactcctg

SEQ ID NO: 8947 - DNA, 16 bp, synthetic construct
  misc_feature 1..16: note = synthetic [barcode part1]
  source 1..16: mol_type = other DNA
agtcggtgcgtatact

SEQ ID NO: 8948 - DNA, 16 bp, synthetic construct
  misc_feature 1..16: note = synthetic [barcode part1]
  source 1..16: mol_type = other DNA
atctagacactgtcct

SEQ ID NO: 8949 - DNA, 16 bp, synthetic construct
  misc_feature 1..16: note = synthetic [barcode part1]
  source 1..16: mol_type = other DNA
tacgacaggcggatac

SEQ ID NO: 8950 - DNA, 16 bp, synthetic construct
  misc_feature 1..16: note = synthetic [barcode part1]
  source 1..16: mol_type = other DNA
acacgttacaaccacg

SEQ ID NO: 8951 - DNA, 16 bp, synthetic construct
  misc_feature 1..16: note = synthetic [barcode part1]
  source 1..16: mol_type = other DNA
cagacgactattcacg

SEQ ID NO: 8952 - DNA, 16 bp, synthetic construct
  misc_feature 1..16: note = synthetic [barcode part1]
  source 1..16: mol_type = other DNA
atctatcctcgtccac

SEQ ID NO: 8953 - DNA, 16 bp, synthetic construct
  misc_feature 1..16: note = synthetic [barcode part1]
  source 1..16: mol_type = other DNA
cggcctatccaataag

SEQ ID NO: 8954 - DNA, 16 bp, synthetic construct
  misc_feature 1..16: note = synthetic [barcode part1]
  source 1..16: mol_type = other DNA
gtgacagacagagtag

SEQ ID NO: 8955 - DNA, 16 bp, synthetic construct
  misc_feature 1..16: note = synthetic [barcode part1]
  source 1..16: mol_type = other DNA
gcctctattactagac

SEQ ID NO: 8956 - DNA, 16 bp, synthetic construct
  misc_feature 1..16: note = synthetic [barcode part1]
  source 1..16: mol_type = other DNA
aggtgactgactcttg

SEQ ID NO: 8957 - DNA, 16 bp, synthetic construct
  misc_feature 1..16: note = synthetic [barcode part1]
  source 1..16: mol_type = other DNA
ttagacgcctatcgcc

SEQ ID NO: 8958 - DNA, 16 bp, synthetic construct
  misc_feature 1..16: note = synthetic [barcode part1]
  source 1..16: mol_type = other DNA
ataggccaaccgtact

SEQ ID NO: 8959 - DNA, 16 bp, synthetic construct
  misc_feature 1..16: note = synthetic [barcode part1]
  source 1..16: mol_type = other DNA
tcggtctctcaatctc

SEQ ID NO: 8960 - DNA, 16 bp, synthetic construct
  misc_feature 1..16: note = synthetic [barcode part1]
  source 1..16: mol_type = other DNA
cggtaattgtgagaac

SEQ ID NO: 8961 - DNA, 16 bp, synthetic construct
  misc_feature 1..16: note = synthetic [barcode part1]
  source 1..16: mol_type = other DNA
cgatctaggcgtgaag

SEQ ID NO: 8962 - DNA, 16 bp, synthetic construct
  misc_feature 1..16: note = synthetic [barcode part1]
  source 1..16: mol_type = other DNA
ttgacctctgtcacct

SEQ ID NO: 8963 - DNA, 16 bp, synthetic construct
  misc_feature 1..16: note = synthetic [barcode part1]
  source 1..16: mol_type = other DNA
cgattcaagacacaag

SEQ ID NO: 8964 - DNA, 16 bp, synthetic construct
  misc_feature 1..16: note = synthetic [barcode part1]
  source 1..16: mol_type = other DNA
tagtcggtaaccgact

SEQ ID NO: 8965 - DNA, 16 bp, synthetic construct
  misc_feature 1..16: note = synthetic [barcode part1]
  source 1..16: mol_type = other DNA
gaattgcgtctgacac

SEQ ID NO: 8966 - DNA, 16 bp, synthetic construct
  misc_feature 1..16: note = synthetic [barcode part1]
  source 1..16: mol_type = other DNA
attgcactgtaccgag

SEQ ID NO: 8967 - DNA, 16 bp, synthetic construct
  misc_feature 1..16: note = synthetic [barcode part1]
  source 1..16: mol_type = other DNA
caccacttcacacgac

SEQ ID NO: 8968 - DNA, 16 bp, synthetic construct
  misc_feature 1..16: note = synthetic [barcode part1]
  source 1..16: mol_type = other DNA
ttctctccgaccaatc

SEQ ID NO: 8969 - DNA, 16 bp, synthetic construct
  misc_feature 1..16: note = synthetic [barcode part1]
  source 1..16: mol_type = other DNA
gactgagagtgacaag

SEQ ID NO: 8970 - DNA, 16 bp, synthetic construct
  misc_feature 1..16: note = synthetic [barcode part1]
  source 1..16: mol_type = other DNA
gtgagtggaacctcag

SEQ ID NO: 8971 - DNA, 16 bp, synthetic construct
  misc_feature 1..16: note = synthetic [barcode part1]
  source 1..16: mol_type = other DNA
ccttgactgcactgac

SEQ ID NO: 8972 - DNA, 16 bp, synthetic construct
  misc_feature 1..16: note = synthetic [barcode part1]
  source 1..16: mol_type = other DNA
acgacagacttggacg

SEQ ID NO: 8973 - DNA, 16 bp, synthetic construct
  misc_feature 1..16: note = synthetic [barcode part1]
  source 1..16: mol_type = other DNA
tgaacgtgtcagaggc

SEQ ID NO: 8974 - DNA, 16 bp, synthetic construct
  misc_feature 1..16: note = synthetic [barcode part1]
  source 1..16: mol_type = other DNA
cgacggccgtattctt

SEQ ID NO: 8975 - DNA, 16 bp, synthetic construct
  misc_feature 1..16: note = synthetic [barcode part1]
  source 1..16: mol_type = other DNA
tcttgccgaactcacg

SEQ ID NO: 8976 - DNA, 16 bp, synthetic construct
  misc_feature 1..16: note = synthetic [barcode part1]
  source 1..16: mol_type = other DNA
gagtagataccacagt

SEQ ID NO: 8977 - DNA, 16 bp, synthetic construct
  misc_feature 1..16: note = synthetic [barcode part1]
  source 1..16: mol_type = other DNA
atcgtccgagtaacac

SEQ ID NO: 8978 - DNA, 16 bp, synthetic construct
  misc_feature 1..16: note = synthetic [barcode part1]
  source 1..16: mol_type = other DNA
tgtcaagtacttccac

SEQ ID NO: 8979 - DNA, 16 bp, synthetic construct
  misc_feature 1..16: note = synthetic [barcode part1]
  source 1..16: mol_type = other DNA
gatcggaaccttctag

SEQ ID NO: 8980 - DNA, 16 bp, synthetic construct
  misc_feature 1..16: note = synthetic [barcode part1]
  source 1..16: mol_type = other DNA
atcagtcaagactccg

SEQ ID NO: 8981 - DNA, 16 bp, synthetic construct
  misc_feature 1..16: note = synthetic [barcode part1]
  source 1..16: mol_type = other DNA
gttaccacctcgtacg

SEQ ID NO: 8982 - DNA, 16 bp, synthetic construct
  misc_feature 1..16: note = synthetic [barcode part1]
  source 1..16: mol_type = other DNA
ttagtctacggccgtc

SEQ ID NO: 8983 - DNA, 16 bp, synthetic construct
  misc_feature 1..16: note = synthetic [barcode part1]
  source 1..16: mol_type = other DNA
tattctggacggaacc

SEQ ID NO: 8984 - DNA, 16 bp, synthetic construct
  misc_feature 1..16: note = synthetic [barcode part1]
  source 1..16: mol_type = other DNA
tacttcaagacggcac

SEQ ID NO: 8985 - DNA, 16 bp, synthetic construct
  misc_feature 1..16: note = synthetic [barcode part1]
  source 1..16: mol_type = other DNA
acagaaggcactcctt

SEQ ID NO: 8986 - DNA, 16 bp, synthetic construct
  misc_feature 1..16: note = synthetic [barcode part1]
  source 1..16: mol_type = other DNA
cgcgacgttataacgt

SEQ ID NO: 8987 - DNA, 16 bp, synthetic construct
  misc_feature 1..16: note = synthetic [barcode part1]
  source 1..16: mol_type = other DNA
ttactaaccttacgcg

SEQ ID NO: 8988 - DNA, 16 bp, synthetic construct
  misc_feature 1..16: note = synthetic [barcode part1]
  source 1..16: mol_type = other DNA
tatataggttcctcgc

SEQ ID NO: 8989 - DNA, 16 bp, synthetic construct
  misc_feature 1..16: note = synthetic [barcode part1]
  source 1..16: mol_type = other DNA
gtggtcacaactgtgt

SEQ ID NO: 8990 - DNA, 16 bp, synthetic construct
  misc_feature 1..16: note = synthetic [barcode part1]
  source 1..16: mol_type = other DNA
ttgccgtaggtctgtc

SEQ ID NO: 8991 - DNA, 16 bp, synthetic construct
  misc_feature 1..16: note = synthetic [barcode part1]
  source 1..16: mol_type = other DNA
gcagtgaattcaagtg

SEQ ID NO: 8992 - DNA, 16 bp, synthetic construct
  misc_feature 1..16: note = synthetic [barcode part1]
  source 1..16: mol_type = other DNA
gagaggcgaattaggt

SEQ ID NO: 8993 - DNA, 16 bp, synthetic construct
  misc_feature 1..16: note = synthetic [barcode part1]
  source 1..16: mol_type = other DNA
gtcgtcgtagtaatcg

SEQ ID NO: 8994 - DNA, 16 bp, synthetic construct
  misc_feature 1..16: note = synthetic [barcode part1]
  source 1..16: mol_type = other DNA
gaatagactcacctgc

SEQ ID NO: 8995 - DNA, 16 bp, synthetic construct
  misc_feature 1..16: note = synthetic [barcode part1]
  source 1..16: mol_type = other DNA
cgagatctgtgacact

SEQ ID NO: 8996 - DNA, 16 bp, synthetic construct
  misc_feature 1..16: note = synthetic [barcode part1]
  source 1..16: mol_type = other DNA
tgatcgagatcagtcc

SEQ ID NO: 8997 - DNA, 16 bp, synthetic construct
  misc_feature 1..16: note = synthetic [barcode part1]
  source 1..16: mol_type = other DNA
ttagacacctggacgt

SEQ ID NO: 8998 - DNA, 16 bp, synthetic construct
  misc_feature 1..16: note = synthetic [barcode part1]
  source 1..16: mol_type = other DNA
tacggcgttgtagtac

SEQ ID NO: 8999 - DNA, 16 bp, synthetic construct
  misc_feature 1..16: note = synthetic [barcode part1]
  source 1..16: mol_type = other DNA
agagtggtaaggcaac

SEQ ID NO: 9000 - DNA, 16 bp, synthetic construct
  misc_feature 1..16: note = synthetic [barcode part1]
  source 1..16: mol_type = other DNA
taccaccgtagagtac

SEQ ID NO: 9001 - DNA, 16 bp, synthetic construct
  misc_feature 1..16: note = synthetic [barcode part1]
  source 1..16: mol_type = other DNA
agtgcgcgttgatatc

SEQ ID NO: 9002 - DNA, 16 bp, synthetic construct
  misc_feature 1..16: note = synthetic [barcode part1]
  source 1..16: mol_type = other DNA
gtcagagactagtgcg

SEQ ID NO: 9003 - DNA, 16 bp, synthetic construct
  misc_feature 1..16: note = synthetic [barcode part1]
  source 1..16: mol_type = other DNA
tctgtataggacacgc

SEQ ID NO: 9004 - DNA, 16 bp, synthetic construct
  misc_feature 1..16: note = synthetic [barcode part1]
  source 1..16: mol_type = other DNA
atcctgagtacacgtg

SEQ ID NO: 9005 - DNA, 16 bp, synthetic construct
  misc_feature 1..16: note = synthetic [barcode part1]
  source 1..16: mol_type = other DNA
tcaacacttctggttg

SEQ ID NO: 9006 - DNA, 16 bp, synthetic construct
  misc_feature 1..16: note = synthetic [barcode part1]
  source 1..16: mol_type = other DNA
accgtgatctatctgt

SEQ ID NO: 9007 - DNA, 16 bp, synthetic construct
  misc_feature 1..16: note = synthetic [barcode part1]
  source 1..16: mol_type = other DNA
gcagttgcaacacgtt

SEQ ID NO: 9008 - DNA, 16 bp, synthetic construct
  misc_feature 1..16: note = synthetic [barcode part1]
  source 1..16: mol_type = other DNA
aattgcgaggatcggc

SEQ ID NO: 9009 - DNA, 16 bp, synthetic construct
  misc_feature 1..16: note = synthetic [barcode part1]
  source 1..16: mol_type = other DNA
atacgaacctgtgtcg

SEQ ID NO: 9010 - DNA, 16 bp, synthetic construct
  misc_feature 1..16: note = synthetic [barcode part1]
  source 1..16: mol_type = other DNA
gtctacctgtctgttc

SEQ ID NO: 9011 - DNA, 16 bp, synthetic construct
  misc_feature 1..16: note = synthetic [barcode part1]
  source 1..16: mol_type = other DNA
ttggacgtgtctaggt

SEQ ID NO: 9012 - DNA, 16 bp, synthetic construct
  misc_feature 1..16: note = synthetic [barcode part1]
  source 1..16: mol_type = other DNA
caacacactgagtacc

SEQ ID NO: 9013 - DNA, 16 bp, synthetic construct
  misc_feature 1..16: note = synthetic [barcode part1]
  source 1..16: mol_type = other DNA
gcaagttgcacctaac

SEQ ID NO: 9014 - DNA, 16 bp, synthetic construct
  misc_feature 1..16: note = synthetic [barcode part1]
  source 1..16: mol_type = other DNA
gactagtgtcgtgatc

SEQ ID NO: 9015 - DNA, 16 bp, synthetic construct
  misc_feature 1..16: note = synthetic [barcode part1]
  source 1..16: mol_type = other DNA
gaaccgtacagtctgt

SEQ ID NO: 9016 - DNA, 16 bp, synthetic construct
  misc_feature 1..16: note = synthetic [barcode part1]
  source 1..16: mol_type = other DNA
cgaagaatacggccgt

SEQ ID NO: 9017 - DNA, 16 bp, synthetic construct
  misc_feature 1..16: note = synthetic [barcode part1]
  source 1..16: mol_type = other DNA
gataacctaatccggc

SEQ ID NO: 9018 - DNA, 16 bp, synthetic construct
  misc_feature 1..16: note = synthetic [barcode part1]
  source 1..16: mol_type = other DNA
cacgagtaggtctgtt

SEQ ID NO: 9019 - DNA, 16 bp, synthetic construct
  misc_feature 1..16: note = synthetic [barcode part1]
  source 1..16: mol_type = other DNA
gagtgtcctacaggtt

SEQ ID NO: 9020 - DNA, 16 bp, synthetic construct
  misc_feature 1..16: note = synthetic [barcode part1]
  source 1..16: mol_type = other DNA
agacggttcctatcag

SEQ ID NO: 9021 - DNA, 16 bp, synthetic construct
  misc_feature 1..16: note = synthetic [barcode part1]
  source 1..16: mol_type = other DNA
gacgtcgaacttcaac

SEQ ID NO: 9022 - DNA, 16 bp, synthetic construct
  misc_feature 1..16: note = synthetic [barcode part1]
  source 1..16: mol_type = other DNA
acttcgccgaatccac

SEQ ID NO: 9023 - DNA, 16 bp, synthetic construct
  misc_feature 1..16: note = synthetic [barcode part1]
  source 1..16: mol_type = other DNA
aaccggaagatcagag

SEQ ID NO: 9024 - DNA, 16 bp, synthetic construct
  misc_feature 1..16: note = synthetic [barcode part1]
  source 1..16: mol_type = other DNA
ttaatactggcgcacg

SEQ ID NO: 9025 - DNA, 16 bp, synthetic construct
  misc_feature 1..16: note = synthetic [barcode part1]
  source 1..16: mol_type = other DNA
tgactacggtgtatcg

SEQ ID NO: 9026 - DNA, 16 bp, synthetic construct
  misc_feature 1..16: note = synthetic [barcode part1]
  source 1..16: mol_type = other DNA
aattgtacggtgcacc

SEQ ID NO: 9027 - DNA, 16 bp, synthetic construct
  misc_feature 1..16: note = synthetic [barcode part1]
  source 1..16: mol_type = other DNA
acttatacctccagtg

SEQ ID NO: 9028 - DNA, 16 bp, synthetic construct
  misc_feature 1..16: note = synthetic [barcode part1]
  source 1..16: mol_type = other DNA
tccgactacacgtcac

SEQ ID NO: 9029 - DNA, 16 bp, synthetic construct
  misc_feature 1..16: note = synthetic [barcode part1]
  source 1..16: mol_type = other DNA
gcgataccttctcctt

SEQ ID NO: 9030 - DNA, 16 bp, synthetic construct
  misc_feature 1..16: note = synthetic [barcode part1]
  source 1..16: mol_type = other DNA
gacttaggtcggattc

SEQ ID NO: 9031 - DNA, 16 bp, synthetic construct
  misc_feature 1..16: note = synthetic [barcode part1]
  source 1..16: mol_type = other DNA
ccaattcctgcacggt

SEQ ID NO: 9032 - DNA, 16 bp, synthetic construct
  misc_feature 1..16: note = synthetic [barcode part1]
  source 1..16: mol_type = other DNA
cctcttcgaaggaagt

SEQ ID NO: 9033 - DNA, 16 bp, synthetic construct
  misc_feature 1..16: note = synthetic [barcode part1]
  source 1..16: mol_type = other DNA
gaattccttcctctcg

SEQ ID NO: 9034 - DNA, 16 bp, synthetic construct
  misc_feature 1..16: note = synthetic [barcode part1]
  source 1..16: mol_type = other DNA
atctccagtctggcgt

SEQ ID NO: 9035 - DNA, 16 bp, synthetic construct
  misc_feature 1..16: note = synthetic [barcode part1]
  source 1..16: mol_type = other DNA
attgacgtgtcctgcc

SEQ ID NO: 9036 - DNA, 16 bp, synthetic construct
  misc_feature 1..16: note = synthetic [barcode part1]
  source 1..16: mol_type = other DNA
cgcgccgattatatag

SEQ ID NO: 9037 - DNA, 16 bp, synthetic construct
  misc_feature 1..16: note = synthetic [barcode part1]
  source 1..16: mol_type = other DNA
agtacaagacgatctg

SEQ ID NO: 9038 - DNA, 16 bp, synthetic construct
  misc_feature 1..16: note = synthetic [barcode part1]
  source 1..16: mol_type = other DNA
ttgaacaacggtgagt

SEQ ID NO: 9039 - DNA, 16 bp, synthetic construct
  misc_feature 1..16: note = synthetic [barcode part1]
  source 1..16: mol_type = other DNA
accactacgcagagag

SEQ ID NO: 9040 - DNA, 16 bp, synthetic construct
  misc_feature 1..16: note = synthetic [barcode part1]
  source 1..16: mol_type = other DNA
tgcgtattggcgttag

SEQ ID NO: 9041 - DNA, 16 bp, synthetic construct
  misc_feature 1..16: note = synthetic [barcode part1]
  source 1..16: mol_type = other DNA
tggcggttgtatcctc

SEQ ID NO: 9042 - DNA, 16 bp, synthetic construct
  misc_feature 1..16: note = synthetic [barcode part1]
  source 1..16: mol_type = other DNA
acggactgttggaggt

SEQ ID NO: 9043 - DNA, 16 bp, synthetic construct
  misc_feature 1..16: note = synthetic [barcode part1]
  source 1..16: mol_type = other DNA
acacttgttgccttag

SEQ ID NO: 9044 - DNA, 16 bp, synthetic construct
  misc_feature 1..16: note = synthetic [barcode part1]
  source 1..16: mol_type = other DNA
cactagtgattcttcg

SEQ ID NO: 9045 - DNA, 16 bp, synthetic construct
  misc_feature 1..16: note = synthetic [barcode part1]
  source 1..16: mol_type = other DNA
tacagtagtctgcctt

SEQ ID NO: 9046 - DNA, 16 bp, synthetic construct
  misc_feature 1..16: note = synthetic [barcode part1]
  source 1..16: mol_type = other DNA
gttaataggcgacggc

SEQ ID NO: 9047 - DNA, 16 bp, synthetic construct
  misc_feature 1..16: note = synthetic [barcode part1]
  source 1..16: mol_type = other DNA
aattaggtctacggag

SEQ ID NO: 9048 - DNA, 16 bp, synthetic construct
  misc_feature 1..16: note = synthetic [barcode part1]
  source 1..16: mol_type = other DNA
aataggttaggactcg

SEQ ID NO: 9049 - DNA, 16 bp, synthetic construct
  misc_feature 1..16: note = synthetic [barcode part1]
  source 1..16: mol_type = other DNA
cacactacaatcgcag

SEQ ID NO: 9050 - DNA, 16 bp, synthetic construct
  misc_feature 1..16: note = synthetic [barcode part1]
  source 1..16: mol_type = other DNA
gagtccaacctagact

SEQ ID NO: 9051 - DNA, 16 bp, synthetic construct
  misc_feature 1..16: note = synthetic [barcode part1]
  source 1..16: mol_type = other DNA
aggtctacgtctcacc

SEQ ID NO: 9052 - DNA, 16 bp, synthetic construct
  misc_feature 1..16: note = synthetic [barcode part1]
  source 1..16: mol_type = other DNA
gagtaggatcttagac

SEQ ID NO: 9053 - DNA, 16 bp, synthetic construct
  misc_feature 1..16: note = synthetic [barcode part1]
  source 1..16: mol_type = other DNA
gcgtgaactcaataag

SEQ ID NO: 9054 - DNA, 16 bp, synthetic construct
  misc_feature 1..16: note = synthetic [barcode part1]
  source 1..16: mol_type = other DNA
ttctggcgattcacgc

SEQ ID NO: 9055 - DNA, 16 bp, synthetic construct
  misc_feature 1..16: note = synthetic [barcode part1]
  source 1..16: mol_type = other DNA
cgtcgtgtacaatacg

SEQ ID NO: 9056 - DNA, 16 bp, synthetic construct
  misc_feature 1..16: note = synthetic [barcode part1]
  source 1..16: mol_type = other DNA
atagtcaaccacgcgt

SEQ ID NO: 9057 - DNA, 16 bp, synthetic construct
  misc_feature 1..16: note = synthetic [barcode part1]
  source 1..16: mol_type = other DNA
atagaagttgacgacc

SEQ ID NO: 9058 - DNA, 16 bp, synthetic construct
  misc_feature 1..16: note = synthetic [barcode part1]
  source 1..16: mol_type = other DNA
attgttccgttgcctc

SEQ ID NO: 9059 - DNA, 16 bp, synthetic construct
  misc_feature 1..16: note = synthetic [barcode part1]
  source 1..16: mol_type = other DNA
tgtctccgatccaacg

SEQ ID NO: 9060 - DNA, 16 bp, synthetic construct
  misc_feature 1..16: note = synthetic [barcode part1]
  source 1..16: mol_type = other DNA
caggacaagactgaag

SEQ ID NO: 9061 - DNA, 16 bp, synthetic construct
  misc_feature 1..16: note = synthetic [barcode part1]
  source 1..16: mol_type = other DNA
accgattctcttctcg

SEQ ID NO: 9062 - DNA, 16 bp, synthetic construct
  misc_feature 1..16: note = synthetic [barcode part1]
  source 1..16: mol_type = other DNA
ataacacgcgcacgtt

SEQ ID NO: 9063 - DNA, 16 bp, synthetic construct
  misc_feature 1..16: note = synthetic [barcode part1]
  source 1..16: mol_type = other DNA
gagacaccgataaccg

SEQ ID NO: 9064 - DNA, 16 bp, synthetic construct
  misc_feature 1..16: note = synthetic [barcode part1]
  source 1..16: mol_type = other DNA
actaaccggttagtcg

SEQ ID NO: 9065 - DNA, 16 bp, synthetic construct
  misc_feature 1..16: note = synthetic [barcode part1]
  source 1..16: mol_type = other DNA
tctggtccggtgtatc

SEQ ID NO: 9066 - DNA, 16 bp, synthetic construct
  misc_feature 1..16: note = synthetic [barcode part1]
  source 1..16: mol_type = other DNA
cagaattgtgtcgcgt

SEQ ID NO: 9067 - DNA, 16 bp, synthetic construct
  misc_feature 1..16: note = synthetic [barcode part1]
  source 1..16: mol_type = other DNA
gacctctaatcgtatc

SEQ ID NO: 9068 - DNA, 16 bp, synthetic construct
  misc_feature 1..16: note = synthetic [barcode part1]
  source 1..16: mol_type = other DNA
tgccggacctatatcc

SEQ ID NO: 9069 - DNA, 16 bp, synthetic construct
  misc_feature 1..16: note = synthetic [barcode part1]
  source 1..16: mol_type = other DNA
cgatatctgaggtctg

SEQ ID NO: 9070 - DNA, 16 bp, synthetic construct
  misc_feature 1..16: note = synthetic [barcode part1]
  source 1..16: mol_type = other DNA
gttgtgtccaagtacg

SEQ ID NO: 9071 - DNA, 16 bp, synthetic construct
  misc_feature 1..16: note = synthetic [barcode part1]
  source 1..16: mol_type = other DNA
tctgcaattgtaggcg

SEQ ID NO: 9072 - DNA, 16 bp, synthetic construct
  misc_feature 1..16: note = synthetic [barcode part1]
  source 1..16: mol_type = other DNA
ttggaacaggttccac

SEQ ID NO: 9073 - DNA, 16 bp, synthetic construct
  misc_feature 1..16: note = synthetic [barcode part1]
  source 1..16: mol_type = other DNA
agatattactccgtcc

SEQ ID NO: 9074 - DNA, 16 bp, synthetic construct
  misc_feature 1..16: note = synthetic [barcode part1]
  source 1..16: mol_type = other DNA
aacgatctcagtgacc

SEQ ID NO: 9075 - DNA, 16 bp, synthetic construct
  misc_feature 1..16: note = synthetic [barcode part1]
  source 1..16: mol_type = other DNA
tataggcaggcaatac

SEQ ID NO: 9076 - DNA, 16 bp, synthetic construct
  misc_feature 1..16: note = synthetic [barcode part1]
  source 1..16: mol_type = other DNA
cacagatctcactatc

SEQ ID NO: 9077 - DNA, 16 bp, synthetic construct
  misc_feature 1..16: note = synthetic [barcode part1]
  source 1..16: mol_type = other DNA
ccagaatataggtgac

SEQ ID NO: 9078 - DNA, 16 bp, synthetic construct
  misc_feature 1..16: note = synthetic [barcode part1]
  source 1..16: mol_type = other DNA
cctagagaggatctct

SEQ ID NO: 9079 - DNA, 16 bp, synthetic construct
  misc_feature 1..16: note = synthetic [barcode part1]
  source 1..16: mol_type = other DNA
gcaagaatcgaactgt

SEQ ID NO: 9080 - DNA, 16 bp, synthetic construct
  misc_feature 1..16: note = synthetic [barcode part1]
  source 1..16: mol_type = other DNA
ccacacttaccttcac

SEQ ID NO: 9081 - DNA, 16 bp, synthetic construct
  misc_feature 1..16: note = synthetic [barcode part1]
  source 1..16: mol_type = other DNA
ttgacgatactctcac

SEQ ID NO: 9082 - DNA, 16 bp, synthetic construct
  misc_feature 1..16: note = synthetic [barcode part1]
  source 1..16: mol_type = other DNA
ataccttccttcgtgc

SEQ ID NO: 9083 - DNA, 16 bp, synthetic construct
  misc_feature 1..16: note = synthetic [barcode part1]
  source 1..16: mol_type = other DNA
ttgaacgatctacggc

SEQ ID NO: 9084 - DNA, 16 bp, synthetic construct
  misc_feature 1..16: note = synthetic [barcode part1]
  source 1..16: mol_type = other DNA
aagaggcacaactatc

SEQ ID NO: 9085 - DNA, 16 bp, synthetic construct
  misc_feature 1..16: note = synthetic [barcode part1]
  source 1..16: mol_type = other DNA
aaccgatccggttaac

SEQ ID NO: 9086 - DNA, 16 bp, synthetic construct
  misc_feature 1..16: note = synthetic [barcode part1]
  source 1..16: mol_type = other DNA
tggtgtactctatcac

SEQ ID NO: 9087 - DNA, 16 bp, synthetic construct
  misc_feature 1..16: note = synthetic [barcode part1]
  source 1..16: mol_type = other DNA
tcgtcgtacggattcc

SEQ ID NO: 9088 - DNA, 16 bp, synthetic construct
  misc_feature 1..16: note = synthetic [barcode part1]
  source 1..16: mol_type = other DNA
gttagacaggttgtcc

SEQ ID NO: 9089 - DNA, 16 bp, synthetic construct
  misc_feature 1..16: note = synthetic [barcode part1]
  source 1..16: mol_type = other DNA
cctgtgtgtcactgac

SEQ ID NO: 9090 - DNA, 16 bp, synthetic construct
  misc_feature 1..16: note = synthetic [barcode part1]
  source 1..16: mol_type = other DNA
ccgcactcttgtatct

SEQ ID NO: 9091 - DNA, 16 bp, synthetic construct
  misc_feature 1..16: note = synthetic [barcode part1]
  source 1..16: mol_type = other DNA
gagtatcgagtggtgc

SEQ ID NO: 9092 - DNA, 16 bp, synthetic construct
  misc_feature 1..16: note = synthetic [barcode part1]
  source 1..16: mol_type = other DNA
cagatcagtgcaggac

SEQ ID NO: 9093 - DNA, 16 bp, synthetic construct
  misc_feature 1..16: note = synthetic [barcode part1]
  source 1..16: mol_type = other DNA
cgttcaagattgcgtg

SEQ ID NO: 9094 - DNA, 16 bp, synthetic construct
  misc_feature 1..16: note = synthetic [barcode part1]
  source 1..16: mol_type = other DNA
ccaccgtaacgagatt

SEQ ID NO: 9095 - DNA, 16 bp, synthetic construct
  misc_feature 1..16: note = synthetic [barcode part1]
  source 1..16: mol_type = other DNA
gcgtctctaacctggt

SEQ ID NO: 9096 - DNA, 16 bp, synthetic construct
  misc_feature 1..16: note = synthetic [barcode part1]
  source 1..16: mol_type = other DNA
gtctgcgtgtattgag

SEQ ID NO: 9097 - DNA, 16 bp, synthetic construct
  misc_feature 1..16: note = synthetic [barcode part1]
  source 1..16: mol_type = other DNA
cgattccaatcaaggc

SEQ ID NO: 9098 - DNA, 16 bp, synthetic construct
  misc_feature 1..16: note = synthetic [barcode part1]
  source 1..16: mol_type = other DNA
cagttccagttgagac

SEQ ID NO: 9099 - DNA, 16 bp, synthetic construct
  misc_feature 1..16: note = synthetic [barcode part1]
  source 1..16: mol_type = other DNA
cgcgcctataactcac

SEQ ID NO: 9100 - DNA, 16 bp, synthetic construct
  misc_feature 1..16: note = synthetic [barcode part1]
  source 1..16: mol_type = other DNA
gaggcgcgactattag

SEQ ID NO: 9101 - DNA, 16 bp, synthetic construct
  misc_feature 1..16: note = synthetic [barcode part1]
  source 1..16: mol_type = other DNA
tatccgcagatcttac

SEQ ID NO: 9102 - DNA, 16 bp, synthetic construct
  misc_feature 1..16: note = synthetic [barcode part1]
  source 1..16: mol_type = other DNA
gtctgtcttcggaacc

SEQ ID NO: 9103 - DNA, 16 bp, synthetic construct
  misc_feature 1..16: note = synthetic [barcode part1]
  source 1..16: mol_type = other DNA
tccaccacgtatcgac

SEQ ID NO: 9104 - DNA, 16 bp, synthetic construct
  misc_feature 1..16: note = synthetic [barcode part1]
  source 1..16: mol_type = other DNA
gacaagagtacgatct

SEQ ID NO: 9105 - DNA, 16 bp, synthetic construct
  misc_feature 1..16: note = synthetic [barcode part1]
  source 1..16: mol_type = other DNA
atcacctcgttcaagt

SEQ ID NO: 9106 - DNA, 16 bp, synthetic construct
  misc_feature 1..16: note = synthetic [barcode part1]
  source 1..16: mol_type = other DNA
gtgagagaactgccac

SEQ ID NO: 9107 - DNA, 16 bp, synthetic construct
  misc_feature 1..16: note = synthetic [barcode part1]
  source 1..16: mol_type = other DNA
atcggagagaatcgag

SEQ ID NO: 9108 - DNA, 16 bp, synthetic construct
  misc_feature 1..16: note = synthetic [barcode part1]
  source 1..16: mol_type = other DNA
caatcctcttctcggt

SEQ ID NO: 9109 - DNA, 16 bp, synthetic construct
  misc_feature 1..16: note = synthetic [barcode part1]
  source 1..16: mol_type = other DNA
gcaacttgtccagtag

SEQ ID NO: 9110 - DNA, 16 bp, synthetic construct
  misc_feature 1..16: note = synthetic [barcode part1]
  source 1..16: mol_type = other DNA
cgcgttcttgccaagt

SEQ ID NO: 9111 - DNA, 16 bp, synthetic construct
  misc_feature 1..16: note = synthetic [barcode part1]
  source 1..16: mol_type = other DNA
ttggatagacggaact

SEQ ID NO: 9112 - DNA, 16 bp, synthetic construct
  misc_feature 1..16: note = synthetic [barcode part1]
  source 1..16: mol_type = other DNA
gaccgacgttagttac

SEQ ID NO: 9113 - DNA, 16 bp, synthetic construct
  misc_feature 1..16: note = synthetic [barcode part1]
  source 1..16: mol_type = other DNA
cgtacgcactataacg

SEQ ID NO: 9114 - DNA, 16 bp, synthetic construct
  misc_feature 1..16: note = synthetic [barcode part1]
  source 1..16: mol_type = other DNA
cacaccttagaccacc

SEQ ID NO: 9115 - DNA, 16 bp, synthetic construct
  misc_feature 1..16: note = synthetic [barcode part1]
  source 1..16: mol_type = other DNA
gaatacacgcaccttg

SEQ ID NO: 9116 - DNA, 16 bp, synthetic construct
  misc_feature 1..16: note = synthetic [barcode part1]
  source 1..16: mol_type = other DNA
aagtaaccgtgtcaag

SEQ ID NO: 9117 - DNA, 16 bp, synthetic construct
  misc_feature 1..16: note = synthetic [barcode part1]
  source 1..16: mol_type = other DNA
gatcacgttagtcctt

SEQ ID NO: 9118 - DNA, 16 bp, synthetic construct
  misc_feature 1..16: note = synthetic [barcode part1]
  source 1..16: mol_type = other DNA
tgtagaacggcgatcg

SEQ ID NO: 9119 - DNA, 16 bp, synthetic construct
  misc_feature 1..16: note = synthetic [barcode part1]
  source 1..16: mol_type = other DNA
aattaggaacggcgag

SEQ ID NO: 9120 - DNA, 16 bp, synthetic construct
  misc_feature 1..16: note = synthetic [barcode part1]
  source 1..16: mol_type = other DNA
tcacacttaccaggtt

SEQ ID NO: 9121 - DNA, 16 bp, synthetic construct
  misc_feature 1..16: note = synthetic [barcode part1]
  source 1..16: mol_type = other DNA
cacttgatagtcttcg

SEQ ID NO: 9122 - DNA, 16 bp, synthetic construct
  misc_feature 1..16: note = synthetic [barcode part1]
  source 1..16: mol_type = other DNA
aaggacgatagttcac

SEQ ID NO: 9123 - DNA, 16 bp, synthetic construct
  misc_feature 1..16: note = synthetic [barcode part1]
  source 1..16: mol_type = other DNA
ttaccttgattgcacg

SEQ ID NO: 9124 - DNA, 16 bp, synthetic construct
  misc_feature 1..16: note = synthetic [barcode part1]
  source 1..16: mol_type = other DNA
tacgaacgtgagttcc

SEQ ID NO: 9125 - DNA, 16 bp, synthetic construct
  misc_feature 1..16: note = synthetic [barcode part1]
  source 1..16: mol_type = other DNA
ttcaaggccttaggac

SEQ ID NO: 9126 - DNA, 16 bp, synthetic construct
  misc_feature 1..16: note = synthetic [barcode part1]
  source 1..16: mol_type = other DNA
acttgcctcgcgatac

SEQ ID NO: 9127 - DNA, 16 bp, synthetic construct
  misc_feature 1..16: note = synthetic [barcode part1]
  source 1..16: mol_type = other DNA
tccgtacgttgttaac

SEQ ID NO: 9128 - DNA, 16 bp, synthetic construct
  misc_feature 1..16: note = synthetic [barcode part1]
  source 1..16: mol_type = other DNA
caccaggcctatactc

SEQ ID NO: 9129 - DNA, 16 bp, synthetic construct
  misc_feature 1..16: note = synthetic [barcode part1]
  source 1..16: mol_type = other DNA
gttgcaagtccactcc

SEQ ID NO: 9130 - DNA, 16 bp, synthetic construct
  misc_feature 1..16: note = synthetic [barcode part1]
  source 1..16: mol_type = other DNA
acaagtcgccgttctc

SEQ ID NO: 9131 - DNA, 16 bp, synthetic construct
  misc_feature 1..16: note = synthetic [barcode part1]
  source 1..16: mol_type = other DNA
cacgagaagttactag

SEQ ID NO: 9132 - DNA, 16 bp, synthetic construct
  misc_feature 1..16: note = synthetic [barcode part1]
  source 1..16: mol_type = other DNA
tctaaccaccagtact

SEQ ID NO: 9133 - DNA, 16 bp, synthetic construct
  misc_feature 1..16: note = synthetic [barcode part1]
  source 1..16: mol_type = other DNA
agagtcgagagtagtg

SEQ ID NO: 9134 - DNA, 16 bp, synthetic construct
  misc_feature 1..16: note = synthetic [barcode part1]
  source 1..16: mol_type = other DNA
caaggactagagacag

SEQ ID NO: 9135 - DNA, 16 bp, synthetic construct
  misc_feature 1..16: note = synthetic [barcode part1]
  source 1..16: mol_type = other DNA
cagaatcacgcgtatc

SEQ ID NO: 9136 - DNA, 16 bp, synthetic construct
  misc_feature 1..16: note = synthetic [barcode part1]
  source 1..16: mol_type = other DNA
gtctctcaccgtacag

SEQ ID NO: 9137 - DNA, 16 bp, synthetic construct
  misc_feature 1..16: note = synthetic [barcode part1]
  source 1..16: mol_type = other DNA
tggaccaacacctcct

SEQ ID NO: 9138 - DNA, 16 bp, synthetic construct
  misc_feature 1..16: note = synthetic [barcode part1]
  source 1..16: mol_type = other DNA
attacggactcacttc

SEQ ID NO: 9139 - DNA, 16 bp, synthetic construct
  misc_feature 1..16: note = synthetic [barcode part1]
  source 1..16: mol_type = other DNA
cgtgaaggttattgag

SEQ ID NO: 9140 - DNA, 16 bp, synthetic construct
  misc_feature 1..16: note = synthetic [barcode part1]
  source 1..16: mol_type = other DNA
cctctactattaggtg

SEQ ID NO: 9141 - DNA, 16 bp, synthetic construct
  misc_feature 1..16: note = synthetic [barcode part1]
  source 1..16: mol_type = other DNA
tcgagatccgcaatac

SEQ ID NO: 9142 - DNA, 16 bp, synthetic construct
  misc_feature 1..16: note = synthetic [barcode part1]
  source 1..16: mol_type = other DNA
gaacctgacttggact

SEQ ID NO: 9143 - DNA, 16 bp, synthetic construct
  misc_feature 1..16: note = synthetic [barcode part1]
  source 1..16: mol_type = other DNA
gaaccgttgagtcact

SEQ ID NO: 9144 - DNA, 16 bp, synthetic construct
  misc_feature 1..16: note = synthetic [barcode part1]
  source 1..16: mol_type = other DNA
attgaacggcgatcct

SEQ ID NO: 9145 - DNA, 16 bp, synthetic construct
  misc_feature 1..16: note = synthetic [barcode part1]
  source 1..16: mol_type = other DNA
aagatcacggtggaag

SEQ ID NO: 9146 - DNA, 16 bp, synthetic construct
  misc_feature 1..16: note = synthetic [barcode part1]
  source 1..16: mol_type = other DNA
cgcacagacttctcac

SEQ ID NO: 9147 - DNA, 16 bp, synthetic construct
  misc_feature 1..16: note = synthetic [barcode part1]
  source 1..16: mol_type = other DNA
cgagtgtgatctgtgt

SEQ ID NO: 9148 - DNA, 16 bp, synthetic construct
  misc_feature 1..16: note = synthetic [barcode part1]
  source 1..16: mol_type = other DNA
cgcgtaagtaaccgtt

SEQ ID NO: 9149 - DNA, 16 bp, synthetic construct
  misc_feature 1..16: note = synthetic [barcode part1]
  source 1..16: mol_type = other DNA
gaaggactaagaggtc

SEQ ID NO: 9150 - DNA, 16 bp, synthetic construct
  misc_feature 1..16: note = synthetic [barcode part1]
  source 1..16: mol_type = other DNA
taacaacggaggtact

SEQ ID NO: 9151 - DNA, 16 bp, synthetic construct
  misc_feature 1..16: note = synthetic [barcode part1]
  source 1..16: mol_type = other DNA
ttgatcgacgtcgtag

SEQ ID NO: 9152 - DNA, 16 bp, synthetic construct
  misc_feature 1..16: note = synthetic [barcode part1]
  source 1..16: mol_type = other DNA
cctacaattgcgagtg

SEQ ID NO: 9153 - DNA, 16 bp, synthetic construct
  misc_feature 1..16: note = synthetic [barcode part1]
  source 1..16: mol_type = other DNA
tgagttcacctcaccg

SEQ ID NO: 9154 - DNA, 16 bp, synthetic construct
  misc_feature 1..16: note = synthetic [barcode part1]
  source 1..16: mol_type = other DNA
cgaatctagacggcag

SEQ ID NO: 9155 - DNA, 16 bp, synthetic construct
  misc_feature 1..16: note = synthetic [barcode part1]
  source 1..16: mol_type = other DNA
tgcggtaacttgtctt

SEQ ID NO: 9156 - DNA, 16 bp, synthetic construct
  misc_feature 1..16: note = synthetic [barcode part1]
  source 1..16: mol_type = other DNA
tgaactcgaatctgcg

SEQ ID NO: 9157 - DNA, 16 bp, synthetic construct
  misc_feature 1..16: note = synthetic [barcode part1]
  source 1..16: mol_type = other DNA
ttgccgtgaactcacc

SEQ ID NO: 9158 - DNA, 16 bp, synthetic construct
  misc_feature 1..16: note = synthetic [barcode part1]
  source 1..16: mol_type = other DNA
tggtgttaacggatag

SEQ ID NO: 9159 - DNA, 16 bp, synthetic construct
  misc_feature 1..16: note = synthetic [barcode part1]
  source 1..16: mol_type = other DNA
atctgtgtgactcttg

SEQ ID NO: 9160 - DNA, 16 bp, synthetic construct
  misc_feature 1..16: note = synthetic [barcode part1]
  source 1..16: mol_type = other DNA
gagatcctgtctatct

SEQ ID NO: 9161 - DNA, 16 bp, synthetic construct
  misc_feature 1..16: note = synthetic [barcode part1]
  source 1..16: mol_type = other DNA
gttggttcgtaacgtg

SEQ ID NO: 9162 - DNA, 16 bp, synthetic construct
  misc_feature 1..16: note = synthetic [barcode part1]
  source 1..16: mol_type = other DNA
gtctgtcttatccgtc

SEQ ID NO: 9163 - DNA, 16 bp, synthetic construct
  misc_feature 1..16: note = synthetic [barcode part1]
  source 1..16: mol_type = other DNA
acctgtctcacttgtc

SEQ ID NO: 9164 - DNA, 16 bp, synthetic construct
  misc_feature 1..16: note = synthetic [barcode part1]
  source 1..16: mol_type = other DNA
tcttctcgtatcgcac

SEQ ID NO: 9165 - DNA, 16 bp, synthetic construct
  misc_feature 1..16: note = synthetic [barcode part1]
  source 1..16: mol_type = other DNA
tgcaagttaccacttc

SEQ ID NO: 9166 - DNA, 16 bp, synthetic construct
  misc_feature 1..16: note = synthetic [barcode part1]
  source 1..16: mol_type = other DNA
accgtctcttgttacc

SEQ ID NO: 9167 - DNA, 16 bp, synthetic construct
  misc_feature 1..16: note = synthetic [barcode part1]
  source 1..16: mol_type = other DNA
actcctccgtacaacg

SEQ ID NO: 9168 - DNA, 16 bp, synthetic construct
  misc_feature 1..16: note = synthetic [barcode part1]
  source 1..16: mol_type = other DNA
gaggtaagttcgtagt

SEQ ID NO: 9169 - DNA, 16 bp, synthetic construct
  misc_feature 1..16: note = synthetic [barcode part1]
  source 1..16: mol_type = other DNA
ccttaatcacaccaac

SEQ ID NO: 9170 - DNA, 16 bp, synthetic construct
  misc_feature 1..16: note = synthetic [barcode part1]
  source 1..16: mol_type = other DNA
gcacacaggagttctt

SEQ ID NO: 9171 - DNA, 16 bp, synthetic construct
  misc_feature 1..16: note = synthetic [barcode part1]
  source 1..16: mol_type = other DNA
gatctggtgtattcct

SEQ ID NO: 9172 - DNA, 16 bp, synthetic construct
  misc_feature 1..16: note = synthetic [barcode part1]
  source 1..16: mol_type = other DNA
tgacgatcgatagtcc

SEQ ID NO: 9173 - DNA, 16 bp, synthetic construct
  misc_feature 1..16: note = synthetic [barcode part1]
  source 1..16: mol_type = other DNA
cagtagttcaacggtc

SEQ ID NO: 9174 - DNA, 16 bp, synthetic construct
  misc_feature 1..16: note = synthetic [barcode part1]
  source 1..16: mol_type = other DNA
gcgattgaggattagt

SEQ ID NO: 9175 - DNA, 16 bp, synthetic construct
  misc_feature 1..16: note = synthetic [barcode part1]
  source 1..16: mol_type = other DNA
acgattaagtcctcct

SEQ ID NO: 9176 - DNA, 16 bp, synthetic construct
  misc_feature 1..16: note = synthetic [barcode part1]
  source 1..16: mol_type = other DNA
aactctcggtcgtatt

SEQ ID NO: 9177 - DNA, 16 bp, synthetic construct
  misc_feature 1..16: note = synthetic [barcode part1]
  source 1..16: mol_type = other DNA
tgtaccttgtctccgt

SEQ ID NO: 9178 - DNA, 16 bp, synthetic construct
  misc_feature 1..16: note = synthetic [barcode part1]
  source 1..16: mol_type = other DNA
tggatcttaggcactg

SEQ ID NO: 9179 - DNA, 16 bp, synthetic construct
  misc_feature 1..16: note = synthetic [barcode part1]
  source 1..16: mol_type = other DNA
tctagtcttggcctct

SEQ ID NO: 9180 - DNA, 16 bp, synthetic construct
  misc_feature 1..16: note = synthetic [barcode part1]
  source 1..16: mol_type = other DNA
gtccgactgtacttcg

SEQ ID NO: 9181 - DNA, 16 bp, synthetic construct
  misc_feature 1..16: note = synthetic [barcode part1]
  source 1..16: mol_type = other DNA
tcggaactctacttgt

SEQ ID NO: 9182 - DNA, 16 bp, synthetic construct
  misc_feature 1..16: note = synthetic [barcode part1]
  source 1..16: mol_type = other DNA
ccaagataggcgagtc

SEQ ID NO: 9183 - DNA, 16 bp, synthetic construct
  misc_feature 1..16: note = synthetic [barcode part1]
  source 1..16: mol_type = other DNA
tagtacaacgcgacct

SEQ ID NO: 9184 - DNA, 16 bp, synthetic construct
  misc_feature 1..16: note = synthetic [barcode part1]
  source 1..16: mol_type = other DNA
tcgcctagacgaatac

SEQ ID NO: 9185 - DNA, 16 bp, synthetic construct
  misc_feature 1..16: note = synthetic [barcode part1]
  source 1..16: mol_type = other DNA
atcacgacctgtctgc

SEQ ID NO: 9186 - DNA, 16 bp, synthetic construct
  misc_feature 1..16: note = synthetic [barcode part1]
  source 1..16: mol_type = other DNA
tccaccgtgtaggtct

SEQ ID NO: 9187 - DNA, 16 bp, synthetic construct
  misc_feature 1..16: note = synthetic [barcode part1]
  source 1..16: mol_type = other DNA
gaccagtgccgtaatt

SEQ ID NO: 9188 - DNA, 16 bp, synthetic construct
  misc_feature 1..16: note = synthetic [barcode part1]
  source 1..16: mol_type = other DNA
tgacgttggactctag

SEQ ID NO: 9189 - DNA, 16 bp, synthetic construct
  misc_feature 1..16: note = synthetic [barcode part1]
  source 1..16: mol_type = other DNA
gtaggagaaccgttgc

SEQ ID NO: 9190 - DNA, 16 bp, synthetic construct
  misc_feature 1..16: note = synthetic [barcode part1]
  source 1..16: mol_type = other DNA
tccaagtcgttctgcg

SEQ ID NO: 9191 - DNA, 16 bp, synthetic construct
  misc_feature 1..16: note = synthetic [barcode part1]
  source 1..16: mol_type = other DNA
atcaccacaacggttg

SEQ ID NO: 9192 - DNA, 16 bp, synthetic construct
  misc_feature 1..16: note = synthetic [barcode part1]
  source 1..16: mol_type = other DNA
gttaattgccgaccag

SEQ ID NO: 9193 - DNA, 16 bp, synthetic construct
  misc_feature 1..16: note = synthetic [barcode part1]
  source 1..16: mol_type = other DNA
actgcgacttgagact

SEQ ID NO: 9194 - DNA, 16 bp, synthetic construct
  misc_feature 1..16: note = synthetic [barcode part1]
  source 1..16: mol_type = other DNA
cctctgttagattgtg

SEQ ID NO: 9195 - DNA, 16 bp, synthetic construct
  misc_feature 1..16: note = synthetic [barcode part1]
  source 1..16: mol_type = other DNA
gcctctgcaggttact

SEQ ID NO: 9196 - DNA, 16 bp, synthetic construct
  misc_feature 1..16: note = synthetic [barcode part1]
  source 1..16: mol_type = other DNA
cctacaccagtctgac

SEQ ID NO: 9197 - DNA, 16 bp, synthetic construct
  misc_feature 1..16: note = synthetic [barcode part1]
  source 1..16: mol_type = other DNA
ttgtctacgtctgtcc

SEQ ID NO: 9198 - DNA, 16 bp, synthetic construct
  misc_feature 1..16: note = synthetic [barcode part1]
  source 1..16: mol_type = other DNA
cacacaggacaacggt

SEQ ID NO: 9199 - DNA, 16 bp, synthetic construct
  misc_feature 1..16: note = synthetic [barcode part1]
  source 1..16: mol_type = other DNA
ttggcagatagtccgt

SEQ ID NO: 9200 - DNA, 16 bp, synthetic construct
  misc_feature 1..16: note = synthetic [barcode part1]
  source 1..16: mol_type = other DNA
cgtcaggtaaggacac

SEQ ID NO: 9201 - DNA, 16 bp, synthetic construct
  misc_feature 1..16: note = synthetic [barcode part1]
  source 1..16: mol_type = other DNA
tgaccaagtacgtacc

SEQ ID NO: 9202 - DNA, 16 bp, synthetic construct
  misc_feature 1..16: note = synthetic [barcode part1]
  source 1..16: mol_type = other DNA
ccacttacgaagtctt

SEQ ID NO: 9203 - DNA, 16 bp, synthetic construct
  misc_feature 1..16: note = synthetic [barcode part1]
  source 1..16: mol_type = other DNA
cacaaggtcaagttag

SEQ ID NO: 9204 - DNA, 16 bp, synthetic construct
  misc_feature 1..16: note = synthetic [barcode part1]
  source 1..16: mol_type = other DNA
gagactccttggaact

SEQ ID NO: 9205 - DNA, 16 bp, synthetic construct
  misc_feature 1..16: note = synthetic [barcode part1]
  source 1..16: mol_type = other DNA
gcgtagttaactgcgt

SEQ ID NO: 9206 - DNA, 16 bp, synthetic construct
  misc_feature 1..16: note = synthetic [barcode part1]
  source 1..16: mol_type = other DNA
tcctccaggtgataag

SEQ ID NO: 9207 - DNA, 16 bp, synthetic construct
  misc_feature 1..16: note = synthetic [barcode part1]
  source 1..16: mol_type = other DNA
tacagtctcagtgcag

SEQ ID NO: 9208 - DNA, 16 bp, synthetic construct
  misc_feature 1..16: note = synthetic [barcode part1]
  source 1..16: mol_type = other DNA
gttagtgcaccttatc

SEQ ID NO: 9209 - DNA, 16 bp, synthetic construct
  misc_feature 1..16: note = synthetic [barcode part1]
  source 1..16: mol_type = other DNA
tcttcaacgacacgcc

SEQ ID NO: 9210 - DNA, 16 bp, synthetic construct
  misc_feature 1..16: note = synthetic [barcode part1]
  source 1..16: mol_type = other DNA
ccggacgagatctatt

SEQ ID NO: 9211 - DNA, 16 bp, synthetic construct
  misc_feature 1..16: note = synthetic [barcode part1]
  source 1..16: mol_type = other DNA
agtgcgttgattgcgt

SEQ ID NO: 9212 - DNA, 16 bp, synthetic construct
  misc_feature 1..16: note = synthetic [barcode part1]
  source 1..16: mol_type = other DNA
agtcaacggttgactc

SEQ ID NO: 9213 - DNA, 16 bp, synthetic construct
  misc_feature 1..16: note = synthetic [barcode part1]
  source 1..16: mol_type = other DNA
cacgcagttattgttc

SEQ ID NO: 9214 - DNA, 16 bp, synthetic construct
  misc_feature 1..16: note = synthetic [barcode part1]
  source 1..16: mol_type = other DNA
gtaacctgtctccgtg

SEQ ID NO: 9215 - DNA, 16 bp, synthetic construct
  misc_feature 1..16: note = synthetic [barcode part1]
  source 1..16: mol_type = other DNA
aatcgtctctacgttg

SEQ ID NO: 9216 - DNA, 16 bp, synthetic construct
  misc_feature 1..16: note = synthetic [barcode part1]
  source 1..16: mol_type = other DNA
cgttctgacctacgac

SEQ ID NO: 9217 - DNA, 16 bp, synthetic construct
  misc_feature 1..16: note = synthetic [barcode part1]
  source 1..16: mol_type = other DNA
cgattcctagtgtgcc

SEQ ID NO: 9218 - DNA, 16 bp, synthetic construct
  misc_feature 1..16: note = synthetic [barcode part1]
  source 1..16: mol_type = other DNA
ttccacggagagtatc

SEQ ID NO: 9219 - DNA, 16 bp, synthetic construct
  misc_feature 1..16: note = synthetic [barcode part1]
  source 1..16: mol_type = other DNA
gatatattacggccgc

SEQ ID NO: 9220 - DNA, 16 bp, synthetic construct
  misc_feature 1..16: note = synthetic [barcode part1]
  source 1..16: mol_type = other DNA
ccgccaaggttattag

SEQ ID NO: 9221 - DNA, 16 bp, synthetic construct
  misc_feature 1..16: note = synthetic [barcode part1]
  source 1..16: mol_type = other DNA
tcgtaggttacgtggt

SEQ ID NO: 9222 - DNA, 16 bp, synthetic construct
  misc_feature 1..16: note = synthetic [barcode part1]
  source 1..16: mol_type = other DNA
ttccgattacgaacct

SEQ ID NO: 9223 - DNA, 16 bp, synthetic construct
  misc_feature 1..16: note = synthetic [barcode part1]
  source 1..16: mol_type = other DNA
gtaacgtaacctcgac

SEQ ID NO: 9224 - DNA, 16 bp, synthetic construct
  misc_feature 1..16: note = synthetic [barcode part1]
  source 1..16: mol_type = other DNA
agtaaccgtgtgaggc

SEQ ID NO: 9225 - DNA, 16 bp, synthetic construct
  misc_feature 1..16: note = synthetic [barcode part1]
  source 1..16: mol_type = other DNA
gcgtagacctaataag

SEQ ID NO: 9226 - DNA, 16 bp, synthetic construct
  misc_feature 1..16: note = synthetic [barcode part1]
  source 1..16: mol_type = other DNA
cctaatccggtcacgt

SEQ ID NO: 9227 - DNA, 16 bp, synthetic construct
  misc_feature 1..16: note = synthetic [barcode part1]
  source 1..16: mol_type = other DNA
atctacggaggtgacg

SEQ ID NO: 9228 - DNA, 16 bp, synthetic construct
  misc_feature 1..16: note = synthetic [barcode part1]
  source 1..16: mol_type = other DNA
taccaccaacgcgttc

SEQ ID NO: 9229 - DNA, 16 bp, synthetic construct
  misc_feature 1..16: note = synthetic [barcode part1]
  source 1..16: mol_type = other DNA
tgtgtcacagtacgtg

SEQ ID NO: 9230 - DNA, 16 bp, synthetic construct
  misc_feature 1..16: note = synthetic [barcode part1]
  source 1..16: mol_type = other DNA
atacgtgccgagattc

SEQ ID NO: 9231 - DNA, 16 bp, synthetic construct
  misc_feature 1..16: note = synthetic [barcode part1]
  source 1..16: mol_type = other DNA
ttatcctcgtgtcaag

SEQ ID NO: 9232 - DNA, 16 bp, synthetic construct
  misc_feature 1..16: note = synthetic [barcode part1]
  source 1..16: mol_type = other DNA
gagttattgaaggcgt

SEQ ID NO: 9233 - DNA, 16 bp, synthetic construct
  misc_feature 1..16: note = synthetic [barcode part1]
  source 1..16: mol_type = other DNA
aatactacgtggcgtc

SEQ ID NO: 9234 - DNA, 16 bp, synthetic construct
  misc_feature 1..16: note = synthetic [barcode part1]
  source 1..16: mol_type = other DNA
acacgacgcactagtt

SEQ ID NO: 9235 - DNA, 16 bp, synthetic construct
  misc_feature 1..16: note = synthetic [barcode part1]
  source 1..16: mol_type = other DNA
gataggcgatactgcg

SEQ ID NO: 9236 - DNA, 16 bp, synthetic construct
  misc_feature 1..16: note = synthetic [barcode part1]
  source 1..16: mol_type = other DNA
cagattacgcggaggt

SEQ ID NO: 9237 - DNA, 16 bp, synthetic construct
  misc_feature 1..16: note = synthetic [barcode part1]
  source 1..16: mol_type = other DNA
gacttggtcagtggtt

SEQ ID NO: 9238 - DNA, 16 bp, synthetic construct
  misc_feature 1..16: note = synthetic [barcode part1]
  source 1..16: mol_type = other DNA
tatcagaagacgcagt

SEQ ID NO: 9239 - DNA, 16 bp, synthetic construct
  misc_feature 1..16: note = synthetic [barcode part1]
  source 1..16: mol_type = other DNA
cgaactgttggactgt

SEQ ID NO: 9240 - DNA, 16 bp, synthetic construct
  misc_feature 1..16: note = synthetic [barcode part1]
  source 1..16: mol_type = other DNA
aactgcgccttccagt

SEQ ID NO: 9241 - DNA, 16 bp, synthetic construct
  misc_feature 1..16: note = synthetic [barcode part1]
  source 1..16: mol_type = other DNA
tagactgtggtagtcc

SEQ ID NO: 9242 - DNA, 16 bp, synthetic construct
  misc_feature 1..16: note = synthetic [barcode part1]
  source 1..16: mol_type = other DNA
cagaatattcacggag

SEQ ID NO: 9243 - DNA, 16 bp, synthetic construct
  misc_feature 1..16: note = synthetic [barcode part1]
  source 1..16: mol_type = other DNA
ttctacgcgataacct

SEQ ID NO: 9244 - DNA, 16 bp, synthetic construct
  misc_feature 1..16: note = synthetic [barcode part1]
  source 1..16: mol_type = other DNA
taggaatactcggtag

SEQ ID NO: 9245 - DNA, 16 bp, synthetic construct
  misc_feature 1..16: note = synthetic [barcode part1]
  source 1..16: mol_type = other DNA
tgcctatcctgaagtt

SEQ ID NO: 9246 - DNA, 16 bp, synthetic construct
  misc_feature 1..16: note = synthetic [barcode part1]
  source 1..16: mol_type = other DNA
gcggtaagttcgaacg

SEQ ID NO: 9247 - DNA, 16 bp, synthetic construct
  misc_feature 1..16: note = synthetic [barcode part1]
  source 1..16: mol_type = other DNA
tcggcctcaagttcgt

SEQ ID NO: 9248 - DNA, 16 bp, synthetic construct
  misc_feature 1..16: note = synthetic [barcode part1]
  source 1..16: mol_type = other DNA
tctacttgacactgtg

SEQ ID NO: 9249 - DNA, 16 bp, synthetic construct
  misc_feature 1..16: note = synthetic [barcode part1]
  source 1..16: mol_type = other DNA
tattcggaaggtaacg

SEQ ID NO: 9250 - DNA, 16 bp, synthetic construct
  misc_feature 1..16: note = synthetic [barcode part1]
  source 1..16: mol_type = other DNA
gcaggagttaacagtt

SEQ ID NO: 9251 - DNA, 16 bp, synthetic construct
  misc_feature 1..16: note = synthetic [barcode part1]
  source 1..16: mol_type = other DNA
ccgattaccaaggttg

SEQ ID NO: 9252 - DNA, 16 bp, synthetic construct
  misc_feature 1..16: note = synthetic [barcode part1]
  source 1..16: mol_type = other DNA
agaacggttgcggatc

SEQ ID NO: 9253 - DNA, 16 bp, synthetic construct
  misc_feature 1..16: note = synthetic [barcode part1]
  source 1..16: mol_type = other DNA
gagtgtgaccagactg

SEQ ID NO: 9254 - DNA, 16 bp, synthetic construct
  misc_feature 1..16: note = synthetic [barcode part1]
  source 1..16: mol_type = other DNA
gactggtctagagtct

SEQ ID NO: 9255 - DNA, 16 bp, synthetic construct
  misc_feature 1..16: note = synthetic [barcode part1]
  source 1..16: mol_type = other DNA
tacacggtgtcaacgt

SEQ ID NO: 9256 - DNA, 16 bp, synthetic construct
  misc_feature 1..16: note = synthetic [barcode part1]
  source 1..16: mol_type = other DNA
tgattcgttcgtactg

SEQ ID NO: 9257 - DNA, 16 bp, synthetic construct
  misc_feature 1..16: note = synthetic [barcode part1]
  source 1..16: mol_type = other DNA
gacgtgtgtaccagtt

SEQ ID NO: 9258 - DNA, 16 bp, synthetic construct
  misc_feature 1..16: note = synthetic [barcode part1]
  source 1..16: mol_type = other DNA
ccttggttacgttggc

SEQ ID NO: 9259 - DNA, 16 bp, synthetic construct
  misc_feature 1..16: note = synthetic [barcode part1]
  source 1..16: mol_type = other DNA
cagtgagtactactcg

SEQ ID NO: 9260 - DNA, 16 bp, synthetic construct
  misc_feature 1..16: note = synthetic [barcode part1]
  source 1..16: mol_type = other DNA
tagattacctcgcgcc

SEQ ID NO: 9261 - DNA, 16 bp, synthetic construct
  misc_feature 1..16: note = synthetic [barcode part1]
  source 1..16: mol_type = other DNA
tgatataggccgtgtc

SEQ ID NO: 9262 - DNA, 16 bp, synthetic construct
  misc_feature 1..16: note = synthetic [barcode part1]
  source 1..16: mol_type = other DNA
actggataggtcactc

SEQ ID NO: 9263 - DNA, 16 bp, synthetic construct
  misc_feature 1..16: note = synthetic [barcode part1]
  source 1..16: mol_type = other DNA
ttcgagaccttcttcc

SEQ ID NO: 9264 - DNA, 16 bp, synthetic construct
  misc_feature 1..16: note = synthetic [barcode part1]
  source 1..16: mol_type = other DNA
tagaaccggccaattc

SEQ ID NO: 9265 - DNA, 16 bp, synthetic construct
  misc_feature 1..16: note = synthetic [barcode part1]
  source 1..16: mol_type = other DNA
gtgaactagttcgtgc

SEQ ID NO: 9266 - DNA, 16 bp, synthetic construct
  misc_feature 1..16: note = synthetic [barcode part1]
  source 1..16: mol_type = other DNA
atctcgtcctataggt

SEQ ID NO: 9267 - DNA, 16 bp, synthetic construct
  misc_feature 1..16: note = synthetic [barcode part1]
  source 1..16: mol_type = other DNA
gcagtaggcaactacg

SEQ ID NO: 9268 - DNA, 16 bp, synthetic construct
  misc_feature 1..16: note = synthetic [barcode part1]
  source 1..16: mol_type = other DNA
acgagttctctcaatc

SEQ ID NO: 9269 - DNA, 16 bp, synthetic construct
  misc_feature 1..16: note = synthetic [barcode part1]
  source 1..16: mol_type = other DNA
gacgtgaaggtacaag

SEQ ID NO: 9270 - DNA, 16 bp, synthetic construct
  misc_feature 1..16: note = synthetic [barcode part1]
  source 1..16: mol_type = other DNA
acgccggttctgttgt

SEQ ID NO: 9271 - DNA, 16 bp, synthetic construct
  misc_feature 1..16: note = synthetic [barcode part1]
  source 1..16: mol_type = other DNA
ttgttctggagtggtg

SEQ ID NO: 9272 - DNA, 16 bp, synthetic construct
  misc_feature 1..16: note = synthetic [barcode part1]
  source 1..16: mol_type = other DNA
agaacttcctgttcgt

SEQ ID NO: 9273 - DNA, 16 bp, synthetic construct
  misc_feature 1..16: note = synthetic [barcode part1]
  source 1..16: mol_type = other DNA
acttctaagacgtggc

SEQ ID NO: 9274 - DNA, 16 bp, synthetic construct
  misc_feature 1..16: note = synthetic [barcode part1]
  source 1..16: mol_type = other DNA
ccactcgatctgttct

SEQ ID NO: 9275 - DNA, 16 bp, synthetic construct
  misc_feature 1..16: note = synthetic [barcode part1]
  source 1..16: mol_type = other DNA
acgtacgcaaccagtt

SEQ ID NO: 9276 - DNA, 16 bp, synthetic construct
  misc_feature 1..16: note = synthetic [barcode part1]
  source 1..16: mol_type = other DNA
gtgttacagactccag

SEQ ID NO: 9277 - DNA, 16 bp, synthetic construct
  misc_feature 1..16: note = synthetic [barcode part1]
  source 1..16: mol_type = other DNA
gccttgttgaggaatc

SEQ ID NO: 9278 - DNA, 16 bp, synthetic construct
  misc_feature 1..16: note = synthetic [barcode part1]
  source 1..16: mol_type = other DNA
agacgttatagtggac

SEQ ID NO: 9279 - DNA, 16 bp, synthetic construct
  misc_feature 1..16: note = synthetic [barcode part1]
  source 1..16: mol_type = other DNA
gtgaagagttgccggt

SEQ ID NO: 9280 - DNA, 16 bp, synthetic construct
  misc_feature 1..16: note = synthetic [barcode part1]
  source 1..16: mol_type = other DNA
atcgagtcgtcagatc

SEQ ID NO: 9281 - DNA, 16 bp, synthetic construct
  misc_feature 1..16: note = synthetic [barcode part1]
  source 1..16: mol_type = other DNA
tcctgacttaagtgtc

SEQ ID NO: 9282 - DNA, 16 bp, synthetic construct
  misc_feature 1..16: note = synthetic [barcode part1]
  source 1..16: mol_type = other DNA
atacacggtcgtgatc

SEQ ID NO: 9283 - DNA, 16 bp, synthetic construct
  misc_feature 1..16: note = synthetic [barcode part1]
  source 1..16: mol_type = other DNA
cgataacctggattgc

SEQ ID NO: 9284 - DNA, 16 bp, synthetic construct
  misc_feature 1..16: note = synthetic [barcode part1]
  source 1..16: mol_type = other DNA
gtactcctatagaggc

SEQ ID NO: 9285 - DNA, 16 bp, synthetic construct
  misc_feature 1..16: note = synthetic [barcode part1]
  source 1..16: mol_type = other DNA
tgagatcacgtcacac

SEQ ID NO: 9286 - DNA, 16 bp, synthetic construct
  misc_feature 1..16: note = synthetic [barcode part1]
  source 1..16: mol_type = other DNA
cagaataccgttaccg

SEQ ID NO: 9287 - DNA, 16 bp, synthetic construct
  misc_feature 1..16: note = synthetic [barcode part1]
  source 1..16: mol_type = other DNA
tactgcacaactggtg

SEQ ID NO: 9288 - DNA, 16 bp, synthetic construct
  misc_feature 1..16: note = synthetic [barcode part1]
  source 1..16: mol_type = other DNA
cgtactcagattatcc

SEQ ID NO: 9289 - DNA, 16 bp, synthetic construct
  misc_feature 1..16: note = synthetic [barcode part1]
  source 1..16: mol_type = other DNA
caacggagaattcgcg

SEQ ID NO: 9290 - DNA, 16 bp, synthetic construct
  misc_feature 1..16: note = synthetic [barcode part1]
  source 1..16: mol_type = other DNA
atcgaggatcgacgtg

SEQ ID NO: 9291 - DNA, 16 bp, synthetic construct
  misc_feature 1..16: note = synthetic [barcode part1]
  source 1..16: mol_type = other DNA
gtgccagtagtaaggc

SEQ ID NO: 9292 - DNA, 16 bp, synthetic construct
  misc_feature 1..16: note = synthetic [barcode part1]
  source 1..16: mol_type = other DNA
ttgagaacgtagactg

SEQ ID NO: 9293 - DNA, 16 bp, synthetic construct
  misc_feature 1..16: note = synthetic [barcode part1]
  source 1..16: mol_type = other DNA
tatcactgttcgagtc

SEQ ID NO: 9294 - DNA, 16 bp, synthetic construct
  misc_feature 1..16: note = synthetic [barcode part1]
  source 1..16: mol_type = other DNA
ttggacaacttcactc

SEQ ID NO: 9295 - DNA, 16 bp, synthetic construct
  misc_feature 1..16: note = synthetic [barcode part1]
  source 1..16: mol_type = other DNA
tagttctacgtcaacc

SEQ ID NO: 9296 - DNA, 16 bp, synthetic construct
  misc_feature 1..16: note = synthetic [barcode part1]
  source 1..16: mol_type = other DNA
tggaatatccgatccg

SEQ ID NO: 9297 - DNA, 16 bp, synthetic construct
  misc_feature 1..16: note = synthetic [barcode part1]
  source 1..16: mol_type = other DNA
gactctaggataagtg

SEQ ID NO: 9298 - DNA, 16 bp, synthetic construct
  misc_feature 1..16: note = synthetic [barcode part1]
  source 1..16: mol_type = other DNA
aggcgttgtaacaagt

SEQ ID NO: 9299 - DNA, 16 bp, synthetic construct
  misc_feature 1..16: note = synthetic [barcode part1]
  source 1..16: mol_type = other DNA
gcggaagttagattgt

SEQ ID NO: 9300 - DNA, 16 bp, synthetic construct
  misc_feature 1..16: note = synthetic [barcode part1]
  source 1..16: mol_type = other DNA
gattcggtcctgcgtt

SEQ ID NO: 9301 - DNA, 16 bp, synthetic construct
  misc_feature 1..16: note = synthetic [barcode part1]
  source 1..16: mol_type = other DNA
tgacacacgataagac

SEQ ID NO: 9302 - DNA, 16 bp, synthetic construct
  misc_feature 1..16: note = synthetic [barcode part1]
  source 1..16: mol_type = other DNA
gacacgtgttgacgtt

SEQ ID NO: 9303 - DNA, 16 bp, synthetic construct
  misc_feature 1..16: note = synthetic [barcode part1]
  source 1..16: mol_type = other DNA
tggttccgtcgtgtac

SEQ ID NO: 9304 - DNA, 16 bp, synthetic construct
  misc_feature 1..16: note = synthetic [barcode part1]
  source 1..16: mol_type = other DNA
tacggagttaacaacg

SEQ ID NO: 9305 - DNA, 16 bp, synthetic construct
  misc_feature 1..16: note = synthetic [barcode part1]
  source 1..16: mol_type = other DNA
gcactccgtacttctt

SEQ ID NO: 9306 - DNA, 16 bp, synthetic construct
  misc_feature 1..16: note = synthetic [barcode part1]
  source 1..16: mol_type = other DNA
tgccactacaaccgtc

SEQ ID NO: 9307 - DNA, 16 bp, synthetic construct
  misc_feature 1..16: note = synthetic [barcode part1]
  source 1..16: mol_type = other DNA
tcttatctcgcaagtg

SEQ ID NO: 9308 - DNA, 16 bp, synthetic construct
  misc_feature 1..16: note = synthetic [barcode part1]
  source 1..16: mol_type = other DNA
ttcacaccggcgactt

SEQ ID NO: 9309 - DNA, 16 bp, synthetic construct
  misc_feature 1..16: note = synthetic [barcode part1]
  source 1..16: mol_type = other DNA
cactggcaatctctcg

SEQ ID NO: 9310 - DNA, 16 bp, synthetic construct
  misc_feature 1..16: note = synthetic [barcode part1]
  source 1..16: mol_type = other DNA
agaatcacgacggaag

SEQ ID NO: 9311 - DNA, 16 bp, synthetic construct
  misc_feature 1..16: note = synthetic [barcode part1]
  source 1..16: mol_type = other DNA
ttcactagagaaccgc

SEQ ID NO: 9312 - DNA, 16 bp, synthetic construct
  misc_feature 1..16: note = synthetic [barcode part1]
  source 1..16: mol_type = other DNA
ttacgagtgaatccgc

SEQ ID NO: 9313 - DNA, 16 bp, synthetic construct
  misc_feature 1..16: note = synthetic [barcode part1]
  source 1..16: mol_type = other DNA
ttgatccggtgcgtct

SEQ ID NO: 9314 - DNA, 16 bp, synthetic construct
  misc_feature 1..16: note = synthetic [barcode part1]
  source 1..16: mol_type = other DNA
ccaaggattgaacgcg

SEQ ID NO: 9315 - DNA, 16 bp, synthetic construct
  misc_feature 1..16: note = synthetic [barcode part1]
  source 1..16: mol_type = other DNA
cacgtctaagttgttc

SEQ ID NO: 9316 - DNA, 16 bp, synthetic construct
  misc_feature 1..16: note = synthetic [barcode part1]
  source 1..16: mol_type = other DNA
ttactgcgtgaactct

SEQ ID NO: 9317 - DNA, 16 bp, synthetic construct
  misc_feature 1..16: note = synthetic [barcode part1]
  source 1..16: mol_type = other DNA
ttcactaccgacacgc

SEQ ID NO: 9318 - DNA, 16 bp, synthetic construct
  misc_feature 1..16: note = synthetic [barcode part1]
  source 1..16: mol_type = other DNA
tggcgtgtcctgttac

SEQ ID NO: 9319 - DNA, 16 bp, synthetic construct
  misc_feature 1..16: note = synthetic [barcode part1]
  source 1..16: mol_type = other DNA
cagagaagactggagt

SEQ ID NO: 9320 - DNA, 16 bp, synthetic construct
  misc_feature 1..16: note = synthetic [barcode part1]
  source 1..16: mol_type = other DNA
cggtggtaagagtacc

SEQ ID NO: 9321 - DNA, 16 bp, synthetic construct
  misc_feature 1..16: note = synthetic [barcode part1]
  source 1..16: mol_type = other DNA
gtgcacgtaacactac

SEQ ID NO: 9322 - DNA, 16 bp, synthetic construct
  misc_feature 1..16: note = synthetic [barcode part1]
  source 1..16: mol_type = other DNA
caggagactctctaac

SEQ ID NO: 9323 - DNA, 16 bp, synthetic construct
  misc_feature 1..16: note = synthetic [barcode part1]
  source 1..16: mol_type = other DNA
tggtgcgatacctaac

SEQ ID NO: 9324 - DNA, 16 bp, synthetic construct
  misc_feature 1..16: note = synthetic [barcode part1]
  source 1..16: mol_type = other DNA
aattcggcgacaactc

SEQ ID NO: 9325 - DNA, 16 bp, synthetic construct
  misc_feature 1..16: note = synthetic [barcode part1]
  source 1..16: mol_type = other DNA
actggtagtaggacgc

SEQ ID NO: 9326 - DNA, 16 bp, synthetic construct
  misc_feature 1..16: note = synthetic [barcode part1]
  source 1..16: mol_type = other DNA
gcgtgcaacactatac

SEQ ID NO: 9327 - DNA, 16 bp, synthetic construct
  misc_feature 1..16: note = synthetic [barcode part1]
  source 1..16: mol_type = other DNA
cgcgtaactgttatct

SEQ ID NO: 9328 - DNA, 16 bp, synthetic construct
  misc_feature 1..16: note = synthetic [barcode part1]
  source 1..16: mol_type = other DNA
cgttaggaacgacctt

SEQ ID NO: 9329 - DNA, 16 bp, synthetic construct
  misc_feature 1..16: note = synthetic [barcode part1]
  source 1..16: mol_type = other DNA
cggtcttacgttggtc

SEQ ID NO: 9330 - DNA, 16 bp, synthetic construct
  misc_feature 1..16: note = synthetic [barcode part1]
  source 1..16: mol_type = other DNA
gaacaggtattacgac

SEQ ID NO: 9331 - DNA, 16 bp, synthetic construct
  misc_feature 1..16: note = synthetic [barcode part1]
  source 1..16: mol_type = other DNA
cgcgtgatactgatac

SEQ ID NO: 9332 - DNA, 16 bp, synthetic construct
  misc_feature 1..16: note = synthetic [barcode part1]
  source 1..16: mol_type = other DNA
gacgtgtgtgttggtt

SEQ ID NO: 9333 - DNA, 16 bp, synthetic construct
  misc_feature 1..16: note = synthetic [barcode part1]
  source 1..16: mol_type = other DNA
taggaaggcaccaatt

SEQ ID NO: 9334 - DNA, 16 bp, synthetic construct
  misc_feature 1..16: note = synthetic [barcode part1]
  source 1..16: mol_type = other DNA
tcgacagacgaggact

SEQ ID NO: 9335 - DNA, 16 bp, synthetic construct
  misc_feature 1..16: note = synthetic [barcode part1]
  source 1..16: mol_type = other DNA
tggaggtccactagag

SEQ ID NO: 9336 - DNA, 16 bp, synthetic construct
  misc_feature 1..16: note = synthetic [barcode part1]
  source 1..16: mol_type = other DNA
gtccgtcaatactgtt

SEQ ID NO: 9337 - DNA, 16 bp, synthetic construct
  misc_feature 1..16: note = synthetic [barcode part1]
  source 1..16: mol_type = other DNA
aatcggttcctcttcc

SEQ ID NO: 9338 - DNA, 16 bp, synthetic construct
  misc_feature 1..16: note = synthetic [barcode part1]
  source 1..16: mol_type = other DNA
tcctgactacgaattc

SEQ ID NO: 9339 - DNA, 16 bp, synthetic construct
  misc_feature 1..16: note = synthetic [barcode part1]
  source 1..16: mol_type = other DNA
cagaagacagttacgt

SEQ ID NO: 9340 - DNA, 16 bp, synthetic construct
  misc_feature 1..16: note = synthetic [barcode part1]
  source 1..16: mol_type = other DNA
acggacaatctgttcg

SEQ ID NO: 9341 - DNA, 16 bp, synthetic construct
  misc_feature 1..16: note = synthetic [barcode part1]
  source 1..16: mol_type = other DNA
agaatcacgcactaag

SEQ ID NO: 9342 - DNA, 16 bp, synthetic construct
  misc_feature 1..16: note = synthetic [barcode part1]
  source 1..16: mol_type = other DNA
cacctgccgaagttct

SEQ ID NO: 9343 - DNA, 16 bp, synthetic construct
  misc_feature 1..16: note = synthetic [barcode part1]
  source 1..16: mol_type = other DNA
attggtgtgaagagtc

SEQ ID NO: 9344 - DNA, 16 bp, synthetic construct
  misc_feature 1..16: note = synthetic [barcode part1]
  source 1..16: mol_type = other DNA
tcgtgatccagaactg

SEQ ID NO: 9345 - DNA, 16 bp, synthetic construct
  misc_feature 1..16: note = synthetic [barcode part1]
  source 1..16: mol_type = other DNA
aaccgtaactgcgtac

SEQ ID NO: 9346 - DNA, 16 bp, synthetic construct
  misc_feature 1..16: note = synthetic [barcode part1]
  source 1..16: mol_type = other DNA
ccttcagacgtgttgc

SEQ ID NO: 9347 - DNA, 16 bp, synthetic construct
  misc_feature 1..16: note = synthetic [barcode part1]
  source 1..16: mol_type = other DNA
tcgtacctctggtgac

SEQ ID NO: 9348 - DNA, 16 bp, synthetic construct
  misc_feature 1..16: note = synthetic [barcode part1]
  source 1..16: mol_type = other DNA
tcctcagtataaccac

SEQ ID NO: 9349 - DNA, 16 bp, synthetic construct
  misc_feature 1..16: note = synthetic [barcode part1]
  source 1..16: mol_type = other DNA
gaacttgtcacgtgac

SEQ ID NO: 9350 - DNA, 16 bp, synthetic construct
  misc_feature 1..16: note = synthetic [barcode part1]
  source 1..16: mol_type = other DNA
gtgtcctatcaccgac

SEQ ID NO: 9351 - DNA, 16 bp, synthetic construct
  misc_feature 1..16: note = synthetic [barcode part1]
  source 1..16: mol_type = other DNA
tccgtataactaccgt

SEQ ID NO: 9352 - DNA, 16 bp, synthetic construct
  misc_feature 1..16: note = synthetic [barcode part1]
  source 1..16: mol_type = other DNA
tgtggcgaggtagatc

SEQ ID NO: 9353 - DNA, 16 bp, synthetic construct
  misc_feature 1..16: note = synthetic [barcode part1]
  source 1..16: mol_type = other DNA
gatagttgccagacct

SEQ ID NO: 9354 - DNA, 16 bp, synthetic construct
  misc_feature 1..16: note = synthetic [barcode part1]
  source 1..16: mol_type = other DNA
atatccttagtctggc

SEQ ID NO: 9355 - DNA, 16 bp, synthetic construct
  misc_feature 1..16: note = synthetic [barcode part1]
  source 1..16: mol_type = other DNA
tcggtggtctgataac

SEQ ID NO: 9356 - DNA, 16 bp, synthetic construct
  misc_feature 1..16: note = synthetic [barcode part1]
  source 1..16: mol_type = other DNA
tattccgtgagtgtct

SEQ ID NO: 9357 - DNA, 16 bp, synthetic construct
  misc_feature 1..16: note = synthetic [barcode part1]
  source 1..16: mol_type = other DNA
taacctgtccggtaag

SEQ ID NO: 9358 - DNA, 16 bp, synthetic construct
  misc_feature 1..16: note = synthetic [barcode part1]
  source 1..16: mol_type = other DNA
acgtctattgtggacg

SEQ ID NO: 9359 - DNA, 16 bp, synthetic construct
  misc_feature 1..16: note = synthetic [barcode part1]
  source 1..16: mol_type = other DNA
atacgtccaccttgcg

SEQ ID NO: 9360 - DNA, 16 bp, synthetic construct
  misc_feature 1..16: note = synthetic [barcode part1]
  source 1..16: mol_type = other DNA
ttatcacaggcagtgc

SEQ ID NO: 9361 - DNA, 16 bp, synthetic construct
  misc_feature 1..16: note = synthetic [barcode part1]
  source 1..16: mol_type = other DNA
cggagtaacctgagtg

SEQ ID NO: 9362 - DNA, 16 bp, synthetic construct
  misc_feature 1..16: note = synthetic [barcode part1]
  source 1..16: mol_type = other DNA
gaaggcgttaccaggt

SEQ ID NO: 9363 - DNA, 16 bp, synthetic construct
  misc_feature 1..16: note = synthetic [barcode part1]
  source 1..16: mol_type = other DNA
caaggttgtgtcacac

SEQ ID NO: 9364 - DNA, 16 bp, synthetic construct
  misc_feature 1..16: note = synthetic [barcode part1]
  source 1..16: mol_type = other DNA
gtgttaggtatccgac

SEQ ID NO: 9365 - DNA, 16 bp, synthetic construct
  misc_feature 1..16: note = synthetic [barcode part1]
  source 1..16: mol_type = other DNA
agactggtaaccgcag

SEQ ID NO: 9366 - DNA, 16 bp, synthetic construct
  misc_feature 1..16: note = synthetic [barcode part1]
  source 1..16: mol_type = other DNA
tacggtagaacagatc

SEQ ID NO: 9367 - DNA, 16 bp, synthetic construct
  misc_feature 1..16: note = synthetic [barcode part1]
  source 1..16: mol_type = other DNA
ccaataccttcgattg

SEQ ID NO: 9368 - DNA, 16 bp, synthetic construct
  misc_feature 1..16: note = synthetic [barcode part1]
  source 1..16: mol_type = other DNA
ttatacagtgccggtg

SEQ ID NO: 9369 - DNA, 16 bp, synthetic construct
  misc_feature 1..16: note = synthetic [barcode part1]
  source 1..16: mol_type = other DNA
tgttgtgactggtcag

SEQ ID NO: 9370 - DNA, 16 bp, synthetic construct
  misc_feature 1..16: note = synthetic [barcode part1]
  source 1..16: mol_type = other DNA
gttcgtcacttgttcc

SEQ ID NO: 9371 - DNA, 16 bp, synthetic construct
  misc_feature 1..16: note = synthetic [barcode part1]
  source 1..16: mol_type = other DNA
tcaattccttacaggc

SEQ ID NO: 9372 - DNA, 16 bp, synthetic construct
  misc_feature 1..16: note = synthetic [barcode part1]
  source 1..16: mol_type = other DNA
tgtgtctctgtcaagt

SEQ ID NO: 9373 - DNA, 16 bp, synthetic construct
  misc_feature 1..16: note = synthetic [barcode part1]
  source 1..16: mol_type = other DNA
acgaccgtcctgattc

SEQ ID NO: 9374 - DNA, 16 bp, synthetic construct
  misc_feature 1..16: note = synthetic [barcode part1]
  source 1..16: mol_type = other DNA
agaacggaagtccacc

SEQ ID NO: 9375 - DNA, 16 bp, synthetic construct
  misc_feature 1..16: note = synthetic [barcode part1]
  source 1..16: mol_type = other DNA
actggttgtgtgtgtg

SEQ ID NO: 9376 - DNA, 16 bp, synthetic construct
  misc_feature 1..16: note = synthetic [barcode part1]
  source 1..16: mol_type = other DNA
tagaggcctaccagag

SEQ ID NO: 9377 - DNA, 16 bp, synthetic construct
  misc_feature 1..16: note = synthetic [barcode part1]
  source 1..16: mol_type = other DNA
aatagagacgcggtcc

SEQ ID NO: 9378 - DNA, 16 bp, synthetic construct
  misc_feature 1..16: note = synthetic [barcode part1]
  source 1..16: mol_type = other DNA
aggcagatcgcgatac

SEQ ID NO: 9379 - DNA, 16 bp, synthetic construct
  misc_feature 1..16: note = synthetic [barcode part1]
  source 1..16: mol_type = other DNA
agagtcgatcagagag

SEQ ID NO: 9380 - DNA, 16 bp, synthetic construct
  misc_feature 1..16: note = synthetic [barcode part1]
  source 1..16: mol_type = other DNA
aggacctggtgaacgt

SEQ ID NO: 9381 - DNA, 16 bp, synthetic construct
  misc_feature 1..16: note = synthetic [barcode part1]
  source 1..16: mol_type = other DNA
acaactatcctggtct

SEQ ID NO: 9382 - DNA, 16 bp, synthetic construct
  misc_feature 1..16: note = synthetic [barcode part1]
  source 1..16: mol_type = other DNA
gtctggactgcgaatt

SEQ ID NO: 9383 - DNA, 16 bp, synthetic construct
  misc_feature 1..16: note = synthetic [barcode part1]
  source 1..16: mol_type = other DNA
atcacggcgagtgagt

SEQ ID NO: 9384 - DNA, 16 bp, synthetic construct
  misc_feature 1..16: note = synthetic [barcode part1]
  source 1..16: mol_type = other DNA
cctgagatcggttagt

SEQ ID NO: 9385 - DNA, 16 bp, synthetic construct
  misc_feature 1..16: note = synthetic [barcode part1]
  source 1..16: mol_type = other DNA
caggactagtctcagt

SEQ ID NO: 9386 - DNA, 16 bp, synthetic construct
  misc_feature 1..16: note = synthetic [barcode part1]
  source 1..16: mol_type = other DNA
tagtggtgaggtgtgc

SEQ ID NO: 9387 - DNA, 16 bp, synthetic construct
  misc_feature 1..16: note = synthetic [barcode part1]
  source 1..16: mol_type = other DNA
aaggtaacctatcgcc

SEQ ID NO: 9388 - DNA, 16 bp, synthetic construct
  misc_feature 1..16: note = synthetic [barcode part1]
  source 1..16: mol_type = other DNA
tcagtgtgtcacacag

SEQ ID NO: 9389 - DNA, 16 bp, synthetic construct
  misc_feature 1..16: note = synthetic [barcode part1]
  source 1..16: mol_type = other DNA
agtctctaggacggtt

SEQ ID NO: 9390 - DNA, 16 bp, synthetic construct
  misc_feature 1..16: note = synthetic [barcode part1]
  source 1..16: mol_type = other DNA
actcgccgtcttgagt

SEQ ID NO: 9391 - DNA, 16 bp, synthetic construct
  misc_feature 1..16: note = synthetic [barcode part1]
  source 1..16: mol_type = other DNA
ttggtctctgtacagt

SEQ ID NO: 9392 - DNA, 16 bp, synthetic construct
  misc_feature 1..16: note = synthetic [barcode part1]
  source 1..16: mol_type = other DNA
tgaccaagactggttc

SEQ ID NO: 9393 - DNA, 16 bp, synthetic construct
  misc_feature 1..16: note = synthetic [barcode part1]
  source 1..16: mol_type = other DNA
cctctgacaactgtgc

SEQ ID NO: 9394 - DNA, 16 bp, synthetic construct
  misc_feature 1..16: note = synthetic [barcode part1]
  source 1..16: mol_type = other DNA
agacaattgcgaatcg

SEQ ID NO: 9395 - DNA, 16 bp, synthetic construct
  misc_feature 1..16: note = synthetic [barcode part1]
  source 1..16: mol_type = other DNA
gtggatcggagactgt

SEQ ID NO: 9396 - DNA, 16 bp, synthetic construct
  misc_feature 1..16: note = synthetic [barcode part1]
  source 1..16: mol_type = other DNA
agatccgtactgacgt

SEQ ID NO: 9397 - DNA, 16 bp, synthetic construct
  misc_feature 1..16: note = synthetic [barcode part1]
  source 1..16: mol_type = other DNA
gaggagtacgagatac

SEQ ID NO: 9398 - DNA, 16 bp, synthetic construct
  misc_feature 1..16: note = synthetic [barcode part1]
  source 1..16: mol_type = other DNA
aatatacctggtcctc

SEQ ID NO: 9399 - DNA, 16 bp, synthetic construct
  misc_feature 1..16: note = synthetic [barcode part1]
  source 1..16: mol_type = other DNA
agttacgacaccgatc

SEQ ID NO: 9400 - DNA, 16 bp, synthetic construct
  misc_feature 1..16: note = synthetic [barcode part1]
  source 1..16: mol_type = other DNA
gtgtgtgtcgaagtct

SEQ ID NO: 9401 - DNA, 16 bp, synthetic construct
  misc_feature 1..16: note = synthetic [barcode part1]
  source 1..16: mol_type = other DNA
cacaatcgtgcaatcg

SEQ ID NO: 9402 - DNA, 16 bp, synthetic construct
  misc_feature 1..16: note = synthetic [barcode part1]
  source 1..16: mol_type = other DNA
gtgagtcctcctggtt

SEQ ID NO: 9403 - DNA, 16 bp, synthetic construct
  misc_feature 1..16: note = synthetic [barcode part1]
  source 1..16: mol_type = other DNA
agtcctaacggtatcg

SEQ ID NO: 9404 - DNA, 16 bp, synthetic construct
  misc_feature 1..16: note = synthetic [barcode part1]
  source 1..16: mol_type = other DNA
gaactctgaagaggag

SEQ ID NO: 9405 - DNA, 16 bp, synthetic construct
  misc_feature 1..16: note = synthetic [barcode part1]
  source 1..16: mol_type = other DNA
cagaggtgcaactcag

SEQ ID NO: 9406 - DNA, 16 bp, synthetic construct
  misc_feature 1..16: note = synthetic [barcode part1]
  source 1..16: mol_type = other DNA
cgtagactgccgtctt

SEQ ID NO: 9407 - DNA, 16 bp, synthetic construct
  misc_feature 1..16: note = synthetic [barcode part1]
  source 1..16: mol_type = other DNA
cgatcaacgactagtc

SEQ ID NO: 9408 - DNA, 16 bp, synthetic construct
  misc_feature 1..16: note = synthetic [barcode part1]
  source 1..16: mol_type = other DNA
acggtgacttagttcg

SEQ ID NO: 9409 - DNA, 16 bp, synthetic construct
  misc_feature 1..16: note = synthetic [barcode part1]
  source 1..16: mol_type = other DNA
ccagtgaattcctact

SEQ ID NO: 9410 - DNA, 16 bp, synthetic construct
  misc_feature 1..16: note = synthetic [barcode part1]
  source 1..16: mol_type = other DNA
agtcacagtgttgacc

SEQ ID NO: 9411 - DNA, 16 bp, synthetic construct
  misc_feature 1..16: note = synthetic [barcode part1]
  source 1..16: mol_type = other DNA
acaggtgtcacttgtg

SEQ ID NO: 9412 - DNA, 16 bp, synthetic construct
  misc_feature 1..16: note = synthetic [barcode part1]
  source 1..16: mol_type = other DNA
gacagagaaggatcac

SEQ ID NO: 9413 - DNA, 16 bp, synthetic construct
  misc_feature 1..16: note = synthetic [barcode part1]
  source 1..16: mol_type = other DNA
ttgagtcctgacaacg

SEQ ID NO: 9414 - DNA, 16 bp, synthetic construct
  misc_feature 1..16: note = synthetic [barcode part1]
  source 1..16: mol_type = other DNA
gtccgtcgaacagatt

SEQ ID NO: 9415 - DNA, 16 bp, synthetic construct
  misc_feature 1..16: note = synthetic [barcode part1]
  source 1..16: mol_type = other DNA
taactctcggtgtatc

SEQ ID NO: 9416 - DNA, 16 bp, synthetic construct
  misc_feature 1..16: note = synthetic [barcode part1]
  source 1..16: mol_type = other DNA
cagagactaggaacag

SEQ ID NO: 9417 - DNA, 16 bp, synthetic construct
  misc_feature 1..16: note = synthetic [barcode part1]
  source 1..16: mol_type = other DNA
tcgtacctaccgaacc

SEQ ID NO: 9418 - DNA, 16 bp, synthetic construct
  misc_feature 1..16: note = synthetic [barcode part1]
  source 1..16: mol_type = other DNA
gcgattaaccacacac

SEQ ID NO: 9419 - DNA, 16 bp, synthetic construct
  misc_feature 1..16: note = synthetic [barcode part1]
  source 1..16: mol_type = other DNA
aacacctaagtcagag

SEQ ID NO: 9420 - DNA, 16 bp, synthetic construct
  misc_feature 1..16: note = synthetic [barcode part1]
  source 1..16: mol_type = other DNA
agaagaccgaatctgt

SEQ ID NO: 9421 - DNA, 16 bp, synthetic construct
  misc_feature 1..16: note = synthetic [barcode part1]
  source 1..16: mol_type = other DNA
aggcctgacttctcac

SEQ ID NO: 9422 - DNA, 16 bp, synthetic construct
  misc_feature 1..16: note = synthetic [barcode part1]
  source 1..16: mol_type = other DNA
cactgtacgacactag

SEQ ID NO: 9423 - DNA, 16 bp, synthetic construct
  misc_feature 1..16: note = synthetic [barcode part1]
  source 1..16: mol_type = other DNA
cgtacagaacggcagt

SEQ ID NO: 9424 - DNA, 16 bp, synthetic construct
  misc_feature 1..16: note = synthetic [barcode part1]
  source 1..16: mol_type = other DNA
cagacagtggaatccg

SEQ ID NO: 9425 - DNA, 16 bp, synthetic construct
  misc_feature 1..16: note = synthetic [barcode part1]
  source 1..16: mol_type = other DNA
cagttggacacgtgtt

SEQ ID NO: 9426 - DNA, 16 bp, synthetic construct
  misc_feature 1..16: note = synthetic [barcode part1]
  source 1..16: mol_type = other DNA
tgaatccgaatccacg

SEQ ID NO: 9427 - DNA, 16 bp, synthetic construct
  misc_feature 1..16: note = synthetic [barcode part1]
  source 1..16: mol_type = other DNA
gtctgccttgtggtgt

SEQ ID NO: 9428 - DNA, 16 bp, synthetic construct
  misc_feature 1..16: note = synthetic [barcode part1]
  source 1..16: mol_type = other DNA
acgtgtgaccacgatt

SEQ ID NO: 9429 - DNA, 16 bp, synthetic construct
  misc_feature 1..16: note = synthetic [barcode part1]
  source 1..16: mol_type = other DNA
tcttaattgtgccggt

SEQ ID NO: 9430 - DNA, 16 bp, synthetic construct
  misc_feature 1..16: note = synthetic [barcode part1]
  source 1..16: mol_type = other DNA
gacaggtccgtaacag

SEQ ID NO: 9431 - DNA, 16 bp, synthetic construct
  misc_feature 1..16: note = synthetic [barcode part1]
  source 1..16: mol_type = other DNA
aacggcactgtgagtg

SEQ ID NO: 9432 - DNA, 16 bp, synthetic construct
  misc_feature 1..16: note = synthetic [barcode part1]
  source 1..16: mol_type = other DNA
attggtcaccggttag

SEQ ID NO: 9433 - DNA, 16 bp, synthetic construct
  misc_feature 1..16: note = synthetic [barcode part1]
  source 1..16: mol_type = other DNA
tcggcagagatataac

SEQ ID NO: 9434 - DNA, 16 bp, synthetic construct
  misc_feature 1..16: note = synthetic [barcode part1]
  source 1..16: mol_type = other DNA
tgtggttactgcctcg

SEQ ID NO: 9435 - DNA, 16 bp, synthetic construct
  misc_feature 1..16: note = synthetic [barcode part1]
  source 1..16: mol_type = other DNA
cggacaagatagacag

SEQ ID NO: 9436 - DNA, 16 bp, synthetic construct
  misc_feature 1..16: note = synthetic [barcode part1]
  source 1..16: mol_type = other DNA
ttcgtgagaactcgtg

SEQ ID NO: 9437 - DNA, 16 bp, synthetic construct
  misc_feature 1..16: note = synthetic [barcode part1]
  source 1..16: mol_type = other DNA
tccaacctgtgattac

SEQ ID NO: 9438 - DNA, 16 bp, synthetic construct
  misc_feature 1..16: note = synthetic [barcode part1]
  source 1..16: mol_type = other DNA
aacggtgactctgttg

SEQ ID NO: 9439 - DNA, 16 bp, synthetic construct
  misc_feature 1..16: note = synthetic [barcode part1]
  source 1..16: mol_type = other DNA
gtggtccgaacgtaag

SEQ ID NO: 9440 - DNA, 16 bp, synthetic construct
  misc_feature 1..16: note = synthetic [barcode part1]
  source 1..16: mol_type = other DNA
tgcacttacgaggact

SEQ ID NO: 9441 - DNA, 16 bp, synthetic construct
  misc_feature 1..16: note = synthetic [barcode part1]
  source 1..16: mol_type = other DNA
tgcaacttagtggaag

SEQ ID NO: 9442 - DNA, 16 bp, synthetic construct
  misc_feature 1..16: note = synthetic [barcode part1]
  source 1..16: mol_type = other DNA
aggttgtggattgtcc

SEQ ID NO: 9443 - DNA, 16 bp, synthetic construct
  misc_feature 1..16: note = synthetic [barcode part1]
  source 1..16: mol_type = other DNA
tgacacttagacgaag

SEQ ID NO: 9444 - DNA, 16 bp, synthetic construct
  misc_feature 1..16: note = synthetic [barcode part1]
  source 1..16: mol_type = other DNA
ttgactcgcgattact

SEQ ID NO: 9445 - DNA, 16 bp, synthetic construct
  misc_feature 1..16: note = synthetic [barcode part1]
  source 1..16: mol_type = other DNA
gattcgaggaggtgtc

SEQ ID NO: 9446 - DNA, 16 bp, synthetic construct
  misc_feature 1..16: note = synthetic [barcode part1]
  source 1..16: mol_type = other DNA
ttccagtgtgtggcct

SEQ ID NO: 9447 - DNA, 16 bp, synthetic construct
  misc_feature 1..16: note = synthetic [barcode part1]
  source 1..16: mol_type = other DNA
cgttacttccgcaggt

SEQ ID NO: 9448 - DNA, 16 bp, synthetic construct
  misc_feature 1..16: note = synthetic [barcode part1]
  source 1..16: mol_type = other DNA
tgtggatagacagtac

SEQ ID NO: 9449 - DNA, 16 bp, synthetic construct
  misc_feature 1..16: note = synthetic [barcode part1]
  source 1..16: mol_type = other DNA
ccttgacaagagttgc

SEQ ID NO: 9450 - DNA, 16 bp, synthetic construct
  misc_feature 1..16: note = synthetic [barcode part1]
  source 1..16: mol_type = other DNA
ttactgtgttcgcggc

SEQ ID NO: 9451 - DNA, 16 bp, synthetic construct
  misc_feature 1..16: note = synthetic [barcode part1]
  source 1..16: mol_type = other DNA
gactgttgcaactcag

SEQ ID NO: 9452 - DNA, 16 bp, synthetic construct
  misc_feature 1..16: note = synthetic [barcode part1]
  source 1..16: mol_type = other DNA
atactcgccgtaagtg

SEQ ID NO: 9453 - DNA, 16 bp, synthetic construct
  misc_feature 1..16: note = synthetic [barcode part1]
  source 1..16: mol_type = other DNA
acacacaaccagtcac

SEQ ID NO: 9454 - DNA, 16 bp, synthetic construct
  misc_feature 1..16: note = synthetic [barcode part1]
  source 1..16: mol_type = other DNA
gattgacgtgttacgc

SEQ ID NO: 9455 - DNA, 16 bp, synthetic construct
  misc_feature 1..16: note = synthetic [barcode part1]
  source 1..16: mol_type = other DNA
cgttgagatcttcact

SEQ ID NO: 9456 - DNA, 16 bp, synthetic construct
  misc_feature 1..16: note = synthetic [barcode part1]
  source 1..16: mol_type = other DNA
gttagacctatcggac

SEQ ID NO: 9457 - DNA, 16 bp, synthetic construct
  misc_feature 1..16: note = synthetic [barcode part1]
  source 1..16: mol_type = other DNA
attataccgacggaag

SEQ ID NO: 9458 - DNA, 16 bp, synthetic construct
  misc_feature 1..16: note = synthetic [barcode part1]
  source 1..16: mol_type = other DNA
caaggtctaacaccgt

SEQ ID NO: 9459 - DNA, 16 bp, synthetic construct
  misc_feature 1..16: note = synthetic [barcode part1]
  source 1..16: mol_type = other DNA
acaggagattatcgac

SEQ ID NO: 9460 - DNA, 16 bp, synthetic construct
  misc_feature 1..16: note = synthetic [barcode part1]
  source 1..16: mol_type = other DNA
tcgatacaatcctctg

SEQ ID NO: 9461 - DNA, 16 bp, synthetic construct
  misc_feature 1..16: note = synthetic [barcode part1]
  source 1..16: mol_type = other DNA
tgcgttacaatacgcg

SEQ ID NO: 9462 - DNA, 16 bp, synthetic construct
  misc_feature 1..16: note = synthetic [barcode part1]
  source 1..16: mol_type = other DNA
tacgcggattcttcgc

SEQ ID NO: 9463 - DNA, 16 bp, synthetic construct
  misc_feature 1..16: note = synthetic [barcode part1]
  source 1..16: mol_type = other DNA
tgtgccgtgactatag

SEQ ID NO: 9464 - DNA, 16 bp, synthetic construct
  misc_feature 1..16: note = synthetic [barcode part1]
  source 1..16: mol_type = other DNA
acactcaggtggaacg

SEQ ID NO: 9465 - DNA, 16 bp, synthetic construct
  misc_feature 1..16: note = synthetic [barcode part1]
  source 1..16: mol_type = other DNA
tagtgacgatcgtcac

SEQ ID NO: 9466 - DNA, 16 bp, synthetic construct
  misc_feature 1..16: note = synthetic [barcode part1]
  source 1..16: mol_type = other DNA
acctgttgcaagtggt

SEQ ID NO: 9467 - DNA, 16 bp, synthetic construct
  misc_feature 1..16: note = synthetic [barcode part1]
  source 1..16: mol_type = other DNA
cgtaggagaccactag

SEQ ID NO: 9468 - DNA, 16 bp, synthetic construct
  misc_feature 1..16: note = synthetic [barcode part1]
  source 1..16: mol_type = other DNA
ttccaagttacggcag

SEQ ID NO: 9469 - DNA, 16 bp, synthetic construct
  misc_feature 1..16: note = synthetic [barcode part1]
  source 1..16: mol_type = other DNA
acgaataattccggag

SEQ ID NO: 9470 - DNA, 16 bp, synthetic construct
  misc_feature 1..16: note = synthetic [barcode part1]
  source 1..16: mol_type = other DNA
caggtcctggatattg

SEQ ID NO: 9471 - DNA, 16 bp, synthetic construct
  misc_feature 1..16: note = synthetic [barcode part1]
  source 1..16: mol_type = other DNA
aacagatcaggattcg

SEQ ID NO: 9472 - DNA, 16 bp, synthetic construct
  misc_feature 1..16: note = synthetic [barcode part1]
  source 1..16: mol_type = other DNA
gtggtacacgtgtact

SEQ ID NO: 9473 - DNA, 16 bp, synthetic construct
  misc_feature 1..16: note = synthetic [barcode part1]
  source 1..16: mol_type = other DNA
acaccaactagtgcac

SEQ ID NO: 9474 - DNA, 16 bp, synthetic construct
  misc_feature 1..16: note = synthetic [barcode part1]
  source 1..16: mol_type = other DNA
gattagaggcacaccg

SEQ ID NO: 9475 - DNA, 16 bp, synthetic construct
  misc_feature 1..16: note = synthetic [barcode part1]
  source 1..16: mol_type = other DNA
atcgactgaggttctg

SEQ ID NO: 9476 - DNA, 16 bp, synthetic construct
  misc_feature 1..16: note = synthetic [barcode part1]
  source 1..16: mol_type = other DNA
ccaagtaacggcgaac

SEQ ID NO: 9477 - DNA, 16 bp, synthetic construct
  misc_feature 1..16: note = synthetic [barcode part1]
  source 1..16: mol_type = other DNA
cctccaggcactagtt

SEQ ID NO: 9478 - DNA, 16 bp, synthetic construct
  misc_feature 1..16: note = synthetic [barcode part1]
  source 1..16: mol_type = other DNA
atctacttctaggacc

SEQ ID NO: 9479 - DNA, 16 bp, synthetic construct
  misc_feature 1..16: note = synthetic [barcode part1]
  source 1..16: mol_type = other DNA
tgcgtctggtgatctc

SEQ ID NO: 9480 - DNA, 16 bp, synthetic construct
  misc_feature 1..16: note = synthetic [barcode part1]
  source 1..16: mol_type = other DNA
tggactacgacctaac

SEQ ID NO: 9481 - DNA, 16 bp, synthetic construct
  misc_feature 1..16: note = synthetic [barcode part1]
  source 1..16: mol_type = other DNA
tggacgcagagactac

SEQ ID NO: 9482 - DNA, 16 bp, synthetic construct
  misc_feature 1..16: note = synthetic [barcode part1]
  source 1..16: mol_type = other DNA
caatcttggaggactc

SEQ ID NO: 9483 - DNA, 16 bp, synthetic construct
  misc_feature 1..16: note = synthetic [barcode part1]
  source 1..16: mol_type = other DNA
aggaggttactagtac

SEQ ID NO: 9484 - DNA, 16 bp, synthetic construct
  misc_feature 1..16: note = synthetic [barcode part1]
  source 1..16: mol_type = other DNA
tgttcttaattcggcg

SEQ ID NO: 9485 - DNA, 16 bp, synthetic construct
  misc_feature 1..16: note = synthetic [barcode part1]
  source 1..16: mol_type = other DNA
tgttgacttcttcgag

SEQ ID NO: 9486 - DNA, 16 bp, synthetic construct
  misc_feature 1..16: note = synthetic [barcode part1]
  source 1..16: mol_type = other DNA
tgagtgccaattctct

SEQ ID NO: 9487 - DNA, 16 bp, synthetic construct
  misc_feature 1..16: note = synthetic [barcode part1]
  source 1..16: mol_type = other DNA
acaagagtaacggtct

SEQ ID NO: 9488 - DNA, 16 bp, synthetic construct
  misc_feature 1..16: note = synthetic [barcode part1]
  source 1..16: mol_type = other DNA
cacgttcgcagttcac

SEQ ID NO: 9489 - DNA, 16 bp, synthetic construct
  misc_feature 1..16: note = synthetic [barcode part1]
  source 1..16: mol_type = other DNA
tgcctctaatcgccag

SEQ ID NO: 9490 - DNA, 16 bp, synthetic construct
  misc_feature 1..16: note = synthetic [barcode part1]
  source 1..16: mol_type = other DNA
actgaaccgtcagatc

SEQ ID NO: 9491 - DNA, 16 bp, synthetic construct
  misc_feature 1..16: note = synthetic [barcode part1]
  source 1..16: mol_type = other DNA
acagttatcggaaggt

SEQ ID NO: 9492 - DNA, 16 bp, synthetic construct
  misc_feature 1..16: note = synthetic [barcode part1]
  source 1..16: mol_type = other DNA
gacgattgagaacgcc

SEQ ID NO: 9493 - DNA, 16 bp, synthetic construct
  misc_feature 1..16: note = synthetic [barcode part1]
  source 1..16: mol_type = other DNA
gagatatcagtctgag

SEQ ID NO: 9494 - DNA, 16 bp, synthetic construct
  misc_feature 1..16: note = synthetic [barcode part1]
  source 1..16: mol_type = other DNA
ttcgccagtgcctaac

SEQ ID NO: 9495 - DNA, 16 bp, synthetic construct
  misc_feature 1..16: note = synthetic [barcode part1]
  source 1..16: mol_type = other DNA
tctctcttgcgatacc

SEQ ID NO: 9496 - DNA, 16 bp, synthetic construct
  misc_feature 1..16: note = synthetic [barcode part1]
  source 1..16: mol_type = other DNA
acggacaacgacgttg

SEQ ID NO: 9497 - DNA, 16 bp, synthetic construct
  misc_feature 1..16: note = synthetic [barcode part1]
  source 1..16: mol_type = other DNA
gcgaggattagattgt

SEQ ID NO: 9498 - DNA, 16 bp, synthetic construct
  misc_feature 1..16: note = synthetic [barcode part1]
  source 1..16: mol_type = other DNA
tacgtggactcctcgt

SEQ ID NO: 9499 - DNA, 16 bp, synthetic construct
  misc_feature 1..16: note = synthetic [barcode part1]
  source 1..16: mol_type = other DNA
ccttgtgtcaggttgc

SEQ ID NO: 9500 - DNA, 16 bp, synthetic construct
  misc_feature 1..16: note = synthetic [barcode part1]
  source 1..16: mol_type = other DNA
gtcctgtgatacgtcc

SEQ ID NO: 9501 - DNA, 16 bp, synthetic construct
  misc_feature 1..16: note = synthetic [barcode part1]
  source 1..16: mol_type = other DNA
gcctagatacctgagt

SEQ ID NO: 9502 - DNA, 16 bp, synthetic construct
  misc_feature 1..16: note = synthetic [barcode part1]
  source 1..16: mol_type = other DNA
cacgacgtattacgac

SEQ ID NO: 9503 - DNA, 16 bp, synthetic construct
  misc_feature 1..16: note = synthetic [barcode part1]
  source 1..16: mol_type = other DNA
gaacgaatcgcctgtt

SEQ ID NO: 9504 - DNA, 16 bp, synthetic construct
  misc_feature 1..16: note = synthetic [barcode part1]
  source 1..16: mol_type = other DNA
acgttggtcttcgatt

SEQ ID NO: 9505 - DNA, 16 bp, synthetic construct
  misc_feature 1..16: note = synthetic [barcode part1]
  source 1..16: mol_type = other DNA
cagtgacttctgtact

SEQ ID NO: 9506 - DNA, 16 bp, synthetic construct
  misc_feature 1..16: note = synthetic [barcode part1]
  source 1..16: mol_type = other DNA
agttgtccggagacag

SEQ ID NO: 9507 - DNA, 16 bp, synthetic construct
  misc_feature 1..16: note = synthetic [barcode part1]
  source 1..16: mol_type = other DNA
gcctataacgtggttg

SEQ ID NO: 9508 - DNA, 16 bp, synthetic construct
  misc_feature 1..16: note = synthetic [barcode part1]
  source 1..16: mol_type = other DNA
gaagtagtggaacggt

SEQ ID NO: 9509 - DNA, 16 bp, synthetic construct
  misc_feature 1..16: note = synthetic [barcode part1]
  source 1..16: mol_type = other DNA
cggagaacgtaaccac

SEQ ID NO: 9510 - DNA, 16 bp, synthetic construct
  misc_feature 1..16: note = synthetic [barcode part1]
  source 1..16: mol_type = other DNA
gcgacacagtcttaac

SEQ ID NO: 9511 - DNA, 16 bp, synthetic construct
  misc_feature 1..16: note = synthetic [barcode part1]
  source 1..16: mol_type = other DNA
atccgaataggacggc

SEQ ID NO: 9512 - DNA, 16 bp, synthetic construct
  misc_feature 1..16: note = synthetic [barcode part1]
  source 1..16: mol_type = other DNA
tcaccacgtgagttcc

SEQ ID NO: 9513 - DNA, 16 bp, synthetic construct
  misc_feature 1..16: note = synthetic [barcode part1]
  source 1..16: mol_type = other DNA
tgttgtgaagacctcg

SEQ ID NO: 9514 - DNA, 16 bp, synthetic construct
  misc_feature 1..16: note = synthetic [barcode part1]
  source 1..16: mol_type = other DNA
gagtgagatcttgaac

SEQ ID NO: 9515 - DNA, 16 bp, synthetic construct
  misc_feature 1..16: note = synthetic [barcode part1]
  source 1..16: mol_type = other DNA
gagataggtggatctt

SEQ ID NO: 9516 - DNA, 16 bp, synthetic construct
  misc_feature 1..16: note = synthetic [barcode part1]
  source 1..16: mol_type = other DNA
ttcctctcttcctctc

SEQ ID NO: 9517 - DNA, 16 bp, synthetic construct
  misc_feature 1..16: note = synthetic [barcode part1]
  source 1..16: mol_type = other DNA
actaacgttactgtcc

SEQ ID NO: 9518 - DNA, 16 bp, synthetic construct
  misc_feature 1..16: note = synthetic [barcode part1]
  source 1..16: mol_type = other DNA
tcacgtaatcgtgcag

SEQ ID NO: 9519 - DNA, 16 bp, synthetic construct
  misc_feature 1..16: note = synthetic [barcode part1]
  source 1..16: mol_type = other DNA
ttcaatcggtccttcc

SEQ ID NO: 9520 - DNA, 16 bp, synthetic construct
  misc_feature 1..16: note = synthetic [barcode part1]
  source 1..16: mol_type = other DNA
attcttctagtgcacg

SEQ ID NO: 9521 - DNA, 16 bp, synthetic construct
  misc_feature 1..16: note = synthetic [barcode part1]
  source 1..16: mol_type = other DNA
gataattgccgttggc

SEQ ID NO: 9522 - DNA, 16 bp, synthetic construct
  misc_feature 1..16: note = synthetic [barcode part1]
  source 1..16: mol_type = other DNA
gatcggtcttcctctt

SEQ ID NO: 9523 - DNA, 16 bp, synthetic construct
  misc_feature 1..16: note = synthetic [barcode part1]
  source 1..16: mol_type = other DNA
atcacaccaacctccg

SEQ ID NO: 9524 - DNA, 16 bp, synthetic construct
  misc_feature 1..16: note = synthetic [barcode part1]
  source 1..16: mol_type = other DNA
tgattccggtctctct

SEQ ID NO: 9525 - DNA, 16 bp, synthetic construct
  misc_feature 1..16: note = synthetic [barcode part1]
  source 1..16: mol_type = other DNA
tacggatcgtcgttcc

SEQ ID NO: 9526 - DNA, 16 bp, synthetic construct
  misc_feature 1..16: note = synthetic [barcode part1]
  source 1..16: mol_type = other DNA
gacgagtacttgtctg

SEQ ID NO: 9527 - DNA, 16 bp, synthetic construct
  misc_feature 1..16: note = synthetic [barcode part1]
  source 1..16: mol_type = other DNA
cgtacttgtgattcgt

SEQ ID NO: 9528 - DNA, 16 bp, synthetic construct
  misc_feature 1..16: note = synthetic [barcode part1]
  source 1..16: mol_type = other DNA
tgtcctgtgagtgtcc

SEQ ID NO: 9529 - DNA, 16 bp, synthetic construct
  misc_feature 1..16: note = synthetic [barcode part1]
  source 1..16: mol_type = other DNA
ttccgatcgtactagt

SEQ ID NO: 9530 - DNA, 16 bp, synthetic construct
  misc_feature 1..16: note = synthetic [barcode part1]
  source 1..16: mol_type = other DNA
cgtactacttcctaag

SEQ ID NO: 9531 - DNA, 16 bp, synthetic construct
  misc_feature 1..16: note = synthetic [barcode part1]
  source 1..16: mol_type = other DNA
gtgcgattcttggcct

SEQ ID NO: 9532 - DNA, 16 bp, synthetic construct
  misc_feature 1..16: note = synthetic [barcode part1]
  source 1..16: mol_type = other DNA
ataattggccacacgc

SEQ ID NO: 9533 - DNA, 16 bp, synthetic construct
  misc_feature 1..16: note = synthetic [barcode part1]
  source 1..16: mol_type = other DNA
gaaccgaaggactaag

SEQ ID NO: 9534 - DNA, 16 bp, synthetic construct
  misc_feature 1..16: note = synthetic [barcode part1]
  source 1..16: mol_type = other DNA
gtatacagtcgcggtt

SEQ ID NO: 9535 - DNA, 16 bp, synthetic construct
  misc_feature 1..16: note = synthetic [barcode part1]
  source 1..16: mol_type = other DNA
tcagaacacgagtaac

SEQ ID NO: 9536 - DNA, 16 bp, synthetic construct
  misc_feature 1..16: note = synthetic [barcode part1]
  source 1..16: mol_type = other DNA
gatcgcagagattagt

SEQ ID NO: 9537 - DNA, 16 bp, synthetic construct
  misc_feature 1..16: note = synthetic [barcode part1]
  source 1..16: mol_type = other DNA
gtacggagacgatctg

SEQ ID NO: 9538 - DNA, 16 bp, synthetic construct
  misc_feature 1..16: note = synthetic [barcode part1]
  source 1..16: mol_type = other DNA
cgtcacctactggtgt

SEQ ID NO: 9539 - DNA, 16 bp, synthetic construct
  misc_feature 1..16: note = synthetic [barcode part1]
  source 1..16: mol_type = other DNA
accacttcgaagtggt

SEQ ID NO: 9540 - DNA, 16 bp, synthetic construct
  misc_feature 1..16: note = synthetic [barcode part1]
  source 1..16: mol_type = other DNA
caggttaccagtagtc

SEQ ID NO: 9541 - DNA, 16 bp, synthetic construct
  misc_feature 1..16: note = synthetic [barcode part1]
  source 1..16: mol_type = other DNA
taacctcacaccgatt

SEQ ID NO: 9542 - DNA, 16 bp, synthetic construct
  misc_feature 1..16: note = synthetic [barcode part1]
  source 1..16: mol_type = other DNA
tcgtctggtctcgaac

SEQ ID NO: 9543 - DNA, 16 bp, synthetic construct
  misc_feature 1..16: note = synthetic [barcode part1]
  source 1..16: mol_type = other DNA
gataagtggcaggtag

SEQ ID NO: 9544 - DNA, 16 bp, synthetic construct
  misc_feature 1..16: note = synthetic [barcode part1]
  source 1..16: mol_type = other DNA
taggtgtaagacgatc

SEQ ID NO: 9545 - DNA, 16 bp, synthetic construct
  misc_feature 1..16: note = synthetic [barcode part1]
  source 1..16: mol_type = other DNA
gtacgcgagaatcttc

SEQ ID NO: 9546 - DNA, 16 bp, synthetic construct
  misc_feature 1..16: note = synthetic [barcode part1]
  source 1..16: mol_type = other DNA
tccgtggcactacttg

SEQ ID NO: 9547 - DNA, 16 bp, synthetic construct
  misc_feature 1..16: note = synthetic [barcode part1]
  source 1..16: mol_type = other DNA
acgttccgacctaacc

SEQ ID NO: 9548 - DNA, 16 bp, synthetic construct
  misc_feature 1..16: note = synthetic [barcode part1]
  source 1..16: mol_type = other DNA
ttacttgaggcaggtc

SEQ ID NO: 9549 - DNA, 16 bp, synthetic construct
  misc_feature 1..16: note = synthetic [barcode part1]
  source 1..16: mol_type = other DNA
cagttaactgaccggt

SEQ ID NO: 9550 - DNA, 16 bp, synthetic construct
  misc_feature 1..16: note = synthetic [barcode part1]
  source 1..16: mol_type = other DNA
gcaccttgttagattc

SEQ ID NO: 9551 - DNA, 16 bp, synthetic construct
  misc_feature 1..16: note = synthetic [barcode part1]
  source 1..16: mol_type = other DNA
attgtgagacagacgt

SEQ ID NO: 9552 - DNA, 16 bp, synthetic construct
  misc_feature 1..16: note = synthetic [barcode part1]
  source 1..16: mol_type = other DNA
ttctcctcggtgttac

SEQ ID NO: 9553 - DNA, 16 bp, synthetic construct
  misc_feature 1..16: note = synthetic [barcode part1]
  source 1..16: mol_type = other DNA
cgccgagatccttgtt

SEQ ID NO: 9554 - DNA, 16 bp, synthetic construct
  misc_feature 1..16: note = synthetic [barcode part1]
  source 1..16: mol_type = other DNA
atcaggtacttctgtc

SEQ ID NO: 9555 - DNA, 16 bp, synthetic construct
  misc_feature 1..16: note = synthetic [barcode part1]
  source 1..16: mol_type = other DNA
gcacgatactgtacgt

SEQ ID NO: 9556 - DNA, 16 bp, synthetic construct
  misc_feature 1..16: note = synthetic [barcode part1]
  source 1..16: mol_type = other DNA
gtgaggtgtgaacctg

SEQ ID NO: 9557 - DNA, 16 bp, synthetic construct
  misc_feature 1..16: note = synthetic [barcode part1]
  source 1..16: mol_type = other DNA
agaagtggcctctact

SEQ ID NO: 9558 - DNA, 16 bp, synthetic construct
  misc_feature 1..16: note = synthetic [barcode part1]
  source 1..16: mol_type = other DNA
cggtgtgattagaggc

SEQ ID NO: 9559 - DNA, 16 bp, synthetic construct
  misc_feature 1..16: note = synthetic [barcode part1]
  source 1..16: mol_type = other DNA
cagaggtaggtgtaag

SEQ ID NO: 9560 - DNA, 16 bp, synthetic construct
  misc_feature 1..16: note = synthetic [barcode part1]
  source 1..16: mol_type = other DNA
cggttatcactgacag

SEQ ID NO: 9561 - DNA, 16 bp, synthetic construct
  misc_feature 1..16: note = synthetic [barcode part1]
  source 1..16: mol_type = other DNA
gccaggtattcaacac

SEQ ID NO: 9562 - DNA, 16 bp, synthetic construct
  misc_feature 1..16: note = synthetic [barcode part1]
  source 1..16: mol_type = other DNA
gtctgaatcgtcttac

SEQ ID NO: 9563 - DNA, 16 bp, synthetic construct
  misc_feature 1..16: note = synthetic [barcode part1]
  source 1..16: mol_type = other DNA
ttgtcttcgtaggttg

SEQ ID NO: 9564 - DNA, 16 bp, synthetic construct
  misc_feature 1..16: note = synthetic [barcode part1]
  source 1..16: mol_type = other DNA
tagactgccaacagtc

SEQ ID NO: 9565 - DNA, 16 bp, synthetic construct
  misc_feature 1..16: note = synthetic [barcode part1]
  source 1..16: mol_type = other DNA
tgcaagtcctattacc

SEQ ID NO: 9566 - DNA, 16 bp, synthetic construct
  misc_feature 1..16: note = synthetic [barcode part1]
  source 1..16: mol_type = other DNA
tgcctggatacctaag

SEQ ID NO: 9567 - DNA, 16 bp, synthetic construct
  misc_feature 1..16: note = synthetic [barcode part1]
  source 1..16: mol_type = other DNA
ttactgtcgaggtgac

SEQ ID NO: 9568 - DNA, 16 bp, synthetic construct
  misc_feature 1..16: note = synthetic [barcode part1]
  source 1..16: mol_type = other DNA
tatctcagtggatctc

SEQ ID NO: 9569 - DNA, 16 bp, synthetic construct
  misc_feature 1..16: note = synthetic [barcode part1]
  source 1..16: mol_type = other DNA
cgcagtggacaagtac

SEQ ID NO: 9570 - DNA, 16 bp, synthetic construct
  misc_feature 1..16: note = synthetic [barcode part1]
  source 1..16: mol_type = other DNA
actagtcaacctcgag

SEQ ID NO: 9571 - DNA, 16 bp, synthetic construct
  misc_feature 1..16: note = synthetic [barcode part1]
  source 1..16: mol_type = other DNA
gtctggattcactact

SEQ ID NO: 9572 - DNA, 16 bp, synthetic construct
  misc_feature 1..16: note = synthetic [barcode part1]
  source 1..16: mol_type = other DNA
ttgttgtacttgtggc

SEQ ID NO: 9573 - DNA, 16 bp, synthetic construct
  misc_feature 1..16: note = synthetic [barcode part1]
  source 1..16: mol_type = other DNA
cgaggtctaactagtc

SEQ ID NO: 9574 - DNA, 16 bp, synthetic construct
  misc_feature 1..16: note = synthetic [barcode part1]
  source 1..16: mol_type = other DNA
acgtgtacacgtgtac

SEQ ID NO: 9575 - DNA, 16 bp, synthetic construct
  misc_feature 1..16: note = synthetic [barcode part1]
  source 1..16: mol_type = other DNA
acacacggaagttcct

SEQ ID NO: 9576 - DNA, 16 bp, synthetic construct
  misc_feature 1..16: note = synthetic [barcode part1]
  source 1..16: mol_type = other DNA
gcgcgagttatatctg

SEQ ID NO: 9577 - DNA, 16 bp, synthetic construct
  misc_feature 1..16: note = synthetic [barcode part1]
  source 1..16: mol_type = other DNA
gtgtgtatcctctctc

SEQ ID NO: 9578 - DNA, 16 bp, synthetic construct
  misc_feature 1..16: note = synthetic [barcode part1]
  source 1..16: mol_type = other DNA
caggtgtgttggaggt

SEQ ID NO: 9579 - DNA, 16 bp, synthetic construct
  misc_feature 1..16: note = synthetic [barcode part1]
  source 1..16: mol_type = other DNA
gcagtattcggtcaac

SEQ ID NO: 9580 - DNA, 16 bp, synthetic construct
  misc_feature 1..16: note = synthetic [barcode part1]
  source 1..16: mol_type = other DNA
ccacaagacaggacgt

SEQ ID NO: 9581 - DNA, 16 bp, synthetic construct
  misc_feature 1..16: note = synthetic [barcode part1]
  source 1..16: mol_type = other DNA
cgaggagtgcacgatt

SEQ ID NO: 9582 - DNA, 16 bp, synthetic construct
  misc_feature 1..16: note = synthetic [barcode part1]
  source 1..16: mol_type = other DNA
tgacctccgcgattac

SEQ ID NO: 9583 - DNA, 16 bp, synthetic construct
  misc_feature 1..16: note = synthetic [barcode part1]
  source 1..16: mol_type = other DNA
gtatagatccacaccg

SEQ ID NO: 9584 - DNA, 16 bp, synthetic construct
  misc_feature 1..16: note = synthetic [barcode part1]
  source 1..16: mol_type = other DNA
acacgttcactgacag

SEQ ID NO: 9585 - DNA, 16 bp, synthetic construct
  misc_feature 1..16: note = synthetic [barcode part1]
  source 1..16: mol_type = other DNA
tgcaggcacaacagac

SEQ ID NO: 9586 - DNA, 16 bp, synthetic construct
  misc_feature 1..16: note = synthetic [barcode part1]
  source 1..16: mol_type = other DNA
taggcaggtggtactg

SEQ ID NO: 9587 - DNA, 16 bp, synthetic construct
  misc_feature 1..16: note = synthetic [barcode part1]
  source 1..16: mol_type = other DNA
acacgatatcgacacc

SEQ ID NO: 9588 - DNA, 16 bp, synthetic construct
  misc_feature 1..16: note = synthetic [barcode part1]
  source 1..16: mol_type = other DNA
cctccgcagtaacttg

SEQ ID NO: 9589 - DNA, 16 bp, synthetic construct
  misc_feature 1..16: note = synthetic [barcode part1]
  source 1..16: mol_type = other DNA
cggtagtcacgtcctt

SEQ ID NO: 9590 - DNA, 16 bp, synthetic construct
  misc_feature 1..16: note = synthetic [barcode part1]
  source 1..16: mol_type = other DNA
acgtgttacagtcacg

SEQ ID NO: 9591 - DNA, 16 bp, synthetic construct
  misc_feature 1..16: note = synthetic [barcode part1]
  source 1..16: mol_type = other DNA
caccacgaactaatcg

SEQ ID NO: 9592 - DNA, 16 bp, synthetic construct
  misc_feature 1..16: note = synthetic [barcode part1]
  source 1..16: mol_type = other DNA
tacactctgaaggcgt

SEQ ID NO: 9593 - DNA, 16 bp, synthetic construct
  misc_feature 1..16: note = synthetic [barcode part1]
  source 1..16: mol_type = other DNA
caatctcgcgttgatt

SEQ ID NO: 9594 - DNA, 16 bp, synthetic construct
  misc_feature 1..16: note = synthetic [barcode part1]
  source 1..16: mol_type = other DNA
gaagagtcagaggact

SEQ ID NO: 9595 - DNA, 16 bp, synthetic construct
  misc_feature 1..16: note = synthetic [barcode part1]
  source 1..16: mol_type = other DNA
agatcacgtctgacac

SEQ ID NO: 9596 - DNA, 16 bp, synthetic construct
  misc_feature 1..16: note = synthetic [barcode part1]
  source 1..16: mol_type = other DNA
cgcgcaggatatactt

SEQ ID NO: 9597 - DNA, 16 bp, synthetic construct
  misc_feature 1..16: note = synthetic [barcode part1]
  source 1..16: mol_type = other DNA
atactctctggcggtc

SEQ ID NO: 9598 - DNA, 16 bp, synthetic construct
  misc_feature 1..16: note = synthetic [barcode part1]
  source 1..16: mol_type = other DNA
agagtctggacgagtc

SEQ ID NO: 9599 - DNA, 16 bp, synthetic construct
  misc_feature 1..16: note = synthetic [barcode part1]
  source 1..16: mol_type = other DNA
caggattactacggtc

SEQ ID NO: 9600 - DNA, 16 bp, synthetic construct
  misc_feature 1..16: note = synthetic [barcode part1]
  source 1..16: mol_type = other DNA
tctgatcactgtacgt

SEQ ID NO: 9601 - DNA, 16 bp, synthetic construct
  misc_feature 1..16: note = synthetic [barcode part1]
  source 1..16: mol_type = other DNA
gtcgtcttacctggac

SEQ ID NO: 9602 - DNA, 16 bp, synthetic construct
  misc_feature 1..16: note = synthetic [barcode part1]
  source 1..16: mol_type = other DNA
attgcgattcgttcac

SEQ ID NO: 9603 - DNA, 16 bp, synthetic construct
  misc_feature 1..16: note = synthetic [barcode part1]
  source 1..16: mol_type = other DNA
tactatctgttggcac

SEQ ID NO: 9604 - DNA, 16 bp, synthetic construct
  misc_feature 1..16: note = synthetic [barcode part1]
  source 1..16: mol_type = other DNA
agacctgcgaaggact

SEQ ID NO: 9605 - DNA, 16 bp, synthetic construct
  misc_feature 1..16: note = synthetic [barcode part1]
  source 1..16: mol_type = other DNA
aattggcggtcttgac

SEQ ID NO: 9606 - DNA, 16 bp, synthetic construct
  misc_feature 1..16: note = synthetic [barcode part1]
  source 1..16: mol_type = other DNA
atcgtgttggtaagag

SEQ ID NO: 9607 - DNA, 16 bp, synthetic construct
  misc_feature 1..16: note = synthetic [barcode part1]
  source 1..16: mol_type = other DNA
gcaccactgttcactg

SEQ ID NO: 9608 - DNA, 16 bp, synthetic construct
  misc_feature 1..16: note = synthetic [barcode part1]
  source 1..16: mol_type = other DNA
gtcaactgagaaggag

SEQ ID NO: 9609 - DNA, 16 bp, synthetic construct
  misc_feature 1..16: note = synthetic [barcode part1]
  source 1..16: mol_type = other DNA
tgttgcagtgtgtgtg

SEQ ID NO: 9610 - DNA, 16 bp, synthetic construct
  misc_feature 1..16: note = synthetic [barcode part1]
  source 1..16: mol_type = other DNA
aaggtcctctacttgt

SEQ ID NO: 9611 - DNA, 16 bp, synthetic construct
  misc_feature 1..16: note = synthetic [barcode part1]
  source 1..16: mol_type = other DNA
tggtagtcacgaaggc

SEQ ID NO: 9612 - DNA, 16 bp, synthetic construct
  misc_feature 1..16: note = synthetic [barcode part1]
  source 1..16: mol_type = other DNA
aggtggtacacctgag

SEQ ID NO: 9613 - DNA, 16 bp, synthetic construct
  misc_feature 1..16: note = synthetic [barcode part1]
  source 1..16: mol_type = other DNA
cgtaatctcctgttag

SEQ ID NO: 9614 - DNA, 16 bp, synthetic construct
  misc_feature 1..16: note = synthetic [barcode part1]
  source 1..16: mol_type = other DNA
gtcgataggtgtatcc

SEQ ID NO: 9615 - DNA, 16 bp, synthetic construct
  misc_feature 1..16: note = synthetic [barcode part1]
  source 1..16: mol_type = other DNA
agtagaactaggtgtc

SEQ ID NO: 9616 - DNA, 16 bp, synthetic construct
  misc_feature 1..16: note = synthetic [barcode part1]
  source 1..16: mol_type = other DNA
acgataaccgtcactg

SEQ ID NO: 9617 - DNA, 16 bp, synthetic construct
  misc_feature 1..16: note = synthetic [barcode part1]
  source 1..16: mol_type = other DNA
cagtgacggagtacgt

SEQ ID NO: 9618 - DNA, 16 bp, synthetic construct
  misc_feature 1..16: note = synthetic [barcode part1]
  source 1..16: mol_type = other DNA
cctagaagactagtcc

SEQ ID NO: 9619 - DNA, 16 bp, synthetic construct
  misc_feature 1..16: note = synthetic [barcode part1]
  source 1..16: mol_type = other DNA
gatctactacctggag

SEQ ID NO: 9620 - DNA, 16 bp, synthetic construct
  misc_feature 1..16: note = synthetic [barcode part1]
  source 1..16: mol_type = other DNA
cctgactcgtaactgc

SEQ ID NO: 9621 - DNA, 16 bp, synthetic construct
  misc_feature 1..16: note = synthetic [barcode part1]
  source 1..16: mol_type = other DNA
accgcaattacctgtt

SEQ ID NO: 9622 - DNA, 16 bp, synthetic construct
  misc_feature 1..16: note = synthetic [barcode part1]
  source 1..16: mol_type = other DNA
acgattcagaccactg

SEQ ID NO: 9623 - DNA, 16 bp, synthetic construct
  misc_feature 1..16: note = synthetic [barcode part1]
  source 1..16: mol_type = other DNA
cggtaacaactgtcgt

SEQ ID NO: 9624 - DNA, 16 bp, synthetic construct
  misc_feature 1..16: note = synthetic [barcode part1]
  source 1..16: mol_type = other DNA
ttgtacctgaaccgtt

SEQ ID NO: 9625 - DNA, 16 bp, synthetic construct
  misc_feature 1..16: note = synthetic [barcode part1]
  source 1..16: mol_type = other DNA
tggacagttgttcacg

SEQ ID NO: 9626 - DNA, 16 bp, synthetic construct
  misc_feature 1..16: note = synthetic [barcode part1]
  source 1..16: mol_type = other DNA
tggattcctattccag

SEQ ID NO: 9627 - DNA, 16 bp, synthetic construct
  misc_feature 1..16: note = synthetic [barcode part1]
  source 1..16: mol_type = other DNA
cctcgattgtgttaac

SEQ ID NO: 9628 - DNA, 16 bp, synthetic construct
  misc_feature 1..16: note = synthetic [barcode part1]
  source 1..16: mol_type = other DNA
gtaatcgatatcggcc

SEQ ID NO: 9629 - DNA, 16 bp, synthetic construct
  misc_feature 1..16: note = synthetic [barcode part1]
  source 1..16: mol_type = other DNA
gcgcgaggaattatcg

SEQ ID NO: 9630 - DNA, 16 bp, synthetic construct
  misc_feature 1..16: note = synthetic [barcode part1]
  source 1..16: mol_type = other DNA
gcgtagatcactggag

SEQ ID NO: 9631 - DNA, 16 bp, synthetic construct
  misc_feature 1..16: note = synthetic [barcode part1]
  source 1..16: mol_type = other DNA
ccgtcgtagatagtgt

SEQ ID NO: 9632 - DNA, 16 bp, synthetic construct
  misc_feature 1..16: note = synthetic [barcode part1]
  source 1..16: mol_type = other DNA
cgttccttctctgtag

SEQ ID NO: 9633 - DNA, 16 bp, synthetic construct
  misc_feature 1..16: note = synthetic [barcode part1]
  source 1..16: mol_type = other DNA
tccagtcctgaagaac

SEQ ID NO: 9634 - DNA, 16 bp, synthetic construct
  misc_feature 1..16: note = synthetic [barcode part1]
  source 1..16: mol_type = other DNA
attcgagtcactccgc

SEQ ID NO: 9635 - DNA, 16 bp, synthetic construct
  misc_feature 1..16: note = synthetic [barcode part1]
  source 1..16: mol_type = other DNA
cagactaacgcctctc

SEQ ID NO: 9636 - DNA, 16 bp, synthetic construct
  misc_feature 1..16: note = synthetic [barcode part1]
  source 1..16: mol_type = other DNA
aagactcgcgatactc

SEQ ID NO: 9637 - DNA, 16 bp, synthetic construct
  misc_feature 1..16: note = synthetic [barcode part1]
  source 1..16: mol_type = other DNA
ccgttcttgtgagtcg

SEQ ID NO: 9638 - DNA, 16 bp, synthetic construct
  misc_feature 1..16: note = synthetic [barcode part1]
  source 1..16: mol_type = other DNA
caataatccggtggtc

SEQ ID NO: 9639 - DNA, 16 bp, synthetic construct
  misc_feature 1..16: note = synthetic [barcode part1]
  source 1..16: mol_type = other DNA
gagtaccagatccact

SEQ ID NO: 9640 - DNA, 16 bp, synthetic construct
  misc_feature 1..16: note = synthetic [barcode part1]
  source 1..16: mol_type = other DNA
ttgcgttaggcacagt

SEQ ID NO: 9641 - DNA, 16 bp, synthetic construct
  misc_feature 1..16: note = synthetic [barcode part1]
  source 1..16: mol_type = other DNA
gacgagacgcactaac

SEQ ID NO: 9642 - DNA, 16 bp, synthetic construct
  misc_feature 1..16: note = synthetic [barcode part1]
  source 1..16: mol_type = other DNA
tgtgtgtactgtggtg

SEQ ID NO: 9643 - DNA, 16 bp, synthetic construct
  misc_feature 1..16: note = synthetic [barcode part1]
  source 1..16: mol_type = other DNA
cggaatcttccttcct

SEQ ID NO: 9644 - DNA, 16 bp, synthetic construct
  misc_feature 1..16: note = synthetic [barcode part1]
  source 1..16: mol_type = other DNA
acaagtcctccaccac

SEQ ID NO: 9645 - DNA, 16 bp, synthetic construct
  misc_feature 1..16: note = synthetic [barcode part1]
  source 1..16: mol_type = other DNA
ttgtcgtggacttact

SEQ ID NO: 9646 - DNA, 16 bp, synthetic construct
  misc_feature 1..16: note = synthetic [barcode part1]
  source 1..16: mol_type = other DNA
tggtgttagacggacg

SEQ ID NO: 9647 - DNA, 16 bp, synthetic construct
  misc_feature 1..16: note = synthetic [barcode part1]
  source 1..16: mol_type = other DNA
aatacacgccggtact

SEQ ID NO: 9648 - DNA, 16 bp, synthetic construct
  misc_feature 1..16: note = synthetic [barcode part1]
  source 1..16: mol_type = other DNA
gcaccgtggtagatag

SEQ ID NO: 9649 - DNA, 16 bp, synthetic construct
  misc_feature 1..16: note = synthetic [barcode part1]
  source 1..16: mol_type = other DNA
cgtgtatatacacgcg

SEQ ID NO: 9650 - DNA, 16 bp, synthetic construct
  misc_feature 1..16: note = synthetic [barcode part1]
  source 1..16: mol_type = other DNA
cggttaaccaattggc

SEQ ID NO: 9651 - DNA, 16 bp, synthetic construct
  misc_feature 1..16: note = synthetic [barcode part1]
  source 1..16: mol_type = other DNA
gcggaatcttggacag

SEQ ID NO: 9652 - DNA, 16 bp, synthetic construct
  misc_feature 1..16: note = synthetic [barcode part1]
  source 1..16: mol_type = other DNA
gaagttcctcacttac

SEQ ID NO: 9653 - DNA, 16 bp, synthetic construct
  misc_feature 1..16: note = synthetic [barcode part1]
  source 1..16: mol_type = other DNA
agatagacctagagtc

SEQ ID NO: 9654 - DNA, 16 bp, synthetic construct
  misc_feature 1..16: note = synthetic [barcode part1]
  source 1..16: mol_type = other DNA
cggacaagatattacg

SEQ ID NO: 9655 - DNA, 16 bp, synthetic construct
  misc_feature 1..16: note = synthetic [barcode part1]
  source 1..16: mol_type = other DNA
gttggtatccgactcc

SEQ ID NO: 9656 - DNA, 16 bp, synthetic construct
  misc_feature 1..16: note = synthetic [barcode part1]
  source 1..16: mol_type = other DNA
gaatcggttagaggag

SEQ ID NO: 9657 - DNA, 16 bp, synthetic construct
  misc_feature 1..16: note = synthetic [barcode part1]
  source 1..16: mol_type = other DNA
gagtgtgtatactccg

SEQ ID NO: 9658 - DNA, 16 bp, synthetic construct
  misc_feature 1..16: note = synthetic [barcode part1]
  source 1..16: mol_type = other DNA
agtcctactgttcgcg

SEQ ID NO: 9659 - DNA, 16 bp, synthetic construct
  misc_feature 1..16: note = synthetic [barcode part1]
  source 1..16: mol_type = other DNA
attcttcgcgtgccag

SEQ ID NO: 9660 - DNA, 16 bp, synthetic construct
  misc_feature 1..16: note = synthetic [barcode part1]
  source 1..16: mol_type = other DNA
tgcctacgtggtactc

SEQ ID NO: 9661 - DNA, 16 bp, synthetic construct
  misc_feature 1..16: note = synthetic [barcode part1]
  source 1..16: mol_type = other DNA
ccactaagattgccag

SEQ ID NO: 9662 - DNA, 16 bp, synthetic construct
  misc_feature 1..16: note = synthetic [barcode part1]
  source 1..16: mol_type = other DNA
gagtactacgaacctc

SEQ ID NO: 9663 - DNA, 16 bp, synthetic construct
  misc_feature 1..16: note = synthetic [barcode part1]
  source 1..16: mol_type = other DNA
cgagagacttcaactc

SEQ ID NO: 9664 - DNA, 16 bp, synthetic construct
  misc_feature 1..16: note = synthetic [barcode part1]
  source 1..16: mol_type = other DNA
ccagtcgcaatatcag

SEQ ID NO: 9665 - DNA, 16 bp, synthetic construct
  misc_feature 1..16: note = synthetic [barcode part1]
  source 1..16: mol_type = other DNA
ccagtgattgtcaggt

SEQ ID NO: 9666 - DNA, 16 bp, synthetic construct
  misc_feature 1..16: note = synthetic [barcode part1]
  source 1..16: mol_type = other DNA
gaggatctggtacacg

SEQ ID NO: 9667 - DNA, 16 bp, synthetic construct
  misc_feature 1..16: note = synthetic [barcode part1]
  source 1..16: mol_type = other DNA
tctagaggttaaccgc

SEQ ID NO: 9668 - DNA, 16 bp, synthetic construct
  misc_feature 1..16: note = synthetic [barcode part1]
  source 1..16: mol_type = other DNA
cagtgagatctgtaag

SEQ ID NO: 9669 - DNA, 16 bp, synthetic construct
  misc_feature 1..16: note = synthetic [barcode part1]
  source 1..16: mol_type = other DNA
tggcaccgtgagtaag

SEQ ID NO: 9670 - DNA, 16 bp, synthetic construct
  misc_feature 1..16: note = synthetic [barcode part1]
  source 1..16: mol_type = other DNA
ccttgtccactatctg

SEQ ID NO: 9671 - DNA, 16 bp, synthetic construct
  misc_feature 1..16: note = synthetic [barcode part1]
  source 1..16: mol_type = other DNA
tcgtccttcggatacg

SEQ ID NO: 9672 - DNA, 16 bp, synthetic construct
  misc_feature 1..16: note = synthetic [barcode part1]
  source 1..16: mol_type = other DNA
acctgaacgagtatcc

SEQ ID NO: 9673 - DNA, 16 bp, synthetic construct
  misc_feature 1..16: note = synthetic [barcode part1]
  source 1..16: mol_type = other DNA
gaataacagaggccag

SEQ ID NO: 9674 - DNA, 16 bp, synthetic construct
  misc_feature 1..16: note = synthetic [barcode part1]
  source 1..16: mol_type = other DNA
gataagaacactcgac

SEQ ID NO: 9675 - DNA, 16 bp, synthetic construct
  misc_feature 1..16: note = synthetic [barcode part1]
  source 1..16: mol_type = other DNA
tgtgagtaataaggcc

SEQ ID NO: 9676 - DNA, 16 bp, synthetic construct
  misc_feature 1..16: note = synthetic [barcode part1]
  source 1..16: mol_type = other DNA
aggaggtaacggtaac

SEQ ID NO: 9677 - DNA, 16 bp, synthetic construct
  misc_feature 1..16: note = synthetic [barcode part1]
  source 1..16: mol_type = other DNA
gcagtgcaactaactc

SEQ ID NO: 9678 - DNA, 16 bp, synthetic construct
  misc_feature 1..16: note = synthetic [barcode part1]
  source 1..16: mol_type = other DNA
attggcagttcttcac

SEQ ID NO: 9679 - DNA, 16 bp, synthetic construct
  misc_feature 1..16: note = synthetic [barcode part1]
  source 1..16: mol_type = other DNA
tgtagactccgttgcc

SEQ ID NO: 9680 - DNA, 16 bp, synthetic construct
  misc_feature 1..16: note = synthetic [barcode part1]
  source 1..16: mol_type = other DNA
acaactgttggaagac

SEQ ID NO: 9681 - DNA, 16 bp, synthetic construct
  misc_feature 1..16: note = synthetic [barcode part1]
  source 1..16: mol_type = other DNA
tgaggtggtctgagtg

SEQ ID NO: 9682 - DNA, 16 bp, synthetic construct
  misc_feature 1..16: note = synthetic [barcode part1]
  source 1..16: mol_type = other DNA
agagattgcactggcg

SEQ ID NO: 9683 - DNA, 16 bp, synthetic construct
  misc_feature 1..16: note = synthetic [barcode part1]
  source 1..16: mol_type = other DNA
taactggaccgattgc

SEQ ID NO: 9684 - DNA, 16 bp, synthetic construct
  misc_feature 1..16: note = synthetic [barcode part1]
  source 1..16: mol_type = other DNA
gaaccttcaattggcg

SEQ ID NO: 9685 - DNA, 16 bp, synthetic construct
  misc_feature 1..16: note = synthetic [barcode part1]
  source 1..16: mol_type = other DNA
aattgcggattaaggc

SEQ ID NO: 9686 - DNA, 16 bp, synthetic construct
  misc_feature 1..16: note = synthetic [barcode part1]
  source 1..16: mol_type = other DNA
gagtcgccttacactc

SEQ ID NO: 9687 - DNA, 16 bp, synthetic construct
  misc_feature 1..16: note = synthetic [barcode part1]
  source 1..16: mol_type = other DNA
cgattagattggtcgc

SEQ ID NO: 9688 - DNA, 16 bp, synthetic construct
  misc_feature 1..16: note = synthetic [barcode part1]
  source 1..16: mol_type = other DNA
tgccgagtagaagtgc

SEQ ID NO: 9689 - DNA, 16 bp, synthetic construct
  misc_feature 1..16: note = synthetic [barcode part1]
  source 1..16: mol_type = other DNA
tctctcgtgccagtag

SEQ ID NO: 9690 - DNA, 16 bp, synthetic construct
  misc_feature 1..16: note = synthetic [barcode part1]
  source 1..16: mol_type = other DNA
tctcctcgatcgactt

SEQ ID NO: 9691 - DNA, 16 bp, synthetic construct
  misc_feature 1..16: note = synthetic [barcode part1]
  source 1..16: mol_type = other DNA
ataggtccgcactaac

SEQ ID NO: 9692 - DNA, 16 bp, synthetic construct
  misc_feature 1..16: note = synthetic [barcode part1]
  source 1..16: mol_type = other DNA
gttctgatcagaaccg

SEQ ID NO: 9693 - DNA, 16 bp, synthetic construct
  misc_feature 1..16: note = synthetic [barcode part1]
  source 1..16: mol_type = other DNA
caactaggaggaagac

SEQ ID NO: 9694 - DNA, 16 bp, synthetic construct
  misc_feature 1..16: note = synthetic [barcode part1]
  source 1..16: mol_type = other DNA
gcagtattaacaccgc

SEQ ID NO: 9695 - DNA, 16 bp, synthetic construct
  misc_feature 1..16: note = synthetic [barcode part1]
  source 1..16: mol_type = other DNA
gcggtcaattaacacc

SEQ ID NO: 9696 - DNA, 16 bp, synthetic construct
  misc_feature 1..16: note = synthetic [barcode part1]
  source 1..16: mol_type = other DNA
caacggtctggtgatt

SEQ ID NO: 9697 - DNA, 16 bp, synthetic construct
  misc_feature 1..16: note = synthetic [barcode part1]
  source 1..16: mol_type = other DNA
tctcggcagaagttgt

SEQ ID NO: 9698 - DNA, 16 bp, synthetic construct
  misc_feature 1..16: note = synthetic [barcode part1]
  source 1..16: mol_type = other DNA
gttgtctcaggtgcct

SEQ ID NO: 9699 - DNA, 16 bp, synthetic construct
  misc_feature 1..16: note = synthetic [barcode part1]
  source 1..16: mol_type = other DNA
aacaaggtcggcacgt

SEQ ID NO: 9700 - DNA, 16 bp, synthetic construct
  misc_feature 1..16: note = synthetic [barcode part1]
  source 1..16: mol_type = other DNA
tcctctgactcttcag

SEQ ID NO: 9701 - DNA, 16 bp, synthetic construct
  misc_feature 1..16: note = synthetic [barcode part1]
  source 1..16: mol_type = other DNA
gaaggcgattctcact

SEQ ID NO: 9702 - DNA, 16 bp, synthetic construct
  misc_feature 1..16: note = synthetic [barcode part1]
  source 1..16: mol_type = other DNA
ccaagtaacggatctc

SEQ ID NO: 9703 - DNA, 16 bp, synthetic construct
  misc_feature 1..16: note = synthetic [barcode part1]
  source 1..16: mol_type = other DNA
gatcttccgtgaactt

SEQ ID NO: 9704 - DNA, 16 bp, synthetic construct
  misc_feature 1..16: note = synthetic [barcode part1]
  source 1..16: mol_type = other DNA
tagattggaccgtcgt

SEQ ID NO: 9705 - DNA, 16 bp, synthetic construct
  misc_feature 1..16: note = synthetic [barcode part1]
  source 1..16: mol_type = other DNA
gttatctgaacggtgc

SEQ ID NO: 9706 - DNA, 16 bp, synthetic construct
  misc_feature 1..16: note = synthetic [barcode part1]
  source 1..16: mol_type = other DNA
tctccaatacgactgt

SEQ ID NO: 9707 - DNA, 16 bp, synthetic construct
  misc_feature 1..16: note = synthetic [barcode part1]
  source 1..16: mol_type = other DNA
aagttgccggagacac

SEQ ID NO: 9708 - DNA, 16 bp, synthetic construct
  misc_feature 1..16: note = synthetic [barcode part1]
  source 1..16: mol_type = other DNA
ccaggacagatcttac

SEQ ID NO: 9709 - DNA, 16 bp, synthetic construct
  misc_feature 1..16: note = synthetic [barcode part1]
  source 1..16: mol_type = other DNA
taccggacactgagtt

SEQ ID NO: 9710 - DNA, 16 bp, synthetic construct
  misc_feature 1..16: note = synthetic [barcode part1]
  source 1..16: mol_type = other DNA
cgtaacgaggtagatt

SEQ ID NO: 9711 - DNA, 16 bp, synthetic construct
  misc_feature 1..16: note = synthetic [barcode part1]
  source 1..16: mol_type = other DNA
gacggcgataagtctg

SEQ ID NO: 9712 - DNA, 16 bp, synthetic construct
  misc_feature 1..16: note = synthetic [barcode part1]
  source 1..16: mol_type = other DNA
cagttgtgcaactgtg

SEQ ID NO: 9713 - DNA, 16 bp, synthetic construct
  misc_feature 1..16: note = synthetic [barcode part1]
  source 1..16: mol_type = other DNA
gcacagtctccagtct

SEQ ID NO: 9714 - DNA, 16 bp, synthetic construct
  misc_feature 1..16: note = synthetic [barcode part1]
  source 1..16: mol_type = other DNA
ttaccgcacctgtgac

SEQ ID NO: 9715 - DNA, 16 bp, synthetic construct
  misc_feature 1..16: note = synthetic [barcode part1]
  source 1..16: mol_type = other DNA
cacgacaccgttcact

SEQ ID NO: 9716 - DNA, 16 bp, synthetic construct
  misc_feature 1..16: note = synthetic [barcode part1]
  source 1..16: mol_type = other DNA
tgacgtagatccgtac

SEQ ID NO: 9717 - DNA, 16 bp, synthetic construct
  misc_feature 1..16: note = synthetic [barcode part1]
  source 1..16: mol_type = other DNA
gtacttccgactcggt

SEQ ID NO: 9718 - DNA, 16 bp, synthetic construct
  misc_feature 1..16: note = synthetic [barcode part1]
  source 1..16: mol_type = other DNA
gtgtcctcgacagttc

SEQ ID NO: 9719 - DNA, 16 bp, synthetic construct
  misc_feature 1..16: note = synthetic [barcode part1]
  source 1..16: mol_type = other DNA
tagacctcttgccacg

SEQ ID NO: 9720 - DNA, 16 bp, synthetic construct
  misc_feature 1..16: note = synthetic [barcode part1]
  source 1..16: mol_type = other DNA
tctgatcctccaacct

SEQ ID NO: 9721 - DNA, 16 bp, synthetic construct
  misc_feature 1..16: note = synthetic [barcode part1]
  source 1..16: mol_type = other DNA
ttacgtcggtaatcct

SEQ ID NO: 9722 - DNA, 16 bp, synthetic construct
  misc_feature 1..16: note = synthetic [barcode part1]
  source 1..16: mol_type = other DNA
accgaagactaatacg

SEQ ID NO: 9723 - DNA, 16 bp, synthetic construct
  misc_feature 1..16: note = synthetic [barcode part1]
  source 1..16: mol_type = other DNA
taacggcggagatatt

SEQ ID NO: 9724 - DNA, 16 bp, synthetic construct
  misc_feature 1..16: note = synthetic [barcode part1]
  source 1..16: mol_type = other DNA
tccaattgttgcgcgc

SEQ ID NO: 9725 - DNA, 16 bp, synthetic construct
  misc_feature 1..16: note = synthetic [barcode part1]
  source 1..16: mol_type = other DNA
tgtactctctggtagt

SEQ ID NO: 9726 - DNA, 16 bp, synthetic construct
  misc_feature 1..16: note = synthetic [barcode part1]
  source 1..16: mol_type = other DNA
gacctcctgacttctt

SEQ ID NO: 9727 - DNA, 16 bp, synthetic construct
  misc_feature 1..16: note = synthetic [barcode part1]
  source 1..16: mol_type = other DNA
gtaactctcaccgaag

SEQ ID NO: 9728 - DNA, 16 bp, synthetic construct
  misc_feature 1..16: note = synthetic [barcode part1]
  source 1..16: mol_type = other DNA
ccgtggtattaaccag

SEQ ID NO: 9729 - DNA, 16 bp, synthetic construct
  misc_feature 1..16: note = synthetic [barcode part1]
  source 1..16: mol_type = other DNA
ttcgacaagacgcgag

SEQ ID NO: 9730 - DNA, 16 bp, synthetic construct
  misc_feature 1..16: note = synthetic [barcode part1]
  source 1..16: mol_type = other DNA
cggtaacagagatact

SEQ ID NO: 9731 - DNA, 16 bp, synthetic construct
  misc_feature 1..16: note = synthetic [barcode part1]
  source 1..16: mol_type = other DNA
tcgcggagaatatctc

SEQ ID NO: 9732 - DNA, 16 bp, synthetic construct
  misc_feature 1..16: note = synthetic [barcode part1]
  source 1..16: mol_type = other DNA
caggaggtgacacgtt

SEQ ID NO: 9733 - DNA, 16 bp, synthetic construct
  misc_feature 1..16: note = synthetic [barcode part1]
  source 1..16: mol_type = other DNA
cgatcgacgatcaact

SEQ ID NO: 9734 - DNA, 16 bp, synthetic construct
  misc_feature 1..16: note = synthetic [barcode part1]
  source 1..16: mol_type = other DNA
attcctgcctgtgtct

SEQ ID NO: 9735 - DNA, 16 bp, synthetic construct
  misc_feature 1..16: note = synthetic [barcode part1]
  source 1..16: mol_type = other DNA
gagtgtcgtcttgcct

SEQ ID NO: 9736 - DNA, 16 bp, synthetic construct
  misc_feature 1..16: note = synthetic [barcode part1]
  source 1..16: mol_type = other DNA
gtgcgatagaattggt

SEQ ID NO: 9737 - DNA, 16 bp, synthetic construct
  misc_feature 1..16: note = synthetic [barcode part1]
  source 1..16: mol_type = other DNA
tgactcaagatacgag

SEQ ID NO: 9738 - DNA, 16 bp, synthetic construct
  misc_feature 1..16: note = synthetic [barcode part1]
  source 1..16: mol_type = other DNA
gaattgactggaggag

SEQ ID NO: 9739 - DNA, 16 bp, synthetic construct
  misc_feature 1..16: note = synthetic [barcode part1]
  source 1..16: mol_type = other DNA
gccgtgatctacttgc

SEQ ID NO: 9740 - DNA, 16 bp, synthetic construct
  misc_feature 1..16: note = synthetic [barcode part1]
  source 1..16: mol_type = other DNA
tacgactaagacaacg

SEQ ID NO: 9741 - DNA, 16 bp, synthetic construct
  misc_feature 1..16: note = synthetic [barcode part1]
  source 1..16: mol_type = other DNA
gtgtgcagacttcagt

SEQ ID NO: 9742 - DNA, 16 bp, synthetic construct
  misc_feature 1..16: note = synthetic [barcode part1]
  source 1..16: mol_type = other DNA
tgttcagttctaccag

SEQ ID NO: 9743 - DNA, 16 bp, synthetic construct
  misc_feature 1..16: note = synthetic [barcode part1]
  source 1..16: mol_type = other DNA
cggcaatcgtgtctct

SEQ ID NO: 9744 - DNA, 16 bp, synthetic construct
  misc_feature 1..16: note = synthetic [barcode part1]
  source 1..16: mol_type = other DNA
tggattacctcgtgtt

SEQ ID NO: 9745 - DNA, 16 bp, synthetic construct
  misc_feature 1..16: note = synthetic [barcode part1]
  source 1..16: mol_type = other DNA
gcaatactacacgcac

SEQ ID NO: 9746 - DNA, 16 bp, synthetic construct
  misc_feature 1..16: note = synthetic [barcode part1]
  source 1..16: mol_type = other DNA
ttgacaggcaatctgc

SEQ ID NO: 9747 - DNA, 16 bp, synthetic construct
  misc_feature 1..16: note = synthetic [barcode part1]
  source 1..16: mol_type = other DNA
gtattaggaccgcgtt

SEQ ID NO: 9748 - DNA, 16 bp, synthetic construct
  misc_feature 1..16: note = synthetic [barcode part1]
  source 1..16: mol_type = other DNA
tagtcttcgcgtgacc

SEQ ID NO: 9749 - DNA, 16 bp, synthetic construct
  misc_feature 1..16: note = synthetic [barcode part1]
  source 1..16: mol_type = other DNA
tgcggtatactcgcct

SEQ ID NO: 9750 - DNA, 16 bp, synthetic construct
  misc_feature 1..16: note = synthetic [barcode part1]
  source 1..16: mol_type = other DNA
aaggcaaccgtcttgt

SEQ ID NO: 9751 - DNA, 16 bp, synthetic construct
  misc_feature 1..16: note = synthetic [barcode part1]
  source 1..16: mol_type = other DNA
attcgccttcgaggtc

SEQ ID NO: 9752 - DNA, 16 bp, synthetic construct
  misc_feature 1..16: note = synthetic [barcode part1]
  source 1..16: mol_type = other DNA
tcgtgaacgttctgcc

SEQ ID NO: 9753 - DNA, 16 bp, synthetic construct
  misc_feature 1..16: note = synthetic [barcode part1]
  source 1..16: mol_type = other DNA
gatataccttcggtct

SEQ ID NO: 9754 - DNA, 16 bp, synthetic construct
  misc_feature 1..16: note = synthetic [barcode part1]
  source 1..16: mol_type = other DNA
gattgtgccaacctcc

SEQ ID NO: 9755 - DNA, 16 bp, synthetic construct
  misc_feature 1..16: note = synthetic [barcode part1]
  source 1..16: mol_type = other DNA
tcagacagtgacaggc

SEQ ID NO: 9756 - DNA, 16 bp, synthetic construct
  misc_feature 1..16: note = synthetic [barcode part1]
  source 1..16: mol_type = other DNA
ccaagtgacaggttct

SEQ ID NO: 9757 - DNA, 16 bp, synthetic construct
  misc_feature 1..16: note = synthetic [barcode part1]
  source 1..16: mol_type = other DNA
gagttacaggtcactc

SEQ ID NO: 9758 - DNA, 16 bp, synthetic construct
  misc_feature 1..16: note = synthetic [barcode part1]
  source 1..16: mol_type = other DNA
ataggccgaggtaatt

SEQ ID NO: 9759 - DNA, 16 bp, synthetic construct
  misc_feature 1..16: note = synthetic [barcode part1]
  source 1..16: mol_type = other DNA
acctgtagattcgcag

SEQ ID NO: 9760 - DNA, 16 bp, synthetic construct
  misc_feature 1..16: note = synthetic [barcode part1]
  source 1..16: mol_type = other DNA
actccgcgtctgaact

SEQ ID NO: 9761 - DNA, 16 bp, synthetic construct
  misc_feature 1..16: note = synthetic [barcode part1]
  source 1..16: mol_type = other DNA
tctctgcacgacctag

SEQ ID NO: 9762 - DNA, 16 bp, synthetic construct
  misc_feature 1..16: note = synthetic [barcode part1]
  source 1..16: mol_type = other DNA
aacctacgcgacgaag

SEQ ID NO: 9763 - DNA, 16 bp, synthetic construct
  misc_feature 1..16: note = synthetic [barcode part1]
  source 1..16: mol_type = other DNA
gattgtcacaagagtg

SEQ ID NO: 9764 - DNA, 16 bp, synthetic construct
  misc_feature 1..16: note = synthetic [barcode part1]
  source 1..16: mol_type = other DNA
gaagtagacaggtctt

SEQ ID NO: 9765 - DNA, 16 bp, synthetic construct
  misc_feature 1..16: note = synthetic [barcode part1]
  source 1..16: mol_type = other DNA
aggagaccaagtccac

SEQ ID NO: 9766 - DNA, 16 bp, synthetic construct
  misc_feature 1..16: note = synthetic [barcode part1]
  source 1..16: mol_type = other DNA
gcggatacactacgag

SEQ ID NO: 9767 - DNA, 16 bp, synthetic construct
  misc_feature 1..16: note = synthetic [barcode part1]
  source 1..16: mol_type = other DNA
tcggaacggtactact

SEQ ID NO: 9768 - DNA, 16 bp, synthetic construct
  misc_feature 1..16: note = synthetic [barcode part1]
  source 1..16: mol_type = other DNA
tcctgtgcagtccaac

SEQ ID NO: 9769 - DNA, 16 bp, synthetic construct
  misc_feature 1..16: note = synthetic [barcode part1]
  source 1..16: mol_type = other DNA
gatccaaggttcgatc

SEQ ID NO: 9770 - DNA, 16 bp, synthetic construct
  misc_feature 1..16: note = synthetic [barcode part1]
  source 1..16: mol_type = other DNA
attcaagacttcgcct

SEQ ID NO: 9771 - DNA, 16 bp, synthetic construct
  misc_feature 1..16: note = synthetic [barcode part1]
  source 1..16: mol_type = other DNA
agagatagacgatctc

SEQ ID NO: 9772 - DNA, 16 bp, synthetic construct
  misc_feature 1..16: note = synthetic [barcode part1]
  source 1..16: mol_type = other DNA
tccgactaattcctcc

SEQ ID NO: 9773 - DNA, 16 bp, synthetic construct
  misc_feature 1..16: note = synthetic [barcode part1]
  source 1..16: mol_type = other DNA
cgaggaacgcaatcac

SEQ ID NO: 9774 - DNA, 16 bp, synthetic construct
  misc_feature 1..16: note = synthetic [barcode part1]
  source 1..16: mol_type = other DNA
gtgcgactgtacaatc

SEQ ID NO: 9775 - DNA, 16 bp, synthetic construct
  misc_feature 1..16: note = synthetic [barcode part1]
  source 1..16: mol_type = other DNA
gttctcagaatcacct

SEQ ID NO: 9776 - DNA, 16 bp, synthetic construct
  misc_feature 1..16: note = synthetic [barcode part1]
  source 1..16: mol_type = other DNA
ttacctggcaagtggt

SEQ ID NO: 9777 - DNA, 16 bp, synthetic construct
  misc_feature 1..16: note = synthetic [barcode part1]
  source 1..16: mol_type = other DNA
tgttattggtgcgtct

SEQ ID NO: 9778 - DNA, 16 bp, synthetic construct
  misc_feature 1..16: note = synthetic [barcode part1]
  source 1..16: mol_type = other DNA
gaagttccacttactc

SEQ ID NO: 9779 - DNA, 16 bp, synthetic construct
  misc_feature 1..16: note = synthetic [barcode part1]
  source 1..16: mol_type = other DNA
cactgttgagtactct

SEQ ID NO: 9780 - DNA, 16 bp, synthetic construct
  misc_feature 1..16: note = synthetic [barcode part1]
  source 1..16: mol_type = other DNA
cgaccttctcttcaac

SEQ ID NO: 9781 - DNA, 16 bp, synthetic construct
  misc_feature 1..16: note = synthetic [barcode part1]
  source 1..16: mol_type = other DNA
gactagtagagaaggc

SEQ ID NO: 9782 - DNA, 16 bp, synthetic construct
  misc_feature 1..16: note = synthetic [barcode part1]
  source 1..16: mol_type = other DNA
gtgtgacaccagtact

SEQ ID NO: 9783 - DNA, 16 bp, synthetic construct
  misc_feature 1..16: note = synthetic [barcode part1]
  source 1..16: mol_type = other DNA
gaatatctcgcggact

SEQ ID NO: 9784 - DNA, 16 bp, synthetic construct
  misc_feature 1..16: note = synthetic [barcode part1]
  source 1..16: mol_type = other DNA
acagactgtactcgac

SEQ ID NO: 9785 - DNA, 16 bp, synthetic construct
  misc_feature 1..16: note = synthetic [barcode part1]
  source 1..16: mol_type = other DNA
gtgcacggtattacac

SEQ ID NO: 9786 - DNA, 16 bp, synthetic construct
  misc_feature 1..16: note = synthetic [barcode part1]
  source 1..16: mol_type = other DNA
agtgcagactcttacg

SEQ ID NO: 9787 - DNA, 16 bp, synthetic construct
  misc_feature 1..16: note = synthetic [barcode part1]
  source 1..16: mol_type = other DNA
tgatacctccacttag

SEQ ID NO: 9788 - DNA, 16 bp, synthetic construct
  misc_feature 1..16: note = synthetic [barcode part1]
  source 1..16: mol_type = other DNA
tggaactattgaccgc

SEQ ID NO: 9789 - DNA, 16 bp, synthetic construct
  misc_feature 1..16: note = synthetic [barcode part1]
  source 1..16: mol_type = other DNA
tgtaaccttcttgacg

SEQ ID NO: 9790 - DNA, 16 bp, synthetic construct
  misc_feature 1..16: note = synthetic [barcode part1]
  source 1..16: mol_type = other DNA
gtagtgttgcacgtac

SEQ ID NO: 9791 - DNA, 16 bp, synthetic construct
  misc_feature 1..16: note = synthetic [barcode part1]
  source 1..16: mol_type = other DNA
tggacagacgagtaag

SEQ ID NO: 9792 - DNA, 16 bp, synthetic construct
  misc_feature 1..16: note = synthetic [barcode part1]
  source 1..16: mol_type = other DNA
tgcgaacggtacttgt

SEQ ID NO: 9793 - DNA, 16 bp, synthetic construct
  misc_feature 1..16: note = synthetic [barcode part1]
  source 1..16: mol_type = other DNA
tggtcagaaccgactt

SEQ ID NO: 9794 - DNA, 16 bp, synthetic construct
  misc_feature 1..16: note = synthetic [barcode part1]
  source 1..16: mol_type = other DNA
tcaacacgttggtgtg

SEQ ID NO: 9795 - DNA, 16 bp, synthetic construct
  misc_feature 1..16: note = synthetic [barcode part1]
  source 1..16: mol_type = other DNA
cagtgtgacgtgatct

SEQ ID NO: 9796 - DNA, 16 bp, synthetic construct
  misc_feature 1..16: note = synthetic [barcode part1]
  source 1..16: mol_type = other DNA
ttcaacgattctcacg

SEQ ID NO: 9797 - DNA, 16 bp, synthetic construct
  misc_feature 1..16: note = synthetic [barcode part1]
  source 1..16: mol_type = other DNA
caggaacgacaacctg

SEQ ID NO: 9798 - DNA, 16 bp, synthetic construct
  misc_feature 1..16: note = synthetic [barcode part1]
  source 1..16: mol_type = other DNA
gtgtctcgtcgtcaac

SEQ ID NO: 9799 - DNA, 16 bp, synthetic construct
  misc_feature 1..16: note = synthetic [barcode part1]
  source 1..16: mol_type = other DNA
attcacgccagatacg

SEQ ID NO: 9800 - DNA, 16 bp, synthetic construct
  misc_feature 1..16: note = synthetic [barcode part1]
  source 1..16: mol_type = other DNA
aatacacgtacgccgt

SEQ ID NO: 9801 - DNA, 16 bp, synthetic construct
  misc_feature 1..16: note = synthetic [barcode part1]
  source 1..16: mol_type = other DNA
aacaacctgtggaggc

SEQ ID NO: 9802 - DNA, 16 bp, synthetic construct
  misc_feature 1..16: note = synthetic [barcode part1]
  source 1..16: mol_type = other DNA
tgtctcaccgcggatt

SEQ ID NO: 9803 - DNA, 16 bp, synthetic construct
  misc_feature 1..16: note = synthetic [barcode part1]
  source 1..16: mol_type = other DNA
gactgttattcctacg

SEQ ID NO: 9804 - DNA, 16 bp, synthetic construct
  misc_feature 1..16: note = synthetic [barcode part1]
  source 1..16: mol_type = other DNA
aaggtgcgtattcctg

SEQ ID NO: 9805 - DNA, 16 bp, synthetic construct
  misc_feature 1..16: note = synthetic [barcode part1]
  source 1..16: mol_type = other DNA
cgtgaatagtagagtc

SEQ ID NO: 9806 - DNA, 16 bp, synthetic construct
  misc_feature 1..16: note = synthetic [barcode part1]
  source 1..16: mol_type = other DNA
attgaccaggaaggag

SEQ ID NO: 9807 - DNA, 16 bp, synthetic construct
  misc_feature 1..16: note = synthetic [barcode part1]
  source 1..16: mol_type = other DNA
actcctcgttgcgtag

SEQ ID NO: 9808 - DNA, 16 bp, synthetic construct
  misc_feature 1..16: note = synthetic [barcode part1]
  source 1..16: mol_type = other DNA
caacggcaagatatac

SEQ ID NO: 9809 - DNA, 16 bp, synthetic construct
  misc_feature 1..16: note = synthetic [barcode part1]
  source 1..16: mol_type = other DNA
gtatcaacgactctct

SEQ ID NO: 9810 - DNA, 16 bp, synthetic construct
  misc_feature 1..16: note = synthetic [barcode part1]
  source 1..16: mol_type = other DNA
gtaattgtcggtctct

SEQ ID NO: 9811 - DNA, 16 bp, synthetic construct
  misc_feature 1..16: note = synthetic [barcode part1]
  source 1..16: mol_type = other DNA
gttagtcactgtggtg

SEQ ID NO: 9812 - DNA, 16 bp, synthetic construct
  misc_feature 1..16: note = synthetic [barcode part1]
  source 1..16: mol_type = other DNA
ccggagtaataggcac

SEQ ID NO: 9813 - DNA, 16 bp, synthetic construct
  misc_feature 1..16: note = synthetic [barcode part1]
  source 1..16: mol_type = other DNA
tccacgtaacctaatc

SEQ ID NO: 9814 - DNA, 16 bp, synthetic construct
  misc_feature 1..16: note = synthetic [barcode part1]
  source 1..16: mol_type = other DNA
agactacgacgtggac

SEQ ID NO: 9815 - DNA, 16 bp, synthetic construct
  misc_feature 1..16: note = synthetic [barcode part1]
  source 1..16: mol_type = other DNA
ccgccaaggagtatag

SEQ ID NO: 9816 - DNA, 16 bp, synthetic construct
  misc_feature 1..16: note = synthetic [barcode part1]
  source 1..16: mol_type = other DNA
caggtgtgacttgtgt

SEQ ID NO: 9817 - DNA, 16 bp, synthetic construct
  misc_feature 1..16: note = synthetic [barcode part1]
  source 1..16: mol_type = other DNA
tagtcggccttcttct

SEQ ID NO: 9818 - DNA, 16 bp, synthetic construct
  misc_feature 1..16: note = synthetic [barcode part1]
  source 1..16: mol_type = other DNA
tattgcgaggacttcg

SEQ ID NO: 9819 - DNA, 16 bp, synthetic construct
  misc_feature 1..16: note = synthetic [barcode part1]
  source 1..16: mol_type = other DNA
cgagaagtaacgtgcc

SEQ ID NO: 9820 - DNA, 16 bp, synthetic construct
  misc_feature 1..16: note = synthetic [barcode part1]
  source 1..16: mol_type = other DNA
cgcgatcactgttctg

SEQ ID NO: 9821 - DNA, 16 bp, synthetic construct
  misc_feature 1..16: note = synthetic [barcode part1]
  source 1..16: mol_type = other DNA
aaggacggtctctatc

SEQ ID NO: 9822 - DNA, 16 bp, synthetic construct
  misc_feature 1..16: note = synthetic [barcode part1]
  source 1..16: mol_type = other DNA
tcgcgtggtattaacg

SEQ ID NO: 9823 - DNA, 16 bp, synthetic construct
  misc_feature 1..16: note = synthetic [barcode part1]
  source 1..16: mol_type = other DNA
acttgactgacctgag

SEQ ID NO: 9824 - DNA, 16 bp, synthetic construct
  misc_feature 1..16: note = synthetic [barcode part1]
  source 1..16: mol_type = other DNA
gatactacacgtgcgt

SEQ ID NO: 9825 - DNA, 16 bp, synthetic construct
  misc_feature 1..16: note = synthetic [barcode part1]
  source 1..16: mol_type = other DNA
ttcacgacagagtaag

SEQ ID NO: 9826 - DNA, 16 bp, synthetic construct
  misc_feature 1..16: note = synthetic [barcode part1]
  source 1..16: mol_type = other DNA
gtcgtgcggaatagtg

SEQ ID NO: 9827 - DNA, 16 bp, synthetic construct
  misc_feature 1..16: note = synthetic [barcode part1]
  source 1..16: mol_type = other DNA
aacttccgcgtaactt

SEQ ID NO: 9828 - DNA, 16 bp, synthetic construct
  misc_feature 1..16: note = synthetic [barcode part1]
  source 1..16: mol_type = other DNA
agtcgtgccagtctct

SEQ ID NO: 9829 - DNA, 16 bp, synthetic construct
  misc_feature 1..16: note = synthetic [barcode part1]
  source 1..16: mol_type = other DNA
aacgacgtcaccttag

SEQ ID NO: 9830 - DNA, 16 bp, synthetic construct
  misc_feature 1..16: note = synthetic [barcode part1]
  source 1..16: mol_type = other DNA
aaggacggataattcc

SEQ ID NO: 9831 - DNA, 16 bp, synthetic construct
  misc_feature 1..16: note = synthetic [barcode part1]
  source 1..16: mol_type = other DNA
aggccgtatctgatac

SEQ ID NO: 9832 - DNA, 16 bp, synthetic construct
  misc_feature 1..16: note = synthetic [barcode part1]
  source 1..16: mol_type = other DNA
agtgtgcgcgttgatt

SEQ ID NO: 9833 - DNA, 16 bp, synthetic construct
  misc_feature 1..16: note = synthetic [barcode part1]
  source 1..16: mol_type = other DNA
cagagagaggattgac

SEQ ID NO: 9834 - DNA, 16 bp, synthetic construct
  misc_feature 1..16: note = synthetic [barcode part1]
  source 1..16: mol_type = other DNA
cggacctcgttacttg

SEQ ID NO: 9835 - DNA, 16 bp, synthetic construct
  misc_feature 1..16: note = synthetic [barcode part1]
  source 1..16: mol_type = other DNA
ttcgtccttacaacag

SEQ ID NO: 9836 - DNA, 16 bp, synthetic construct
  misc_feature 1..16: note = synthetic [barcode part1]
  source 1..16: mol_type = other DNA
gtaatagatccgaacg

SEQ ID NO: 9837 - DNA, 16 bp, synthetic construct
  misc_feature 1..16: note = synthetic [barcode part1]
  source 1..16: mol_type = other DNA
gtggatcggagtgact

SEQ ID NO: 9838 - DNA, 16 bp, synthetic construct
  misc_feature 1..16: note = synthetic [barcode part1]
  source 1..16: mol_type = other DNA
cgtaagtcgagtatcc

SEQ ID NO: 9839 - DNA, 16 bp, synthetic construct
  misc_feature 1..16: note = synthetic [barcode part1]
  source 1..16: mol_type = other DNA
aatcctgtgttcgttg

SEQ ID NO: 9840 - DNA, 16 bp, synthetic construct
  misc_feature 1..16: note = synthetic [barcode part1]
  source 1..16: mol_type = other DNA
accgtctgtctgtgac

SEQ ID NO: 9841 - DNA, 16 bp, synthetic construct
  misc_feature 1..16: note = synthetic [barcode part1]
  source 1..16: mol_type = other DNA
gcaacttccgtgtctg

SEQ ID NO: 9842 - DNA, 16 bp, synthetic construct
  misc_feature 1..16: note = synthetic [barcode part1]
  source 1..16: mol_type = other DNA
gcagagtgagtaacag

SEQ ID NO: 9843 - DNA, 16 bp, synthetic construct
  misc_feature 1..16: note = synthetic [barcode part1]
  source 1..16: mol_type = other DNA
aagactcgacgaacgc

SEQ ID NO: 9844 - DNA, 16 bp, synthetic construct
  misc_feature 1..16: note = synthetic [barcode part1]
  source 1..16: mol_type = other DNA
tggcagttgacctagt

SEQ ID NO: 9845 - DNA, 16 bp, synthetic construct
  misc_feature 1..16: note = synthetic [barcode part1]
  source 1..16: mol_type = other DNA
ttctctcgttacgacc

SEQ ID NO: 9846 - DNA, 16 bp, synthetic construct
  misc_feature 1..16: note = synthetic [barcode part1]
  source 1..16: mol_type = other DNA
tgagttacggtgacct

SEQ ID NO: 9847 - DNA, 16 bp, synthetic construct
  misc_feature 1..16: note = synthetic [barcode part1]
  source 1..16: mol_type = other DNA
gcgaattacacctgac

SEQ ID NO: 9848 - DNA, 16 bp, synthetic construct
  misc_feature 1..16: note = synthetic [barcode part1]
  source 1..16: mol_type = other DNA
acggtgtagaacctct

SEQ ID NO: 9849 - DNA, 16 bp, synthetic construct
  misc_feature 1..16: note = synthetic [barcode part1]
  source 1..16: mol_type = other DNA
atcgtcagtcaggttg

SEQ ID NO: 9850 - DNA, 16 bp, synthetic construct
  misc_feature 1..16: note = synthetic [barcode part1]
  source 1..16: mol_type = other DNA
tattcgtggcactgcc

SEQ ID NO: 9851 - DNA, 16 bp, synthetic construct
  misc_feature 1..16: note = synthetic [barcode part1]
  source 1..16: mol_type = other DNA
tagataccgactcctt

SEQ ID NO: 9852 - DNA, 16 bp, synthetic construct
  misc_feature 1..16: note = synthetic [barcode part1]
  source 1..16: mol_type = other DNA
aatctgattctcgcgt

SEQ ID NO: 9853 - DNA, 16 bp, synthetic construct
  misc_feature 1..16: note = synthetic [barcode part1]
  source 1..16: mol_type = other DNA
cgactccaccaatatt

SEQ ID NO: 9854 - DNA, 16 bp, synthetic construct
  misc_feature 1..16: note = synthetic [barcode part1]
  source 1..16: mol_type = other DNA
accgaacaacgatcct

SEQ ID NO: 9855 - DNA, 16 bp, synthetic construct
  misc_feature 1..16: note = synthetic [barcode part1]
  source 1..16: mol_type = other DNA
tatccgatcctactag

SEQ ID NO: 9856 - DNA, 16 bp, synthetic construct
  misc_feature 1..16: note = synthetic [barcode part1]
  source 1..16: mol_type = other DNA
ccagtatccgaccttg

SEQ ID NO: 9857 - DNA, 16 bp, synthetic construct
  misc_feature 1..16: note = synthetic [barcode part1]
  source 1..16: mol_type = other DNA
tccaactaggaggtct

SEQ ID NO: 9858 - DNA, 16 bp, synthetic construct
  misc_feature 1..16: note = synthetic [barcode part1]
  source 1..16: mol_type = other DNA
gtacggtctcttcggt

SEQ ID NO: 9859 - DNA, 16 bp, synthetic construct
  misc_feature 1..16: note = synthetic [barcode part1]
  source 1..16: mol_type = other DNA
gttgcgacgttcacct

SEQ ID NO: 9860 - DNA, 16 bp, synthetic construct
  misc_feature 1..16: note = synthetic [barcode part1]
  source 1..16: mol_type = other DNA
gtctggataggtacct

SEQ ID NO: 9861 - DNA, 16 bp, synthetic construct
  misc_feature 1..16: note = synthetic [barcode part1]
  source 1..16: mol_type = other DNA
cgaccagtgatatcac

SEQ ID NO: 9862 - DNA, 16 bp, synthetic construct
  misc_feature 1..16: note = synthetic [barcode part1]
  source 1..16: mol_type = other DNA
tgcacgaacttggact

SEQ ID NO: 9863 - DNA, 16 bp, synthetic construct
  misc_feature 1..16: note = synthetic [barcode part1]
  source 1..16: mol_type = other DNA
tcgatacaggagaccg

SEQ ID NO: 9864 - DNA, 16 bp, synthetic construct
  misc_feature 1..16: note = synthetic [barcode part1]
  source 1..16: mol_type = other DNA
actaccagtacaagag

SEQ ID NO: 9865 - DNA, 16 bp, synthetic construct
  misc_feature 1..16: note = synthetic [barcode part1]
  source 1..16: mol_type = other DNA
gtgacacgtgttgtgt

SEQ ID NO: 9866 - DNA, 16 bp, synthetic construct
  misc_feature 1..16: note = synthetic [barcode part1]
  source 1..16: mol_type = other DNA
tgtccacagactccac

SEQ ID NO: 9867 - DNA, 16 bp, synthetic construct
  misc_feature 1..16: note = synthetic [barcode part1]
  source 1..16: mol_type = other DNA
gttaggtctcgcgttc

SEQ ID NO: 9868 - DNA, 16 bp, synthetic construct
  misc_feature 1..16: note = synthetic [barcode part1]
  source 1..16: mol_type = other DNA
cgatagtataccttcc

SEQ ID NO: 9869 - DNA, 16 bp, synthetic construct
  misc_feature 1..16: note = synthetic [barcode part1]
  source 1..16: mol_type = other DNA
acggtcaagaattggt

SEQ ID NO: 9870 - DNA, 16 bp, synthetic construct
  misc_feature 1..16: note = synthetic [barcode part1]
  source 1..16: mol_type = other DNA
agaacggtcgtgaacc

SEQ ID NO: 9871 - DNA, 16 bp, synthetic construct
  misc_feature 1..16: note = synthetic [barcode part1]
  source 1..16: mol_type = other DNA
cacacgcaactaatcg

SEQ ID NO: 9872 - DNA, 16 bp, synthetic construct
  misc_feature 1..16: note = synthetic [barcode part1]
  source 1..16: mol_type = other DNA
tcgcaggatagaatac

SEQ ID NO: 9873 - DNA, 16 bp, synthetic construct
  misc_feature 1..16: note = synthetic [barcode part1]
  source 1..16: mol_type = other DNA
gtaagttcggtagagt

SEQ ID NO: 9874 - DNA, 16 bp, synthetic construct
  misc_feature 1..16: note = synthetic [barcode part1]
  source 1..16: mol_type = other DNA
ttccaagtaggtagag

SEQ ID NO: 9875 - DNA, 16 bp, synthetic construct
  misc_feature 1..16: note = synthetic [barcode part1]
  source 1..16: mol_type = other DNA
tgtaggcgaatagtgt

SEQ ID NO: 9876 - DNA, 16 bp, synthetic construct
  misc_feature 1..16: note = synthetic [barcode part1]
  source 1..16: mol_type = other DNA
ttgtcaccgagtatct

SEQ ID NO: 9877 - DNA, 16 bp, synthetic construct
  misc_feature 1..16: note = synthetic [barcode part1]
  source 1..16: mol_type = other DNA
tgtactgcagtgtacg

SEQ ID NO: 9878 - DNA, 16 bp, synthetic construct
  misc_feature 1..16: note = synthetic [barcode part1]
  source 1..16: mol_type = other DNA
tgttctgtcgtcctgt

SEQ ID NO: 9879 - DNA, 16 bp, synthetic construct
  misc_feature 1..16: note = synthetic [barcode part1]
  source 1..16: mol_type = other DNA
aatacacctgaggagt

SEQ ID NO: 9880 - DNA, 16 bp, synthetic construct
  misc_feature 1..16: note = synthetic [barcode part1]
  source 1..16: mol_type = other DNA
atctcaggtacgtacg

SEQ ID NO: 9881 - DNA, 16 bp, synthetic construct
  misc_feature 1..16: note = synthetic [barcode part1]
  source 1..16: mol_type = other DNA
aactgcaacacactgc

SEQ ID NO: 9882 - DNA, 16 bp, synthetic construct
  misc_feature 1..16: note = synthetic [barcode part1]
  source 1..16: mol_type = other DNA
agtcggaactcaggtg

SEQ ID NO: 9883 - DNA, 16 bp, synthetic construct
  misc_feature 1..16: note = synthetic [barcode part1]
  source 1..16: mol_type = other DNA
cagattcagacggcag

SEQ ID NO: 9884 - DNA, 16 bp, synthetic construct
  misc_feature 1..16: note = synthetic [barcode part1]
  source 1..16: mol_type = other DNA
aaggtcgacgcaactg

SEQ ID NO: 9885 - DNA, 16 bp, synthetic construct
  misc_feature 1..16: note = synthetic [barcode part1]
  source 1..16: mol_type = other DNA
cgattctgatcggagt

SEQ ID NO: 9886 - DNA, 16 bp, synthetic construct
  misc_feature 1..16: note = synthetic [barcode part1]
  source 1..16: mol_type = other DNA
agatcgttctggcaac

SEQ ID NO: 9887 - DNA, 16 bp, synthetic construct
  misc_feature 1..16: note = synthetic [barcode part1]
  source 1..16: mol_type = other DNA
tctcggtaatctgcgc

SEQ ID NO: 9888 - DNA, 16 bp, synthetic construct
  misc_feature 1..16: note = synthetic [barcode part1]
  source 1..16: mol_type = other DNA
gcgtattacaactgcg

SEQ ID NO: 9889 - DNA, 16 bp, synthetic construct
  misc_feature 1..16: note = synthetic [barcode part1]
  source 1..16: mol_type = other DNA
gtctctaaggtacggt

SEQ ID NO: 9890 - DNA, 16 bp, synthetic construct
  misc_feature 1..16: note = synthetic [barcode part1]
  source 1..16: mol_type = other DNA
aacgtcttgtcggtag

SEQ ID NO: 9891 - DNA, 16 bp, synthetic construct
  misc_feature 1..16: note = synthetic [barcode part1]
  source 1..16: mol_type = other DNA
aggagtgtactgaatc

SEQ ID NO: 9892 - DNA, 16 bp, synthetic construct
  misc_feature 1..16: note = synthetic [barcode part1]
  source 1..16: mol_type = other DNA
gaagattgcgtcgacg

SEQ ID NO: 9893 - DNA, 16 bp, synthetic construct
  misc_feature 1..16: note = synthetic [barcode part1]
  source 1..16: mol_type = other DNA
cgtagtggtgagtggt

SEQ ID NO: 9894 - DNA, 16 bp, synthetic construct
  misc_feature 1..16: note = synthetic [barcode part1]
  source 1..16: mol_type = other DNA
acttaccaacaccgtt

SEQ ID NO: 9895 - DNA, 16 bp, synthetic construct
  misc_feature 1..16: note = synthetic [barcode part1]
  source 1..16: mol_type = other DNA
ccgcactaagtcgtct

SEQ ID NO: 9896 - DNA, 16 bp, synthetic construct
  misc_feature 1..16: note = synthetic [barcode part1]
  source 1..16: mol_type = other DNA
gcaggcgtactgtaag

SEQ ID NO: 9897 - DNA, 16 bp, synthetic construct
  misc_feature 1..16: note = synthetic [barcode part1]
  source 1..16: mol_type = other DNA
acaggtgcggaatctg

SEQ ID NO: 9898 - DNA, 16 bp, synthetic construct
  misc_feature 1..16: note = synthetic [barcode part1]
  source 1..16: mol_type = other DNA
agtacgtgtgtactgc

SEQ ID NO: 9899 - DNA, 16 bp, synthetic construct
  misc_feature 1..16: note = synthetic [barcode part1]
  source 1..16: mol_type = other DNA
agtgtggagattactg

SEQ ID NO: 9900 - DNA, 16 bp, synthetic construct
  misc_feature 1..16: note = synthetic [barcode part1]
  source 1..16: mol_type = other DNA
cacagagtagtaactg

SEQ ID NO: 9901 - DNA, 16 bp, synthetic construct
  misc_feature 1..16: note = synthetic [barcode part1]
  source 1..16: mol_type = other DNA
gtcgagtaatacaggt

SEQ ID NO: 9902 - DNA, 16 bp, synthetic construct
  misc_feature 1..16: note = synthetic [barcode part1]
  source 1..16: mol_type = other DNA
attacgacagacgagt

SEQ ID NO: 9903 - DNA, 16 bp, synthetic construct
  misc_feature 1..16: note = synthetic [barcode part1]
  source 1..16: mol_type = other DNA
gttcgcggacttatag

SEQ ID NO: 9904 - DNA, 16 bp, synthetic construct
  misc_feature 1..16: note = synthetic [barcode part1]
  source 1..16: mol_type = other DNA
aatctcttctccggtc

SEQ ID NO: 9905 - DNA, 16 bp, synthetic construct
  misc_feature 1..16: note = synthetic [barcode part1]
  source 1..16: mol_type = other DNA
ttctcaggttggtact

SEQ ID NO: 9906 - DNA, 16 bp, synthetic construct
  misc_feature 1..16: note = synthetic [barcode part1]
  source 1..16: mol_type = other DNA
gtaggtcaactcgtgt

SEQ ID NO: 9907 - DNA, 16 bp, synthetic construct
  misc_feature 1..16: note = synthetic [barcode part1]
  source 1..16: mol_type = other DNA
tggtcagacacacact

SEQ ID NO: 9908 - DNA, 16 bp, synthetic construct
  misc_feature 1..16: note = synthetic [barcode part1]
  source 1..16: mol_type = other DNA
gttctgtcaggagact

SEQ ID NO: 9909 - DNA, 16 bp, synthetic construct
  misc_feature 1..16: note = synthetic [barcode part1]
  source 1..16: mol_type = other DNA
cggtccaacctaatag

SEQ ID NO: 9910 - DNA, 16 bp, synthetic construct
  misc_feature 1..16: note = synthetic [barcode part1]
  source 1..16: mol_type = other DNA
agtgaagtacaggtct

SEQ ID NO: 9911 - DNA, 16 bp, synthetic construct
  misc_feature 1..16: note = synthetic [barcode part1]
  source 1..16: mol_type = other DNA
caccagaattcctgtt

SEQ ID NO: 9912 - DNA, 16 bp, synthetic construct
  misc_feature 1..16: note = synthetic [barcode part1]
  source 1..16: mol_type = other DNA
cgtaccgaactggaag

SEQ ID NO: 9913 - DNA, 16 bp, synthetic construct
  misc_feature 1..16: note = synthetic [barcode part1]
  source 1..16: mol_type = other DNA
tacttgccgccgtagt

SEQ ID NO: 9914 - DNA, 16 bp, synthetic construct
  misc_feature 1..16: note = synthetic [barcode part1]
  source 1..16: mol_type = other DNA
aggtatctctaggtgc

SEQ ID NO: 9915 - DNA, 16 bp, synthetic construct
  misc_feature 1..16: note = synthetic [barcode part1]
  source 1..16: mol_type = other DNA
tcaaccacacagtacg

SEQ ID NO: 9916 - DNA, 16 bp, synthetic construct
  misc_feature 1..16: note = synthetic [barcode part1]
  source 1..16: mol_type = other DNA
agatccgcgtcttatt

SEQ ID NO: 9917 - DNA, 16 bp, synthetic construct
  misc_feature 1..16: note = synthetic [barcode part1]
  source 1..16: mol_type = other DNA
tccgaatcactggtag

SEQ ID NO: 9918 - DNA, 16 bp, synthetic construct
  misc_feature 1..16: note = synthetic [barcode part1]
  source 1..16: mol_type = other DNA
tgtacaggtgattgcc

SEQ ID NO: 9919 - DNA, 16 bp, synthetic construct
  misc_feature 1..16: note = synthetic [barcode part1]
  source 1..16: mol_type = other DNA
gacggattgagtagag

SEQ ID NO: 9920 - DNA, 16 bp, synthetic construct
  misc_feature 1..16: note = synthetic [barcode part1]
  source 1..16: mol_type = other DNA
ccaattgcaattggcg

SEQ ID NO: 9921 - DNA, 16 bp, synthetic construct
  misc_feature 1..16: note = synthetic [barcode part1]
  source 1..16: mol_type = other DNA
gttacttggtacttgc

SEQ ID NO: 9922 - DNA, 16 bp, synthetic construct
  misc_feature 1..16: note = synthetic [barcode part1]
  source 1..16: mol_type = other DNA
aggtaccgatactcgt

SEQ ID NO: 9923 - DNA, 16 bp, synthetic construct
  misc_feature 1..16: note = synthetic [barcode part1]
  source 1..16: mol_type = other DNA
gacgtacctccgatct

SEQ ID NO: 9924 - DNA, 16 bp, synthetic construct
  misc_feature 1..16: note = synthetic [barcode part1]
  source 1..16: mol_type = other DNA
actctcactgttgagt

SEQ ID NO: 9925 - DNA, 16 bp, synthetic construct
  misc_feature 1..16: note = synthetic [barcode part1]
  source 1..16: mol_type = other DNA
cgtgaaggattgttag

SEQ ID NO: 9926 - DNA, 16 bp, synthetic construct
  misc_feature 1..16: note = synthetic [barcode part1]
  source 1..16: mol_type = other DNA
tccactgacacagtcc

SEQ ID NO: 9927 - DNA, 16 bp, synthetic construct
  misc_feature 1..16: note = synthetic [barcode part1]
  source 1..16: mol_type = other DNA
tcttggttcagacact

SEQ ID NO: 9928 - DNA, 16 bp, synthetic construct
  misc_feature 1..16: note = synthetic [barcode part1]
  source 1..16: mol_type = other DNA
ttctgagttgtctgtg

SEQ ID NO: 9929 - DNA, 16 bp, synthetic construct
  misc_feature 1..16: note = synthetic [barcode part1]
  source 1..16: mol_type = other DNA
cgaatacttagacgcc

SEQ ID NO: 9930 - DNA, 16 bp, synthetic construct
  misc_feature 1..16: note = synthetic [barcode part1]
  source 1..16: mol_type = other DNA
tctcttacgaatccag

SEQ ID NO: 9931 - DNA, 16 bp, synthetic construct
  misc_feature 1..16: note = synthetic [barcode part1]
  source 1..16: mol_type = other DNA
tagttatcggaagacg

SEQ ID NO: 9932 - DNA, 16 bp, synthetic construct
  misc_feature 1..16: note = synthetic [barcode part1]
  source 1..16: mol_type = other DNA
agtgaaggagaaccgt

SEQ ID NO: 9933 - DNA, 16 bp, synthetic construct
  misc_feature 1..16: note = synthetic [barcode part1]
  source 1..16: mol_type = other DNA
ccgtatcagtgacctc

SEQ ID NO: 9934 - DNA, 16 bp, synthetic construct
  misc_feature 1..16: note = synthetic [barcode part1]
  source 1..16: mol_type = other DNA
tggtgacggagtgtgt

SEQ ID NO: 9935 - DNA, 16 bp, synthetic construct
  misc_feature 1..16: note = synthetic [barcode part1]
  source 1..16: mol_type = other DNA
gtcttgatctcttccg

SEQ ID NO: 9936 - DNA, 16 bp, synthetic construct
  misc_feature 1..16: note = synthetic [barcode part1]
  source 1..16: mol_type = other DNA
ttgagatcggagtcct

SEQ ID NO: 9937 - DNA, 16 bp, synthetic construct
  misc_feature 1..16: note = synthetic [barcode part1]
  source 1..16: mol_type = other DNA
gcagtacttctggagt

SEQ ID NO: 9938 - DNA, 16 bp, synthetic construct
  misc_feature 1..16: note = synthetic [barcode part1]
  source 1..16: mol_type = other DNA
tgtcactatccgagtt

SEQ ID NO: 9939 - DNA, 16 bp, synthetic construct
  misc_feature 1..16: note = synthetic [barcode part1]
  source 1..16: mol_type = other DNA
gtccttcaatccttcg

SEQ ID NO: 9940 - DNA, 16 bp, synthetic construct
  misc_feature 1..16: note = synthetic [barcode part1]
  source 1..16: mol_type = other DNA
ttccttcgtatcgcac

SEQ ID NO: 9941 - DNA, 16 bp, synthetic construct
  misc_feature 1..16: note = synthetic [barcode part1]
  source 1..16: mol_type = other DNA
accacagaataggtgt

SEQ ID NO: 9942 - DNA, 16 bp, synthetic construct
  misc_feature 1..16: note = synthetic [barcode part1]
  source 1..16: mol_type = other DNA
agtaccacagtgttgc

SEQ ID NO: 9943 - DNA, 16 bp, synthetic construct
  misc_feature 1..16: note = synthetic [barcode part1]
  source 1..16: mol_type = other DNA
tactactctgcgtggc

SEQ ID NO: 9944 - DNA, 16 bp, synthetic construct
  misc_feature 1..16: note = synthetic [barcode part1]
  source 1..16: mol_type = other DNA
tgcgttaccttaatcg

SEQ ID NO: 9945 - DNA, 16 bp, synthetic construct
  misc_feature 1..16: note = synthetic [barcode part1]
  source 1..16: mol_type = other DNA
ccagacagaactcact

SEQ ID NO: 9946 - DNA, 16 bp, synthetic construct
  misc_feature 1..16: note = synthetic [barcode part1]
  source 1..16: mol_type = other DNA
agagattaccgcgcag

SEQ ID NO: 9947 - DNA, 16 bp, synthetic construct
  misc_feature 1..16: note = synthetic [barcode part1]
  source 1..16: mol_type = other DNA
atcacacttctcggcg

SEQ ID NO: 9948 - DNA, 16 bp, synthetic construct
  misc_feature 1..16: note = synthetic [barcode part1]
  source 1..16: mol_type = other DNA
tgaggagattagtgtc

SEQ ID NO: 9949 - DNA, 16 bp, synthetic construct
  misc_feature 1..16: note = synthetic [barcode part1]
  source 1..16: mol_type = other DNA
cgaagagtctctcaac

SEQ ID NO: 9950 - DNA, 16 bp, synthetic construct
  misc_feature 1..16: note = synthetic [barcode part1]
  source 1..16: mol_type = other DNA
attgagacacgcgacg

SEQ ID NO: 9951 - DNA, 16 bp, synthetic construct
  misc_feature 1..16: note = synthetic [barcode part1]
  source 1..16: mol_type = other DNA
gttgactgactaaccg

SEQ ID NO: 9952 - DNA, 16 bp, synthetic construct
  misc_feature 1..16: note = synthetic [barcode part1]
  source 1..16: mol_type = other DNA
ttccttagagtactcg

SEQ ID NO: 9953 - DNA, 16 bp, synthetic construct
  misc_feature 1..16: note = synthetic [barcode part1]
  source 1..16: mol_type = other DNA
ccgtaggtggaagatc

SEQ ID NO: 9954 - DNA, 16 bp, synthetic construct
  misc_feature 1..16: note = synthetic [barcode part1]
  source 1..16: mol_type = other DNA
aataccgtgtagtgcc

SEQ ID NO: 9955 - DNA, 16 bp, synthetic construct
  misc_feature 1..16: note = synthetic [barcode part1]
  source 1..16: mol_type = other DNA
cgatcgcgcaagatag

SEQ ID NO: 9956 - DNA, 16 bp, synthetic construct
  misc_feature 1..16: note = synthetic [barcode part1]
  source 1..16: mol_type = other DNA
atcgtccttacggacc

SEQ ID NO: 9957 - DNA, 16 bp, synthetic construct
  misc_feature 1..16: note = synthetic [barcode part1]
  source 1..16: mol_type = other DNA
acaaccgtcggtctct

SEQ ID NO: 9958 - DNA, 16 bp, synthetic construct
  misc_feature 1..16: note = synthetic [barcode part1]
  source 1..16: mol_type = other DNA
aattggaccactaccg

SEQ ID NO: 9959 - DNA, 16 bp, synthetic construct
  misc_feature 1..16: note = synthetic [barcode part1]
  source 1..16: mol_type = other DNA
gacgaccaactattgc

SEQ ID NO: 9960 - DNA, 16 bp, synthetic construct
  misc_feature 1..16: note = synthetic [barcode part1]
  source 1..16: mol_type = other DNA
gttaggccgagagtgt

SEQ ID NO: 9961 - DNA, 16 bp, synthetic construct
  misc_feature 1..16: note = synthetic [barcode part1]
  source 1..16: mol_type = other DNA
gaacggaacctacttc

SEQ ID NO: 9962 - DNA, 16 bp, synthetic construct
  misc_feature 1..16: note = synthetic [barcode part1]
  source 1..16: mol_type = other DNA
gcggacttcagatatc

SEQ ID NO: 9963 - DNA, 16 bp, synthetic construct
  misc_feature 1..16: note = synthetic [barcode part1]
  source 1..16: mol_type = other DNA
caagtgtatatccggc

SEQ ID NO: 9964 - DNA, 16 bp, synthetic construct
  misc_feature 1..16: note = synthetic [barcode part1]
  source 1..16: mol_type = other DNA
taggtatcgcaccagt

SEQ ID NO: 9965 - DNA, 16 bp, synthetic construct
  misc_feature 1..16: note = synthetic [barcode part1]
  source 1..16: mol_type = other DNA
agactacgttcagtgc

SEQ ID NO: 9966 - DNA, 16 bp, synthetic construct
  misc_feature 1..16: note = synthetic [barcode part1]
  source 1..16: mol_type = other DNA
tacgttctctggtagt

SEQ ID NO: 9967 - DNA, 16 bp, synthetic construct
  misc_feature 1..16: note = synthetic [barcode part1]
  source 1..16: mol_type = other DNA
atagtcggcactaacc

SEQ ID NO: 9968 - DNA, 16 bp, synthetic construct
  misc_feature 1..16: note = synthetic [barcode part1]
  source 1..16: mol_type = other DNA
attgttccggatactc

SEQ ID NO: 9969 - DNA, 16 bp, synthetic construct
  misc_feature 1..16: note = synthetic [barcode part1]
  source 1..16: mol_type = other DNA
ttcggcgaggtgtaag

SEQ ID NO: 9970 - DNA, 16 bp, synthetic construct
  misc_feature 1..16: note = synthetic [barcode part1]
  source 1..16: mol_type = other DNA
aacttatccgcgagtg

SEQ ID NO: 9971 - DNA, 16 bp, synthetic construct
  misc_feature 1..16: note = synthetic [barcode part1]
  source 1..16: mol_type = other DNA
gatcagttcagtcgac

SEQ ID NO: 9972 - DNA, 16 bp, synthetic construct
  misc_feature 1..16: note = synthetic [barcode part1]
  source 1..16: mol_type = other DNA
aacttcggaatagacg

SEQ ID NO: 9973 - DNA, 16 bp, synthetic construct
  misc_feature 1..16: note = synthetic [barcode part1]
  source 1..16: mol_type = other DNA
aagagtactaccagac

SEQ ID NO: 9974 - DNA, 16 bp, synthetic construct
  misc_feature 1..16: note = synthetic [barcode part1]
  source 1..16: mol_type = other DNA
caacctcggttaagac

SEQ ID NO: 9975 - DNA, 16 bp, synthetic construct
  misc_feature 1..16: note = synthetic [barcode part1]
  source 1..16: mol_type = other DNA
tacctacaacaccgtt

SEQ ID NO: 9976 - DNA, 16 bp, synthetic construct
  misc_feature 1..16: note = synthetic [barcode part1]
  source 1..16: mol_type = other DNA
gcgtgcgactacaatt

SEQ ID NO: 9977 - DNA, 16 bp, synthetic construct
  misc_feature 1..16: note = synthetic [barcode part1]
  source 1..16: mol_type = other DNA
actcttgatccagtgt

SEQ ID NO: 9978 - DNA, 16 bp, synthetic construct
  misc_feature 1..16: note = synthetic [barcode part1]
  source 1..16: mol_type = other DNA
agttgacactgtgacc

SEQ ID NO: 9979 - DNA, 16 bp, synthetic construct
  misc_feature 1..16: note = synthetic [barcode part1]
  source 1..16: mol_type = other DNA
atagaaccgtcgttcg

SEQ ID NO: 9980 - DNA, 16 bp, synthetic construct
  misc_feature 1..16: note = synthetic [barcode part1]
  source 1..16: mol_type = other DNA
tatcgttcgttgacac

SEQ ID NO: 9981 - DNA, 16 bp, synthetic construct
  misc_feature 1..16: note = synthetic [barcode part1]
  source 1..16: mol_type = other DNA
gcacaaggcctaacag

SEQ ID NO: 9982 - DNA, 16 bp, synthetic construct
  misc_feature 1..16: note = synthetic [barcode part1]
  source 1..16: mol_type = other DNA
tactggaacgattcgc

SEQ ID NO: 9983 - DNA, 16 bp, synthetic construct
  misc_feature 1..16: note = synthetic [barcode part1]
  source 1..16: mol_type = other DNA
tcggcaaccgtgtctt

SEQ ID NO: 9984 - DNA, 16 bp, synthetic construct
  misc_feature 1..16: note = synthetic [barcode part1]
  source 1..16: mol_type = other DNA
atcaagacagtcacag

SEQ ID NO: 9985 - DNA, 16 bp, synthetic construct
  misc_feature 1..16: note = synthetic [barcode part1]
  source 1..16: mol_type = other DNA
gtcaagtataggaacc

SEQ ID NO: 9986 - DNA, 16 bp, synthetic construct
  misc_feature 1..16: note = synthetic [barcode part1]
  source 1..16: mol_type = other DNA
tacacggcggaagact

SEQ ID NO: 9987 - DNA, 16 bp, synthetic construct
  misc_feature 1..16: note = synthetic [barcode part1]
  source 1..16: mol_type = other DNA
tgttacttggatccac

SEQ ID NO: 9988 - DNA, 16 bp, synthetic construct
  misc_feature 1..16: note = synthetic [barcode part1]
  source 1..16: mol_type = other DNA
agataacagttacgcg

SEQ ID NO: 9989 - DNA, 16 bp, synthetic construct
  misc_feature 1..16: note = synthetic [barcode part1]
  source 1..16: mol_type = other DNA
tcaaggtgccttagac

SEQ ID NO: 9990 - DNA, 16 bp, synthetic construct
  misc_feature 1..16: note = synthetic [barcode part1]
  source 1..16: mol_type = other DNA
gtcgcacgttacttcg

SEQ ID NO: 9991 - DNA, 16 bp, synthetic construct
  misc_feature 1..16: note = synthetic [barcode part1]
  source 1..16: mol_type = other DNA
gacgtcacgatcgatt

SEQ ID NO: 9992 - DNA, 16 bp, synthetic construct
  misc_feature 1..16: note = synthetic [barcode part1]
  source 1..16: mol_type = other DNA
agtccaacgtattctc

SEQ ID NO: 9993 - DNA, 16 bp, synthetic construct
  misc_feature 1..16: note = synthetic [barcode part1]
  source 1..16: mol_type = other DNA
cagacaggccttgaag

SEQ ID NO: 9994 - DNA, 16 bp, synthetic construct
  misc_feature 1..16: note = synthetic [barcode part1]
  source 1..16: mol_type = other DNA
tgcgtagacgatcact

SEQ ID NO: 9995 - DNA, 16 bp, synthetic construct
  misc_feature 1..16: note = synthetic [barcode part1]
  source 1..16: mol_type = other DNA
cgacgaactataggcg

SEQ ID NO: 9996 - DNA, 16 bp, synthetic construct
  misc_feature 1..16: note = synthetic [barcode part1]
  source 1..16: mol_type = other DNA
gcaagtctataccggt

SEQ ID NO: 9997 - DNA, 16 bp, synthetic construct
  misc_feature 1..16: note = synthetic [barcode part1]
  source 1..16: mol_type = other DNA
ccaccaccaagtgtct

SEQ ID NO: 9998 - DNA, 16 bp, synthetic construct
  misc_feature 1..16: note = synthetic [barcode part1]
  source 1..16: mol_type = other DNA
gaatcaccactggatc

SEQ ID NO: 9999 - DNA, 16 bp, synthetic construct
  misc_feature 1..16: note = synthetic [barcode part1]
  source 1..16: mol_type = other DNA
tcgcggtaatcaatcg

SEQ ID NO: 10000 - DNA, 16 bp, synthetic construct
  misc_feature 1..16: note = synthetic [barcode part1]
  source 1..16: mol_type = other DNA
tcacgcctgaaccgtt

SEQ ID NO: 10001 - DNA, 16 bp, synthetic construct
  misc_feature 1..16: note = synthetic [barcode part1]
  source 1..16: mol_type = other DNA
aagacagtggatacct

SEQ ID NO: 10002 - DNA, 16 bp, synthetic construct
  misc_feature 1..16: note = synthetic [barcode part1]
  source 1..16: mol_type = other DNA
ttgtctacgtcacggc

SEQ ID NO: 10003 - DNA, 16 bp, synthetic construct
  misc_feature 1..16: note = synthetic [barcode part1]
  source 1..16: mol_type = other DNA
gataattggccgttgc

SEQ ID NO: 10004 - DNA, 16 bp, synthetic construct
  misc_feature 1..16: note = synthetic [barcode part1]
  source 1..16: mol_type = other DNA
caactggcgtggtatt

SEQ ID NO: 10005 - DNA, 16 bp, synthetic construct
  misc_feature 1..16: note = synthetic [barcode part1]
  source 1..16: mol_type = other DNA
atccttaccactgaac

SEQ ID NO: 10006 - DNA, 16 bp, synthetic construct
  misc_feature 1..16: note = synthetic [barcode part1]
  source 1..16: mol_type = other DNA
gttccacaatacgttc

SEQ ID NO: 10007 - DNA, 16 bp, synthetic construct
  misc_feature 1..16: note = synthetic [barcode part1]
  source 1..16: mol_type = other DNA
atactaatcctcggtc

SEQ ID NO: 10008 - DNA, 16 bp, synthetic construct
  misc_feature 1..16: note = synthetic [barcode part1]
  source 1..16: mol_type = other DNA
cgtggaagaagatacg

SEQ ID NO: 10009 - DNA, 16 bp, synthetic construct
  misc_feature 1..16: note = synthetic [barcode part1]
  source 1..16: mol_type = other DNA
ttagtgccggtatacg

SEQ ID NO: 10010 - DNA, 16 bp, synthetic construct
  misc_feature 1..16: note = synthetic [barcode part1]
  source 1..16: mol_type = other DNA
acacggaagatacgag

SEQ ID NO: 10011 - DNA, 16 bp, synthetic construct
  misc_feature 1..16: note = synthetic [barcode part1]
  source 1..16: mol_type = other DNA
actccgtgacacgttc

SEQ ID NO: 10012 - DNA, 16 bp, synthetic construct
  misc_feature 1..16: note = synthetic [barcode part1]
  source 1..16: mol_type = other DNA
tgcacgaagaccgagt

SEQ ID NO: 10013 - DNA, 16 bp, synthetic construct
  misc_feature 1..16: note = synthetic [barcode part1]
  source 1..16: mol_type = other DNA
taggaggtaattacgc

SEQ ID NO: 10014 - DNA, 16 bp, synthetic construct
  misc_feature 1..16: note = synthetic [barcode part1]
  source 1..16: mol_type = other DNA
tagacactcagtacgc

SEQ ID NO: 10015 - DNA, 16 bp, synthetic construct
  misc_feature 1..16: note = synthetic [barcode part1]
  source 1..16: mol_type = other DNA
ccttgaagtggtatcg

SEQ ID NO: 10016 - DNA, 16 bp, synthetic construct
  misc_feature 1..16: note = synthetic [barcode part1]
  source 1..16: mol_type = other DNA
gatcttcaactcgtgt

SEQ ID NO: 10017 - DNA, 16 bp, synthetic construct
  misc_feature 1..16: note = synthetic [barcode part1]
  source 1..16: mol_type = other DNA
ttgtgcacagtacacg

SEQ ID NO: 10018 - DNA, 16 bp, synthetic construct
  misc_feature 1..16: note = synthetic [barcode part1]
  source 1..16: mol_type = other DNA
tgtcctatctgaacgt

SEQ ID NO: 10019 - DNA, 16 bp, synthetic construct
  misc_feature 1..16: note = synthetic [barcode part1]
  source 1..16: mol_type = other DNA
cgcaacgaacgagtac

SEQ ID NO: 10020 - DNA, 16 bp, synthetic construct
  misc_feature 1..16: note = synthetic [barcode part1]
  source 1..16: mol_type = other DNA
cggcaatccttcacgt

SEQ ID NO: 10021 - DNA, 16 bp, synthetic construct
  misc_feature 1..16: note = synthetic [barcode part1]
  source 1..16: mol_type = other DNA
ttcaacgaacgtagag

SEQ ID NO: 10022 - DNA, 16 bp, synthetic construct
  misc_feature 1..16: note = synthetic [barcode part1]
  source 1..16: mol_type = other DNA
agagtatcgacttgag

SEQ ID NO: 10023 - DNA, 16 bp, synthetic construct
  misc_feature 1..16: note = synthetic [barcode part1]
  source 1..16: mol_type = other DNA
ttgcgtacgatcacag

SEQ ID NO: 10024 - DNA, 16 bp, synthetic construct
  misc_feature 1..16: note = synthetic [barcode part1]
  source 1..16: mol_type = other DNA
taacggcgatctggtt

SEQ ID NO: 10025 - DNA, 16 bp, synthetic construct
  misc_feature 1..16: note = synthetic [barcode part1]
  source 1..16: mol_type = other DNA
tcggttatcggagttg

SEQ ID NO: 10026 - DNA, 16 bp, synthetic construct
  misc_feature 1..16: note = synthetic [barcode part1]
  source 1..16: mol_type = other DNA
gacacagagacgtaag

SEQ ID NO: 10027 - DNA, 16 bp, synthetic construct
  misc_feature 1..16: note = synthetic [barcode part1]
  source 1..16: mol_type = other DNA
tcttgagaataccgcg

SEQ ID NO: 10028 - DNA, 16 bp, synthetic construct
  misc_feature 1..16: note = synthetic [barcode part1]
  source 1..16: mol_type = other DNA
ttgcagaaggttgaac

SEQ ID NO: 10029 - DNA, 16 bp, synthetic construct
  misc_feature 1..16: note = synthetic [barcode part1]
  source 1..16: mol_type = other DNA
cgataacgaaggtgcc

SEQ ID NO: 10030 - DNA, 16 bp, synthetic construct
  misc_feature 1..16: note = synthetic [barcode part1]
  source 1..16: mol_type = other DNA
attcctgcgaactact

SEQ ID NO: 10031 - DNA, 16 bp, synthetic construct
  misc_feature 1..16: note = synthetic [barcode part1]
  source 1..16: mol_type = other DNA
tgtacgaggattagac

SEQ ID NO: 10032 - DNA, 16 bp, synthetic construct
  misc_feature 1..16: note = synthetic [barcode part1]
  source 1..16: mol_type = other DNA
gtcagagagagtcaag

SEQ ID NO: 10033 - DNA, 16 bp, synthetic construct
  misc_feature 1..16: note = synthetic [barcode part1]
  source 1..16: mol_type = other DNA
tcgtgtctctgtatcc

SEQ ID NO: 10034 - DNA, 16 bp, synthetic construct
  misc_feature 1..16: note = synthetic [barcode part1]
  source 1..16: mol_type = other DNA
ttccacggattaccgc

SEQ ID NO: 10035 - DNA, 16 bp, synthetic construct
  misc_feature 1..16: note = synthetic [barcode part1]
  source 1..16: mol_type = other DNA
cactcacgaatctcgc

SEQ ID NO: 10036 - DNA, 16 bp, synthetic construct
  misc_feature 1..16: note = synthetic [barcode part1]
  source 1..16: mol_type = other DNA
agtctaactcttgcgt

SEQ ID NO: 10037 - DNA, 16 bp, synthetic construct
  misc_feature 1..16: note = synthetic [barcode part1]
  source 1..16: mol_type = other DNA
aggagtacactaggtt

SEQ ID NO: 10038 - DNA, 16 bp, synthetic construct
  misc_feature 1..16: note = synthetic [barcode part1]
  source 1..16: mol_type = other DNA
tgttatctgttggtgc

SEQ ID NO: 10039 - DNA, 16 bp, synthetic construct
  misc_feature 1..16: note = synthetic [barcode part1]
  source 1..16: mol_type = other DNA
tcgtgtacgtgtaacg

SEQ ID NO: 10040 - DNA, 16 bp, synthetic construct
  misc_feature 1..16: note = synthetic [barcode part1]
  source 1..16: mol_type = other DNA
gaccacgtacacaatc

SEQ ID NO: 10041 - DNA, 16 bp, synthetic construct
  misc_feature 1..16: note = synthetic [barcode part1]
  source 1..16: mol_type = other DNA
aagtacttgccacctt

SEQ ID NO: 10042 - DNA, 16 bp, synthetic construct
  misc_feature 1..16: note = synthetic [barcode part1]
  source 1..16: mol_type = other DNA
gttcagtcagtccaag

SEQ ID NO: 10043 - DNA, 16 bp, synthetic construct
  misc_feature 1..16: note = synthetic [barcode part1]
  source 1..16: mol_type = other DNA
ccgtcgacaacaattg

SEQ ID NO: 10044 - DNA, 16 bp, synthetic construct
  misc_feature 1..16: note = synthetic [barcode part1]
  source 1..16: mol_type = other DNA
atagacctctctgatc

SEQ ID NO: 10045 - DNA, 16 bp, synthetic construct
  misc_feature 1..16: note = synthetic [barcode part1]
  source 1..16: mol_type = other DNA
caggaagttccgattc

SEQ ID NO: 10046 - DNA, 16 bp, synthetic construct
  misc_feature 1..16: note = synthetic [barcode part1]
  source 1..16: mol_type = other DNA
gtcctaacgacgttag

SEQ ID NO: 10047 - DNA, 16 bp, synthetic construct
  misc_feature 1..16: note = synthetic [barcode part1]
  source 1..16: mol_type = other DNA
tcctgcgtctcgtatt

SEQ ID NO: 10048 - DNA, 16 bp, synthetic construct
  misc_feature 1..16: note = synthetic [barcode part1]
  source 1..16: mol_type = other DNA
gcggataagtatcgcg

SEQ ID NO: 10049 - DNA, 16 bp, synthetic construct
  misc_feature 1..16: note = synthetic [barcode part1]
  source 1..16: mol_type = other DNA
actctgaaccacaacg

SEQ ID NO: 10050 - DNA, 16 bp, synthetic construct
  misc_feature 1..16: note = synthetic [barcode part1]
  source 1..16: mol_type = other DNA
ttcctggaatcggaac

SEQ ID NO: 10051 - DNA, 16 bp, synthetic construct
  misc_feature 1..16: note = synthetic [barcode part1]
  source 1..16: mol_type = other DNA
tagagtactacacgag

SEQ ID NO: 10052 - DNA, 16 bp, synthetic construct
  misc_feature 1..16: note = synthetic [barcode part1]
  source 1..16: mol_type = other DNA
gaggaacttactgtcc

SEQ ID NO: 10053 - DNA, 16 bp, synthetic construct
  misc_feature 1..16: note = synthetic [barcode part1]
  source 1..16: mol_type = other DNA
tacaggcagtaagact

SEQ ID NO: 10054 - DNA, 16 bp, synthetic construct
  misc_feature 1..16: note = synthetic [barcode part1]
  source 1..16: mol_type = other DNA
gcgttaggaagattgt

SEQ ID NO: 10055 - DNA, 16 bp, synthetic construct
  misc_feature 1..16: note = synthetic [barcode part1]
  source 1..16: mol_type = other DNA
aattctcctaacgtgc

SEQ ID NO: 10056 - DNA, 16 bp, synthetic construct
  misc_feature 1..16: note = synthetic [barcode part1]
  source 1..16: mol_type = other DNA
taagtgattcaggacg

SEQ ID NO: 10057 - DNA, 16 bp, synthetic construct
  misc_feature 1..16: note = synthetic [barcode part1]
  source 1..16: mol_type = other DNA
aggacctgtaacgtct

SEQ ID NO: 10058 - DNA, 16 bp, synthetic construct
  misc_feature 1..16: note = synthetic [barcode part1]
  source 1..16: mol_type = other DNA
cacgttctattcctgc

SEQ ID NO: 10059 - DNA, 16 bp, synthetic construct
  misc_feature 1..16: note = synthetic [barcode part1]
  source 1..16: mol_type = other DNA
tgcgacaattcacctt

SEQ ID NO: 10060 - DNA, 16 bp, synthetic construct
  misc_feature 1..16: note = synthetic [barcode part1]
  source 1..16: mol_type = other DNA
aggtggagtgaacaac

SEQ ID NO: 10061 - DNA, 16 bp, synthetic construct
  misc_feature 1..16: note = synthetic [barcode part1]
  source 1..16: mol_type = other DNA
ttcgagtacgactacg

SEQ ID NO: 10062 - DNA, 16 bp, synthetic construct
  misc_feature 1..16: note = synthetic [barcode part1]
  source 1..16: mol_type = other DNA
gtacgcaatcagtcgt

SEQ ID NO: 10063 - DNA, 16 bp, synthetic construct
  misc_feature 1..16: note = synthetic [barcode part1]
  source 1..16: mol_type = other DNA
gtgttcctggcagttc

SEQ ID NO: 10064 - DNA, 16 bp, synthetic construct
  misc_feature 1..16: note = synthetic [barcode part1]
  source 1..16: mol_type = other DNA
ccgtgtccactagact

SEQ ID NO: 10065 - DNA, 16 bp, synthetic construct
  misc_feature 1..16: note = synthetic [barcode part1]
  source 1..16: mol_type = other DNA
tgattcggttcctgcg

SEQ ID NO: 10066 - DNA, 16 bp, synthetic construct
  misc_feature 1..16: note = synthetic [barcode part1]
  source 1..16: mol_type = other DNA
gaatcactctgtgttc

SEQ ID NO: 10067 - DNA, 16 bp, synthetic construct
  misc_feature 1..16: note = synthetic [barcode part1]
  source 1..16: mol_type = other DNA
tccacaacctatcgcg

SEQ ID NO: 10068 - DNA, 16 bp, synthetic construct
  misc_feature 1..16: note = synthetic [barcode part1]
  source 1..16: mol_type = other DNA
taggcgttgtagacct

SEQ ID NO: 10069 - DNA, 16 bp, synthetic construct
  misc_feature 1..16: note = synthetic [barcode part1]
  source 1..16: mol_type = other DNA
aacggccttaagttgc

SEQ ID NO: 10070 - DNA, 16 bp, synthetic construct
  misc_feature 1..16: note = synthetic [barcode part1]
  source 1..16: mol_type = other DNA
gtgccttgaccgttac

SEQ ID NO: 10071 - DNA, 16 bp, synthetic construct
  misc_feature 1..16: note = synthetic [barcode part1]
  source 1..16: mol_type = other DNA
gttctatagaccggac

SEQ ID NO: 10072 - DNA, 16 bp, synthetic construct
  misc_feature 1..16: note = synthetic [barcode part1]
  source 1..16: mol_type = other DNA
cgtagttctctcggtg

SEQ ID NO: 10073 - DNA, 16 bp, synthetic construct
  misc_feature 1..16: note = synthetic [barcode part1]
  source 1..16: mol_type = other DNA
cctctgaattatacgc

SEQ ID NO: 10074 - DNA, 16 bp, synthetic construct
  misc_feature 1..16: note = synthetic [barcode part1]
  source 1..16: mol_type = other DNA
gtcgagaccttaatcg

SEQ ID NO: 10075 - DNA, 16 bp, synthetic construct
  misc_feature 1..16: note = synthetic [barcode part1]
  source 1..16: mol_type = other DNA
aggcgaggaattccgt

SEQ ID NO: 10076 - DNA, 16 bp, synthetic construct
  misc_feature 1..16: note = synthetic [barcode part1]
  source 1..16: mol_type = other DNA
tacctagtcttcggcg

SEQ ID NO: 10077 - DNA, 16 bp, synthetic construct
  misc_feature 1..16: note = synthetic [barcode part1]
  source 1..16: mol_type = other DNA
cgaccgatagtgttac

SEQ ID NO: 10078 - DNA, 16 bp, synthetic construct
  misc_feature 1..16: note = synthetic [barcode part1]
  source 1..16: mol_type = other DNA
actgaactgttctcac

SEQ ID NO: 10079 - DNA, 16 bp, synthetic construct
  misc_feature 1..16: note = synthetic [barcode part1]
  source 1..16: mol_type = other DNA
gtgacagttgtgtaag

SEQ ID NO: 10080 - DNA, 16 bp, synthetic construct
  misc_feature 1..16: note = synthetic [barcode part1]
  source 1..16: mol_type = other DNA
aagaggaccttgagag

SEQ ID NO: 10081 - DNA, 16 bp, synthetic construct
  misc_feature 1..16: note = synthetic [barcode part1]
  source 1..16: mol_type = other DNA
cctacgtcgtaagaac

SEQ ID NO: 10082 - DNA, 16 bp, synthetic construct
  misc_feature 1..16: note = synthetic [barcode part1]
  source 1..16: mol_type = other DNA
caggattgaaggagac

SEQ ID NO: 10083 - DNA, 16 bp, synthetic construct
  misc_feature 1..16: note = synthetic [barcode part1]
  source 1..16: mol_type = other DNA
gttaggtataaggacc

SEQ ID NO: 10084 - DNA, 16 bp, synthetic construct
  misc_feature 1..16: note = synthetic [barcode part1]
  source 1..16: mol_type = other DNA
cgttacctgtcagtgc

SEQ ID NO: 10085 - DNA, 16 bp, synthetic construct
  misc_feature 1..16: note = synthetic [barcode part1]
  source 1..16: mol_type = other DNA
gtaggcacaggatctg

SEQ ID NO: 10086 - DNA, 16 bp, synthetic construct
  misc_feature 1..16: note = synthetic [barcode part1]
  source 1..16: mol_type = other DNA
attcgtgactagagag

SEQ ID NO: 10087 - DNA, 16 bp, synthetic construct
  misc_feature 1..16: note = synthetic [barcode part1]
  source 1..16: mol_type = other DNA
gacaggagagacaatc

SEQ ID NO: 10088 - DNA, 16 bp, synthetic construct
  misc_feature 1..16: note = synthetic [barcode part1]
  source 1..16: mol_type = other DNA
cggaagaactgtgcac

SEQ ID NO: 10089 - DNA, 16 bp, synthetic construct
  misc_feature 1..16: note = synthetic [barcode part1]
  source 1..16: mol_type = other DNA
tcgtgtcttgccagac

SEQ ID NO: 10090 - DNA, 16 bp, synthetic construct
  misc_feature 1..16: note = synthetic [barcode part1]
  source 1..16: mol_type = other DNA
gatcacacgtacaacc

SEQ ID NO: 10091 - DNA, 16 bp, synthetic construct
  misc_feature 1..16: note = synthetic [barcode part1]
  source 1..16: mol_type = other DNA
gtctaagttgccttac

SEQ ID NO: 10092 - DNA, 16 bp, synthetic construct
  misc_feature 1..16: note = synthetic [barcode part1]
  source 1..16: mol_type = other DNA
gagacgattacgaatc

SEQ ID NO: 10093 - DNA, 16 bp, synthetic construct
  misc_feature 1..16: note = synthetic [barcode part1]
  source 1..16: mol_type = other DNA
tggaactgattccgac

SEQ ID NO: 10094 - DNA, 16 bp, synthetic construct
  misc_feature 1..16: note = synthetic [barcode part1]
  source 1..16: mol_type = other DNA
acgcgaattgttgaag

SEQ ID NO: 10095 - DNA, 16 bp, synthetic construct
  misc_feature 1..16: note = synthetic [barcode part1]
  source 1..16: mol_type = other DNA
tataggcgcgacgaac

SEQ ID NO: 10096 - DNA, 16 bp, synthetic construct
  misc_feature 1..16: note = synthetic [barcode part1]
  source 1..16: mol_type = other DNA
ttagataggcaagacc

SEQ ID NO: 10097 - DNA, 16 bp, synthetic construct
  misc_feature 1..16: note = synthetic [barcode part1]
  source 1..16: mol_type = other DNA
attgttactctgtgcg

SEQ ID NO: 10098 - DNA, 16 bp, synthetic construct
  misc_feature 1..16: note = synthetic [barcode part1]
  source 1..16: mol_type = other DNA
tcctgacctgaatatc

SEQ ID NO: 10099 - DNA, 16 bp, synthetic construct
  misc_feature 1..16: note = synthetic [barcode part1]
  source 1..16: mol_type = other DNA
acgttctcggcaacct

SEQ ID NO: 10100 - DNA, 16 bp, synthetic construct
  misc_feature 1..16: note = synthetic [barcode part1]
  source 1..16: mol_type = other DNA
ttcaacgattcctgtg

SEQ ID NO: 10101 - DNA, 16 bp, synthetic construct
  misc_feature 1..16: note = synthetic [barcode part1]
  source 1..16: mol_type = other DNA
agagaccgcgtgttag

SEQ ID NO: 10102 - DNA, 16 bp, synthetic construct
  misc_feature 1..16: note = synthetic [barcode part1]
  source 1..16: mol_type = other DNA
tacctgccgaagtctc

SEQ ID NO: 10103 - DNA, 16 bp, synthetic construct
  misc_feature 1..16: note = synthetic [barcode part1]
  source 1..16: mol_type = other DNA
ttcgacttacgactgt

SEQ ID NO: 10104 - DNA, 16 bp, synthetic construct
  misc_feature 1..16: note = synthetic [barcode part1]
  source 1..16: mol_type = other DNA
gtctaagtctgttacc

SEQ ID NO: 10105 - DNA, 16 bp, synthetic construct
  misc_feature 1..16: note = synthetic [barcode part1]
  source 1..16: mol_type = other DNA
taacgactgatctggc

SEQ ID NO: 10106 - DNA, 16 bp, synthetic construct
  misc_feature 1..16: note = synthetic [barcode part1]
  source 1..16: mol_type = other DNA
cgttctgttcgaatac

SEQ ID NO: 10107 - DNA, 16 bp, synthetic construct
  misc_feature 1..16: note = synthetic [barcode part1]
  source 1..16: mol_type = other DNA
cgacgcgttctatcgt

SEQ ID NO: 10108 - DNA, 16 bp, synthetic construct
  misc_feature 1..16: note = synthetic [barcode part1]
  source 1..16: mol_type = other DNA
tgcgtgatctaacctt

SEQ ID NO: 10109 - DNA, 16 bp, synthetic construct
  misc_feature 1..16: note = synthetic [barcode part1]
  source 1..16: mol_type = other DNA
gacacagaggtacaag

SEQ ID NO: 10110 - DNA, 16 bp, synthetic construct
  misc_feature 1..16: note = synthetic [barcode part1]
  source 1..16: mol_type = other DNA
tgaatatcgcggactc

SEQ ID NO: 10111 - DNA, 16 bp, synthetic construct
  misc_feature 1..16: note = synthetic [barcode part1]
  source 1..16: mol_type = other DNA
ttacgccacctctatc

SEQ ID NO: 10112 - DNA, 16 bp, synthetic construct
  misc_feature 1..16: note = synthetic [barcode part1]
  source 1..16: mol_type = other DNA
ccgcggataaggaact

SEQ ID NO: 10113 - DNA, 16 bp, synthetic construct
  misc_feature 1..16: note = synthetic [barcode part1]
  source 1..16: mol_type = other DNA
gagtacggccgttaag

SEQ ID NO: 10114 - DNA, 16 bp, synthetic construct
  misc_feature 1..16: note = synthetic [barcode part1]
  source 1..16: mol_type = other DNA
tccttattcaccagag

SEQ ID NO: 10115 - DNA, 16 bp, synthetic construct
  misc_feature 1..16: note = synthetic [barcode part1]
  source 1..16: mol_type = other DNA
caatcctgaaggacct

SEQ ID NO: 10116 - DNA, 16 bp, synthetic construct
  misc_feature 1..16: note = synthetic [barcode part1]
  source 1..16: mol_type = other DNA
taacgcgcacagatct

SEQ ID NO: 10117 - DNA, 16 bp, synthetic construct
  misc_feature 1..16: note = synthetic [barcode part1]
  source 1..16: mol_type = other DNA
gtaggaaccgacaatt

SEQ ID NO: 10118 - DNA, 16 bp, synthetic construct
  misc_feature 1..16: note = synthetic [barcode part1]
  source 1..16: mol_type = other DNA
gcacggtggaattgac

SEQ ID NO: 10119 - DNA, 16 bp, synthetic construct
  misc_feature 1..16: note = synthetic [barcode part1]
  source 1..16: mol_type = other DNA
gtccaagatcttacct

SEQ ID NO: 10120 - DNA, 16 bp, synthetic construct
  misc_feature 1..16: note = synthetic [barcode part1]
  source 1..16: mol_type = other DNA
gcaactggtcagtact

SEQ ID NO: 10121 - DNA, 16 bp, synthetic construct
  misc_feature 1..16: note = synthetic [barcode part1]
  source 1..16: mol_type = other DNA
cacttgaagagtggcg

SEQ ID NO: 10122 - DNA, 16 bp, synthetic construct
  misc_feature 1..16: note = synthetic [barcode part1]
  source 1..16: mol_type = other DNA
cgcgaggatcgaattg

SEQ ID NO: 10123 - DNA, 16 bp, synthetic construct
  misc_feature 1..16: note = synthetic [barcode part1]
  source 1..16: mol_type = other DNA
aatctggccagtgatc

SEQ ID NO: 10124 - DNA, 16 bp, synthetic construct
  misc_feature 1..16: note = synthetic [barcode part1]
  source 1..16: mol_type = other DNA
ttcgcgcaccagatct

SEQ ID NO: 10125 - DNA, 16 bp, synthetic construct
  misc_feature 1..16: note = synthetic [barcode part1]
  source 1..16: mol_type = other DNA
tgaacaaggacgaacg

SEQ ID NO: 10126 - DNA, 16 bp, synthetic construct
  misc_feature 1..16: note = synthetic [barcode part1]
  source 1..16: mol_type = other DNA
gttcttatatcaggcc

SEQ ID NO: 10127 - DNA, 16 bp, synthetic construct
  misc_feature 1..16: note = synthetic [barcode part1]
  source 1..16: mol_type = other DNA
aacaaccggagtacgc

SEQ ID NO: 10128 - DNA, 16 bp, synthetic construct
  misc_feature 1..16: note = synthetic [barcode part1]
  source 1..16: mol_type = other DNA
gtcgcgtgaagtagtg

SEQ ID NO: 10129 - DNA, 16 bp, synthetic construct
  misc_feature 1..16: note = synthetic [barcode part1]
  source 1..16: mol_type = other DNA
ttccgacaactacgcc

SEQ ID NO: 10130 - DNA, 16 bp, synthetic construct
  misc_feature 1..16: note = synthetic [barcode part1]
  source 1..16: mol_type = other DNA
gagtgttcgaagtggc

SEQ ID NO: 10131 - DNA, 16 bp, synthetic construct
  misc_feature 1..16: note = synthetic [barcode part1]
  source 1..16: mol_type = other DNA
tacacagtgccagtac

SEQ ID NO: 10132 - DNA, 16 bp, synthetic construct
  misc_feature 1..16: note = synthetic [barcode part1]
  source 1..16: mol_type = other DNA
taatcgatcgaccggt

SEQ ID NO: 10133 - DNA, 16 bp, synthetic construct
  misc_feature 1..16: note = synthetic [barcode part1]
  source 1..16: mol_type = other DNA
caccaatcgcaactag

SEQ ID NO: 10134 - DNA, 16 bp, synthetic construct
  misc_feature 1..16: note = synthetic [barcode part1]
  source 1..16: mol_type = other DNA
agaggacgtggttacc

SEQ ID NO: 10135 - DNA, 16 bp, synthetic construct
  misc_feature 1..16: note = synthetic [barcode part1]
  source 1..16: mol_type = other DNA
actaggtgcaagaatc

SEQ ID NO: 10136 - DNA, 16 bp, synthetic construct
  misc_feature 1..16: note = synthetic [barcode part1]
  source 1..16: mol_type = other DNA
atctcttcagtgtacg

SEQ ID NO: 10137 - DNA, 16 bp, synthetic construct
  misc_feature 1..16: note = synthetic [barcode part1]
  source 1..16: mol_type = other DNA
acgcaattgcgcaatc

SEQ ID NO: 10138 - DNA, 16 bp, synthetic construct
  misc_feature 1..16: note = synthetic [barcode part1]
  source 1..16: mol_type = other DNA
tcgtagttctcctctg

SEQ ID NO: 10139 - DNA, 16 bp, synthetic construct
  misc_feature 1..16: note = synthetic [barcode part1]
  source 1..16: mol_type = other DNA
gaagaagatacgcgtg

SEQ ID NO: 10140 - DNA, 16 bp, synthetic construct
  misc_feature 1..16: note = synthetic [barcode part1]
  source 1..16: mol_type = other DNA
atacgtccaccgatag

SEQ ID NO: 10141 - DNA, 16 bp, synthetic construct
  misc_feature 1..16: note = synthetic [barcode part1]
  source 1..16: mol_type = other DNA
tcgtccgtaggtaagt

SEQ ID NO: 10142 - DNA, 16 bp, synthetic construct
  misc_feature 1..16: note = synthetic [barcode part1]
  source 1..16: mol_type = other DNA
actgacaccactattc

SEQ ID NO: 10143 - DNA, 16 bp, synthetic construct
  misc_feature 1..16: note = synthetic [barcode part1]
  source 1..16: mol_type = other DNA
gattctggtctcgaag

SEQ ID NO: 10144 - DNA, 16 bp, synthetic construct
  misc_feature 1..16: note = synthetic [barcode part1]
  source 1..16: mol_type = other DNA
acaccgacttccgact

SEQ ID NO: 10145 - DNA, 16 bp, synthetic construct
  misc_feature 1..16: note = synthetic [barcode part1]
  source 1..16: mol_type = other DNA
gactccttgtaggtcc

SEQ ID NO: 10146 - DNA, 16 bp, synthetic construct
  misc_feature 1..16: note = synthetic [barcode part1]
  source 1..16: mol_type = other DNA
ttaggcacactgcctc

SEQ ID NO: 10147 - DNA, 16 bp, synthetic construct
  misc_feature 1..16: note = synthetic [barcode part1]
  source 1..16: mol_type = other DNA
gattgtactctccagt

SEQ ID NO: 10148 - DNA, 16 bp, synthetic construct
  misc_feature 1..16: note = synthetic [barcode part1]
  source 1..16: mol_type = other DNA
ttgcacctactctcac

SEQ ID NO: 10149 - DNA, 16 bp, synthetic construct
  misc_feature 1..16: note = synthetic [barcode part1]
  source 1..16: mol_type = other DNA
acgcgcaattggttac

SEQ ID NO: 10150 - DNA, 16 bp, synthetic construct
  misc_feature 1..16: note = synthetic [barcode part1]
  source 1..16: mol_type = other DNA
atcggtagacagtggc

SEQ ID NO: 10151 - DNA, 16 bp, synthetic construct
  misc_feature 1..16: note = synthetic [barcode part1]
  source 1..16: mol_type = other DNA
cagtggtgtgtcctct

SEQ ID NO: 10152 - DNA, 16 bp, synthetic construct
  misc_feature 1..16: note = synthetic [barcode part1]
  source 1..16: mol_type = other DNA
tgacttgtcaccgaag

SEQ ID NO: 10153 - DNA, 16 bp, synthetic construct
  misc_feature 1..16: note = synthetic [barcode part1]
  source 1..16: mol_type = other DNA
tagatatcgcgccaac

SEQ ID NO: 10154 - DNA, 16 bp, synthetic construct
  misc_feature 1..16: note = synthetic [barcode part1]
  source 1..16: mol_type = other DNA
gtgcggtctctagttc

SEQ ID NO: 10155 - DNA, 16 bp, synthetic construct
  misc_feature 1..16: note = synthetic [barcode part1]
  source 1..16: mol_type = other DNA
gtgtggcctaatctcc

SEQ ID NO: 10156 - DNA, 16 bp, synthetic construct
  misc_feature 1..16: note = synthetic [barcode part1]
  source 1..16: mol_type = other DNA
attctcgcgaagacgt

SEQ ID NO: 10157 - DNA, 16 bp, synthetic construct
  misc_feature 1..16: note = synthetic [barcode part1]
  source 1..16: mol_type = other DNA
gacctgaaccagatct

SEQ ID NO: 10158 - DNA, 16 bp, synthetic construct
  misc_feature 1..16: note = synthetic [barcode part1]
  source 1..16: mol_type = other DNA
ccagtctaccttctac

SEQ ID NO: 10159 - DNA, 16 bp, synthetic construct
  misc_feature 1..16: note = synthetic [barcode part1]
  source 1..16: mol_type = other DNA
ataggttctccactgt

SEQ ID NO: 10160 - DNA, 16 bp, synthetic construct
  misc_feature 1..16: note = synthetic [barcode part1]
  source 1..16: mol_type = other DNA
tcaacgtaccagtacg

SEQ ID NO: 10161 - DNA, 16 bp, synthetic construct
  misc_feature 1..16: note = synthetic [barcode part1]
  source 1..16: mol_type = other DNA
caaccagttgactggt

SEQ ID NO: 10162 - DNA, 16 bp, synthetic construct
  misc_feature 1..16: note = synthetic [barcode part1]
  source 1..16: mol_type = other DNA
taagttaaggagtgcc

SEQ ID NO: 10163 - DNA, 16 bp, synthetic construct
  misc_feature 1..16: note = synthetic [barcode part1]
  source 1..16: mol_type = other DNA
cgagtgtgtgtgactt

SEQ ID NO: 10164 - DNA, 16 bp, synthetic construct
  misc_feature 1..16: note = synthetic [barcode part1]
  source 1..16: mol_type = other DNA
gaacaattacaggtcg

SEQ ID NO: 10165 - DNA, 16 bp, synthetic construct
  misc_feature 1..16: note = synthetic [barcode part1]
  source 1..16: mol_type = other DNA
cggtctctcctaactt

SEQ ID NO: 10166 - DNA, 16 bp, synthetic construct
  misc_feature 1..16: note = synthetic [barcode part1]
  source 1..16: mol_type = other DNA
tcggaatcgagattcc

SEQ ID NO: 10167 - DNA, 16 bp, synthetic construct
  misc_feature 1..16: note = synthetic [barcode part1]
  source 1..16: mol_type = other DNA
ccaattgccgatcaag

SEQ ID NO: 10168 - DNA, 16 bp, synthetic construct
  misc_feature 1..16: note = synthetic [barcode part1]
  source 1..16: mol_type = other DNA
taataggtctaggcag

SEQ ID NO: 10169 - DNA, 16 bp, synthetic construct
  misc_feature 1..16: note = synthetic [barcode part1]
  source 1..16: mol_type = other DNA
acgtgttctattgtcg

SEQ ID NO: 10170 - DNA, 16 bp, synthetic construct
  misc_feature 1..16: note = synthetic [barcode part1]
  source 1..16: mol_type = other DNA
agtggaactggcacgt

SEQ ID NO: 10171 - DNA, 16 bp, synthetic construct
  misc_feature 1..16: note = synthetic [barcode part1]
  source 1..16: mol_type = other DNA
cgaccgtaggttgaag

SEQ ID NO: 10172 - DNA, 16 bp, synthetic construct
  misc_feature 1..16: note = synthetic [barcode part1]
  source 1..16: mol_type = other DNA
agtgtgttcgagaggc

SEQ ID NO: 10173 - DNA, 16 bp, synthetic construct
  misc_feature 1..16: note = synthetic [barcode part1]
  source 1..16: mol_type = other DNA
taggcgtattgaaggt

SEQ ID NO: 10174 - DNA, 16 bp, synthetic construct
  misc_feature 1..16: note = synthetic [barcode part1]
  source 1..16: mol_type = other DNA
caaccggtaatcaacc

SEQ ID NO: 10175 - DNA, 16 bp, synthetic construct
  misc_feature 1..16: note = synthetic [barcode part1]
  source 1..16: mol_type = other DNA
tcttgcacgtacctct

SEQ ID NO: 10176 - DNA, 16 bp, synthetic construct
  misc_feature 1..16: note = synthetic [barcode part1]
  source 1..16: mol_type = other DNA
gccagtgttacacaac

SEQ ID NO: 10177 - DNA, 16 bp, synthetic construct
  misc_feature 1..16: note = synthetic [barcode part1]
  source 1..16: mol_type = other DNA
taaggcgtacttcacg

SEQ ID NO: 10178 - DNA, 16 bp, synthetic construct
  misc_feature 1..16: note = synthetic [barcode part1]
  source 1..16: mol_type = other DNA
tacaagttaccgcctt

SEQ ID NO: 10179 - DNA, 16 bp, synthetic construct
  misc_feature 1..16: note = synthetic [barcode part1]
  source 1..16: mol_type = other DNA
ttcaggaccttaaggc

SEQ ID NO: 10180 - DNA, 16 bp, synthetic construct
  misc_feature 1..16: note = synthetic [barcode part1]
  source 1..16: mol_type = other DNA
gagtgaatctgcctgt

SEQ ID NO: 10181 - DNA, 16 bp, synthetic construct
  misc_feature 1..16: note = synthetic [barcode part1]
  source 1..16: mol_type = other DNA
tacgtgttaatcggcg

SEQ ID NO: 10182 - DNA, 16 bp, synthetic construct
  misc_feature 1..16: note = synthetic [barcode part1]
  source 1..16: mol_type = other DNA
attgaccgtatcgcag

SEQ ID NO: 10183 - DNA, 16 bp, synthetic construct
  misc_feature 1..16: note = synthetic [barcode part1]
  source 1..16: mol_type = other DNA
cctgttgcgtattggc

SEQ ID NO: 10184 - DNA, 16 bp, synthetic construct
  misc_feature 1..16: note = synthetic [barcode part1]
  source 1..16: mol_type = other DNA
ccgttaacacaagaag

SEQ ID NO: 10185 - DNA, 16 bp, synthetic construct
  misc_feature 1..16: note = synthetic [barcode part1]
  source 1..16: mol_type = other DNA
tcttgtacgtgtcctc

SEQ ID NO: 10186 - DNA, 16 bp, synthetic construct
  misc_feature 1..16: note = synthetic [barcode part1]
  source 1..16: mol_type = other DNA
aaggtgaaggtgacgt

SEQ ID NO: 10187 - DNA, 16 bp, synthetic construct
  misc_feature 1..16: note = synthetic [barcode part1]
  source 1..16: mol_type = other DNA
caatagagtggtggag

SEQ ID NO: 10188 - DNA, 16 bp, synthetic construct
  misc_feature 1..16: note = synthetic [barcode part1]
  source 1..16: mol_type = other DNA
gttggatctgcactcc

SEQ ID NO: 10189 - DNA, 16 bp, synthetic construct
  misc_feature 1..16: note = synthetic [barcode part1]
  source 1..16: mol_type = other DNA
acaccgccttgtctag

SEQ ID NO: 10190 - DNA, 16 bp, synthetic construct
  misc_feature 1..16: note = synthetic [barcode part1]
  source 1..16: mol_type = other DNA
tgttctaccgtagatc

SEQ ID NO: 10191 - DNA, 16 bp, synthetic construct
  misc_feature 1..16: note = synthetic [barcode part1]
  source 1..16: mol_type = other DNA
caacctaactcgacag

SEQ ID NO: 10192 - DNA, 16 bp, synthetic construct
  misc_feature 1..16: note = synthetic [barcode part1]
  source 1..16: mol_type = other DNA
ttccaagttcaggacg

SEQ ID NO: 10193 - DNA, 16 bp, synthetic construct
  misc_feature 1..16: note = synthetic [barcode part1]
  source 1..16: mol_type = other DNA
acaactacttctcggt

SEQ ID NO: 10194 - DNA, 16 bp, synthetic construct
  misc_feature 1..16: note = synthetic [barcode part1]
  source 1..16: mol_type = other DNA
ttcagttataccgacc

SEQ ID NO: 10195 - DNA, 16 bp, synthetic construct
  misc_feature 1..16: note = synthetic [barcode part1]
  source 1..16: mol_type = other DNA
tgcaacacaggatctc

SEQ ID NO: 10196 - DNA, 16 bp, synthetic construct
  misc_feature 1..16: note = synthetic [barcode part1]
  source 1..16: mol_type = other DNA
tgcaggacggtagttg

SEQ ID NO: 10197 - DNA, 16 bp, synthetic construct
  misc_feature 1..16: note = synthetic [barcode part1]
  source 1..16: mol_type = other DNA
actggttgttggtcag

SEQ ID NO: 10198 - DNA, 16 bp, synthetic construct
  misc_feature 1..16: note = synthetic [barcode part1]
  source 1..16: mol_type = other DNA
agtgacgacctataag

SEQ ID NO: 10199 - DNA, 16 bp, synthetic construct
  misc_feature 1..16: note = synthetic [barcode part1]
  source 1..16: mol_type = other DNA
ttgtacggactcctcg

SEQ ID NO: 10200 - DNA, 16 bp, synthetic construct
  misc_feature 1..16: note = synthetic [barcode part1]
  source 1..16: mol_type = other DNA
cagtacactaacgcac

SEQ ID NO: 10201 - DNA, 16 bp, synthetic construct
  misc_feature 1..16: note = synthetic [barcode part1]
  source 1..16: mol_type = other DNA
tcaagtctggttcgag

SEQ ID NO: 10202 - DNA, 16 bp, synthetic construct
  misc_feature 1..16: note = synthetic [barcode part1]
  source 1..16: mol_type = other DNA
ttgactggatcctgag

SEQ ID NO: 10203 - DNA, 16 bp, synthetic construct
  misc_feature 1..16: note = synthetic [barcode part1]
  source 1..16: mol_type = other DNA
actgcagacggacagt

SEQ ID NO: 10204 - DNA, 16 bp, synthetic construct
  misc_feature 1..16: note = synthetic [barcode part1]
  source 1..16: mol_type = other DNA
tactggaccgtgtctc

SEQ ID NO: 10205 - DNA, 16 bp, synthetic construct
  misc_feature 1..16: note = synthetic [barcode part1]
  source 1..16: mol_type = other DNA
tggtggtaccactagt

SEQ ID NO: 10206 - DNA, 16 bp, synthetic construct
  misc_feature 1..16: note = synthetic [barcode part1]
  source 1..16: mol_type = other DNA
cgagttattcctacac

SEQ ID NO: 10207 - DNA, 16 bp, synthetic construct
  misc_feature 1..16: note = synthetic [barcode part1]
  source 1..16: mol_type = other DNA
accgacgtagagaacc

SEQ ID NO: 10208 - DNA, 16 bp, synthetic construct
  misc_feature 1..16: note = synthetic [barcode part1]
  source 1..16: mol_type = other DNA
agtacctacaactgcg

SEQ ID NO: 10209 - DNA, 16 bp, synthetic construct
  misc_feature 1..16: note = synthetic [barcode part1]
  source 1..16: mol_type = other DNA
cgacagatatcactcg

SEQ ID NO: 10210 - DNA, 16 bp, synthetic construct
  misc_feature 1..16: note = synthetic [barcode part1]
  source 1..16: mol_type = other DNA
taacacgcggtaaggc

SEQ ID NO: 10211 - DNA, 16 bp, synthetic construct
  misc_feature 1..16: note = synthetic [barcode part1]
  source 1..16: mol_type = other DNA
cacacaacttgcagac

SEQ ID NO: 10212 - DNA, 16 bp, synthetic construct
  misc_feature 1..16: note = synthetic [barcode part1]
  source 1..16: mol_type = other DNA
tccagattgtcctgcg

SEQ ID NO: 10213 - DNA, 16 bp, synthetic construct
  misc_feature 1..16: note = synthetic [barcode part1]
  source 1..16: mol_type = other DNA
aacggcacacttggag

SEQ ID NO: 10214 - DNA, 16 bp, synthetic construct
  misc_feature 1..16: note = synthetic [barcode part1]
  source 1..16: mol_type = other DNA
cgttaacgattcttcg

SEQ ID NO: 10215 - DNA, 16 bp, synthetic construct
  misc_feature 1..16: note = synthetic [barcode part1]
  source 1..16: mol_type = other DNA
ataagaccttaggcag

SEQ ID NO: 10216 - DNA, 16 bp, synthetic construct
  misc_feature 1..16: note = synthetic [barcode part1]
  source 1..16: mol_type = other DNA
cactcaagtgcaatcg

SEQ ID NO: 10217 - DNA, 16 bp, synthetic construct
  misc_feature 1..16: note = synthetic [barcode part1]
  source 1..16: mol_type = other DNA
ttaatcacgtgacgcg

SEQ ID NO: 10218 - DNA, 16 bp, synthetic construct
  misc_feature 1..16: note = synthetic [barcode part1]
  source 1..16: mol_type = other DNA
gcaactactcttcggc

SEQ ID NO: 10219 - DNA, 16 bp, synthetic construct
  misc_feature 1..16: note = synthetic [barcode part1]
  source 1..16: mol_type = other DNA
cctcaactcgaacacc

SEQ ID NO: 10220 - DNA, 16 bp, synthetic construct
  misc_feature 1..16: note = synthetic [barcode part1]
  source 1..16: mol_type = other DNA
tccaacctcttctgac

SEQ ID NO: 10221 - DNA, 16 bp, synthetic construct
  misc_feature 1..16: note = synthetic [barcode part1]
  source 1..16: mol_type = other DNA
tcgtgtcgaatacgac

SEQ ID NO: 10222 - DNA, 16 bp, synthetic construct
  misc_feature 1..16: note = synthetic [barcode part1]
  source 1..16: mol_type = other DNA
acctctcgaagaactg

SEQ ID NO: 10223 - DNA, 16 bp, synthetic construct
  misc_feature 1..16: note = synthetic [barcode part1]
  source 1..16: mol_type = other DNA
tagtctgcgttcttag

SEQ ID NO: 10224 - DNA, 16 bp, synthetic construct
  misc_feature 1..16: note = synthetic [barcode part1]
  source 1..16: mol_type = other DNA
aacctcaagtatcgcg

SEQ ID NO: 10225 - DNA, 16 bp, synthetic construct
  misc_feature 1..16: note = synthetic [barcode part1]
  source 1..16: mol_type = other DNA
gagtaccttgcgagtt

SEQ ID NO: 10226 - DNA, 16 bp, synthetic construct
  misc_feature 1..16: note = synthetic [barcode part1]
  source 1..16: mol_type = other DNA
gatactcctgttactg

SEQ ID NO: 10227 - DNA, 16 bp, synthetic construct
  misc_feature 1..16: note = synthetic [barcode part1]
  source 1..16: mol_type = other DNA
tctccttgacctcaac

SEQ ID NO: 10228 - DNA, 16 bp, synthetic construct
  misc_feature 1..16: note = synthetic [barcode part1]
  source 1..16: mol_type = other DNA
agaccaggtatcgacg

SEQ ID NO: 10229 - DNA, 16 bp, synthetic construct
  misc_feature 1..16: note = synthetic [barcode part1]
  source 1..16: mol_type = other DNA
aactcgagatccaacc

SEQ ID NO: 10230 - DNA, 16 bp, synthetic construct
  misc_feature 1..16: note = synthetic [barcode part1]
  source 1..16: mol_type = other DNA
attgatacacttcgcc

SEQ ID NO: 10231 - DNA, 16 bp, synthetic construct
  misc_feature 1..16: note = synthetic [barcode part1]
  source 1..16: mol_type = other DNA
gaacacttgtcgcctc

SEQ ID NO: 10232 - DNA, 16 bp, synthetic construct
  misc_feature 1..16: note = synthetic [barcode part1]
  source 1..16: mol_type = other DNA
actcacacaacaagag

SEQ ID NO: 10233 - DNA, 16 bp, synthetic construct
  misc_feature 1..16: note = synthetic [barcode part1]
  source 1..16: mol_type = other DNA
tccacggatcctatcg

SEQ ID NO: 10234 - DNA, 16 bp, synthetic construct
  misc_feature 1..16: note = synthetic [barcode part1]
  source 1..16: mol_type = other DNA
cgtcttgcctaggtac

SEQ ID NO: 10235 - DNA, 16 bp, synthetic construct
  misc_feature 1..16: note = synthetic [barcode part1]
  source 1..16: mol_type = other DNA
tcttctccttctcctc

SEQ ID NO: 10236 - DNA, 16 bp, synthetic construct
  misc_feature 1..16: note = synthetic [barcode part1]
  source 1..16: mol_type = other DNA
atagtgaccgttaccg

SEQ ID NO: 10237 - DNA, 16 bp, synthetic construct
  misc_feature 1..16: note = synthetic [barcode part1]
  source 1..16: mol_type = other DNA
tggacttatctgcgag

SEQ ID NO: 10238 - DNA, 16 bp, synthetic construct
  misc_feature 1..16: note = synthetic [barcode part1]
  source 1..16: mol_type = other DNA
gaggaactctacggac

SEQ ID NO: 10239 - DNA, 16 bp, synthetic construct
  misc_feature 1..16: note = synthetic [barcode part1]
  source 1..16: mol_type = other DNA
gcgatcagtcgatact

SEQ ID NO: 10240 - DNA, 16 bp, synthetic construct
  misc_feature 1..16: note = synthetic [barcode part1]
  source 1..16: mol_type = other DNA
taaggaggaggtcagt

SEQ ID NO: 10241 - DNA, 16 bp, synthetic construct
  misc_feature 1..16: note = synthetic [barcode part1]
  source 1..16: mol_type = other DNA
tgcctgtgacgttacc

SEQ ID NO: 10242 - DNA, 16 bp, synthetic construct
  misc_feature 1..16: note = synthetic [barcode part1]
  source 1..16: mol_type = other DNA
atcgcgaactctgagt

SEQ ID NO: 10243 - DNA, 16 bp, synthetic construct
  misc_feature 1..16: note = synthetic [barcode part1]
  source 1..16: mol_type = other DNA
ttctactctcgaacag

SEQ ID NO: 10244 - DNA, 16 bp, synthetic construct
  misc_feature 1..16: note = synthetic [barcode part1]
  source 1..16: mol_type = other DNA
taggtcgcgtggaagt

SEQ ID NO: 10245 - DNA, 16 bp, synthetic construct
  misc_feature 1..16: note = synthetic [barcode part1]
  source 1..16: mol_type = other DNA
ccacgtgaggatcaag

SEQ ID NO: 10246 - DNA, 16 bp, synthetic construct
  misc_feature 1..16: note = synthetic [barcode part1]
  source 1..16: mol_type = other DNA
gagaccaatattcgag

SEQ ID NO: 10247 - DNA, 16 bp, synthetic construct
  misc_feature 1..16: note = synthetic [barcode part1]
  source 1..16: mol_type = other DNA
cacctcgtctaggtgt

SEQ ID NO: 10248 - DNA, 16 bp, synthetic construct
  misc_feature 1..16: note = synthetic [barcode part1]
  source 1..16: mol_type = other DNA
aattcctcgacctctc

SEQ ID NO: 10249 - DNA, 16 bp, synthetic construct
  misc_feature 1..16: note = synthetic [barcode part1]
  source 1..16: mol_type = other DNA
cactcacaacagacac

SEQ ID NO: 10250 - DNA, 16 bp, synthetic construct
  misc_feature 1..16: note = synthetic [barcode part1]
  source 1..16: mol_type = other DNA
tctcgtggattatcac

SEQ ID NO: 10251 - DNA, 16 bp, synthetic construct
  misc_feature 1..16: note = synthetic [barcode part1]
  source 1..16: mol_type = other DNA
gtcggtcttgagattg

SEQ ID NO: 10252 - DNA, 16 bp, synthetic construct
  misc_feature 1..16: note = synthetic [barcode part1]
  source 1..16: mol_type = other DNA
gcgttcctcaacaatt

SEQ ID NO: 10253 - DNA, 16 bp, synthetic construct
  misc_feature 1..16: note = synthetic [barcode part1]
  source 1..16: mol_type = other DNA
caggtgttataggcct

SEQ ID NO: 10254 - DNA, 16 bp, synthetic construct
  misc_feature 1..16: note = synthetic [barcode part1]
  source 1..16: mol_type = other DNA
attcgagtgaacgtcc

SEQ ID NO: 10255 - DNA, 16 bp, synthetic construct
  misc_feature 1..16: note = synthetic [barcode part1]
  source 1..16: mol_type = other DNA
cgtcgttacctagacc

SEQ ID NO: 10256 - DNA, 16 bp, synthetic construct
  misc_feature 1..16: note = synthetic [barcode part1]
  source 1..16: mol_type = other DNA
atccacaggagtgacg

SEQ ID NO: 10257 - DNA, 16 bp, synthetic construct
  misc_feature 1..16: note = synthetic [barcode part1]
  source 1..16: mol_type = other DNA
aacacacggccagaac

SEQ ID NO: 10258 - DNA, 16 bp, synthetic construct
  misc_feature 1..16: note = synthetic [barcode part1]
  source 1..16: mol_type = other DNA
gagaggcagtacgtct

SEQ ID NO: 10259 - DNA, 16 bp, synthetic construct
  misc_feature 1..16: note = synthetic [barcode part1]
  source 1..16: mol_type = other DNA
gttcacagttgagaag

SEQ ID NO: 10260 - DNA, 16 bp, synthetic construct
  misc_feature 1..16: note = synthetic [barcode part1]
  source 1..16: mol_type = other DNA
tgtagtggtcctgaac

SEQ ID NO: 10261 - DNA, 16 bp, synthetic construct
  misc_feature 1..16: note = synthetic [barcode part1]
  source 1..16: mol_type = other DNA
acctacaagttacgcg

SEQ ID NO: 10262 - DNA, 16 bp, synthetic construct
  misc_feature 1..16: note = synthetic [barcode part1]
  source 1..16: mol_type = other DNA
acggactgtacgactt

SEQ ID NO: 10263 - DNA, 16 bp, synthetic construct
  misc_feature 1..16: note = synthetic [barcode part1]
  source 1..16: mol_type = other DNA
aggcgaatatctgtcc

SEQ ID NO: 10264 - DNA, 16 bp, synthetic construct
  misc_feature 1..16: note = synthetic [barcode part1]
  source 1..16: mol_type = other DNA
ttgaaccgacttgacg

SEQ ID NO: 10265 - DNA, 16 bp, synthetic construct
  misc_feature 1..16: note = synthetic [barcode part1]
  source 1..16: mol_type = other DNA
cgaggatcgaagatag

SEQ ID NO: 10266 - DNA, 16 bp, synthetic construct
  misc_feature 1..16: note = synthetic [barcode part1]
  source 1..16: mol_type = other DNA
cctgttggatctacgc

SEQ ID NO: 10267 - DNA, 16 bp, synthetic construct
  misc_feature 1..16: note = synthetic [barcode part1]
  source 1..16: mol_type = other DNA
caccaggaacaacttc

SEQ ID NO: 10268 - DNA, 16 bp, synthetic construct
  misc_feature 1..16: note = synthetic [barcode part1]
  source 1..16: mol_type = other DNA
gacgaggtcttcagtt

SEQ ID NO: 10269 - DNA, 16 bp, synthetic construct
  misc_feature 1..16: note = synthetic [barcode part1]
  source 1..16: mol_type = other DNA
tcgtctgtagaacttc

SEQ ID NO: 10270 - DNA, 16 bp, synthetic construct
  misc_feature 1..16: note = synthetic [barcode part1]
  source 1..16: mol_type = other DNA
tgagatattgcgcaag

SEQ ID NO: 10271 - DNA, 16 bp, synthetic construct
  misc_feature 1..16: note = synthetic [barcode part1]
  source 1..16: mol_type = other DNA
aggaaccactgacacg

SEQ ID NO: 10272 - DNA, 16 bp, synthetic construct
  misc_feature 1..16: note = synthetic [barcode part1]
  source 1..16: mol_type = other DNA
cgttctgtcacagacc

SEQ ID NO: 10273 - DNA, 16 bp, synthetic construct
  misc_feature 1..16: note = synthetic [barcode part1]
  source 1..16: mol_type = other DNA
ttgtcgccttaggcac

SEQ ID NO: 10274 - DNA, 16 bp, synthetic construct
  misc_feature 1..16: note = synthetic [barcode part1]
  source 1..16: mol_type = other DNA
gcagttgtgcaactgt

SEQ ID NO: 10275 - DNA, 16 bp, synthetic construct
  misc_feature 1..16: note = synthetic [barcode part1]
  source 1..16: mol_type = other DNA
gatatcgaccagttgc

SEQ ID NO: 10276 - DNA, 16 bp, synthetic construct
  misc_feature 1..16: note = synthetic [barcode part1]
  source 1..16: mol_type = other DNA
gtctactggtactact

SEQ ID NO: 10277 - DNA, 16 bp, synthetic construct
  misc_feature 1..16: note = synthetic [barcode part1]
  source 1..16: mol_type = other DNA
aggttatcgccggatt

SEQ ID NO: 10278 - DNA, 16 bp, synthetic construct
  misc_feature 1..16: note = synthetic [barcode part1]
  source 1..16: mol_type = other DNA
acaagttcgactcctt

SEQ ID NO: 10279 - DNA, 16 bp, synthetic construct
  misc_feature 1..16: note = synthetic [barcode part1]
  source 1..16: mol_type = other DNA
actcagttcttgtgtg

SEQ ID NO: 10280 - DNA, 16 bp, synthetic construct
  misc_feature 1..16: note = synthetic [barcode part1]
  source 1..16: mol_type = other DNA
ccgagtgtactactcc

SEQ ID NO: 10281 - DNA, 16 bp, synthetic construct
  misc_feature 1..16: note = synthetic [barcode part1]
  source 1..16: mol_type = other DNA
gatctaacgcactctt

SEQ ID NO: 10282 - DNA, 16 bp, synthetic construct
  misc_feature 1..16: note = synthetic [barcode part1]
  source 1..16: mol_type = other DNA
ttgcagaataaggtgc

SEQ ID NO: 10283 - DNA, 16 bp, synthetic construct
  misc_feature 1..16: note = synthetic [barcode part1]
  source 1..16: mol_type = other DNA
atccgattgtgagaag

SEQ ID NO: 10284 - DNA, 16 bp, synthetic construct
  misc_feature 1..16: note = synthetic [barcode part1]
  source 1..16: mol_type = other DNA
agacaggttcgtctac

SEQ ID NO: 10285 - DNA, 16 bp, synthetic construct
  misc_feature 1..16: note = synthetic [barcode part1]
  source 1..16: mol_type = other DNA
tactctgttgcctcgt

SEQ ID NO: 10286 - DNA, 16 bp, synthetic construct
  misc_feature 1..16: note = synthetic [barcode part1]
  source 1..16: mol_type = other DNA
tcacaggttcgtaggt

SEQ ID NO: 10287 - DNA, 16 bp, synthetic construct
  misc_feature 1..16: note = synthetic [barcode part1]
  source 1..16: mol_type = other DNA
atagtgccgtgtacac

SEQ ID NO: 10288 - DNA, 16 bp, synthetic construct
  misc_feature 1..16: note = synthetic [barcode part1]
  source 1..16: mol_type = other DNA
cagatctaggtctgtg

SEQ ID NO: 10289 - DNA, 16 bp, synthetic construct
  misc_feature 1..16: note = synthetic [barcode part1]
  source 1..16: mol_type = other DNA
acttccggcaacttgc

SEQ ID NO: 10290 - DNA, 16 bp, synthetic construct
  misc_feature 1..16: note = synthetic [barcode part1]
  source 1..16: mol_type = other DNA
agtccaacgatagtcc

SEQ ID NO: 10291 - DNA, 16 bp, synthetic construct
  misc_feature 1..16: note = synthetic [barcode part1]
  source 1..16: mol_type = other DNA
attacggtgaacagac

SEQ ID NO: 10292 - DNA, 16 bp, synthetic construct
  misc_feature 1..16: note = synthetic [barcode part1]
  source 1..16: mol_type = other DNA
gccttaacacagtgtg

SEQ ID NO: 10293 - DNA, 16 bp, synthetic construct
  misc_feature 1..16: note = synthetic [barcode part1]
  source 1..16: mol_type = other DNA
tcgaggtcgaagttct

SEQ ID NO: 10294 - DNA, 16 bp, synthetic construct
  misc_feature 1..16: note = synthetic [barcode part1]
  source 1..16: mol_type = other DNA
gattaccttgccgaag

SEQ ID NO: 10295 - DNA, 16 bp, synthetic construct
  misc_feature 1..16: note = synthetic [barcode part1]
  source 1..16: mol_type = other DNA
ttaggtccacgccttg

SEQ ID NO: 10296 - DNA, 16 bp, synthetic construct
  misc_feature 1..16: note = synthetic [barcode part1]
  source 1..16: mol_type = other DNA
gtaggaacggtggtct

SEQ ID NO: 10297 - DNA, 16 bp, synthetic construct
  misc_feature 1..16: note = synthetic [barcode part1]
  source 1..16: mol_type = other DNA
atccgttgcgatatct

SEQ ID NO: 10298 - DNA, 16 bp, synthetic construct
  misc_feature 1..16: note = synthetic [barcode part1]
  source 1..16: mol_type = other DNA
tgtaccttcacgtcct

SEQ ID NO: 10299 - DNA, 16 bp, synthetic construct
  misc_feature 1..16: note = synthetic [barcode part1]
  source 1..16: mol_type = other DNA
tatacaacaggagacc

SEQ ID NO: 10300 - DNA, 16 bp, synthetic construct
  misc_feature 1..16: note = synthetic [barcode part1]
  source 1..16: mol_type = other DNA
cctggacgaatcgaag

SEQ ID NO: 10301 - DNA, 16 bp, synthetic construct
  misc_feature 1..16: note = synthetic [barcode part1]
  source 1..16: mol_type = other DNA
caagtactgactcttc

SEQ ID NO: 10302 - DNA, 16 bp, synthetic construct
  misc_feature 1..16: note = synthetic [barcode part1]
  source 1..16: mol_type = other DNA
acctctcgtgcactag

SEQ ID NO: 10303 - DNA, 16 bp, synthetic construct
  misc_feature 1..16: note = synthetic [barcode part1]
  source 1..16: mol_type = other DNA
aatcttcgattacgcc

SEQ ID NO: 10304 - DNA, 16 bp, synthetic construct
  misc_feature 1..16: note = synthetic [barcode part1]
  source 1..16: mol_type = other DNA
ttccacctgttgtctg

SEQ ID NO: 10305 - DNA, 16 bp, synthetic construct
  misc_feature 1..16: note = synthetic [barcode part1]
  source 1..16: mol_type = other DNA
gcaagtgacgaacaag

SEQ ID NO: 10306 - DNA, 16 bp, synthetic construct
  misc_feature 1..16: note = synthetic [barcode part1]
  source 1..16: mol_type = other DNA
acacaacactgacgtc

SEQ ID NO: 10307 - DNA, 16 bp, synthetic construct
  misc_feature 1..16: note = synthetic [barcode part1]
  source 1..16: mol_type = other DNA
tattgaacggaggtac

SEQ ID NO: 10308 - DNA, 16 bp, synthetic construct
  misc_feature 1..16: note = synthetic [barcode part1]
  source 1..16: mol_type = other DNA
gatagagtgtactggt

SEQ ID NO: 10309 - DNA, 16 bp, synthetic construct
  misc_feature 1..16: note = synthetic [barcode part1]
  source 1..16: mol_type = other DNA
atacacgccttaaggc

SEQ ID NO: 10310 - DNA, 16 bp, synthetic construct
  misc_feature 1..16: note = synthetic [barcode part1]
  source 1..16: mol_type = other DNA
acaatattgcacgcgc

SEQ ID NO: 10311 - DNA, 16 bp, synthetic construct
  misc_feature 1..16: note = synthetic [barcode part1]
  source 1..16: mol_type = other DNA
tcagaacttacctacc

SEQ ID NO: 10312 - DNA, 16 bp, synthetic construct
  misc_feature 1..16: note = synthetic [barcode part1]
  source 1..16: mol_type = other DNA
cgtcctaggacaatac

SEQ ID NO: 10313 - DNA, 16 bp, synthetic construct
  misc_feature 1..16: note = synthetic [barcode part1]
  source 1..16: mol_type = other DNA
aaccgtgcacgtgatt

SEQ ID NO: 10314 - DNA, 16 bp, synthetic construct
  misc_feature 1..16: note = synthetic [barcode part1]
  source 1..16: mol_type = other DNA
gatcgaggatacgtcg

SEQ ID NO: 10315 - DNA, 16 bp, synthetic construct
  misc_feature 1..16: note = synthetic [barcode part1]
  source 1..16: mol_type = other DNA
tggataccaatcttcc

SEQ ID NO: 10316 - DNA, 16 bp, synthetic construct
  misc_feature 1..16: note = synthetic [barcode part1]
  source 1..16: mol_type = other DNA
tggttaggccaattgc

SEQ ID NO: 10317 - DNA, 16 bp, synthetic construct
  misc_feature 1..16: note = synthetic [barcode part1]
  source 1..16: mol_type = other DNA
attcactcaggacttc

SEQ ID NO: 10318 - DNA, 16 bp, synthetic construct
  misc_feature 1..16: note = synthetic [barcode part1]
  source 1..16: mol_type = other DNA
acctcaccggacttac

SEQ ID NO: 10319 - DNA, 16 bp, synthetic construct
  misc_feature 1..16: note = synthetic [barcode part1]
  source 1..16: mol_type = other DNA
cggttgaatacgcact

SEQ ID NO: 10320 - DNA, 16 bp, synthetic construct
  misc_feature 1..16: note = synthetic [barcode part1]
  source 1..16: mol_type = other DNA
cacaactaaggactag

SEQ ID NO: 10321 - DNA, 16 bp, synthetic construct
  misc_feature 1..16: note = synthetic [barcode part1]
  source 1..16: mol_type = other DNA
tcctacgattaccggc

SEQ ID NO: 10322 - DNA, 16 bp, synthetic construct
  misc_feature 1..16: note = synthetic [barcode part1]
  source 1..16: mol_type = other DNA
gagtccacaggaggtt

SEQ ID NO: 10323 - DNA, 16 bp, synthetic construct
  misc_feature 1..16: note = synthetic [barcode part1]
  source 1..16: mol_type = other DNA
ccgagtaactcgtagt

SEQ ID NO: 10324 - DNA, 16 bp, synthetic construct
  misc_feature 1..16: note = synthetic [barcode part1]
  source 1..16: mol_type = other DNA
gtgactacacgtaacc

SEQ ID NO: 10325 - DNA, 16 bp, synthetic construct
  misc_feature 1..16: note = synthetic [barcode part1]
  source 1..16: mol_type = other DNA
ttcctatcgtcaagtg

SEQ ID NO: 10326 - DNA, 16 bp, synthetic construct
  misc_feature 1..16: note = synthetic [barcode part1]
  source 1..16: mol_type = other DNA
tactgtggtgttgcag

SEQ ID NO: 10327 - DNA, 16 bp, synthetic construct
  misc_feature 1..16: note = synthetic [barcode part1]
  source 1..16: mol_type = other DNA
gttgttgattaggccg

SEQ ID NO: 10328 - DNA, 16 bp, synthetic construct
  misc_feature 1..16: note = synthetic [barcode part1]
  source 1..16: mol_type = other DNA
tagacggtagaattcg

SEQ ID NO: 10329 - DNA, 16 bp, synthetic construct
  misc_feature 1..16: note = synthetic [barcode part1]
  source 1..16: mol_type = other DNA
taccagagagtgtggc

SEQ ID NO: 10330 - DNA, 16 bp, synthetic construct
  misc_feature 1..16: note = synthetic [barcode part1]
  source 1..16: mol_type = other DNA
gcacacctactctgtg

SEQ ID NO: 10331 - DNA, 16 bp, synthetic construct
  misc_feature 1..16: note = synthetic [barcode part1]
  source 1..16: mol_type = other DNA
cctacgttacgagaac

SEQ ID NO: 10332 - DNA, 16 bp, synthetic construct
  misc_feature 1..16: note = synthetic [barcode part1]
  source 1..16: mol_type = other DNA
cgtcttaatctacggt

SEQ ID NO: 10333 - DNA, 16 bp, synthetic construct
  misc_feature 1..16: note = synthetic [barcode part1]
  source 1..16: mol_type = other DNA
gtgactgaagattggt

SEQ ID NO: 10334 - DNA, 16 bp, synthetic construct
  misc_feature 1..16: note = synthetic [barcode part1]
  source 1..16: mol_type = other DNA
taattcctaaccgtgc

SEQ ID NO: 10335 - DNA, 16 bp, synthetic construct
  misc_feature 1..16: note = synthetic [barcode part1]
  source 1..16: mol_type = other DNA
tccttctggccttaac

SEQ ID NO: 10336 - DNA, 16 bp, synthetic construct
  misc_feature 1..16: note = synthetic [barcode part1]
  source 1..16: mol_type = other DNA
cggattagaggtgtgc

SEQ ID NO: 10337 - DNA, 16 bp, synthetic construct
  misc_feature 1..16: note = synthetic [barcode part1]
  source 1..16: mol_type = other DNA
aacaaccgactgtcac

SEQ ID NO: 10338 - DNA, 16 bp, synthetic construct
  misc_feature 1..16: note = synthetic [barcode part1]
  source 1..16: mol_type = other DNA
caaggcagacgtactg

SEQ ID NO: 10339 - DNA, 16 bp, synthetic construct
  misc_feature 1..16: note = synthetic [barcode part1]
  source 1..16: mol_type = other DNA
ttgagtcaaccgtcag

SEQ ID NO: 10340 - DNA, 16 bp, synthetic construct
  misc_feature 1..16: note = synthetic [barcode part1]
  source 1..16: mol_type = other DNA
accgataatccgagtc

SEQ ID NO: 10341 - DNA, 16 bp, synthetic construct
  misc_feature 1..16: note = synthetic [barcode part1]
  source 1..16: mol_type = other DNA
gagaatactcggtaac

SEQ ID NO: 10342 - DNA, 16 bp, synthetic construct
  misc_feature 1..16: note = synthetic [barcode part1]
  source 1..16: mol_type = other DNA
tagacgtacgtagtcc

SEQ ID NO: 10343 - DNA, 16 bp, synthetic construct
  misc_feature 1..16: note = synthetic [barcode part1]
  source 1..16: mol_type = other DNA
agtggttcgcgaagac

SEQ ID NO: 10344 - DNA, 16 bp, synthetic construct
  misc_feature 1..16: note = synthetic [barcode part1]
  source 1..16: mol_type = other DNA
gtccgcagtataatcg

SEQ ID NO: 10345 - DNA, 16 bp, synthetic construct
  misc_feature 1..16: note = synthetic [barcode part1]
  source 1..16: mol_type = other DNA
cacgtgcgtattacag

SEQ ID NO: 10346 - DNA, 16 bp, synthetic construct
  misc_feature 1..16: note = synthetic [barcode part1]
  source 1..16: mol_type = other DNA
acgtctctagtaatcc

SEQ ID NO: 10347 - DNA, 16 bp, synthetic construct
  misc_feature 1..16: note = synthetic [barcode part1]
  source 1..16: mol_type = other DNA
gtctcctggaactaag

SEQ ID NO: 10348 - DNA, 16 bp, synthetic construct
  misc_feature 1..16: note = synthetic [barcode part1]
  source 1..16: mol_type = other DNA
caaccgcaagtatctg

SEQ ID NO: 10349 - DNA, 16 bp, synthetic construct
  misc_feature 1..16: note = synthetic [barcode part1]
  source 1..16: mol_type = other DNA
actcaagtatccggac

SEQ ID NO: 10350 - DNA, 16 bp, synthetic construct
  misc_feature 1..16: note = synthetic [barcode part1]
  source 1..16: mol_type = other DNA
gcgtcttaacctgacc

SEQ ID NO: 10351 - DNA, 16 bp, synthetic construct
  misc_feature 1..16: note = synthetic [barcode part1]
  source 1..16: mol_type = other DNA
ccgttgcacaagtcct

SEQ ID NO: 10352 - DNA, 16 bp, synthetic construct
  misc_feature 1..16: note = synthetic [barcode part1]
  source 1..16: mol_type = other DNA
ttctgcagtgtctcct

SEQ ID NO: 10353 - DNA, 16 bp, synthetic construct
  misc_feature 1..16: note = synthetic [barcode part1]
  source 1..16: mol_type = other DNA
agactattgcctctgt

SEQ ID NO: 10354 - DNA, 16 bp, synthetic construct
  misc_feature 1..16: note = synthetic [barcode part1]
  source 1..16: mol_type = other DNA
gcgttatactcacttg

SEQ ID NO: 10355 - DNA, 16 bp, synthetic construct
  misc_feature 1..16: note = synthetic [barcode part1]
  source 1..16: mol_type = other DNA
ttgatctcaccaacac

SEQ ID NO: 10356 - DNA, 16 bp, synthetic construct
  misc_feature 1..16: note = synthetic [barcode part1]
  source 1..16: mol_type = other DNA
gacacgtcacagttgt

SEQ ID NO: 10357 - DNA, 16 bp, synthetic construct
  misc_feature 1..16: note = synthetic [barcode part1]
  source 1..16: mol_type = other DNA
gacgcgcaattggagt

SEQ ID NO: 10358 - DNA, 16 bp, synthetic construct
  misc_feature 1..16: note = synthetic [barcode part1]
  source 1..16: mol_type = other DNA
gtgccgtaacgagtag

SEQ ID NO: 10359 - DNA, 16 bp, synthetic construct
  misc_feature 1..16: note = synthetic [barcode part1]
  source 1..16: mol_type = other DNA
caaggtgtctgcagag

SEQ ID NO: 10360 - DNA, 16 bp, synthetic construct
  misc_feature 1..16: note = synthetic [barcode part1]
  source 1..16: mol_type = other DNA
gttgcgcgtgtaattg

SEQ ID NO: 10361 - DNA, 16 bp, synthetic construct
  misc_feature 1..16: note = synthetic [barcode part1]
  source 1..16: mol_type = other DNA
cgtccagaggagttag

SEQ ID NO: 10362 - DNA, 16 bp, synthetic construct
  misc_feature 1..16: note = synthetic [barcode part1]
  source 1..16: mol_type = other DNA
gtcactacgtgtcctg

SEQ ID NO: 10363 - DNA, 16 bp, synthetic construct
  misc_feature 1..16: note = synthetic [barcode part1]
  source 1..16: mol_type = other DNA
gcgaactgtcgttcct

SEQ ID NO: 10364 - DNA, 16 bp, synthetic construct
  misc_feature 1..16: note = synthetic [barcode part1]
  source 1..16: mol_type = other DNA
tagattgcacgagagt

SEQ ID NO: 10365 - DNA, 16 bp, synthetic construct
  misc_feature 1..16: note = synthetic [barcode part1]
  source 1..16: mol_type = other DNA
aacgactcagtggttc

SEQ ID NO: 10366 - DNA, 16 bp, synthetic construct
  misc_feature 1..16: note = synthetic [barcode part1]
  source 1..16: mol_type = other DNA
aactgcaaccaacgtc

SEQ ID NO: 10367 - DNA, 16 bp, synthetic construct
  misc_feature 1..16: note = synthetic [barcode part1]
  source 1..16: mol_type = other DNA
tcacttgtgtcgtagt

SEQ ID NO: 10368 - DNA, 16 bp, synthetic construct
  misc_feature 1..16: note = synthetic [barcode part1]
  source 1..16: mol_type = other DNA
aacgaatcgccacgag

SEQ ID NO: 10369 - DNA, 16 bp, synthetic construct
  misc_feature 1..16: note = synthetic [barcode part1]
  source 1..16: mol_type = other DNA
caagaggcgattgtgc

SEQ ID NO: 10370 - DNA, 16 bp, synthetic construct
  misc_feature 1..16: note = synthetic [barcode part1]
  source 1..16: mol_type = other DNA
attcgtgtgatccttg

SEQ ID NO: 10371 - DNA, 16 bp, synthetic construct
  misc_feature 1..16: note = synthetic [barcode part1]
  source 1..16: mol_type = other DNA
aatcgcactctctggc

SEQ ID NO: 10372 - DNA, 16 bp, synthetic construct
  misc_feature 1..16: note = synthetic [barcode part1]
  source 1..16: mol_type = other DNA
gacgtacacacactgt

SEQ ID NO: 10373 - DNA, 16 bp, synthetic construct
  misc_feature 1..16: note = synthetic [barcode part1]
  source 1..16: mol_type = other DNA
acgccgttactcactg

SEQ ID NO: 10374 - DNA, 16 bp, synthetic construct
  misc_feature 1..16: note = synthetic [barcode part1]
  source 1..16: mol_type = other DNA
gaggtggagtaggatt

SEQ ID NO: 10375 - DNA, 16 bp, synthetic construct
  misc_feature 1..16: note = synthetic [barcode part1]
  source 1..16: mol_type = other DNA
gccgtcttgtctgagt

SEQ ID NO: 10376 - DNA, 16 bp, synthetic construct
  misc_feature 1..16: note = synthetic [barcode part1]
  source 1..16: mol_type = other DNA
ttgaacgtatcacctc

SEQ ID NO: 10377 - DNA, 16 bp, synthetic construct
  misc_feature 1..16: note = synthetic [barcode part1]
  source 1..16: mol_type = other DNA
ccgttcacttaggacc

SEQ ID NO: 10378 - DNA, 16 bp, synthetic construct
  misc_feature 1..16: note = synthetic [barcode part1]
  source 1..16: mol_type = other DNA
atcttcacttagtggc

SEQ ID NO: 10379 - DNA, 16 bp, synthetic construct
  misc_feature 1..16: note = synthetic [barcode part1]
  source 1..16: mol_type = other DNA
cgtcgacgaagaactg

SEQ ID NO: 10380 - DNA, 16 bp, synthetic construct
  misc_feature 1..16: note = synthetic [barcode part1]
  source 1..16: mol_type = other DNA
ttggagtaggtggacc

SEQ ID NO: 10381 - DNA, 16 bp, synthetic construct
  misc_feature 1..16: note = synthetic [barcode part1]
  source 1..16: mol_type = other DNA
taacgcgcagtcctct

SEQ ID NO: 10382 - DNA, 16 bp, synthetic construct
  misc_feature 1..16: note = synthetic [barcode part1]
  source 1..16: mol_type = other DNA
tagaaggcggtcgtgt

SEQ ID NO: 10383 - DNA, 16 bp, synthetic construct
  misc_feature 1..16: note = synthetic [barcode part1]
  source 1..16: mol_type = other DNA
gtcgcacgaagtaacg

SEQ ID NO: 10384 - DNA, 16 bp, synthetic construct
  misc_feature 1..16: note = synthetic [barcode part1]
  source 1..16: mol_type = other DNA
caatcctaccgcgtgt

SEQ ID NO: 10385 - DNA, 16 bp, synthetic construct
  misc_feature 1..16: note = synthetic [barcode part1]
  source 1..16: mol_type = other DNA
gtcgagtcagatcact

SEQ ID NO: 10386 - DNA, 16 bp, synthetic construct
  misc_feature 1..16: note = synthetic [barcode part1]
  source 1..16: mol_type = other DNA
ttaacaacgcctctac

SEQ ID NO: 10387 - DNA, 16 bp, synthetic construct
  misc_feature 1..16: note = synthetic [barcode part1]
  source 1..16: mol_type = other DNA
gagtctggaatcaagt

SEQ ID NO: 10388 - DNA, 16 bp, synthetic construct
  misc_feature 1..16: note = synthetic [barcode part1]
  source 1..16: mol_type = other DNA
acgtggaattcgatag

SEQ ID NO: 10389 - DNA, 16 bp, synthetic construct
  misc_feature 1..16: note = synthetic [barcode part1]
  source 1..16: mol_type = other DNA
aggacttacttactcc

SEQ ID NO: 10390 - DNA, 16 bp, synthetic construct
  misc_feature 1..16: note = synthetic [barcode part1]
  source 1..16: mol_type = other DNA
gtataccaacaacgag

SEQ ID NO: 10391 - DNA, 16 bp, synthetic construct
  misc_feature 1..16: note = synthetic [barcode part1]
  source 1..16: mol_type = other DNA
gagttcacaagaggcc

SEQ ID NO: 10392 - DNA, 16 bp, synthetic construct
  misc_feature 1..16: note = synthetic [barcode part1]
  source 1..16: mol_type = other DNA
gttgtgttgtggatcg

SEQ ID NO: 10393 - DNA, 16 bp, synthetic construct
  misc_feature 1..16: note = synthetic [barcode part1]
  source 1..16: mol_type = other DNA
agtcaacagtcggttc

SEQ ID NO: 10394 - DNA, 16 bp, synthetic construct
  misc_feature 1..16: note = synthetic [barcode part1]
  source 1..16: mol_type = other DNA
cgagttggtacgaggt

SEQ ID NO: 10395 - DNA, 16 bp, synthetic construct
  misc_feature 1..16: note = synthetic [barcode part1]
  source 1..16: mol_type = other DNA
tacaggtacgagtctc

SEQ ID NO: 10396 - DNA, 16 bp, synthetic construct
  misc_feature 1..16: note = synthetic [barcode part1]
  source 1..16: mol_type = other DNA
gcagttgtcttgatct

SEQ ID NO: 10397 - DNA, 16 bp, synthetic construct
  misc_feature 1..16: note = synthetic [barcode part1]
  source 1..16: mol_type = other DNA
ccaggtctgatctaag

SEQ ID NO: 10398 - DNA, 16 bp, synthetic construct
  misc_feature 1..16: note = synthetic [barcode part1]
  source 1..16: mol_type = other DNA
tcttggaggcggatag

SEQ ID NO: 10399 - DNA, 16 bp, synthetic construct
  misc_feature 1..16: note = synthetic [barcode part1]
  source 1..16: mol_type = other DNA
ttactctgccaggaag

SEQ ID NO: 10400 - DNA, 16 bp, synthetic construct
  misc_feature 1..16: note = synthetic [barcode part1]
  source 1..16: mol_type = other DNA
tcagtgtacgttgacg

SEQ ID NO: 10401 - DNA, 16 bp, synthetic construct
  misc_feature 1..16: note = synthetic [barcode part1]
  source 1..16: mol_type = other DNA
aatcgtgttccagttc

SEQ ID NO: 10402 - DNA, 16 bp, synthetic construct
  misc_feature 1..16: note = synthetic [barcode part1]
  source 1..16: mol_type = other DNA
ttgtgtcagatcgtct

SEQ ID NO: 10403 - DNA, 16 bp, synthetic construct
  misc_feature 1..16: note = synthetic [barcode part1]
  source 1..16: mol_type = other DNA
gtgagttatactcggc

SEQ ID NO: 10404 - DNA, 16 bp, synthetic construct
  misc_feature 1..16: note = synthetic [barcode part1]
  source 1..16: mol_type = other DNA
atcacttcaaggtggc

SEQ ID NO: 10405 - DNA, 16 bp, synthetic construct
  misc_feature 1..16: note = synthetic [barcode part1]
  source 1..16: mol_type = other DNA
gcctgtctacctatct

SEQ ID NO: 10406 - DNA, 16 bp, synthetic construct
  misc_feature 1..16: note = synthetic [barcode part1]
  source 1..16: mol_type = other DNA
tacgttcgacgatctt

SEQ ID NO: 10407 - DNA, 16 bp, synthetic construct
  misc_feature 1..16: note = synthetic [barcode part1]
  source 1..16: mol_type = other DNA
tggcggttgattcaac

SEQ ID NO: 10408 - DNA, 16 bp, synthetic construct
  misc_feature 1..16: note = synthetic [barcode part1]
  source 1..16: mol_type = other DNA
acgaatccttccggtc

SEQ ID NO: 10409 - DNA, 16 bp, synthetic construct
  misc_feature 1..16: note = synthetic [barcode part1]
  source 1..16: mol_type = other DNA
ccaacttgaacactct

SEQ ID NO: 10410 - DNA, 16 bp, synthetic construct
  misc_feature 1..16: note = synthetic [barcode part1]
  source 1..16: mol_type = other DNA
gcactaaccagtacac

SEQ ID NO: 10411 - DNA, 16 bp, synthetic construct
  misc_feature 1..16: note = synthetic [barcode part1]
  source 1..16: mol_type = other DNA
ttcctggtaactgtac

SEQ ID NO: 10412 - DNA, 16 bp, synthetic construct
  misc_feature 1..16: note = synthetic [barcode part1]
  source 1..16: mol_type = other DNA
acggtgtgactgatct

SEQ ID NO: 10413 - DNA, 16 bp, synthetic construct
  misc_feature 1..16: note = synthetic [barcode part1]
  source 1..16: mol_type = other DNA
tgcgagaattggattg

SEQ ID NO: 10414 - DNA, 16 bp, synthetic construct
  misc_feature 1..16: note = synthetic [barcode part1]
  source 1..16: mol_type = other DNA
attcaggtgtcacttc

SEQ ID NO: 10415 - DNA, 16 bp, synthetic construct
  misc_feature 1..16: note = synthetic [barcode part1]
  source 1..16: mol_type = other DNA
atagtgcacgcgtatc

SEQ ID NO: 10416 - DNA, 16 bp, synthetic construct
  misc_feature 1..16: note = synthetic [barcode part1]
  source 1..16: mol_type = other DNA
atctacgagaagtcag

SEQ ID NO: 10417 - DNA, 16 bp, synthetic construct
  misc_feature 1..16: note = synthetic [barcode part1]
  source 1..16: mol_type = other DNA
cgtaatcaaggactag

SEQ ID NO: 10418 - DNA, 16 bp, synthetic construct
  misc_feature 1..16: note = synthetic [barcode part1]
  source 1..16: mol_type = other DNA
tcactgtagtactcgt

SEQ ID NO: 10419 - DNA, 16 bp, synthetic construct
  misc_feature 1..16: note = synthetic [barcode part1]
  source 1..16: mol_type = other DNA
ttgtgtcctgtcaagt

SEQ ID NO: 10420 - DNA, 16 bp, synthetic construct
  misc_feature 1..16: note = synthetic [barcode part1]
  source 1..16: mol_type = other DNA
cgagaagtgtacgacc

SEQ ID NO: 10421 - DNA, 16 bp, synthetic construct
  misc_feature 1..16: note = synthetic [barcode part1]
  source 1..16: mol_type = other DNA
cgttaagactcagtgc

SEQ ID NO: 10422 - DNA, 16 bp, synthetic construct
  misc_feature 1..16: note = synthetic [barcode part1]
  source 1..16: mol_type = other DNA
caacctacttgtatcg

SEQ ID NO: 10423 - DNA, 16 bp, synthetic construct
  misc_feature 1..16: note = synthetic [barcode part1]
  source 1..16: mol_type = other DNA
caaggagttctggttc

SEQ ID NO: 10424 - DNA, 16 bp, synthetic construct
  misc_feature 1..16: note = synthetic [barcode part1]
  source 1..16: mol_type = other DNA
cggaattgtcaactgc

SEQ ID NO: 10425 - DNA, 16 bp, synthetic construct
  misc_feature 1..16: note = synthetic [barcode part1]
  source 1..16: mol_type = other DNA
aacacaattcggcaag

SEQ ID NO: 10426 - DNA, 16 bp, synthetic construct
  misc_feature 1..16: note = synthetic [barcode part1]
  source 1..16: mol_type = other DNA
gtgccaggattgtatc

SEQ ID NO: 10427 - DNA, 16 bp, synthetic construct
  misc_feature 1..16: note = synthetic [barcode part1]
  source 1..16: mol_type = other DNA
ttgtaggccactattc

SEQ ID NO: 10428 - DNA, 16 bp, synthetic construct
  misc_feature 1..16: note = synthetic [barcode part1]
  source 1..16: mol_type = other DNA
gacggttactgttggt

SEQ ID NO: 10429 - DNA, 16 bp, synthetic construct
  misc_feature 1..16: note = synthetic [barcode part1]
  source 1..16: mol_type = other DNA
tctcggcacgtgactt

SEQ ID NO: 10430 - DNA, 16 bp, synthetic construct
  misc_feature 1..16: note = synthetic [barcode part1]
  source 1..16: mol_type = other DNA
aacggagttctgttgc

SEQ ID NO: 10431 - DNA, 16 bp, synthetic construct
  misc_feature 1..16: note = synthetic [barcode part1]
  source 1..16: mol_type = other DNA
ttgcgatatcgtggtg

SEQ ID NO: 10432 - DNA, 16 bp, synthetic construct
  misc_feature 1..16: note = synthetic [barcode part1]
  source 1..16: mol_type = other DNA
ttcagacggtacactg

SEQ ID NO: 10433 - DNA, 16 bp, synthetic construct
  misc_feature 1..16: note = synthetic [barcode part1]
  source 1..16: mol_type = other DNA
tatctggcgacggaag

SEQ ID NO: 10434 - DNA, 16 bp, synthetic construct
  misc_feature 1..16: note = synthetic [barcode part1]
  source 1..16: mol_type = other DNA
cgaagtcgtgtacact

SEQ ID NO: 10435 - DNA, 16 bp, synthetic construct
  misc_feature 1..16: note = synthetic [barcode part1]
  source 1..16: mol_type = other DNA
tcgtgattcaagaccg

SEQ ID NO: 10436 - DNA, 16 bp, synthetic construct
  misc_feature 1..16: note = synthetic [barcode part1]
  source 1..16: mol_type = other DNA
acttgaacgccgtcct

SEQ ID NO: 10437 - DNA, 16 bp, synthetic construct
  misc_feature 1..16: note = synthetic [barcode part1]
  source 1..16: mol_type = other DNA
aactaagttcgcagag

SEQ ID NO: 10438 - DNA, 16 bp, synthetic construct
  misc_feature 1..16: note = synthetic [barcode part1]
  source 1..16: mol_type = other DNA
acgtggtacgtatcgt

SEQ ID NO: 10439 - DNA, 16 bp, synthetic construct
  misc_feature 1..16: note = synthetic [barcode part1]
  source 1..16: mol_type = other DNA
agacagatctaggact

SEQ ID NO: 10440 - DNA, 16 bp, synthetic construct
  misc_feature 1..16: note = synthetic [barcode part1]
  source 1..16: mol_type = other DNA
aagtagtgcgtggtcg

SEQ ID NO: 10441 - DNA, 16 bp, synthetic construct
  misc_feature 1..16: note = synthetic [barcode part1]
  source 1..16: mol_type = other DNA
cgcggtagaacaagtc

SEQ ID NO: 10442 - DNA, 16 bp, synthetic construct
  misc_feature 1..16: note = synthetic [barcode part1]
  source 1..16: mol_type = other DNA
attcttccggttacag

SEQ ID NO: 10443 - DNA, 16 bp, synthetic construct
  misc_feature 1..16: note = synthetic [barcode part1]
  source 1..16: mol_type = other DNA
gacttgttactatccg

SEQ ID NO: 10444 - DNA, 16 bp, synthetic construct
  misc_feature 1..16: note = synthetic [barcode part1]
  source 1..16: mol_type = other DNA
tataagtggcaggatc

SEQ ID NO: 10445 - DNA, 16 bp, synthetic construct
  misc_feature 1..16: note = synthetic [barcode part1]
  source 1..16: mol_type = other DNA
caatctggttcctgcg

SEQ ID NO: 10446 - DNA, 16 bp, synthetic construct
  misc_feature 1..16: note = synthetic [barcode part1]
  source 1..16: mol_type = other DNA
gagtacgaacctggtg

SEQ ID NO: 10447 - DNA, 16 bp, synthetic construct
  misc_feature 1..16: note = synthetic [barcode part1]
  source 1..16: mol_type = other DNA
tgtgatcacgtggttg

SEQ ID NO: 10448 - DNA, 16 bp, synthetic construct
  misc_feature 1..16: note = synthetic [barcode part1]
  source 1..16: mol_type = other DNA
tcgtattgtcttcgcc

SEQ ID NO: 10449 - DNA, 16 bp, synthetic construct
  misc_feature 1..16: note = synthetic [barcode part1]
  source 1..16: mol_type = other DNA
gacagagttaggtgcc

SEQ ID NO: 10450 - DNA, 16 bp, synthetic construct
  misc_feature 1..16: note = synthetic [barcode part1]
  source 1..16: mol_type = other DNA
tgcctgcacgacactt

SEQ ID NO: 10451 - DNA, 16 bp, synthetic construct
  misc_feature 1..16: note = synthetic [barcode part1]
  source 1..16: mol_type = other DNA
acgttgtctattcacg

SEQ ID NO: 10452 - DNA, 16 bp, synthetic construct
  misc_feature 1..16: note = synthetic [barcode part1]
  source 1..16: mol_type = other DNA
gaacgtgccgataacg

SEQ ID NO: 10453 - DNA, 16 bp, synthetic construct
  misc_feature 1..16: note = synthetic [barcode part1]
  source 1..16: mol_type = other DNA
tgtggtgtcacagtgt

SEQ ID NO: 10454 - DNA, 16 bp, synthetic construct
  misc_feature 1..16: note = synthetic [barcode part1]
  source 1..16: mol_type = other DNA
aggcgaattcaagatc

SEQ ID NO: 10455 - DNA, 16 bp, synthetic construct
  misc_feature 1..16: note = synthetic [barcode part1]
  source 1..16: mol_type = other DNA
cgtgttcctacacttc

SEQ ID NO: 10456 - DNA, 16 bp, synthetic construct
  misc_feature 1..16: note = synthetic [barcode part1]
  source 1..16: mol_type = other DNA
gtcgttattccacgcg

SEQ ID NO: 10457 - DNA, 16 bp, synthetic construct
  misc_feature 1..16: note = synthetic [barcode part1]
  source 1..16: mol_type = other DNA
ccttctggtctcttag

SEQ ID NO: 10458 - DNA, 16 bp, synthetic construct
  misc_feature 1..16: note = synthetic [barcode part1]
  source 1..16: mol_type = other DNA
tagactcagatctgcg

SEQ ID NO: 10459 - DNA, 16 bp, synthetic construct
  misc_feature 1..16: note = synthetic [barcode part1]
  source 1..16: mol_type = other DNA
taaggaagttacgtgc

SEQ ID NO: 10460 - DNA, 16 bp, synthetic construct
  misc_feature 1..16: note = synthetic [barcode part1]
  source 1..16: mol_type = other DNA
caggtgaggattccag

SEQ ID NO: 10461 - DNA, 16 bp, synthetic construct
  misc_feature 1..16: note = synthetic [barcode part1]
  source 1..16: mol_type = other DNA
tcagtgtacaccaacg

SEQ ID NO: 10462 - DNA, 16 bp, synthetic construct
  misc_feature 1..16: note = synthetic [barcode part1]
  source 1..16: mol_type = other DNA
atcgcgacctactcgt

SEQ ID NO: 10463 - DNA, 16 bp, synthetic construct
  misc_feature 1..16: note = synthetic [barcode part1]
  source 1..16: mol_type = other DNA
acttactgacaccgcc

SEQ ID NO: 10464 - DNA, 16 bp, synthetic construct
  misc_feature 1..16: note = synthetic [barcode part1]
  source 1..16: mol_type = other DNA
gtgagtgaacgagtag

SEQ ID NO: 10465 - DNA, 16 bp, synthetic construct
  misc_feature 1..16: note = synthetic [barcode part1]
  source 1..16: mol_type = other DNA
aacggactccaagacg

SEQ ID NO: 10466 - DNA, 16 bp, synthetic construct
  misc_feature 1..16: note = synthetic [barcode part1]
  source 1..16: mol_type = other DNA
gccagtggagttgaac

SEQ ID NO: 10467 - DNA, 16 bp, synthetic construct
  misc_feature 1..16: note = synthetic [barcode part1]
  source 1..16: mol_type = other DNA
cagtacacttcgccac

SEQ ID NO: 10468 - DNA, 16 bp, synthetic construct
  misc_feature 1..16: note = synthetic [barcode part1]
  source 1..16: mol_type = other DNA
ccttgtaagttgtcgt

SEQ ID NO: 10469 - DNA, 16 bp, synthetic construct
  misc_feature 1..16: note = synthetic [barcode part1]
  source 1..16: mol_type = other DNA
tcacactcggaccgtt

SEQ ID NO: 10470 - DNA, 16 bp, synthetic construct
  misc_feature 1..16: note = synthetic [barcode part1]
  source 1..16: mol_type = other DNA
accacctgtctacgac

SEQ ID NO: 10471 - DNA, 16 bp, synthetic construct
  misc_feature 1..16: note = synthetic [barcode part1]
  source 1..16: mol_type = other DNA
acgagtctaatctcct

SEQ ID NO: 10472 - DNA, 16 bp, synthetic construct
  misc_feature 1..16: note = synthetic [barcode part1]
  source 1..16: mol_type = other DNA
aatccgtagtgcctag

SEQ ID NO: 10473 - DNA, 16 bp, synthetic construct
  misc_feature 1..16: note = synthetic [barcode part1]
  source 1..16: mol_type = other DNA
taccaccgtagttatc

SEQ ID NO: 10474 - DNA, 16 bp, synthetic construct
  misc_feature 1..16: note = synthetic [barcode part1]
  source 1..16: mol_type = other DNA
atcggacagatcgtct

SEQ ID NO: 10475 - DNA, 16 bp, synthetic construct
  misc_feature 1..16: note = synthetic [barcode part1]
  source 1..16: mol_type = other DNA
gccaggtcaagagtac

SEQ ID NO: 10476 - DNA, 16 bp, synthetic construct
  misc_feature 1..16: note = synthetic [barcode part1]
  source 1..16: mol_type = other DNA
tagaagagtgtcgatc

SEQ ID NO: 10477 - DNA, 16 bp, synthetic construct
  misc_feature 1..16: note = synthetic [barcode part1]
  source 1..16: mol_type = other DNA
caatccacttgtgttg

SEQ ID NO: 10478 - DNA, 16 bp, synthetic construct
  misc_feature 1..16: note = synthetic [barcode part1]
  source 1..16: mol_type = other DNA
aatcggtattgtggcc

SEQ ID NO: 10479 - DNA, 16 bp, synthetic construct
  misc_feature 1..16: note = synthetic [barcode part1]
  source 1..16: mol_type = other DNA
ccgataactcgcgttc

SEQ ID NO: 10480 - DNA, 16 bp, synthetic construct
  misc_feature 1..16: note = synthetic [barcode part1]
  source 1..16: mol_type = other DNA
ttatcacttgcagacc

SEQ ID NO: 10481 - DNA, 16 bp, synthetic construct
  misc_feature 1..16: note = synthetic [barcode part1]
  source 1..16: mol_type = other DNA
gtcttgcctcaatctc

SEQ ID NO: 10482 - DNA, 16 bp, synthetic construct
  misc_feature 1..16: note = synthetic [barcode part1]
  source 1..16: mol_type = other DNA
gagagatactcggatt

SEQ ID NO: 10483 - DNA, 16 bp, synthetic construct
  misc_feature 1..16: note = synthetic [barcode part1]
  source 1..16: mol_type = other DNA
gcagtaggtgaagtag

SEQ ID NO: 10484 - DNA, 16 bp, synthetic construct
  misc_feature 1..16: note = synthetic [barcode part1]
  source 1..16: mol_type = other DNA
acgaggagattattgc

SEQ ID NO: 10485 - DNA, 16 bp, synthetic construct
  misc_feature 1..16: note = synthetic [barcode part1]
  source 1..16: mol_type = other DNA
cggacaagaataggtg

SEQ ID NO: 10486 - DNA, 16 bp, synthetic construct
  misc_feature 1..16: note = synthetic [barcode part1]
  source 1..16: mol_type = other DNA
tgtcacagtgtacgtg

SEQ ID NO: 10487 - DNA, 16 bp, synthetic construct
  misc_feature 1..16: note = synthetic [barcode part1]
  source 1..16: mol_type = other DNA
ttggttccttgcaagt

SEQ ID NO: 10488 - DNA, 16 bp, synthetic construct
  misc_feature 1..16: note = synthetic [barcode part1]
  source 1..16: mol_type = other DNA
acttggagacactcac

SEQ ID NO: 10489 - DNA, 16 bp, synthetic construct
  misc_feature 1..16: note = synthetic [barcode part1]
  source 1..16: mol_type = other DNA
gtaaggcgtaacagag

SEQ ID NO: 10490 - DNA, 16 bp, synthetic construct
  misc_feature 1..16: note = synthetic [barcode part1]
  source 1..16: mol_type = other DNA
gacttgaccttgtatc

SEQ ID NO: 10491 - DNA, 16 bp, synthetic construct
  misc_feature 1..16: note = synthetic [barcode part1]
  source 1..16: mol_type = other DNA
cacctgttctggaacc

SEQ ID NO: 10492 - DNA, 16 bp, synthetic construct
  misc_feature 1..16: note = synthetic [barcode part1]
  source 1..16: mol_type = other DNA
agactacgtaagaacc

SEQ ID NO: 10493 - DNA, 16 bp, synthetic construct
  misc_feature 1..16: note = synthetic [barcode part1]
  source 1..16: mol_type = other DNA
gagaacaggtgattct

SEQ ID NO: 10494 - DNA, 16 bp, synthetic construct
  misc_feature 1..16: note = synthetic [barcode part1]
  source 1..16: mol_type = other DNA
tgaccagtcctaaggt

SEQ ID NO: 10495 - DNA, 16 bp, synthetic construct
  misc_feature 1..16: note = synthetic [barcode part1]
  source 1..16: mol_type = other DNA
caagtctaagtggtag

SEQ ID NO: 10496 - DNA, 16 bp, synthetic construct
  misc_feature 1..16: note = synthetic [barcode part1]
  source 1..16: mol_type = other DNA
aatagacctcgtccag

SEQ ID NO: 10497 - DNA, 16 bp, synthetic construct
  misc_feature 1..16: note = synthetic [barcode part1]
  source 1..16: mol_type = other DNA
gcgtgaacttgtatcg

SEQ ID NO: 10498 - DNA, 16 bp, synthetic construct
  misc_feature 1..16: note = synthetic [barcode part1]
  source 1..16: mol_type = other DNA
cacggaccgttatctc

SEQ ID NO: 10499 - DNA, 16 bp, synthetic construct
  misc_feature 1..16: note = synthetic [barcode part1]
  source 1..16: mol_type = other DNA
ttagattgtgcggaag

SEQ ID NO: 10500 - DNA, 16 bp, synthetic construct
  misc_feature 1..16: note = synthetic [barcode part1]
  source 1..16: mol_type = other DNA
tgttgacttaactccg

SEQ ID NO: 10501 - DNA, 16 bp, synthetic construct
  misc_feature 1..16: note = synthetic [barcode part1]
  source 1..16: mol_type = other DNA
gagtgaacggaattct

SEQ ID NO: 10502 - DNA, 16 bp, synthetic construct
  misc_feature 1..16: note = synthetic [barcode part1]
  source 1..16: mol_type = other DNA
gacggatcagaatccg

SEQ ID NO: 10503 - DNA, 16 bp, synthetic construct
  misc_feature 1..16: note = synthetic [barcode part1]
  source 1..16: mol_type = other DNA
tgaacctcgttgcctg

SEQ ID NO: 10504 - DNA, 16 bp, synthetic construct
  misc_feature 1..16: note = synthetic [barcode part1]
  source 1..16: mol_type = other DNA
acgtcaactctatcac

SEQ ID NO: 10505 - DNA, 16 bp, synthetic construct
  misc_feature 1..16: note = synthetic [barcode part1]
  source 1..16: mol_type = other DNA
gttctgcggatactcc

SEQ ID NO: 10506 - DNA, 16 bp, synthetic construct
  misc_feature 1..16: note = synthetic [barcode part1]
  source 1..16: mol_type = other DNA
ttctgcgaactgccac

SEQ ID NO: 10507 - DNA, 16 bp, synthetic construct
  misc_feature 1..16: note = synthetic [barcode part1]
  source 1..16: mol_type = other DNA
tcgttacggattcact

SEQ ID NO: 10508 - DNA, 16 bp, synthetic construct
  misc_feature 1..16: note = synthetic [barcode part1]
  source 1..16: mol_type = other DNA
ttgaggtagactctgc

SEQ ID NO: 10509 - DNA, 16 bp, synthetic construct
  misc_feature 1..16: note = synthetic [barcode part1]
  source 1..16: mol_type = other DNA
ccttgtgttctcgtac

SEQ ID NO: 10510 - DNA, 16 bp, synthetic construct
  misc_feature 1..16: note = synthetic [barcode part1]
  source 1..16: mol_type = other DNA
gatcgtactgattctc

SEQ ID NO: 10511 - DNA, 16 bp, synthetic construct
  misc_feature 1..16: note = synthetic [barcode part1]
  source 1..16: mol_type = other DNA
tctggaatagtgtcgc

SEQ ID NO: 10512 - DNA, 16 bp, synthetic construct
  misc_feature 1..16: note = synthetic [barcode part1]
  source 1..16: mol_type = other DNA
tgtggtgcgagtaggt

SEQ ID NO: 10513 - DNA, 16 bp, synthetic construct
  misc_feature 1..16: note = synthetic [barcode part1]
  source 1..16: mol_type = other DNA
tcttagtgtgcaactc

SEQ ID NO: 10514 - DNA, 16 bp, synthetic construct
  misc_feature 1..16: note = synthetic [barcode part1]
  source 1..16: mol_type = other DNA
cgtacagtgagagatt

SEQ ID NO: 10515 - DNA, 16 bp, synthetic construct
  misc_feature 1..16: note = synthetic [barcode part1]
  source 1..16: mol_type = other DNA
tgcgattaggatagtg

SEQ ID NO: 10516 - DNA, 16 bp, synthetic construct
  misc_feature 1..16: note = synthetic [barcode part1]
  source 1..16: mol_type = other DNA
atacgtcgccttccag

SEQ ID NO: 10517 - DNA, 16 bp, synthetic construct
  misc_feature 1..16: note = synthetic [barcode part1]
  source 1..16: mol_type = other DNA
tccagtcctgattctc

SEQ ID NO: 10518 - DNA, 16 bp, synthetic construct
  misc_feature 1..16: note = synthetic [barcode part1]
  source 1..16: mol_type = other DNA
tacgtccacagagatc

SEQ ID NO: 10519 - DNA, 16 bp, synthetic construct
  misc_feature 1..16: note = synthetic [barcode part1]
  source 1..16: mol_type = other DNA
tctgtgaggatagtag

SEQ ID NO: 10520 - DNA, 16 bp, synthetic construct
  misc_feature 1..16: note = synthetic [barcode part1]
  source 1..16: mol_type = other DNA
agtggcacgagataag

SEQ ID NO: 10521 - DNA, 16 bp, synthetic construct
  misc_feature 1..16: note = synthetic [barcode part1]
  source 1..16: mol_type = other DNA
ttcgagtctgcacaag

SEQ ID NO: 10522 - DNA, 16 bp, synthetic construct
  misc_feature 1..16: note = synthetic [barcode part1]
  source 1..16: mol_type = other DNA
gattccagaatagacg

SEQ ID NO: 10523 - DNA, 16 bp, synthetic construct
  misc_feature 1..16: note = synthetic [barcode part1]
  source 1..16: mol_type = other DNA
gacgcgttaactacac

SEQ ID NO: 10524 - DNA, 16 bp, synthetic construct
  misc_feature 1..16: note = synthetic [barcode part1]
  source 1..16: mol_type = other DNA
cgttacttcgccactt

SEQ ID NO: 10525 - DNA, 16 bp, synthetic construct
  misc_feature 1..16: note = synthetic [barcode part1]
  source 1..16: mol_type = other DNA
atcttacctgcacggc

SEQ ID NO: 10526 - DNA, 16 bp, synthetic construct
  misc_feature 1..16: note = synthetic [barcode part1]
  source 1..16: mol_type = other DNA
ttcgtgcgtcgttgac

SEQ ID NO: 10527 - DNA, 16 bp, synthetic construct
  misc_feature 1..16: note = synthetic [barcode part1]
  source 1..16: mol_type = other DNA
atcagtgaataacggc

SEQ ID NO: 10528 - DNA, 16 bp, synthetic construct
  misc_feature 1..16: note = synthetic [barcode part1]
  source 1..16: mol_type = other DNA
taaccgatcctccttc

SEQ ID NO: 10529 - DNA, 16 bp, synthetic construct
  misc_feature 1..16: note = synthetic [barcode part1]
  source 1..16: mol_type = other DNA
tgtgtcaggaggactg

SEQ ID NO: 10530 - DNA, 16 bp, synthetic construct
  misc_feature 1..16: note = synthetic [barcode part1]
  source 1..16: mol_type = other DNA
gttctcggcctagtac

SEQ ID NO: 10531 - DNA, 16 bp, synthetic construct
  misc_feature 1..16: note = synthetic [barcode part1]
  source 1..16: mol_type = other DNA
cacaatctgtaggtcg

SEQ ID NO: 10532 - DNA, 16 bp, synthetic construct
  misc_feature 1..16: note = synthetic [barcode part1]
  source 1..16: mol_type = other DNA
tagactcgtcttgccg

SEQ ID NO: 10533 - DNA, 16 bp, synthetic construct
  misc_feature 1..16: note = synthetic [barcode part1]
  source 1..16: mol_type = other DNA
cggtaagaacaagacg

SEQ ID NO: 10534 - DNA, 16 bp, synthetic construct
  misc_feature 1..16: note = synthetic [barcode part1]
  source 1..16: mol_type = other DNA
aatagagtggcctctc

SEQ ID NO: 10535 - DNA, 16 bp, synthetic construct
  misc_feature 1..16: note = synthetic [barcode part1]
  source 1..16: mol_type = other DNA
taggaggtgtgaccac

SEQ ID NO: 10536 - DNA, 16 bp, synthetic construct
  misc_feature 1..16: note = synthetic [barcode part1]
  source 1..16: mol_type = other DNA
gacaacgaggtagtag

SEQ ID NO: 10537 - DNA, 16 bp, synthetic construct
  misc_feature 1..16: note = synthetic [barcode part1]
  source 1..16: mol_type = other DNA
aggtctatactctgtc

SEQ ID NO: 10538 - DNA, 16 bp, synthetic construct
  misc_feature 1..16: note = synthetic [barcode part1]
  source 1..16: mol_type = other DNA
cgaggaacttcagttc

SEQ ID NO: 10539 - DNA, 16 bp, synthetic construct
  misc_feature 1..16: note = synthetic [barcode part1]
  source 1..16: mol_type = other DNA
cgaccacttcagtctg

SEQ ID NO: 10540 - DNA, 16 bp, synthetic construct
  misc_feature 1..16: note = synthetic [barcode part1]
  source 1..16: mol_type = other DNA
gcaacactgtggtact

SEQ ID NO: 10541 - DNA, 16 bp, synthetic construct
  misc_feature 1..16: note = synthetic [barcode part1]
  source 1..16: mol_type = other DNA
tggcagaatctgcgag

SEQ ID NO: 10542 - DNA, 16 bp, synthetic construct
  misc_feature 1..16: note = synthetic [barcode part1]
  source 1..16: mol_type = other DNA
actggtaacgagacgc

SEQ ID NO: 10543 - DNA, 16 bp, synthetic construct
  misc_feature 1..16: note = synthetic [barcode part1]
  source 1..16: mol_type = other DNA
cggaacttagtaccgt

SEQ ID NO: 10544 - DNA, 16 bp, synthetic construct
  misc_feature 1..16: note = synthetic [barcode part1]
  source 1..16: mol_type = other DNA
cagtccgtctaacaag

SEQ ID NO: 10545 - DNA, 16 bp, synthetic construct
  misc_feature 1..16: note = synthetic [barcode part1]
  source 1..16: mol_type = other DNA
cgtaaggttagtaacg

SEQ ID NO: 10546 - DNA, 16 bp, synthetic construct
  misc_feature 1..16: note = synthetic [barcode part1]
  source 1..16: mol_type = other DNA
cgttcgcggatcttgt

SEQ ID NO: 10547 - DNA, 16 bp, synthetic construct
  misc_feature 1..16: note = synthetic [barcode part1]
  source 1..16: mol_type = other DNA
tctatacgaccgccac

SEQ ID NO: 10548 - DNA, 16 bp, synthetic construct
  misc_feature 1..16: note = synthetic [barcode part1]
  source 1..16: mol_type = other DNA
cgttgataggaagttg

SEQ ID NO: 10549 - DNA, 16 bp, synthetic construct
  misc_feature 1..16: note = synthetic [barcode part1]
  source 1..16: mol_type = other DNA
ttggtacggttcctcg

SEQ ID NO: 10550 - DNA, 16 bp, synthetic construct
  misc_feature 1..16: note = synthetic [barcode part1]
  source 1..16: mol_type = other DNA
gtagagacttccacgt

SEQ ID NO: 10551 - DNA, 16 bp, synthetic construct
  misc_feature 1..16: note = synthetic [barcode part1]
  source 1..16: mol_type = other DNA
agtgtcttctgcagag

SEQ ID NO: 10552 - DNA, 16 bp, synthetic construct
  misc_feature 1..16: note = synthetic [barcode part1]
  source 1..16: mol_type = other DNA
acggcacactatagtc

SEQ ID NO: 10553 - DNA, 16 bp, synthetic construct
  misc_feature 1..16: note = synthetic [barcode part1]
  source 1..16: mol_type = other DNA
tgttcttacgtcctcg

SEQ ID NO: 10554 - DNA, 16 bp, synthetic construct
  misc_feature 1..16: note = synthetic [barcode part1]
  source 1..16: mol_type = other DNA
agaagtaactcggcgc

SEQ ID NO: 10555 - DNA, 16 bp, synthetic construct
  misc_feature 1..16: note = synthetic [barcode part1]
  source 1..16: mol_type = other DNA
cgttattgtctagacc

SEQ ID NO: 10556 - DNA, 16 bp, synthetic construct
  misc_feature 1..16: note = synthetic [barcode part1]
  source 1..16: mol_type = other DNA
tcctagtgtgcgacct

SEQ ID NO: 10557 - DNA, 16 bp, synthetic construct
  misc_feature 1..16: note = synthetic [barcode part1]
  source 1..16: mol_type = other DNA
aggatccaagtagact

SEQ ID NO: 10558 - DNA, 16 bp, synthetic construct
  misc_feature 1..16: note = synthetic [barcode part1]
  source 1..16: mol_type = other DNA
tcgcgtgtctctcaag

SEQ ID NO: 10559 - DNA, 16 bp, synthetic construct
  misc_feature 1..16: note = synthetic [barcode part1]
  source 1..16: mol_type = other DNA
gtaggtctaacaaggt

SEQ ID NO: 10560 - DNA, 16 bp, synthetic construct
  misc_feature 1..16: note = synthetic [barcode part1]
  source 1..16: mol_type = other DNA
actccaccttaacctc

SEQ ID NO: 10561 - DNA, 16 bp, synthetic construct
  misc_feature 1..16: note = synthetic [barcode part1]
  source 1..16: mol_type = other DNA
cgtataaccacgcagt

SEQ ID NO: 10562 - DNA, 16 bp, synthetic construct
  misc_feature 1..16: note = synthetic [barcode part1]
  source 1..16: mol_type = other DNA
aggttgcgtctagtgt

SEQ ID NO: 10563 - DNA, 16 bp, synthetic construct
  misc_feature 1..16: note = synthetic [barcode part1]
  source 1..16: mol_type = other DNA
aacaggcaagttctag

SEQ ID NO: 10564 - DNA, 16 bp, synthetic construct
  misc_feature 1..16: note = synthetic [barcode part1]
  source 1..16: mol_type = other DNA
cgttccgcagatacct

SEQ ID NO: 10565 - DNA, 16 bp, synthetic construct
  misc_feature 1..16: note = synthetic [barcode part1]
  source 1..16: mol_type = other DNA
ttacaggaggcacttc

SEQ ID NO: 10566 - DNA, 16 bp, synthetic construct
  misc_feature 1..16: note = synthetic [barcode part1]
  source 1..16: mol_type = other DNA
cacgtctagtacgaac

SEQ ID NO: 10567 - DNA, 16 bp, synthetic construct
  misc_feature 1..16: note = synthetic [barcode part1]
  source 1..16: mol_type = other DNA
gtatcctaatccggtt

SEQ ID NO: 10568 - DNA, 16 bp, synthetic construct
  misc_feature 1..16: note = synthetic [barcode part1]
  source 1..16: mol_type = other DNA
aggacgaaggtctacc

SEQ ID NO: 10569 - DNA, 16 bp, synthetic construct
  misc_feature 1..16: note = synthetic [barcode part1]
  source 1..16: mol_type = other DNA
cgagaccaactctaac

SEQ ID NO: 10570 - DNA, 16 bp, synthetic construct
  misc_feature 1..16: note = synthetic [barcode part1]
  source 1..16: mol_type = other DNA
ccggagtctatctacc

SEQ ID NO: 10571 - DNA, 16 bp, synthetic construct
  misc_feature 1..16: note = synthetic [barcode part1]
  source 1..16: mol_type = other DNA
agttccttcggcacgt

SEQ ID NO: 10572 - DNA, 16 bp, synthetic construct
  misc_feature 1..16: note = synthetic [barcode part1]
  source 1..16: mol_type = other DNA
gtattggccaacacac

SEQ ID NO: 10573 - DNA, 16 bp, synthetic construct
  misc_feature 1..16: note = synthetic [barcode part1]
  source 1..16: mol_type = other DNA
gtcaaggaccgtacag

SEQ ID NO: 10574 - DNA, 16 bp, synthetic construct
  misc_feature 1..16: note = synthetic [barcode part1]
  source 1..16: mol_type = other DNA
tgaggtcgagactctt

SEQ ID NO: 10575 - DNA, 16 bp, synthetic construct
  misc_feature 1..16: note = synthetic [barcode part1]
  source 1..16: mol_type = other DNA
tcgtgtcgaattgttc

SEQ ID NO: 10576 - DNA, 16 bp, synthetic construct
  misc_feature 1..16: note = synthetic [barcode part1]
  source 1..16: mol_type = other DNA
aggactctattcacct

SEQ ID NO: 10577 - DNA, 16 bp, synthetic construct
  misc_feature 1..16: note = synthetic [barcode part1]
  source 1..16: mol_type = other DNA
aatcgtagactggagt

SEQ ID NO: 10578 - DNA, 16 bp, synthetic construct
  misc_feature 1..16: note = synthetic [barcode part1]
  source 1..16: mol_type = other DNA
tccgtcacgtactgac

SEQ ID NO: 10579 - DNA, 16 bp, synthetic construct
  misc_feature 1..16: note = synthetic [barcode part1]
  source 1..16: mol_type = other DNA
gcggatatctggaacg

SEQ ID NO: 10580 - DNA, 16 bp, synthetic construct
  misc_feature 1..16: note = synthetic [barcode part1]
  source 1..16: mol_type = other DNA
tcgatctgtccttcgt

SEQ ID NO: 10581 - DNA, 16 bp, synthetic construct
  misc_feature 1..16: note = synthetic [barcode part1]
  source 1..16: mol_type = other DNA
atctggtaagagtgtg

SEQ ID NO: 10582 - DNA, 16 bp, synthetic construct
  misc_feature 1..16: note = synthetic [barcode part1]
  source 1..16: mol_type = other DNA
cgagattcttctcctc

SEQ ID NO: 10583 - DNA, 16 bp, synthetic construct
  misc_feature 1..16: note = synthetic [barcode part1]
  source 1..16: mol_type = other DNA
accgcctgaactcact

SEQ ID NO: 10584 - DNA, 16 bp, synthetic construct
  misc_feature 1..16: note = synthetic [barcode part1]
  source 1..16: mol_type = other DNA
aagattcgtaggtggt

SEQ ID NO: 10585 - DNA, 16 bp, synthetic construct
  misc_feature 1..16: note = synthetic [barcode part1]
  source 1..16: mol_type = other DNA
attgtccgtcctacct

SEQ ID NO: 10586 - DNA, 16 bp, synthetic construct
  misc_feature 1..16: note = synthetic [barcode part1]
  source 1..16: mol_type = other DNA
accgagtgtaggaatt

SEQ ID NO: 10587 - DNA, 16 bp, synthetic construct
  misc_feature 1..16: note = synthetic [barcode part1]
  source 1..16: mol_type = other DNA
gtgagagtcggtaacc

SEQ ID NO: 10588 - DNA, 16 bp, synthetic construct
  misc_feature 1..16: note = synthetic [barcode part1]
  source 1..16: mol_type = other DNA
tgcgtcgccttaactg

SEQ ID NO: 10589 - DNA, 16 bp, synthetic construct
  misc_feature 1..16: note = synthetic [barcode part1]
  source 1..16: mol_type = other DNA
cctaacctgtggtcac

SEQ ID NO: 10590 - DNA, 16 bp, synthetic construct
  misc_feature 1..16: note = synthetic [barcode part1]
  source 1..16: mol_type = other DNA
cgatctccaatcacgc

SEQ ID NO: 10591 - DNA, 16 bp, synthetic construct
  misc_feature 1..16: note = synthetic [barcode part1]
  source 1..16: mol_type = other DNA
tcacctacaggatctt

SEQ ID NO: 10592 - DNA, 16 bp, synthetic construct
  misc_feature 1..16: note = synthetic [barcode part1]
  source 1..16: mol_type = other DNA
tgtcacagaggtcttg

SEQ ID NO: 10593 - DNA, 16 bp, synthetic construct
  misc_feature 1..16: note = synthetic [barcode part1]
  source 1..16: mol_type = other DNA
tactgcctggagaatc

SEQ ID NO: 10594 - DNA, 16 bp, synthetic construct
  misc_feature 1..16: note = synthetic [barcode part1]
  source 1..16: mol_type = other DNA
tctgtgagaacctgtg

SEQ ID NO: 10595 - DNA, 16 bp, synthetic construct
  misc_feature 1..16: note = synthetic [barcode part1]
  source 1..16: mol_type = other DNA
agagtctaacaccacc

SEQ ID NO: 10596 - DNA, 16 bp, synthetic construct
  misc_feature 1..16: note = synthetic [barcode part1]
  source 1..16: mol_type = other DNA
tcacaccttgtcaggc

SEQ ID NO: 10597 - DNA, 16 bp, synthetic construct
  misc_feature 1..16: note = synthetic [barcode part1]
  source 1..16: mol_type = other DNA
cagtatacggcgaggt

SEQ ID NO: 10598 - DNA, 16 bp, synthetic construct
  misc_feature 1..16: note = synthetic [barcode part1]
  source 1..16: mol_type = other DNA
tacagacttaccttgc

SEQ ID NO: 10599 - DNA, 16 bp, synthetic construct
  misc_feature 1..16: note = synthetic [barcode part1]
  source 1..16: mol_type = other DNA
gtactccaagagtgtc

SEQ ID NO: 10600 - DNA, 16 bp, synthetic construct
  misc_feature 1..16: note = synthetic [barcode part1]
  source 1..16: mol_type = other DNA
tacgttcagatcgtct

SEQ ID NO: 10601 - DNA, 16 bp, synthetic construct
  misc_feature 1..16: note = synthetic [barcode part1]
  source 1..16: mol_type = other DNA
cagagtcaccagttgt

SEQ ID NO: 10602 - DNA, 16 bp, synthetic construct
  misc_feature 1..16: note = synthetic [barcode part1]
  source 1..16: mol_type = other DNA
ttgagaaggagtggtg

SEQ ID NO: 10603 - DNA, 16 bp, synthetic construct
  misc_feature 1..16: note = synthetic [barcode part1]
  source 1..16: mol_type = other DNA
gcaagaacggcgatct

SEQ ID NO: 10604 - DNA, 16 bp, synthetic construct
  misc_feature 1..16: note = synthetic [barcode part1]
  source 1..16: mol_type = other DNA
agttacaccagtctct

SEQ ID NO: 10605 - DNA, 16 bp, synthetic construct
  misc_feature 1..16: note = synthetic [barcode part1]
  source 1..16: mol_type = other DNA
tacctattcgcggtgc

SEQ ID NO: 10606 - DNA, 16 bp, synthetic construct
  misc_feature 1..16: note = synthetic [barcode part1]
  source 1..16: mol_type = other DNA
aacactgaccacagtc

SEQ ID NO: 10607 - DNA, 16 bp, synthetic construct
  misc_feature 1..16: note = synthetic [barcode part1]
  source 1..16: mol_type = other DNA
attactctcgtagacc

SEQ ID NO: 10608 - DNA, 16 bp, synthetic construct
  misc_feature 1..16: note = synthetic [barcode part1]
  source 1..16: mol_type = other DNA
aactgcacacaaccac

SEQ ID NO: 10609 - DNA, 16 bp, synthetic construct
  misc_feature 1..16: note = synthetic [barcode part1]
  source 1..16: mol_type = other DNA
accaggtggtaatcct

SEQ ID NO: 10610 - DNA, 16 bp, synthetic construct
  misc_feature 1..16: note = synthetic [barcode part1]
  source 1..16: mol_type = other DNA
tagaattgccgtggtc

SEQ ID NO: 10611 - DNA, 16 bp, synthetic construct
  misc_feature 1..16: note = synthetic [barcode part1]
  source 1..16: mol_type = other DNA
gtgagagtgtaaggac

SEQ ID NO: 10612 - DNA, 16 bp, synthetic construct
  misc_feature 1..16: note = synthetic [barcode part1]
  source 1..16: mol_type = other DNA
attggaagtcgtgtag

SEQ ID NO: 10613 - DNA, 16 bp, synthetic construct
  misc_feature 1..16: note = synthetic [barcode part1]
  source 1..16: mol_type = other DNA
tctgttatcaacgcac

SEQ ID NO: 10614 - DNA, 16 bp, synthetic construct
  misc_feature 1..16: note = synthetic [barcode part1]
  source 1..16: mol_type = other DNA
tgtcggatattctcgt

SEQ ID NO: 10615 - DNA, 16 bp, synthetic construct
  misc_feature 1..16: note = synthetic [barcode part1]
  source 1..16: mol_type = other DNA
tgtcctggtaggtctc

SEQ ID NO: 10616 - DNA, 16 bp, synthetic construct
  misc_feature 1..16: note = synthetic [barcode part1]
  source 1..16: mol_type = other DNA
ccagtgccaatatacg

SEQ ID NO: 10617 - DNA, 16 bp, synthetic construct
  misc_feature 1..16: note = synthetic [barcode part1]
  source 1..16: mol_type = other DNA
cacctactgtcgtgac

SEQ ID NO: 10618 - DNA, 16 bp, synthetic construct
  misc_feature 1..16: note = synthetic [barcode part1]
  source 1..16: mol_type = other DNA
gcgcaacagaagatcc

SEQ ID NO: 10619 - DNA, 16 bp, synthetic construct
  misc_feature 1..16: note = synthetic [barcode part1]
  source 1..16: mol_type = other DNA
agtgcagtgtcttcag

SEQ ID NO: 10620 - DNA, 16 bp, synthetic construct
  misc_feature 1..16: note = synthetic [barcode part1]
  source 1..16: mol_type = other DNA
tgcaaggaacttagtg

SEQ ID NO: 10621 - DNA, 16 bp, synthetic construct
  misc_feature 1..16: note = synthetic [barcode part1]
  source 1..16: mol_type = other DNA
gtacagtatcgacacc

SEQ ID NO: 10622 - DNA, 16 bp, synthetic construct
  misc_feature 1..16: note = synthetic [barcode part1]
  source 1..16: mol_type = other DNA
cctgagagaccaactt

SEQ ID NO: 10623 - DNA, 16 bp, synthetic construct
  misc_feature 1..16: note = synthetic [barcode part1]
  source 1..16: mol_type = other DNA
gtgacttccgtacctg

SEQ ID NO: 10624 - DNA, 16 bp, synthetic construct
  misc_feature 1..16: note = synthetic [barcode part1]
  source 1..16: mol_type = other DNA
accagtggagtgttct

SEQ ID NO: 10625 - DNA, 16 bp, synthetic construct
  misc_feature 1..16: note = synthetic [barcode part1]
  source 1..16: mol_type = other DNA
gaacctacgttctgcc

SEQ ID NO: 10626 - DNA, 16 bp, synthetic construct
  misc_feature 1..16: note = synthetic [barcode part1]
  source 1..16: mol_type = other DNA
gcgaactaggaaccgt

SEQ ID NO: 10627 - DNA, 16 bp, synthetic construct
  misc_feature 1..16: note = synthetic [barcode part1]
  source 1..16: mol_type = other DNA
cgtataaccgttacct

SEQ ID NO: 10628 - DNA, 16 bp, synthetic construct
  misc_feature 1..16: note = synthetic [barcode part1]
  source 1..16: mol_type = other DNA
taggactgacttcgac

SEQ ID NO: 10629 - DNA, 16 bp, synthetic construct
  misc_feature 1..16: note = synthetic [barcode part1]
  source 1..16: mol_type = other DNA
cgaccagaatcaactc

SEQ ID NO: 10630 - DNA, 16 bp, synthetic construct
  misc_feature 1..16: note = synthetic [barcode part1]
  source 1..16: mol_type = other DNA
gttcttgacggagact

SEQ ID NO: 10631 - DNA, 16 bp, synthetic construct
  misc_feature 1..16: note = synthetic [barcode part1]
  source 1..16: mol_type = other DNA
acttgacctgagtcag

SEQ ID NO: 10632 - DNA, 16 bp, synthetic construct
  misc_feature 1..16: note = synthetic [barcode part1]
  source 1..16: mol_type = other DNA
tacacctcgttcctgt

SEQ ID NO: 10633 - DNA, 16 bp, synthetic construct
  misc_feature 1..16: note = synthetic [barcode part1]
  source 1..16: mol_type = other DNA
aggtctagtccagatc

SEQ ID NO: 10634 - DNA, 16 bp, synthetic construct
  misc_feature 1..16: note = synthetic [barcode part1]
  source 1..16: mol_type = other DNA
agaggtagtgatctgt

SEQ ID NO: 10635 - DNA, 16 bp, synthetic construct
  misc_feature 1..16: note = synthetic [barcode part1]
  source 1..16: mol_type = other DNA
gtctaagtattgcctc

SEQ ID NO: 10636 - DNA, 16 bp, synthetic construct
  misc_feature 1..16: note = synthetic [barcode part1]
  source 1..16: mol_type = other DNA
caacaacttggatcgc

SEQ ID NO: 10637 - DNA, 16 bp, synthetic construct
  misc_feature 1..16: note = synthetic [barcode part1]
  source 1..16: mol_type = other DNA
tattgcgcaattggcg

SEQ ID NO: 10638 - DNA, 16 bp, synthetic construct
  misc_feature 1..16: note = synthetic [barcode part1]
  source 1..16: mol_type = other DNA
atcaagacagtacgtg

SEQ ID NO: 10639 - DNA, 16 bp, synthetic construct
  misc_feature 1..16: note = synthetic [barcode part1]
  source 1..16: mol_type = other DNA
tgcaagtgtctcgtcc

SEQ ID NO: 10640 - DNA, 16 bp, synthetic construct
  misc_feature 1..16: note = synthetic [barcode part1]
  source 1..16: mol_type = other DNA
gtaattggtcgcgtgt

SEQ ID NO: 10641 - DNA, 16 bp, synthetic construct
  misc_feature 1..16: note = synthetic [barcode part1]
  source 1..16: mol_type = other DNA
tgtgtagttgtacggc

SEQ ID NO: 10642 - DNA, 16 bp, synthetic construct
  misc_feature 1..16: note = synthetic [barcode part1]
  source 1..16: mol_type = other DNA
cagaactagagaaggc

SEQ ID NO: 10643 - DNA, 16 bp, synthetic construct
  misc_feature 1..16: note = synthetic [barcode part1]
  source 1..16: mol_type = other DNA
atcgaataggcgtagt

SEQ ID NO: 10644 - DNA, 16 bp, synthetic construct
  misc_feature 1..16: note = synthetic [barcode part1]
  source 1..16: mol_type = other DNA
gatccggtatatcttc

SEQ ID NO: 10645 - DNA, 16 bp, synthetic construct
  misc_feature 1..16: note = synthetic [barcode part1]
  source 1..16: mol_type = other DNA
acttccacctacgtct

SEQ ID NO: 10646 - DNA, 16 bp, synthetic construct
  misc_feature 1..16: note = synthetic [barcode part1]
  source 1..16: mol_type = other DNA
gtggccgactgatatt

SEQ ID NO: 10647 - DNA, 16 bp, synthetic construct
  misc_feature 1..16: note = synthetic [barcode part1]
  source 1..16: mol_type = other DNA
gtcctgtctacgtgac

SEQ ID NO: 10648 - DNA, 16 bp, synthetic construct
  misc_feature 1..16: note = synthetic [barcode part1]
  source 1..16: mol_type = other DNA
gatagtcgacttggtc

SEQ ID NO: 10649 - DNA, 16 bp, synthetic construct
  misc_feature 1..16: note = synthetic [barcode part1]
  source 1..16: mol_type = other DNA
cactcgtgcagataac

SEQ ID NO: 10650 - DNA, 16 bp, synthetic construct
  misc_feature 1..16: note = synthetic [barcode part1]
  source 1..16: mol_type = other DNA
cactcaccacttgttc

SEQ ID NO: 10651 - DNA, 16 bp, synthetic construct
  misc_feature 1..16: note = synthetic [barcode part1]
  source 1..16: mol_type = other DNA
atcctatacgattgcc

SEQ ID NO: 10652 - DNA, 16 bp, synthetic construct
  misc_feature 1..16: note = synthetic [barcode part1]
  source 1..16: mol_type = other DNA
agaacgactgcggact

SEQ ID NO: 10653 - DNA, 16 bp, synthetic construct
  misc_feature 1..16: note = synthetic [barcode part1]
  source 1..16: mol_type = other DNA
atcttcaacttggtgc

SEQ ID NO: 10654 - DNA, 16 bp, synthetic construct
  misc_feature 1..16: note = synthetic [barcode part1]
  source 1..16: mol_type = other DNA
acacgttctgtgcaag

SEQ ID NO: 10655 - DNA, 16 bp, synthetic construct
  misc_feature 1..16: note = synthetic [barcode part1]
  source 1..16: mol_type = other DNA
ttaggcaggcaggatc

SEQ ID NO: 10656 - DNA, 16 bp, synthetic construct
  misc_feature 1..16: note = synthetic [barcode part1]
  source 1..16: mol_type = other DNA
ttgttgttggaacggc

SEQ ID NO: 10657 - DNA, 16 bp, synthetic construct
  misc_feature 1..16: note = synthetic [barcode part1]
  source 1..16: mol_type = other DNA
acctcactgaagagtc

SEQ ID NO: 10658 - DNA, 16 bp, synthetic construct
  misc_feature 1..16: note = synthetic [barcode part1]
  source 1..16: mol_type = other DNA
ttccaacggcctgtgt

SEQ ID NO: 10659 - DNA, 16 bp, synthetic construct
  misc_feature 1..16: note = synthetic [barcode part1]
  source 1..16: mol_type = other DNA
aacttctccggtacgc

SEQ ID NO: 10660 - DNA, 16 bp, synthetic construct
  misc_feature 1..16: note = synthetic [barcode part1]
  source 1..16: mol_type = other DNA
gttgaacttcaacggc

SEQ ID NO: 10661 - DNA, 16 bp, synthetic construct
  misc_feature 1..16: note = synthetic [barcode part1]
  source 1..16: mol_type = other DNA
aggcagtaaccgtgtg

SEQ ID NO: 10662 - DNA, 16 bp, synthetic construct
  misc_feature 1..16: note = synthetic [barcode part1]
  source 1..16: mol_type = other DNA
gacttagtcaacgacc

SEQ ID NO: 10663 - DNA, 16 bp, synthetic construct
  misc_feature 1..16: note = synthetic [barcode part1]
  source 1..16: mol_type = other DNA
ttgtgtgagtctcttg

SEQ ID NO: 10664 - DNA, 16 bp, synthetic construct
  misc_feature 1..16: note = synthetic [barcode part1]
  source 1..16: mol_type = other DNA
agtgtggaacagtccg

SEQ ID NO: 10665 - DNA, 16 bp, synthetic construct
  misc_feature 1..16: note = synthetic [barcode part1]
  source 1..16: mol_type = other DNA
tgatcgagatcgactc

SEQ ID NO: 10666 - DNA, 16 bp, synthetic construct
  misc_feature 1..16: note = synthetic [barcode part1]
  source 1..16: mol_type = other DNA
gttctactcgtcgtct

SEQ ID NO: 10667 - DNA, 16 bp, synthetic construct
  misc_feature 1..16: note = synthetic [barcode part1]
  source 1..16: mol_type = other DNA
tagtgacgactaccac

SEQ ID NO: 10668 - DNA, 16 bp, synthetic construct
  misc_feature 1..16: note = synthetic [barcode part1]
  source 1..16: mol_type = other DNA
taacgcggtcacctct

SEQ ID NO: 10669 - DNA, 16 bp, synthetic construct
  misc_feature 1..16: note = synthetic [barcode part1]
  source 1..16: mol_type = other DNA
caacacttagacagag

SEQ ID NO: 10670 - DNA, 16 bp, synthetic construct
  misc_feature 1..16: note = synthetic [barcode part1]
  source 1..16: mol_type = other DNA
gaagaacggtacactt

SEQ ID NO: 10671 - DNA, 16 bp, synthetic construct
  misc_feature 1..16: note = synthetic [barcode part1]
  source 1..16: mol_type = other DNA
tcgaacgacgagttct

SEQ ID NO: 10672 - DNA, 16 bp, synthetic construct
  misc_feature 1..16: note = synthetic [barcode part1]
  source 1..16: mol_type = other DNA
tcgagttccttgcacg

SEQ ID NO: 10673 - DNA, 16 bp, synthetic construct
  misc_feature 1..16: note = synthetic [barcode part1]
  source 1..16: mol_type = other DNA
cggacctgtctataag

SEQ ID NO: 10674 - DNA, 16 bp, synthetic construct
  misc_feature 1..16: note = synthetic [barcode part1]
  source 1..16: mol_type = other DNA
aatacagtactaggcg

SEQ ID NO: 10675 - DNA, 16 bp, synthetic construct
  misc_feature 1..16: note = synthetic [barcode part1]
  source 1..16: mol_type = other DNA
atcggcgtacttcgtc

SEQ ID NO: 10676 - DNA, 16 bp, synthetic construct
  misc_feature 1..16: note = synthetic [barcode part1]
  source 1..16: mol_type = other DNA
atactaatcggcgcac

SEQ ID NO: 10677 - DNA, 16 bp, synthetic construct
  misc_feature 1..16: note = synthetic [barcode part1]
  source 1..16: mol_type = other DNA
gactacgatcgacact

SEQ ID NO: 10678 - DNA, 16 bp, synthetic construct
  misc_feature 1..16: note = synthetic [barcode part1]
  source 1..16: mol_type = other DNA
gatcggtccttgaagt

SEQ ID NO: 10679 - DNA, 16 bp, synthetic construct
  misc_feature 1..16: note = synthetic [barcode part1]
  source 1..16: mol_type = other DNA
gccgaacttgtactcc

SEQ ID NO: 10680 - DNA, 16 bp, synthetic construct
  misc_feature 1..16: note = synthetic [barcode part1]
  source 1..16: mol_type = other DNA
tccgaatacaactgcg

SEQ ID NO: 10681 - DNA, 16 bp, synthetic construct
  misc_feature 1..16: note = synthetic [barcode part1]
  source 1..16: mol_type = other DNA
tcactcggagtcctac

SEQ ID NO: 10682 - DNA, 16 bp, synthetic construct
  misc_feature 1..16: note = synthetic [barcode part1]
  source 1..16: mol_type = other DNA
atcacgtccggtatag

SEQ ID NO: 10683 - DNA, 16 bp, synthetic construct
  misc_feature 1..16: note = synthetic [barcode part1]
  source 1..16: mol_type = other DNA
gcacctggagtaacag

SEQ ID NO: 10684 - DNA, 16 bp, synthetic construct
  misc_feature 1..16: note = synthetic [barcode part1]
  source 1..16: mol_type = other DNA
ccttagtgattgcact

SEQ ID NO: 10685 - DNA, 16 bp, synthetic construct
  misc_feature 1..16: note = synthetic [barcode part1]
  source 1..16: mol_type = other DNA
attatacgaagtggcg

SEQ ID NO: 10686 - DNA, 16 bp, synthetic construct
  misc_feature 1..16: note = synthetic [barcode part1]
  source 1..16: mol_type = other DNA
ttagtcgtaaccgacg

SEQ ID NO: 10687 - DNA, 16 bp, synthetic construct
  misc_feature 1..16: note = synthetic [barcode part1]
  source 1..16: mol_type = other DNA
aacgcgaagattgttg

SEQ ID NO: 10688 - DNA, 16 bp, synthetic construct
  misc_feature 1..16: note = synthetic [barcode part1]
  source 1..16: mol_type = other DNA
atatctctctccgtgc

SEQ ID NO: 10689 - DNA, 16 bp, synthetic construct
  misc_feature 1..16: note = synthetic [barcode part1]
  source 1..16: mol_type = other DNA
aacgtactggtgtgtc

SEQ ID NO: 10690 - DNA, 16 bp, synthetic construct
  misc_feature 1..16: note = synthetic [barcode part1]
  source 1..16: mol_type = other DNA
caattgcgttcttcag

SEQ ID NO: 10691 - DNA, 16 bp, synthetic construct
  misc_feature 1..16: note = synthetic [barcode part1]
  source 1..16: mol_type = other DNA
tgtgagtcctgtcgtc

SEQ ID NO: 10692 - DNA, 16 bp, synthetic construct
  misc_feature 1..16: note = synthetic [barcode part1]
  source 1..16: mol_type = other DNA
tccagaatcgaccaac

SEQ ID NO: 10693 - DNA, 16 bp, synthetic construct
  misc_feature 1..16: note = synthetic [barcode part1]
  source 1..16: mol_type = other DNA
agagtgacgtccaggt

SEQ ID NO: 10694 - DNA, 16 bp, synthetic construct
  misc_feature 1..16: note = synthetic [barcode part1]
  source 1..16: mol_type = other DNA
agacgttagtaaggtc

SEQ ID NO: 10695 - DNA, 16 bp, synthetic construct
  misc_feature 1..16: note = synthetic [barcode part1]
  source 1..16: mol_type = other DNA
ttcggtagacaactcg

SEQ ID NO: 10696 - DNA, 16 bp, synthetic construct
  misc_feature 1..16: note = synthetic [barcode part1]
  source 1..16: mol_type = other DNA
cagttactctaatccg

SEQ ID NO: 10697 - DNA, 16 bp, synthetic construct
  misc_feature 1..16: note = synthetic [barcode part1]
  source 1..16: mol_type = other DNA
ttggatctcagtgacg

SEQ ID NO: 10698 - DNA, 16 bp, synthetic construct
  misc_feature 1..16: note = synthetic [barcode part1]
  source 1..16: mol_type = other DNA
agagacagacaacctt

SEQ ID NO: 10699 - DNA, 16 bp, synthetic construct
  misc_feature 1..16: note = synthetic [barcode part1]
  source 1..16: mol_type = other DNA
tcctcgattggagaac

SEQ ID NO: 10700 - DNA, 16 bp, synthetic construct
  misc_feature 1..16: note = synthetic [barcode part1]
  source 1..16: mol_type = other DNA
cgaatactctctaacc

SEQ ID NO: 10701 - DNA, 16 bp, synthetic construct
  misc_feature 1..16: note = synthetic [barcode part1]
  source 1..16: mol_type = other DNA
ttccaacttaacgcgt

SEQ ID NO: 10702 - DNA, 16 bp, synthetic construct
  misc_feature 1..16: note = synthetic [barcode part1]
  source 1..16: mol_type = other DNA
gcgatattcttgaggc

SEQ ID NO: 10703 - DNA, 16 bp, synthetic construct
  misc_feature 1..16: note = synthetic [barcode part1]
  source 1..16: mol_type = other DNA
gaacgacactactctg

SEQ ID NO: 10704 - DNA, 16 bp, synthetic construct
  misc_feature 1..16: note = synthetic [barcode part1]
  source 1..16: mol_type = other DNA
gaagagtagtggcagt

SEQ ID NO: 10705 - DNA, 16 bp, synthetic construct
  misc_feature 1..16: note = synthetic [barcode part1]
  source 1..16: mol_type = other DNA
tgagttgtggtagtcc

SEQ ID NO: 10706 - DNA, 16 bp, synthetic construct
  misc_feature 1..16: note = synthetic [barcode part1]
  source 1..16: mol_type = other DNA
gcactggtgattcctc

SEQ ID NO: 10707 - DNA, 16 bp, synthetic construct
  misc_feature 1..16: note = synthetic [barcode part1]
  source 1..16: mol_type = other DNA
tccaagtcttgattcg

SEQ ID NO: 10708 - DNA, 16 bp, synthetic construct
  misc_feature 1..16: note = synthetic [barcode part1]
  source 1..16: mol_type = other DNA
tgagacgatccttcag

SEQ ID NO: 10709 - DNA, 16 bp, synthetic construct
  misc_feature 1..16: note = synthetic [barcode part1]
  source 1..16: mol_type = other DNA
ccgttcacaagtagac

SEQ ID NO: 10710 - DNA, 16 bp, synthetic construct
  misc_feature 1..16: note = synthetic [barcode part1]
  source 1..16: mol_type = other DNA
tcctaccagatccacg

SEQ ID NO: 10711 - DNA, 16 bp, synthetic construct
  misc_feature 1..16: note = synthetic [barcode part1]
  source 1..16: mol_type = other DNA
tagaggatctctcggt

SEQ ID NO: 10712 - DNA, 16 bp, synthetic construct
  misc_feature 1..16: note = synthetic [barcode part1]
  source 1..16: mol_type = other DNA
caagttcggacaatag

SEQ ID NO: 10713 - DNA, 16 bp, synthetic construct
  misc_feature 1..16: note = synthetic [barcode part1]
  source 1..16: mol_type = other DNA
gcagagtgaacctgtg

SEQ ID NO: 10714 - DNA, 16 bp, synthetic construct
  misc_feature 1..16: note = synthetic [barcode part1]
  source 1..16: mol_type = other DNA
ccaagtaactctactc

SEQ ID NO: 10715 - DNA, 16 bp, synthetic construct
  misc_feature 1..16: note = synthetic [barcode part1]
  source 1..16: mol_type = other DNA
acctacctaagacttc

SEQ ID NO: 10716 - DNA, 16 bp, synthetic construct
  misc_feature 1..16: note = synthetic [barcode part1]
  source 1..16: mol_type = other DNA
gcgaatcaactcgtgt

SEQ ID NO: 10717 - DNA, 16 bp, synthetic construct
  misc_feature 1..16: note = synthetic [barcode part1]
  source 1..16: mol_type = other DNA
gtagttatcggttcct

SEQ ID NO: 10718 - DNA, 16 bp, synthetic construct
  misc_feature 1..16: note = synthetic [barcode part1]
  source 1..16: mol_type = other DNA
tactcaggtcacctcg

SEQ ID NO: 10719 - DNA, 16 bp, synthetic construct
  misc_feature 1..16: note = synthetic [barcode part1]
  source 1..16: mol_type = other DNA
cctaagaaccacagtc

SEQ ID NO: 10720 - DNA, 16 bp, synthetic construct
  misc_feature 1..16: note = synthetic [barcode part1]
  source 1..16: mol_type = other DNA
gcacgcgtataacact

SEQ ID NO: 10721 - DNA, 16 bp, synthetic construct
  misc_feature 1..16: note = synthetic [barcode part1]
  source 1..16: mol_type = other DNA
ccgaattgtcactgag

SEQ ID NO: 10722 - DNA, 16 bp, synthetic construct
  misc_feature 1..16: note = synthetic [barcode part1]
  source 1..16: mol_type = other DNA
cctgatcttctccaac

SEQ ID NO: 10723 - DNA, 16 bp, synthetic construct
  misc_feature 1..16: note = synthetic [barcode part1]
  source 1..16: mol_type = other DNA
cgtatcaataccggtg

SEQ ID NO: 10724 - DNA, 16 bp, synthetic construct
  misc_feature 1..16: note = synthetic [barcode part1]
  source 1..16: mol_type = other DNA
cgtaggttgccgttct

SEQ ID NO: 10725 - DNA, 16 bp, synthetic construct
  misc_feature 1..16: note = synthetic [barcode part1]
  source 1..16: mol_type = other DNA
tagagtcctgattggc

SEQ ID NO: 10726 - DNA, 16 bp, synthetic construct
  misc_feature 1..16: note = synthetic [barcode part1]
  source 1..16: mol_type = other DNA
tacgtgaattctccac

SEQ ID NO: 10727 - DNA, 16 bp, synthetic construct
  misc_feature 1..16: note = synthetic [barcode part1]
  source 1..16: mol_type = other DNA
tccaacttgcggtcgt

SEQ ID NO: 10728 - DNA, 16 bp, synthetic construct
  misc_feature 1..16: note = synthetic [barcode part1]
  source 1..16: mol_type = other DNA
tcgaacaagatccacc

SEQ ID NO: 10729 - DNA, 16 bp, synthetic construct
  misc_feature 1..16: note = synthetic [barcode part1]
  source 1..16: mol_type = other DNA
ttgattcgcctgaatc

SEQ ID NO: 10730 - DNA, 16 bp, synthetic construct
  misc_feature 1..16: note = synthetic [barcode part1]
  source 1..16: mol_type = other DNA
ttggaataggcgaact

SEQ ID NO: 10731 - DNA, 16 bp, synthetic construct
  misc_feature 1..16: note = synthetic [barcode part1]
  source 1..16: mol_type = other DNA
tccagaacacagtgtc

SEQ ID NO: 10732 - DNA, 16 bp, synthetic construct
  misc_feature 1..16: note = synthetic [barcode part1]
  source 1..16: mol_type = other DNA
tatcaagagtgcgagt

SEQ ID NO: 10733 - DNA, 16 bp, synthetic construct
  misc_feature 1..16: note = synthetic [barcode part1]
  source 1..16: mol_type = other DNA
acgaacggaacaagtg

SEQ ID NO: 10734 - DNA, 16 bp, synthetic construct
  misc_feature 1..16: note = synthetic [barcode part1]
  source 1..16: mol_type = other DNA
cgtctggaaggactag

SEQ ID NO: 10735 - DNA, 16 bp, synthetic construct
  misc_feature 1..16: note = synthetic [barcode part1]
  source 1..16: mol_type = other DNA
aggactcctcactcgt

SEQ ID NO: 10736 - DNA, 16 bp, synthetic construct
  misc_feature 1..16: note = synthetic [barcode part1]
  source 1..16: mol_type = other DNA
acactggtcaacacgt

SEQ ID NO: 10737 - DNA, 16 bp, synthetic construct
  misc_feature 1..16: note = synthetic [barcode part1]
  source 1..16: mol_type = other DNA
gttggtgtcgttactt

SEQ ID NO: 10738 - DNA, 16 bp, synthetic construct
  misc_feature 1..16: note = synthetic [barcode part1]
  source 1..16: mol_type = other DNA
ccactaagtattctcg

SEQ ID NO: 10739 - DNA, 16 bp, synthetic construct
  misc_feature 1..16: note = synthetic [barcode part1]
  source 1..16: mol_type = other DNA
gtcggtggtctcttac

SEQ ID NO: 10740 - DNA, 16 bp, synthetic construct
  misc_feature 1..16: note = synthetic [barcode part1]
  source 1..16: mol_type = other DNA
tacagacggcgagatc

SEQ ID NO: 10741 - DNA, 16 bp, synthetic construct
  misc_feature 1..16: note = synthetic [barcode part1]
  source 1..16: mol_type = other DNA
attccgttctacgagt

SEQ ID NO: 10742 - DNA, 16 bp, synthetic construct
  misc_feature 1..16: note = synthetic [barcode part1]
  source 1..16: mol_type = other DNA
gcggatcaagaattac

SEQ ID NO: 10743 - DNA, 16 bp, synthetic construct
  misc_feature 1..16: note = synthetic [barcode part1]
  source 1..16: mol_type = other DNA
tgacactaccttggag

SEQ ID NO: 10744 - DNA, 16 bp, synthetic construct
  misc_feature 1..16: note = synthetic [barcode part1]
  source 1..16: mol_type = other DNA
aagaacgaggtcgcct

SEQ ID NO: 10745 - DNA, 16 bp, synthetic construct
  misc_feature 1..16: note = synthetic [barcode part1]
  source 1..16: mol_type = other DNA
attgtatccaggcgtg

SEQ ID NO: 10746 - DNA, 16 bp, synthetic construct
  misc_feature 1..16: note = synthetic [barcode part1]
  source 1..16: mol_type = other DNA
gcgtagtgattgaagt

SEQ ID NO: 10747 - DNA, 16 bp, synthetic construct
  misc_feature 1..16: note = synthetic [barcode part1]
  source 1..16: mol_type = other DNA
atccttgtcacgtcct

SEQ ID NO: 10748 - DNA, 16 bp, synthetic construct
  misc_feature 1..16: note = synthetic [barcode part1]
  source 1..16: mol_type = other DNA
gtaccggtaattcttc

SEQ ID NO: 10749 - DNA, 16 bp, synthetic construct
  misc_feature 1..16: note = synthetic [barcode part1]
  source 1..16: mol_type = other DNA
gagagtacttgcacct

SEQ ID NO: 10750 - DNA, 16 bp, synthetic construct
  misc_feature 1..16: note = synthetic [barcode part1]
  source 1..16: mol_type = other DNA
gcaagtctcgagtgtt

SEQ ID NO: 10751 - DNA, 16 bp, synthetic construct
  misc_feature 1..16: note = synthetic [barcode part1]
  source 1..16: mol_type = other DNA
gaccaccttcaacaag

SEQ ID NO: 10752 - DNA, 16 bp, synthetic construct
  misc_feature 1..16: note = synthetic [barcode part1]
  source 1..16: mol_type = other DNA
agtgcaccgcaattgt

SEQ ID NO: 10753 - DNA, 16 bp, synthetic construct
  misc_feature 1..16: note = synthetic [barcode part1]
  source 1..16: mol_type = other DNA
aggcaaggaacaagtc

SEQ ID NO: 10754 - DNA, 16 bp, synthetic construct
  misc_feature 1..16: note = synthetic [barcode part1]
  source 1..16: mol_type = other DNA
caccgtctgttctgtt

SEQ ID NO: 10755 - DNA, 16 bp, synthetic construct
  misc_feature 1..16: note = synthetic [barcode part1]
  source 1..16: mol_type = other DNA
tcctgacactgagaac

SEQ ID NO: 10756 - DNA, 16 bp, synthetic construct
  misc_feature 1..16: note = synthetic [barcode part1]
  source 1..16: mol_type = other DNA
agtcctctataccggc

SEQ ID NO: 10757 - DNA, 16 bp, synthetic construct
  misc_feature 1..16: note = synthetic [barcode part1]
  source 1..16: mol_type = other DNA
tgtggactcacaggtt

SEQ ID NO: 10758 - DNA, 16 bp, synthetic construct
  misc_feature 1..16: note = synthetic [barcode part1]
  source 1..16: mol_type = other DNA
tggcgtagtcagaggt

SEQ ID NO: 10759 - DNA, 16 bp, synthetic construct
  misc_feature 1..16: note = synthetic [barcode part1]
  source 1..16: mol_type = other DNA
cgtcctgacttgtggt

SEQ ID NO: 10760 - DNA, 16 bp, synthetic construct
  misc_feature 1..16: note = synthetic [barcode part1]
  source 1..16: mol_type = other DNA
tgtgaacgtaggttcc

SEQ ID NO: 10761 - DNA, 16 bp, synthetic construct
  misc_feature 1..16: note = synthetic [barcode part1]
  source 1..16: mol_type = other DNA
aactagtgccacgact

SEQ ID NO: 10762 - DNA, 16 bp, synthetic construct
  misc_feature 1..16: note = synthetic [barcode part1]
  source 1..16: mol_type = other DNA
cactatctccgcaggt

SEQ ID NO: 10763 - DNA, 16 bp, synthetic construct
  misc_feature 1..16: note = synthetic [barcode part1]
  source 1..16: mol_type = other DNA
gttgtctcttgccgtt

SEQ ID NO: 10764 - DNA, 16 bp, synthetic construct
  misc_feature 1..16: note = synthetic [barcode part1]
  source 1..16: mol_type = other DNA
acgattggtcgtacac

SEQ ID NO: 10765 - DNA, 16 bp, synthetic construct
  misc_feature 1..16: note = synthetic [barcode part1]
  source 1..16: mol_type = other DNA
acgaacctggtggagt

SEQ ID NO: 10766 - DNA, 16 bp, synthetic construct
  misc_feature 1..16: note = synthetic [barcode part1]
  source 1..16: mol_type = other DNA
accgacacgaacttgt

SEQ ID NO: 10767 - DNA, 16 bp, synthetic construct
  misc_feature 1..16: note = synthetic [barcode part1]
  source 1..16: mol_type = other DNA
aacctgaggagtatac

SEQ ID NO: 10768 - DNA, 16 bp, synthetic construct
  misc_feature 1..16: note = synthetic [barcode part1]
  source 1..16: mol_type = other DNA
agtgacggttctactg

SEQ ID NO: 10769 - DNA, 16 bp, synthetic construct
  misc_feature 1..16: note = synthetic [barcode part1]
  source 1..16: mol_type = other DNA
tgtgcaacgaagaatc

SEQ ID NO: 10770 - DNA, 16 bp, synthetic construct
  misc_feature 1..16: note = synthetic [barcode part1]
  source 1..16: mol_type = other DNA
tcgatacgaccaggag

SEQ ID NO: 10771 - DNA, 16 bp, synthetic construct
  misc_feature 1..16: note = synthetic [barcode part1]
  source 1..16: mol_type = other DNA
tcctggtatattcgac

SEQ ID NO: 10772 - DNA, 16 bp, synthetic construct
  misc_feature 1..16: note = synthetic [barcode part1]
  source 1..16: mol_type = other DNA
ccacaggatagagtgc

SEQ ID NO: 10773 - DNA, 16 bp, synthetic construct
  misc_feature 1..16: note = synthetic [barcode part1]
  source 1..16: mol_type = other DNA
caggtgcgtatctaac

SEQ ID NO: 10774 - DNA, 16 bp, synthetic construct
  misc_feature 1..16: note = synthetic [barcode part1]
  source 1..16: mol_type = other DNA
agtgaggccaacgtac

SEQ ID NO: 10775 - DNA, 16 bp, synthetic construct
  misc_feature 1..16: note = synthetic [barcode part1]
  source 1..16: mol_type = other DNA
acactccacacttctc

SEQ ID NO: 10776 - DNA, 16 bp, synthetic construct
  misc_feature 1..16: note = synthetic [barcode part1]
  source 1..16: mol_type = other DNA
agagtgcgtatctctg

SEQ ID NO: 10777 - DNA, 16 bp, synthetic construct
  misc_feature 1..16: note = synthetic [barcode part1]
  source 1..16: mol_type = other DNA
caactcactgttggag

SEQ ID NO: 10778 - DNA, 16 bp, synthetic construct
  misc_feature 1..16: note = synthetic [barcode part1]
  source 1..16: mol_type = other DNA
cggattatcgacgatc

SEQ ID NO: 10779 - DNA, 16 bp, synthetic construct
  misc_feature 1..16: note = synthetic [barcode part1]
  source 1..16: mol_type = other DNA
tctcgaaggtactgtg

SEQ ID NO: 10780 - DNA, 16 bp, synthetic construct
  misc_feature 1..16: note = synthetic [barcode part1]
  source 1..16: mol_type = other DNA
tggaaccactgcagtt

SEQ ID NO: 10781 - DNA, 16 bp, synthetic construct
  misc_feature 1..16: note = synthetic [barcode part1]
  source 1..16: mol_type = other DNA
cgtctgtgaatcttac

SEQ ID NO: 10782 - DNA, 16 bp, synthetic construct
  misc_feature 1..16: note = synthetic [barcode part1]
  source 1..16: mol_type = other DNA
gatcgtgatacaccgt

SEQ ID NO: 10783 - DNA, 16 bp, synthetic construct
  misc_feature 1..16: note = synthetic [barcode part1]
  source 1..16: mol_type = other DNA
ttcgtattggcgattc

SEQ ID NO: 10784 - DNA, 16 bp, synthetic construct
  misc_feature 1..16: note = synthetic [barcode part1]
  source 1..16: mol_type = other DNA
acgttccaactcaatc

SEQ ID NO: 10785 - DNA, 16 bp, synthetic construct
  misc_feature 1..16: note = synthetic [barcode part1]
  source 1..16: mol_type = other DNA
gtctccgcgtcaagtt

SEQ ID NO: 10786 - DNA, 16 bp, synthetic construct
  misc_feature 1..16: note = synthetic [barcode part1]
  source 1..16: mol_type = other DNA
gtcacctagtacctgc

SEQ ID NO: 10787 - DNA, 16 bp, synthetic construct
  misc_feature 1..16: note = synthetic [barcode part1]
  source 1..16: mol_type = other DNA
ttcgtatcgacctaac

SEQ ID NO: 10788 - DNA, 16 bp, synthetic construct
  misc_feature 1..16: note = synthetic [barcode part1]
  source 1..16: mol_type = other DNA
tgtaagtgcgataggt

SEQ ID NO: 10789 - DNA, 16 bp, synthetic construct
  misc_feature 1..16: note = synthetic [barcode part1]
  source 1..16: mol_type = other DNA
tagatcgaaccgttgc

SEQ ID NO: 10790 - DNA, 16 bp, synthetic construct
  misc_feature 1..16: note = synthetic [barcode part1]
  source 1..16: mol_type = other DNA
tccgataggtgacttg

SEQ ID NO: 10791 - DNA, 16 bp, synthetic construct
  misc_feature 1..16: note = synthetic [barcode part1]
  source 1..16: mol_type = other DNA
cgttagatccacgtcc

SEQ ID NO: 10792 - DNA, 16 bp, synthetic construct
  misc_feature 1..16: note = synthetic [barcode part1]
  source 1..16: mol_type = other DNA
aaggaataccttccgc

SEQ ID NO: 10793 - DNA, 16 bp, synthetic construct
  misc_feature 1..16: note = synthetic [barcode part1]
  source 1..16: mol_type = other DNA
caactctccgaagagt

SEQ ID NO: 10794 - DNA, 16 bp, synthetic construct
  misc_feature 1..16: note = synthetic [barcode part1]
  source 1..16: mol_type = other DNA
gcagtgttgacgttgt

SEQ ID NO: 10795 - DNA, 16 bp, synthetic construct
  misc_feature 1..16: note = synthetic [barcode part1]
  source 1..16: mol_type = other DNA
tgcgtaattcgacttc

SEQ ID NO: 10796 - DNA, 16 bp, synthetic construct
  misc_feature 1..16: note = synthetic [barcode part1]
  source 1..16: mol_type = other DNA
ataggttatcgcctct

SEQ ID NO: 10797 - DNA, 16 bp, synthetic construct
  misc_feature 1..16: note = synthetic [barcode part1]
  source 1..16: mol_type = other DNA
gacctaatcggcaatc

SEQ ID NO: 10798 - DNA, 16 bp, synthetic construct
  misc_feature 1..16: note = synthetic [barcode part1]
  source 1..16: mol_type = other DNA
gcgcaactcttaattc

SEQ ID NO: 10799 - DNA, 16 bp, synthetic construct
  misc_feature 1..16: note = synthetic [barcode part1]
  source 1..16: mol_type = other DNA
cgcgcaacaaggaatc

SEQ ID NO: 10800 - DNA, 16 bp, synthetic construct
  misc_feature 1..16: note = synthetic [barcode part1]
  source 1..16: mol_type = other DNA
aatcgtctggagatag

SEQ ID NO: 10801 - DNA, 16 bp, synthetic construct
  misc_feature 1..16: note = synthetic [barcode part1]
  source 1..16: mol_type = other DNA
tgtcctcaattcaacg

SEQ ID NO: 10802 - DNA, 16 bp, synthetic construct
  misc_feature 1..16: note = synthetic [barcode part1]
  source 1..16: mol_type = other DNA
actcgaacttactacc

SEQ ID NO: 10803 - DNA, 16 bp, synthetic construct
  misc_feature 1..16: note = synthetic [barcode part1]
  source 1..16: mol_type = other DNA
ccagtatctctctaag

SEQ ID NO: 10804 - DNA, 16 bp, synthetic construct
  misc_feature 1..16: note = synthetic [barcode part1]
  source 1..16: mol_type = other DNA
cacagttcgactctcg

SEQ ID NO: 10805 - DNA, 16 bp, synthetic construct
  misc_feature 1..16: note = synthetic [barcode part1]
  source 1..16: mol_type = other DNA
ccggacaagacagtac

SEQ ID NO: 10806 - DNA, 16 bp, synthetic construct
  misc_feature 1..16: note = synthetic [barcode part1]
  source 1..16: mol_type = other DNA
taacaccggcggatag

SEQ ID NO: 10807 - DNA, 16 bp, synthetic construct
  misc_feature 1..16: note = synthetic [barcode part1]
  source 1..16: mol_type = other DNA
cgtgaatcgagtgttc

SEQ ID NO: 10808 - DNA, 16 bp, synthetic construct
  misc_feature 1..16: note = synthetic [barcode part1]
  source 1..16: mol_type = other DNA
aaggcgaactctactc

SEQ ID NO: 10809 - DNA, 16 bp, synthetic construct
  misc_feature 1..16: note = synthetic [barcode part1]
  source 1..16: mol_type = other DNA
caagttatcctgcgtt

SEQ ID NO: 10810 - DNA, 16 bp, synthetic construct
  misc_feature 1..16: note = synthetic [barcode part1]
  source 1..16: mol_type = other DNA
cactgcctatcctgtt

SEQ ID NO: 10811 - DNA, 16 bp, synthetic construct
  misc_feature 1..16: note = synthetic [barcode part1]
  source 1..16: mol_type = other DNA
acctctgtcactaggc

SEQ ID NO: 10812 - DNA, 16 bp, synthetic construct
  misc_feature 1..16: note = synthetic [barcode part1]
  source 1..16: mol_type = other DNA
gtgtcttgttgccggt

SEQ ID NO: 10813 - DNA, 16 bp, synthetic construct
  misc_feature 1..16: note = synthetic [barcode part1]
  source 1..16: mol_type = other DNA
gtcgatactcacgaac

SEQ ID NO: 10814 - DNA, 16 bp, synthetic construct
  misc_feature 1..16: note = synthetic [barcode part1]
  source 1..16: mol_type = other DNA
tatctctgtcggattg

SEQ ID NO: 10815 - DNA, 16 bp, synthetic construct
  misc_feature 1..16: note = synthetic [barcode part1]
  source 1..16: mol_type = other DNA
tagtcctaggactggt

SEQ ID NO: 10816 - DNA, 16 bp, synthetic construct
  misc_feature 1..16: note = synthetic [barcode part1]
  source 1..16: mol_type = other DNA
gttgtcaggagtatag

SEQ ID NO: 10817 - DNA, 16 bp, synthetic construct
  misc_feature 1..16: note = synthetic [barcode part1]
  source 1..16: mol_type = other DNA
gttacgaccgtagtac

SEQ ID NO: 10818 - DNA, 16 bp, synthetic construct
  misc_feature 1..16: note = synthetic [barcode part1]
  source 1..16: mol_type = other DNA
atcttcaagaccgttc

SEQ ID NO: 10819 - DNA, 16 bp, synthetic construct
  misc_feature 1..16: note = synthetic [barcode part1]
  source 1..16: mol_type = other DNA
aacgtcacagttggtc

SEQ ID NO: 10820 - DNA, 16 bp, synthetic construct
  misc_feature 1..16: note = synthetic [barcode part1]
  source 1..16: mol_type = other DNA
tcactacggcagagtt

SEQ ID NO: 10821 - DNA, 16 bp, synthetic construct
  misc_feature 1..16: note = synthetic [barcode part1]
  source 1..16: mol_type = other DNA
acggagaaggatacac

SEQ ID NO: 10822 - DNA, 16 bp, synthetic construct
  misc_feature 1..16: note = synthetic [barcode part1]
  source 1..16: mol_type = other DNA
agtcgtgaggaggtct

SEQ ID NO: 10823 - DNA, 16 bp, synthetic construct
  misc_feature 1..16: note = synthetic [barcode part1]
  source 1..16: mol_type = other DNA
tactagaggtggcctt

SEQ ID NO: 10824 - DNA, 16 bp, synthetic construct
  misc_feature 1..16: note = synthetic [barcode part1]
  source 1..16: mol_type = other DNA
attcactgtggtgttc

SEQ ID NO: 10825 - DNA, 16 bp, synthetic construct
  misc_feature 1..16: note = synthetic [barcode part1]
  source 1..16: mol_type = other DNA
agtagttcggtggtct

SEQ ID NO: 10826 - DNA, 16 bp, synthetic construct
  misc_feature 1..16: note = synthetic [barcode part1]
  source 1..16: mol_type = other DNA
ttagacgcctactatc

SEQ ID NO: 10827 - DNA, 16 bp, synthetic construct
  misc_feature 1..16: note = synthetic [barcode part1]
  source 1..16: mol_type = other DNA
cagttgtccgtgtaag

SEQ ID NO: 10828 - DNA, 16 bp, synthetic construct
  misc_feature 1..16: note = synthetic [barcode part1]
  source 1..16: mol_type = other DNA
ttgcagttcaggatcg

SEQ ID NO: 10829 - DNA, 16 bp, synthetic construct
  misc_feature 1..16: note = synthetic [barcode part1]
  source 1..16: mol_type = other DNA
cgaaggttgttcctag

SEQ ID NO: 10830 - DNA, 16 bp, synthetic construct
  misc_feature 1..16: note = synthetic [barcode part1]
  source 1..16: mol_type = other DNA
gtcacctcctagacac

SEQ ID NO: 10831 - DNA, 16 bp, synthetic construct
  misc_feature 1..16: note = synthetic [barcode part1]
  source 1..16: mol_type = other DNA
gaataaccacgaactg

SEQ ID NO: 10832 - DNA, 16 bp, synthetic construct
  misc_feature 1..16: note = synthetic [barcode part1]
  source 1..16: mol_type = other DNA
cgtgttcagtacgaac

SEQ ID NO: 10833 - DNA, 16 bp, synthetic construct
  misc_feature 1..16: note = synthetic [barcode part1]
  source 1..16: mol_type = other DNA
ttcaaccgtcagtact

SEQ ID NO: 10834 - DNA, 16 bp, synthetic construct
  misc_feature 1..16: note = synthetic [barcode part1]
  source 1..16: mol_type = other DNA
actgcggtctacttgc

SEQ ID NO: 10835 - DNA, 16 bp, synthetic construct
  misc_feature 1..16: note = synthetic [barcode part1]
  source 1..16: mol_type = other DNA
aagtggcaatcacgcg

SEQ ID NO: 10836 - DNA, 16 bp, synthetic construct
  misc_feature 1..16: note = synthetic [barcode part1]
  source 1..16: mol_type = other DNA
cgagacacttatagag

SEQ ID NO: 10837 - DNA, 16 bp, synthetic construct
  misc_feature 1..16: note = synthetic [barcode part1]
  source 1..16: mol_type = other DNA
gcaccttatacctctc

SEQ ID NO: 10838 - DNA, 16 bp, synthetic construct
  misc_feature 1..16: note = synthetic [barcode part1]
  source 1..16: mol_type = other DNA
gcacaaccacacaact

SEQ ID NO: 10839 - DNA, 16 bp, synthetic construct
  misc_feature 1..16: note = synthetic [barcode part1]
  source 1..16: mol_type = other DNA
tctagaggtcgtgatc

SEQ ID NO: 10840 - DNA, 16 bp, synthetic construct
  misc_feature 1..16: note = synthetic [barcode part1]
  source 1..16: mol_type = other DNA
tcgactctcactactc

SEQ ID NO: 10841 - DNA, 16 bp, synthetic construct
  misc_feature 1..16: note = synthetic [barcode part1]
  source 1..16: mol_type = other DNA
tcacactggacacagt

SEQ ID NO: 10842 - DNA, 16 bp, synthetic construct
  misc_feature 1..16: note = synthetic [barcode part1]
  source 1..16: mol_type = other DNA
aataccagtaccgcgt

SEQ ID NO: 10843 - DNA, 16 bp, synthetic construct
  misc_feature 1..16: note = synthetic [barcode part1]
  source 1..16: mol_type = other DNA
acagttgtcttagtcc

SEQ ID NO: 10844 - DNA, 16 bp, synthetic construct
  misc_feature 1..16: note = synthetic [barcode part1]
  source 1..16: mol_type = other DNA
gcctatcgtaggtaac

SEQ ID NO: 10845 - DNA, 16 bp, synthetic construct
  misc_feature 1..16: note = synthetic [barcode part1]
  source 1..16: mol_type = other DNA
gcgcacttattggtag

SEQ ID NO: 10846 - DNA, 16 bp, synthetic construct
  misc_feature 1..16: note = synthetic [barcode part1]
  source 1..16: mol_type = other DNA
caagtaagacgttgtg

SEQ ID NO: 10847 - DNA, 16 bp, synthetic construct
  misc_feature 1..16: note = synthetic [barcode part1]
  source 1..16: mol_type = other DNA
acttggacgaacgttc

SEQ ID NO: 10848 - DNA, 16 bp, synthetic construct
  misc_feature 1..16: note = synthetic [barcode part1]
  source 1..16: mol_type = other DNA
cagacgataggtgaag

SEQ ID NO: 10849 - DNA, 16 bp, synthetic construct
  misc_feature 1..16: note = synthetic [barcode part1]
  source 1..16: mol_type = other DNA
agaagtactgtcagac

SEQ ID NO: 10850 - DNA, 16 bp, synthetic construct
  misc_feature 1..16: note = synthetic [barcode part1]
  source 1..16: mol_type = other DNA
tctgaccacgcgttac

SEQ ID NO: 10851 - DNA, 16 bp, synthetic construct
  misc_feature 1..16: note = synthetic [barcode part1]
  source 1..16: mol_type = other DNA
ttgttacacgagtctc

SEQ ID NO: 10852 - DNA, 16 bp, synthetic construct
  misc_feature 1..16: note = synthetic [barcode part1]
  source 1..16: mol_type = other DNA
acagtgttcttgaggc

SEQ ID NO: 10853 - DNA, 16 bp, synthetic construct
  misc_feature 1..16: note = synthetic [barcode part1]
  source 1..16: mol_type = other DNA
cacgagttactatcct

SEQ ID NO: 10854 - DNA, 16 bp, synthetic construct
  misc_feature 1..16: note = synthetic [barcode part1]
  source 1..16: mol_type = other DNA
tcaaggttctaaggcc

SEQ ID NO: 10855 - DNA, 16 bp, synthetic construct
  misc_feature 1..16: note = synthetic [barcode part1]
  source 1..16: mol_type = other DNA
gcggttgtggtatatc

SEQ ID NO: 10856 - DNA, 16 bp, synthetic construct
  misc_feature 1..16: note = synthetic [barcode part1]
  source 1..16: mol_type = other DNA
agatcaagtcgtgtag

SEQ ID NO: 10857 - DNA, 16 bp, synthetic construct
  misc_feature 1..16: note = synthetic [barcode part1]
  source 1..16: mol_type = other DNA
ttcaggacaataccgc

SEQ ID NO: 10858 - DNA, 16 bp, synthetic construct
  misc_feature 1..16: note = synthetic [barcode part1]
  source 1..16: mol_type = other DNA
aacttaaccggatcgc

SEQ ID NO: 10859 - DNA, 16 bp, synthetic construct
  misc_feature 1..16: note = synthetic [barcode part1]
  source 1..16: mol_type = other DNA
actcaggactctatct

SEQ ID NO: 10860 - DNA, 16 bp, synthetic construct
  misc_feature 1..16: note = synthetic [barcode part1]
  source 1..16: mol_type = other DNA
tgttcgaagtctgcag

SEQ ID NO: 10861 - DNA, 16 bp, synthetic construct
  misc_feature 1..16: note = synthetic [barcode part1]
  source 1..16: mol_type = other DNA
gactcgacctcgtgtt

SEQ ID NO: 10862 - DNA, 16 bp, synthetic construct
  misc_feature 1..16: note = synthetic [barcode part1]
  source 1..16: mol_type = other DNA
actaggtgtgatccac

SEQ ID NO: 10863 - DNA, 16 bp, synthetic construct
  misc_feature 1..16: note = synthetic [barcode part1]
  source 1..16: mol_type = other DNA
ccgttcggtaagtagt

SEQ ID NO: 10864 - DNA, 16 bp, synthetic construct
  misc_feature 1..16: note = synthetic [barcode part1]
  source 1..16: mol_type = other DNA
cacggtcactatctcg

SEQ ID NO: 10865 - DNA, 16 bp, synthetic construct
  misc_feature 1..16: note = synthetic [barcode part1]
  source 1..16: mol_type = other DNA
atcacagtaggcggac

SEQ ID NO: 10866 - DNA, 16 bp, synthetic construct
  misc_feature 1..16: note = synthetic [barcode part1]
  source 1..16: mol_type = other DNA
atcctgacagtcaacg

SEQ ID NO: 10867 - DNA, 16 bp, synthetic construct
  misc_feature 1..16: note = synthetic [barcode part1]
  source 1..16: mol_type = other DNA
ttgccgttacttagac

SEQ ID NO: 10868 - DNA, 16 bp, synthetic construct
  misc_feature 1..16: note = synthetic [barcode part1]
  source 1..16: mol_type = other DNA
gcgtggttaatacgtc

SEQ ID NO: 10869 - DNA, 16 bp, synthetic construct
  misc_feature 1..16: note = synthetic [barcode part1]
  source 1..16: mol_type = other DNA
acgcgtctactaacag

SEQ ID NO: 10870 - DNA, 16 bp, synthetic construct
  misc_feature 1..16: note = synthetic [barcode part1]
  source 1..16: mol_type = other DNA
actgcctaatatccac

SEQ ID NO: 10871 - DNA, 16 bp, synthetic construct
  misc_feature 1..16: note = synthetic [barcode part1]
  source 1..16: mol_type = other DNA
cggaggaactagtatt

SEQ ID NO: 10872 - DNA, 16 bp, synthetic construct
  misc_feature 1..16: note = synthetic [barcode part1]
  source 1..16: mol_type = other DNA
cgagatcaccacaact

SEQ ID NO: 10873 - DNA, 16 bp, synthetic construct
  misc_feature 1..16: note = synthetic [barcode part1]
  source 1..16: mol_type = other DNA
aatcgtatcgacctct

SEQ ID NO: 10874 - DNA, 16 bp, synthetic construct
  misc_feature 1..16: note = synthetic [barcode part1]
  source 1..16: mol_type = other DNA
ccaacgagtagagatt

SEQ ID NO: 10875 - DNA, 16 bp, synthetic construct
  misc_feature 1..16: note = synthetic [barcode part1]
  source 1..16: mol_type = other DNA
cagactagtcgaactc

SEQ ID NO: 10876 - DNA, 16 bp, synthetic construct
  misc_feature 1..16: note = synthetic [barcode part1]
  source 1..16: mol_type = other DNA
acagatcttaacgcgc

SEQ ID NO: 10877 - DNA, 16 bp, synthetic construct
  misc_feature 1..16: note = synthetic [barcode part1]
  source 1..16: mol_type = other DNA
gacctattggacgttg

SEQ ID NO: 10878 - DNA, 16 bp, synthetic construct
  misc_feature 1..16: note = synthetic [barcode part1]
  source 1..16: mol_type = other DNA
atcctcggtgagaatc

SEQ ID NO: 10879 - DNA, 16 bp, synthetic construct
  misc_feature 1..16: note = synthetic [barcode part1]
  source 1..16: mol_type = other DNA
accgttcgcagattcc

SEQ ID NO: 10880 - DNA, 16 bp, synthetic construct
  misc_feature 1..16: note = synthetic [barcode part1]
  source 1..16: mol_type = other DNA
attgtctctgtaggtc

SEQ ID NO: 10881 - DNA, 16 bp, synthetic construct
  misc_feature 1..16: note = synthetic [barcode part1]
  source 1..16: mol_type = other DNA
gattgaacactccacg

SEQ ID NO: 10882 - DNA, 16 bp, synthetic construct
  misc_feature 1..16: note = synthetic [barcode part1]
  source 1..16: mol_type = other DNA
ttgagtggacaggacc

SEQ ID NO: 10883 - DNA, 16 bp, synthetic construct
  misc_feature 1..16: note = synthetic [barcode part1]
  source 1..16: mol_type = other DNA
tggccacaacggtaag

SEQ ID NO: 10884 - DNA, 16 bp, synthetic construct
  misc_feature 1..16: note = synthetic [barcode part1]
  source 1..16: mol_type = other DNA
cactccacgttattcc

SEQ ID NO: 10885 - DNA, 16 bp, synthetic construct
  misc_feature 1..16: note = synthetic [barcode part1]
  source 1..16: mol_type = other DNA
agtgcgaacctgacag

SEQ ID NO: 10886 - DNA, 16 bp, synthetic construct
  misc_feature 1..16: note = synthetic [barcode part1]
  source 1..16: mol_type = other DNA
agtgaagtggcagagt

SEQ ID NO: 10887 - DNA, 16 bp, synthetic construct
  misc_feature 1..16: note = synthetic [barcode part1]
  source 1..16: mol_type = other DNA
cagtgacttctacgtt

SEQ ID NO: 10888 - DNA, 16 bp, synthetic construct
  misc_feature 1..16: note = synthetic [barcode part1]
  source 1..16: mol_type = other DNA
cgataggacgaacctg

SEQ ID NO: 10889 - DNA, 16 bp, synthetic construct
  misc_feature 1..16: note = synthetic [barcode part1]
  source 1..16: mol_type = other DNA
cacaacttcctgttag

SEQ ID NO: 10890 - DNA, 16 bp, synthetic construct
  misc_feature 1..16: note = synthetic [barcode part1]
  source 1..16: mol_type = other DNA
cagttcctcctaatcc

SEQ ID NO: 10891 - DNA, 16 bp, synthetic construct
  misc_feature 1..16: note = synthetic [barcode part1]
  source 1..16: mol_type = other DNA
tatactctagactgcc

SEQ ID NO: 10892 - DNA, 16 bp, synthetic construct
  misc_feature 1..16: note = synthetic [barcode part1]
  source 1..16: mol_type = other DNA
ccggtaagtctagtgt

SEQ ID NO: 10893 - DNA, 16 bp, synthetic construct
  misc_feature 1..16: note = synthetic [barcode part1]
  source 1..16: mol_type = other DNA
gaataagtcgtccgtc

SEQ ID NO: 10894 - DNA, 16 bp, synthetic construct
  misc_feature 1..16: note = synthetic [barcode part1]
  source 1..16: mol_type = other DNA
cgtaagtcggatactc

SEQ ID NO: 10895 - DNA, 16 bp, synthetic construct
  misc_feature 1..16: note = synthetic [barcode part1]
  source 1..16: mol_type = other DNA
aagttatcggaccacc

SEQ ID NO: 10896 - DNA, 16 bp, synthetic construct
  misc_feature 1..16: note = synthetic [barcode part1]
  source 1..16: mol_type = other DNA
tcgtatcgagttgtct

SEQ ID NO: 10897 - DNA, 16 bp, synthetic construct
  misc_feature 1..16: note = synthetic [barcode part1]
  source 1..16: mol_type = other DNA
acaggaaccttgcact

SEQ ID NO: 10898 - DNA, 16 bp, synthetic construct
  misc_feature 1..16: note = synthetic [barcode part1]
  source 1..16: mol_type = other DNA
acgatctatctctgtg

SEQ ID NO: 10899 - DNA, 16 bp, synthetic construct
  misc_feature 1..16: note = synthetic [barcode part1]
  source 1..16: mol_type = other DNA
cagaccacctcgtgtt

SEQ ID NO: 10900 - DNA, 16 bp, synthetic construct
  misc_feature 1..16: note = synthetic [barcode part1]
  source 1..16: mol_type = other DNA
cgtgattactattccg

SEQ ID NO: 10901 - DNA, 16 bp, synthetic construct
  misc_feature 1..16: note = synthetic [barcode part1]
  source 1..16: mol_type = other DNA
tacggtgtcgtccgtt

SEQ ID NO: 10902 - DNA, 16 bp, synthetic construct
  misc_feature 1..16: note = synthetic [barcode part1]
  source 1..16: mol_type = other DNA
cagtgagacttcgttg

SEQ ID NO: 10903 - DNA, 16 bp, synthetic construct
  misc_feature 1..16: note = synthetic [barcode part1]
  source 1..16: mol_type = other DNA
tgttcgcgtgacgttc

SEQ ID NO: 10904 - DNA, 16 bp, synthetic construct
  misc_feature 1..16: note = synthetic [barcode part1]
  source 1..16: mol_type = other DNA
cacaccgtgtataacg

SEQ ID NO: 10905 - DNA, 16 bp, synthetic construct
  misc_feature 1..16: note = synthetic [barcode part1]
  source 1..16: mol_type = other DNA
agaggtcgattggaag

SEQ ID NO: 10906 - DNA, 16 bp, synthetic construct
  misc_feature 1..16: note = synthetic [barcode part1]
  source 1..16: mol_type = other DNA
ttcacgaagacaacag

SEQ ID NO: 10907 - DNA, 16 bp, synthetic construct
  misc_feature 1..16: note = synthetic [barcode part1]
  source 1..16: mol_type = other DNA
tgttgtgacacgtacg

SEQ ID NO: 10908 - DNA, 16 bp, synthetic construct
  misc_feature 1..16: note = synthetic [barcode part1]
  source 1..16: mol_type = other DNA
tacgcggccactattc

SEQ ID NO: 10909 - DNA, 16 bp, synthetic construct
  misc_feature 1..16: note = synthetic [barcode part1]
  source 1..16: mol_type = other DNA
cgaatacttccgttac

SEQ ID NO: 10910 - DNA, 16 bp, synthetic construct
  misc_feature 1..16: note = synthetic [barcode part1]
  source 1..16: mol_type = other DNA
agtattgccgaggtct

SEQ ID NO: 10911 - DNA, 16 bp, synthetic construct
  misc_feature 1..16: note = synthetic [barcode part1]
  source 1..16: mol_type = other DNA
tctgccacaataaggc

SEQ ID NO: 10912 - DNA, 16 bp, synthetic construct
  misc_feature 1..16: note = synthetic [barcode part1]
  source 1..16: mol_type = other DNA
tcaagaaggagtgacg

SEQ ID NO: 10913 - DNA, 16 bp, synthetic construct
  misc_feature 1..16: note = synthetic [barcode part1]
  source 1..16: mol_type = other DNA
cgcgaaccttatcacc

SEQ ID NO: 10914 - DNA, 16 bp, synthetic construct
  misc_feature 1..16: note = synthetic [barcode part1]
  source 1..16: mol_type = other DNA
acaacactggtgttgc

SEQ ID NO: 10915 - DNA, 16 bp, synthetic construct
  misc_feature 1..16: note = synthetic [barcode part1]
  source 1..16: mol_type = other DNA
ttcgcgccgatctagt

SEQ ID NO: 10916 - DNA, 16 bp, synthetic construct
  misc_feature 1..16: note = synthetic [barcode part1]
  source 1..16: mol_type = other DNA
agaggacgttcgaacc

SEQ ID NO: 10917 - DNA, 16 bp, synthetic construct
  misc_feature 1..16: note = synthetic [barcode part1]
  source 1..16: mol_type = other DNA
tcgttagtccttgtag

SEQ ID NO: 10918 - DNA, 16 bp, synthetic construct
  misc_feature 1..16: note = synthetic [barcode part1]
  source 1..16: mol_type = other DNA
cctctgtgaattactg

SEQ ID NO: 10919 - DNA, 16 bp, synthetic construct
  misc_feature 1..16: note = synthetic [barcode part1]
  source 1..16: mol_type = other DNA
atagtcacgcgcaact

SEQ ID NO: 10920 - DNA, 16 bp, synthetic construct
  misc_feature 1..16: note = synthetic [barcode part1]
  source 1..16: mol_type = other DNA
tcaagtctgcactccg

SEQ ID NO: 10921 - DNA, 16 bp, synthetic construct
  misc_feature 1..16: note = synthetic [barcode part1]
  source 1..16: mol_type = other DNA
aactctccacgaactt

SEQ ID NO: 10922 - DNA, 16 bp, synthetic construct
  misc_feature 1..16: note = synthetic [barcode part1]
  source 1..16: mol_type = other DNA
cgagtgcaaggtgatc

SEQ ID NO: 10923 - DNA, 16 bp, synthetic construct
  misc_feature 1..16: note = synthetic [barcode part1]
  source 1..16: mol_type = other DNA
gtataatctccagtcc

SEQ ID NO: 10924 - DNA, 16 bp, synthetic construct
  misc_feature 1..16: note = synthetic [barcode part1]
  source 1..16: mol_type = other DNA
tagtacgcaacaagac

SEQ ID NO: 10925 - DNA, 16 bp, synthetic construct
  misc_feature 1..16: note = synthetic [barcode part1]
  source 1..16: mol_type = other DNA
ataagacgacacctag

SEQ ID NO: 10926 - DNA, 16 bp, synthetic construct
  misc_feature 1..16: note = synthetic [barcode part1]
  source 1..16: mol_type = other DNA
taacggtaatcaccgc

SEQ ID NO: 10927 - DNA, 16 bp, synthetic construct
  misc_feature 1..16: note = synthetic [barcode part1]
  source 1..16: mol_type = other DNA
agacgtcaggtctact

SEQ ID NO: 10928 - DNA, 16 bp, synthetic construct
  misc_feature 1..16: note = synthetic [barcode part1]
  source 1..16: mol_type = other DNA
ttcttactgcctccag

SEQ ID NO: 10929 - DNA, 16 bp, synthetic construct
  misc_feature 1..16: note = synthetic [barcode part1]
  source 1..16: mol_type = other DNA
gataccgttagtcggt

SEQ ID NO: 10930 - DNA, 16 bp, synthetic construct
  misc_feature 1..16: note = synthetic [barcode part1]
  source 1..16: mol_type = other DNA
atcttactggatccac

SEQ ID NO: 10931 - DNA, 16 bp, synthetic construct
  misc_feature 1..16: note = synthetic [barcode part1]
  source 1..16: mol_type = other DNA
tgtggccttctaccag

SEQ ID NO: 10932 - DNA, 16 bp, synthetic construct
  misc_feature 1..16: note = synthetic [barcode part1]
  source 1..16: mol_type = other DNA
tggtacttaggtgaag

SEQ ID NO: 10933 - DNA, 16 bp, synthetic construct
  misc_feature 1..16: note = synthetic [barcode part1]
  source 1..16: mol_type = other DNA
tgccgaagagttgtct

SEQ ID NO: 10934 - DNA, 16 bp, synthetic construct
  misc_feature 1..16: note = synthetic [barcode part1]
  source 1..16: mol_type = other DNA
ttacaccggtacaggt

SEQ ID NO: 10935 - DNA, 16 bp, synthetic construct
  misc_feature 1..16: note = synthetic [barcode part1]
  source 1..16: mol_type = other DNA
atacgcgcagtgttgt

SEQ ID NO: 10936 - DNA, 16 bp, synthetic construct
  misc_feature 1..16: note = synthetic [barcode part1]
  source 1..16: mol_type = other DNA
actaacaccgccgtct

SEQ ID NO: 10937 - DNA, 16 bp, synthetic construct
  misc_feature 1..16: note = synthetic [barcode part1]
  source 1..16: mol_type = other DNA
cctaaggtgatcggtt

SEQ ID NO: 10938 - DNA, 16 bp, synthetic construct
  misc_feature 1..16: note = synthetic [barcode part1]
  source 1..16: mol_type = other DNA
ttgatctagtgcgttc

SEQ ID NO: 10939 - DNA, 16 bp, synthetic construct
  misc_feature 1..16: note = synthetic [barcode part1]
  source 1..16: mol_type = other DNA
ttaacctcactccacc

SEQ ID NO: 10940 - DNA, 16 bp, synthetic construct
  misc_feature 1..16: note = synthetic [barcode part1]
  source 1..16: mol_type = other DNA
aagacggagtactcgc

SEQ ID NO: 10941 - DNA, 16 bp, synthetic construct
  misc_feature 1..16: note = synthetic [barcode part1]
  source 1..16: mol_type = other DNA
tccaacacggaggtag

SEQ ID NO: 10942 - DNA, 16 bp, synthetic construct
  misc_feature 1..16: note = synthetic [barcode part1]
  source 1..16: mol_type = other DNA
ttgtgacgtaccacag

SEQ ID NO: 10943 - DNA, 16 bp, synthetic construct
  misc_feature 1..16: note = synthetic [barcode part1]
  source 1..16: mol_type = other DNA
tcctataggagacgtc

SEQ ID NO: 10944 - DNA, 16 bp, synthetic construct
  misc_feature 1..16: note = synthetic [barcode part1]
  source 1..16: mol_type = other DNA
aactgacaccacagtc

SEQ ID NO: 10945 - DNA, 16 bp, synthetic construct
  misc_feature 1..16: note = synthetic [barcode part1]
  source 1..16: mol_type = other DNA
cacacttgagtcactt

SEQ ID NO: 10946 - DNA, 16 bp, synthetic construct
  misc_feature 1..16: note = synthetic [barcode part1]
  source 1..16: mol_type = other DNA
tgtcgattgaccgtag

SEQ ID NO: 10947 - DNA, 16 bp, synthetic construct
  misc_feature 1..16: note = synthetic [barcode part1]
  source 1..16: mol_type = other DNA
tcctgcgaacttgatt

SEQ ID NO: 10948 - DNA, 16 bp, synthetic construct
  misc_feature 1..16: note = synthetic [barcode part1]
  source 1..16: mol_type = other DNA
agtctagttggactgc

SEQ ID NO: 10949 - DNA, 16 bp, synthetic construct
  misc_feature 1..16: note = synthetic [barcode part1]
  source 1..16: mol_type = other DNA
gttcactcttgcctgt

SEQ ID NO: 10950 - DNA, 16 bp, synthetic construct
  misc_feature 1..16: note = synthetic [barcode part1]
  source 1..16: mol_type = other DNA
tggtactaacgtcacg

SEQ ID NO: 10951 - DNA, 16 bp, synthetic construct
  misc_feature 1..16: note = synthetic [barcode part1]
  source 1..16: mol_type = other DNA
cacggattccgtcact

SEQ ID NO: 10952 - DNA, 16 bp, synthetic construct
  misc_feature 1..16: note = synthetic [barcode part1]
  source 1..16: mol_type = other DNA
tcgtaacgaaggagag

SEQ ID NO: 10953 - DNA, 16 bp, synthetic construct
  misc_feature 1..16: note = synthetic [barcode part1]
  source 1..16: mol_type = other DNA
ccgtacgtcgattctg

SEQ ID NO: 10954 - DNA, 16 bp, synthetic construct
  misc_feature 1..16: note = synthetic [barcode part1]
  source 1..16: mol_type = other DNA
tgttgccgtccgaatc

SEQ ID NO: 10955 - DNA, 16 bp, synthetic construct
  misc_feature 1..16: note = synthetic [barcode part1]
  source 1..16: mol_type = other DNA
ttctgaccgtagactt

SEQ ID NO: 10956 - DNA, 16 bp, synthetic construct
  misc_feature 1..16: note = synthetic [barcode part1]
  source 1..16: mol_type = other DNA
agttcctcttcgtcgt

SEQ ID NO: 10957 - DNA, 16 bp, synthetic construct
  misc_feature 1..16: note = synthetic [barcode part1]
  source 1..16: mol_type = other DNA
ttgcctccgtagactg

SEQ ID NO: 10958 - DNA, 16 bp, synthetic construct
  misc_feature 1..16: note = synthetic [barcode part1]
  source 1..16: mol_type = other DNA
tagtgcaactggaggc

SEQ ID NO: 10959 - DNA, 16 bp, synthetic construct
  misc_feature 1..16: note = synthetic [barcode part1]
  source 1..16: mol_type = other DNA
cctactacgaccttct

SEQ ID NO: 10960 - DNA, 16 bp, synthetic construct
  misc_feature 1..16: note = synthetic [barcode part1]
  source 1..16: mol_type = other DNA
aataatctcctgcgtc

SEQ ID NO: 10961 - DNA, 16 bp, synthetic construct
  misc_feature 1..16: note = synthetic [barcode part1]
  source 1..16: mol_type = other DNA
taggaggtggtcacac

SEQ ID NO: 10962 - DNA, 16 bp, synthetic construct
  misc_feature 1..16: note = synthetic [barcode part1]
  source 1..16: mol_type = other DNA
gttcgaagtgacaggc

SEQ ID NO: 10963 - DNA, 16 bp, synthetic construct
  misc_feature 1..16: note = synthetic [barcode part1]
  source 1..16: mol_type = other DNA
tgtacacgtgtgtgtg

SEQ ID NO: 10964 - DNA, 16 bp, synthetic construct
  misc_feature 1..16: note = synthetic [barcode part1]
  source 1..16: mol_type = other DNA
tctaacttagttgcgc

SEQ ID NO: 10965 - DNA, 16 bp, synthetic construct
  misc_feature 1..16: note = synthetic [barcode part1]
  source 1..16: mol_type = other DNA
attcgagacggatctc

SEQ ID NO: 10966 - DNA, 16 bp, synthetic construct
  misc_feature 1..16: note = synthetic [barcode part1]
  source 1..16: mol_type = other DNA
tctcgcaagagtacac

SEQ ID NO: 10967 - DNA, 16 bp, synthetic construct
  misc_feature 1..16: note = synthetic [barcode part1]
  source 1..16: mol_type = other DNA
tccaaggtctcagagt

SEQ ID NO: 10968 - DNA, 16 bp, synthetic construct
  misc_feature 1..16: note = synthetic [barcode part1]
  source 1..16: mol_type = other DNA
gagatctacgaacaac

SEQ ID NO: 10969 - DNA, 16 bp, synthetic construct
  misc_feature 1..16: note = synthetic [barcode part1]
  source 1..16: mol_type = other DNA
tggccttaactgagac

SEQ ID NO: 10970 - DNA, 16 bp, synthetic construct
  misc_feature 1..16: note = synthetic [barcode part1]
  source 1..16: mol_type = other DNA
gttacgacctggaatc

SEQ ID NO: 10971 - DNA, 16 bp, synthetic construct
  misc_feature 1..16: note = synthetic [barcode part1]
  source 1..16: mol_type = other DNA
tccaccgattgttcct

SEQ ID NO: 10972 - DNA, 16 bp, synthetic construct
  misc_feature 1..16: note = synthetic [barcode part1]
  source 1..16: mol_type = other DNA
acgtacgttggtcagt

SEQ ID NO: 10973 - DNA, 16 bp, synthetic construct
  misc_feature 1..16: note = synthetic [barcode part1]
  source 1..16: mol_type = other DNA
ccaagtacactatctc

SEQ ID NO: 10974 - DNA, 16 bp, synthetic construct
  misc_feature 1..16: note = synthetic [barcode part1]
  source 1..16: mol_type = other DNA
cgtgttctgaatcgcc

SEQ ID NO: 10975 - DNA, 16 bp, synthetic construct
  misc_feature 1..16: note = synthetic [barcode part1]
  source 1..16: mol_type = other DNA
gtggtagacagttgcg

SEQ ID NO: 10976 - DNA, 16 bp, synthetic construct
  misc_feature 1..16: note = synthetic [barcode part1]
  source 1..16: mol_type = other DNA
cactcctcgacgattg

SEQ ID NO: 10977 - DNA, 16 bp, synthetic construct
  misc_feature 1..16: note = synthetic [barcode part1]
  source 1..16: mol_type = other DNA
acaagttcgtgtcggt

SEQ ID NO: 10978 - DNA, 16 bp, synthetic construct
  misc_feature 1..16: note = synthetic [barcode part1]
  source 1..16: mol_type = other DNA
aacaccttagagagtg

SEQ ID NO: 10979 - DNA, 16 bp, synthetic construct
  misc_feature 1..16: note = synthetic [barcode part1]
  source 1..16: mol_type = other DNA
gaagttacggtggaag

SEQ ID NO: 10980 - DNA, 16 bp, synthetic construct
  misc_feature 1..16: note = synthetic [barcode part1]
  source 1..16: mol_type = other DNA
agttacaccagaaggt

SEQ ID NO: 10981 - DNA, 16 bp, synthetic construct
  misc_feature 1..16: note = synthetic [barcode part1]
  source 1..16: mol_type = other DNA
ttctgttgagttcgtg

SEQ ID NO: 10982 - DNA, 16 bp, synthetic construct
  misc_feature 1..16: note = synthetic [barcode part1]
  source 1..16: mol_type = other DNA
taggtctagatctgcg

SEQ ID NO: 10983 - DNA, 16 bp, synthetic construct
  misc_feature 1..16: note = synthetic [barcode part1]
  source 1..16: mol_type = other DNA
tcctaatctaggtacc

SEQ ID NO: 10984 - DNA, 16 bp, synthetic construct
  misc_feature 1..16: note = synthetic [barcode part1]
  source 1..16: mol_type = other DNA
acgactggttgtacgt

SEQ ID NO: 10985 - DNA, 16 bp, synthetic construct
  misc_feature 1..16: note = synthetic [barcode part1]
  source 1..16: mol_type = other DNA
ccttctccacgatact

SEQ ID NO: 10986 - DNA, 16 bp, synthetic construct
  misc_feature 1..16: note = synthetic [barcode part1]
  source 1..16: mol_type = other DNA
tgtgatcgttgtcttg

SEQ ID NO: 10987 - DNA, 16 bp, synthetic construct
  misc_feature 1..16: note = synthetic [barcode part1]
  source 1..16: mol_type = other DNA
taggaggtgtgtggtc

SEQ ID NO: 10988 - DNA, 16 bp, synthetic construct
  misc_feature 1..16: note = synthetic [barcode part1]
  source 1..16: mol_type = other DNA
agtatagtgtcgaacg

SEQ ID NO: 10989 - DNA, 16 bp, synthetic construct
  misc_feature 1..16: note = synthetic [barcode part1]
  source 1..16: mol_type = other DNA
ccacgagtattctgcc

SEQ ID NO: 10990 - DNA, 16 bp, synthetic construct
  misc_feature 1..16: note = synthetic [barcode part1]
  source 1..16: mol_type = other DNA
gactaactggcactac

SEQ ID NO: 10991 - DNA, 16 bp, synthetic construct
  misc_feature 1..16: note = synthetic [barcode part1]
  source 1..16: mol_type = other DNA
ttgttcaagtgtcgtc

SEQ ID NO: 10992 - DNA, 16 bp, synthetic construct
  misc_feature 1..16: note = synthetic [barcode part1]
  source 1..16: mol_type = other DNA
cgcacttaatagtctc

SEQ ID NO: 10993 - DNA, 16 bp, synthetic construct
  misc_feature 1..16: note = synthetic [barcode part1]
  source 1..16: mol_type = other DNA
gtcacctgttcgcaac

SEQ ID NO: 10994 - DNA, 16 bp, synthetic construct
  misc_feature 1..16: note = synthetic [barcode part1]
  source 1..16: mol_type = other DNA
gcggatatcacttgtg

SEQ ID NO: 10995 - DNA, 16 bp, synthetic construct
  misc_feature 1..16: note = synthetic [barcode part1]
  source 1..16: mol_type = other DNA
atcagaccgaagacgc

SEQ ID NO: 10996 - DNA, 16 bp, synthetic construct
  misc_feature 1..16: note = synthetic [barcode part1]
  source 1..16: mol_type = other DNA
acagtgcaaggtctct

SEQ ID NO: 10997 - DNA, 16 bp, synthetic construct
  misc_feature 1..16: note = synthetic [barcode part1]
  source 1..16: mol_type = other DNA
tgattcgtagagacag

SEQ ID NO: 10998 - DNA, 16 bp, synthetic construct
  misc_feature 1..16: note = synthetic [barcode part1]
  source 1..16: mol_type = other DNA
cgtagagataccttcg

SEQ ID NO: 10999 - DNA, 16 bp, synthetic construct
  misc_feature 1..16: note = synthetic [barcode part1]
  source 1..16: mol_type = other DNA
ataggcgcaagtgaag

SEQ ID NO: 11000 - DNA, 16 bp, synthetic construct
  misc_feature 1..16: note = synthetic [barcode part1]
  source 1..16: mol_type = other DNA
gatcgccttatatctg

SEQ ID NO: 11001 - DNA, 16 bp, synthetic construct
  misc_feature 1..16: note = synthetic [barcode part1]
  source 1..16: mol_type = other DNA
gaagattgcgtatcag

SEQ ID NO: 11002 - DNA, 16 bp, synthetic construct
  misc_feature 1..16: note = synthetic [barcode part1]
  source 1..16: mol_type = other DNA
tcctgtgattatcgac

SEQ ID NO: 11003 - DNA, 16 bp, synthetic construct
  misc_feature 1..16: note = synthetic [barcode part1]
  source 1..16: mol_type = other DNA
cacctattctaggact

SEQ ID NO: 11004 - DNA, 16 bp, synthetic construct
  misc_feature 1..16: note = synthetic [barcode part1]
  source 1..16: mol_type = other DNA
tgcgttctgaattgtc

SEQ ID NO: 11005 - DNA, 16 bp, synthetic construct
  misc_feature 1..16: note = synthetic [barcode part1]
  source 1..16: mol_type = other DNA
cgttacaatacgcgtg

SEQ ID NO: 11006 - DNA, 16 bp, synthetic construct
  misc_feature 1..16: note = synthetic [barcode part1]
  source 1..16: mol_type = other DNA
tgtgttcgtaatccgt

SEQ ID NO: 11007 - DNA, 16 bp, synthetic construct
  misc_feature 1..16: note = synthetic [barcode part1]
  source 1..16: mol_type = other DNA
gagatccggcactatt

SEQ ID NO: 11008 - DNA, 16 bp, synthetic construct
  misc_feature 1..16: note = synthetic [barcode part1]
  source 1..16: mol_type = other DNA
agaagtgccacactct

SEQ ID NO: 11009 - DNA, 16 bp, synthetic construct
  misc_feature 1..16: note = synthetic [barcode part1]
  source 1..16: mol_type = other DNA
taggtacagtcgtacc

SEQ ID NO: 11010 - DNA, 16 bp, synthetic construct
  misc_feature 1..16: note = synthetic [barcode part1]
  source 1..16: mol_type = other DNA
ttattgaccttcgcag

SEQ ID NO: 11011 - DNA, 16 bp, synthetic construct
  misc_feature 1..16: note = synthetic [barcode part1]
  source 1..16: mol_type = other DNA
tcaactcggcacacct

SEQ ID NO: 11012 - DNA, 16 bp, synthetic construct
  misc_feature 1..16: note = synthetic [barcode part1]
  source 1..16: mol_type = other DNA
acaagtccgtagactc

SEQ ID NO: 11013 - DNA, 16 bp, synthetic construct
  misc_feature 1..16: note = synthetic [barcode part1]
  source 1..16: mol_type = other DNA
tgcgaccgagatagtg

SEQ ID NO: 11014 - DNA, 16 bp, synthetic construct
  misc_feature 1..16: note = synthetic [barcode part1]
  source 1..16: mol_type = other DNA
acgagactactgttcg

SEQ ID NO: 11015 - DNA, 16 bp, synthetic construct
  misc_feature 1..16: note = synthetic [barcode part1]
  source 1..16: mol_type = other DNA
aggattccgaagttcc

SEQ ID NO: 11016 - DNA, 16 bp, synthetic construct
  misc_feature 1..16: note = synthetic [barcode part1]
  source 1..16: mol_type = other DNA
gatctaacggtggtct

SEQ ID NO: 11017 - DNA, 16 bp, synthetic construct
  misc_feature 1..16: note = synthetic [barcode part1]
  source 1..16: mol_type = other DNA
gactataggttctcct

SEQ ID NO: 11018 - DNA, 16 bp, synthetic construct
  misc_feature 1..16: note = synthetic [barcode part1]
  source 1..16: mol_type = other DNA
tgcagtactcagagtc

SEQ ID NO: 11019 - DNA, 16 bp, synthetic construct
  misc_feature 1..16: note = synthetic [barcode part1]
  source 1..16: mol_type = other DNA
attacagagtggacgt

SEQ ID NO: 11020 - DNA, 16 bp, synthetic construct
  misc_feature 1..16: note = synthetic [barcode part1]
  source 1..16: mol_type = other DNA
cactcgcagacagatt

SEQ ID NO: 11021 - DNA, 16 bp, synthetic construct
  misc_feature 1..16: note = synthetic [barcode part1]
  source 1..16: mol_type = other DNA
tctctcctgcaacgtt

SEQ ID NO: 11022 - DNA, 16 bp, synthetic construct
  misc_feature 1..16: note = synthetic [barcode part1]
  source 1..16: mol_type = other DNA
ccgattcacttcctac

SEQ ID NO: 11023 - DNA, 16 bp, synthetic construct
  misc_feature 1..16: note = synthetic [barcode part1]
  source 1..16: mol_type = other DNA
aggatcctgtctgcct

SEQ ID NO: 11024 - DNA, 16 bp, synthetic construct
  misc_feature 1..16: note = synthetic [barcode part1]
  source 1..16: mol_type = other DNA
tattacctgtcggtac

SEQ ID NO: 11025 - DNA, 16 bp, synthetic construct
  misc_feature 1..16: note = synthetic [barcode part1]
  source 1..16: mol_type = other DNA
tcttgatcgacaaggc

SEQ ID NO: 11026 - DNA, 16 bp, synthetic construct
  misc_feature 1..16: note = synthetic [barcode part1]
  source 1..16: mol_type = other DNA
tagacacgcgcaattc

SEQ ID NO: 11027 - DNA, 16 bp, synthetic construct
  misc_feature 1..16: note = synthetic [barcode part1]
  source 1..16: mol_type = other DNA
gaacacgcgactcaag

SEQ ID NO: 11028 - DNA, 16 bp, synthetic construct
  misc_feature 1..16: note = synthetic [barcode part1]
  source 1..16: mol_type = other DNA
tccgaatcctaattcg

SEQ ID NO: 11029 - DNA, 16 bp, synthetic construct
  misc_feature 1..16: note = synthetic [barcode part1]
  source 1..16: mol_type = other DNA
ccagttagattgaccg

SEQ ID NO: 11030 - DNA, 16 bp, synthetic construct
  misc_feature 1..16: note = synthetic [barcode part1]
  source 1..16: mol_type = other DNA
tgtagacggtacctac

SEQ ID NO: 11031 - DNA, 16 bp, synthetic construct
  misc_feature 1..16: note = synthetic [barcode part1]
  source 1..16: mol_type = other DNA
aatcaaccacacgcgt

SEQ ID NO: 11032 - DNA, 16 bp, synthetic construct
  misc_feature 1..16: note = synthetic [barcode part1]
  source 1..16: mol_type = other DNA
gtgcacgcaatatcac

SEQ ID NO: 11033 - DNA, 16 bp, synthetic construct
  misc_feature 1..16: note = synthetic [barcode part1]
  source 1..16: mol_type = other DNA
tatctctcgcaggaag

SEQ ID NO: 11034 - DNA, 16 bp, synthetic construct
  misc_feature 1..16: note = synthetic [barcode part1]
  source 1..16: mol_type = other DNA
tccagtccgattatac

SEQ ID NO: 11035 - DNA, 16 bp, synthetic construct
  misc_feature 1..16: note = synthetic [barcode part1]
  source 1..16: mol_type = other DNA
ttcctggatactggcc

SEQ ID NO: 11036 - DNA, 16 bp, synthetic construct
  misc_feature 1..16: note = synthetic [barcode part1]
  source 1..16: mol_type = other DNA
atcaagtgcgaagact

SEQ ID NO: 11037 - DNA, 16 bp, synthetic construct
  misc_feature 1..16: note = synthetic [barcode part1]
  source 1..16: mol_type = other DNA
acttccgcaagttgcc

SEQ ID NO: 11038 - DNA, 16 bp, synthetic construct
  misc_feature 1..16: note = synthetic [barcode part1]
  source 1..16: mol_type = other DNA
tgtgtgtctgaccaag

SEQ ID NO: 11039 - DNA, 16 bp, synthetic construct
  misc_feature 1..16: note = synthetic [barcode part1]
  source 1..16: mol_type = other DNA
atccactcctaagact

SEQ ID NO: 11040 - DNA, 16 bp, synthetic construct
  misc_feature 1..16: note = synthetic [barcode part1]
  source 1..16: mol_type = other DNA
tgcagttcgacttccg

SEQ ID NO: 11041 - DNA, 16 bp, synthetic construct
  misc_feature 1..16: note = synthetic [barcode part1]
  source 1..16: mol_type = other DNA
tggaacgtactggcag

SEQ ID NO: 11042 - DNA, 16 bp, synthetic construct
  misc_feature 1..16: note = synthetic [barcode part1]
  source 1..16: mol_type = other DNA
cagtatattctgccgt

SEQ ID NO: 11043 - DNA, 16 bp, synthetic construct
  misc_feature 1..16: note = synthetic [barcode part1]
  source 1..16: mol_type = other DNA
gtcgtaacactcgtcc

SEQ ID NO: 11044 - DNA, 16 bp, synthetic construct
  misc_feature 1..16: note = synthetic [barcode part1]
  source 1..16: mol_type = other DNA
agtaggagaccgtatt

SEQ ID NO: 11045 - DNA, 16 bp, synthetic construct
  misc_feature 1..16: note = synthetic [barcode part1]
  source 1..16: mol_type = other DNA
ccgaacgtctaagtac

SEQ ID NO: 11046 - DNA, 16 bp, synthetic construct
  misc_feature 1..16: note = synthetic [barcode part1]
  source 1..16: mol_type = other DNA
ccgtgcctatcagatc

SEQ ID NO: 11047 - DNA, 16 bp, synthetic construct
  misc_feature 1..16: note = synthetic [barcode part1]
  source 1..16: mol_type = other DNA
ttcaggtctcgactcg

SEQ ID NO: 11048 - DNA, 16 bp, synthetic construct
  misc_feature 1..16: note = synthetic [barcode part1]
  source 1..16: mol_type = other DNA
caagatccgtaacgtc

SEQ ID NO: 11049 - DNA, 16 bp, synthetic construct
  misc_feature 1..16: note = synthetic [barcode part1]
  source 1..16: mol_type = other DNA
gaaggatctcgatcct

SEQ ID NO: 11050 - DNA, 16 bp, synthetic construct
  misc_feature 1..16: note = synthetic [barcode part1]
  source 1..16: mol_type = other DNA
cagatactgcgagttc

SEQ ID NO: 11051 - DNA, 16 bp, synthetic construct
  misc_feature 1..16: note = synthetic [barcode part1]
  source 1..16: mol_type = other DNA
tcagtagtacttccac

SEQ ID NO: 11052 - DNA, 16 bp, synthetic construct
  misc_feature 1..16: note = synthetic [barcode part1]
  source 1..16: mol_type = other DNA
ttgcctggtgaacaac

SEQ ID NO: 11053 - DNA, 16 bp, synthetic construct
  misc_feature 1..16: note = synthetic [barcode part1]
  source 1..16: mol_type = other DNA
ccagatagtggtaggc

SEQ ID NO: 11054 - DNA, 16 bp, synthetic construct
  misc_feature 1..16: note = synthetic [barcode part1]
  source 1..16: mol_type = other DNA
gtgtacaggtcagttc

SEQ ID NO: 11055 - DNA, 16 bp, synthetic construct
  misc_feature 1..16: note = synthetic [barcode part1]
  source 1..16: mol_type = other DNA
cgtgcggacttcttgt

SEQ ID NO: 11056 - DNA, 16 bp, synthetic construct
  misc_feature 1..16: note = synthetic [barcode part1]
  source 1..16: mol_type = other DNA
acgtacaggaacttcc

SEQ ID NO: 11057 - DNA, 16 bp, synthetic construct
  misc_feature 1..16: note = synthetic [barcode part1]
  source 1..16: mol_type = other DNA
attccgtaacgcgcct

SEQ ID NO: 11058 - DNA, 16 bp, synthetic construct
  misc_feature 1..16: note = synthetic [barcode part1]
  source 1..16: mol_type = other DNA
tgatcgaggttctgac

SEQ ID NO: 11059 - DNA, 16 bp, synthetic construct
  misc_feature 1..16: note = synthetic [barcode part1]
  source 1..16: mol_type = other DNA
gacacgaacttgatag

SEQ ID NO: 11060 - DNA, 16 bp, synthetic construct
  misc_feature 1..16: note = synthetic [barcode part1]
  source 1..16: mol_type = other DNA
taacctgtcgcacctg

SEQ ID NO: 11061 - DNA, 16 bp, synthetic construct
  misc_feature 1..16: note = synthetic [barcode part1]
  source 1..16: mol_type = other DNA
tccgtgtaattcggcc

SEQ ID NO: 11062 - DNA, 16 bp, synthetic construct
  misc_feature 1..16: note = synthetic [barcode part1]
  source 1..16: mol_type = other DNA
aaggcgtctaatagtg

SEQ ID NO: 11063 - DNA, 16 bp, synthetic construct
  misc_feature 1..16: note = synthetic [barcode part1]
  source 1..16: mol_type = other DNA
taacgtgcaattctcc

SEQ ID NO: 11064 - DNA, 16 bp, synthetic construct
  misc_feature 1..16: note = synthetic [barcode part1]
  source 1..16: mol_type = other DNA
tagaattcgcgtgtgc

SEQ ID NO: 11065 - DNA, 16 bp, synthetic construct
  misc_feature 1..16: note = synthetic [barcode part1]
  source 1..16: mol_type = other DNA
tgttatctaggaggcc

SEQ ID NO: 11066 - DNA, 16 bp, synthetic construct
  misc_feature 1..16: note = synthetic [barcode part1]
  source 1..16: mol_type = other DNA
taacctgttaccggag

SEQ ID NO: 11067 - DNA, 16 bp, synthetic construct
  misc_feature 1..16: note = synthetic [barcode part1]
  source 1..16: mol_type = other DNA
tgtgtgaaggtgtctc

SEQ ID NO: 11068 - DNA, 16 bp, synthetic construct
  misc_feature 1..16: note = synthetic [barcode part1]
  source 1..16: mol_type = other DNA
accaggagagaagttg

SEQ ID NO: 11069 - DNA, 16 bp, synthetic construct
  misc_feature 1..16: note = synthetic [barcode part1]
  source 1..16: mol_type = other DNA
aagacttgacagacgt

SEQ ID NO: 11070 - DNA, 16 bp, synthetic construct
  misc_feature 1..16: note = synthetic [barcode part1]
  source 1..16: mol_type = other DNA
aagttaccagagacgt

SEQ ID NO: 11071 - DNA, 16 bp, synthetic construct
  misc_feature 1..16: note = synthetic [barcode part1]
  source 1..16: mol_type = other DNA
gagttctcctctcttg

SEQ ID NO: 11072 - DNA, 16 bp, synthetic construct
  misc_feature 1..16: note = synthetic [barcode part1]
  source 1..16: mol_type = other DNA
gtgtataccggttggt

SEQ ID NO: 11073 - DNA, 16 bp, synthetic construct
  misc_feature 1..16: note = synthetic [barcode part1]
  source 1..16: mol_type = other DNA
aagaggtctatcgcct

SEQ ID NO: 11074 - DNA, 16 bp, synthetic construct
  misc_feature 1..16: note = synthetic [barcode part1]
  source 1..16: mol_type = other DNA
aatccttgtcgtcctc

SEQ ID NO: 11075 - DNA, 16 bp, synthetic construct
  misc_feature 1..16: note = synthetic [barcode part1]
  source 1..16: mol_type = other DNA
taccagagacagttcc

SEQ ID NO: 11076 - DNA, 16 bp, synthetic construct
  misc_feature 1..16: note = synthetic [barcode part1]
  source 1..16: mol_type = other DNA
gtgtagttagtgcacc

SEQ ID NO: 11077 - DNA, 16 bp, synthetic construct
  misc_feature 1..16: note = synthetic [barcode part1]
  source 1..16: mol_type = other DNA
gaattgcaagtcgtcc

SEQ ID NO: 11078 - DNA, 16 bp, synthetic construct
  misc_feature 1..16: note = synthetic [barcode part1]
  source 1..16: mol_type = other DNA
ccgtatacctcaattg

SEQ ID NO: 11079 - DNA, 16 bp, synthetic construct
  misc_feature 1..16: note = synthetic [barcode part1]
  source 1..16: mol_type = other DNA
gcacaaccaacgtact

SEQ ID NO: 11080 - DNA, 16 bp, synthetic construct
  misc_feature 1..16: note = synthetic [barcode part1]
  source 1..16: mol_type = other DNA
ccagagtcaaggtctt

SEQ ID NO: 11081 - DNA, 16 bp, synthetic construct
  misc_feature 1..16: note = synthetic [barcode part1]
  source 1..16: mol_type = other DNA
acaacctctcacaccg

SEQ ID NO: 11082 - DNA, 16 bp, synthetic construct
  misc_feature 1..16: note = synthetic [barcode part1]
  source 1..16: mol_type = other DNA
taactcctgtggttgt

SEQ ID NO: 11083 - DNA, 16 bp, synthetic construct
  misc_feature 1..16: note = synthetic [barcode part1]
  source 1..16: mol_type = other DNA
tctggaatcggaatcc

SEQ ID NO: 11084 - DNA, 16 bp, synthetic construct
  misc_feature 1..16: note = synthetic [barcode part1]
  source 1..16: mol_type = other DNA
tcgcaccacttctgtt

SEQ ID NO: 11085 - DNA, 16 bp, synthetic construct
  misc_feature 1..16: note = synthetic [barcode part1]
  source 1..16: mol_type = other DNA
agtcgtgtgtaaccgt

SEQ ID NO: 11086 - DNA, 16 bp, synthetic construct
  misc_feature 1..16: note = synthetic [barcode part1]
  source 1..16: mol_type = other DNA
tcgcgtgagagttgag

SEQ ID NO: 11087 - DNA, 16 bp, synthetic construct
  misc_feature 1..16: note = synthetic [barcode part1]
  source 1..16: mol_type = other DNA
cgttctacttaggtgt

SEQ ID NO: 11088 - DNA, 16 bp, synthetic construct
  misc_feature 1..16: note = synthetic [barcode part1]
  source 1..16: mol_type = other DNA
atccaggtaagtgcct

SEQ ID NO: 11089 - DNA, 16 bp, synthetic construct
  misc_feature 1..16: note = synthetic [barcode part1]
  source 1..16: mol_type = other DNA
tgtcttgtaaggcggt

SEQ ID NO: 11090 - DNA, 16 bp, synthetic construct
  misc_feature 1..16: note = synthetic [barcode part1]
  source 1..16: mol_type = other DNA
tgtcacacacagtgtg

SEQ ID NO: 11091 - DNA, 16 bp, synthetic construct
  misc_feature 1..16: note = synthetic [barcode part1]
  source 1..16: mol_type = other DNA
ccgatagtaccgagtt

SEQ ID NO: 11092 - DNA, 16 bp, synthetic construct
  misc_feature 1..16: note = synthetic [barcode part1]
  source 1..16: mol_type = other DNA
acttgttggcggatac

SEQ ID NO: 11093 - DNA, 16 bp, synthetic construct
  misc_feature 1..16: note = synthetic [barcode part1]
  source 1..16: mol_type = other DNA
atcgagtaacgcaggc

SEQ ID NO: 11094 - DNA, 16 bp, synthetic construct
  misc_feature 1..16: note = synthetic [barcode part1]
  source 1..16: mol_type = other DNA
aaggcctcagacaggt

SEQ ID NO: 11095 - DNA, 16 bp, synthetic construct
  misc_feature 1..16: note = synthetic [barcode part1]
  source 1..16: mol_type = other DNA
cgaggagatcggtgtt

SEQ ID NO: 11096 - DNA, 16 bp, synthetic construct
  misc_feature 1..16: note = synthetic [barcode part1]
  source 1..16: mol_type = other DNA
acctcaatcaagaccg

SEQ ID NO: 11097 - DNA, 16 bp, synthetic construct
  misc_feature 1..16: note = synthetic [barcode part1]
  source 1..16: mol_type = other DNA
tatcactgtctaggtc

SEQ ID NO: 11098 - DNA, 16 bp, synthetic construct
  misc_feature 1..16: note = synthetic [barcode part1]
  source 1..16: mol_type = other DNA
aattgcgtctcgattc

SEQ ID NO: 11099 - DNA, 16 bp, synthetic construct
  misc_feature 1..16: note = synthetic [barcode part1]
  source 1..16: mol_type = other DNA
gagtagaagatcctgt

SEQ ID NO: 11100 - DNA, 16 bp, synthetic construct
  misc_feature 1..16: note = synthetic [barcode part1]
  source 1..16: mol_type = other DNA
gacacgatatcggacg

SEQ ID NO: 11101 - DNA, 16 bp, synthetic construct
  misc_feature 1..16: note = synthetic [barcode part1]
  source 1..16: mol_type = other DNA
taatcggtaacgtcgc

SEQ ID NO: 11102 - DNA, 16 bp, synthetic construct
  misc_feature 1..16: note = synthetic [barcode part1]
  source 1..16: mol_type = other DNA
agtgttctcgtcaccg

SEQ ID NO: 11103 - DNA, 16 bp, synthetic construct
  misc_feature 1..16: note = synthetic [barcode part1]
  source 1..16: mol_type = other DNA
taacgtcaggtcctag

SEQ ID NO: 11104 - DNA, 16 bp, synthetic construct
  misc_feature 1..16: note = synthetic [barcode part1]
  source 1..16: mol_type = other DNA
tcaacggcgttgaact

SEQ ID NO: 11105 - DNA, 16 bp, synthetic construct
  misc_feature 1..16: note = synthetic [barcode part1]
  source 1..16: mol_type = other DNA
gagacctataggcggt

SEQ ID NO: 11106 - DNA, 16 bp, synthetic construct
  misc_feature 1..16: note = synthetic [barcode part1]
  source 1..16: mol_type = other DNA
cacaactactaggaag

SEQ ID NO: 11107 - DNA, 16 bp, synthetic construct
  misc_feature 1..16: note = synthetic [barcode part1]
  source 1..16: mol_type = other DNA
taccttgagtactcgt

SEQ ID NO: 11108 - DNA, 16 bp, synthetic construct
  misc_feature 1..16: note = synthetic [barcode part1]
  source 1..16: mol_type = other DNA
tgtcacagatctcgag

SEQ ID NO: 11109 - DNA, 16 bp, synthetic construct
  misc_feature 1..16: note = synthetic [barcode part1]
  source 1..16: mol_type = other DNA
tatcactacggttacc

SEQ ID NO: 11110 - DNA, 16 bp, synthetic construct
  misc_feature 1..16: note = synthetic [barcode part1]
  source 1..16: mol_type = other DNA
taggagatacaaccgt

SEQ ID NO: 11111 - DNA, 16 bp, synthetic construct
  misc_feature 1..16: note = synthetic [barcode part1]
  source 1..16: mol_type = other DNA
taccgtcacgatcgtc

SEQ ID NO: 11112 - DNA, 16 bp, synthetic construct
  misc_feature 1..16: note = synthetic [barcode part1]
  source 1..16: mol_type = other DNA
taccaactcttagtcg

SEQ ID NO: 11113 - DNA, 16 bp, synthetic construct
  misc_feature 1..16: note = synthetic [barcode part1]
  source 1..16: mol_type = other DNA
ataacttgagtgcgag

SEQ ID NO: 11114 - DNA, 16 bp, synthetic construct
  misc_feature 1..16: note = synthetic [barcode part1]
  source 1..16: mol_type = other DNA
cagacgataggactcg

SEQ ID NO: 11115 - DNA, 16 bp, synthetic construct
  misc_feature 1..16: note = synthetic [barcode part1]
  source 1..16: mol_type = other DNA
gcctggtacacagaag

SEQ ID NO: 11116 - DNA, 16 bp, synthetic construct
  misc_feature 1..16: note = synthetic [barcode part1]
  source 1..16: mol_type = other DNA
caacgattgtgagaac

SEQ ID NO: 11117 - DNA, 16 bp, synthetic construct
  misc_feature 1..16: note = synthetic [barcode part1]
  source 1..16: mol_type = other DNA
ccggccgtaatattag

SEQ ID NO: 11118 - DNA, 16 bp, synthetic construct
  misc_feature 1..16: note = synthetic [barcode part1]
  source 1..16: mol_type = other DNA
tacaccaagtctcttg

SEQ ID NO: 11119 - DNA, 16 bp, synthetic construct
  misc_feature 1..16: note = synthetic [barcode part1]
  source 1..16: mol_type = other DNA
acacaactggttgcac

SEQ ID NO: 11120 - DNA, 16 bp, synthetic construct
  misc_feature 1..16: note = synthetic [barcode part1]
  source 1..16: mol_type = other DNA
caattatacggccacg

SEQ ID NO: 11121 - DNA, 16 bp, synthetic construct
  misc_feature 1..16: note = synthetic [barcode part1]
  source 1..16: mol_type = other DNA
taccagtgtgtcagtg

SEQ ID NO: 11122 - DNA, 16 bp, synthetic construct
  misc_feature 1..16: note = synthetic [barcode part1]
  source 1..16: mol_type = other DNA
gagaacaggcaatctt

SEQ ID NO: 11123 - DNA, 16 bp, synthetic construct
  misc_feature 1..16: note = synthetic [barcode part1]
  source 1..16: mol_type = other DNA
tgttctggcgataggt

SEQ ID NO: 11124 - DNA, 16 bp, synthetic construct
  misc_feature 1..16: note = synthetic [barcode part1]
  source 1..16: mol_type = other DNA
cgccactgcgactatt

SEQ ID NO: 11125 - DNA, 16 bp, synthetic construct
  misc_feature 1..16: note = synthetic [barcode part1]
  source 1..16: mol_type = other DNA
tgcgtggtagacttac

SEQ ID NO: 11126 - DNA, 16 bp, synthetic construct
  misc_feature 1..16: note = synthetic [barcode part1]
  source 1..16: mol_type = other DNA
taagtccagacctgtg

SEQ ID NO: 11127 - DNA, 16 bp, synthetic construct
  misc_feature 1..16: note = synthetic [barcode part1]
  source 1..16: mol_type = other DNA
tagtgcaatcgaagac

SEQ ID NO: 11128 - DNA, 16 bp, synthetic construct
  misc_feature 1..16: note = synthetic [barcode part1]
  source 1..16: mol_type = other DNA
cgagtgatctactcag

SEQ ID NO: 11129 - DNA, 16 bp, synthetic construct
  misc_feature 1..16: note = synthetic [barcode part1]
  source 1..16: mol_type = other DNA
gaccagtaagacctct

SEQ ID NO: 11130 - DNA, 16 bp, synthetic construct
  misc_feature 1..16: note = synthetic [barcode part1]
  source 1..16: mol_type = other DNA
gtgtatattggccggt

SEQ ID NO: 11131 - DNA, 16 bp, synthetic construct
  misc_feature 1..16: note = synthetic [barcode part1]
  source 1..16: mol_type = other DNA
gagttgtcagaagtac

SEQ ID NO: 11132 - DNA, 16 bp, synthetic construct
  misc_feature 1..16: note = synthetic [barcode part1]
  source 1..16: mol_type = other DNA
actctccactgtgcag

SEQ ID NO: 11133 - DNA, 16 bp, synthetic construct
  misc_feature 1..16: note = synthetic [barcode part1]
  source 1..16: mol_type = other DNA
gaccgtgttgactctc

SEQ ID NO: 11134 - DNA, 16 bp, synthetic construct
  misc_feature 1..16: note = synthetic [barcode part1]
  source 1..16: mol_type = other DNA
cctcagtatatccggc

SEQ ID NO: 11135 - DNA, 16 bp, synthetic construct
  misc_feature 1..16: note = synthetic [barcode part1]
  source 1..16: mol_type = other DNA
ttcaccgccttactac

SEQ ID NO: 11136 - DNA, 16 bp, synthetic construct
  misc_feature 1..16: note = synthetic [barcode part1]
  source 1..16: mol_type = other DNA
taatagttcggaccgc

SEQ ID NO: 11137 - DNA, 16 bp, synthetic construct
  misc_feature 1..16: note = synthetic [barcode part1]
  source 1..16: mol_type = other DNA
gcaagacacaggttcg

SEQ ID NO: 11138 - DNA, 16 bp, synthetic construct
  misc_feature 1..16: note = synthetic [barcode part1]
  source 1..16: mol_type = other DNA
gcgttctgtcagactc

SEQ ID NO: 11139 - DNA, 16 bp, synthetic construct
  misc_feature 1..16: note = synthetic [barcode part1]
  source 1..16: mol_type = other DNA
taggaagaggaccagt

SEQ ID NO: 11140 - DNA, 16 bp, synthetic construct
  misc_feature 1..16: note = synthetic [barcode part1]
  source 1..16: mol_type = other DNA
taccactacctctcgt

SEQ ID NO: 11141 - DNA, 16 bp, synthetic construct
  misc_feature 1..16: note = synthetic [barcode part1]
  source 1..16: mol_type = other DNA
accacgcgaagatcag

SEQ ID NO: 11142 - DNA, 16 bp, synthetic construct
  misc_feature 1..16: note = synthetic [barcode part1]
  source 1..16: mol_type = other DNA
tcgtgattcaaccgag

SEQ ID NO: 11143 - DNA, 16 bp, synthetic construct
  misc_feature 1..16: note = synthetic [barcode part1]
  source 1..16: mol_type = other DNA
gtcggcggtgattatt

SEQ ID NO: 11144 - DNA, 16 bp, synthetic construct
  misc_feature 1..16: note = synthetic [barcode part1]
  source 1..16: mol_type = other DNA
tggtgtacggttcctc

SEQ ID NO: 11145 - DNA, 16 bp, synthetic construct
  misc_feature 1..16: note = synthetic [barcode part1]
  source 1..16: mol_type = other DNA
gtgcacgttgagattc

SEQ ID NO: 11146 - DNA, 16 bp, synthetic construct
  misc_feature 1..16: note = synthetic [barcode part1]
  source 1..16: mol_type = other DNA
tctagtccggcacgtt

SEQ ID NO: 11147 - DNA, 16 bp, synthetic construct
  misc_feature 1..16: note = synthetic [barcode part1]
  source 1..16: mol_type = other DNA
cgtaacgagacgaatt

SEQ ID NO: 11148 - DNA, 16 bp, synthetic construct
  misc_feature 1..16: note = synthetic [barcode part1]
  source 1..16: mol_type = other DNA
cgcacaactcaatctt

SEQ ID NO: 11149 - DNA, 16 bp, synthetic construct
  misc_feature 1..16: note = synthetic [barcode part1]
  source 1..16: mol_type = other DNA
taatctaggcgtagag

SEQ ID NO: 11150 - DNA, 16 bp, synthetic construct
  misc_feature 1..16: note = synthetic [barcode part1]
  source 1..16: mol_type = other DNA
ataccttcgcaaggac

SEQ ID NO: 11151 - DNA, 16 bp, synthetic construct
  misc_feature 1..16: note = synthetic [barcode part1]
  source 1..16: mol_type = other DNA
tccgtgtagaacacac

SEQ ID NO: 11152 - DNA, 16 bp, synthetic construct
  misc_feature 1..16: note = synthetic [barcode part1]
  source 1..16: mol_type = other DNA
acagtgtggagttctc

SEQ ID NO: 11153 - DNA, 16 bp, synthetic construct
  misc_feature 1..16: note = synthetic [barcode part1]
  source 1..16: mol_type = other DNA
acttccgtactctcac

SEQ ID NO: 11154 - DNA, 16 bp, synthetic construct
  misc_feature 1..16: note = synthetic [barcode part1]
  source 1..16: mol_type = other DNA
agattaggaccaggag

SEQ ID NO: 11155 - DNA, 16 bp, synthetic construct
  misc_feature 1..16: note = synthetic [barcode part1]
  source 1..16: mol_type = other DNA
gtagtaagtggccacg

SEQ ID NO: 11156 - DNA, 16 bp, synthetic construct
  misc_feature 1..16: note = synthetic [barcode part1]
  source 1..16: mol_type = other DNA
tagtcaggatcgactc

SEQ ID NO: 11157 - DNA, 16 bp, synthetic construct
  misc_feature 1..16: note = synthetic [barcode part1]
  source 1..16: mol_type = other DNA
acgagacgagtgatag

SEQ ID NO: 11158 - DNA, 16 bp, synthetic construct
  misc_feature 1..16: note = synthetic [barcode part1]
  source 1..16: mol_type = other DNA
tcgtcggaatctagtg

SEQ ID NO: 11159 - DNA, 16 bp, synthetic construct
  misc_feature 1..16: note = synthetic [barcode part1]
  source 1..16: mol_type = other DNA
tcagatagacgagact

SEQ ID NO: 11160 - DNA, 16 bp, synthetic construct
  misc_feature 1..16: note = synthetic [barcode part1]
  source 1..16: mol_type = other DNA
tgattcgatccttacg

SEQ ID NO: 11161 - DNA, 16 bp, synthetic construct
  misc_feature 1..16: note = synthetic [barcode part1]
  source 1..16: mol_type = other DNA
agtgtcgagttccagt

SEQ ID NO: 11162 - DNA, 16 bp, synthetic construct
  misc_feature 1..16: note = synthetic [barcode part1]
  source 1..16: mol_type = other DNA
aacctccttctgttgc

SEQ ID NO: 11163 - DNA, 16 bp, synthetic construct
  misc_feature 1..16: note = synthetic [barcode part1]
  source 1..16: mol_type = other DNA
tgcgtgcgtattgtag

SEQ ID NO: 11164 - DNA, 16 bp, synthetic construct
  misc_feature 1..16: note = synthetic [barcode part1]
  source 1..16: mol_type = other DNA
agaacctcggataggc

SEQ ID NO: 11165 - DNA, 16 bp, synthetic construct
  misc_feature 1..16: note = synthetic [barcode part1]
  source 1..16: mol_type = other DNA
agaggtgacaacctgc

SEQ ID NO: 11166 - DNA, 16 bp, synthetic construct
  misc_feature 1..16: note = synthetic [barcode part1]
  source 1..16: mol_type = other DNA
tcaggcgtctatcgtc

SEQ ID NO: 11167 - DNA, 16 bp, synthetic construct
  misc_feature 1..16: note = synthetic [barcode part1]
  source 1..16: mol_type = other DNA
acacgatcaaccgtac

SEQ ID NO: 11168 - DNA, 16 bp, synthetic construct
  misc_feature 1..16: note = synthetic [barcode part1]
  source 1..16: mol_type = other DNA
atcctcgtgttcctac

SEQ ID NO: 11169 - DNA, 16 bp, synthetic construct
  misc_feature 1..16: note = synthetic [barcode part1]
  source 1..16: mol_type = other DNA
gcgcaattgcgtgatt

SEQ ID NO: 11170 - DNA, 16 bp, synthetic construct
  misc_feature 1..16: note = synthetic [barcode part1]
  source 1..16: mol_type = other DNA
cggttagaccgtgatt

SEQ ID NO: 11171 - DNA, 16 bp, synthetic construct
  misc_feature 1..16: note = synthetic [barcode part1]
  source 1..16: mol_type = other DNA
tattcctcgacaactg

SEQ ID NO: 11172 - DNA, 16 bp, synthetic construct
  misc_feature 1..16: note = synthetic [barcode part1]
  source 1..16: mol_type = other DNA
tctacgcagttgttac

SEQ ID NO: 11173 - DNA, 16 bp, synthetic construct
  misc_feature 1..16: note = synthetic [barcode part1]
  source 1..16: mol_type = other DNA
taacggcgttggatct

SEQ ID NO: 11174 - DNA, 16 bp, synthetic construct
  misc_feature 1..16: note = synthetic [barcode part1]
  source 1..16: mol_type = other DNA
attgaacggatcgcct

SEQ ID NO: 11175 - DNA, 16 bp, synthetic construct
  misc_feature 1..16: note = synthetic [barcode part1]
  source 1..16: mol_type = other DNA
tatcagacctgcgcct

SEQ ID NO: 11176 - DNA, 16 bp, synthetic construct
  misc_feature 1..16: note = synthetic [barcode part1]
  source 1..16: mol_type = other DNA
caggactctgaagtct

SEQ ID NO: 11177 - DNA, 16 bp, synthetic construct
  misc_feature 1..16: note = synthetic [barcode part1]
  source 1..16: mol_type = other DNA
aatctattctaccgcg

SEQ ID NO: 11178 - DNA, 16 bp, synthetic construct
  misc_feature 1..16: note = synthetic [barcode part1]
  source 1..16: mol_type = other DNA
ttacacgtctcgaccg

SEQ ID NO: 11179 - DNA, 16 bp, synthetic construct
  misc_feature 1..16: note = synthetic [barcode part1]
  source 1..16: mol_type = other DNA
aggacttcttaaggcc

SEQ ID NO: 11180 - DNA, 16 bp, synthetic construct
  misc_feature 1..16: note = synthetic [barcode part1]
  source 1..16: mol_type = other DNA
tgcgagttccgtcact

SEQ ID NO: 11181 - DNA, 16 bp, synthetic construct
  misc_feature 1..16: note = synthetic [barcode part1]
  source 1..16: mol_type = other DNA
tccgcgcaattgtcac

SEQ ID NO: 11182 - DNA, 16 bp, synthetic construct
  misc_feature 1..16: note = synthetic [barcode part1]
  source 1..16: mol_type = other DNA
tgaaggcggcaacttg

SEQ ID NO: 11183 - DNA, 16 bp, synthetic construct
  misc_feature 1..16: note = synthetic [barcode part1]
  source 1..16: mol_type = other DNA
gacgtatattgacgcc

SEQ ID NO: 11184 - DNA, 16 bp, synthetic construct
  misc_feature 1..16: note = synthetic [barcode part1]
  source 1..16: mol_type = other DNA
acttactcgaagttcc

SEQ ID NO: 11185 - DNA, 16 bp, synthetic construct
  misc_feature 1..16: note = synthetic [barcode part1]
  source 1..16: mol_type = other DNA
tgccaggagtaacttc

SEQ ID NO: 11186 - DNA, 16 bp, synthetic construct
  misc_feature 1..16: note = synthetic [barcode part1]
  source 1..16: mol_type = other DNA
ttctgagtggagtctg

SEQ ID NO: 11187 - DNA, 16 bp, synthetic construct
  misc_feature 1..16: note = synthetic [barcode part1]
  source 1..16: mol_type = other DNA
agagttctacctactc

SEQ ID NO: 11188 - DNA, 16 bp, synthetic construct
  misc_feature 1..16: note = synthetic [barcode part1]
  source 1..16: mol_type = other DNA
gcaagtcctcctgact

SEQ ID NO: 11189 - DNA, 16 bp, synthetic construct
  misc_feature 1..16: note = synthetic [barcode part1]
  source 1..16: mol_type = other DNA
aatctggagaggtgcc

SEQ ID NO: 11190 - DNA, 16 bp, synthetic construct
  misc_feature 1..16: note = synthetic [barcode part1]
  source 1..16: mol_type = other DNA
cgcaggttactgtctc

SEQ ID NO: 11191 - DNA, 16 bp, synthetic construct
  misc_feature 1..16: note = synthetic [barcode part1]
  source 1..16: mol_type = other DNA
gtaactcggtgattcg

SEQ ID NO: 11192 - DNA, 16 bp, synthetic construct
  misc_feature 1..16: note = synthetic [barcode part1]
  source 1..16: mol_type = other DNA
tggacgcaaggtagtc

SEQ ID NO: 11193 - DNA, 16 bp, synthetic construct
  misc_feature 1..16: note = synthetic [barcode part1]
  source 1..16: mol_type = other DNA
gacaacctgacttggt

SEQ ID NO: 11194 - DNA, 16 bp, synthetic construct
  misc_feature 1..16: note = synthetic [barcode part1]
  source 1..16: mol_type = other DNA
ccaagtaacctgcaac

SEQ ID NO: 11195 - DNA, 16 bp, synthetic construct
  misc_feature 1..16: note = synthetic [barcode part1]
  source 1..16: mol_type = other DNA
aagttcgacggaacgc

SEQ ID NO: 11196 - DNA, 16 bp, synthetic construct
  misc_feature 1..16: note = synthetic [barcode part1]
  source 1..16: mol_type = other DNA
acaacgttatacgcgc

SEQ ID NO: 11197 - DNA, 16 bp, synthetic construct
  misc_feature 1..16: note = synthetic [barcode part1]
  source 1..16: mol_type = other DNA
gtgcggtatcaatacc

SEQ ID NO: 11198 - DNA, 16 bp, synthetic construct
  misc_feature 1..16: note = synthetic [barcode part1]
  source 1..16: mol_type = other DNA
aacaccttattccgtg

SEQ ID NO: 11199 - DNA, 16 bp, synthetic construct
  misc_feature 1..16: note = synthetic [barcode part1]
  source 1..16: mol_type = other DNA
atcaccttgtcgcctt

SEQ ID NO: 11200 - DNA, 16 bp, synthetic construct
  misc_feature 1..16: note = synthetic [barcode part1]
  source 1..16: mol_type = other DNA
gtgtctcagttattgc

SEQ ID NO: 11201 - DNA, 16 bp, synthetic construct
  misc_feature 1..16: note = synthetic [barcode part1]
  source 1..16: mol_type = other DNA
tacgtagtactctacc

SEQ ID NO: 11202 - DNA, 16 bp, synthetic construct
  misc_feature 1..16: note = synthetic [barcode part1]
  source 1..16: mol_type = other DNA
aaccttgtgaagtccg

SEQ ID NO: 11203 - DNA, 16 bp, synthetic construct
  misc_feature 1..16: note = synthetic [barcode part1]
  source 1..16: mol_type = other DNA
gtgactggtgtcagtt

SEQ ID NO: 11204 - DNA, 16 bp, synthetic construct
  misc_feature 1..16: note = synthetic [barcode part1]
  source 1..16: mol_type = other DNA
taaggaggatcggagt

SEQ ID NO: 11205 - DNA, 16 bp, synthetic construct
  misc_feature 1..16: note = synthetic [barcode part1]
  source 1..16: mol_type = other DNA
aatcgaataggtccag

SEQ ID NO: 11206 - DNA, 16 bp, synthetic construct
  misc_feature 1..16: note = synthetic [barcode part1]
  source 1..16: mol_type = other DNA
tggatacaactgtgcc

SEQ ID NO: 11207 - DNA, 16 bp, synthetic construct
  misc_feature 1..16: note = synthetic [barcode part1]
  source 1..16: mol_type = other DNA
cacgttctcgttggac

SEQ ID NO: 11208 - DNA, 16 bp, synthetic construct
  misc_feature 1..16: note = synthetic [barcode part1]
  source 1..16: mol_type = other DNA
attggtagtgaggtgt

SEQ ID NO: 11209 - DNA, 16 bp, synthetic construct
  misc_feature 1..16: note = synthetic [barcode part1]
  source 1..16: mol_type = other DNA
acctattctcaggatc

SEQ ID NO: 11210 - DNA, 16 bp, synthetic construct
  misc_feature 1..16: note = synthetic [barcode part1]
  source 1..16: mol_type = other DNA
gcaagttgattacgcc

SEQ ID NO: 11211 - DNA, 16 bp, synthetic construct
  misc_feature 1..16: note = synthetic [barcode part1]
  source 1..16: mol_type = other DNA
gtagaatctgtaggtg

SEQ ID NO: 11212 - DNA, 16 bp, synthetic construct
  misc_feature 1..16: note = synthetic [barcode part1]
  source 1..16: mol_type = other DNA
gtgcggcacactaatt

SEQ ID NO: 11213 - DNA, 16 bp, synthetic construct
  misc_feature 1..16: note = synthetic [barcode part1]
  source 1..16: mol_type = other DNA
acagtcaaccacacac

SEQ ID NO: 11214 - DNA, 16 bp, synthetic construct
  misc_feature 1..16: note = synthetic [barcode part1]
  source 1..16: mol_type = other DNA
aacctacctgtgaacg

SEQ ID NO: 11215 - DNA, 16 bp, synthetic construct
  misc_feature 1..16: note = synthetic [barcode part1]
  source 1..16: mol_type = other DNA
cgaactattccgcacc

SEQ ID NO: 11216 - DNA, 16 bp, synthetic construct
  misc_feature 1..16: note = synthetic [barcode part1]
  source 1..16: mol_type = other DNA
gtactagtcgacacac

SEQ ID NO: 11217 - DNA, 16 bp, synthetic construct
  misc_feature 1..16: note = synthetic [barcode part1]
  source 1..16: mol_type = other DNA
gtgcacgactaattgc

SEQ ID NO: 11218 - DNA, 16 bp, synthetic construct
  misc_feature 1..16: note = synthetic [barcode part1]
  source 1..16: mol_type = other DNA
tggtcttcacacagtt

SEQ ID NO: 11219 - DNA, 16 bp, synthetic construct
  misc_feature 1..16: note = synthetic [barcode part1]
  source 1..16: mol_type = other DNA
gtatacgcacagtacc

SEQ ID NO: 11220 - DNA, 16 bp, synthetic construct
  misc_feature 1..16: note = synthetic [barcode part1]
  source 1..16: mol_type = other DNA
aggtcagatcgcgtag

SEQ ID NO: 11221 - DNA, 16 bp, synthetic construct
  misc_feature 1..16: note = synthetic [barcode part1]
  source 1..16: mol_type = other DNA
aactaccagatcaccg

SEQ ID NO: 11222 - DNA, 16 bp, synthetic construct
  misc_feature 1..16: note = synthetic [barcode part1]
  source 1..16: mol_type = other DNA
gcgtaccacggaatag

SEQ ID NO: 11223 - DNA, 16 bp, synthetic construct
  misc_feature 1..16: note = synthetic [barcode part1]
  source 1..16: mol_type = other DNA
tagatagtaccacgag

SEQ ID NO: 11224 - DNA, 16 bp, synthetic construct
  misc_feature 1..16: note = synthetic [barcode part1]
  source 1..16: mol_type = other DNA
actgtgtctaggtgtg

SEQ ID NO: 11225 - DNA, 16 bp, synthetic construct
  misc_feature 1..16: note = synthetic [barcode part1]
  source 1..16: mol_type = other DNA
atacgacgagaccgac

SEQ ID NO: 11226 - DNA, 16 bp, synthetic construct
  misc_feature 1..16: note = synthetic [barcode part1]
  source 1..16: mol_type = other DNA
agtgtaaggactgccg

SEQ ID NO: 11227 - DNA, 16 bp, synthetic construct
  misc_feature 1..16: note = synthetic [barcode part1]
  source 1..16: mol_type = other DNA
cgcacttattcagtac

SEQ ID NO: 11228 - DNA, 16 bp, synthetic construct
  misc_feature 1..16: note = synthetic [barcode part1]
  source 1..16: mol_type = other DNA
cgtgtaactgtgtgac

SEQ ID NO: 11229 - DNA, 16 bp, synthetic construct
  misc_feature 1..16: note = synthetic [barcode part1]
  source 1..16: mol_type = other DNA
taatcaagtgcgcgtc

SEQ ID NO: 11230 - DNA, 16 bp, synthetic construct
  misc_feature 1..16: note = synthetic [barcode part1]
  source 1..16: mol_type = other DNA
ttctacggacttgact

SEQ ID NO: 11231 - DNA, 16 bp, synthetic construct
  misc_feature 1..16: note = synthetic [barcode part1]
  source 1..16: mol_type = other DNA
gtagtcgcgtgtaact

SEQ ID NO: 11232 - DNA, 16 bp, synthetic construct
  misc_feature 1..16: note = synthetic [barcode part1]
  source 1..16: mol_type = other DNA
cgttaagatccggtac

SEQ ID NO: 11233 - DNA, 16 bp, synthetic construct
  misc_feature 1..16: note = synthetic [barcode part1]
  source 1..16: mol_type = other DNA
agtaaggtgcgtcggt

SEQ ID NO: 11234 - DNA, 16 bp, synthetic construct
  misc_feature 1..16: note = synthetic [barcode part1]
  source 1..16: mol_type = other DNA
agtcctatcacggtag

SEQ ID NO: 11235 - DNA, 16 bp, synthetic construct
  misc_feature 1..16: note = synthetic [barcode part1]
  source 1..16: mol_type = other DNA
cgtgagtcctgtcact

SEQ ID NO: 11236 - DNA, 16 bp, synthetic construct
  misc_feature 1..16: note = synthetic [barcode part1]
  source 1..16: mol_type = other DNA
ttcacgtatcggactt

SEQ ID NO: 11237 - DNA, 16 bp, synthetic construct
  misc_feature 1..16: note = synthetic [barcode part1]
  source 1..16: mol_type = other DNA
agagtagacttcgcct

SEQ ID NO: 11238 - DNA, 16 bp, synthetic construct
  misc_feature 1..16: note = synthetic [barcode part1]
  source 1..16: mol_type = other DNA
gtgaccgatcagtatc

SEQ ID NO: 11239 - DNA, 16 bp, synthetic construct
  misc_feature 1..16: note = synthetic [barcode part1]
  source 1..16: mol_type = other DNA
gtcgtgattgtctact

SEQ ID NO: 11240 - DNA, 16 bp, synthetic construct
  misc_feature 1..16: note = synthetic [barcode part1]
  source 1..16: mol_type = other DNA
attccgagttacggtg

SEQ ID NO: 11241 - DNA, 16 bp, synthetic construct
  misc_feature 1..16: note = synthetic [barcode part1]
  source 1..16: mol_type = other DNA
cacgaacaggttcgtt

SEQ ID NO: 11242 - DNA, 16 bp, synthetic construct
  misc_feature 1..16: note = synthetic [barcode part1]
  source 1..16: mol_type = other DNA
atcgactgatcagtcg

SEQ ID NO: 11243 - DNA, 16 bp, synthetic construct
  misc_feature 1..16: note = synthetic [barcode part1]
  source 1..16: mol_type = other DNA
ttatcctgcacggtcg

SEQ ID NO: 11244 - DNA, 16 bp, synthetic construct
  misc_feature 1..16: note = synthetic [barcode part1]
  source 1..16: mol_type = other DNA
agacacgaggatacag

SEQ ID NO: 11245 - DNA, 16 bp, synthetic construct
  misc_feature 1..16: note = synthetic [barcode part1]
  source 1..16: mol_type = other DNA
gcagaccgagaactac

SEQ ID NO: 11246 - DNA, 16 bp, synthetic construct
  misc_feature 1..16: note = synthetic [barcode part1]
  source 1..16: mol_type = other DNA
ttgaacctgtgcctcg

SEQ ID NO: 11247 - DNA, 16 bp, synthetic construct
  misc_feature 1..16: note = synthetic [barcode part1]
  source 1..16: mol_type = other DNA
taacgaccgcaccttc

SEQ ID NO: 11248 - DNA, 16 bp, synthetic construct
  misc_feature 1..16: note = synthetic [barcode part1]
  source 1..16: mol_type = other DNA
tcgtgtaactagtgcg

SEQ ID NO: 11249 - DNA, 16 bp, synthetic construct
  misc_feature 1..16: note = synthetic [barcode part1]
  source 1..16: mol_type = other DNA
gtcagacttcacgcct

SEQ ID NO: 11250 - DNA, 16 bp, synthetic construct
  misc_feature 1..16: note = synthetic [barcode part1]
  source 1..16: mol_type = other DNA
ccttcacaagtgtgag

SEQ ID NO: 11251 - DNA, 16 bp, synthetic construct
  misc_feature 1..16: note = synthetic [barcode part1]
  source 1..16: mol_type = other DNA
caaccggttaagatcc

SEQ ID NO: 11252 - DNA, 16 bp, synthetic construct
  misc_feature 1..16: note = synthetic [barcode part1]
  source 1..16: mol_type = other DNA
cagaacggagtatccg

SEQ ID NO: 11253 - DNA, 16 bp, synthetic construct
  misc_feature 1..16: note = synthetic [barcode part1]
  source 1..16: mol_type = other DNA
tgtaggtcttaccgcc

SEQ ID NO: 11254 - DNA, 16 bp, synthetic construct
  misc_feature 1..16: note = synthetic [barcode part1]
  source 1..16: mol_type = other DNA
tccagagtcggaatct

SEQ ID NO: 11255 - DNA, 16 bp, synthetic construct
  misc_feature 1..16: note = synthetic [barcode part1]
  source 1..16: mol_type = other DNA
ttactgcgtaggttct

SEQ ID NO: 11256 - DNA, 16 bp, synthetic construct
  misc_feature 1..16: note = synthetic [barcode part1]
  source 1..16: mol_type = other DNA
acgattatcgagaggt

SEQ ID NO: 11257 - DNA, 16 bp, synthetic construct
  misc_feature 1..16: note = synthetic [barcode part1]
  source 1..16: mol_type = other DNA
ttccgcaagttcggtc

SEQ ID NO: 11258 - DNA, 16 bp, synthetic construct
  misc_feature 1..16: note = synthetic [barcode part1]
  source 1..16: mol_type = other DNA
tcacagaagtgacaac

SEQ ID NO: 11259 - DNA, 16 bp, synthetic construct
  misc_feature 1..16: note = synthetic [barcode part1]
  source 1..16: mol_type = other DNA
tacgtgacagaagatc

SEQ ID NO: 11260 - DNA, 16 bp, synthetic construct
  misc_feature 1..16: note = synthetic [barcode part1]
  source 1..16: mol_type = other DNA
tcgcaatcgactaacg

SEQ ID NO: 11261 - DNA, 16 bp, synthetic construct
  misc_feature 1..16: note = synthetic [barcode part1]
  source 1..16: mol_type = other DNA
actgcaattacttgcc

SEQ ID NO: 11262 - DNA, 16 bp, synthetic construct
  misc_feature 1..16: note = synthetic [barcode part1]
  source 1..16: mol_type = other DNA
aggccaatacgcagtg

SEQ ID NO: 11263 - DNA, 16 bp, synthetic construct
  misc_feature 1..16: note = synthetic [barcode part1]
  source 1..16: mol_type = other DNA
tacagtctacggactg

SEQ ID NO: 11264 - DNA, 16 bp, synthetic construct
  misc_feature 1..16: note = synthetic [barcode part1]
  source 1..16: mol_type = other DNA
atccaggtacctgagt

SEQ ID NO: 11265 - DNA, 16 bp, synthetic construct
  misc_feature 1..16: note = synthetic [barcode part1]
  source 1..16: mol_type = other DNA
gacgaccaacttaacc

SEQ ID NO: 11266 - DNA, 16 bp, synthetic construct
  misc_feature 1..16: note = synthetic [barcode part1]
  source 1..16: mol_type = other DNA
aacaagacgtaggttc

SEQ ID NO: 11267 - DNA, 16 bp, synthetic construct
  misc_feature 1..16: note = synthetic [barcode part1]
  source 1..16: mol_type = other DNA
gttggttacgtcgtag

SEQ ID NO: 11268 - DNA, 16 bp, synthetic construct
  misc_feature 1..16: note = synthetic [barcode part1]
  source 1..16: mol_type = other DNA
tgacgacttgaaccgt

SEQ ID NO: 11269 - DNA, 16 bp, synthetic construct
  misc_feature 1..16: note = synthetic [barcode part1]
  source 1..16: mol_type = other DNA
ttcctaactcttcggc

SEQ ID NO: 11270 - DNA, 16 bp, synthetic construct
  misc_feature 1..16: note = synthetic [barcode part1]
  source 1..16: mol_type = other DNA
acgcgaattacacctg

SEQ ID NO: 11271 - DNA, 16 bp, synthetic construct
  misc_feature 1..16: note = synthetic [barcode part1]
  source 1..16: mol_type = other DNA
tcttgtgtcgacaact

SEQ ID NO: 11272 - DNA, 16 bp, synthetic construct
  misc_feature 1..16: note = synthetic [barcode part1]
  source 1..16: mol_type = other DNA
gcggttctcgtattcg

SEQ ID NO: 11273 - DNA, 16 bp, synthetic construct
  misc_feature 1..16: note = synthetic [barcode part1]
  source 1..16: mol_type = other DNA
tactgtcgcgattact

SEQ ID NO: 11274 - DNA, 16 bp, synthetic construct
  misc_feature 1..16: note = synthetic [barcode part1]
  source 1..16: mol_type = other DNA
atactcctcgaactgt

SEQ ID NO: 11275 - DNA, 16 bp, synthetic construct
  misc_feature 1..16: note = synthetic [barcode part1]
  source 1..16: mol_type = other DNA
gtagatatcgtccacg

SEQ ID NO: 11276 - DNA, 16 bp, synthetic construct
  misc_feature 1..16: note = synthetic [barcode part1]
  source 1..16: mol_type = other DNA
cactggcaacttcctg

SEQ ID NO: 11277 - DNA, 16 bp, synthetic construct
  misc_feature 1..16: note = synthetic [barcode part1]
  source 1..16: mol_type = other DNA
tgttgttagacgtctc

SEQ ID NO: 11278 - DNA, 16 bp, synthetic construct
  misc_feature 1..16: note = synthetic [barcode part1]
  source 1..16: mol_type = other DNA
gcacttattacaggcg

SEQ ID NO: 11279 - DNA, 16 bp, synthetic construct
  misc_feature 1..16: note = synthetic [barcode part1]
  source 1..16: mol_type = other DNA
tgaacacgaggaccac

SEQ ID NO: 11280 - DNA, 16 bp, synthetic construct
  misc_feature 1..16: note = synthetic [barcode part1]
  source 1..16: mol_type = other DNA
aacttcttacggactc

SEQ ID NO: 11281 - DNA, 16 bp, synthetic construct
  misc_feature 1..16: note = synthetic [barcode part1]
  source 1..16: mol_type = other DNA
gatcgcgtcttagtcc

SEQ ID NO: 11282 - DNA, 16 bp, synthetic construct
  misc_feature 1..16: note = synthetic [barcode part1]
  source 1..16: mol_type = other DNA
ttacttccgtgaatcg

SEQ ID NO: 11283 - DNA, 16 bp, synthetic construct
  misc_feature 1..16: note = synthetic [barcode part1]
  source 1..16: mol_type = other DNA
atagtcggtgccaatc

SEQ ID NO: 11284 - DNA, 16 bp, synthetic construct
  misc_feature 1..16: note = synthetic [barcode part1]
  source 1..16: mol_type = other DNA
tattcaaccagacgcg

SEQ ID NO: 11285 - DNA, 16 bp, synthetic construct
  misc_feature 1..16: note = synthetic [barcode part1]
  source 1..16: mol_type = other DNA
gacgagatctctagtc

SEQ ID NO: 11286 - DNA, 16 bp, synthetic construct
  misc_feature 1..16: note = synthetic [barcode part1]
  source 1..16: mol_type = other DNA
tcaaggtcttattcgc

SEQ ID NO: 11287 - DNA, 16 bp, synthetic construct
  misc_feature 1..16: note = synthetic [barcode part1]
  source 1..16: mol_type = other DNA
aaggaacaacgcgcct

SEQ ID NO: 11288 - DNA, 16 bp, synthetic construct
  misc_feature 1..16: note = synthetic [barcode part1]
  source 1..16: mol_type = other DNA
gtgactatagtgtgcc

SEQ ID NO: 11289 - DNA, 16 bp, synthetic construct
  misc_feature 1..16: note = synthetic [barcode part1]
  source 1..16: mol_type = other DNA
gcggtaagttcaggtg

SEQ ID NO: 11290 - DNA, 16 bp, synthetic construct
  misc_feature 1..16: note = synthetic [barcode part1]
  source 1..16: mol_type = other DNA
cggaattcgatcgatc

SEQ ID NO: 11291 - DNA, 16 bp, synthetic construct
  misc_feature 1..16: note = synthetic [barcode part1]
  source 1..16: mol_type = other DNA
gttcaactggtccaag

SEQ ID NO: 11292 - DNA, 16 bp, synthetic construct
  misc_feature 1..16: note = synthetic [barcode part1]
  source 1..16: mol_type = other DNA
gcaagacggtacctag

SEQ ID NO: 11293 - DNA, 16 bp, synthetic construct
  misc_feature 1..16: note = synthetic [barcode part1]
  source 1..16: mol_type = other DNA
aattgtaaggactggc

SEQ ID NO: 11294 - DNA, 16 bp, synthetic construct
  misc_feature 1..16: note = synthetic [barcode part1]
  source 1..16: mol_type = other DNA
actagtggcaattgcc

SEQ ID NO: 11295 - DNA, 16 bp, synthetic construct
  misc_feature 1..16: note = synthetic [barcode part1]
  source 1..16: mol_type = other DNA
atagagacgtggagac

SEQ ID NO: 11296 - DNA, 16 bp, synthetic construct
  misc_feature 1..16: note = synthetic [barcode part1]
  source 1..16: mol_type = other DNA
aactggtaagacctcc

SEQ ID NO: 11297 - DNA, 16 bp, synthetic construct
  misc_feature 1..16: note = synthetic [barcode part1]
  source 1..16: mol_type = other DNA
cgtaacttgcgtcaag

SEQ ID NO: 11298 - DNA, 16 bp, synthetic construct
  misc_feature 1..16: note = synthetic [barcode part1]
  source 1..16: mol_type = other DNA
gcgcctcttaacagtc

SEQ ID NO: 11299 - DNA, 16 bp, synthetic construct
  misc_feature 1..16: note = synthetic [barcode part1]
  source 1..16: mol_type = other DNA
taagaggcagtcgcgt

SEQ ID NO: 11300 - DNA, 16 bp, synthetic construct
  misc_feature 1..16: note = synthetic [barcode part1]
  source 1..16: mol_type = other DNA
gagtggttgcagatcg

SEQ ID NO: 11301 - DNA, 16 bp, synthetic construct
  misc_feature 1..16: note = synthetic [barcode part1]
  source 1..16: mol_type = other DNA
tctgattgcgttagtc

SEQ ID NO: 11302 - DNA, 16 bp, synthetic construct
  misc_feature 1..16: note = synthetic [barcode part1]
  source 1..16: mol_type = other DNA
gcgccaattctcaacc

SEQ ID NO: 11303 - DNA, 16 bp, synthetic construct
  misc_feature 1..16: note = synthetic [barcode part1]
  source 1..16: mol_type = other DNA
caggtactgcaagtct

SEQ ID NO: 11304 - DNA, 16 bp, synthetic construct
  misc_feature 1..16: note = synthetic [barcode part1]
  source 1..16: mol_type = other DNA
tgacgcggatctatac

SEQ ID NO: 11305 - DNA, 16 bp, synthetic construct
  misc_feature 1..16: note = synthetic [barcode part1]
  source 1..16: mol_type = other DNA
taggcgaacggtactg

SEQ ID NO: 11306 - DNA, 16 bp, synthetic construct
  misc_feature 1..16: note = synthetic [barcode part1]
  source 1..16: mol_type = other DNA
aactataccaagaggc

SEQ ID NO: 11307 - DNA, 16 bp, synthetic construct
  misc_feature 1..16: note = synthetic [barcode part1]
  source 1..16: mol_type = other DNA
caataataccaccggc

SEQ ID NO: 11308 - DNA, 16 bp, synthetic construct
  misc_feature 1..16: note = synthetic [barcode part1]
  source 1..16: mol_type = other DNA
tctgcgtgattcgacc

SEQ ID NO: 11309 - DNA, 16 bp, synthetic construct
  misc_feature 1..16: note = synthetic [barcode part1]
  source 1..16: mol_type = other DNA
gcgtaaggataatctg

SEQ ID NO: 11310 - DNA, 16 bp, synthetic construct
  misc_feature 1..16: note = synthetic [barcode part1]
  source 1..16: mol_type = other DNA
caagacggtaattgtg

SEQ ID NO: 11311 - DNA, 16 bp, synthetic construct
  misc_feature 1..16: note = synthetic [barcode part1]
  source 1..16: mol_type = other DNA
aagacctaagtcctgc

SEQ ID NO: 11312 - DNA, 16 bp, synthetic construct
  misc_feature 1..16: note = synthetic [barcode part1]
  source 1..16: mol_type = other DNA
cggatcagttatcggt

SEQ ID NO: 11313 - DNA, 16 bp, synthetic construct
  misc_feature 1..16: note = synthetic [barcode part1]
  source 1..16: mol_type = other DNA
accgtctggacttgtc

SEQ ID NO: 11314 - DNA, 16 bp, synthetic construct
  misc_feature 1..16: note = synthetic [barcode part1]
  source 1..16: mol_type = other DNA
gacggaacacgtcaac

SEQ ID NO: 11315 - DNA, 16 bp, synthetic construct
  misc_feature 1..16: note = synthetic [barcode part1]
  source 1..16: mol_type = other DNA
tcagacaggcgagatc

SEQ ID NO: 11316 - DNA, 16 bp, synthetic construct
  misc_feature 1..16: note = synthetic [barcode part1]
  source 1..16: mol_type = other DNA
tagtgtagtgcctggt

SEQ ID NO: 11317 - DNA, 16 bp, synthetic construct
  misc_feature 1..16: note = synthetic [barcode part1]
  source 1..16: mol_type = other DNA
taggcgactcacttag

SEQ ID NO: 11318 - DNA, 16 bp, synthetic construct
  misc_feature 1..16: note = synthetic [barcode part1]
  source 1..16: mol_type = other DNA
ttatcctcggttcctg

SEQ ID NO: 11319 - DNA, 16 bp, synthetic construct
  misc_feature 1..16: note = synthetic [barcode part1]
  source 1..16: mol_type = other DNA
ttaccgtcaaggcagt

SEQ ID NO: 11320 - DNA, 16 bp, synthetic construct
  misc_feature 1..16: note = synthetic [barcode part1]
  source 1..16: mol_type = other DNA
gatctcctcttcagtc

SEQ ID NO: 11321 - DNA, 16 bp, synthetic construct
  misc_feature 1..16: note = synthetic [barcode part1]
  source 1..16: mol_type = other DNA
acctatcagtgtcact

SEQ ID NO: 11322 - DNA, 16 bp, synthetic construct
  misc_feature 1..16: note = synthetic [barcode part1]
  source 1..16: mol_type = other DNA
cacctcacactcagac

SEQ ID NO: 11323 - DNA, 16 bp, synthetic construct
  misc_feature 1..16: note = synthetic [barcode part1]
  source 1..16: mol_type = other DNA
gtactaacacggacct

SEQ ID NO: 11324 - DNA, 16 bp, synthetic construct
  misc_feature 1..16: note = synthetic [barcode part1]
  source 1..16: mol_type = other DNA
cagatcactctcgtgc

SEQ ID NO: 11325 - DNA, 16 bp, synthetic construct
  misc_feature 1..16: note = synthetic [barcode part1]
  source 1..16: mol_type = other DNA
ccaagtgattccgcct

SEQ ID NO: 11326 - DNA, 16 bp, synthetic construct
  misc_feature 1..16: note = synthetic [barcode part1]
  source 1..16: mol_type = other DNA
tcgtagttacagtgcg

SEQ ID NO: 11327 - DNA, 16 bp, synthetic construct
  misc_feature 1..16: note = synthetic [barcode part1]
  source 1..16: mol_type = other DNA
tcggtgcctaaccttg

SEQ ID NO: 11328 - DNA, 16 bp, synthetic construct
  misc_feature 1..16: note = synthetic [barcode part1]
  source 1..16: mol_type = other DNA
gcgaagacagtggttc

SEQ ID NO: 11329 - DNA, 16 bp, synthetic construct
  misc_feature 1..16: note = synthetic [barcode part1]
  source 1..16: mol_type = other DNA
cgataacgaagtgcgc

SEQ ID NO: 11330 - DNA, 16 bp, synthetic construct
  misc_feature 1..16: note = synthetic [barcode part1]
  source 1..16: mol_type = other DNA
agtagaacgtaccaac

SEQ ID NO: 11331 - DNA, 16 bp, synthetic construct
  misc_feature 1..16: note = synthetic [barcode part1]
  source 1..16: mol_type = other DNA
tgcgtctcttgtatcc

SEQ ID NO: 11332 - DNA, 16 bp, synthetic construct
  misc_feature 1..16: note = synthetic [barcode part1]
  source 1..16: mol_type = other DNA
tctagtgcgaagatag

SEQ ID NO: 11333 - DNA, 16 bp, synthetic construct
  misc_feature 1..16: note = synthetic [barcode part1]
  source 1..16: mol_type = other DNA
actagtatcgtgcggt

SEQ ID NO: 11334 - DNA, 16 bp, synthetic construct
  misc_feature 1..16: note = synthetic [barcode part1]
  source 1..16: mol_type = other DNA
gcaagacaggtctgtg

SEQ ID NO: 11335 - DNA, 16 bp, synthetic construct
  misc_feature 1..16: note = synthetic [barcode part1]
  source 1..16: mol_type = other DNA
agttgcaactgcacac

SEQ ID NO: 11336 - DNA, 16 bp, synthetic construct
  misc_feature 1..16: note = synthetic [barcode part1]
  source 1..16: mol_type = other DNA
ttccagaacttgttcg

SEQ ID NO: 11337 - DNA, 16 bp, synthetic construct
  misc_feature 1..16: note = synthetic [barcode part1]
  source 1..16: mol_type = other DNA
agtactccactctgcg

SEQ ID NO: 11338 - DNA, 16 bp, synthetic construct
  misc_feature 1..16: note = synthetic [barcode part1]
  source 1..16: mol_type = other DNA
tgagaaggcactgatt

SEQ ID NO: 11339 - DNA, 16 bp, synthetic construct
  misc_feature 1..16: note = synthetic [barcode part1]
  source 1..16: mol_type = other DNA
accggattcgcacctt

SEQ ID NO: 11340 - DNA, 16 bp, synthetic construct
  misc_feature 1..16: note = synthetic [barcode part1]
  source 1..16: mol_type = other DNA
cgaatctcagaacaag

SEQ ID NO: 11341 - DNA, 16 bp, synthetic construct
  misc_feature 1..16: note = synthetic [barcode part1]
  source 1..16: mol_type = other DNA
tattccgtgttcaggt

SEQ ID NO: 11342 - DNA, 16 bp, synthetic construct
  misc_feature 1..16: note = synthetic [barcode part1]
  source 1..16: mol_type = other DNA
tcacaagacaggatac

SEQ ID NO: 11343 - DNA, 16 bp, synthetic construct
  misc_feature 1..16: note = synthetic [barcode part1]
  source 1..16: mol_type = other DNA
cacggtcttgaatacg

SEQ ID NO: 11344 - DNA, 16 bp, synthetic construct
  misc_feature 1..16: note = synthetic [barcode part1]
  source 1..16: mol_type = other DNA
agttcggccgaattgt

SEQ ID NO: 11345 - DNA, 16 bp, synthetic construct
  misc_feature 1..16: note = synthetic [barcode part1]
  source 1..16: mol_type = other DNA
agtactaccgaccagt

SEQ ID NO: 11346 - DNA, 16 bp, synthetic construct
  misc_feature 1..16: note = synthetic [barcode part1]
  source 1..16: mol_type = other DNA
tacgcgaacctagact

SEQ ID NO: 11347 - DNA, 16 bp, synthetic construct
  misc_feature 1..16: note = synthetic [barcode part1]
  source 1..16: mol_type = other DNA
tgaactggatcaccac

SEQ ID NO: 11348 - DNA, 16 bp, synthetic construct
  misc_feature 1..16: note = synthetic [barcode part1]
  source 1..16: mol_type = other DNA
gagatctggtattgcc

SEQ ID NO: 11349 - DNA, 16 bp, synthetic construct
  misc_feature 1..16: note = synthetic [barcode part1]
  source 1..16: mol_type = other DNA
cactccagatatctac

SEQ ID NO: 11350 - DNA, 16 bp, synthetic construct
  misc_feature 1..16: note = synthetic [barcode part1]
  source 1..16: mol_type = other DNA
ttcggaagaccagttc

SEQ ID NO: 11351 - DNA, 16 bp, synthetic construct
  misc_feature 1..16: note = synthetic [barcode part1]
  source 1..16: mol_type = other DNA
gagataggaatccgtt

SEQ ID NO: 11352 - DNA, 16 bp, synthetic construct
  misc_feature 1..16: note = synthetic [barcode part1]
  source 1..16: mol_type = other DNA
tgcctgtgttccgaac

SEQ ID NO: 11353 - DNA, 16 bp, synthetic construct
  misc_feature 1..16: note = synthetic [barcode part1]
  source 1..16: mol_type = other DNA
taacgcgttggacgtt

SEQ ID NO: 11354 - DNA, 16 bp, synthetic construct
  misc_feature 1..16: note = synthetic [barcode part1]
  source 1..16: mol_type = other DNA
attattgaccgccgag

SEQ ID NO: 11355 - DNA, 16 bp, synthetic construct
  misc_feature 1..16: note = synthetic [barcode part1]
  source 1..16: mol_type = other DNA
aggtcgaacgtaccag

SEQ ID NO: 11356 - DNA, 16 bp, synthetic construct
  misc_feature 1..16: note = synthetic [barcode part1]
  source 1..16: mol_type = other DNA
cggtggttggtaattc

SEQ ID NO: 11357 - DNA, 16 bp, synthetic construct
  misc_feature 1..16: note = synthetic [barcode part1]
  source 1..16: mol_type = other DNA
ccgaacctcttacgtg

SEQ ID NO: 11358 - DNA, 16 bp, synthetic construct
  misc_feature 1..16: note = synthetic [barcode part1]
  source 1..16: mol_type = other DNA
gattatagaggtcgac

SEQ ID NO: 11359 - DNA, 16 bp, synthetic construct
  misc_feature 1..16: note = synthetic [barcode part1]
  source 1..16: mol_type = other DNA
aggcctgttactattc

SEQ ID NO: 11360 - DNA, 16 bp, synthetic construct
  misc_feature 1..16: note = synthetic [barcode part1]
  source 1..16: mol_type = other DNA
aacctagtcttgcgcc

SEQ ID NO: 11361 - DNA, 16 bp, synthetic construct
  misc_feature 1..16: note = synthetic [barcode part1]
  source 1..16: mol_type = other DNA
tctgcgcgacttggtt

SEQ ID NO: 11362 - DNA, 16 bp, synthetic construct
  misc_feature 1..16: note = synthetic [barcode part1]
  source 1..16: mol_type = other DNA
acttcttggccagaag

SEQ ID NO: 11363 - DNA, 16 bp, synthetic construct
  misc_feature 1..16: note = synthetic [barcode part1]
  source 1..16: mol_type = other DNA
gtcaacgcaccttatt

SEQ ID NO: 11364 - DNA, 16 bp, synthetic construct
  misc_feature 1..16: note = synthetic [barcode part1]
  source 1..16: mol_type = other DNA
cagatcaatcaggtcc

SEQ ID NO: 11365 - DNA, 16 bp, synthetic construct
  misc_feature 1..16: note = synthetic [barcode part1]
  source 1..16: mol_type = other DNA
atcctcctgcacaacg

SEQ ID NO: 11366 - DNA, 16 bp, synthetic construct
  misc_feature 1..16: note = synthetic [barcode part1]
  source 1..16: mol_type = other DNA
acgcacgtacaatacc

SEQ ID NO: 11367 - DNA, 16 bp, synthetic construct
  misc_feature 1..16: note = synthetic [barcode part1]
  source 1..16: mol_type = other DNA
gtcacttagacctgtt

SEQ ID NO: 11368 - DNA, 16 bp, synthetic construct
  misc_feature 1..16: note = synthetic [barcode part1]
  source 1..16: mol_type = other DNA
gcgatcaagaggacct

SEQ ID NO: 11369 - DNA, 16 bp, synthetic construct
  misc_feature 1..16: note = synthetic [barcode part1]
  source 1..16: mol_type = other DNA
cgatcctgaagaatcc

SEQ ID NO: 11370 - DNA, 16 bp, synthetic construct
  misc_feature 1..16: note = synthetic [barcode part1]
  source 1..16: mol_type = other DNA
accttacaggtgtctt

SEQ ID NO: 11371 - DNA, 16 bp, synthetic construct
  misc_feature 1..16: note = synthetic [barcode part1]
  source 1..16: mol_type = other DNA
tcctaacctaacgtgt

SEQ ID NO: 11372 - DNA, 16 bp, synthetic construct
  misc_feature 1..16: note = synthetic [barcode part1]
  source 1..16: mol_type = other DNA
agattgttccgcgcct

SEQ ID NO: 11373 - DNA, 16 bp, synthetic construct
  misc_feature 1..16: note = synthetic [barcode part1]
  source 1..16: mol_type = other DNA
tgcggacctactctac

SEQ ID NO: 11374 - DNA, 16 bp, synthetic construct
  misc_feature 1..16: note = synthetic [barcode part1]
  source 1..16: mol_type = other DNA
ttggcaactgcactcc

SEQ ID NO: 11375 - DNA, 16 bp, synthetic construct
  misc_feature 1..16: note = synthetic [barcode part1]
  source 1..16: mol_type = other DNA
gtcggtatactctact

SEQ ID NO: 11376 - DNA, 16 bp, synthetic construct
  misc_feature 1..16: note = synthetic [barcode part1]
  source 1..16: mol_type = other DNA
ttaattctgccgacgt

SEQ ID NO: 11377 - DNA, 16 bp, synthetic construct
  misc_feature 1..16: note = synthetic [barcode part1]
  source 1..16: mol_type = other DNA
gccttatctgtgtagt

SEQ ID NO: 11378 - DNA, 16 bp, synthetic construct
  misc_feature 1..16: note = synthetic [barcode part1]
  source 1..16: mol_type = other DNA
gagtaggagactctgc

SEQ ID NO: 11379 - DNA, 16 bp, synthetic construct
  misc_feature 1..16: note = synthetic [barcode part1]
  source 1..16: mol_type = other DNA
tgtcaccgtgaagtac

SEQ ID NO: 11380 - DNA, 16 bp, synthetic construct
  misc_feature 1..16: note = synthetic [barcode part1]
  source 1..16: mol_type = other DNA
ttacggagacgtatcc

SEQ ID NO: 11381 - DNA, 16 bp, synthetic construct
  misc_feature 1..16: note = synthetic [barcode part1]
  source 1..16: mol_type = other DNA
tcagagttctattcgc

SEQ ID NO: 11382 - DNA, 16 bp, synthetic construct
  misc_feature 1..16: note = synthetic [barcode part1]
  source 1..16: mol_type = other DNA
tcacacagatcctccg

SEQ ID NO: 11383 - DNA, 16 bp, synthetic construct
  misc_feature 1..16: note = synthetic [barcode part1]
  source 1..16: mol_type = other DNA
acttcacgttctccgt

SEQ ID NO: 11384 - DNA, 16 bp, synthetic construct
  misc_feature 1..16: note = synthetic [barcode part1]
  source 1..16: mol_type = other DNA
ccttcggtaactgcgt

SEQ ID NO: 11385 - DNA, 16 bp, synthetic construct
  misc_feature 1..16: note = synthetic [barcode part1]
  source 1..16: mol_type = other DNA
tcggtctgtctgagtc

SEQ ID NO: 11386 - DNA, 16 bp, synthetic construct
  misc_feature 1..16: note = synthetic [barcode part1]
  source 1..16: mol_type = other DNA
gttacaccgataagag

SEQ ID NO: 11387 - DNA, 16 bp, synthetic construct
  misc_feature 1..16: note = synthetic [barcode part1]
  source 1..16: mol_type = other DNA
cgagatcgacttcagt

SEQ ID NO: 11388 - DNA, 16 bp, synthetic construct
  misc_feature 1..16: note = synthetic [barcode part1]
  source 1..16: mol_type = other DNA
gtcggcgcagaagatt

SEQ ID NO: 11389 - DNA, 16 bp, synthetic construct
  misc_feature 1..16: note = synthetic [barcode part1]
  source 1..16: mol_type = other DNA
tgttactcgtcgatac

SEQ ID NO: 11390 - DNA, 16 bp, synthetic construct
  misc_feature 1..16: note = synthetic [barcode part1]
  source 1..16: mol_type = other DNA
gcacgactcctgattc

SEQ ID NO: 11391 - DNA, 16 bp, synthetic construct
  misc_feature 1..16: note = synthetic [barcode part1]
  source 1..16: mol_type = other DNA
gaagacctgcgactag

SEQ ID NO: 11392 - DNA, 16 bp, synthetic construct
  misc_feature 1..16: note = synthetic [barcode part1]
  source 1..16: mol_type = other DNA
attggatctcgtgtct

SEQ ID NO: 11393 - DNA, 16 bp, synthetic construct
  misc_feature 1..16: note = synthetic [barcode part1]
  source 1..16: mol_type = other DNA
ttggccgaattggttg

SEQ ID NO: 11394 - DNA, 16 bp, synthetic construct
  misc_feature 1..16: note = synthetic [barcode part1]
  source 1..16: mol_type = other DNA
cacgaatatccgtgac

SEQ ID NO: 11395 - DNA, 16 bp, synthetic construct
  misc_feature 1..16: note = synthetic [barcode part1]
  source 1..16: mol_type = other DNA
cacacagaatacgcct

SEQ ID NO: 11396 - DNA, 16 bp, synthetic construct
  misc_feature 1..16: note = synthetic [barcode part1]
  source 1..16: mol_type = other DNA
gagagaagactctgag

SEQ ID NO: 11397 - DNA, 16 bp, synthetic construct
  misc_feature 1..16: note = synthetic [barcode part1]
  source 1..16: mol_type = other DNA
ttcctaacttcctggc

SEQ ID NO: 11398 - DNA, 16 bp, synthetic construct
  misc_feature 1..16: note = synthetic [barcode part1]
  source 1..16: mol_type = other DNA
gtatcggtaactctct

SEQ ID NO: 11399 - DNA, 16 bp, synthetic construct
  misc_feature 1..16: note = synthetic [barcode part1]
  source 1..16: mol_type = other DNA
gtcaggcagtacagac

SEQ ID NO: 11400 - DNA, 16 bp, synthetic construct
  misc_feature 1..16: note = synthetic [barcode part1]
  source 1..16: mol_type = other DNA
acaacctgtctggtag

SEQ ID NO: 11401 - DNA, 16 bp, synthetic construct
  misc_feature 1..16: note = synthetic [barcode part1]
  source 1..16: mol_type = other DNA
aacctagtcgacgatc

SEQ ID NO: 11402 - DNA, 16 bp, synthetic construct
  misc_feature 1..16: note = synthetic [barcode part1]
  source 1..16: mol_type = other DNA
aaccagttgacgttgc

SEQ ID NO: 11403 - DNA, 16 bp, synthetic construct
  misc_feature 1..16: note = synthetic [barcode part1]
  source 1..16: mol_type = other DNA
gatagatacaacaccg

SEQ ID NO: 11404 - DNA, 16 bp, synthetic construct
  misc_feature 1..16: note = synthetic [barcode part1]
  source 1..16: mol_type = other DNA
tcgttattgtctggac

SEQ ID NO: 11405 - DNA, 16 bp, synthetic construct
  misc_feature 1..16: note = synthetic [barcode part1]
  source 1..16: mol_type = other DNA
tgacgcaatcacttct

SEQ ID NO: 11406 - DNA, 16 bp, synthetic construct
  misc_feature 1..16: note = synthetic [barcode part1]
  source 1..16: mol_type = other DNA
tcttacaattgccgac

SEQ ID NO: 11407 - DNA, 16 bp, synthetic construct
  misc_feature 1..16: note = synthetic [barcode part1]
  source 1..16: mol_type = other DNA
caacagtgtacaagac

SEQ ID NO: 11408 - DNA, 16 bp, synthetic construct
  misc_feature 1..16: note = synthetic [barcode part1]
  source 1..16: mol_type = other DNA
gttggtaataagacgc

SEQ ID NO: 11409 - DNA, 16 bp, synthetic construct
  misc_feature 1..16: note = synthetic [barcode part1]
  source 1..16: mol_type = other DNA
tcgttgtggattcgtt

SEQ ID NO: 11410 - DNA, 16 bp, synthetic construct
  misc_feature 1..16: note = synthetic [barcode part1]
  source 1..16: mol_type = other DNA
tcgtggaacgatcgtt

SEQ ID NO: 11411 - DNA, 16 bp, synthetic construct
  misc_feature 1..16: note = synthetic [barcode part1]
  source 1..16: mol_type = other DNA
taacgtgagttcgtgc

SEQ ID NO: 11412 - DNA, 16 bp, synthetic construct
  misc_feature 1..16: note = synthetic [barcode part1]
  source 1..16: mol_type = other DNA
ttagtccaggtatcct

SEQ ID NO: 11413 - DNA, 16 bp, synthetic construct
  misc_feature 1..16: note = synthetic [barcode part1]
  source 1..16: mol_type = other DNA
atactcgcaccactcg

SEQ ID NO: 11414 - DNA, 16 bp, synthetic construct
  misc_feature 1..16: note = synthetic [barcode part1]
  source 1..16: mol_type = other DNA
gttacgattcaaggcc

SEQ ID NO: 11415 - DNA, 16 bp, synthetic construct
  misc_feature 1..16: note = synthetic [barcode part1]
  source 1..16: mol_type = other DNA
gacactattccgagac

SEQ ID NO: 11416 - DNA, 16 bp, synthetic construct
  misc_feature 1..16: note = synthetic [barcode part1]
  source 1..16: mol_type = other DNA
tcaacactgtgtgacg

SEQ ID NO: 11417 - DNA, 16 bp, synthetic construct
  misc_feature 1..16: note = synthetic [barcode part1]
  source 1..16: mol_type = other DNA
acttggacctgaacac

SEQ ID NO: 11418 - DNA, 16 bp, synthetic construct
  misc_feature 1..16: note = synthetic [barcode part1]
  source 1..16: mol_type = other DNA
tgtatcttggaggcac

SEQ ID NO: 11419 - DNA, 16 bp, synthetic construct
  misc_feature 1..16: note = synthetic [barcode part1]
  source 1..16: mol_type = other DNA
gtaccaacctctgacc

SEQ ID NO: 11420 - DNA, 16 bp, synthetic construct
  misc_feature 1..16: note = synthetic [barcode part1]
  source 1..16: mol_type = other DNA
taccaagtgaggacgc

SEQ ID NO: 11421 - DNA, 16 bp, synthetic construct
  misc_feature 1..16: note = synthetic [barcode part1]
  source 1..16: mol_type = other DNA
tcaatagttgcgtcct

SEQ ID NO: 11422 - DNA, 16 bp, synthetic construct
  misc_feature 1..16: note = synthetic [barcode part1]
  source 1..16: mol_type = other DNA
cgaatcaagttaccgc

SEQ ID NO: 11423 - DNA, 16 bp, synthetic construct
  misc_feature 1..16: note = synthetic [barcode part1]
  source 1..16: mol_type = other DNA
cctgtgttcgagttgc

SEQ ID NO: 11424 - DNA, 16 bp, synthetic construct
  misc_feature 1..16: note = synthetic [barcode part1]
  source 1..16: mol_type = other DNA
gcgactaggtcagagt

SEQ ID NO: 11425 - DNA, 16 bp, synthetic construct
  misc_feature 1..16: note = synthetic [barcode part1]
  source 1..16: mol_type = other DNA
ttcctggaatcctctc

SEQ ID NO: 11426 - DNA, 16 bp, synthetic construct
  misc_feature 1..16: note = synthetic [barcode part1]
  source 1..16: mol_type = other DNA
gttaattggttggccg

SEQ ID NO: 11427 - DNA, 16 bp, synthetic construct
  misc_feature 1..16: note = synthetic [barcode part1]
  source 1..16: mol_type = other DNA
agacggagtaatactc

SEQ ID NO: 11428 - DNA, 16 bp, synthetic construct
  misc_feature 1..16: note = synthetic [barcode part1]
  source 1..16: mol_type = other DNA
aattgccgtgaggacg

SEQ ID NO: 11429 - DNA, 16 bp, synthetic construct
  misc_feature 1..16: note = synthetic [barcode part1]
  source 1..16: mol_type = other DNA
ccttcgaggttagaac

SEQ ID NO: 11430 - DNA, 16 bp, synthetic construct
  misc_feature 1..16: note = synthetic [barcode part1]
  source 1..16: mol_type = other DNA
ccgactcttgcacagt

SEQ ID NO: 11431 - DNA, 16 bp, synthetic construct
  misc_feature 1..16: note = synthetic [barcode part1]
  source 1..16: mol_type = other DNA
ttgacgtacaccaacg

SEQ ID NO: 11432 - DNA, 16 bp, synthetic construct
  misc_feature 1..16: note = synthetic [barcode part1]
  source 1..16: mol_type = other DNA
cgattacctatcgttg

SEQ ID NO: 11433 - DNA, 16 bp, synthetic construct
  misc_feature 1..16: note = synthetic [barcode part1]
  source 1..16: mol_type = other DNA
aatcgcgttctggcct

SEQ ID NO: 11434 - DNA, 16 bp, synthetic construct
  misc_feature 1..16: note = synthetic [barcode part1]
  source 1..16: mol_type = other DNA
taagtacgtgtggcct

SEQ ID NO: 11435 - DNA, 16 bp, synthetic construct
  misc_feature 1..16: note = synthetic [barcode part1]
  source 1..16: mol_type = other DNA
gtgatctgacacggag

SEQ ID NO: 11436 - DNA, 16 bp, synthetic construct
  misc_feature 1..16: note = synthetic [barcode part1]
  source 1..16: mol_type = other DNA
ccgagaattggtgcag

SEQ ID NO: 11437 - DNA, 16 bp, synthetic construct
  misc_feature 1..16: note = synthetic [barcode part1]
  source 1..16: mol_type = other DNA
gtgtctaacagatccg

SEQ ID NO: 11438 - DNA, 16 bp, synthetic construct
  misc_feature 1..16: note = synthetic [barcode part1]
  source 1..16: mol_type = other DNA
acctgaggcctcactt

SEQ ID NO: 11439 - DNA, 16 bp, synthetic construct
  misc_feature 1..16: note = synthetic [barcode part1]
  source 1..16: mol_type = other DNA
attagaggagaccgag

SEQ ID NO: 11440 - DNA, 16 bp, synthetic construct
  misc_feature 1..16: note = synthetic [barcode part1]
  source 1..16: mol_type = other DNA
acacgttgacgtgttg

SEQ ID NO: 11441 - DNA, 16 bp, synthetic construct
  misc_feature 1..16: note = synthetic [barcode part1]
  source 1..16: mol_type = other DNA
tgtgtgtcacagtacg

SEQ ID NO: 11442 - DNA, 16 bp, synthetic construct
  misc_feature 1..16: note = synthetic [barcode part1]
  source 1..16: mol_type = other DNA
cacgacaccacctact

SEQ ID NO: 11443 - DNA, 16 bp, synthetic construct
  misc_feature 1..16: note = synthetic [barcode part1]
  source 1..16: mol_type = other DNA
gatacaccgatcacac

SEQ ID NO: 11444 - DNA, 16 bp, synthetic construct
  misc_feature 1..16: note = synthetic [barcode part1]
  source 1..16: mol_type = other DNA
tggcgtggaagtaacc

SEQ ID NO: 11445 - DNA, 16 bp, synthetic construct
  misc_feature 1..16: note = synthetic [barcode part1]
  source 1..16: mol_type = other DNA
aggtcgtgaatcgtct

SEQ ID NO: 11446 - DNA, 16 bp, synthetic construct
  misc_feature 1..16: note = synthetic [barcode part1]
  source 1..16: mol_type = other DNA
aggtctaagaccaggc

SEQ ID NO: 11447 - DNA, 16 bp, synthetic construct
  misc_feature 1..16: note = synthetic [barcode part1]
  source 1..16: mol_type = other DNA
gtacgagataggaacg

SEQ ID NO: 11448 - DNA, 16 bp, synthetic construct
  misc_feature 1..16: note = synthetic [barcode part1]
  source 1..16: mol_type = other DNA
ttgaagtcgaggcctt

SEQ ID NO: 11449 - DNA, 16 bp, synthetic construct
  misc_feature 1..16: note = synthetic [barcode part1]
  source 1..16: mol_type = other DNA
tcaggagtgcagactg

SEQ ID NO: 11450 - DNA, 16 bp, synthetic construct
  misc_feature 1..16: note = synthetic [barcode part1]
  source 1..16: mol_type = other DNA
cactgttgcctcttgt

SEQ ID NO: 11451 - DNA, 16 bp, synthetic construct
  misc_feature 1..16: note = synthetic [barcode part1]
  source 1..16: mol_type = other DNA
accgataggcaacgac

SEQ ID NO: 11452 - DNA, 16 bp, synthetic construct
  misc_feature 1..16: note = synthetic [barcode part1]
  source 1..16: mol_type = other DNA
ccttgtctgaacgtcg

SEQ ID NO: 11453 - DNA, 16 bp, synthetic construct
  misc_feature 1..16: note = synthetic [barcode part1]
  source 1..16: mol_type = other DNA
aaccgtattaagaggc

SEQ ID NO: 11454 - DNA, 16 bp, synthetic construct
  misc_feature 1..16: note = synthetic [barcode part1]
  source 1..16: mol_type = other DNA
agtgattcttcgcact

SEQ ID NO: 11455 - DNA, 16 bp, synthetic construct
  misc_feature 1..16: note = synthetic [barcode part1]
  source 1..16: mol_type = other DNA
cagtcctgcactagtc

SEQ ID NO: 11456 - DNA, 16 bp, synthetic construct
  misc_feature 1..16: note = synthetic [barcode part1]
  source 1..16: mol_type = other DNA
cgattggttctggagt

SEQ ID NO: 11457 - DNA, 16 bp, synthetic construct
  misc_feature 1..16: note = synthetic [barcode part1]
  source 1..16: mol_type = other DNA
tcggtggtcgtatctc

SEQ ID NO: 11458 - DNA, 16 bp, synthetic construct
  misc_feature 1..16: note = synthetic [barcode part1]
  source 1..16: mol_type = other DNA
gttacggacctgtcct

SEQ ID NO: 11459 - DNA, 16 bp, synthetic construct
  misc_feature 1..16: note = synthetic [barcode part1]
  source 1..16: mol_type = other DNA
tacctcgaataggacc

SEQ ID NO: 11460 - DNA, 16 bp, synthetic construct
  misc_feature 1..16: note = synthetic [barcode part1]
  source 1..16: mol_type = other DNA
gtgaatcgattcgtgc

SEQ ID NO: 11461 - DNA, 16 bp, synthetic construct
  misc_feature 1..16: note = synthetic [barcode part1]
  source 1..16: mol_type = other DNA
tcagtggtccaacagt

SEQ ID NO: 11462 - DNA, 16 bp, synthetic construct
  misc_feature 1..16: note = synthetic [barcode part1]
  source 1..16: mol_type = other DNA
cggtgtcctcacttag

SEQ ID NO: 11463 - DNA, 16 bp, synthetic construct
  misc_feature 1..16: note = synthetic [barcode part1]
  source 1..16: mol_type = other DNA
atcgtacacactcgag

SEQ ID NO: 11464 - DNA, 16 bp, synthetic construct
  misc_feature 1..16: note = synthetic [barcode part1]
  source 1..16: mol_type = other DNA
ttgtggacgaaggacc

SEQ ID NO: 11465 - DNA, 16 bp, synthetic construct
  misc_feature 1..16: note = synthetic [barcode part1]
  source 1..16: mol_type = other DNA
aaggccaatactcaag

SEQ ID NO: 11466 - DNA, 16 bp, synthetic construct
  misc_feature 1..16: note = synthetic [barcode part1]
  source 1..16: mol_type = other DNA
tctgcggaataggacg

SEQ ID NO: 11467 - DNA, 16 bp, synthetic construct
  misc_feature 1..16: note = synthetic [barcode part1]
  source 1..16: mol_type = other DNA
agaaccgacgcctaag

SEQ ID NO: 11468 - DNA, 16 bp, synthetic construct
  misc_feature 1..16: note = synthetic [barcode part1]
  source 1..16: mol_type = other DNA
cgcgaactatcacctc

SEQ ID NO: 11469 - DNA, 16 bp, synthetic construct
  misc_feature 1..16: note = synthetic [barcode part1]
  source 1..16: mol_type = other DNA
cactgtctcgtgtgac

SEQ ID NO: 11470 - DNA, 16 bp, synthetic construct
  misc_feature 1..16: note = synthetic [barcode part1]
  source 1..16: mol_type = other DNA
tgttcttgccgaattg

SEQ ID NO: 11471 - DNA, 16 bp, synthetic construct
  misc_feature 1..16: note = synthetic [barcode part1]
  source 1..16: mol_type = other DNA
acgactactggccttc

SEQ ID NO: 11472 - DNA, 16 bp, synthetic construct
  misc_feature 1..16: note = synthetic [barcode part1]
  source 1..16: mol_type = other DNA
acagaccgcgtaactt

SEQ ID NO: 11473 - DNA, 16 bp, synthetic construct
  misc_feature 1..16: note = synthetic [barcode part1]
  source 1..16: mol_type = other DNA
tggcacgtcaatacac

SEQ ID NO: 11474 - DNA, 16 bp, synthetic construct
  misc_feature 1..16: note = synthetic [barcode part1]
  source 1..16: mol_type = other DNA
atcaaccgaggaagag

SEQ ID NO: 11475 - DNA, 16 bp, synthetic construct
  misc_feature 1..16: note = synthetic [barcode part1]
  source 1..16: mol_type = other DNA
acctctagtgatctgt

SEQ ID NO: 11476 - DNA, 16 bp, synthetic construct
  misc_feature 1..16: note = synthetic [barcode part1]
  source 1..16: mol_type = other DNA
tcaagtcgtgttcttg

SEQ ID NO: 11477 - DNA, 16 bp, synthetic construct
  misc_feature 1..16: note = synthetic [barcode part1]
  source 1..16: mol_type = other DNA
tcgcgtgcaattacag

SEQ ID NO: 11478 - DNA, 16 bp, synthetic construct
  misc_feature 1..16: note = synthetic [barcode part1]
  source 1..16: mol_type = other DNA
gaatacctctgttgtc

SEQ ID NO: 11479 - DNA, 16 bp, synthetic construct
  misc_feature 1..16: note = synthetic [barcode part1]
  source 1..16: mol_type = other DNA
actggttcgtacgtag

SEQ ID NO: 11480 - DNA, 16 bp, synthetic construct
  misc_feature 1..16: note = synthetic [barcode part1]
  source 1..16: mol_type = other DNA
gcagtgaccgtgtaag

SEQ ID NO: 11481 - DNA, 16 bp, synthetic construct
  misc_feature 1..16: note = synthetic [barcode part1]
  source 1..16: mol_type = other DNA
gagttgtgaacacaac

SEQ ID NO: 11482 - DNA, 16 bp, synthetic construct
  misc_feature 1..16: note = synthetic [barcode part1]
  source 1..16: mol_type = other DNA
ttaaggacgacttccg

SEQ ID NO: 11483 - DNA, 16 bp, synthetic construct
  misc_feature 1..16: note = synthetic [barcode part1]
  source 1..16: mol_type = other DNA
tggcggcaattatcgt

SEQ ID NO: 11484 - DNA, 16 bp, synthetic construct
  misc_feature 1..16: note = synthetic [barcode part1]
  source 1..16: mol_type = other DNA
gtcctcagtctaatac

SEQ ID NO: 11485 - DNA, 16 bp, synthetic construct
  misc_feature 1..16: note = synthetic [barcode part1]
  source 1..16: mol_type = other DNA
gtacttgcaggtactg

SEQ ID NO: 11486 - DNA, 16 bp, synthetic construct
  misc_feature 1..16: note = synthetic [barcode part1]
  source 1..16: mol_type = other DNA
agaggtgtcactaggc

SEQ ID NO: 11487 - DNA, 16 bp, synthetic construct
  misc_feature 1..16: note = synthetic [barcode part1]
  source 1..16: mol_type = other DNA
caaccaggttagtcgt

SEQ ID NO: 11488 - DNA, 16 bp, synthetic construct
  misc_feature 1..16: note = synthetic [barcode part1]
  source 1..16: mol_type = other DNA
aggtctaaggtgttcc

SEQ ID NO: 11489 - DNA, 16 bp, synthetic construct
  misc_feature 1..16: note = synthetic [barcode part1]
  source 1..16: mol_type = other DNA
ccacacttattgaacc

SEQ ID NO: 11490 - DNA, 16 bp, synthetic construct
  misc_feature 1..16: note = synthetic [barcode part1]
  source 1..16: mol_type = other DNA
ccagacgcgttacttc

SEQ ID NO: 11491 - DNA, 16 bp, synthetic construct
  misc_feature 1..16: note = synthetic [barcode part1]
  source 1..16: mol_type = other DNA
tctctggatacactac

SEQ ID NO: 11492 - DNA, 16 bp, synthetic construct
  misc_feature 1..16: note = synthetic [barcode part1]
  source 1..16: mol_type = other DNA
ccttgtgttggattac

SEQ ID NO: 11493 - DNA, 16 bp, synthetic construct
  misc_feature 1..16: note = synthetic [barcode part1]
  source 1..16: mol_type = other DNA
gaattcagtccggact

SEQ ID NO: 11494 - DNA, 16 bp, synthetic construct
  misc_feature 1..16: note = synthetic [barcode part1]
  source 1..16: mol_type = other DNA
tgcaggttccgtcgtt

SEQ ID NO: 11495 - DNA, 16 bp, synthetic construct
  misc_feature 1..16: note = synthetic [barcode part1]
  source 1..16: mol_type = other DNA
tactcttgactcaacg

SEQ ID NO: 11496 - DNA, 16 bp, synthetic construct
  misc_feature 1..16: note = synthetic [barcode part1]
  source 1..16: mol_type = other DNA
cagtcctcacggttac

SEQ ID NO: 11497 - DNA, 16 bp, synthetic construct
  misc_feature 1..16: note = synthetic [barcode part1]
  source 1..16: mol_type = other DNA
taccaacacgtgtcag

SEQ ID NO: 11498 - DNA, 16 bp, synthetic construct
  misc_feature 1..16: note = synthetic [barcode part1]
  source 1..16: mol_type = other DNA
tggcgtgaatctgtac

SEQ ID NO: 11499 - DNA, 16 bp, synthetic construct
  misc_feature 1..16: note = synthetic [barcode part1]
  source 1..16: mol_type = other DNA
tggttagatacgcacc

SEQ ID NO: 11500 - DNA, 16 bp, synthetic construct
  misc_feature 1..16: note = synthetic [barcode part1]
  source 1..16: mol_type = other DNA
tcaggactattcgtct

SEQ ID NO: 11501 - DNA, 16 bp, synthetic construct
  misc_feature 1..16: note = synthetic [barcode part1]
  source 1..16: mol_type = other DNA
gagtagagacgttgtt

SEQ ID NO: 11502 - DNA, 16 bp, synthetic construct
  misc_feature 1..16: note = synthetic [barcode part1]
  source 1..16: mol_type = other DNA
tctctctccttgagac

SEQ ID NO: 11503 - DNA, 16 bp, synthetic construct
  misc_feature 1..16: note = synthetic [barcode part1]
  source 1..16: mol_type = other DNA
gttctgaggagtcttg

SEQ ID NO: 11504 - DNA, 16 bp, synthetic construct
  misc_feature 1..16: note = synthetic [barcode part1]
  source 1..16: mol_type = other DNA
accaacagtctaggtc

SEQ ID NO: 11505 - DNA, 16 bp, synthetic construct
  misc_feature 1..16: note = synthetic [barcode part1]
  source 1..16: mol_type = other DNA
aacacctcctaatctg

SEQ ID NO: 11506 - DNA, 16 bp, synthetic construct
  misc_feature 1..16: note = synthetic [barcode part1]
  source 1..16: mol_type = other DNA
atcctgaacactgcag

SEQ ID NO: 11507 - DNA, 16 bp, synthetic construct
  misc_feature 1..16: note = synthetic [barcode part1]
  source 1..16: mol_type = other DNA
atctcttgaggtcgag

SEQ ID NO: 11508 - DNA, 16 bp, synthetic construct
  misc_feature 1..16: note = synthetic [barcode part1]
  source 1..16: mol_type = other DNA
gatcgtggagaccagt

SEQ ID NO: 11509 - DNA, 16 bp, synthetic construct
  misc_feature 1..16: note = synthetic [barcode part1]
  source 1..16: mol_type = other DNA
tctgagtcgtcttgcg

SEQ ID NO: 11510 - DNA, 16 bp, synthetic construct
  misc_feature 1..16: note = synthetic [barcode part1]
  source 1..16: mol_type = other DNA
actacactcgagtgtg

SEQ ID NO: 11511 - DNA, 16 bp, synthetic construct
  misc_feature 1..16: note = synthetic [barcode part1]
  source 1..16: mol_type = other DNA
cgtccgttccgagatt

SEQ ID NO: 11512 - DNA, 16 bp, synthetic construct
  misc_feature 1..16: note = synthetic [barcode part1]
  source 1..16: mol_type = other DNA
cacagatacctgcaac

SEQ ID NO: 11513 - DNA, 16 bp, synthetic construct
  misc_feature 1..16: note = synthetic [barcode part1]
  source 1..16: mol_type = other DNA
cggttgagaccaatct

SEQ ID NO: 11514 - DNA, 16 bp, synthetic construct
  misc_feature 1..16: note = synthetic [barcode part1]
  source 1..16: mol_type = other DNA
cctcggtgagatagtt

SEQ ID NO: 11515 - DNA, 16 bp, synthetic construct
  misc_feature 1..16: note = synthetic [barcode part1]
  source 1..16: mol_type = other DNA
attggtcttgaggtcg

SEQ ID NO: 11516 - DNA, 16 bp, synthetic construct
  misc_feature 1..16: note = synthetic [barcode part1]
  source 1..16: mol_type = other DNA
cctatagtctgccgtg

SEQ ID NO: 11517 - DNA, 16 bp, synthetic construct
  misc_feature 1..16: note = synthetic [barcode part1]
  source 1..16: mol_type = other DNA
ttatcacctcaggcgc

SEQ ID NO: 11518 - DNA, 16 bp, synthetic construct
  misc_feature 1..16: note = synthetic [barcode part1]
  source 1..16: mol_type = other DNA
tcttagtgaccgcacc

SEQ ID NO: 11519 - DNA, 16 bp, synthetic construct
  misc_feature 1..16: note = synthetic [barcode part1]
  source 1..16: mol_type = other DNA
aactctcaatctgcgt

SEQ ID NO: 11520 - DNA, 16 bp, synthetic construct
  misc_feature 1..16: note = synthetic [barcode part1]
  source 1..16: mol_type = other DNA
gtgtggtcagtgtact

SEQ ID NO: 11521 - DNA, 16 bp, synthetic construct
  misc_feature 1..16: note = synthetic [barcode part1]
  source 1..16: mol_type = other DNA
tgaagtacttgtggag

SEQ ID NO: 11522 - DNA, 16 bp, synthetic construct
  misc_feature 1..16: note = synthetic [barcode part1]
  source 1..16: mol_type = other DNA
gcaggtaggataagtg

SEQ ID NO: 11523 - DNA, 16 bp, synthetic construct
  misc_feature 1..16: note = synthetic [barcode part1]
  source 1..16: mol_type = other DNA
tcacgagttgccacct

SEQ ID NO: 11524 - DNA, 16 bp, synthetic construct
  misc_feature 1..16: note = synthetic [barcode part1]
  source 1..16: mol_type = other DNA
gaatcggaatcggaag

SEQ ID NO: 11525 - DNA, 16 bp, synthetic construct
  misc_feature 1..16: note = synthetic [barcode part1]
  source 1..16: mol_type = other DNA
aacctaacttctgcgt

SEQ ID NO: 11526 - DNA, 16 bp, synthetic construct
  misc_feature 1..16: note = synthetic [barcode part1]
  source 1..16: mol_type = other DNA
tgttctaacttgcgac

SEQ ID NO: 11527 - DNA, 16 bp, synthetic construct
  misc_feature 1..16: note = synthetic [barcode part1]
  source 1..16: mol_type = other DNA
cctgacttacgcagtc

SEQ ID NO: 11528 - DNA, 16 bp, synthetic construct
  misc_feature 1..16: note = synthetic [barcode part1]
  source 1..16: mol_type = other DNA
aaggagatagttggcg

SEQ ID NO: 11529 - DNA, 16 bp, synthetic construct
  misc_feature 1..16: note = synthetic [barcode part1]
  source 1..16: mol_type = other DNA
agactcagataacgac

SEQ ID NO: 11530 - DNA, 16 bp, synthetic construct
  misc_feature 1..16: note = synthetic [barcode part1]
  source 1..16: mol_type = other DNA
ttgtggtgttgtggtg

SEQ ID NO: 11531 - DNA, 16 bp, synthetic construct
  misc_feature 1..16: note = synthetic [barcode part1]
  source 1..16: mol_type = other DNA
aagtgttgcctgtggt

SEQ ID NO: 11532 - DNA, 16 bp, synthetic construct
  misc_feature 1..16: note = synthetic [barcode part1]
  source 1..16: mol_type = other DNA
ccgcctctaattcttg

SEQ ID NO: 11533 - DNA, 16 bp, synthetic construct
  misc_feature 1..16: note = synthetic [barcode part1]
  source 1..16: mol_type = other DNA
gactgtggttggtact

SEQ ID NO: 11534 - DNA, 16 bp, synthetic construct
  misc_feature 1..16: note = synthetic [barcode part1]
  source 1..16: mol_type = other DNA
aaccgtgcgcaattgt

SEQ ID NO: 11535 - DNA, 16 bp, synthetic construct
  misc_feature 1..16: note = synthetic [barcode part1]
  source 1..16: mol_type = other DNA
agttacgccaattctc

SEQ ID NO: 11536 - DNA, 16 bp, synthetic construct
  misc_feature 1..16: note = synthetic [barcode part1]
  source 1..16: mol_type = other DNA
ttggaggtggtaagag

SEQ ID NO: 11537 - DNA, 16 bp, synthetic construct
  misc_feature 1..16: note = synthetic [barcode part1]
  source 1..16: mol_type = other DNA
cgcacgtatatcacag

SEQ ID NO: 11538 - DNA, 16 bp, synthetic construct
  misc_feature 1..16: note = synthetic [barcode part1]
  source 1..16: mol_type = other DNA
aaccgtgtctcgacct

SEQ ID NO: 11539 - DNA, 16 bp, synthetic construct
  misc_feature 1..16: note = synthetic [barcode part1]
  source 1..16: mol_type = other DNA
tctgagaataccgcac

SEQ ID NO: 11540 - DNA, 16 bp, synthetic construct
  misc_feature 1..16: note = synthetic [barcode part1]
  source 1..16: mol_type = other DNA
aatcgacctaatcggc

SEQ ID NO: 11541 - DNA, 16 bp, synthetic construct
  misc_feature 1..16: note = synthetic [barcode part1]
  source 1..16: mol_type = other DNA
ccgttgttatcactcc

SEQ ID NO: 11542 - DNA, 16 bp, synthetic construct
  misc_feature 1..16: note = synthetic [barcode part1]
  source 1..16: mol_type = other DNA
tggttctcctcgactt

SEQ ID NO: 11543 - DNA, 16 bp, synthetic construct
  misc_feature 1..16: note = synthetic [barcode part1]
  source 1..16: mol_type = other DNA
tgcggaactggtaacg

SEQ ID NO: 11544 - DNA, 16 bp, synthetic construct
  misc_feature 1..16: note = synthetic [barcode part1]
  source 1..16: mol_type = other DNA
aattaggaacgtaccg

SEQ ID NO: 11545 - DNA, 16 bp, synthetic construct
  misc_feature 1..16: note = synthetic [barcode part1]
  source 1..16: mol_type = other DNA
atcgcggttcacctac

SEQ ID NO: 11546 - DNA, 16 bp, synthetic construct
  misc_feature 1..16: note = synthetic [barcode part1]
  source 1..16: mol_type = other DNA
tctgccggacttgtgt

SEQ ID NO: 11547 - DNA, 16 bp, synthetic construct
  misc_feature 1..16: note = synthetic [barcode part1]
  source 1..16: mol_type = other DNA
aagatctgtagacggt

SEQ ID NO: 11548 - DNA, 16 bp, synthetic construct
  misc_feature 1..16: note = synthetic [barcode part1]
  source 1..16: mol_type = other DNA
ccactacagataacgc

SEQ ID NO: 11549 - DNA, 16 bp, synthetic construct
  misc_feature 1..16: note = synthetic [barcode part1]
  source 1..16: mol_type = other DNA
aacgccgtggtattac

SEQ ID NO: 11550 - DNA, 16 bp, synthetic construct
  misc_feature 1..16: note = synthetic [barcode part1]
  source 1..16: mol_type = other DNA
gttgcctaacgagatc

SEQ ID NO: 11551 - DNA, 16 bp, synthetic construct
  misc_feature 1..16: note = synthetic [barcode part1]
  source 1..16: mol_type = other DNA
gcactaacttccaatc

SEQ ID NO: 11552 - DNA, 16 bp, synthetic construct
  misc_feature 1..16: note = synthetic [barcode part1]
  source 1..16: mol_type = other DNA
gactcctagagattgc

SEQ ID NO: 11553 - DNA, 16 bp, synthetic construct
  misc_feature 1..16: note = synthetic [barcode part1]
  source 1..16: mol_type = other DNA
tcactgacacaagaag

SEQ ID NO: 11554 - DNA, 16 bp, synthetic construct
  misc_feature 1..16: note = synthetic [barcode part1]
  source 1..16: mol_type = other DNA
tcaccgtgacacttgc

SEQ ID NO: 11555 - DNA, 16 bp, synthetic construct
  misc_feature 1..16: note = synthetic [barcode part1]
  source 1..16: mol_type = other DNA
cgaccgtattcaagtg

SEQ ID NO: 11556 - DNA, 16 bp, synthetic construct
  misc_feature 1..16: note = synthetic [barcode part1]
  source 1..16: mol_type = other DNA
acgaatcgattacgcc

SEQ ID NO: 11557 - DNA, 16 bp, synthetic construct
  misc_feature 1..16: note = synthetic [barcode part1]
  source 1..16: mol_type = other DNA
aattgaccgcggtgtt

SEQ ID NO: 11558 - DNA, 16 bp, synthetic construct
  misc_feature 1..16: note = synthetic [barcode part1]
  source 1..16: mol_type = other DNA
gattcctgccactctt

SEQ ID NO: 11559 - DNA, 16 bp, synthetic construct
  misc_feature 1..16: note = synthetic [barcode part1]
  source 1..16: mol_type = other DNA
gtgcgaagagttattg

SEQ ID NO: 11560 - DNA, 16 bp, synthetic construct
  misc_feature 1..16: note = synthetic [barcode part1]
  source 1..16: mol_type = other DNA
gcgaggaccagtagtt

SEQ ID NO: 11561 - DNA, 16 bp, synthetic construct
  misc_feature 1..16: note = synthetic [barcode part1]
  source 1..16: mol_type = other DNA
ttagttcggaccgaac

SEQ ID NO: 11562 - DNA, 16 bp, synthetic construct
  misc_feature 1..16: note = synthetic [barcode part1]
  source 1..16: mol_type = other DNA
ttactctcggttctcg

SEQ ID NO: 11563 - DNA, 16 bp, synthetic construct
  misc_feature 1..16: note = synthetic [barcode part1]
  source 1..16: mol_type = other DNA
actcgtccttaggacc

SEQ ID NO: 11564 - DNA, 16 bp, synthetic construct
  misc_feature 1..16: note = synthetic [barcode part1]
  source 1..16: mol_type = other DNA
acctctccgcaatcag

SEQ ID NO: 11565 - DNA, 16 bp, synthetic construct
  misc_feature 1..16: note = synthetic [barcode part1]
  source 1..16: mol_type = other DNA
cggtggtacgttcttc

SEQ ID NO: 11566 - DNA, 16 bp, synthetic construct
  misc_feature 1..16: note = synthetic [barcode part1]
  source 1..16: mol_type = other DNA
aattgcacgcgtgact

SEQ ID NO: 11567 - DNA, 16 bp, synthetic construct
  misc_feature 1..16: note = synthetic [barcode part1]
  source 1..16: mol_type = other DNA
agactcaggaccgaac

SEQ ID NO: 11568 - DNA, 16 bp, synthetic construct
  misc_feature 1..16: note = synthetic [barcode part1]
  source 1..16: mol_type = other DNA
agaccgacttcctaag

SEQ ID NO: 11569 - DNA, 16 bp, synthetic construct
  misc_feature 1..16: note = synthetic [barcode part1]
  source 1..16: mol_type = other DNA
gccagtgtatcctacc

SEQ ID NO: 11570 - DNA, 16 bp, synthetic construct
  misc_feature 1..16: note = synthetic [barcode part1]
  source 1..16: mol_type = other DNA
tgacgcgtcttaccac

SEQ ID NO: 11571 - DNA, 16 bp, synthetic construct
  misc_feature 1..16: note = synthetic [barcode part1]
  source 1..16: mol_type = other DNA
gtcacgacagaacctt

SEQ ID NO: 11572 - DNA, 16 bp, synthetic construct
  misc_feature 1..16: note = synthetic [barcode part1]
  source 1..16: mol_type = other DNA
aggtcacggacgtagt

SEQ ID NO: 11573 - DNA, 16 bp, synthetic construct
  misc_feature 1..16: note = synthetic [barcode part1]
  source 1..16: mol_type = other DNA
gcaagtgtatccgttg

SEQ ID NO: 11574 - DNA, 16 bp, synthetic construct
  misc_feature 1..16: note = synthetic [barcode part1]
  source 1..16: mol_type = other DNA
ccaagacagtgtcgtt

SEQ ID NO: 11575 - DNA, 16 bp, synthetic construct
  misc_feature 1..16: note = synthetic [barcode part1]
  source 1..16: mol_type = other DNA
taacaaggtcctgtcg

SEQ ID NO: 11576 - DNA, 16 bp, synthetic construct
  misc_feature 1..16: note = synthetic [barcode part1]
  source 1..16: mol_type = other DNA
tccgagagagattcct

SEQ ID NO: 11577 - DNA, 16 bp, synthetic construct
  misc_feature 1..16: note = synthetic [barcode part1]
  source 1..16: mol_type = other DNA
actacacggttacacg

SEQ ID NO: 11578 - DNA, 16 bp, synthetic construct
  misc_feature 1..16: note = synthetic [barcode part1]
  source 1..16: mol_type = other DNA
caacacagaggcgatc

SEQ ID NO: 11579 - DNA, 16 bp, synthetic construct
  misc_feature 1..16: note = synthetic [barcode part1]
  source 1..16: mol_type = other DNA
ttcgcgttacaccttc

SEQ ID NO: 11580 - DNA, 16 bp, synthetic construct
  misc_feature 1..16: note = synthetic [barcode part1]
  source 1..16: mol_type = other DNA
cgtgtgatactctgtt

SEQ ID NO: 11581 - DNA, 16 bp, synthetic construct
  misc_feature 1..16: note = synthetic [barcode part1]
  source 1..16: mol_type = other DNA
tcctacctattcagag

SEQ ID NO: 11582 - DNA, 16 bp, synthetic construct
  misc_feature 1..16: note = synthetic [barcode part1]
  source 1..16: mol_type = other DNA
tctcgcagtattctcc

SEQ ID NO: 11583 - DNA, 16 bp, synthetic construct
  misc_feature 1..16: note = synthetic [barcode part1]
  source 1..16: mol_type = other DNA
ccgcgcctaagttact

SEQ ID NO: 11584 - DNA, 16 bp, synthetic construct
  misc_feature 1..16: note = synthetic [barcode part1]
  source 1..16: mol_type = other DNA
gccttaacaactggtg

SEQ ID NO: 11585 - DNA, 16 bp, synthetic construct
  misc_feature 1..16: note = synthetic [barcode part1]
  source 1..16: mol_type = other DNA
tctaccgttgagtgcc

SEQ ID NO: 11586 - DNA, 16 bp, synthetic construct
  misc_feature 1..16: note = synthetic [barcode part1]
  source 1..16: mol_type = other DNA
tcctcgagtgtatcgc

SEQ ID NO: 11587 - DNA, 16 bp, synthetic construct
  misc_feature 1..16: note = synthetic [barcode part1]
  source 1..16: mol_type = other DNA
ccttcgaagtcaagac

SEQ ID NO: 11588 - DNA, 16 bp, synthetic construct
  misc_feature 1..16: note = synthetic [barcode part1]
  source 1..16: mol_type = other DNA
tcgcgtggagagattg

SEQ ID NO: 11589 - DNA, 16 bp, synthetic construct
  misc_feature 1..16: note = synthetic [barcode part1]
  source 1..16: mol_type = other DNA
acttccaggtgtgagt

SEQ ID NO: 11590 - DNA, 16 bp, synthetic construct
  misc_feature 1..16: note = synthetic [barcode part1]
  source 1..16: mol_type = other DNA
gtggatcaagacagtt

SEQ ID NO: 11591 - DNA, 16 bp, synthetic construct
  misc_feature 1..16: note = synthetic [barcode part1]
  source 1..16: mol_type = other DNA
gttctgatcgactgag

SEQ ID NO: 11592 - DNA, 16 bp, synthetic construct
  misc_feature 1..16: note = synthetic [barcode part1]
  source 1..16: mol_type = other DNA
gtcggtaagacacctt

SEQ ID NO: 11593 - DNA, 16 bp, synthetic construct
  misc_feature 1..16: note = synthetic [barcode part1]
  source 1..16: mol_type = other DNA
agtccttgtcgagagt

SEQ ID NO: 11594 - DNA, 16 bp, synthetic construct
  misc_feature 1..16: note = synthetic [barcode part1]
  source 1..16: mol_type = other DNA
ccttggtcagtaagac

SEQ ID NO: 11595 - DNA, 16 bp, synthetic construct
  misc_feature 1..16: note = synthetic [barcode part1]
  source 1..16: mol_type = other DNA
gacaacgagacttgcg

SEQ ID NO: 11596 - DNA, 16 bp, synthetic construct
  misc_feature 1..16: note = synthetic [barcode part1]
  source 1..16: mol_type = other DNA
gtgtaatcggcacact

SEQ ID NO: 11597 - DNA, 16 bp, synthetic construct
  misc_feature 1..16: note = synthetic [barcode part1]
  source 1..16: mol_type = other DNA
ccttgtcgacgttcag

SEQ ID NO: 11598 - DNA, 16 bp, synthetic construct
  misc_feature 1..16: note = synthetic [barcode part1]
  source 1..16: mol_type = other DNA
cacgtagaggtgttct

SEQ ID NO: 11599 - DNA, 16 bp, synthetic construct
  misc_feature 1..16: note = synthetic [barcode part1]
  source 1..16: mol_type = other DNA
cggtaccaagtaggtg

SEQ ID NO: 11600 - DNA, 16 bp, synthetic construct
  misc_feature 1..16: note = synthetic [barcode part1]
  source 1..16: mol_type = other DNA
tcggtagtggatcgtt

SEQ ID NO: 11601 - DNA, 16 bp, synthetic construct
  misc_feature 1..16: note = synthetic [barcode part1]
  source 1..16: mol_type = other DNA
ttgcacagtactgacg

SEQ ID NO: 11602 - DNA, 16 bp, synthetic construct
  misc_feature 1..16: note = synthetic [barcode part1]
  source 1..16: mol_type = other DNA
cgtctcgagtggaatt

SEQ ID NO: 11603 - DNA, 16 bp, synthetic construct
  misc_feature 1..16: note = synthetic [barcode part1]
  source 1..16: mol_type = other DNA
aagagtgcagagacgt

SEQ ID NO: 11604 - DNA, 16 bp, synthetic construct
  misc_feature 1..16: note = synthetic [barcode part1]
  source 1..16: mol_type = other DNA
ccagtctacctggatc

SEQ ID NO: 11605 - DNA, 16 bp, synthetic construct
  misc_feature 1..16: note = synthetic [barcode part1]
  source 1..16: mol_type = other DNA
taactccacactgact

SEQ ID NO: 11606 - DNA, 16 bp, synthetic construct
  misc_feature 1..16: note = synthetic [barcode part1]
  source 1..16: mol_type = other DNA
tcgatccgaatattcc

SEQ ID NO: 11607 - DNA, 16 bp, synthetic construct
  misc_feature 1..16: note = synthetic [barcode part1]
  source 1..16: mol_type = other DNA
gatcaggtcactactg

SEQ ID NO: 11608 - DNA, 16 bp, synthetic construct
  misc_feature 1..16: note = synthetic [barcode part1]
  source 1..16: mol_type = other DNA
taggtcggaagatact

SEQ ID NO: 11609 - DNA, 16 bp, synthetic construct
  misc_feature 1..16: note = synthetic [barcode part1]
  source 1..16: mol_type = other DNA
tacctgagacttgcag

SEQ ID NO: 11610 - DNA, 16 bp, synthetic construct
  misc_feature 1..16: note = synthetic [barcode part1]
  source 1..16: mol_type = other DNA
tggcaagttgtggacg

SEQ ID NO: 11611 - DNA, 16 bp, synthetic construct
  misc_feature 1..16: note = synthetic [barcode part1]
  source 1..16: mol_type = other DNA
gcgtacgttcttcttc

SEQ ID NO: 11612 - DNA, 16 bp, synthetic construct
  misc_feature 1..16: note = synthetic [barcode part1]
  source 1..16: mol_type = other DNA
aactgaatcgtacgag

SEQ ID NO: 11613 - DNA, 16 bp, synthetic construct
  misc_feature 1..16: note = synthetic [barcode part1]
  source 1..16: mol_type = other DNA
tggacgaggtagatag

SEQ ID NO: 11614 - DNA, 16 bp, synthetic construct
  misc_feature 1..16: note = synthetic [barcode part1]
  source 1..16: mol_type = other DNA
acaccgagagacaatt

SEQ ID NO: 11615 - DNA, 16 bp, synthetic construct
  misc_feature 1..16: note = synthetic [barcode part1]
  source 1..16: mol_type = other DNA
gatcgcagaccagagt

SEQ ID NO: 11616 - DNA, 16 bp, synthetic construct
  misc_feature 1..16: note = synthetic [barcode part1]
  source 1..16: mol_type = other DNA
tgccggtggaatcaag

SEQ ID NO: 11617 - DNA, 16 bp, synthetic construct
  misc_feature 1..16: note = synthetic [barcode part1]
  source 1..16: mol_type = other DNA
aggcaactacgttaag

SEQ ID NO: 11618 - DNA, 16 bp, synthetic construct
  misc_feature 1..16: note = synthetic [barcode part1]
  source 1..16: mol_type = other DNA
tgatcctggtcgaagt

SEQ ID NO: 11619 - DNA, 16 bp, synthetic construct
  misc_feature 1..16: note = synthetic [barcode part1]
  source 1..16: mol_type = other DNA
cagtaggttacaagtg

SEQ ID NO: 11620 - DNA, 16 bp, synthetic construct
  misc_feature 1..16: note = synthetic [barcode part1]
  source 1..16: mol_type = other DNA
ttcaggaagttctggc

SEQ ID NO: 11621 - DNA, 16 bp, synthetic construct
  misc_feature 1..16: note = synthetic [barcode part1]
  source 1..16: mol_type = other DNA
cagttgtagacgttcg

SEQ ID NO: 11622 - DNA, 16 bp, synthetic construct
  misc_feature 1..16: note = synthetic [barcode part1]
  source 1..16: mol_type = other DNA
acactctccttgcact

SEQ ID NO: 11623 - DNA, 16 bp, synthetic construct
  misc_feature 1..16: note = synthetic [barcode part1]
  source 1..16: mol_type = other DNA
ccaattggaagtcctg

SEQ ID NO: 11624 - DNA, 16 bp, synthetic construct
  misc_feature 1..16: note = synthetic [barcode part1]
  source 1..16: mol_type = other DNA
gtactagaaccacgtc

SEQ ID NO: 11625 - DNA, 16 bp, synthetic construct
  misc_feature 1..16: note = synthetic [barcode part1]
  source 1..16: mol_type = other DNA
tacctccttaacaacg

SEQ ID NO: 11626 - DNA, 16 bp, synthetic construct
  misc_feature 1..16: note = synthetic [barcode part1]
  source 1..16: mol_type = other DNA
ccttcctaccgattgt

SEQ ID NO: 11627 - DNA, 16 bp, synthetic construct
  misc_feature 1..16: note = synthetic [barcode part1]
  source 1..16: mol_type = other DNA
agaacttacgacgcct

SEQ ID NO: 11628 - DNA, 16 bp, synthetic construct
  misc_feature 1..16: note = synthetic [barcode part1]
  source 1..16: mol_type = other DNA
gcgagttcttccaatt

SEQ ID NO: 11629 - DNA, 16 bp, synthetic construct
  misc_feature 1..16: note = synthetic [barcode part1]
  source 1..16: mol_type = other DNA
ccaagactacttacct

SEQ ID NO: 11630 - DNA, 16 bp, synthetic construct
  misc_feature 1..16: note = synthetic [barcode part1]
  source 1..16: mol_type = other DNA
cacgtcctgccgaatt

SEQ ID NO: 11631 - DNA, 16 bp, synthetic construct
  misc_feature 1..16: note = synthetic [barcode part1]
  source 1..16: mol_type = other DNA
atcctacctactgcct

SEQ ID NO: 11632 - DNA, 16 bp, synthetic construct
  misc_feature 1..16: note = synthetic [barcode part1]
  source 1..16: mol_type = other DNA
cgaccgtagtggtaag

SEQ ID NO: 11633 - DNA, 16 bp, synthetic construct
  misc_feature 1..16: note = synthetic [barcode part1]
  source 1..16: mol_type = other DNA
tccggagttggttaac

SEQ ID NO: 11634 - DNA, 16 bp, synthetic construct
  misc_feature 1..16: note = synthetic [barcode part1]
  source 1..16: mol_type = other DNA
cgtggcaataggcaac

SEQ ID NO: 11635 - DNA, 16 bp, synthetic construct
  misc_feature 1..16: note = synthetic [barcode part1]
  source 1..16: mol_type = other DNA
ccacctgtggaactct

SEQ ID NO: 11636 - DNA, 16 bp, synthetic construct
  misc_feature 1..16: note = synthetic [barcode part1]
  source 1..16: mol_type = other DNA
ttggtcctactaacac

SEQ ID NO: 11637 - DNA, 16 bp, synthetic construct
  misc_feature 1..16: note = synthetic [barcode part1]
  source 1..16: mol_type = other DNA
acttaggcaaggcgac

SEQ ID NO: 11638 - DNA, 16 bp, synthetic construct
  misc_feature 1..16: note = synthetic [barcode part1]
  source 1..16: mol_type = other DNA
cggaattggttgatcc

SEQ ID NO: 11639 - DNA, 16 bp, synthetic construct
  misc_feature 1..16: note = synthetic [barcode part1]
  source 1..16: mol_type = other DNA
ccgagactctatccac

SEQ ID NO: 11640 - DNA, 16 bp, synthetic construct
  misc_feature 1..16: note = synthetic [barcode part1]
  source 1..16: mol_type = other DNA
gacttctgtgtctagt

SEQ ID NO: 11641 - DNA, 16 bp, synthetic construct
  misc_feature 1..16: note = synthetic [barcode part1]
  source 1..16: mol_type = other DNA
tctcctgcctgtagag

SEQ ID NO: 11642 - DNA, 16 bp, synthetic construct
  misc_feature 1..16: note = synthetic [barcode part1]
  source 1..16: mol_type = other DNA
gtgttaggcgtctaac

SEQ ID NO: 11643 - DNA, 16 bp, synthetic construct
  misc_feature 1..16: note = synthetic [barcode part1]
  source 1..16: mol_type = other DNA
cacgttaaggaccgag

SEQ ID NO: 11644 - DNA, 16 bp, synthetic construct
  misc_feature 1..16: note = synthetic [barcode part1]
  source 1..16: mol_type = other DNA
tggttgtccgttaccg

SEQ ID NO: 11645 - DNA, 16 bp, synthetic construct
  misc_feature 1..16: note = synthetic [barcode part1]
  source 1..16: mol_type = other DNA
actacacctcctgacg

SEQ ID NO: 11646 - DNA, 16 bp, synthetic construct
  misc_feature 1..16: note = synthetic [barcode part1]
  source 1..16: mol_type = other DNA
gttaccttgtctgagt

SEQ ID NO: 11647 - DNA, 16 bp, synthetic construct
  misc_feature 1..16: note = synthetic [barcode part1]
  source 1..16: mol_type = other DNA
ttggtggttcgtatct

SEQ ID NO: 11648 - DNA, 16 bp, synthetic construct
  misc_feature 1..16: note = synthetic [barcode part1]
  source 1..16: mol_type = other DNA
gaggcgcagaatatag

SEQ ID NO: 11649 - DNA, 16 bp, synthetic construct
  misc_feature 1..16: note = synthetic [barcode part1]
  source 1..16: mol_type = other DNA
tgcggactcgttctac

SEQ ID NO: 11650 - DNA, 16 bp, synthetic construct
  misc_feature 1..16: note = synthetic [barcode part1]
  source 1..16: mol_type = other DNA
tcaccaatcagaccag

SEQ ID NO: 11651 - DNA, 16 bp, synthetic construct
  misc_feature 1..16: note = synthetic [barcode part1]
  source 1..16: mol_type = other DNA
gtgaagaaccaagtct

SEQ ID NO: 11652 - DNA, 16 bp, synthetic construct
  misc_feature 1..16: note = synthetic [barcode part1]
  source 1..16: mol_type = other DNA
cggacctactctactg

SEQ ID NO: 11653 - DNA, 16 bp, synthetic construct
  misc_feature 1..16: note = synthetic [barcode part1]
  source 1..16: mol_type = other DNA
tggattgttccgcacc

SEQ ID NO: 11654 - DNA, 16 bp, synthetic construct
  misc_feature 1..16: note = synthetic [barcode part1]
  source 1..16: mol_type = other DNA
agttgaaggtgtgccg

SEQ ID NO: 11655 - DNA, 16 bp, synthetic construct
  misc_feature 1..16: note = synthetic [barcode part1]
  source 1..16: mol_type = other DNA
gtcgacagtgatcact

SEQ ID NO: 11656 - DNA, 16 bp, synthetic construct
  misc_feature 1..16: note = synthetic [barcode part1]
  source 1..16: mol_type = other DNA
gttgacgtaccagtgt

SEQ ID NO: 11657 - DNA, 16 bp, synthetic construct
  misc_feature 1..16: note = synthetic [barcode part1]
  source 1..16: mol_type = other DNA
aggttgtgagtcgttc

SEQ ID NO: 11658 - DNA, 16 bp, synthetic construct
  misc_feature 1..16: note = synthetic [barcode part1]
  source 1..16: mol_type = other DNA
agatagaactctaggc

SEQ ID NO: 11659 - DNA, 16 bp, synthetic construct
  misc_feature 1..16: note = synthetic [barcode part1]
  source 1..16: mol_type = other DNA
ttcgtactacggaggt

SEQ ID NO: 11660 - DNA, 16 bp, synthetic construct
  misc_feature 1..16: note = synthetic [barcode part1]
  source 1..16: mol_type = other DNA
gttcaggagtatccgt

SEQ ID NO: 11661 - DNA, 16 bp, synthetic construct
  misc_feature 1..16: note = synthetic [barcode part1]
  source 1..16: mol_type = other DNA
gtctcacttcgtaggc

SEQ ID NO: 11662 - DNA, 16 bp, synthetic construct
  misc_feature 1..16: note = synthetic [barcode part1]
  source 1..16: mol_type = other DNA
acggaggtatactcct

SEQ ID NO: 11663 - DNA, 16 bp, synthetic construct
  misc_feature 1..16: note = synthetic [barcode part1]
  source 1..16: mol_type = other DNA
aagtagagataccacc

SEQ ID NO: 11664 - DNA, 16 bp, synthetic construct
  misc_feature 1..16: note = synthetic [barcode part1]
  source 1..16: mol_type = other DNA
agtgcgagttcgacag

SEQ ID NO: 11665 - DNA, 16 bp, synthetic construct
  misc_feature 1..16: note = synthetic [barcode part1]
  source 1..16: mol_type = other DNA
tcacagacaccttgcc

SEQ ID NO: 11666 - DNA, 16 bp, synthetic construct
  misc_feature 1..16: note = synthetic [barcode part1]
  source 1..16: mol_type = other DNA
cgagtcacaacgactt

SEQ ID NO: 11667 - DNA, 16 bp, synthetic construct
  misc_feature 1..16: note = synthetic [barcode part1]
  source 1..16: mol_type = other DNA
agtccgatcctcgtgt

SEQ ID NO: 11668 - DNA, 16 bp, synthetic construct
  misc_feature 1..16: note = synthetic [barcode part1]
  source 1..16: mol_type = other DNA
tcttcggaacttcctc

SEQ ID NO: 11669 - DNA, 16 bp, synthetic construct
  misc_feature 1..16: note = synthetic [barcode part1]
  source 1..16: mol_type = other DNA
tgtccacgtgaacaac

SEQ ID NO: 11670 - DNA, 16 bp, synthetic construct
  misc_feature 1..16: note = synthetic [barcode part1]
  source 1..16: mol_type = other DNA
ttgtgcagatcaagag

SEQ ID NO: 11671 - DNA, 16 bp, synthetic construct
  misc_feature 1..16: note = synthetic [barcode part1]
  source 1..16: mol_type = other DNA
aattcaagaccaccgc

SEQ ID NO: 11672 - DNA, 16 bp, synthetic construct
  misc_feature 1..16: note = synthetic [barcode part1]
  source 1..16: mol_type = other DNA
cagacacgactacgtt

SEQ ID NO: 11673 - DNA, 16 bp, synthetic construct
  misc_feature 1..16: note = synthetic [barcode part1]
  source 1..16: mol_type = other DNA
tcgttccttgaatacg

SEQ ID NO: 11674 - DNA, 16 bp, synthetic construct
  misc_feature 1..16: note = synthetic [barcode part1]
  source 1..16: mol_type = other DNA
actagaccagatcacc

SEQ ID NO: 11675 - DNA, 16 bp, synthetic construct
  misc_feature 1..16: note = synthetic [barcode part1]
  source 1..16: mol_type = other DNA
tgtatctcagaggtgc

SEQ ID NO: 11676 - DNA, 16 bp, synthetic construct
  misc_feature 1..16: note = synthetic [barcode part1]
  source 1..16: mol_type = other DNA
tacttgttggaacctc

SEQ ID NO: 11677 - DNA, 16 bp, synthetic construct
  misc_feature 1..16: note = synthetic [barcode part1]
  source 1..16: mol_type = other DNA
cgccgaacttacgttc

SEQ ID NO: 11678 - DNA, 16 bp, synthetic construct
  misc_feature 1..16: note = synthetic [barcode part1]
  source 1..16: mol_type = other DNA
aggacttggcgagtac

SEQ ID NO: 11679 - DNA, 16 bp, synthetic construct
  misc_feature 1..16: note = synthetic [barcode part1]
  source 1..16: mol_type = other DNA
gtcacaggtgacactt

SEQ ID NO: 11680 - DNA, 16 bp, synthetic construct
  misc_feature 1..16: note = synthetic [barcode part1]
  source 1..16: mol_type = other DNA
gtgcacacagtgttgt

SEQ ID NO: 11681 - DNA, 16 bp, synthetic construct
  misc_feature 1..16: note = synthetic [barcode part1]
  source 1..16: mol_type = other DNA
taggtataccgaaggt

SEQ ID NO: 11682 - DNA, 16 bp, synthetic construct
  misc_feature 1..16: note = synthetic [barcode part1]
  source 1..16: mol_type = other DNA
actcagacttagacgc

SEQ ID NO: 11683 - DNA, 16 bp, synthetic construct
  misc_feature 1..16: note = synthetic [barcode part1]
  source 1..16: mol_type = other DNA
cgttaggttcacgcct

SEQ ID NO: 11684 - DNA, 16 bp, synthetic construct
  misc_feature 1..16: note = synthetic [barcode part1]
  source 1..16: mol_type = other DNA
tacaggtaataaggcc

SEQ ID NO: 11685 - DNA, 16 bp, synthetic construct
  misc_feature 1..16: note = synthetic [barcode part1]
  source 1..16: mol_type = other DNA
gacttcctaactcctc

SEQ ID NO: 11686 - DNA, 16 bp, synthetic construct
  misc_feature 1..16: note = synthetic [barcode part1]
  source 1..16: mol_type = other DNA
acgatcgagaatcagt

SEQ ID NO: 11687 - DNA, 16 bp, synthetic construct
  misc_feature 1..16: note = synthetic [barcode part1]
  source 1..16: mol_type = other DNA
aacacacaccagtacc

SEQ ID NO: 11688 - DNA, 16 bp, synthetic construct
  misc_feature 1..16: note = synthetic [barcode part1]
  source 1..16: mol_type = other DNA
tcctgacgacttgcac

SEQ ID NO: 11689 - DNA, 16 bp, synthetic construct
  misc_feature 1..16: note = synthetic [barcode part1]
  source 1..16: mol_type = other DNA
atcttcactatcaggc

SEQ ID NO: 11690 - DNA, 16 bp, synthetic construct
  misc_feature 1..16: note = synthetic [barcode part1]
  source 1..16: mol_type = other DNA
gtcagtacactccgtc

SEQ ID NO: 11691 - DNA, 16 bp, synthetic construct
  misc_feature 1..16: note = synthetic [barcode part1]
  source 1..16: mol_type = other DNA
cgagatccagtactgt

SEQ ID NO: 11692 - DNA, 16 bp, synthetic construct
  misc_feature 1..16: note = synthetic [barcode part1]
  source 1..16: mol_type = other DNA
gtcagtggagttaagt

SEQ ID NO: 11693 - DNA, 16 bp, synthetic construct
  misc_feature 1..16: note = synthetic [barcode part1]
  source 1..16: mol_type = other DNA
aaccgtacgtagtcac

SEQ ID NO: 11694 - DNA, 16 bp, synthetic construct
  misc_feature 1..16: note = synthetic [barcode part1]
  source 1..16: mol_type = other DNA
aaggacggtaatctac

SEQ ID NO: 11695 - DNA, 16 bp, synthetic construct
  misc_feature 1..16: note = synthetic [barcode part1]
  source 1..16: mol_type = other DNA
aacacacacaccagtc

SEQ ID NO: 11696 - DNA, 16 bp, synthetic construct
  misc_feature 1..16: note = synthetic [barcode part1]
  source 1..16: mol_type = other DNA
cacggtacctgttcgt

SEQ ID NO: 11697 - DNA, 16 bp, synthetic construct
  misc_feature 1..16: note = synthetic [barcode part1]
  source 1..16: mol_type = other DNA
tgcgaagaactgttag

SEQ ID NO: 11698 - DNA, 16 bp, synthetic construct
  misc_feature 1..16: note = synthetic [barcode part1]
  source 1..16: mol_type = other DNA
ccgaagtgttctaggt

SEQ ID NO: 11699 - DNA, 16 bp, synthetic construct
  misc_feature 1..16: note = synthetic [barcode part1]
  source 1..16: mol_type = other DNA
tgcgcgtcaattaacg

SEQ ID NO: 11700 - DNA, 16 bp, synthetic construct
  misc_feature 1..16: note = synthetic [barcode part1]
  source 1..16: mol_type = other DNA
gaacaatagagtggcg

SEQ ID NO: 11701 - DNA, 16 bp, synthetic construct
  misc_feature 1..16: note = synthetic [barcode part1]
  source 1..16: mol_type = other DNA
gaattgaccgactctg

SEQ ID NO: 11702 - DNA, 16 bp, synthetic construct
  misc_feature 1..16: note = synthetic [barcode part1]
  source 1..16: mol_type = other DNA
tgtcagagagtgtaac

SEQ ID NO: 11703 - DNA, 16 bp, synthetic construct
  misc_feature 1..16: note = synthetic [barcode part1]
  source 1..16: mol_type = other DNA
gtctgatcaatccgag

SEQ ID NO: 11704 - DNA, 16 bp, synthetic construct
  misc_feature 1..16: note = synthetic [barcode part1]
  source 1..16: mol_type = other DNA
gacagagtgatccttc

SEQ ID NO: 11705 - DNA, 16 bp, synthetic construct
  misc_feature 1..16: note = synthetic [barcode part1]
  source 1..16: mol_type = other DNA
cacagtgcaaggttct

SEQ ID NO: 11706 - DNA, 16 bp, synthetic construct
  misc_feature 1..16: note = synthetic [barcode part1]
  source 1..16: mol_type = other DNA
atcgtggtcgtctatt

SEQ ID NO: 11707 - DNA, 16 bp, synthetic construct
  misc_feature 1..16: note = synthetic [barcode part1]
  source 1..16: mol_type = other DNA
cgcacgattgttattc

SEQ ID NO: 11708 - DNA, 16 bp, synthetic construct
  misc_feature 1..16: note = synthetic [barcode part1]
  source 1..16: mol_type = other DNA
gtgtgtactggtcaac

SEQ ID NO: 11709 - DNA, 16 bp, synthetic construct
  misc_feature 1..16: note = synthetic [barcode part1]
  source 1..16: mol_type = other DNA
tgactggattgcgact

SEQ ID NO: 11710 - DNA, 16 bp, synthetic construct
  misc_feature 1..16: note = synthetic [barcode part1]
  source 1..16: mol_type = other DNA
gagagacttacgtggc

SEQ ID NO: 11711 - DNA, 16 bp, synthetic construct
  misc_feature 1..16: note = synthetic [barcode part1]
  source 1..16: mol_type = other DNA
tgcgtatccgatcaag

SEQ ID NO: 11712 - DNA, 16 bp, synthetic construct
  misc_feature 1..16: note = synthetic [barcode part1]
  source 1..16: mol_type = other DNA
tgaggagatcggtacc

SEQ ID NO: 11713 - DNA, 16 bp, synthetic construct
  misc_feature 1..16: note = synthetic [barcode part1]
  source 1..16: mol_type = other DNA
tagtctgcactaggtg

SEQ ID NO: 11714 - DNA, 16 bp, synthetic construct
  misc_feature 1..16: note = synthetic [barcode part1]
  source 1..16: mol_type = other DNA
acagaccgcacaatct

SEQ ID NO: 11715 - DNA, 16 bp, synthetic construct
  misc_feature 1..16: note = synthetic [barcode part1]
  source 1..16: mol_type = other DNA
gatacggttattggag

SEQ ID NO: 11716 - DNA, 16 bp, synthetic construct
  misc_feature 1..16: note = synthetic [barcode part1]
  source 1..16: mol_type = other DNA
tccttctaccacaacc

SEQ ID NO: 11717 - DNA, 16 bp, synthetic construct
  misc_feature 1..16: note = synthetic [barcode part1]
  source 1..16: mol_type = other DNA
gtcaacgtacttcgtt

SEQ ID NO: 11718 - DNA, 16 bp, synthetic construct
  misc_feature 1..16: note = synthetic [barcode part1]
  source 1..16: mol_type = other DNA
gcgcgataagaagtcc

SEQ ID NO: 11719 - DNA, 16 bp, synthetic construct
  misc_feature 1..16: note = synthetic [barcode part1]
  source 1..16: mol_type = other DNA
gactgtagtatcggtc

SEQ ID NO: 11720 - DNA, 16 bp, synthetic construct
  misc_feature 1..16: note = synthetic [barcode part1]
  source 1..16: mol_type = other DNA
tgcaagttcgtggatc

SEQ ID NO: 11721 - DNA, 16 bp, synthetic construct
  misc_feature 1..16: note = synthetic [barcode part1]
  source 1..16: mol_type = other DNA
ttataccgacgtaggc

SEQ ID NO: 11722 - DNA, 16 bp, synthetic construct
  misc_feature 1..16: note = synthetic [barcode part1]
  source 1..16: mol_type = other DNA
agtgatcaaccgtcac

SEQ ID NO: 11723 - DNA, 16 bp, synthetic construct
  misc_feature 1..16: note = synthetic [barcode part1]
  source 1..16: mol_type = other DNA
cgttaggtatcttcgt

SEQ ID NO: 11724 - DNA, 16 bp, synthetic construct
  misc_feature 1..16: note = synthetic [barcode part1]
  source 1..16: mol_type = other DNA
ccggaattccaaggtt

SEQ ID NO: 11725 - DNA, 16 bp, synthetic construct
  misc_feature 1..16: note = synthetic [barcode part1]
  source 1..16: mol_type = other DNA
aattcctagttgtgcc

SEQ ID NO: 11726 - DNA, 16 bp, synthetic construct
  misc_feature 1..16: note = synthetic [barcode part1]
  source 1..16: mol_type = other DNA
acactgtggacgagtg

SEQ ID NO: 11727 - DNA, 16 bp, synthetic construct
  misc_feature 1..16: note = synthetic [barcode part1]
  source 1..16: mol_type = other DNA
aaggtcgatacgaccg

SEQ ID NO: 11728 - DNA, 16 bp, synthetic construct
  misc_feature 1..16: note = synthetic [barcode part1]
  source 1..16: mol_type = other DNA
tctctcgttgttgtcg

SEQ ID NO: 11729 - DNA, 16 bp, synthetic construct
  misc_feature 1..16: note = synthetic [barcode part1]
  source 1..16: mol_type = other DNA
cgcacacggttaattg

SEQ ID NO: 11730 - DNA, 16 bp, synthetic construct
  misc_feature 1..16: note = synthetic [barcode part1]
  source 1..16: mol_type = other DNA
gtccacgtctctaacg

SEQ ID NO: 11731 - DNA, 16 bp, synthetic construct
  misc_feature 1..16: note = synthetic [barcode part1]
  source 1..16: mol_type = other DNA
cggtcgaatcgtaatc

SEQ ID NO: 11732 - DNA, 16 bp, synthetic construct
  misc_feature 1..16: note = synthetic [barcode part1]
  source 1..16: mol_type = other DNA
gatcctagttctggag

SEQ ID NO: 11733 - DNA, 16 bp, synthetic construct
  misc_feature 1..16: note = synthetic [barcode part1]
  source 1..16: mol_type = other DNA
atactagtgacctcct

SEQ ID NO: 11734 - DNA, 16 bp, synthetic construct
  misc_feature 1..16: note = synthetic [barcode part1]
  source 1..16: mol_type = other DNA
gcagttagagagattc

SEQ ID NO: 11735 - DNA, 16 bp, synthetic construct
  misc_feature 1..16: note = synthetic [barcode part1]
  source 1..16: mol_type = other DNA
agaggtgtctggcaac

SEQ ID NO: 11736 - DNA, 16 bp, synthetic construct
  misc_feature 1..16: note = synthetic [barcode part1]
  source 1..16: mol_type = other DNA
ttaactcgtggttgtc

SEQ ID NO: 11737 - DNA, 16 bp, synthetic construct
  misc_feature 1..16: note = synthetic [barcode part1]
  source 1..16: mol_type = other DNA
tatcgttcttgcagac

SEQ ID NO: 11738 - DNA, 16 bp, synthetic construct
  misc_feature 1..16: note = synthetic [barcode part1]
  source 1..16: mol_type = other DNA
gcgccaggttactctt

SEQ ID NO: 11739 - DNA, 16 bp, synthetic construct
  misc_feature 1..16: note = synthetic [barcode part1]
  source 1..16: mol_type = other DNA
aatcaatcggtcggtc

SEQ ID NO: 11740 - DNA, 16 bp, synthetic construct
  misc_feature 1..16: note = synthetic [barcode part1]
  source 1..16: mol_type = other DNA
acttcacggactgagt

SEQ ID NO: 11741 - DNA, 16 bp, synthetic construct
  misc_feature 1..16: note = synthetic [barcode part1]
  source 1..16: mol_type = other DNA
tgcaacagatagacac

SEQ ID NO: 11742 - DNA, 16 bp, synthetic construct
  misc_feature 1..16: note = synthetic [barcode part1]
  source 1..16: mol_type = other DNA
caccagaatcttcgtt

SEQ ID NO: 11743 - DNA, 16 bp, synthetic construct
  misc_feature 1..16: note = synthetic [barcode part1]
  source 1..16: mol_type = other DNA
atccaactgacctgag

SEQ ID NO: 11744 - DNA, 16 bp, synthetic construct
  misc_feature 1..16: note = synthetic [barcode part1]
  source 1..16: mol_type = other DNA
cgttagacggaggtac

SEQ ID NO: 11745 - DNA, 16 bp, synthetic construct
  misc_feature 1..16: note = synthetic [barcode part1]
  source 1..16: mol_type = other DNA
tcacacaacgtaccag

SEQ ID NO: 11746 - DNA, 16 bp, synthetic construct
  misc_feature 1..16: note = synthetic [barcode part1]
  source 1..16: mol_type = other DNA
gcctgtgatcgaagag

SEQ ID NO: 11747 - DNA, 16 bp, synthetic construct
  misc_feature 1..16: note = synthetic [barcode part1]
  source 1..16: mol_type = other DNA
ttgttaactccacgtg

SEQ ID NO: 11748 - DNA, 16 bp, synthetic construct
  misc_feature 1..16: note = synthetic [barcode part1]
  source 1..16: mol_type = other DNA
caagatcttggccaac

SEQ ID NO: 11749 - DNA, 16 bp, synthetic construct
  misc_feature 1..16: note = synthetic [barcode part1]
  source 1..16: mol_type = other DNA
acagacctcggatact

SEQ ID NO: 11750 - DNA, 16 bp, synthetic construct
  misc_feature 1..16: note = synthetic [barcode part1]
  source 1..16: mol_type = other DNA
tcgtgaactacgcaac

SEQ ID NO: 11751 - DNA, 16 bp, synthetic construct
  misc_feature 1..16: note = synthetic [barcode part1]
  source 1..16: mol_type = other DNA
tctctgagtcaacgtt

SEQ ID NO: 11752 - DNA, 16 bp, synthetic construct
  misc_feature 1..16: note = synthetic [barcode part1]
  source 1..16: mol_type = other DNA
agttcagttggaccac

SEQ ID NO: 11753 - DNA, 16 bp, synthetic construct
  misc_feature 1..16: note = synthetic [barcode part1]
  source 1..16: mol_type = other DNA
atctcgttcgttgcct

SEQ ID NO: 11754 - DNA, 16 bp, synthetic construct
  misc_feature 1..16: note = synthetic [barcode part1]
  source 1..16: mol_type = other DNA
tggccggtggttaatt

SEQ ID NO: 11755 - DNA, 16 bp, synthetic construct
  misc_feature 1..16: note = synthetic [barcode part1]
  source 1..16: mol_type = other DNA
tgaacgccacgaatct

SEQ ID NO: 11756 - DNA, 16 bp, synthetic construct
  misc_feature 1..16: note = synthetic [barcode part1]
  source 1..16: mol_type = other DNA
actatctcaaggcgac

SEQ ID NO: 11757 - DNA, 16 bp, synthetic construct
  misc_feature 1..16: note = synthetic [barcode part1]
  source 1..16: mol_type = other DNA
taccagaggtacggac

SEQ ID NO: 11758 - DNA, 16 bp, synthetic construct
  misc_feature 1..16: note = synthetic [barcode part1]
  source 1..16: mol_type = other DNA
agtacactggtgtgtc

SEQ ID NO: 11759 - DNA, 16 bp, synthetic construct
  misc_feature 1..16: note = synthetic [barcode part1]
  source 1..16: mol_type = other DNA
taaggaatagtgtgcc

SEQ ID NO: 11760 - DNA, 16 bp, synthetic construct
  misc_feature 1..16: note = synthetic [barcode part1]
  source 1..16: mol_type = other DNA
gactcaactcttgtac

SEQ ID NO: 11761 - DNA, 16 bp, synthetic construct
  misc_feature 1..16: note = synthetic [barcode part1]
  source 1..16: mol_type = other DNA
tcgataaccgtacctt

SEQ ID NO: 11762 - DNA, 16 bp, synthetic construct
  misc_feature 1..16: note = synthetic [barcode part1]
  source 1..16: mol_type = other DNA
ttccagaccgttcgtg

SEQ ID NO: 11763 - DNA, 16 bp, synthetic construct
  misc_feature 1..16: note = synthetic [barcode part1]
  source 1..16: mol_type = other DNA
actcaggttcgttgtt

SEQ ID NO: 11764 - DNA, 16 bp, synthetic construct
  misc_feature 1..16: note = synthetic [barcode part1]
  source 1..16: mol_type = other DNA
aatagttcgtgccttc

SEQ ID NO: 11765 - DNA, 16 bp, synthetic construct
  misc_feature 1..16: note = synthetic [barcode part1]
  source 1..16: mol_type = other DNA
taagtgccggtcttcc

SEQ ID NO: 11766 - DNA, 16 bp, synthetic construct
  misc_feature 1..16: note = synthetic [barcode part1]
  source 1..16: mol_type = other DNA
gattgcgccttggtct

SEQ ID NO: 11767 - DNA, 16 bp, synthetic construct
  misc_feature 1..16: note = synthetic [barcode part1]
  source 1..16: mol_type = other DNA
cgaacaccagtgaggt

SEQ ID NO: 11768 - DNA, 16 bp, synthetic construct
  misc_feature 1..16: note = synthetic [barcode part1]
  source 1..16: mol_type = other DNA
agtacgtgttgtgtgc

SEQ ID NO: 11769 - DNA, 16 bp, synthetic construct
  misc_feature 1..16: note = synthetic [barcode part1]
  source 1..16: mol_type = other DNA
tggaaggaatctcctc

SEQ ID NO: 11770 - DNA, 16 bp, synthetic construct
  misc_feature 1..16: note = synthetic [barcode part1]
  source 1..16: mol_type = other DNA
aagttgccttgtgttc

SEQ ID NO: 11771 - DNA, 16 bp, synthetic construct
  misc_feature 1..16: note = synthetic [barcode part1]
  source 1..16: mol_type = other DNA
tgtcgatctagtcttg

SEQ ID NO: 11772 - DNA, 16 bp, synthetic construct
  misc_feature 1..16: note = synthetic [barcode part1]
  source 1..16: mol_type = other DNA
tcgattcgcaactgtt

SEQ ID NO: 11773 - DNA, 16 bp, synthetic construct
  misc_feature 1..16: note = synthetic [barcode part1]
  source 1..16: mol_type = other DNA
gaagatacactagacc

SEQ ID NO: 11774 - DNA, 16 bp, synthetic construct
  misc_feature 1..16: note = synthetic [barcode part1]
  source 1..16: mol_type = other DNA
gcaactatctcctaac

SEQ ID NO: 11775 - DNA, 16 bp, synthetic construct
  misc_feature 1..16: note = synthetic [barcode part1]
  source 1..16: mol_type = other DNA
cctaacttggcgcact

SEQ ID NO: 11776 - DNA, 16 bp, synthetic construct
  misc_feature 1..16: note = synthetic [barcode part1]
  source 1..16: mol_type = other DNA
gttgaacagacgtaac

SEQ ID NO: 11777 - DNA, 16 bp, synthetic construct
  misc_feature 1..16: note = synthetic [barcode part1]
  source 1..16: mol_type = other DNA
tctggtcttccgattc

SEQ ID NO: 11778 - DNA, 16 bp, synthetic construct
  misc_feature 1..16: note = synthetic [barcode part1]
  source 1..16: mol_type = other DNA
cgttggacgaatcgtt

SEQ ID NO: 11779 - DNA, 16 bp, synthetic construct
  misc_feature 1..16: note = synthetic [barcode part1]
  source 1..16: mol_type = other DNA
gcgattgccagagagt

SEQ ID NO: 11780 - DNA, 16 bp, synthetic construct
  misc_feature 1..16: note = synthetic [barcode part1]
  source 1..16: mol_type = other DNA
tgttagatcacgcctt

SEQ ID NO: 11781 - DNA, 16 bp, synthetic construct
  misc_feature 1..16: note = synthetic [barcode part1]
  source 1..16: mol_type = other DNA
cacaacacgttgcaac

SEQ ID NO: 11782 - DNA, 16 bp, synthetic construct
  misc_feature 1..16: note = synthetic [barcode part1]
  source 1..16: mol_type = other DNA
gttggcagtctagact

SEQ ID NO: 11783 - DNA, 16 bp, synthetic construct
  misc_feature 1..16: note = synthetic [barcode part1]
  source 1..16: mol_type = other DNA
actcgttactccaagt

SEQ ID NO: 11784 - DNA, 16 bp, synthetic construct
  misc_feature 1..16: note = synthetic [barcode part1]
  source 1..16: mol_type = other DNA
aacctctcgcaccagt

SEQ ID NO: 11785 - DNA, 16 bp, synthetic construct
  misc_feature 1..16: note = synthetic [barcode part1]
  source 1..16: mol_type = other DNA
tgttatctactgacgc

SEQ ID NO: 11786 - DNA, 16 bp, synthetic construct
  misc_feature 1..16: note = synthetic [barcode part1]
  source 1..16: mol_type = other DNA
acggcggttacgtaag

SEQ ID NO: 11787 - DNA, 16 bp, synthetic construct
  misc_feature 1..16: note = synthetic [barcode part1]
  source 1..16: mol_type = other DNA
gtcctcagttcctatc

SEQ ID NO: 11788 - DNA, 16 bp, synthetic construct
  misc_feature 1..16: note = synthetic [barcode part1]
  source 1..16: mol_type = other DNA
aggtatcggattcgtc

SEQ ID NO: 11789 - DNA, 16 bp, synthetic construct
  misc_feature 1..16: note = synthetic [barcode part1]
  source 1..16: mol_type = other DNA
tgttaagacctccgtt

SEQ ID NO: 11790 - DNA, 16 bp, synthetic construct
  misc_feature 1..16: note = synthetic [barcode part1]
  source 1..16: mol_type = other DNA
cgcaggtctattctgc

SEQ ID NO: 11791 - DNA, 16 bp, synthetic construct
  misc_feature 1..16: note = synthetic [barcode part1]
  source 1..16: mol_type = other DNA
gtatcttaaccaccac

SEQ ID NO: 11792 - DNA, 16 bp, synthetic construct
  misc_feature 1..16: note = synthetic [barcode part1]
  source 1..16: mol_type = other DNA
accgtggaagtagacc

SEQ ID NO: 11793 - DNA, 16 bp, synthetic construct
  misc_feature 1..16: note = synthetic [barcode part1]
  source 1..16: mol_type = other DNA
ttggagttaggcggac

SEQ ID NO: 11794 - DNA, 16 bp, synthetic construct
  misc_feature 1..16: note = synthetic [barcode part1]
  source 1..16: mol_type = other DNA
aatcttcttagtgcgc

SEQ ID NO: 11795 - DNA, 16 bp, synthetic construct
  misc_feature 1..16: note = synthetic [barcode part1]
  source 1..16: mol_type = other DNA
cgacacaagaacaact

SEQ ID NO: 11796 - DNA, 16 bp, synthetic construct
  misc_feature 1..16: note = synthetic [barcode part1]
  source 1..16: mol_type = other DNA
tgtacggttgccgtct

SEQ ID NO: 11797 - DNA, 16 bp, synthetic construct
  misc_feature 1..16: note = synthetic [barcode part1]
  source 1..16: mol_type = other DNA
aggcactactctatct

SEQ ID NO: 11798 - DNA, 16 bp, synthetic construct
  misc_feature 1..16: note = synthetic [barcode part1]
  source 1..16: mol_type = other DNA
cggcaataaggcgtgt

SEQ ID NO: 11799 - DNA, 16 bp, synthetic construct
  misc_feature 1..16: note = synthetic [barcode part1]
  source 1..16: mol_type = other DNA
taagtatccttaccgc

SEQ ID NO: 11800 - DNA, 16 bp, synthetic construct
  misc_feature 1..16: note = synthetic [barcode part1]
  source 1..16: mol_type = other DNA
accaatactgccactt

SEQ ID NO: 11801 - DNA, 16 bp, synthetic construct
  misc_feature 1..16: note = synthetic [barcode part1]
  source 1..16: mol_type = other DNA
atatcgaggccgtact

SEQ ID NO: 11802 - DNA, 16 bp, synthetic construct
  misc_feature 1..16: note = synthetic [barcode part1]
  source 1..16: mol_type = other DNA
tccggtcttgactctt

SEQ ID NO: 11803 - DNA, 16 bp, synthetic construct
  misc_feature 1..16: note = synthetic [barcode part1]
  source 1..16: mol_type = other DNA
ccgtacgtcgaagaag

SEQ ID NO: 11804 - DNA, 16 bp, synthetic construct
  misc_feature 1..16: note = synthetic [barcode part1]
  source 1..16: mol_type = other DNA
cgcgactgtacttaag

SEQ ID NO: 11805 - DNA, 16 bp, synthetic construct
  misc_feature 1..16: note = synthetic [barcode part1]
  source 1..16: mol_type = other DNA
cgtaacagaatctcgc

SEQ ID NO: 11806 - DNA, 16 bp, synthetic construct
  misc_feature 1..16: note = synthetic [barcode part1]
  source 1..16: mol_type = other DNA
atcgtaacgaggtcct

SEQ ID NO: 11807 - DNA, 16 bp, synthetic construct
  misc_feature 1..16: note = synthetic [barcode part1]
  source 1..16: mol_type = other DNA
tcgcgtcaatacgagt

SEQ ID NO: 11808 - DNA, 16 bp, synthetic construct
  misc_feature 1..16: note = synthetic [barcode part1]
  source 1..16: mol_type = other DNA
gtcgcggagtgttatt

SEQ ID NO: 11809 - DNA, 16 bp, synthetic construct
  misc_feature 1..16: note = synthetic [barcode part1]
  source 1..16: mol_type = other DNA
acgttccgattatcac

SEQ ID NO: 11810 - DNA, 16 bp, synthetic construct
  misc_feature 1..16: note = synthetic [barcode part1]
  source 1..16: mol_type = other DNA
attgcggtggaacctt

SEQ ID NO: 11811 - DNA, 16 bp, synthetic construct
  misc_feature 1..16: note = synthetic [barcode part1]
  source 1..16: mol_type = other DNA
tatagaggtcgaatcg

SEQ ID NO: 11812 - DNA, 16 bp, synthetic construct
  misc_feature 1..16: note = synthetic [barcode part1]
  source 1..16: mol_type = other DNA
gacttgaccgaactac

SEQ ID NO: 11813 - DNA, 16 bp, synthetic construct
  misc_feature 1..16: note = synthetic [barcode part1]
  source 1..16: mol_type = other DNA
cgaccttgaagagttc

SEQ ID NO: 11814 - DNA, 16 bp, synthetic construct
  misc_feature 1..16: note = synthetic [barcode part1]
  source 1..16: mol_type = other DNA
tccacaaggtggagtg

SEQ ID NO: 11815 - DNA, 16 bp, synthetic construct
  misc_feature 1..16: note = synthetic [barcode part1]
  source 1..16: mol_type = other DNA
ccaatcacggttagtg

SEQ ID NO: 11816 - DNA, 16 bp, synthetic construct
  misc_feature 1..16: note = synthetic [barcode part1]
  source 1..16: mol_type = other DNA
gtaacacgaggagaac

SEQ ID NO: 11817 - DNA, 16 bp, synthetic construct
  misc_feature 1..16: note = synthetic [barcode part1]
  source 1..16: mol_type = other DNA
ttctggtacgtggcct

SEQ ID NO: 11818 - DNA, 16 bp, synthetic construct
  misc_feature 1..16: note = synthetic [barcode part1]
  source 1..16: mol_type = other DNA
gcagttggttgtgtgt

SEQ ID NO: 11819 - DNA, 16 bp, synthetic construct
  misc_feature 1..16: note = synthetic [barcode part1]
  source 1..16: mol_type = other DNA
cagtagtgagagtatc

SEQ ID NO: 11820 - DNA, 16 bp, synthetic construct
  misc_feature 1..16: note = synthetic [barcode part1]
  source 1..16: mol_type = other DNA
aggtagacactacagt

SEQ ID NO: 11821 - DNA, 16 bp, synthetic construct
  misc_feature 1..16: note = synthetic [barcode part1]
  source 1..16: mol_type = other DNA
gccacctaacagaact

SEQ ID NO: 11822 - DNA, 16 bp, synthetic construct
  misc_feature 1..16: note = synthetic [barcode part1]
  source 1..16: mol_type = other DNA
tccgtctctacttgtg

SEQ ID NO: 11823 - DNA, 16 bp, synthetic construct
  misc_feature 1..16: note = synthetic [barcode part1]
  source 1..16: mol_type = other DNA
cgtaacttgcgaatcg

SEQ ID NO: 11824 - DNA, 16 bp, synthetic construct
  misc_feature 1..16: note = synthetic [barcode part1]
  source 1..16: mol_type = other DNA
ttccgtattggcaact

SEQ ID NO: 11825 - DNA, 16 bp, synthetic construct
  misc_feature 1..16: note = synthetic [barcode part1]
  source 1..16: mol_type = other DNA
accttgaccgagattg

SEQ ID NO: 11826 - DNA, 16 bp, synthetic construct
  misc_feature 1..16: note = synthetic [barcode part1]
  source 1..16: mol_type = other DNA
tctacgtcggcgactt

SEQ ID NO: 11827 - DNA, 16 bp, synthetic construct
  misc_feature 1..16: note = synthetic [barcode part1]
  source 1..16: mol_type = other DNA
aagtggcgttacttcg

SEQ ID NO: 11828 - DNA, 16 bp, synthetic construct
  misc_feature 1..16: note = synthetic [barcode part1]
  source 1..16: mol_type = other DNA
tgaggagatatactgc

SEQ ID NO: 11829 - DNA, 16 bp, synthetic construct
  misc_feature 1..16: note = synthetic [barcode part1]
  source 1..16: mol_type = other DNA
tgattatcactctgcg

SEQ ID NO: 11830 - DNA, 16 bp, synthetic construct
  misc_feature 1..16: note = synthetic [barcode part1]
  source 1..16: mol_type = other DNA
atacaagtcgcacctg

SEQ ID NO: 11831 - DNA, 16 bp, synthetic construct
  misc_feature 1..16: note = synthetic [barcode part1]
  source 1..16: mol_type = other DNA
aggtggtcaacaagag

SEQ ID NO: 11832 - DNA, 16 bp, synthetic construct
  misc_feature 1..16: note = synthetic [barcode part1]
  source 1..16: mol_type = other DNA
atacttccttcgcgtc

SEQ ID NO: 11833 - DNA, 16 bp, synthetic construct
  misc_feature 1..16: note = synthetic [barcode part1]
  source 1..16: mol_type = other DNA
gttgcctaggttcacc

SEQ ID NO: 11834 - DNA, 16 bp, synthetic construct
  misc_feature 1..16: note = synthetic [barcode part1]
  source 1..16: mol_type = other DNA
ttaactcacggccgtc

SEQ ID NO: 11835 - DNA, 16 bp, synthetic construct
  misc_feature 1..16: note = synthetic [barcode part1]
  source 1..16: mol_type = other DNA
gtcaggaagttggaag

SEQ ID NO: 11836 - DNA, 16 bp, synthetic construct
  misc_feature 1..16: note = synthetic [barcode part1]
  source 1..16: mol_type = other DNA
ttcgacctgcgcaatc

SEQ ID NO: 11837 - DNA, 16 bp, synthetic construct
  misc_feature 1..16: note = synthetic [barcode part1]
  source 1..16: mol_type = other DNA
tggattctactacctg

SEQ ID NO: 11838 - DNA, 16 bp, synthetic construct
  misc_feature 1..16: note = synthetic [barcode part1]
  source 1..16: mol_type = other DNA
gccgttctcacagact

SEQ ID NO: 11839 - DNA, 16 bp, synthetic construct
  misc_feature 1..16: note = synthetic [barcode part1]
  source 1..16: mol_type = other DNA
ccggacttcagattag

SEQ ID NO: 11840 - DNA, 16 bp, synthetic construct
  misc_feature 1..16: note = synthetic [barcode part1]
  source 1..16: mol_type = other DNA
attgtcggccagattg

SEQ ID NO: 11841 - DNA, 16 bp, synthetic construct
  misc_feature 1..16: note = synthetic [barcode part1]
  source 1..16: mol_type = other DNA
ccttgaccacaggttc

SEQ ID NO: 11842 - DNA, 16 bp, synthetic construct
  misc_feature 1..16: note = synthetic [barcode part1]
  source 1..16: mol_type = other DNA
cgtcgcactaattgag

SEQ ID NO: 11843 - DNA, 16 bp, synthetic construct
  misc_feature 1..16: note = synthetic [barcode part1]
  source 1..16: mol_type = other DNA
gtgtgactggtgtact

SEQ ID NO: 11844 - DNA, 16 bp, synthetic construct
  misc_feature 1..16: note = synthetic [barcode part1]
  source 1..16: mol_type = other DNA
accttcctacagttag

SEQ ID NO: 11845 - DNA, 16 bp, synthetic construct
  misc_feature 1..16: note = synthetic [barcode part1]
  source 1..16: mol_type = other DNA
aggttgtgcaagaatc

SEQ ID NO: 11846 - DNA, 16 bp, synthetic construct
  misc_feature 1..16: note = synthetic [barcode part1]
  source 1..16: mol_type = other DNA
taacgtcagtgagtag

SEQ ID NO: 11847 - DNA, 16 bp, synthetic construct
  misc_feature 1..16: note = synthetic [barcode part1]
  source 1..16: mol_type = other DNA
tactgtgagtcaaccg

SEQ ID NO: 11848 - DNA, 16 bp, synthetic construct
  misc_feature 1..16: note = synthetic [barcode part1]
  source 1..16: mol_type = other DNA
gacctaggacttggtt

SEQ ID NO: 11849 - DNA, 16 bp, synthetic construct
  misc_feature 1..16: note = synthetic [barcode part1]
  source 1..16: mol_type = other DNA
tactcagaattgcgcg

SEQ ID NO: 11850 - DNA, 16 bp, synthetic construct
  misc_feature 1..16: note = synthetic [barcode part1]
  source 1..16: mol_type = other DNA
gcgtggtactgtatac

SEQ ID NO: 11851 - DNA, 16 bp, synthetic construct
  misc_feature 1..16: note = synthetic [barcode part1]
  source 1..16: mol_type = other DNA
gcctgacttaagtcag

SEQ ID NO: 11852 - DNA, 16 bp, synthetic construct
  misc_feature 1..16: note = synthetic [barcode part1]
  source 1..16: mol_type = other DNA
tgtcgtcttgtgcgac

SEQ ID NO: 11853 - DNA, 16 bp, synthetic construct
  misc_feature 1..16: note = synthetic [barcode part1]
  source 1..16: mol_type = other DNA
cctagaggagacttct

SEQ ID NO: 11854 - DNA, 16 bp, synthetic construct
  misc_feature 1..16: note = synthetic [barcode part1]
  source 1..16: mol_type = other DNA
aagttgttctacgcct

SEQ ID NO: 11855 - DNA, 16 bp, synthetic construct
  misc_feature 1..16: note = synthetic [barcode part1]
  source 1..16: mol_type = other DNA
cactctgatcctactc

SEQ ID NO: 11856 - DNA, 16 bp, synthetic construct
  misc_feature 1..16: note = synthetic [barcode part1]
  source 1..16: mol_type = other DNA
agacctgttgtacggt

SEQ ID NO: 11857 - DNA, 16 bp, synthetic construct
  misc_feature 1..16: note = synthetic [barcode part1]
  source 1..16: mol_type = other DNA
gacagtgaggttcgtg

SEQ ID NO: 11858 - DNA, 16 bp, synthetic construct
  misc_feature 1..16: note = synthetic [barcode part1]
  source 1..16: mol_type = other DNA
gacgacttgcaggagt

SEQ ID NO: 11859 - DNA, 16 bp, synthetic construct
  misc_feature 1..16: note = synthetic [barcode part1]
  source 1..16: mol_type = other DNA
gaccacgtaacgtatc

SEQ ID NO: 11860 - DNA, 16 bp, synthetic construct
  misc_feature 1..16: note = synthetic [barcode part1]
  source 1..16: mol_type = other DNA
tatcttagtccacggt

SEQ ID NO: 11861 - DNA, 16 bp, synthetic construct
  misc_feature 1..16: note = synthetic [barcode part1]
  source 1..16: mol_type = other DNA
gataggaccaggcact

SEQ ID NO: 11862 - DNA, 16 bp, synthetic construct
  misc_feature 1..16: note = synthetic [barcode part1]
  source 1..16: mol_type = other DNA
ttcaggtatctcctag

SEQ ID NO: 11863 - DNA, 16 bp, synthetic construct
  misc_feature 1..16: note = synthetic [barcode part1]
  source 1..16: mol_type = other DNA
tcgacttcagatctgt

SEQ ID NO: 11864 - DNA, 16 bp, synthetic construct
  misc_feature 1..16: note = synthetic [barcode part1]
  source 1..16: mol_type = other DNA
cacgtaagtaaggcgc

SEQ ID NO: 11865 - DNA, 16 bp, synthetic construct
  misc_feature 1..16: note = synthetic [barcode part1]
  source 1..16: mol_type = other DNA
gttctagacgtcgtag

SEQ ID NO: 11866 - DNA, 16 bp, synthetic construct
  misc_feature 1..16: note = synthetic [barcode part1]
  source 1..16: mol_type = other DNA
atcgaggttctagtcg

SEQ ID NO: 11867 - DNA, 16 bp, synthetic construct
  misc_feature 1..16: note = synthetic [barcode part1]
  source 1..16: mol_type = other DNA
gactcggcaatctaac

SEQ ID NO: 11868 - DNA, 16 bp, synthetic construct
  misc_feature 1..16: note = synthetic [barcode part1]
  source 1..16: mol_type = other DNA
actacctggacaacgt

SEQ ID NO: 11869 - DNA, 16 bp, synthetic construct
  misc_feature 1..16: note = synthetic [barcode part1]
  source 1..16: mol_type = other DNA
actgtctcgagacagt

SEQ ID NO: 11870 - DNA, 16 bp, synthetic construct
  misc_feature 1..16: note = synthetic [barcode part1]
  source 1..16: mol_type = other DNA
tggaccgtcctatacc

SEQ ID NO: 11871 - DNA, 16 bp, synthetic construct
  misc_feature 1..16: note = synthetic [barcode part1]
  source 1..16: mol_type = other DNA
tctaaggccagagttc

SEQ ID NO: 11872 - DNA, 16 bp, synthetic construct
  misc_feature 1..16: note = synthetic [barcode part1]
  source 1..16: mol_type = other DNA
aacgatccgcgagaac

SEQ ID NO: 11873 - DNA, 16 bp, synthetic construct
  misc_feature 1..16: note = synthetic [barcode part1]
  source 1..16: mol_type = other DNA
cgattacagacgttcg

SEQ ID NO: 11874 - DNA, 16 bp, synthetic construct
  misc_feature 1..16: note = synthetic [barcode part1]
  source 1..16: mol_type = other DNA
ccgacttattcagatc

SEQ ID NO: 11875 - DNA, 16 bp, synthetic construct
  misc_feature 1..16: note = synthetic [barcode part1]
  source 1..16: mol_type = other DNA
atctaagacctcacct

SEQ ID NO: 11876 - DNA, 16 bp, synthetic construct
  misc_feature 1..16: note = synthetic [barcode part1]
  source 1..16: mol_type = other DNA
aatagtgccgtcctag

SEQ ID NO: 11877 - DNA, 16 bp, synthetic construct
  misc_feature 1..16: note = synthetic [barcode part1]
  source 1..16: mol_type = other DNA
cgtattggagaggtcg

SEQ ID NO: 11878 - DNA, 16 bp, synthetic construct
  misc_feature 1..16: note = synthetic [barcode part1]
  source 1..16: mol_type = other DNA
gtaaccacgatcacac

SEQ ID NO: 11879 - DNA, 16 bp, synthetic construct
  misc_feature 1..16: note = synthetic [barcode part1]
  source 1..16: mol_type = other DNA
ttcaacttagtcacgc

SEQ ID NO: 11880 - DNA, 16 bp, synthetic construct
  misc_feature 1..16: note = synthetic [barcode part1]
  source 1..16: mol_type = other DNA
cactccgtatcactct

SEQ ID NO: 11881 - DNA, 16 bp, synthetic construct
  misc_feature 1..16: note = synthetic [barcode part1]
  source 1..16: mol_type = other DNA
tctgtcaacacaacct

SEQ ID NO: 11882 - DNA, 16 bp, synthetic construct
  misc_feature 1..16: note = synthetic [barcode part1]
  source 1..16: mol_type = other DNA
actgttgtgacggttg

SEQ ID NO: 11883 - DNA, 16 bp, synthetic construct
  misc_feature 1..16: note = synthetic [barcode part1]
  source 1..16: mol_type = other DNA
ttgtgtcgacgatctt

SEQ ID NO: 11884 - DNA, 16 bp, synthetic construct
  misc_feature 1..16: note = synthetic [barcode part1]
  source 1..16: mol_type = other DNA
tgcctctatcactaag

SEQ ID NO: 11885 - DNA, 16 bp, synthetic construct
  misc_feature 1..16: note = synthetic [barcode part1]
  source 1..16: mol_type = other DNA
ccaagttcacgttccg

SEQ ID NO: 11886 - DNA, 16 bp, synthetic construct
  misc_feature 1..16: note = synthetic [barcode part1]
  source 1..16: mol_type = other DNA
tgcagactactactct

SEQ ID NO: 11887 - DNA, 16 bp, synthetic construct
  misc_feature 1..16: note = synthetic [barcode part1]
  source 1..16: mol_type = other DNA
aactaaggttcaggtg

SEQ ID NO: 11888 - DNA, 16 bp, synthetic construct
  misc_feature 1..16: note = synthetic [barcode part1]
  source 1..16: mol_type = other DNA
gaacgcactcttgtag

SEQ ID NO: 11889 - DNA, 16 bp, synthetic construct
  misc_feature 1..16: note = synthetic [barcode part1]
  source 1..16: mol_type = other DNA
ccgaatacttagacgc

SEQ ID NO: 11890 - DNA, 16 bp, synthetic construct
  misc_feature 1..16: note = synthetic [barcode part1]
  source 1..16: mol_type = other DNA
ttcctctcaatcgacc

SEQ ID NO: 11891 - DNA, 16 bp, synthetic construct
  misc_feature 1..16: note = synthetic [barcode part1]
  source 1..16: mol_type = other DNA
caagacgtcgttatcg

SEQ ID NO: 11892 - DNA, 16 bp, synthetic construct
  misc_feature 1..16: note = synthetic [barcode part1]
  source 1..16: mol_type = other DNA
gatacgcgaagaactt

SEQ ID NO: 11893 - DNA, 16 bp, synthetic construct
  misc_feature 1..16: note = synthetic [barcode part1]
  source 1..16: mol_type = other DNA
gttcctggtaggaatc

SEQ ID NO: 11894 - DNA, 16 bp, synthetic construct
  misc_feature 1..16: note = synthetic [barcode part1]
  source 1..16: mol_type = other DNA
tacctacgttcgtcct

SEQ ID NO: 11895 - DNA, 16 bp, synthetic construct
  misc_feature 1..16: note = synthetic [barcode part1]
  source 1..16: mol_type = other DNA
tgtcctccaacctgag

SEQ ID NO: 11896 - DNA, 16 bp, synthetic construct
  misc_feature 1..16: note = synthetic [barcode part1]
  source 1..16: mol_type = other DNA
tgacggagttctactg

SEQ ID NO: 11897 - DNA, 16 bp, synthetic construct
  misc_feature 1..16: note = synthetic [barcode part1]
  source 1..16: mol_type = other DNA
tgatatacgtaccggc

SEQ ID NO: 11898 - DNA, 16 bp, synthetic construct
  misc_feature 1..16: note = synthetic [barcode part1]
  source 1..16: mol_type = other DNA
tgatcgacagtatcgc

SEQ ID NO: 11899 - DNA, 16 bp, synthetic construct
  misc_feature 1..16: note = synthetic [barcode part1]
  source 1..16: mol_type = other DNA
aacttaaggagtgtgc

SEQ ID NO: 11900 - DNA, 16 bp, synthetic construct
  misc_feature 1..16: note = synthetic [barcode part1]
  source 1..16: mol_type = other DNA
cacaacttctcactag

SEQ ID NO: 11901 - DNA, 16 bp, synthetic construct
  misc_feature 1..16: note = synthetic [barcode part1]
  source 1..16: mol_type = other DNA
gtacctagtctgtgag

SEQ ID NO: 11902 - DNA, 16 bp, synthetic construct
  misc_feature 1..16: note = synthetic [barcode part1]
  source 1..16: mol_type = other DNA
gcaattctgagtcacg

SEQ ID NO: 11903 - DNA, 16 bp, synthetic construct
  misc_feature 1..16: note = synthetic [barcode part1]
  source 1..16: mol_type = other DNA
accgattggaatctcg

SEQ ID NO: 11904 - DNA, 16 bp, synthetic construct
  misc_feature 1..16: note = synthetic [barcode part1]
  source 1..16: mol_type = other DNA
tgtagactgccacctc

SEQ ID NO: 11905 - DNA, 16 bp, synthetic construct
  misc_feature 1..16: note = synthetic [barcode part1]
  source 1..16: mol_type = other DNA
gtgattaggagaacct

SEQ ID NO: 11906 - DNA, 16 bp, synthetic construct
  misc_feature 1..16: note = synthetic [barcode part1]
  source 1..16: mol_type = other DNA
tcagtacagaaggccg

SEQ ID NO: 11907 - DNA, 16 bp, synthetic construct
  misc_feature 1..16: note = synthetic [barcode part1]
  source 1..16: mol_type = other DNA
accggactgaattgtc

SEQ ID NO: 11908 - DNA, 16 bp, synthetic construct
  misc_feature 1..16: note = synthetic [barcode part1]
  source 1..16: mol_type = other DNA
caattcctagtgcgtt

SEQ ID NO: 11909 - DNA, 16 bp, synthetic construct
  misc_feature 1..16: note = synthetic [barcode part1]
  source 1..16: mol_type = other DNA
atcacgagaaccttgc

SEQ ID NO: 11910 - DNA, 16 bp, synthetic construct
  misc_feature 1..16: note = synthetic [barcode part1]
  source 1..16: mol_type = other DNA
actgccttctactacc

SEQ ID NO: 11911 - DNA, 16 bp, synthetic construct
  misc_feature 1..16: note = synthetic [barcode part1]
  source 1..16: mol_type = other DNA
gtcggcacctaatctc

SEQ ID NO: 11912 - DNA, 16 bp, synthetic construct
  misc_feature 1..16: note = synthetic [barcode part1]
  source 1..16: mol_type = other DNA
acggccgttctctagt

SEQ ID NO: 11913 - DNA, 16 bp, synthetic construct
  misc_feature 1..16: note = synthetic [barcode part1]
  source 1..16: mol_type = other DNA
agtgccagaagaaggt

SEQ ID NO: 11914 - DNA, 16 bp, synthetic construct
  misc_feature 1..16: note = synthetic [barcode part1]
  source 1..16: mol_type = other DNA
taactaacacgcgtgc

SEQ ID NO: 11915 - DNA, 16 bp, synthetic construct
  misc_feature 1..16: note = synthetic [barcode part1]
  source 1..16: mol_type = other DNA
gtagttcactcttacg

SEQ ID NO: 11916 - DNA, 16 bp, synthetic construct
  misc_feature 1..16: note = synthetic [barcode part1]
  source 1..16: mol_type = other DNA
tccagtctaattacgc

SEQ ID NO: 11917 - DNA, 16 bp, synthetic construct
  misc_feature 1..16: note = synthetic [barcode part1]
  source 1..16: mol_type = other DNA
gttgtggcggaattct

SEQ ID NO: 11918 - DNA, 16 bp, synthetic construct
  misc_feature 1..16: note = synthetic [barcode part1]
  source 1..16: mol_type = other DNA
gtgcaaggacaactcg

SEQ ID NO: 11919 - DNA, 16 bp, synthetic construct
  misc_feature 1..16: note = synthetic [barcode part1]
  source 1..16: mol_type = other DNA
agtgtacggagttggc

SEQ ID NO: 11920 - DNA, 16 bp, synthetic construct
  misc_feature 1..16: note = synthetic [barcode part1]
  source 1..16: mol_type = other DNA
cctctgttagaccacg

SEQ ID NO: 11921 - DNA, 16 bp, synthetic construct
  misc_feature 1..16: note = synthetic [barcode part1]
  source 1..16: mol_type = other DNA
tcgagattctgagacc

SEQ ID NO: 11922 - DNA, 16 bp, synthetic construct
  misc_feature 1..16: note = synthetic [barcode part1]
  source 1..16: mol_type = other DNA
cagagtgataaggcag

SEQ ID NO: 11923 - DNA, 16 bp, synthetic construct
  misc_feature 1..16: note = synthetic [barcode part1]
  source 1..16: mol_type = other DNA
gtggtgagagttgaag

SEQ ID NO: 11924 - DNA, 16 bp, synthetic construct
  misc_feature 1..16: note = synthetic [barcode part1]
  source 1..16: mol_type = other DNA
cactccttaacagttg

SEQ ID NO: 11925 - DNA, 16 bp, synthetic construct
  misc_feature 1..16: note = synthetic [barcode part1]
  source 1..16: mol_type = other DNA
gtgaccaggttcctct

SEQ ID NO: 11926 - DNA, 16 bp, synthetic construct
  misc_feature 1..16: note = synthetic [barcode part1]
  source 1..16: mol_type = other DNA
caccttaggcgaagtt

SEQ ID NO: 11927 - DNA, 16 bp, synthetic construct
  misc_feature 1..16: note = synthetic [barcode part1]
  source 1..16: mol_type = other DNA
tcgttgttgttcgagt

SEQ ID NO: 11928 - DNA, 16 bp, synthetic construct
  misc_feature 1..16: note = synthetic [barcode part1]
  source 1..16: mol_type = other DNA
ttccaccagacaacag

SEQ ID NO: 11929 - DNA, 16 bp, synthetic construct
  misc_feature 1..16: note = synthetic [barcode part1]
  source 1..16: mol_type = other DNA
tgaatcacggtctggt

SEQ ID NO: 11930 - DNA, 16 bp, synthetic construct
  misc_feature 1..16: note = synthetic [barcode part1]
  source 1..16: mol_type = other DNA
tattctgaggcagtgc

SEQ ID NO: 11931 - DNA, 16 bp, synthetic construct
  misc_feature 1..16: note = synthetic [barcode part1]
  source 1..16: mol_type = other DNA
cacgcggttcaatcct

SEQ ID NO: 11932 - DNA, 16 bp, synthetic construct
  misc_feature 1..16: note = synthetic [barcode part1]
  source 1..16: mol_type = other DNA
acgtggttcgactcct

SEQ ID NO: 11933 - DNA, 16 bp, synthetic construct
  misc_feature 1..16: note = synthetic [barcode part1]
  source 1..16: mol_type = other DNA
accactcgaattcgcc

SEQ ID NO: 11934 - DNA, 16 bp, synthetic construct
  misc_feature 1..16: note = synthetic [barcode part1]
  source 1..16: mol_type = other DNA
tatctcgcaagacggt

SEQ ID NO: 11935 - DNA, 16 bp, synthetic construct
  misc_feature 1..16: note = synthetic [barcode part1]
  source 1..16: mol_type = other DNA
ttaggtctcaacggtg

SEQ ID NO: 11936 - DNA, 16 bp, synthetic construct
  misc_feature 1..16: note = synthetic [barcode part1]
  source 1..16: mol_type = other DNA
actctccgtaccaacg

SEQ ID NO: 11937 - DNA, 16 bp, synthetic construct
  misc_feature 1..16: note = synthetic [barcode part1]
  source 1..16: mol_type = other DNA
gaatcgtcggattacc

SEQ ID NO: 11938 - DNA, 16 bp, synthetic construct
  misc_feature 1..16: note = synthetic [barcode part1]
  source 1..16: mol_type = other DNA
tggagacaacgtgaag

SEQ ID NO: 11939 - DNA, 16 bp, synthetic construct
  misc_feature 1..16: note = synthetic [barcode part1]
  source 1..16: mol_type = other DNA
tcctgacacgtgatcc

SEQ ID NO: 11940 - DNA, 16 bp, synthetic construct
  misc_feature 1..16: note = synthetic [barcode part1]
  source 1..16: mol_type = other DNA
tgactggtctcgaagt

SEQ ID NO: 11941 - DNA, 16 bp, synthetic construct
  misc_feature 1..16: note = synthetic [barcode part1]
  source 1..16: mol_type = other DNA
agattgcactcaacgc

SEQ ID NO: 11942 - DNA, 16 bp, synthetic construct
  misc_feature 1..16: note = synthetic [barcode part1]
  source 1..16: mol_type = other DNA
gacgaacttactcgtg

SEQ ID NO: 11943 - DNA, 16 bp, synthetic construct
  misc_feature 1..16: note = synthetic [barcode part1]
  source 1..16: mol_type = other DNA
tagttctcaacgtacc

SEQ ID NO: 11944 - DNA, 16 bp, synthetic construct
  misc_feature 1..16: note = synthetic [barcode part1]
  source 1..16: mol_type = other DNA
ccacgcctccaataac

SEQ ID NO: 11945 - DNA, 16 bp, synthetic construct
  misc_feature 1..16: note = synthetic [barcode part1]
  source 1..16: mol_type = other DNA
ttgtctgttgcggcgt

SEQ ID NO: 11946 - DNA, 16 bp, synthetic construct
  misc_feature 1..16: note = synthetic [barcode part1]
  source 1..16: mol_type = other DNA
gcctattaccttaggt

SEQ ID NO: 11947 - DNA, 16 bp, synthetic construct
  misc_feature 1..16: note = synthetic [barcode part1]
  source 1..16: mol_type = other DNA
gcaccacctatagtag

SEQ ID NO: 11948 - DNA, 16 bp, synthetic construct
  misc_feature 1..16: note = synthetic [barcode part1]
  source 1..16: mol_type = other DNA
gagtaggtggagttcc

SEQ ID NO: 11949 - DNA, 16 bp, synthetic construct
  misc_feature 1..16: note = synthetic [barcode part1]
  source 1..16: mol_type = other DNA
atcctacgcgattgtt

SEQ ID NO: 11950 - DNA, 16 bp, synthetic construct
  misc_feature 1..16: note = synthetic [barcode part1]
  source 1..16: mol_type = other DNA
agaggaatcaagaccg

SEQ ID NO: 11951 - DNA, 16 bp, synthetic construct
  misc_feature 1..16: note = synthetic [barcode part1]
  source 1..16: mol_type = other DNA
ttagtcgcacgtgtag

SEQ ID NO: 11952 - DNA, 16 bp, synthetic construct
  misc_feature 1..16: note = synthetic [barcode part1]
  source 1..16: mol_type = other DNA
acgttaacctcgttgt

SEQ ID NO: 11953 - DNA, 16 bp, synthetic construct
  misc_feature 1..16: note = synthetic [barcode part1]
  source 1..16: mol_type = other DNA
cgatctctcaaccttc

SEQ ID NO: 11954 - DNA, 16 bp, synthetic construct
  misc_feature 1..16: note = synthetic [barcode part1]
  source 1..16: mol_type = other DNA
tgtacggaccttccgt

SEQ ID NO: 11955 - DNA, 16 bp, synthetic construct
  misc_feature 1..16: note = synthetic [barcode part1]
  source 1..16: mol_type = other DNA
gactctccttcgttac

SEQ ID NO: 11956 - DNA, 16 bp, synthetic construct
  misc_feature 1..16: note = synthetic [barcode part1]
  source 1..16: mol_type = other DNA
cctgagacttcagagt

SEQ ID NO: 11957 - DNA, 16 bp, synthetic construct
  misc_feature 1..16: note = synthetic [barcode part1]
  source 1..16: mol_type = other DNA
attggataggtcgcct

SEQ ID NO: 11958 - DNA, 16 bp, synthetic construct
  misc_feature 1..16: note = synthetic [barcode part1]
  source 1..16: mol_type = other DNA
gaagtcgagttgtgcg

SEQ ID NO: 11959 - DNA, 16 bp, synthetic construct
  misc_feature 1..16: note = synthetic [barcode part1]
  source 1..16: mol_type = other DNA
ttggtcacaaccagtg

SEQ ID NO: 11960 - DNA, 16 bp, synthetic construct
  misc_feature 1..16: note = synthetic [barcode part1]
  source 1..16: mol_type = other DNA
accaggagtattagtg

SEQ ID NO: 11961 - DNA, 16 bp, synthetic construct
  misc_feature 1..16: note = synthetic [barcode part1]
  source 1..16: mol_type = other DNA
tggacagagactccag

SEQ ID NO: 11962 - DNA, 16 bp, synthetic construct
  misc_feature 1..16: note = synthetic [barcode part1]
  source 1..16: mol_type = other DNA
gcggttggatcagaac

SEQ ID NO: 11963 - DNA, 16 bp, synthetic construct
  misc_feature 1..16: note = synthetic [barcode part1]
  source 1..16: mol_type = other DNA
ccaccttcacgagttg

SEQ ID NO: 11964 - DNA, 16 bp, synthetic construct
  misc_feature 1..16: note = synthetic [barcode part1]
  source 1..16: mol_type = other DNA
cgcgaattgtctgagt

SEQ ID NO: 11965 - DNA, 16 bp, synthetic construct
  misc_feature 1..16: note = synthetic [barcode part1]
  source 1..16: mol_type = other DNA
cagagttgaccgattc

SEQ ID NO: 11966 - DNA, 16 bp, synthetic construct
  misc_feature 1..16: note = synthetic [barcode part1]
  source 1..16: mol_type = other DNA
tcaacagattcggcac

SEQ ID NO: 11967 - DNA, 16 bp, synthetic construct
  misc_feature 1..16: note = synthetic [barcode part1]
  source 1..16: mol_type = other DNA
attctcactactaggc

SEQ ID NO: 11968 - DNA, 16 bp, synthetic construct
  misc_feature 1..16: note = synthetic [barcode part1]
  source 1..16: mol_type = other DNA
cctctagattacgcgc

SEQ ID NO: 11969 - DNA, 16 bp, synthetic construct
  misc_feature 1..16: note = synthetic [barcode part1]
  source 1..16: mol_type = other DNA
cagtacaaggacaatc

SEQ ID NO: 11970 - DNA, 16 bp, synthetic construct
  misc_feature 1..16: note = synthetic [barcode part1]
  source 1..16: mol_type = other DNA
cctggtccacgtagtt

SEQ ID NO: 11971 - DNA, 16 bp, synthetic construct
  misc_feature 1..16: note = synthetic [barcode part1]
  source 1..16: mol_type = other DNA
tcctacctccaggtag

SEQ ID NO: 11972 - DNA, 16 bp, synthetic construct
  misc_feature 1..16: note = synthetic [barcode part1]
  source 1..16: mol_type = other DNA
acaccaatacgttggc

SEQ ID NO: 11973 - DNA, 16 bp, synthetic construct
  misc_feature 1..16: note = synthetic [barcode part1]
  source 1..16: mol_type = other DNA
cgatctcaactaggac

SEQ ID NO: 11974 - DNA, 16 bp, synthetic construct
  misc_feature 1..16: note = synthetic [barcode part1]
  source 1..16: mol_type = other DNA
tctactgtcgaacact

SEQ ID NO: 11975 - DNA, 16 bp, synthetic construct
  misc_feature 1..16: note = synthetic [barcode part1]
  source 1..16: mol_type = other DNA
ttagtctcactccgtc

SEQ ID NO: 11976 - DNA, 16 bp, synthetic construct
  misc_feature 1..16: note = synthetic [barcode part1]
  source 1..16: mol_type = other DNA
acttctagtgacctac

SEQ ID NO: 11977 - DNA, 16 bp, synthetic construct
  misc_feature 1..16: note = synthetic [barcode part1]
  source 1..16: mol_type = other DNA
caacgttctgtccgtg

SEQ ID NO: 11978 - DNA, 16 bp, synthetic construct
  misc_feature 1..16: note = synthetic [barcode part1]
  source 1..16: mol_type = other DNA
cgagaggaattgaggt

SEQ ID NO: 11979 - DNA, 16 bp, synthetic construct
  misc_feature 1..16: note = synthetic [barcode part1]
  source 1..16: mol_type = other DNA
acctctagaactacct

SEQ ID NO: 11980 - DNA, 16 bp, synthetic construct
  misc_feature 1..16: note = synthetic [barcode part1]
  source 1..16: mol_type = other DNA
tcgagagatcagagag

SEQ ID NO: 11981 - DNA, 16 bp, synthetic construct
  misc_feature 1..16: note = synthetic [barcode part1]
  source 1..16: mol_type = other DNA
gcaatcgtcttctagt

SEQ ID NO: 11982 - DNA, 16 bp, synthetic construct
  misc_feature 1..16: note = synthetic [barcode part1]
  source 1..16: mol_type = other DNA
gcgtcacagtagacag

SEQ ID NO: 11983 - DNA, 16 bp, synthetic construct
  misc_feature 1..16: note = synthetic [barcode part1]
  source 1..16: mol_type = other DNA
aacgcgtgagaggtct

SEQ ID NO: 11984 - DNA, 16 bp, synthetic construct
  misc_feature 1..16: note = synthetic [barcode part1]
  source 1..16: mol_type = other DNA
ttagacgacggacttc

SEQ ID NO: 11985 - DNA, 16 bp, synthetic construct
  misc_feature 1..16: note = synthetic [barcode part1]
  source 1..16: mol_type = other DNA
cgagtattgcgaatcc

SEQ ID NO: 11986 - DNA, 16 bp, synthetic construct
  misc_feature 1..16: note = synthetic [barcode part1]
  source 1..16: mol_type = other DNA
ccgttactaggtgtcc

SEQ ID NO: 11987 - DNA, 16 bp, synthetic construct
  misc_feature 1..16: note = synthetic [barcode part1]
  source 1..16: mol_type = other DNA
taaccgtccgtcgttg

SEQ ID NO: 11988 - DNA, 16 bp, synthetic construct
  misc_feature 1..16: note = synthetic [barcode part1]
  source 1..16: mol_type = other DNA
gaacgactgcgaactg

SEQ ID NO: 11989 - DNA, 16 bp, synthetic construct
  misc_feature 1..16: note = synthetic [barcode part1]
  source 1..16: mol_type = other DNA
tattctcgttaccgag

SEQ ID NO: 11990 - DNA, 16 bp, synthetic construct
  misc_feature 1..16: note = synthetic [barcode part1]
  source 1..16: mol_type = other DNA
tatacaggcaagacgt

SEQ ID NO: 11991 - DNA, 16 bp, synthetic construct
  misc_feature 1..16: note = synthetic [barcode part1]
  source 1..16: mol_type = other DNA
gacgtatcggttgtac

SEQ ID NO: 11992 - DNA, 16 bp, synthetic construct
  misc_feature 1..16: note = synthetic [barcode part1]
  source 1..16: mol_type = other DNA
aacgtctgtctcttag

SEQ ID NO: 11993 - DNA, 16 bp, synthetic construct
  misc_feature 1..16: note = synthetic [barcode part1]
  source 1..16: mol_type = other DNA
tgcaaggttgagttag

SEQ ID NO: 11994 - DNA, 16 bp, synthetic construct
  misc_feature 1..16: note = synthetic [barcode part1]
  source 1..16: mol_type = other DNA
tctgactgccggtact

SEQ ID NO: 11995 - DNA, 16 bp, synthetic construct
  misc_feature 1..16: note = synthetic [barcode part1]
  source 1..16: mol_type = other DNA
tgagtaactcaagacg

SEQ ID NO: 11996 - DNA, 16 bp, synthetic construct
  misc_feature 1..16: note = synthetic [barcode part1]
  source 1..16: mol_type = other DNA
accaacactgtgcaac

SEQ ID NO: 11997 - DNA, 16 bp, synthetic construct
  misc_feature 1..16: note = synthetic [barcode part1]
  source 1..16: mol_type = other DNA
caacgtagaggactgc

SEQ ID NO: 11998 - DNA, 16 bp, synthetic construct
  misc_feature 1..16: note = synthetic [barcode part1]
  source 1..16: mol_type = other DNA
tagaagagtcacgcgc

SEQ ID NO: 11999 - DNA, 16 bp, synthetic construct
  misc_feature 1..16: note = synthetic [barcode part1]
  source 1..16: mol_type = other DNA
gcacaagattcctacg

SEQ ID NO: 12000 - DNA, 16 bp, synthetic construct
  misc_feature 1..16: note = synthetic [barcode part1]
  source 1..16: mol_type = other DNA
gtcgatagttcgaacc

SEQ ID NO: 12001 - DNA, 16 bp, synthetic construct
  misc_feature 1..16: note = synthetic [barcode part1]
  source 1..16: mol_type = other DNA
ataagaggattgccac

SEQ ID NO: 12002 - DNA, 16 bp, synthetic construct
  misc_feature 1..16: note = synthetic [barcode part1]
  source 1..16: mol_type = other DNA
attgtctctcagacac

SEQ ID NO: 12003 - DNA, 16 bp, synthetic construct
  misc_feature 1..16: note = synthetic [barcode part1]
  source 1..16: mol_type = other DNA
gattctcgacctgcgt

SEQ ID NO: 12004 - DNA, 16 bp, synthetic construct
  misc_feature 1..16: note = synthetic [barcode part1]
  source 1..16: mol_type = other DNA
gtgattcagtgtagag

SEQ ID NO: 12005 - DNA, 16 bp, synthetic construct
  misc_feature 1..16: note = synthetic [barcode part1]
  source 1..16: mol_type = other DNA
ttgacttgccttctgc

SEQ ID NO: 12006 - DNA, 16 bp, synthetic construct
  misc_feature 1..16: note = synthetic [barcode part1]
  source 1..16: mol_type = other DNA
cgacacctacttgtcg

SEQ ID NO: 12007 - DNA, 16 bp, synthetic construct
  misc_feature 1..16: note = synthetic [barcode part1]
  source 1..16: mol_type = other DNA
gtgcaacaccaacact

SEQ ID NO: 12008 - DNA, 16 bp, synthetic construct
  misc_feature 1..16: note = synthetic [barcode part1]
  source 1..16: mol_type = other DNA
ataattgtctcctggc

SEQ ID NO: 12009 - DNA, 16 bp, synthetic construct
  misc_feature 1..16: note = synthetic [barcode part1]
  source 1..16: mol_type = other DNA
caacgtagtgtagtcc

SEQ ID NO: 12010 - DNA, 16 bp, synthetic construct
  misc_feature 1..16: note = synthetic [barcode part1]
  source 1..16: mol_type = other DNA
aagttgcctcagtgac

SEQ ID NO: 12011 - DNA, 16 bp, synthetic construct
  misc_feature 1..16: note = synthetic [barcode part1]
  source 1..16: mol_type = other DNA
taagtcaggccactgt

SEQ ID NO: 12012 - DNA, 16 bp, synthetic construct
  misc_feature 1..16: note = synthetic [barcode part1]
  source 1..16: mol_type = other DNA
caattgcgacgacgag

SEQ ID NO: 12013 - DNA, 16 bp, synthetic construct
  misc_feature 1..16: note = synthetic [barcode part1]
  source 1..16: mol_type = other DNA
aacgaggttaatacgc

SEQ ID NO: 12014 - DNA, 16 bp, synthetic construct
  misc_feature 1..16: note = synthetic [barcode part1]
  source 1..16: mol_type = other DNA
gagacgttaataaccg

SEQ ID NO: 12015 - DNA, 16 bp, synthetic construct
  misc_feature 1..16: note = synthetic [barcode part1]
  source 1..16: mol_type = other DNA
tgcgttccactaggtc

SEQ ID NO: 12016 - DNA, 16 bp, synthetic construct
  misc_feature 1..16: note = synthetic [barcode part1]
  source 1..16: mol_type = other DNA
cgagagaatactggcc

SEQ ID NO: 12017 - DNA, 16 bp, synthetic construct
  misc_feature 1..16: note = synthetic [barcode part1]
  source 1..16: mol_type = other DNA
taccaggaagttgcct

SEQ ID NO: 12018 - DNA, 16 bp, synthetic construct
  misc_feature 1..16: note = synthetic [barcode part1]
  source 1..16: mol_type = other DNA
taggcaggtggataag

SEQ ID NO: 12019 - DNA, 16 bp, synthetic construct
  misc_feature 1..16: note = synthetic [barcode part1]
  source 1..16: mol_type = other DNA
aggatctccacttatc

SEQ ID NO: 12020 - DNA, 16 bp, synthetic construct
  misc_feature 1..16: note = synthetic [barcode part1]
  source 1..16: mol_type = other DNA
ccgatcctaccagtgt

SEQ ID NO: 12021 - DNA, 16 bp, synthetic construct
  misc_feature 1..16: note = synthetic [barcode part1]
  source 1..16: mol_type = other DNA
tattcaagtcgttccg

SEQ ID NO: 12022 - DNA, 16 bp, synthetic construct
  misc_feature 1..16: note = synthetic [barcode part1]
  source 1..16: mol_type = other DNA
agacttcgtatacgcg

SEQ ID NO: 12023 - DNA, 16 bp, synthetic construct
  misc_feature 1..16: note = synthetic [barcode part1]
  source 1..16: mol_type = other DNA
aggtccacactctatt

SEQ ID NO: 12024 - DNA, 16 bp, synthetic construct
  misc_feature 1..16: note = synthetic [barcode part1]
  source 1..16: mol_type = other DNA
caggaggcaacgtgtt

SEQ ID NO: 12025 - DNA, 16 bp, synthetic construct
  misc_feature 1..16: note = synthetic [barcode part1]
  source 1..16: mol_type = other DNA
acgttctatcgtcagt

SEQ ID NO: 12026 - DNA, 16 bp, synthetic construct
  misc_feature 1..16: note = synthetic [barcode part1]
  source 1..16: mol_type = other DNA
gtggactcgtagactt

SEQ ID NO: 12027 - DNA, 16 bp, synthetic construct
  misc_feature 1..16: note = synthetic [barcode part1]
  source 1..16: mol_type = other DNA
cactgtctctgcagac

SEQ ID NO: 12028 - DNA, 16 bp, synthetic construct
  misc_feature 1..16: note = synthetic [barcode part1]
  source 1..16: mol_type = other DNA
tgacgattacgttctc

SEQ ID NO: 12029 - DNA, 16 bp, synthetic construct
  misc_feature 1..16: note = synthetic [barcode part1]
  source 1..16: mol_type = other DNA
ccgttaacgattcgag

SEQ ID NO: 12030 - DNA, 16 bp, synthetic construct
  misc_feature 1..16: note = synthetic [barcode part1]
  source 1..16: mol_type = other DNA
agaccactatccttgt

SEQ ID NO: 12031 - DNA, 16 bp, synthetic construct
  misc_feature 1..16: note = synthetic [barcode part1]
  source 1..16: mol_type = other DNA
tgtggtatatctgtcc

SEQ ID NO: 12032 - DNA, 16 bp, synthetic construct
  misc_feature 1..16: note = synthetic [barcode part1]
  source 1..16: mol_type = other DNA
caagtgttcgaacgtc

SEQ ID NO: 12033 - DNA, 16 bp, synthetic construct
  misc_feature 1..16: note = synthetic [barcode part1]
  source 1..16: mol_type = other DNA
gaagagtcctgatcct

SEQ ID NO: 12034 - DNA, 16 bp, synthetic construct
  misc_feature 1..16: note = synthetic [barcode part1]
  source 1..16: mol_type = other DNA
tggtggattcaggcag

SEQ ID NO: 12035 - DNA, 16 bp, synthetic construct
  misc_feature 1..16: note = synthetic [barcode part1]
  source 1..16: mol_type = other DNA
cagattactccacact

SEQ ID NO: 12036 - DNA, 16 bp, synthetic construct
  misc_feature 1..16: note = synthetic [barcode part1]
  source 1..16: mol_type = other DNA
caccggaactcttgtc

SEQ ID NO: 12037 - DNA, 16 bp, synthetic construct
  misc_feature 1..16: note = synthetic [barcode part1]
  source 1..16: mol_type = other DNA
ccaccttatacaactg

SEQ ID NO: 12038 - DNA, 16 bp, synthetic construct
  misc_feature 1..16: note = synthetic [barcode part1]
  source 1..16: mol_type = other DNA
aggtaggaggtgaatc

SEQ ID NO: 12039 - DNA, 16 bp, synthetic construct
  misc_feature 1..16: note = synthetic [barcode part1]
  source 1..16: mol_type = other DNA
cgattgactctctctc

SEQ ID NO: 12040 - DNA, 16 bp, synthetic construct
  misc_feature 1..16: note = synthetic [barcode part1]
  source 1..16: mol_type = other DNA
tctcagacaagacctg

SEQ ID NO: 12041 - DNA, 16 bp, synthetic construct
  misc_feature 1..16: note = synthetic [barcode part1]
  source 1..16: mol_type = other DNA
taagtatccgacacgc

SEQ ID NO: 12042 - DNA, 16 bp, synthetic construct
  misc_feature 1..16: note = synthetic [barcode part1]
  source 1..16: mol_type = other DNA
tgtgaggagaacgtag

SEQ ID NO: 12043 - DNA, 16 bp, synthetic construct
  misc_feature 1..16: note = synthetic [barcode part1]
  source 1..16: mol_type = other DNA
actcgccaagtagact

SEQ ID NO: 12044 - DNA, 16 bp, synthetic construct
  misc_feature 1..16: note = synthetic [barcode part1]
  source 1..16: mol_type = other DNA
tacttcaccgtcttgc

SEQ ID NO: 12045 - DNA, 16 bp, synthetic construct
  misc_feature 1..16: note = synthetic [barcode part1]
  source 1..16: mol_type = other DNA
ccggaggatattcgag

SEQ ID NO: 12046 - DNA, 16 bp, synthetic construct
  misc_feature 1..16: note = synthetic [barcode part1]
  source 1..16: mol_type = other DNA
gttatcgaaccaccag

SEQ ID NO: 12047 - DNA, 16 bp, synthetic construct
  misc_feature 1..16: note = synthetic [barcode part1]
  source 1..16: mol_type = other DNA
caactgagacttcgac

SEQ ID NO: 12048 - DNA, 16 bp, synthetic construct
  misc_feature 1..16: note = synthetic [barcode part1]
  source 1..16: mol_type = other DNA
gtccgagtgaagtgac

SEQ ID NO: 12049 - DNA, 16 bp, synthetic construct
  misc_feature 1..16: note = synthetic [barcode part1]
  source 1..16: mol_type = other DNA
gtgcgtaggttctagt

SEQ ID NO: 12050 - DNA, 16 bp, synthetic construct
  misc_feature 1..16: note = synthetic [barcode part1]
  source 1..16: mol_type = other DNA
tagtgtcttattcgcg

SEQ ID NO: 12051 - DNA, 16 bp, synthetic construct
  misc_feature 1..16: note = synthetic [barcode part1]
  source 1..16: mol_type = other DNA
ccaatccttgcgtgac

SEQ ID NO: 12052 - DNA, 16 bp, synthetic construct
  misc_feature 1..16: note = synthetic [barcode part1]
  source 1..16: mol_type = other DNA
gcaactgcctcaacct

SEQ ID NO: 12053 - DNA, 16 bp, synthetic construct
  misc_feature 1..16: note = synthetic [barcode part1]
  source 1..16: mol_type = other DNA
gccaatacgtcagtac

SEQ ID NO: 12054 - DNA, 16 bp, synthetic construct
  misc_feature 1..16: note = synthetic [barcode part1]
  source 1..16: mol_type = other DNA
cctctaataactgcgt

SEQ ID NO: 12055 - DNA, 16 bp, synthetic construct
  misc_feature 1..16: note = synthetic [barcode part1]
  source 1..16: mol_type = other DNA
tgcagttcttctggcg

SEQ ID NO: 12056 - DNA, 16 bp, synthetic construct
  misc_feature 1..16: note = synthetic [barcode part1]
  source 1..16: mol_type = other DNA
agtctgtcttgttgtg

SEQ ID NO: 12057 - DNA, 16 bp, synthetic construct
  misc_feature 1..16: note = synthetic [barcode part1]
  source 1..16: mol_type = other DNA
tgaactccttgccacg

SEQ ID NO: 12058 - DNA, 16 bp, synthetic construct
  misc_feature 1..16: note = synthetic [barcode part1]
  source 1..16: mol_type = other DNA
ttcttgataaccgtgc

SEQ ID NO: 12059 - DNA, 16 bp, synthetic construct
  misc_feature 1..16: note = synthetic [barcode part1]
  source 1..16: mol_type = other DNA
acacctcgaggtatac

SEQ ID NO: 12060 - DNA, 16 bp, synthetic construct
  misc_feature 1..16: note = synthetic [barcode part1]
  source 1..16: mol_type = other DNA
ttcttgtcagactgtg

SEQ ID NO: 12061 - DNA, 16 bp, synthetic construct
  misc_feature 1..16: note = synthetic [barcode part1]
  source 1..16: mol_type = other DNA
ccgaggtataagtggc

SEQ ID NO: 12062 - DNA, 16 bp, synthetic construct
  misc_feature 1..16: note = synthetic [barcode part1]
  source 1..16: mol_type = other DNA
taacagtcgcgcctct

SEQ ID NO: 12063 - DNA, 16 bp, synthetic construct
  misc_feature 1..16: note = synthetic [barcode part1]
  source 1..16: mol_type = other DNA
tgtctgtcggaatctt

SEQ ID NO: 12064 - DNA, 16 bp, synthetic construct
  misc_feature 1..16: note = synthetic [barcode part1]
  source 1..16: mol_type = other DNA
tgtccacctcggaatc

SEQ ID NO: 12065 - DNA, 16 bp, synthetic construct
  misc_feature 1..16: note = synthetic [barcode part1]
  source 1..16: mol_type = other DNA
gtagtctgacgtggag

SEQ ID NO: 12066 - DNA, 16 bp, synthetic construct
  misc_feature 1..16: note = synthetic [barcode part1]
  source 1..16: mol_type = other DNA
atctgcactaggtacg

SEQ ID NO: 12067 - DNA, 16 bp, synthetic construct
  misc_feature 1..16: note = synthetic [barcode part1]
  source 1..16: mol_type = other DNA
aggtctaagtgacaac

SEQ ID NO: 12068 - DNA, 16 bp, synthetic construct
  misc_feature 1..16: note = synthetic [barcode part1]
  source 1..16: mol_type = other DNA
tataggtgagtgacgt

SEQ ID NO: 12069 - DNA, 16 bp, synthetic construct
  misc_feature 1..16: note = synthetic [barcode part1]
  source 1..16: mol_type = other DNA
cgaatactgtaccgac

SEQ ID NO: 12070 - DNA, 16 bp, synthetic construct
  misc_feature 1..16: note = synthetic [barcode part1]
  source 1..16: mol_type = other DNA
taggtacggagattac

SEQ ID NO: 12071 - DNA, 16 bp, synthetic construct
  misc_feature 1..16: note = synthetic [barcode part1]
  source 1..16: mol_type = other DNA
ttacggacactctgcc

SEQ ID NO: 12072 - DNA, 16 bp, synthetic construct
  misc_feature 1..16: note = synthetic [barcode part1]
  source 1..16: mol_type = other DNA
tcgataaggcgcgagt

SEQ ID NO: 12073 - DNA, 16 bp, synthetic construct
  misc_feature 1..16: note = synthetic [barcode part1]
  source 1..16: mol_type = other DNA
tcggaacgaacttcgt

SEQ ID NO: 12074 - DNA, 16 bp, synthetic construct
  misc_feature 1..16: note = synthetic [barcode part1]
  source 1..16: mol_type = other DNA
ccgagtgttacttcgc

SEQ ID NO: 12075 - DNA, 16 bp, synthetic construct
  misc_feature 1..16: note = synthetic [barcode part1]
  source 1..16: mol_type = other DNA
acgttgaactatctcc

SEQ ID NO: 12076 - DNA, 16 bp, synthetic construct
  misc_feature 1..16: note = synthetic [barcode part1]
  source 1..16: mol_type = other DNA
gattcacttcgttacg

SEQ ID NO: 12077 - DNA, 16 bp, synthetic construct
  misc_feature 1..16: note = synthetic [barcode part1]
  source 1..16: mol_type = other DNA
gtaactgatcgtgcac

SEQ ID NO: 12078 - DNA, 16 bp, synthetic construct
  misc_feature 1..16: note = synthetic [barcode part1]
  source 1..16: mol_type = other DNA
tgtgagtgtaggtctc

SEQ ID NO: 12079 - DNA, 16 bp, synthetic construct
  misc_feature 1..16: note = synthetic [barcode part1]
  source 1..16: mol_type = other DNA
ttcaacttctcggtcc

SEQ ID NO: 12080 - DNA, 16 bp, synthetic construct
  misc_feature 1..16: note = synthetic [barcode part1]
  source 1..16: mol_type = other DNA
ccacttcttcctagtg

SEQ ID NO: 12081 - DNA, 16 bp, synthetic construct
  misc_feature 1..16: note = synthetic [barcode part1]
  source 1..16: mol_type = other DNA
acgtagtaatcaaggc

SEQ ID NO: 12082 - DNA, 16 bp, synthetic construct
  misc_feature 1..16: note = synthetic [barcode part1]
  source 1..16: mol_type = other DNA
tctggttctgacctct

SEQ ID NO: 12083 - DNA, 16 bp, synthetic construct
  misc_feature 1..16: note = synthetic [barcode part1]
  source 1..16: mol_type = other DNA
ccttagtggtcgtatt

SEQ ID NO: 12084 - DNA, 16 bp, synthetic construct
  misc_feature 1..16: note = synthetic [barcode part1]
  source 1..16: mol_type = other DNA
cagtggtgtgtgaggt

SEQ ID NO: 12085 - DNA, 16 bp, synthetic construct
  misc_feature 1..16: note = synthetic [barcode part1]
  source 1..16: mol_type = other DNA
gacaattcctctgtgt

SEQ ID NO: 12086 - DNA, 16 bp, synthetic construct
  misc_feature 1..16: note = synthetic [barcode part1]
  source 1..16: mol_type = other DNA
agactctaccggttag

SEQ ID NO: 12087 - DNA, 16 bp, synthetic construct
  misc_feature 1..16: note = synthetic [barcode part1]
  source 1..16: mol_type = other DNA
tcggcacgattaggag

SEQ ID NO: 12088 - DNA, 16 bp, synthetic construct
  misc_feature 1..16: note = synthetic [barcode part1]
  source 1..16: mol_type = other DNA
tagtctggttcttacg

SEQ ID NO: 12089 - DNA, 16 bp, synthetic construct
  misc_feature 1..16: note = synthetic [barcode part1]
  source 1..16: mol_type = other DNA
acgagagactatcaac

SEQ ID NO: 12090 - DNA, 16 bp, synthetic construct
  misc_feature 1..16: note = synthetic [barcode part1]
  source 1..16: mol_type = other DNA
aacgactaacctgacc

SEQ ID NO: 12091 - DNA, 16 bp, synthetic construct
  misc_feature 1..16: note = synthetic [barcode part1]
  source 1..16: mol_type = other DNA
caattgccttgatctg

SEQ ID NO: 12092 - DNA, 16 bp, synthetic construct
  misc_feature 1..16: note = synthetic [barcode part1]
  source 1..16: mol_type = other DNA
tgcgaaccgtcgttct

SEQ ID NO: 12093 - DNA, 16 bp, synthetic construct
  misc_feature 1..16: note = synthetic [barcode part1]
  source 1..16: mol_type = other DNA
cacaacgcgaagtctt

SEQ ID NO: 12094 - DNA, 16 bp, synthetic construct
  misc_feature 1..16: note = synthetic [barcode part1]
  source 1..16: mol_type = other DNA
tgaatcacgcacttct

SEQ ID NO: 12095 - DNA, 16 bp, synthetic construct
  misc_feature 1..16: note = synthetic [barcode part1]
  source 1..16: mol_type = other DNA
attggtccgactagtg

SEQ ID NO: 12096 - DNA, 16 bp, synthetic construct
  misc_feature 1..16: note = synthetic [barcode part1]
  source 1..16: mol_type = other DNA
aggttgtagtgtagac

SEQ ID NO: 12097 - DNA, 16 bp, synthetic construct
  misc_feature 1..16: note = synthetic [barcode part1]
  source 1..16: mol_type = other DNA
cctatatcctccacac

SEQ ID NO: 12098 - DNA, 16 bp, synthetic construct
  misc_feature 1..16: note = synthetic [barcode part1]
  source 1..16: mol_type = other DNA
tcctggccaattctct

SEQ ID NO: 12099 - DNA, 16 bp, synthetic construct
  misc_feature 1..16: note = synthetic [barcode part1]
  source 1..16: mol_type = other DNA
aactgtgcgcgtaatc

SEQ ID NO: 12100 - DNA, 16 bp, synthetic construct
  misc_feature 1..16: note = synthetic [barcode part1]
  source 1..16: mol_type = other DNA
tcactgtgtggcaagt

SEQ ID NO: 12101 - DNA, 16 bp, synthetic construct
  misc_feature 1..16: note = synthetic [barcode part1]
  source 1..16: mol_type = other DNA
tcggtggactcttacc

SEQ ID NO: 12102 - DNA, 16 bp, synthetic construct
  misc_feature 1..16: note = synthetic [barcode part1]
  source 1..16: mol_type = other DNA
ccttcaatctcctggt

SEQ ID NO: 12103 - DNA, 16 bp, synthetic construct
  misc_feature 1..16: note = synthetic [barcode part1]
  source 1..16: mol_type = other DNA
ttgagtgcacctgaac

SEQ ID NO: 12104 - DNA, 16 bp, synthetic construct
  misc_feature 1..16: note = synthetic [barcode part1]
  source 1..16: mol_type = other DNA
atcacactacggactg

SEQ ID NO: 12105 - DNA, 16 bp, synthetic construct
  misc_feature 1..16: note = synthetic [barcode part1]
  source 1..16: mol_type = other DNA
tcctgcagactcagtc

SEQ ID NO: 12106 - DNA, 16 bp, synthetic construct
  misc_feature 1..16: note = synthetic [barcode part1]
  source 1..16: mol_type = other DNA
ttcgtccgccttagag

SEQ ID NO: 12107 - DNA, 16 bp, synthetic construct
  misc_feature 1..16: note = synthetic [barcode part1]
  source 1..16: mol_type = other DNA
acaggaaccgacggtt

SEQ ID NO: 12108 - DNA, 16 bp, synthetic construct
  misc_feature 1..16: note = synthetic [barcode part1]
  source 1..16: mol_type = other DNA
gatatcgcagtcagtc

SEQ ID NO: 12109 - DNA, 16 bp, synthetic construct
  misc_feature 1..16: note = synthetic [barcode part1]
  source 1..16: mol_type = other DNA
cgtgaacacttacggt

SEQ ID NO: 12110 - DNA, 16 bp, synthetic construct
  misc_feature 1..16: note = synthetic [barcode part1]
  source 1..16: mol_type = other DNA
gttgacttgtgacgtg

SEQ ID NO: 12111 - DNA, 16 bp, synthetic construct
  misc_feature 1..16: note = synthetic [barcode part1]
  source 1..16: mol_type = other DNA
gacgaggtcagacgtt

SEQ ID NO: 12112 - DNA, 16 bp, synthetic construct
  misc_feature 1..16: note = synthetic [barcode part1]
  source 1..16: mol_type = other DNA
gtaactgcaactacgc

SEQ ID NO: 12113 - DNA, 16 bp, synthetic construct
  misc_feature 1..16: note = synthetic [barcode part1]
  source 1..16: mol_type = other DNA
tggagtgttgttaccg

SEQ ID NO: 12114 - DNA, 16 bp, synthetic construct
  misc_feature 1..16: note = synthetic [barcode part1]
  source 1..16: mol_type = other DNA
gaccgtcctatacctg

SEQ ID NO: 12115 - DNA, 16 bp, synthetic construct
  misc_feature 1..16: note = synthetic [barcode part1]
  source 1..16: mol_type = other DNA
tagaagaatcgacacc

SEQ ID NO: 12116 - DNA, 16 bp, synthetic construct
  misc_feature 1..16: note = synthetic [barcode part1]
  source 1..16: mol_type = other DNA
gtctgaactaccttac

SEQ ID NO: 12117 - DNA, 16 bp, synthetic construct
  misc_feature 1..16: note = synthetic [barcode part1]
  source 1..16: mol_type = other DNA
gcgactgatatcagtc

SEQ ID NO: 12118 - DNA, 16 bp, synthetic construct
  misc_feature 1..16: note = synthetic [barcode part1]
  source 1..16: mol_type = other DNA
ccgagtctacgaagag

SEQ ID NO: 12119 - DNA, 16 bp, synthetic construct
  misc_feature 1..16: note = synthetic [barcode part1]
  source 1..16: mol_type = other DNA
ttgcgttcaggttact

SEQ ID NO: 12120 - DNA, 16 bp, synthetic construct
  misc_feature 1..16: note = synthetic [barcode part1]
  source 1..16: mol_type = other DNA
agtccggaagaacacc

SEQ ID NO: 12121 - DNA, 16 bp, synthetic construct
  misc_feature 1..16: note = synthetic [barcode part1]
  source 1..16: mol_type = other DNA
taggcgtaaggcggtt

SEQ ID NO: 12122 - DNA, 16 bp, synthetic construct
  misc_feature 1..16: note = synthetic [barcode part1]
  source 1..16: mol_type = other DNA
cgattactacttcgtg

SEQ ID NO: 12123 - DNA, 16 bp, synthetic construct
  misc_feature 1..16: note = synthetic [barcode part1]
  source 1..16: mol_type = other DNA
cacagagagttactag

SEQ ID NO: 12124 - DNA, 16 bp, synthetic construct
  misc_feature 1..16: note = synthetic [barcode part1]
  source 1..16: mol_type = other DNA
tgcgtggtgaagaacc

SEQ ID NO: 12125 - DNA, 16 bp, synthetic construct
  misc_feature 1..16: note = synthetic [barcode part1]
  source 1..16: mol_type = other DNA
actaatacgtctcacc

SEQ ID NO: 12126 - DNA, 16 bp, synthetic construct
  misc_feature 1..16: note = synthetic [barcode part1]
  source 1..16: mol_type = other DNA
tattaggcctggtggt

SEQ ID NO: 12127 - DNA, 16 bp, synthetic construct
  misc_feature 1..16: note = synthetic [barcode part1]
  source 1..16: mol_type = other DNA
agagttcgcgaataac

SEQ ID NO: 12128 - DNA, 16 bp, synthetic construct
  misc_feature 1..16: note = synthetic [barcode part1]
  source 1..16: mol_type = other DNA
cctggttaaccttctc

SEQ ID NO: 12129 - DNA, 16 bp, synthetic construct
  misc_feature 1..16: note = synthetic [barcode part1]
  source 1..16: mol_type = other DNA
cgtgtctgaattactc

SEQ ID NO: 12130 - DNA, 16 bp, synthetic construct
  misc_feature 1..16: note = synthetic [barcode part1]
  source 1..16: mol_type = other DNA
ataataatccgcggag

SEQ ID NO: 12131 - DNA, 16 bp, synthetic construct
  misc_feature 1..16: note = synthetic [barcode part1]
  source 1..16: mol_type = other DNA
cagaccaagaagtgtt

SEQ ID NO: 12132 - DNA, 16 bp, synthetic construct
  misc_feature 1..16: note = synthetic [barcode part1]
  source 1..16: mol_type = other DNA
gttccgcgatatatct

SEQ ID NO: 12133 - DNA, 16 bp, synthetic construct
  misc_feature 1..16: note = synthetic [barcode part1]
  source 1..16: mol_type = other DNA
cctggactaaggagtg

SEQ ID NO: 12134 - DNA, 16 bp, synthetic construct
  misc_feature 1..16: note = synthetic [barcode part1]
  source 1..16: mol_type = other DNA
ccgtcgtgtaataggt

SEQ ID NO: 12135 - DNA, 16 bp, synthetic construct
  misc_feature 1..16: note = synthetic [barcode part1]
  source 1..16: mol_type = other DNA
cacaatcgattcgcag

SEQ ID NO: 12136 - DNA, 16 bp, synthetic construct
  misc_feature 1..16: note = synthetic [barcode part1]
  source 1..16: mol_type = other DNA
aggtctacgaaggacc

SEQ ID NO: 12137 - DNA, 16 bp, synthetic construct
  misc_feature 1..16: note = synthetic [barcode part1]
  source 1..16: mol_type = other DNA
acggatctgtggatct

SEQ ID NO: 12138 - DNA, 16 bp, synthetic construct
  misc_feature 1..16: note = synthetic [barcode part1]
  source 1..16: mol_type = other DNA
cctactgtcgacacac

SEQ ID NO: 12139 - DNA, 16 bp, synthetic construct
  misc_feature 1..16: note = synthetic [barcode part1]
  source 1..16: mol_type = other DNA
gagaacggtagtccac

SEQ ID NO: 12140 - DNA, 16 bp, synthetic construct
  misc_feature 1..16: note = synthetic [barcode part1]
  source 1..16: mol_type = other DNA
cgactaacacgtgtac

SEQ ID NO: 12141 - DNA, 16 bp, synthetic construct
  misc_feature 1..16: note = synthetic [barcode part1]
  source 1..16: mol_type = other DNA
agtagtagacggaacg

SEQ ID NO: 12142 - DNA, 16 bp, synthetic construct
  misc_feature 1..16: note = synthetic [barcode part1]
  source 1..16: mol_type = other DNA
ttgaataaggtccgcc

SEQ ID NO: 12143 - DNA, 16 bp, synthetic construct
  misc_feature 1..16: note = synthetic [barcode part1]
  source 1..16: mol_type = other DNA
cacgtaggagtcaggt

SEQ ID NO: 12144 - DNA, 16 bp, synthetic construct
  misc_feature 1..16: note = synthetic [barcode part1]
  source 1..16: mol_type = other DNA
tgccaggagattgttc

SEQ ID NO: 12145 - DNA, 16 bp, synthetic construct
  misc_feature 1..16: note = synthetic [barcode part1]
  source 1..16: mol_type = other DNA
tacctatagacaggcc

SEQ ID NO: 12146 - DNA, 16 bp, synthetic construct
  misc_feature 1..16: note = synthetic [barcode part1]
  source 1..16: mol_type = other DNA
tacggcactgtccgtt

SEQ ID NO: 12147 - DNA, 16 bp, synthetic construct
  misc_feature 1..16: note = synthetic [barcode part1]
  source 1..16: mol_type = other DNA
cagtcaggttgcgatt

SEQ ID NO: 12148 - DNA, 16 bp, synthetic construct
  misc_feature 1..16: note = synthetic [barcode part1]
  source 1..16: mol_type = other DNA
cctcggaagattctag

SEQ ID NO: 12149 - DNA, 16 bp, synthetic construct
  misc_feature 1..16: note = synthetic [barcode part1]
  source 1..16: mol_type = other DNA
tgattccgaccttcct

SEQ ID NO: 12150 - DNA, 16 bp, synthetic construct
  misc_feature 1..16: note = synthetic [barcode part1]
  source 1..16: mol_type = other DNA
gtgttagtaacctctc

SEQ ID NO: 12151 - DNA, 16 bp, synthetic construct
  misc_feature 1..16: note = synthetic [barcode part1]
  source 1..16: mol_type = other DNA
cggaacttcctaaggt

SEQ ID NO: 12152 - DNA, 16 bp, synthetic construct
  misc_feature 1..16: note = synthetic [barcode part1]
  source 1..16: mol_type = other DNA
caaggttctgaagtcc

SEQ ID NO: 12153 - DNA, 16 bp, synthetic construct
  misc_feature 1..16: note = synthetic [barcode part1]
  source 1..16: mol_type = other DNA
gacgtaggcctaacag

SEQ ID NO: 12154 - DNA, 16 bp, synthetic construct
  misc_feature 1..16: note = synthetic [barcode part1]
  source 1..16: mol_type = other DNA
tcgtacctaagttacc

SEQ ID NO: 12155 - DNA, 16 bp, synthetic construct
  misc_feature 1..16: note = synthetic [barcode part1]
  source 1..16: mol_type = other DNA
tcaactgactgtgacg

SEQ ID NO: 12156 - DNA, 16 bp, synthetic construct
  misc_feature 1..16: note = synthetic [barcode part1]
  source 1..16: mol_type = other DNA
atatcggaatcgcgtc

SEQ ID NO: 12157 - DNA, 16 bp, synthetic construct
  misc_feature 1..16: note = synthetic [barcode part1]
  source 1..16: mol_type = other DNA
attctcacgttggatc

SEQ ID NO: 12158 - DNA, 16 bp, synthetic construct
  misc_feature 1..16: note = synthetic [barcode part1]
  source 1..16: mol_type = other DNA
atcggttgaggaagag

SEQ ID NO: 12159 - DNA, 16 bp, synthetic construct
  misc_feature 1..16: note = synthetic [barcode part1]
  source 1..16: mol_type = other DNA
gaatctacctggtctt

SEQ ID NO: 12160 - DNA, 16 bp, synthetic construct
  misc_feature 1..16: note = synthetic [barcode part1]
  source 1..16: mol_type = other DNA
gagagtactgtgtcct

SEQ ID NO: 12161 - DNA, 16 bp, synthetic construct
  misc_feature 1..16: note = synthetic [barcode part1]
  source 1..16: mol_type = other DNA
agacggactacaacgc

SEQ ID NO: 12162 - DNA, 16 bp, synthetic construct
  misc_feature 1..16: note = synthetic [barcode part1]
  source 1..16: mol_type = other DNA
accgttctgtcacttc

SEQ ID NO: 12163 - DNA, 16 bp, synthetic construct
  misc_feature 1..16: note = synthetic [barcode part1]
  source 1..16: mol_type = other DNA
caaggtggtaactgcg

SEQ ID NO: 12164 - DNA, 16 bp, synthetic construct
  misc_feature 1..16: note = synthetic [barcode part1]
  source 1..16: mol_type = other DNA
cggagaatacgcaacc

SEQ ID NO: 12165 - DNA, 16 bp, synthetic construct
  misc_feature 1..16: note = synthetic [barcode part1]
  source 1..16: mol_type = other DNA
acctagatcactctac

SEQ ID NO: 12166 - DNA, 16 bp, synthetic construct
  misc_feature 1..16: note = synthetic [barcode part1]
  source 1..16: mol_type = other DNA
aacagagaactcgtgt

SEQ ID NO: 12167 - DNA, 16 bp, synthetic construct
  misc_feature 1..16: note = synthetic [barcode part1]
  source 1..16: mol_type = other DNA
taaccaggttaaccgc

SEQ ID NO: 12168 - DNA, 16 bp, synthetic construct
  misc_feature 1..16: note = synthetic [barcode part1]
  source 1..16: mol_type = other DNA
agtgttccggaagacg

SEQ ID NO: 12169 - DNA, 16 bp, synthetic construct
  misc_feature 1..16: note = synthetic [barcode part1]
  source 1..16: mol_type = other DNA
atcgaacctgcactcc

SEQ ID NO: 12170 - DNA, 16 bp, synthetic construct
  misc_feature 1..16: note = synthetic [barcode part1]
  source 1..16: mol_type = other DNA
gtgaataacaggcgag

SEQ ID NO: 12171 - DNA, 16 bp, synthetic construct
  misc_feature 1..16: note = synthetic [barcode part1]
  source 1..16: mol_type = other DNA
tctggattaggaagtg

SEQ ID NO: 12172 - DNA, 16 bp, synthetic construct
  misc_feature 1..16: note = synthetic [barcode part1]
  source 1..16: mol_type = other DNA
tcgaacaactctatcc

SEQ ID NO: 12173 - DNA, 16 bp, synthetic construct
  misc_feature 1..16: note = synthetic [barcode part1]
  source 1..16: mol_type = other DNA
tacaatactgcctacc

SEQ ID NO: 12174 - DNA, 16 bp, synthetic construct
  misc_feature 1..16: note = synthetic [barcode part1]
  source 1..16: mol_type = other DNA
tgactctgcgttagtt

SEQ ID NO: 12175 - DNA, 16 bp, synthetic construct
  misc_feature 1..16: note = synthetic [barcode part1]
  source 1..16: mol_type = other DNA
tgcctgtgaatcctgc

SEQ ID NO: 12176 - DNA, 16 bp, synthetic construct
  misc_feature 1..16: note = synthetic [barcode part1]
  source 1..16: mol_type = other DNA
cgtcttgtgtcacttc

SEQ ID NO: 12177 - DNA, 16 bp, synthetic construct
  misc_feature 1..16: note = synthetic [barcode part1]
  source 1..16: mol_type = other DNA
tgaagaatcgacctcc

SEQ ID NO: 12178 - DNA, 16 bp, synthetic construct
  misc_feature 1..16: note = synthetic [barcode part1]
  source 1..16: mol_type = other DNA
gaggcaagagtctacc

SEQ ID NO: 12179 - DNA, 16 bp, synthetic construct
  misc_feature 1..16: note = synthetic [barcode part1]
  source 1..16: mol_type = other DNA
gcgtgacaagaggttc

SEQ ID NO: 12180 - DNA, 16 bp, synthetic construct
  misc_feature 1..16: note = synthetic [barcode part1]
  source 1..16: mol_type = other DNA
tgtagtcctgagtacg

SEQ ID NO: 12181 - DNA, 16 bp, synthetic construct
  misc_feature 1..16: note = synthetic [barcode part1]
  source 1..16: mol_type = other DNA
ttcagtgagtgtagag

SEQ ID NO: 12182 - DNA, 16 bp, synthetic construct
  misc_feature 1..16: note = synthetic [barcode part1]
  source 1..16: mol_type = other DNA
acacaacggttcctcc

SEQ ID NO: 12183 - DNA, 16 bp, synthetic construct
  misc_feature 1..16: note = synthetic [barcode part1]
  source 1..16: mol_type = other DNA
aaccaacgttgaccac

SEQ ID NO: 12184 - DNA, 16 bp, synthetic construct
  misc_feature 1..16: note = synthetic [barcode part1]
  source 1..16: mol_type = other DNA
tcgaacgatctcgcct

SEQ ID NO: 12185 - DNA, 16 bp, synthetic construct
  misc_feature 1..16: note = synthetic [barcode part1]
  source 1..16: mol_type = other DNA
gagacttcagatagac

SEQ ID NO: 12186 - DNA, 16 bp, synthetic construct
  misc_feature 1..16: note = synthetic [barcode part1]
  source 1..16: mol_type = other DNA
taatccgccgttgaag

SEQ ID NO: 12187 - DNA, 16 bp, synthetic construct
  misc_feature 1..16: note = synthetic [barcode part1]
  source 1..16: mol_type = other DNA
aggaggcgtggttgtt

SEQ ID NO: 12188 - DNA, 16 bp, synthetic construct
  misc_feature 1..16: note = synthetic [barcode part1]
  source 1..16: mol_type = other DNA
taacttccaatcgcac

SEQ ID NO: 12189 - DNA, 16 bp, synthetic construct
  misc_feature 1..16: note = synthetic [barcode part1]
  source 1..16: mol_type = other DNA
cgccaacctagtcttg

SEQ ID NO: 12190 - DNA, 16 bp, synthetic construct
  misc_feature 1..16: note = synthetic [barcode part1]
  source 1..16: mol_type = other DNA
gtaactcggactatcg

SEQ ID NO: 12191 - DNA, 16 bp, synthetic construct
  misc_feature 1..16: note = synthetic [barcode part1]
  source 1..16: mol_type = other DNA
acacagtctccgatcc

SEQ ID NO: 12192 - DNA, 16 bp, synthetic construct
  misc_feature 1..16: note = synthetic [barcode part1]
  source 1..16: mol_type = other DNA
atcgtactcttcagtg

SEQ ID NO: 12193 - DNA, 16 bp, synthetic construct
  misc_feature 1..16: note = synthetic [barcode part1]
  source 1..16: mol_type = other DNA
cggcactcttgtctag

SEQ ID NO: 12194 - DNA, 16 bp, synthetic construct
  misc_feature 1..16: note = synthetic [barcode part1]
  source 1..16: mol_type = other DNA
gacaattgaggtgtgt

SEQ ID NO: 12195 - DNA, 16 bp, synthetic construct
  misc_feature 1..16: note = synthetic [barcode part1]
  source 1..16: mol_type = other DNA
acgtcaggtgtaacct

SEQ ID NO: 12196 - DNA, 16 bp, synthetic construct
  misc_feature 1..16: note = synthetic [barcode part1]
  source 1..16: mol_type = other DNA
cacgtagtgccttatt

SEQ ID NO: 12197 - DNA, 16 bp, synthetic construct
  misc_feature 1..16: note = synthetic [barcode part1]
  source 1..16: mol_type = other DNA
ccttcctcgactgatt

SEQ ID NO: 12198 - DNA, 16 bp, synthetic construct
  misc_feature 1..16: note = synthetic [barcode part1]
  source 1..16: mol_type = other DNA
atatcggaaggcgacc

SEQ ID NO: 12199 - DNA, 16 bp, synthetic construct
  misc_feature 1..16: note = synthetic [barcode part1]
  source 1..16: mol_type = other DNA
taactctggtccttcc

SEQ ID NO: 12200 - DNA, 16 bp, synthetic construct
  misc_feature 1..16: note = synthetic [barcode part1]
  source 1..16: mol_type = other DNA
gttcaccttcaaggcc

SEQ ID NO: 12201 - DNA, 16 bp, synthetic construct
  misc_feature 1..16: note = synthetic [barcode part1]
  source 1..16: mol_type = other DNA
aggttgcgatacaagt

SEQ ID NO: 12202 - DNA, 16 bp, synthetic construct
  misc_feature 1..16: note = synthetic [barcode part1]
  source 1..16: mol_type = other DNA
tcggaactaggacctt

SEQ ID NO: 12203 - DNA, 16 bp, synthetic construct
  misc_feature 1..16: note = synthetic [barcode part1]
  source 1..16: mol_type = other DNA
ccgattagaggtcttg

SEQ ID NO: 12204 - DNA, 16 bp, synthetic construct
  misc_feature 1..16: note = synthetic [barcode part1]
  source 1..16: mol_type = other DNA
ttctcaggaggtcagt

SEQ ID NO: 12205 - DNA, 16 bp, synthetic construct
  misc_feature 1..16: note = synthetic [barcode part1]
  source 1..16: mol_type = other DNA
cgcagataacagaact

SEQ ID NO: 12206 - DNA, 16 bp, synthetic construct
  misc_feature 1..16: note = synthetic [barcode part1]
  source 1..16: mol_type = other DNA
acactccagtcaccac

SEQ ID NO: 12207 - DNA, 16 bp, synthetic construct
  misc_feature 1..16: note = synthetic [barcode part1]
  source 1..16: mol_type = other DNA
tcaacgtaccaacgtg

SEQ ID NO: 12208 - DNA, 16 bp, synthetic construct
  misc_feature 1..16: note = synthetic [barcode part1]
  source 1..16: mol_type = other DNA
attgcgacctaagacc

SEQ ID NO: 12209 - DNA, 16 bp, synthetic construct
  misc_feature 1..16: note = synthetic [barcode part1]
  source 1..16: mol_type = other DNA
aaccgccttattggag

SEQ ID NO: 12210 - DNA, 16 bp, synthetic construct
  misc_feature 1..16: note = synthetic [barcode part1]
  source 1..16: mol_type = other DNA
gaccagaagacgtctg

SEQ ID NO: 12211 - DNA, 16 bp, synthetic construct
  misc_feature 1..16: note = synthetic [barcode part1]
  source 1..16: mol_type = other DNA
tgtcctcggttgtcag

SEQ ID NO: 12212 - DNA, 16 bp, synthetic construct
  misc_feature 1..16: note = synthetic [barcode part1]
  source 1..16: mol_type = other DNA
tatagtgtcgcggtgt

SEQ ID NO: 12213 - DNA, 16 bp, synthetic construct
  misc_feature 1..16: note = synthetic [barcode part1]
  source 1..16: mol_type = other DNA
atacgaagagttgtcg

SEQ ID NO: 12214 - DNA, 16 bp, synthetic construct
  misc_feature 1..16: note = synthetic [barcode part1]
  source 1..16: mol_type = other DNA
ataccgtcagatagag

SEQ ID NO: 12215 - DNA, 16 bp, synthetic construct
  misc_feature 1..16: note = synthetic [barcode part1]
  source 1..16: mol_type = other DNA
tatagagtcggtggcg

SEQ ID NO: 12216 - DNA, 16 bp, synthetic construct
  misc_feature 1..16: note = synthetic [barcode part1]
  source 1..16: mol_type = other DNA
ttggtctggtgcacct

SEQ ID NO: 12217 - DNA, 16 bp, synthetic construct
  misc_feature 1..16: note = synthetic [barcode part1]
  source 1..16: mol_type = other DNA
tgaccaggaagttcct

SEQ ID NO: 12218 - DNA, 16 bp, synthetic construct
  misc_feature 1..16: note = synthetic [barcode part1]
  source 1..16: mol_type = other DNA
tgtccgtacttcaggc

SEQ ID NO: 12219 - DNA, 16 bp, synthetic construct
  misc_feature 1..16: note = synthetic [barcode part1]
  source 1..16: mol_type = other DNA
agagtggcctaggtac

SEQ ID NO: 12220 - DNA, 16 bp, synthetic construct
  misc_feature 1..16: note = synthetic [barcode part1]
  source 1..16: mol_type = other DNA
gtggaactctaagtag

SEQ ID NO: 12221 - DNA, 16 bp, synthetic construct
  misc_feature 1..16: note = synthetic [barcode part1]
  source 1..16: mol_type = other DNA
gcggattggaacaatt

SEQ ID NO: 12222 - DNA, 16 bp, synthetic construct
  misc_feature 1..16: note = synthetic [barcode part1]
  source 1..16: mol_type = other DNA
cagtgtaattgaggac

SEQ ID NO: 12223 - DNA, 16 bp, synthetic construct
  misc_feature 1..16: note = synthetic [barcode part1]
  source 1..16: mol_type = other DNA
tgacttcggtcgaagt

SEQ ID NO: 12224 - DNA, 16 bp, synthetic construct
  misc_feature 1..16: note = synthetic [barcode part1]
  source 1..16: mol_type = other DNA
agaggtgtccaataac

SEQ ID NO: 12225 - DNA, 16 bp, synthetic construct
  misc_feature 1..16: note = synthetic [barcode part1]
  source 1..16: mol_type = other DNA
tcctatactgaaccac

SEQ ID NO: 12226 - DNA, 16 bp, synthetic construct
  misc_feature 1..16: note = synthetic [barcode part1]
  source 1..16: mol_type = other DNA
attctctgcacgccag

SEQ ID NO: 12227 - DNA, 16 bp, synthetic construct
  misc_feature 1..16: note = synthetic [barcode part1]
  source 1..16: mol_type = other DNA
tagaagacggcgtacc

SEQ ID NO: 12228 - DNA, 16 bp, synthetic construct
  misc_feature 1..16: note = synthetic [barcode part1]
  source 1..16: mol_type = other DNA
tatacgcgtcggttag

SEQ ID NO: 12229 - DNA, 16 bp, synthetic construct
  misc_feature 1..16: note = synthetic [barcode part1]
  source 1..16: mol_type = other DNA
cgtggtcaggatagtg

SEQ ID NO: 12230 - DNA, 16 bp, synthetic construct
  misc_feature 1..16: note = synthetic [barcode part1]
  source 1..16: mol_type = other DNA
tatcctacgttgcctc

SEQ ID NO: 12231 - DNA, 16 bp, synthetic construct
  misc_feature 1..16: note = synthetic [barcode part1]
  source 1..16: mol_type = other DNA
acgagtcctcctaatt

SEQ ID NO: 12232 - DNA, 16 bp, synthetic construct
  misc_feature 1..16: note = synthetic [barcode part1]
  source 1..16: mol_type = other DNA
cagaattccggagtct

SEQ ID NO: 12233 - DNA, 16 bp, synthetic construct
  misc_feature 1..16: note = synthetic [barcode part1]
  source 1..16: mol_type = other DNA
gcgagaagtacttctc

SEQ ID NO: 12234 - DNA, 16 bp, synthetic construct
  misc_feature 1..16: note = synthetic [barcode part1]
  source 1..16: mol_type = other DNA
cactcaacttcactag

SEQ ID NO: 12235 - DNA, 16 bp, synthetic construct
  misc_feature 1..16: note = synthetic [barcode part1]
  source 1..16: mol_type = other DNA
aaggataggtgtggac

SEQ ID NO: 12236 - DNA, 16 bp, synthetic construct
  misc_feature 1..16: note = synthetic [barcode part1]
  source 1..16: mol_type = other DNA
tgacgacgacctgatt

SEQ ID NO: 12237 - DNA, 16 bp, synthetic construct
  misc_feature 1..16: note = synthetic [barcode part1]
  source 1..16: mol_type = other DNA
gttacttgcaagtctc

SEQ ID NO: 12238 - DNA, 16 bp, synthetic construct
  misc_feature 1..16: note = synthetic [barcode part1]
  source 1..16: mol_type = other DNA
tcttggagtaggtaag

SEQ ID NO: 12239 - DNA, 16 bp, synthetic construct
  misc_feature 1..16: note = synthetic [barcode part1]
  source 1..16: mol_type = other DNA
gtaaggatccttgcgt

SEQ ID NO: 12240 - DNA, 16 bp, synthetic construct
  misc_feature 1..16: note = synthetic [barcode part1]
  source 1..16: mol_type = other DNA
gcgactaccgactctt

SEQ ID NO: 12241 - DNA, 16 bp, synthetic construct
  misc_feature 1..16: note = synthetic [barcode part1]
  source 1..16: mol_type = other DNA
tcacgaggtctcctgt

SEQ ID NO: 12242 - DNA, 16 bp, synthetic construct
  misc_feature 1..16: note = synthetic [barcode part1]
  source 1..16: mol_type = other DNA
ttatctccacgccgag

SEQ ID NO: 12243 - DNA, 16 bp, synthetic construct
  misc_feature 1..16: note = synthetic [barcode part1]
  source 1..16: mol_type = other DNA
tctgtattcggcggtc

SEQ ID NO: 12244 - DNA, 16 bp, synthetic construct
  misc_feature 1..16: note = synthetic [barcode part1]
  source 1..16: mol_type = other DNA
tgcctgtagtattacc

SEQ ID NO: 12245 - DNA, 16 bp, synthetic construct
  misc_feature 1..16: note = synthetic [barcode part1]
  source 1..16: mol_type = other DNA
gtctaggacttgcagt

SEQ ID NO: 12246 - DNA, 16 bp, synthetic construct
  misc_feature 1..16: note = synthetic [barcode part1]
  source 1..16: mol_type = other DNA
tgtaggtcaccgttcc

SEQ ID NO: 12247 - DNA, 16 bp, synthetic construct
  misc_feature 1..16: note = synthetic [barcode part1]
  source 1..16: mol_type = other DNA
cacctcaggtgttcac

SEQ ID NO: 12248 - DNA, 16 bp, synthetic construct
  misc_feature 1..16: note = synthetic [barcode part1]
  source 1..16: mol_type = other DNA
ttgcctcggttgtacg

SEQ ID NO: 12249 - DNA, 16 bp, synthetic construct
  misc_feature 1..16: note = synthetic [barcode part1]
  source 1..16: mol_type = other DNA
tgcgttccggactatc

SEQ ID NO: 12250 - DNA, 16 bp, synthetic construct
  misc_feature 1..16: note = synthetic [barcode part1]
  source 1..16: mol_type = other DNA
tcacctatacctgcct

SEQ ID NO: 12251 - DNA, 16 bp, synthetic construct
  misc_feature 1..16: note = synthetic [barcode part1]
  source 1..16: mol_type = other DNA
tcgttcctagtccttg

SEQ ID NO: 12252 - DNA, 16 bp, synthetic construct
  misc_feature 1..16: note = synthetic [barcode part1]
  source 1..16: mol_type = other DNA
tctccggttggttctt

SEQ ID NO: 12253 - DNA, 16 bp, synthetic construct
  misc_feature 1..16: note = synthetic [barcode part1]
  source 1..16: mol_type = other DNA
aacagaatacggactc

SEQ ID NO: 12254 - DNA, 16 bp, synthetic construct
  misc_feature 1..16: note = synthetic [barcode part1]
  source 1..16: mol_type = other DNA
gactatctaggagtag

SEQ ID NO: 12255 - DNA, 16 bp, synthetic construct
  misc_feature 1..16: note = synthetic [barcode part1]
  source 1..16: mol_type = other DNA
tgacgcgtatagatcc

SEQ ID NO: 12256 - DNA, 16 bp, synthetic construct
  misc_feature 1..16: note = synthetic [barcode part1]
  source 1..16: mol_type = other DNA
ttcaatatctacgccg

SEQ ID NO: 12257 - DNA, 16 bp, synthetic construct
  misc_feature 1..16: note = synthetic [barcode part1]
  source 1..16: mol_type = other DNA
taggattggtcctggt

SEQ ID NO: 12258 - DNA, 16 bp, synthetic construct
  misc_feature 1..16: note = synthetic [barcode part1]
  source 1..16: mol_type = other DNA
ttgacaggaacgtaac

SEQ ID NO: 12259 - DNA, 16 bp, synthetic construct
  misc_feature 1..16: note = synthetic [barcode part1]
  source 1..16: mol_type = other DNA
gccgtccagacttatc

SEQ ID NO: 12260 - DNA, 16 bp, synthetic construct
  misc_feature 1..16: note = synthetic [barcode part1]
  source 1..16: mol_type = other DNA
tctctcgacgagatag

SEQ ID NO: 12261 - DNA, 16 bp, synthetic construct
  misc_feature 1..16: note = synthetic [barcode part1]
  source 1..16: mol_type = other DNA
actctacggtggtagt

SEQ ID NO: 12262 - DNA, 16 bp, synthetic construct
  misc_feature 1..16: note = synthetic [barcode part1]
  source 1..16: mol_type = other DNA
gcaatcaggaaccgac

SEQ ID NO: 12263 - DNA, 16 bp, synthetic construct
  misc_feature 1..16: note = synthetic [barcode part1]
  source 1..16: mol_type = other DNA
tgaagatctaccagag

SEQ ID NO: 12264 - DNA, 16 bp, synthetic construct
  misc_feature 1..16: note = synthetic [barcode part1]
  source 1..16: mol_type = other DNA
acctcaattccggaag

SEQ ID NO: 12265 - DNA, 16 bp, synthetic construct
  misc_feature 1..16: note = synthetic [barcode part1]
  source 1..16: mol_type = other DNA
ttggcctaataacggc

SEQ ID NO: 12266 - DNA, 16 bp, synthetic construct
  misc_feature 1..16: note = synthetic [barcode part1]
  source 1..16: mol_type = other DNA
gcgtaatacgtcaacc

SEQ ID NO: 12267 - DNA, 16 bp, synthetic construct
  misc_feature 1..16: note = synthetic [barcode part1]
  source 1..16: mol_type = other DNA
gccgtctatagtaggt

SEQ ID NO: 12268 - DNA, 16 bp, synthetic construct
  misc_feature 1..16: note = synthetic [barcode part1]
  source 1..16: mol_type = other DNA
agtcactataggaacg

SEQ ID NO: 12269 - DNA, 16 bp, synthetic construct
  misc_feature 1..16: note = synthetic [barcode part1]
  source 1..16: mol_type = other DNA
gattccaacggtactg

SEQ ID NO: 12270 - DNA, 16 bp, synthetic construct
  misc_feature 1..16: note = synthetic [barcode part1]
  source 1..16: mol_type = other DNA
tgtacgacagacctac

SEQ ID NO: 12271 - DNA, 16 bp, synthetic construct
  misc_feature 1..16: note = synthetic [barcode part1]
  source 1..16: mol_type = other DNA
agagtggacggacttc

SEQ ID NO: 12272 - DNA, 16 bp, synthetic construct
  misc_feature 1..16: note = synthetic [barcode part1]
  source 1..16: mol_type = other DNA
cgattcacgaaggcag

SEQ ID NO: 12273 - DNA, 16 bp, synthetic construct
  misc_feature 1..16: note = synthetic [barcode part1]
  source 1..16: mol_type = other DNA
gaatcgtgtaatccgc

SEQ ID NO: 12274 - DNA, 16 bp, synthetic construct
  misc_feature 1..16: note = synthetic [barcode part1]
  source 1..16: mol_type = other DNA
tgtataggacgtgcct

SEQ ID NO: 12275 - DNA, 16 bp, synthetic construct
  misc_feature 1..16: note = synthetic [barcode part1]
  source 1..16: mol_type = other DNA
tgagatccacacacac

SEQ ID NO: 12276 - DNA, 16 bp, synthetic construct
  misc_feature 1..16: note = synthetic [barcode part1]
  source 1..16: mol_type = other DNA
gcctgcagttgttctg

SEQ ID NO: 12277 - DNA, 16 bp, synthetic construct
  misc_feature 1..16: note = synthetic [barcode part1]
  source 1..16: mol_type = other DNA
gttcttgagtagtcct

SEQ ID NO: 12278 - DNA, 16 bp, synthetic construct
  misc_feature 1..16: note = synthetic [barcode part1]
  source 1..16: mol_type = other DNA
ttgttcagaacctcac

SEQ ID NO: 12279 - DNA, 16 bp, synthetic construct
  misc_feature 1..16: note = synthetic [barcode part1]
  source 1..16: mol_type = other DNA
tcggcaatctatacct

SEQ ID NO: 12280 - DNA, 16 bp, synthetic construct
  misc_feature 1..16: note = synthetic [barcode part1]
  source 1..16: mol_type = other DNA
cgactctattggcgtc

SEQ ID NO: 12281 - DNA, 16 bp, synthetic construct
  misc_feature 1..16: note = synthetic [barcode part1]
  source 1..16: mol_type = other DNA
tagtctgacaagagtg

SEQ ID NO: 12282 - DNA, 16 bp, synthetic construct
  misc_feature 1..16: note = synthetic [barcode part1]
  source 1..16: mol_type = other DNA
tgcaaggcggtaatcg

SEQ ID NO: 12283 - DNA, 16 bp, synthetic construct
  misc_feature 1..16: note = synthetic [barcode part1]
  source 1..16: mol_type = other DNA
tcgcggtctaactaag

SEQ ID NO: 12284 - DNA, 16 bp, synthetic construct
  misc_feature 1..16: note = synthetic [barcode part1]
  source 1..16: mol_type = other DNA
ttaggcggcaacgagt

SEQ ID NO: 12285 - DNA, 16 bp, synthetic construct
  misc_feature 1..16: note = synthetic [barcode part1]
  source 1..16: mol_type = other DNA
gcgtcaatccttagtt

SEQ ID NO: 12286 - DNA, 16 bp, synthetic construct
  misc_feature 1..16: note = synthetic [barcode part1]
  source 1..16: mol_type = other DNA
agactgtcgagaacgc

SEQ ID NO: 12287 - DNA, 16 bp, synthetic construct
  misc_feature 1..16: note = synthetic [barcode part1]
  source 1..16: mol_type = other DNA
tgaccgaaccgattgt

SEQ ID NO: 12288 - DNA, 16 bp, synthetic construct
  misc_feature 1..16: note = synthetic [barcode part1]
  source 1..16: mol_type = other DNA
attgagacgactgtag

SEQ ID NO: 12289 - DNA, 16 bp, synthetic construct
  misc_feature 1..16: note = synthetic [barcode part1]
  source 1..16: mol_type = other DNA
gtgagttgagagttac

SEQ ID NO: 12290 - DNA, 16 bp, synthetic construct
  misc_feature 1..16: note = synthetic [barcode part1]
  source 1..16: mol_type = other DNA
atacctctgtgcctct

SEQ ID NO: 12291 - DNA, 16 bp, synthetic construct
  misc_feature 1..16: note = synthetic [barcode part1]
  source 1..16: mol_type = other DNA
tgattcggcaggaacg

SEQ ID NO: 12292 - DNA, 16 bp, synthetic construct
  misc_feature 1..16: note = synthetic [barcode part1]
  source 1..16: mol_type = other DNA
taacggtgcacaggac

SEQ ID NO: 12293 - DNA, 16 bp, synthetic construct
  misc_feature 1..16: note = synthetic [barcode part1]
  source 1..16: mol_type = other DNA
gtgactaggtccttcc

SEQ ID NO: 12294 - DNA, 16 bp, synthetic construct
  misc_feature 1..16: note = synthetic [barcode part1]
  source 1..16: mol_type = other DNA
tgccgagtaagttgtc

SEQ ID NO: 12295 - DNA, 16 bp, synthetic construct
  misc_feature 1..16: note = synthetic [barcode part1]
  source 1..16: mol_type = other DNA
caacacaggagactgc

SEQ ID NO: 12296 - DNA, 16 bp, synthetic construct
  misc_feature 1..16: note = synthetic [barcode part1]
  source 1..16: mol_type = other DNA
gtaggacgttctactg

SEQ ID NO: 12297 - DNA, 16 bp, synthetic construct
  misc_feature 1..16: note = synthetic [barcode part1]
  source 1..16: mol_type = other DNA
gaacaggcctaagacc

SEQ ID NO: 12298 - DNA, 16 bp, synthetic construct
  misc_feature 1..16: note = synthetic [barcode part1]
  source 1..16: mol_type = other DNA
ttcgccagattatacc

SEQ ID NO: 12299 - DNA, 16 bp, synthetic construct
  misc_feature 1..16: note = synthetic [barcode part1]
  source 1..16: mol_type = other DNA
cagtcaatagtgccac

SEQ ID NO: 12300 - DNA, 16 bp, synthetic construct
  misc_feature 1..16: note = synthetic [barcode part1]
  source 1..16: mol_type = other DNA
tggtactctattcacg

SEQ ID NO: 12301 - DNA, 16 bp, synthetic construct
  misc_feature 1..16: note = synthetic [barcode part1]
  source 1..16: mol_type = other DNA
gtcttgaatacgcacg

SEQ ID NO: 12302 - DNA, 16 bp, synthetic construct
  misc_feature 1..16: note = synthetic [barcode part1]
  source 1..16: mol_type = other DNA
tattcggtctccggtg

SEQ ID NO: 12303 - DNA, 16 bp, synthetic construct
  misc_feature 1..16: note = synthetic [barcode part1]
  source 1..16: mol_type = other DNA
tccgcacgtcgttagt

SEQ ID NO: 12304 - DNA, 16 bp, synthetic construct
  misc_feature 1..16: note = synthetic [barcode part1]
  source 1..16: mol_type = other DNA
agatcgcgtgatctgt

SEQ ID NO: 12305 - DNA, 16 bp, synthetic construct
  misc_feature 1..16: note = synthetic [barcode part1]
  source 1..16: mol_type = other DNA
acgccgttctatccag

SEQ ID NO: 12306 - DNA, 16 bp, synthetic construct
  misc_feature 1..16: note = synthetic [barcode part1]
  source 1..16: mol_type = other DNA
tacttgtagtgtcacc

SEQ ID NO: 12307 - DNA, 16 bp, synthetic construct
  misc_feature 1..16: note = synthetic [barcode part1]
  source 1..16: mol_type = other DNA
cagtaggcagacactg

SEQ ID NO: 12308 - DNA, 16 bp, synthetic construct
  misc_feature 1..16: note = synthetic [barcode part1]
  source 1..16: mol_type = other DNA
ttatctcagttacgcg

SEQ ID NO: 12309 - DNA, 16 bp, synthetic construct
  misc_feature 1..16: note = synthetic [barcode part1]
  source 1..16: mol_type = other DNA
tacctcggtgatagac

SEQ ID NO: 12310 - DNA, 16 bp, synthetic construct
  misc_feature 1..16: note = synthetic [barcode part1]
  source 1..16: mol_type = other DNA
tacctcgtctactgtc

SEQ ID NO: 12311 - DNA, 16 bp, synthetic construct
  misc_feature 1..16: note = synthetic [barcode part1]
  source 1..16: mol_type = other DNA
tctgttgtcgagtact

SEQ ID NO: 12312 - DNA, 16 bp, synthetic construct
  misc_feature 1..16: note = synthetic [barcode part1]
  source 1..16: mol_type = other DNA
cactctcgtcgaactg

SEQ ID NO: 12313 - DNA, 16 bp, synthetic construct
  misc_feature 1..16: note = synthetic [barcode part1]
  source 1..16: mol_type = other DNA
cgtgcctcagactact

SEQ ID NO: 12314 - DNA, 16 bp, synthetic construct
  misc_feature 1..16: note = synthetic [barcode part1]
  source 1..16: mol_type = other DNA
taggtcgcgcaagagt

SEQ ID NO: 12315 - DNA, 16 bp, synthetic construct
  misc_feature 1..16: note = synthetic [barcode part1]
  source 1..16: mol_type = other DNA
aggtggtgtacaaccg

SEQ ID NO: 12316 - DNA, 16 bp, synthetic construct
  misc_feature 1..16: note = synthetic [barcode part1]
  source 1..16: mol_type = other DNA
cgtcaggtattagacc

SEQ ID NO: 12317 - DNA, 16 bp, synthetic construct
  misc_feature 1..16: note = synthetic [barcode part1]
  source 1..16: mol_type = other DNA
actcggatcgtagact

SEQ ID NO: 12318 - DNA, 16 bp, synthetic construct
  misc_feature 1..16: note = synthetic [barcode part1]
  source 1..16: mol_type = other DNA
ttgcagagtaggacgc

SEQ ID NO: 12319 - DNA, 16 bp, synthetic construct
  misc_feature 1..16: note = synthetic [barcode part1]
  source 1..16: mol_type = other DNA
tggagttggaaccttc

SEQ ID NO: 12320 - DNA, 16 bp, synthetic construct
  misc_feature 1..16: note = synthetic [barcode part1]
  source 1..16: mol_type = other DNA
gtccacgactaaggag

SEQ ID NO: 12321 - DNA, 16 bp, synthetic construct
  misc_feature 1..16: note = synthetic [barcode part1]
  source 1..16: mol_type = other DNA
ttcctcttacacacgc

SEQ ID NO: 12322 - DNA, 16 bp, synthetic construct
  misc_feature 1..16: note = synthetic [barcode part1]
  source 1..16: mol_type = other DNA
gcaagtgtgccgtaag

SEQ ID NO: 12323 - DNA, 16 bp, synthetic construct
  misc_feature 1..16: note = synthetic [barcode part1]
  source 1..16: mol_type = other DNA
atacgtgcggtgttac

SEQ ID NO: 12324 - DNA, 16 bp, synthetic construct
  misc_feature 1..16: note = synthetic [barcode part1]
  source 1..16: mol_type = other DNA
gaagtgagaactcact

SEQ ID NO: 12325 - DNA, 16 bp, synthetic construct
  misc_feature 1..16: note = synthetic [barcode part1]
  source 1..16: mol_type = other DNA
actgcggtctatccac

SEQ ID NO: 12326 - DNA, 16 bp, synthetic construct
  misc_feature 1..16: note = synthetic [barcode part1]
  source 1..16: mol_type = other DNA
gcggattcaataaggt

SEQ ID NO: 12327 - DNA, 16 bp, synthetic construct
  misc_feature 1..16: note = synthetic [barcode part1]
  source 1..16: mol_type = other DNA
agttgacgtcagtcac

SEQ ID NO: 12328 - DNA, 16 bp, synthetic construct
  misc_feature 1..16: note = synthetic [barcode part1]
  source 1..16: mol_type = other DNA
gcagaggaattcaact

SEQ ID NO: 12329 - DNA, 16 bp, synthetic construct
  misc_feature 1..16: note = synthetic [barcode part1]
  source 1..16: mol_type = other DNA
cgcctattctagaatc

SEQ ID NO: 12330 - DNA, 16 bp, synthetic construct
  misc_feature 1..16: note = synthetic [barcode part1]
  source 1..16: mol_type = other DNA
gacgtatatacaccgc

SEQ ID NO: 12331 - DNA, 16 bp, synthetic construct
  misc_feature 1..16: note = synthetic [barcode part1]
  source 1..16: mol_type = other DNA
ttgtgtggttggtgtg

SEQ ID NO: 12332 - DNA, 16 bp, synthetic construct
  misc_feature 1..16: note = synthetic [barcode part1]
  source 1..16: mol_type = other DNA
acaatcgcctcttggc

SEQ ID NO: 12333 - DNA, 16 bp, synthetic construct
  misc_feature 1..16: note = synthetic [barcode part1]
  source 1..16: mol_type = other DNA
cacagagtcggatcag

SEQ ID NO: 12334 - DNA, 16 bp, synthetic construct
  misc_feature 1..16: note = synthetic [barcode part1]
  source 1..16: mol_type = other DNA
tactggattgtacctc

SEQ ID NO: 12335 - DNA, 16 bp, synthetic construct
  misc_feature 1..16: note = synthetic [barcode part1]
  source 1..16: mol_type = other DNA
agacttgtattctgcc

SEQ ID NO: 12336 - DNA, 16 bp, synthetic construct
  misc_feature 1..16: note = synthetic [barcode part1]
  source 1..16: mol_type = other DNA
gacttaagtgtctcct

SEQ ID NO: 12337 - DNA, 16 bp, synthetic construct
  misc_feature 1..16: note = synthetic [barcode part1]
  source 1..16: mol_type = other DNA
accttgcgatatactc

SEQ ID NO: 12338 - DNA, 16 bp, synthetic construct
  misc_feature 1..16: note = synthetic [barcode part1]
  source 1..16: mol_type = other DNA
gcaactagaaggattc

SEQ ID NO: 12339 - DNA, 16 bp, synthetic construct
  misc_feature 1..16: note = synthetic [barcode part1]
  source 1..16: mol_type = other DNA
tacgaattccaggcgt

SEQ ID NO: 12340 - DNA, 16 bp, synthetic construct
  misc_feature 1..16: note = synthetic [barcode part1]
  source 1..16: mol_type = other DNA
cctccaaccaattctc

SEQ ID NO: 12341 - DNA, 16 bp, synthetic construct
  misc_feature 1..16: note = synthetic [barcode part1]
  source 1..16: mol_type = other DNA
tcagagttgagactcc

SEQ ID NO: 12342 - DNA, 16 bp, synthetic construct
  misc_feature 1..16: note = synthetic [barcode part1]
  source 1..16: mol_type = other DNA
cgagaagagttccttc

SEQ ID NO: 12343 - DNA, 16 bp, synthetic construct
  misc_feature 1..16: note = synthetic [barcode part1]
  source 1..16: mol_type = other DNA
atccaggactccgtct

SEQ ID NO: 12344 - DNA, 16 bp, synthetic construct
  misc_feature 1..16: note = synthetic [barcode part1]
  source 1..16: mol_type = other DNA
ttggacacctgaacac

SEQ ID NO: 12345 - DNA, 16 bp, synthetic construct
  misc_feature 1..16: note = synthetic [barcode part1]
  source 1..16: mol_type = other DNA
acgaatctggcaggac

SEQ ID NO: 12346 - DNA, 16 bp, synthetic construct
  misc_feature 1..16: note = synthetic [barcode part1]
  source 1..16: mol_type = other DNA
ttggtccacgaagtac

SEQ ID NO: 12347 - DNA, 16 bp, synthetic construct
  misc_feature 1..16: note = synthetic [barcode part1]
  source 1..16: mol_type = other DNA
aactcagtggtagtcc

SEQ ID NO: 12348 - DNA, 16 bp, synthetic construct
  misc_feature 1..16: note = synthetic [barcode part1]
  source 1..16: mol_type = other DNA
cgagtaccgtactagt

SEQ ID NO: 12349 - DNA, 16 bp, synthetic construct
  misc_feature 1..16: note = synthetic [barcode part1]
  source 1..16: mol_type = other DNA
tacgatcctaggtgtg

SEQ ID NO: 12350 - DNA, 16 bp, synthetic construct
  misc_feature 1..16: note = synthetic [barcode part1]
  source 1..16: mol_type = other DNA
gccagacagacgtaac

SEQ ID NO: 12351 - DNA, 16 bp, synthetic construct
  misc_feature 1..16: note = synthetic [barcode part1]
  source 1..16: mol_type = other DNA
acgatcggtgttgact

SEQ ID NO: 12352 - DNA, 16 bp, synthetic construct
  misc_feature 1..16: note = synthetic [barcode part1]
  source 1..16: mol_type = other DNA
aatcgaacgtcctacg

SEQ ID NO: 12353 - DNA, 16 bp, synthetic construct
  misc_feature 1..16: note = synthetic [barcode part1]
  source 1..16: mol_type = other DNA
tgcgcaacaccttatt

SEQ ID NO: 12354 - DNA, 16 bp, synthetic construct
  misc_feature 1..16: note = synthetic [barcode part1]
  source 1..16: mol_type = other DNA
gactcgattggtgact

SEQ ID NO: 12355 - DNA, 16 bp, synthetic construct
  misc_feature 1..16: note = synthetic [barcode part1]
  source 1..16: mol_type = other DNA
aacgacgcaggataag

SEQ ID NO: 12356 - DNA, 16 bp, synthetic construct
  misc_feature 1..16: note = synthetic [barcode part1]
  source 1..16: mol_type = other DNA
gatatacctggaaggt

SEQ ID NO: 12357 - DNA, 16 bp, synthetic construct
  misc_feature 1..16: note = synthetic [barcode part1]
  source 1..16: mol_type = other DNA
ttagagaggtctgtag

SEQ ID NO: 12358 - DNA, 16 bp, synthetic construct
  misc_feature 1..16: note = synthetic [barcode part1]
  source 1..16: mol_type = other DNA
cgtgacagtagacggt

SEQ ID NO: 12359 - DNA, 16 bp, synthetic construct
  misc_feature 1..16: note = synthetic [barcode part1]
  source 1..16: mol_type = other DNA
tacaaccgccgtcttg

SEQ ID NO: 12360 - DNA, 16 bp, synthetic construct
  misc_feature 1..16: note = synthetic [barcode part1]
  source 1..16: mol_type = other DNA
gactaatctgaggcct

SEQ ID NO: 12361 - DNA, 16 bp, synthetic construct
  misc_feature 1..16: note = synthetic [barcode part1]
  source 1..16: mol_type = other DNA
ccagaacacgagtggt

SEQ ID NO: 12362 - DNA, 16 bp, synthetic construct
  misc_feature 1..16: note = synthetic [barcode part1]
  source 1..16: mol_type = other DNA
aatatcttgttccgcg

SEQ ID NO: 12363 - DNA, 16 bp, synthetic construct
  misc_feature 1..16: note = synthetic [barcode part1]
  source 1..16: mol_type = other DNA
acgaggaaccgtcaac

SEQ ID NO: 12364 - DNA, 16 bp, synthetic construct
  misc_feature 1..16: note = synthetic [barcode part1]
  source 1..16: mol_type = other DNA
tccgtattcggcaatt

SEQ ID NO: 12365 - DNA, 16 bp, synthetic construct
  misc_feature 1..16: note = synthetic [barcode part1]
  source 1..16: mol_type = other DNA
gcacaaggaaccactg

SEQ ID NO: 12366 - DNA, 16 bp, synthetic construct
  misc_feature 1..16: note = synthetic [barcode part1]
  source 1..16: mol_type = other DNA
gccgcaactatagtac

SEQ ID NO: 12367 - DNA, 16 bp, synthetic construct
  misc_feature 1..16: note = synthetic [barcode part1]
  source 1..16: mol_type = other DNA
gtggagacgacaatcc

SEQ ID NO: 12368 - DNA, 16 bp, synthetic construct
  misc_feature 1..16: note = synthetic [barcode part1]
  source 1..16: mol_type = other DNA
ccgaacctcttcacag

SEQ ID NO: 12369 - DNA, 16 bp, synthetic construct
  misc_feature 1..16: note = synthetic [barcode part1]
  source 1..16: mol_type = other DNA
caccagaatctggtgt

SEQ ID NO: 12370 - DNA, 16 bp, synthetic construct
  misc_feature 1..16: note = synthetic [barcode part1]
  source 1..16: mol_type = other DNA
tagtacgtcagtgcac

SEQ ID NO: 12371 - DNA, 16 bp, synthetic construct
  misc_feature 1..16: note = synthetic [barcode part1]
  source 1..16: mol_type = other DNA
caggacagtagttgcg

SEQ ID NO: 12372 - DNA, 16 bp, synthetic construct
  misc_feature 1..16: note = synthetic [barcode part1]
  source 1..16: mol_type = other DNA
aaccgtaggttaagac

SEQ ID NO: 12373 - DNA, 16 bp, synthetic construct
  misc_feature 1..16: note = synthetic [barcode part1]
  source 1..16: mol_type = other DNA
aggaggcgtctaggtt

SEQ ID NO: 12374 - DNA, 16 bp, synthetic construct
  misc_feature 1..16: note = synthetic [barcode part1]
  source 1..16: mol_type = other DNA
accagaggttaatacg

SEQ ID NO: 12375 - DNA, 16 bp, synthetic construct
  misc_feature 1..16: note = synthetic [barcode part1]
  source 1..16: mol_type = other DNA
gtgaaggcggtagttc

SEQ ID NO: 12376 - DNA, 16 bp, synthetic construct
  misc_feature 1..16: note = synthetic [barcode part1]
  source 1..16: mol_type = other DNA
agtaccgcaatcgact

SEQ ID NO: 12377 - DNA, 16 bp, synthetic construct
  misc_feature 1..16: note = synthetic [barcode part1]
  source 1..16: mol_type = other DNA
gttcctggcaatctgc

SEQ ID NO: 12378 - DNA, 16 bp, synthetic construct
  misc_feature 1..16: note = synthetic [barcode part1]
  source 1..16: mol_type = other DNA
cctgcactgatctggt

SEQ ID NO: 12379 - DNA, 16 bp, synthetic construct
  misc_feature 1..16: note = synthetic [barcode part1]
  source 1..16: mol_type = other DNA
tacaggcctacggatt

SEQ ID NO: 12380 - DNA, 16 bp, synthetic construct
  misc_feature 1..16: note = synthetic [barcode part1]
  source 1..16: mol_type = other DNA
gactaacgaagtctcc

SEQ ID NO: 12381 - DNA, 16 bp, synthetic construct
  misc_feature 1..16: note = synthetic [barcode part1]
  source 1..16: mol_type = other DNA
ccaatacgttagtgcg

SEQ ID NO: 12382 - DNA, 16 bp, synthetic construct
  misc_feature 1..16: note = synthetic [barcode part1]
  source 1..16: mol_type = other DNA
tgagtggcgagattcg

SEQ ID NO: 12383 - DNA, 16 bp, synthetic construct
  misc_feature 1..16: note = synthetic [barcode part1]
  source 1..16: mol_type = other DNA
ccaactctcgtacgac

SEQ ID NO: 12384 - DNA, 16 bp, synthetic construct
  misc_feature 1..16: note = synthetic [barcode part1]
  source 1..16: mol_type = other DNA
ttgaagtcctatccgt

SEQ ID NO: 12385 - DNA, 16 bp, synthetic construct
  misc_feature 1..16: note = synthetic [barcode part1]
  source 1..16: mol_type = other DNA
tcaatatcgcgcagtg

SEQ ID NO: 12386 - DNA, 16 bp, synthetic construct
  misc_feature 1..16: note = synthetic [barcode part1]
  source 1..16: mol_type = other DNA
atacgactctcaactc

SEQ ID NO: 12387 - DNA, 16 bp, synthetic construct
  misc_feature 1..16: note = synthetic [barcode part1]
  source 1..16: mol_type = other DNA
aggaccacgtaagtcg

SEQ ID NO: 12388 - DNA, 16 bp, synthetic construct
  misc_feature 1..16: note = synthetic [barcode part1]
  source 1..16: mol_type = other DNA
acgcaataactccttc

SEQ ID NO: 12389 - DNA, 16 bp, synthetic construct
  misc_feature 1..16: note = synthetic [barcode part1]
  source 1..16: mol_type = other DNA
taggtacgttgagaac

SEQ ID NO: 12390 - DNA, 16 bp, synthetic construct
  misc_feature 1..16: note = synthetic [barcode part1]
  source 1..16: mol_type = other DNA
tctgaacagtgtaccg

SEQ ID NO: 12391 - DNA, 16 bp, synthetic construct
  misc_feature 1..16: note = synthetic [barcode part1]
  source 1..16: mol_type = other DNA
gacggttgactgttgt

SEQ ID NO: 12392 - DNA, 16 bp, synthetic construct
  misc_feature 1..16: note = synthetic [barcode part1]
  source 1..16: mol_type = other DNA
aggacggtaaggtagt

SEQ ID NO: 12393 - DNA, 16 bp, synthetic construct
  misc_feature 1..16: note = synthetic [barcode part1]
  source 1..16: mol_type = other DNA
aggaatacgaactacc

SEQ ID NO: 12394 - DNA, 16 bp, synthetic construct
  misc_feature 1..16: note = synthetic [barcode part1]
  source 1..16: mol_type = other DNA
ttggttgtcttcctcg

SEQ ID NO: 12395 - DNA, 16 bp, synthetic construct
  misc_feature 1..16: note = synthetic [barcode part1]
  source 1..16: mol_type = other DNA
gcggccagtatattgt

SEQ ID NO: 12396 - DNA, 16 bp, synthetic construct
  misc_feature 1..16: note = synthetic [barcode part1]
  source 1..16: mol_type = other DNA
tctccttcaataccgc

SEQ ID NO: 12397 - DNA, 16 bp, synthetic construct
  misc_feature 1..16: note = synthetic [barcode part1]
  source 1..16: mol_type = other DNA
gacgttgtgcaacact

SEQ ID NO: 12398 - DNA, 16 bp, synthetic construct
  misc_feature 1..16: note = synthetic [barcode part1]
  source 1..16: mol_type = other DNA
acggttaactaacgcc

SEQ ID NO: 12399 - DNA, 16 bp, synthetic construct
  misc_feature 1..16: note = synthetic [barcode part1]
  source 1..16: mol_type = other DNA
atcagactgttctcac

SEQ ID NO: 12400 - DNA, 16 bp, synthetic construct
  misc_feature 1..16: note = synthetic [barcode part1]
  source 1..16: mol_type = other DNA
aacacgttgacgtacc

SEQ ID NO: 12401 - DNA, 16 bp, synthetic construct
  misc_feature 1..16: note = synthetic [barcode part1]
  source 1..16: mol_type = other DNA
gagtaccggcaggatt

SEQ ID NO: 12402 - DNA, 16 bp, synthetic construct
  misc_feature 1..16: note = synthetic [barcode part1]
  source 1..16: mol_type = other DNA
taacgcgaagaatcgt

SEQ ID NO: 12403 - DNA, 16 bp, synthetic construct
  misc_feature 1..16: note = synthetic [barcode part1]
  source 1..16: mol_type = other DNA
agataaccggtctctg

SEQ ID NO: 12404 - DNA, 16 bp, synthetic construct
  misc_feature 1..16: note = synthetic [barcode part1]
  source 1..16: mol_type = other DNA
gataccaacgtcgtac

SEQ ID NO: 12405 - DNA, 16 bp, synthetic construct
  misc_feature 1..16: note = synthetic [barcode part1]
  source 1..16: mol_type = other DNA
caacacacctccgatc

SEQ ID NO: 12406 - DNA, 16 bp, synthetic construct
  misc_feature 1..16: note = synthetic [barcode part1]
  source 1..16: mol_type = other DNA
tcttggaaggtaagtg

SEQ ID NO: 12407 - DNA, 16 bp, synthetic construct
  misc_feature 1..16: note = synthetic [barcode part1]
  source 1..16: mol_type = other DNA
aactgcacaacacgtc

SEQ ID NO: 12408 - DNA, 16 bp, synthetic construct
  misc_feature 1..16: note = synthetic [barcode part1]
  source 1..16: mol_type = other DNA
tgacaacgaggtgcac

SEQ ID NO: 12409 - DNA, 16 bp, synthetic construct
  misc_feature 1..16: note = synthetic [barcode part1]
  source 1..16: mol_type = other DNA
acctacctcgtctatc

SEQ ID NO: 12410 - DNA, 16 bp, synthetic construct
  misc_feature 1..16: note = synthetic [barcode part1]
  source 1..16: mol_type = other DNA
actgaggccaattctg

SEQ ID NO: 12411 - DNA, 16 bp, synthetic construct
  misc_feature 1..16: note = synthetic [barcode part1]
  source 1..16: mol_type = other DNA
gtgaaccgttgcctct

SEQ ID NO: 12412 - DNA, 16 bp, synthetic construct
  misc_feature 1..16: note = synthetic [barcode part1]
  source 1..16: mol_type = other DNA
taaggttatcggccgt

SEQ ID NO: 12413 - DNA, 16 bp, synthetic construct
  misc_feature 1..16: note = synthetic [barcode part1]
  source 1..16: mol_type = other DNA
cctcacactgacaacc

SEQ ID NO: 12414 - DNA, 16 bp, synthetic construct
  misc_feature 1..16: note = synthetic [barcode part1]
  source 1..16: mol_type = other DNA
taagtatcttccgacc

SEQ ID NO: 12415 - DNA, 16 bp, synthetic construct
  misc_feature 1..16: note = synthetic [barcode part1]
  source 1..16: mol_type = other DNA
tcagtgttggtgtgtg

SEQ ID NO: 12416 - DNA, 16 bp, synthetic construct
  misc_feature 1..16: note = synthetic [barcode part1]
  source 1..16: mol_type = other DNA
tcctaccacggattcg

SEQ ID NO: 12417 - DNA, 16 bp, synthetic construct
  misc_feature 1..16: note = synthetic [barcode part1]
  source 1..16: mol_type = other DNA
aaccttccttcaccgt

SEQ ID NO: 12418 - DNA, 16 bp, synthetic construct
  misc_feature 1..16: note = synthetic [barcode part1]
  source 1..16: mol_type = other DNA
cacgacacgaacgagt

SEQ ID NO: 12419 - DNA, 16 bp, synthetic construct
  misc_feature 1..16: note = synthetic [barcode part1]
  source 1..16: mol_type = other DNA
accttgaatacgtgcg

SEQ ID NO: 12420 - DNA, 16 bp, synthetic construct
  misc_feature 1..16: note = synthetic [barcode part1]
  source 1..16: mol_type = other DNA
aacctgttgaagtgag

SEQ ID NO: 12421 - DNA, 16 bp, synthetic construct
  misc_feature 1..16: note = synthetic [barcode part1]
  source 1..16: mol_type = other DNA
cgccactagtagtagt

SEQ ID NO: 12422 - DNA, 16 bp, synthetic construct
  misc_feature 1..16: note = synthetic [barcode part1]
  source 1..16: mol_type = other DNA
taacaagaggtctgtg

SEQ ID NO: 12423 - DNA, 16 bp, synthetic construct
  misc_feature 1..16: note = synthetic [barcode part1]
  source 1..16: mol_type = other DNA
gtgtgactgacacact

SEQ ID NO: 12424 - DNA, 16 bp, synthetic construct
  misc_feature 1..16: note = synthetic [barcode part1]
  source 1..16: mol_type = other DNA
taatccttctctcggc

SEQ ID NO: 12425 - DNA, 16 bp, synthetic construct
  misc_feature 1..16: note = synthetic [barcode part1]
  source 1..16: mol_type = other DNA
tagagtcacacgtgtc

SEQ ID NO: 12426 - DNA, 16 bp, synthetic construct
  misc_feature 1..16: note = synthetic [barcode part1]
  source 1..16: mol_type = other DNA
gttaattacacgcgcg

SEQ ID NO: 12427 - DNA, 16 bp, synthetic construct
  misc_feature 1..16: note = synthetic [barcode part1]
  source 1..16: mol_type = other DNA
gaccggttagttaacc

SEQ ID NO: 12428 - DNA, 16 bp, synthetic construct
  misc_feature 1..16: note = synthetic [barcode part1]
  source 1..16: mol_type = other DNA
tcaattcagaccggac

SEQ ID NO: 12429 - DNA, 16 bp, synthetic construct
  misc_feature 1..16: note = synthetic [barcode part1]
  source 1..16: mol_type = other DNA
acaacaaggacacttg

SEQ ID NO: 12430 - DNA, 16 bp, synthetic construct
  misc_feature 1..16: note = synthetic [barcode part1]
  source 1..16: mol_type = other DNA
cggtacctgtctgttg

SEQ ID NO: 12431 - DNA, 16 bp, synthetic construct
  misc_feature 1..16: note = synthetic [barcode part1]
  source 1..16: mol_type = other DNA
acaatccgttcgacag

SEQ ID NO: 12432 - DNA, 16 bp, synthetic construct
  misc_feature 1..16: note = synthetic [barcode part1]
  source 1..16: mol_type = other DNA
aactcggattgccagt

SEQ ID NO: 12433 - DNA, 16 bp, synthetic construct
  misc_feature 1..16: note = synthetic [barcode part1]
  source 1..16: mol_type = other DNA
tatcaccaacgcactt

SEQ ID NO: 12434 - DNA, 16 bp, synthetic construct
  misc_feature 1..16: note = synthetic [barcode part1]
  source 1..16: mol_type = other DNA
gactcgatataggagt

SEQ ID NO: 12435 - DNA, 16 bp, synthetic construct
  misc_feature 1..16: note = synthetic [barcode part1]
  source 1..16: mol_type = other DNA
ataggaagtcgagttc

SEQ ID NO: 12436 - DNA, 16 bp, synthetic construct
  misc_feature 1..16: note = synthetic [barcode part1]
  source 1..16: mol_type = other DNA
cgtgtgaagacgtctt

SEQ ID NO: 12437 - DNA, 16 bp, synthetic construct
  misc_feature 1..16: note = synthetic [barcode part1]
  source 1..16: mol_type = other DNA
tggcaccaacggatag

SEQ ID NO: 12438 - DNA, 16 bp, synthetic construct
  misc_feature 1..16: note = synthetic [barcode part1]
  source 1..16: mol_type = other DNA
cctcgcaactactggt

SEQ ID NO: 12439 - DNA, 16 bp, synthetic construct
  misc_feature 1..16: note = synthetic [barcode part1]
  source 1..16: mol_type = other DNA
caggactacacgtact

SEQ ID NO: 12440 - DNA, 16 bp, synthetic construct
  misc_feature 1..16: note = synthetic [barcode part1]
  source 1..16: mol_type = other DNA
aaccgtggtgccaatt

SEQ ID NO: 12441 - DNA, 16 bp, synthetic construct
  misc_feature 1..16: note = synthetic [barcode part1]
  source 1..16: mol_type = other DNA
cgatcttacgtgccgt

SEQ ID NO: 12442 - DNA, 16 bp, synthetic construct
  misc_feature 1..16: note = synthetic [barcode part1]
  source 1..16: mol_type = other DNA
tgtggcgtatcacaac

SEQ ID NO: 12443 - DNA, 16 bp, synthetic construct
  misc_feature 1..16: note = synthetic [barcode part1]
  source 1..16: mol_type = other DNA
gactcagtcgacgatt

SEQ ID NO: 12444 - DNA, 16 bp, synthetic construct
  misc_feature 1..16: note = synthetic [barcode part1]
  source 1..16: mol_type = other DNA
tcacggatcgttactt

SEQ ID NO: 12445 - DNA, 16 bp, synthetic construct
  misc_feature 1..16: note = synthetic [barcode part1]
  source 1..16: mol_type = other DNA
actggcggtgattatc

SEQ ID NO: 12446 - DNA, 16 bp, synthetic construct
  misc_feature 1..16: note = synthetic [barcode part1]
  source 1..16: mol_type = other DNA
tgcgttatcaaccttg

SEQ ID NO: 12447 - DNA, 16 bp, synthetic construct
  misc_feature 1..16: note = synthetic [barcode part1]
  source 1..16: mol_type = other DNA
ttacttggtggtactc

SEQ ID NO: 12448 - DNA, 16 bp, synthetic construct
  misc_feature 1..16: note = synthetic [barcode part1]
  source 1..16: mol_type = other DNA
tggtaggataagtctg

SEQ ID NO: 12449 - DNA, 16 bp, synthetic construct
  misc_feature 1..16: note = synthetic [barcode part1]
  source 1..16: mol_type = other DNA
attacttgcggcaggt

SEQ ID NO: 12450 - DNA, 16 bp, synthetic construct
  misc_feature 1..16: note = synthetic [barcode part1]
  source 1..16: mol_type = other DNA
acacctaacctcgtcg

SEQ ID NO: 12451 - DNA, 16 bp, synthetic construct
  misc_feature 1..16: note = synthetic [barcode part1]
  source 1..16: mol_type = other DNA
actactgatcggatcg

SEQ ID NO: 12452 - DNA, 16 bp, synthetic construct
  misc_feature 1..16: note = synthetic [barcode part1]
  source 1..16: mol_type = other DNA
taaccgagaccaactc

SEQ ID NO: 12453 - DNA, 16 bp, synthetic construct
  misc_feature 1..16: note = synthetic [barcode part1]
  source 1..16: mol_type = other DNA
aagattgaatcgcgtg

SEQ ID NO: 12454 - DNA, 16 bp, synthetic construct
  misc_feature 1..16: note = synthetic [barcode part1]
  source 1..16: mol_type = other DNA
ccttcacgaatcgtcg

SEQ ID NO: 12455 - DNA, 16 bp, synthetic construct
  misc_feature 1..16: note = synthetic [barcode part1]
  source 1..16: mol_type = other DNA
acagtctgcgagaacg

SEQ ID NO: 12456 - DNA, 16 bp, synthetic construct
  misc_feature 1..16: note = synthetic [barcode part1]
  source 1..16: mol_type = other DNA
tgccgaacctgtgtct

SEQ ID NO: 12457 - DNA, 16 bp, synthetic construct
  misc_feature 1..16: note = synthetic [barcode part1]
  source 1..16: mol_type = other DNA
ccgttataccttgcct

SEQ ID NO: 12458 - DNA, 16 bp, synthetic construct
  misc_feature 1..16: note = synthetic [barcode part1]
  source 1..16: mol_type = other DNA
gcacagttgacacgtt

SEQ ID NO: 12459 - DNA, 16 bp, synthetic construct
  misc_feature 1..16: note = synthetic [barcode part1]
  source 1..16: mol_type = other DNA
gttgagtgacagttcc

SEQ ID NO: 12460 - DNA, 16 bp, synthetic construct
  misc_feature 1..16: note = synthetic [barcode part1]
  source 1..16: mol_type = other DNA
tacgtgatatctcgtc

SEQ ID NO: 12461 - DNA, 16 bp, synthetic construct
  misc_feature 1..16: note = synthetic [barcode part1]
  source 1..16: mol_type = other DNA
gagtatcctcgagtac

SEQ ID NO: 12462 - DNA, 16 bp, synthetic construct
  misc_feature 1..16: note = synthetic [barcode part1]
  source 1..16: mol_type = other DNA
ataggaggactatcgt

SEQ ID NO: 12463 - DNA, 16 bp, synthetic construct
  misc_feature 1..16: note = synthetic [barcode part1]
  source 1..16: mol_type = other DNA
gtgcagttgtgcaact

SEQ ID NO: 12464 - DNA, 16 bp, synthetic construct
  misc_feature 1..16: note = synthetic [barcode part1]
  source 1..16: mol_type = other DNA
ttacaggtctggcctc

SEQ ID NO: 12465 - DNA, 16 bp, synthetic construct
  misc_feature 1..16: note = synthetic [barcode part1]
  source 1..16: mol_type = other DNA
aggacaacacttaggt

SEQ ID NO: 12466 - DNA, 16 bp, synthetic construct
  misc_feature 1..16: note = synthetic [barcode part1]
  source 1..16: mol_type = other DNA
gttaggcagtataggt

SEQ ID NO: 12467 - DNA, 16 bp, synthetic construct
  misc_feature 1..16: note = synthetic [barcode part1]
  source 1..16: mol_type = other DNA
cacacaattcggcctc

SEQ ID NO: 12468 - DNA, 16 bp, synthetic construct
  misc_feature 1..16: note = synthetic [barcode part1]
  source 1..16: mol_type = other DNA
tccgaccaatcaaggt

SEQ ID NO: 12469 - DNA, 16 bp, synthetic construct
  misc_feature 1..16: note = synthetic [barcode part1]
  source 1..16: mol_type = other DNA
gttacttctgcggacc

SEQ ID NO: 12470 - DNA, 16 bp, synthetic construct
  misc_feature 1..16: note = synthetic [barcode part1]
  source 1..16: mol_type = other DNA
agtgagattccgtcgt

SEQ ID NO: 12471 - DNA, 16 bp, synthetic construct
  misc_feature 1..16: note = synthetic [barcode part1]
  source 1..16: mol_type = other DNA
caggtgtaacctacgt

SEQ ID NO: 12472 - DNA, 16 bp, synthetic construct
  misc_feature 1..16: note = synthetic [barcode part1]
  source 1..16: mol_type = other DNA
cagagtcgtacgtgtt

SEQ ID NO: 12473 - DNA, 16 bp, synthetic construct
  misc_feature 1..16: note = synthetic [barcode part1]
  source 1..16: mol_type = other DNA
ataacaggacacgttg

SEQ ID NO: 12474 - DNA, 16 bp, synthetic construct
  misc_feature 1..16: note = synthetic [barcode part1]
  source 1..16: mol_type = other DNA
acgataagtccaggcg

SEQ ID NO: 12475 - DNA, 16 bp, synthetic construct
  misc_feature 1..16: note = synthetic [barcode part1]
  source 1..16: mol_type = other DNA
tctaaccagaaggcct

SEQ ID NO: 12476 - DNA, 16 bp, synthetic construct
  misc_feature 1..16: note = synthetic [barcode part1]
  source 1..16: mol_type = other DNA
tacgacaaggtaagtc

SEQ ID NO: 12477 - DNA, 16 bp, synthetic construct
  misc_feature 1..16: note = synthetic [barcode part1]
  source 1..16: mol_type = other DNA
tccgaattaaggagtg

SEQ ID NO: 12478 - DNA, 16 bp, synthetic construct
  misc_feature 1..16: note = synthetic [barcode part1]
  source 1..16: mol_type = other DNA
cggactggaggtatac

SEQ ID NO: 12479 - DNA, 16 bp, synthetic construct
  misc_feature 1..16: note = synthetic [barcode part1]
  source 1..16: mol_type = other DNA
tagaccgcgacttagt

SEQ ID NO: 12480 - DNA, 16 bp, synthetic construct
  misc_feature 1..16: note = synthetic [barcode part1]
  source 1..16: mol_type = other DNA
tgtgtcaaccaacacg

SEQ ID NO: 12481 - DNA, 16 bp, synthetic construct
  misc_feature 1..16: note = synthetic [barcode part1]
  source 1..16: mol_type = other DNA
attcgccaagttccgc

SEQ ID NO: 12482 - DNA, 16 bp, synthetic construct
  misc_feature 1..16: note = synthetic [barcode part1]
  source 1..16: mol_type = other DNA
gtcgcactgtatcaag

SEQ ID NO: 12483 - DNA, 16 bp, synthetic construct
  misc_feature 1..16: note = synthetic [barcode part1]
  source 1..16: mol_type = other DNA
tcttgaggcaacgttg

SEQ ID NO: 12484 - DNA, 16 bp, synthetic construct
  misc_feature 1..16: note = synthetic [barcode part1]
  source 1..16: mol_type = other DNA
gagttattcacgtcct

SEQ ID NO: 12485 - DNA, 16 bp, synthetic construct
  misc_feature 1..16: note = synthetic [barcode part1]
  source 1..16: mol_type = other DNA
gcggcaggaatatctg

SEQ ID NO: 12486 - DNA, 16 bp, synthetic construct
  misc_feature 1..16: note = synthetic [barcode part1]
  source 1..16: mol_type = other DNA
agtattaactgcggcc

SEQ ID NO: 12487 - DNA, 16 bp, synthetic construct
  misc_feature 1..16: note = synthetic [barcode part1]
  source 1..16: mol_type = other DNA
gttggtgtgtcttact

SEQ ID NO: 12488 - DNA, 16 bp, synthetic construct
  misc_feature 1..16: note = synthetic [barcode part1]
  source 1..16: mol_type = other DNA
ttcgaaggaagtcctc

SEQ ID NO: 12489 - DNA, 16 bp, synthetic construct
  misc_feature 1..16: note = synthetic [barcode part1]
  source 1..16: mol_type = other DNA
gacctctgattatacc

SEQ ID NO: 12490 - DNA, 16 bp, synthetic construct
  misc_feature 1..16: note = synthetic [barcode part1]
  source 1..16: mol_type = other DNA
acgcgtaggttgactt

SEQ ID NO: 12491 - DNA, 16 bp, synthetic construct
  misc_feature 1..16: note = synthetic [barcode part1]
  source 1..16: mol_type = other DNA
aggcgtattctgtgtg

SEQ ID NO: 12492 - DNA, 16 bp, synthetic construct
  misc_feature 1..16: note = synthetic [barcode part1]
  source 1..16: mol_type = other DNA
cacacaggtaggacgt

SEQ ID NO: 12493 - DNA, 16 bp, synthetic construct
  misc_feature 1..16: note = synthetic [barcode part1]
  source 1..16: mol_type = other DNA
cactaccacaagacac

SEQ ID NO: 12494 - DNA, 16 bp, synthetic construct
  misc_feature 1..16: note = synthetic [barcode part1]
  source 1..16: mol_type = other DNA
cctatccacaagtgag

SEQ ID NO: 12495 - DNA, 16 bp, synthetic construct
  misc_feature 1..16: note = synthetic [barcode part1]
  source 1..16: mol_type = other DNA
tataacgccactcact

SEQ ID NO: 12496 - DNA, 16 bp, synthetic construct
  misc_feature 1..16: note = synthetic [barcode part1]
  source 1..16: mol_type = other DNA
cgcgaattattgcctt

SEQ ID NO: 12497 - DNA, 16 bp, synthetic construct
  misc_feature 1..16: note = synthetic [barcode part1]
  source 1..16: mol_type = other DNA
tctgatcttctccggt

SEQ ID NO: 12498 - DNA, 16 bp, synthetic construct
  misc_feature 1..16: note = synthetic [barcode part1]
  source 1..16: mol_type = other DNA
gcagaacacagtgaag

SEQ ID NO: 12499 - DNA, 16 bp, synthetic construct
  misc_feature 1..16: note = synthetic [barcode part1]
  source 1..16: mol_type = other DNA
tggtcgagtacgtgtt

SEQ ID NO: 12500 - DNA, 16 bp, synthetic construct
  misc_feature 1..16: note = synthetic [barcode part1]
  source 1..16: mol_type = other DNA
aatataccacgcgacc

SEQ ID NO: 12501 - DNA, 16 bp, synthetic construct
  misc_feature 1..16: note = synthetic [barcode part1]
  source 1..16: mol_type = other DNA
gacagacgaactccag

SEQ ID NO: 12502 - DNA, 16 bp, synthetic construct
  misc_feature 1..16: note = synthetic [barcode part1]
  source 1..16: mol_type = other DNA
atcttcgtcacgcctt

SEQ ID NO: 12503 - DNA, 16 bp, synthetic construct
  misc_feature 1..16: note = synthetic [barcode part1]
  source 1..16: mol_type = other DNA
gcgtgtatcctgaagt

SEQ ID NO: 12504 - DNA, 16 bp, synthetic construct
  misc_feature 1..16: note = synthetic [barcode part1]
  source 1..16: mol_type = other DNA
ttcggaaggtcctaac

SEQ ID NO: 12505 - DNA, 16 bp, synthetic construct
  misc_feature 1..16: note = synthetic [barcode part1]
  source 1..16: mol_type = other DNA
atatcaacgtgtcggc

SEQ ID NO: 12506 - DNA, 16 bp, synthetic construct
  misc_feature 1..16: note = synthetic [barcode part1]
  source 1..16: mol_type = other DNA
cgataactcggatcac

SEQ ID NO: 12507 - DNA, 16 bp, synthetic construct
  misc_feature 1..16: note = synthetic [barcode part1]
  source 1..16: mol_type = other DNA
gcaagtcttggtacgt

SEQ ID NO: 12508 - DNA, 16 bp, synthetic construct
  misc_feature 1..16: note = synthetic [barcode part1]
  source 1..16: mol_type = other DNA
gtgttccttaggttac

SEQ ID NO: 12509 - DNA, 16 bp, synthetic construct
  misc_feature 1..16: note = synthetic [barcode part1]
  source 1..16: mol_type = other DNA
atacgtgcgcagtatc

SEQ ID NO: 12510 - DNA, 16 bp, synthetic construct
  misc_feature 1..16: note = synthetic [barcode part1]
  source 1..16: mol_type = other DNA
gagtctaacgatcacc

SEQ ID NO: 12511 - DNA, 16 bp, synthetic construct
  misc_feature 1..16: note = synthetic [barcode part1]
  source 1..16: mol_type = other DNA
cacgagtgagtctact

SEQ ID NO: 12512 - DNA, 16 bp, synthetic construct
  misc_feature 1..16: note = synthetic [barcode part1]
  source 1..16: mol_type = other DNA
gccggtggaatcaagt

SEQ ID NO: 12513 - DNA, 16 bp, synthetic construct
  misc_feature 1..16: note = synthetic [barcode part1]
  source 1..16: mol_type = other DNA
tcaagtgacttgtggc

SEQ ID NO: 12514 - DNA, 16 bp, synthetic construct
  misc_feature 1..16: note = synthetic [barcode part1]
  source 1..16: mol_type = other DNA
gacttgagtatccttc

SEQ ID NO: 12515 - DNA, 16 bp, synthetic construct
  misc_feature 1..16: note = synthetic [barcode part1]
  source 1..16: mol_type = other DNA
cgttaggtgttcttgt

SEQ ID NO: 12516 - DNA, 16 bp, synthetic construct
  misc_feature 1..16: note = synthetic [barcode part1]
  source 1..16: mol_type = other DNA
gatccaatcgacgatc

SEQ ID NO: 12517 - DNA, 16 bp, synthetic construct
  misc_feature 1..16: note = synthetic [barcode part1]
  source 1..16: mol_type = other DNA
ccacttacgtcgtggt

SEQ ID NO: 12518 - DNA, 16 bp, synthetic construct
  misc_feature 1..16: note = synthetic [barcode part1]
  source 1..16: mol_type = other DNA
ccttaccgtcttgttg

SEQ ID NO: 12519 - DNA, 16 bp, synthetic construct
  misc_feature 1..16: note = synthetic [barcode part1]
  source 1..16: mol_type = other DNA
caagaggcgatacgtc

SEQ ID NO: 12520 - DNA, 16 bp, synthetic construct
  misc_feature 1..16: note = synthetic [barcode part1]
  source 1..16: mol_type = other DNA
agtgtactgtgtggtc

SEQ ID NO: 12521 - DNA, 16 bp, synthetic construct
  misc_feature 1..16: note = synthetic [barcode part1]
  source 1..16: mol_type = other DNA
gaggaggagtcaattg

SEQ ID NO: 12522 - DNA, 16 bp, synthetic construct
  misc_feature 1..16: note = synthetic [barcode part1]
  source 1..16: mol_type = other DNA
tgtacacgacttcgag

SEQ ID NO: 12523 - DNA, 16 bp, synthetic construct
  misc_feature 1..16: note = synthetic [barcode part1]
  source 1..16: mol_type = other DNA
caacgtacctcactgc

SEQ ID NO: 12524 - DNA, 16 bp, synthetic construct
  misc_feature 1..16: note = synthetic [barcode part1]
  source 1..16: mol_type = other DNA
cagtcaatctcaggac

SEQ ID NO: 12525 - DNA, 16 bp, synthetic construct
  misc_feature 1..16: note = synthetic [barcode part1]
  source 1..16: mol_type = other DNA
tcgactcacaattacc

SEQ ID NO: 12526 - DNA, 16 bp, synthetic construct
  misc_feature 1..16: note = synthetic [barcode part1]
  source 1..16: mol_type = other DNA
attccaccaagttcgt

SEQ ID NO: 12527 - DNA, 16 bp, synthetic construct
  misc_feature 1..16: note = synthetic [barcode part1]
  source 1..16: mol_type = other DNA
cctagagtacacgtgt

SEQ ID NO: 12528 - DNA, 16 bp, synthetic construct
  misc_feature 1..16: note = synthetic [barcode part1]
  source 1..16: mol_type = other DNA
gttcgaatcgcgaatc

SEQ ID NO: 12529 - DNA, 16 bp, synthetic construct
  misc_feature 1..16: note = synthetic [barcode part1]
  source 1..16: mol_type = other DNA
gtctgtctcgtaacgc

SEQ ID NO: 12530 - DNA, 16 bp, synthetic construct
  misc_feature 1..16: note = synthetic [barcode part1]
  source 1..16: mol_type = other DNA
tctcgattgacgaggt

SEQ ID NO: 12531 - DNA, 16 bp, synthetic construct
  misc_feature 1..16: note = synthetic [barcode part1]
  source 1..16: mol_type = other DNA
gataaggtgcgttagt

SEQ ID NO: 12532 - DNA, 16 bp, synthetic construct
  misc_feature 1..16: note = synthetic [barcode part1]
  source 1..16: mol_type = other DNA
agttacgcctcttggc

SEQ ID NO: 12533 - DNA, 16 bp, synthetic construct
  misc_feature 1..16: note = synthetic [barcode part1]
  source 1..16: mol_type = other DNA
taggcacgccacttct

SEQ ID NO: 12534 - DNA, 16 bp, synthetic construct
  misc_feature 1..16: note = synthetic [barcode part1]
  source 1..16: mol_type = other DNA
attggtcgaagtcctg

SEQ ID NO: 12535 - DNA, 16 bp, synthetic construct
  misc_feature 1..16: note = synthetic [barcode part1]
  source 1..16: mol_type = other DNA
agaatagtccaggtac

SEQ ID NO: 12536 - DNA, 16 bp, synthetic construct
  misc_feature 1..16: note = synthetic [barcode part1]
  source 1..16: mol_type = other DNA
gacttgtaacgcctag

SEQ ID NO: 12537 - DNA, 16 bp, synthetic construct
  misc_feature 1..16: note = synthetic [barcode part1]
  source 1..16: mol_type = other DNA
gcgtagaagtacgaag

SEQ ID NO: 12538 - DNA, 16 bp, synthetic construct
  misc_feature 1..16: note = synthetic [barcode part1]
  source 1..16: mol_type = other DNA
acgacaggagttagag

SEQ ID NO: 12539 - DNA, 16 bp, synthetic construct
  misc_feature 1..16: note = synthetic [barcode part1]
  source 1..16: mol_type = other DNA
taaggatcagattgcg

SEQ ID NO: 12540 - DNA, 16 bp, synthetic construct
  misc_feature 1..16: note = synthetic [barcode part1]
  source 1..16: mol_type = other DNA
cgtctcgacgataagt

SEQ ID NO: 12541 - DNA, 16 bp, synthetic construct
  misc_feature 1..16: note = synthetic [barcode part1]
  source 1..16: mol_type = other DNA
tgccgtcttacgtggt

SEQ ID NO: 12542 - DNA, 16 bp, synthetic construct
  misc_feature 1..16: note = synthetic [barcode part1]
  source 1..16: mol_type = other DNA
tgcctctctcttacag

SEQ ID NO: 12543 - DNA, 16 bp, synthetic construct
  misc_feature 1..16: note = synthetic [barcode part1]
  source 1..16: mol_type = other DNA
gcgaacagtaatatcg

SEQ ID NO: 12544 - DNA, 16 bp, synthetic construct
  misc_feature 1..16: note = synthetic [barcode part1]
  source 1..16: mol_type = other DNA
caggcggttgtaacag

SEQ ID NO: 12545 - DNA, 16 bp, synthetic construct
  misc_feature 1..16: note = synthetic [barcode part1]
  source 1..16: mol_type = other DNA
accggtctcaattgag

SEQ ID NO: 12546 - DNA, 16 bp, synthetic construct
  misc_feature 1..16: note = synthetic [barcode part1]
  source 1..16: mol_type = other DNA
gttctgttctgtaggt

SEQ ID NO: 12547 - DNA, 16 bp, synthetic construct
  misc_feature 1..16: note = synthetic [barcode part1]
  source 1..16: mol_type = other DNA
acgttagtcggtgtac

SEQ ID NO: 12548 - DNA, 16 bp, synthetic construct
  misc_feature 1..16: note = synthetic [barcode part1]
  source 1..16: mol_type = other DNA
ccacacgaactggaag

SEQ ID NO: 12549 - DNA, 16 bp, synthetic construct
  misc_feature 1..16: note = synthetic [barcode part1]
  source 1..16: mol_type = other DNA
tccttccgagattcct

SEQ ID NO: 12550 - DNA, 16 bp, synthetic construct
  misc_feature 1..16: note = synthetic [barcode part1]
  source 1..16: mol_type = other DNA
cacgattcgaccttcg

SEQ ID NO: 12551 - DNA, 16 bp, synthetic construct
  misc_feature 1..16: note = synthetic [barcode part1]
  source 1..16: mol_type = other DNA
tgtcgaataggagtac

SEQ ID NO: 12552 - DNA, 16 bp, synthetic construct
  misc_feature 1..16: note = synthetic [barcode part1]
  source 1..16: mol_type = other DNA
cactgatccttagttg

SEQ ID NO: 12553 - DNA, 16 bp, synthetic construct
  misc_feature 1..16: note = synthetic [barcode part1]
  source 1..16: mol_type = other DNA
taagaccgtcggttac

SEQ ID NO: 12554 - DNA, 16 bp, synthetic construct
  misc_feature 1..16: note = synthetic [barcode part1]
  source 1..16: mol_type = other DNA
gtcgtaggacaggtgt

SEQ ID NO: 12555 - DNA, 16 bp, synthetic construct
  misc_feature 1..16: note = synthetic [barcode part1]
  source 1..16: mol_type = other DNA
tagaggcacggtctag

SEQ ID NO: 12556 - DNA, 16 bp, synthetic construct
  misc_feature 1..16: note = synthetic [barcode part1]
  source 1..16: mol_type = other DNA
atcttcgcactcctgt

SEQ ID NO: 12557 - DNA, 16 bp, synthetic construct
  misc_feature 1..16: note = synthetic [barcode part1]
  source 1..16: mol_type = other DNA
cactggatactcttgt

SEQ ID NO: 12558 - DNA, 16 bp, synthetic construct
  misc_feature 1..16: note = synthetic [barcode part1]
  source 1..16: mol_type = other DNA
gtacgtagactggttc

SEQ ID NO: 12559 - DNA, 16 bp, synthetic construct
  misc_feature 1..16: note = synthetic [barcode part1]
  source 1..16: mol_type = other DNA
tatcgtgcaatcgacg

SEQ ID NO: 12560 - DNA, 16 bp, synthetic construct
  misc_feature 1..16: note = synthetic [barcode part1]
  source 1..16: mol_type = other DNA
cagatctacttcactg

SEQ ID NO: 12561 - DNA, 16 bp, synthetic construct
  misc_feature 1..16: note = synthetic [barcode part1]
  source 1..16: mol_type = other DNA
acacctaagatccacg

SEQ ID NO: 12562 - DNA, 16 bp, synthetic construct
  misc_feature 1..16: note = synthetic [barcode part1]
  source 1..16: mol_type = other DNA
taaggcctcaggactt

SEQ ID NO: 12563 - DNA, 16 bp, synthetic construct
  misc_feature 1..16: note = synthetic [barcode part1]
  source 1..16: mol_type = other DNA
gcggttattccaatct

SEQ ID NO: 12564 - DNA, 16 bp, synthetic construct
  misc_feature 1..16: note = synthetic [barcode part1]
  source 1..16: mol_type = other DNA
taacggttgattcggc

SEQ ID NO: 12565 - DNA, 16 bp, synthetic construct
  misc_feature 1..16: note = synthetic [barcode part1]
  source 1..16: mol_type = other DNA
gcgtaaccttcaactt

SEQ ID NO: 12566 - DNA, 16 bp, synthetic construct
  misc_feature 1..16: note = synthetic [barcode part1]
  source 1..16: mol_type = other DNA
gtgatcttgccaagtg

SEQ ID NO: 12567 - DNA, 16 bp, synthetic construct
  misc_feature 1..16: note = synthetic [barcode part1]
  source 1..16: mol_type = other DNA
atcaggtgtgactcac

SEQ ID NO: 12568 - DNA, 16 bp, synthetic construct
  misc_feature 1..16: note = synthetic [barcode part1]
  source 1..16: mol_type = other DNA
tcttgatacgcgattc

SEQ ID NO: 12569 - DNA, 16 bp, synthetic construct
  misc_feature 1..16: note = synthetic [barcode part1]
  source 1..16: mol_type = other DNA
accttcctcaactctg

SEQ ID NO: 12570 - DNA, 16 bp, synthetic construct
  misc_feature 1..16: note = synthetic [barcode part1]
  source 1..16: mol_type = other DNA
gagtgaacacttgcct

SEQ ID NO: 12571 - DNA, 16 bp, synthetic construct
  misc_feature 1..16: note = synthetic [barcode part1]
  source 1..16: mol_type = other DNA
tatcttcaccggattg

SEQ ID NO: 12572 - DNA, 16 bp, synthetic construct
  misc_feature 1..16: note = synthetic [barcode part1]
  source 1..16: mol_type = other DNA
cactcaacggtccttg

SEQ ID NO: 12573 - DNA, 16 bp, synthetic construct
  misc_feature 1..16: note = synthetic [barcode part1]
  source 1..16: mol_type = other DNA
tccactagagacgact

SEQ ID NO: 12574 - DNA, 16 bp, synthetic construct
  misc_feature 1..16: note = synthetic [barcode part1]
  source 1..16: mol_type = other DNA
tccgtaactgtgagtg

SEQ ID NO: 12575 - DNA, 16 bp, synthetic construct
  misc_feature 1..16: note = synthetic [barcode part1]
  source 1..16: mol_type = other DNA
gtaactgtacgtggtc

SEQ ID NO: 12576 - DNA, 16 bp, synthetic construct
  misc_feature 1..16: note = synthetic [barcode part1]
  source 1..16: mol_type = other DNA
atatctccgacctaac

SEQ ID NO: 12577 - DNA, 16 bp, synthetic construct
  misc_feature 1..16: note = synthetic [barcode part1]
  source 1..16: mol_type = other DNA
aacgtacctccgactc

SEQ ID NO: 12578 - DNA, 16 bp, synthetic construct
  misc_feature 1..16: note = synthetic [barcode part1]
  source 1..16: mol_type = other DNA
ccaagtactgtcttac

SEQ ID NO: 12579 - DNA, 16 bp, synthetic construct
  misc_feature 1..16: note = synthetic [barcode part1]
  source 1..16: mol_type = other DNA
attggtcctctccttg

SEQ ID NO: 12580 - DNA, 16 bp, synthetic construct
  misc_feature 1..16: note = synthetic [barcode part1]
  source 1..16: mol_type = other DNA
tacaaccgactacgtg

SEQ ID NO: 12581 - DNA, 16 bp, synthetic construct
  misc_feature 1..16: note = synthetic [barcode part1]
  source 1..16: mol_type = other DNA
tacaattcgcgtcgag

SEQ ID NO: 12582 - DNA, 16 bp, synthetic construct
  misc_feature 1..16: note = synthetic [barcode part1]
  source 1..16: mol_type = other DNA
actgtctacctgcggt

SEQ ID NO: 12583 - DNA, 16 bp, synthetic construct
  misc_feature 1..16: note = synthetic [barcode part1]
  source 1..16: mol_type = other DNA
tcggaatcaggtggac

SEQ ID NO: 12584 - DNA, 16 bp, synthetic construct
  misc_feature 1..16: note = synthetic [barcode part1]
  source 1..16: mol_type = other DNA
gaggcaagtccgtaac

SEQ ID NO: 12585 - DNA, 16 bp, synthetic construct
  misc_feature 1..16: note = synthetic [barcode part1]
  source 1..16: mol_type = other DNA
cgacaataaggacgcc

SEQ ID NO: 12586 - DNA, 16 bp, synthetic construct
  misc_feature 1..16: note = synthetic [barcode part1]
  source 1..16: mol_type = other DNA
gcaccgtgtagacaag

SEQ ID NO: 12587 - DNA, 16 bp, synthetic construct
  misc_feature 1..16: note = synthetic [barcode part1]
  source 1..16: mol_type = other DNA
gcaccttgacctgatc

SEQ ID NO: 12588 - DNA, 16 bp, synthetic construct
  misc_feature 1..16: note = synthetic [barcode part1]
  source 1..16: mol_type = other DNA
aagtctgtcactatcc

SEQ ID NO: 12589 - DNA, 16 bp, synthetic construct
  misc_feature 1..16: note = synthetic [barcode part1]
  source 1..16: mol_type = other DNA
ttacggactcacagac

SEQ ID NO: 12590 - DNA, 16 bp, synthetic construct
  misc_feature 1..16: note = synthetic [barcode part1]
  source 1..16: mol_type = other DNA
cgaacgttcttgccgt

SEQ ID NO: 12591 - DNA, 16 bp, synthetic construct
  misc_feature 1..16: note = synthetic [barcode part1]
  source 1..16: mol_type = other DNA
tcgttcggaattccgc

SEQ ID NO: 12592 - DNA, 16 bp, synthetic construct
  misc_feature 1..16: note = synthetic [barcode part1]
  source 1..16: mol_type = other DNA
cctgccgatataattc

SEQ ID NO: 12593 - DNA, 16 bp, synthetic construct
  misc_feature 1..16: note = synthetic [barcode part1]
  source 1..16: mol_type = other DNA
aggtcgttcgtcaagt

SEQ ID NO: 12594 - DNA, 16 bp, synthetic construct
  misc_feature 1..16: note = synthetic [barcode part1]
  source 1..16: mol_type = other DNA
tagtaagttcggacag

SEQ ID NO: 12595 - DNA, 16 bp, synthetic construct
  misc_feature 1..16: note = synthetic [barcode part1]
  source 1..16: mol_type = other DNA
tccactctaagattcg

SEQ ID NO: 12596 - DNA, 16 bp, synthetic construct
  misc_feature 1..16: note = synthetic [barcode part1]
  source 1..16: mol_type = other DNA
gagatctgtgacactc

SEQ ID NO: 12597 - DNA, 16 bp, synthetic construct
  misc_feature 1..16: note = synthetic [barcode part1]
  source 1..16: mol_type = other DNA
cctcggagataggtag

SEQ ID NO: 12598 - DNA, 16 bp, synthetic construct
  misc_feature 1..16: note = synthetic [barcode part1]
  source 1..16: mol_type = other DNA
tattcctcgacggtcg

SEQ ID NO: 12599 - DNA, 16 bp, synthetic construct
  misc_feature 1..16: note = synthetic [barcode part1]
  source 1..16: mol_type = other DNA
taacctgcgaattgcg

SEQ ID NO: 12600 - DNA, 16 bp, synthetic construct
  misc_feature 1..16: note = synthetic [barcode part1]
  source 1..16: mol_type = other DNA
tggtgtgaagacagtt

SEQ ID NO: 12601 - DNA, 16 bp, synthetic construct
  misc_feature 1..16: note = synthetic [barcode part1]
  source 1..16: mol_type = other DNA
aggcgtacaacgactg

SEQ ID NO: 12602 - DNA, 16 bp, synthetic construct
  misc_feature 1..16: note = synthetic [barcode part1]
  source 1..16: mol_type = other DNA
gttggccacgttatag

SEQ ID NO: 12603 - DNA, 16 bp, synthetic construct
  misc_feature 1..16: note = synthetic [barcode part1]
  source 1..16: mol_type = other DNA
gcacgattcttctagt

SEQ ID NO: 12604 - DNA, 16 bp, synthetic construct
  misc_feature 1..16: note = synthetic [barcode part1]
  source 1..16: mol_type = other DNA
tggatcgtcgacgatt

SEQ ID NO: 12605 - DNA, 16 bp, synthetic construct
  misc_feature 1..16: note = synthetic [barcode part1]
  source 1..16: mol_type = other DNA
aacagagtggcagagt

SEQ ID NO: 12606 - DNA, 16 bp, synthetic construct
  misc_feature 1..16: note = synthetic [barcode part1]
  source 1..16: mol_type = other DNA
gagtcgaagaaccaag

SEQ ID NO: 12607 - DNA, 16 bp, synthetic construct
  misc_feature 1..16: note = synthetic [barcode part1]
  source 1..16: mol_type = other DNA
agtaaggccaggcgtt

SEQ ID NO: 12608 - DNA, 16 bp, synthetic construct
  misc_feature 1..16: note = synthetic [barcode part1]
  source 1..16: mol_type = other DNA
tgattcttggtacacc

SEQ ID NO: 12609 - DNA, 16 bp, synthetic construct
  misc_feature 1..16: note = synthetic [barcode part1]
  source 1..16: mol_type = other DNA
cctgatatccacgtcg

SEQ ID NO: 12610 - DNA, 16 bp, synthetic construct
  misc_feature 1..16: note = synthetic [barcode part1]
  source 1..16: mol_type = other DNA
cctggcctaatcgtac

SEQ ID NO: 12611 - DNA, 16 bp, synthetic construct
  misc_feature 1..16: note = synthetic [barcode part1]
  source 1..16: mol_type = other DNA
ccaggaagtatctaag

SEQ ID NO: 12612 - DNA, 16 bp, synthetic construct
  misc_feature 1..16: note = synthetic [barcode part1]
  source 1..16: mol_type = other DNA
tgtaagtacggtgagt

SEQ ID NO: 12613 - DNA, 16 bp, synthetic construct
  misc_feature 1..16: note = synthetic [barcode part1]
  source 1..16: mol_type = other DNA
cgtgtaagtggaatac

SEQ ID NO: 12614 - DNA, 16 bp, synthetic construct
  misc_feature 1..16: note = synthetic [barcode part1]
  source 1..16: mol_type = other DNA
actgtaggtgagtggc

SEQ ID NO: 12615 - DNA, 16 bp, synthetic construct
  misc_feature 1..16: note = synthetic [barcode part1]
  source 1..16: mol_type = other DNA
actattccgaacactc

SEQ ID NO: 12616 - DNA, 16 bp, synthetic construct
  misc_feature 1..16: note = synthetic [barcode part1]
  source 1..16: mol_type = other DNA
cagagaatcgagaggt

SEQ ID NO: 12617 - DNA, 16 bp, synthetic construct
  misc_feature 1..16: note = synthetic [barcode part1]
  source 1..16: mol_type = other DNA
taattccgcactagtc

SEQ ID NO: 12618 - DNA, 16 bp, synthetic construct
  misc_feature 1..16: note = synthetic [barcode part1]
  source 1..16: mol_type = other DNA
ccgttcagaacttcgc

SEQ ID NO: 12619 - DNA, 16 bp, synthetic construct
  misc_feature 1..16: note = synthetic [barcode part1]
  source 1..16: mol_type = other DNA
acagtctaagttgccg

SEQ ID NO: 12620 - DNA, 16 bp, synthetic construct
  misc_feature 1..16: note = synthetic [barcode part1]
  source 1..16: mol_type = other DNA
tagtacacttccgact

SEQ ID NO: 12621 - DNA, 16 bp, synthetic construct
  misc_feature 1..16: note = synthetic [barcode part1]
  source 1..16: mol_type = other DNA
tacaacgtaggacctc

SEQ ID NO: 12622 - DNA, 16 bp, synthetic construct
  misc_feature 1..16: note = synthetic [barcode part1]
  source 1..16: mol_type = other DNA
acaacacgtcaactgc

SEQ ID NO: 12623 - DNA, 16 bp, synthetic construct
  misc_feature 1..16: note = synthetic [barcode part1]
  source 1..16: mol_type = other DNA
taatagtctcttgcgc

SEQ ID NO: 12624 - DNA, 16 bp, synthetic construct
  misc_feature 1..16: note = synthetic [barcode part1]
  source 1..16: mol_type = other DNA
tacgtggttcgtaggt

SEQ ID NO: 12625 - DNA, 16 bp, synthetic construct
  misc_feature 1..16: note = synthetic [barcode part1]
  source 1..16: mol_type = other DNA
tgatacggtacctgac

SEQ ID NO: 12626 - DNA, 16 bp, synthetic construct
  misc_feature 1..16: note = synthetic [barcode part1]
  source 1..16: mol_type = other DNA
gttgttctcgtagact

SEQ ID NO: 12627 - DNA, 16 bp, synthetic construct
  misc_feature 1..16: note = synthetic [barcode part1]
  source 1..16: mol_type = other DNA
caggagagtcgtacac

SEQ ID NO: 12628 - DNA, 16 bp, synthetic construct
  misc_feature 1..16: note = synthetic [barcode part1]
  source 1..16: mol_type = other DNA
gtgtagtattgcgtgc

SEQ ID NO: 12629 - DNA, 16 bp, synthetic construct
  misc_feature 1..16: note = synthetic [barcode part1]
  source 1..16: mol_type = other DNA
cagaccgaggatacac

SEQ ID NO: 12630 - DNA, 16 bp, synthetic construct
  misc_feature 1..16: note = synthetic [barcode part1]
  source 1..16: mol_type = other DNA
gattacgtgacacacc

SEQ ID NO: 12631 - DNA, 16 bp, synthetic construct
  misc_feature 1..16: note = synthetic [barcode part1]
  source 1..16: mol_type = other DNA
tagttgaaccgcggtt

SEQ ID NO: 12632 - DNA, 16 bp, synthetic construct
  misc_feature 1..16: note = synthetic [barcode part1]
  source 1..16: mol_type = other DNA
cgatatacacaggcct

SEQ ID NO: 12633 - DNA, 16 bp, synthetic construct
  misc_feature 1..16: note = synthetic [barcode part1]
  source 1..16: mol_type = other DNA
gtgagtctcagacact

SEQ ID NO: 12634 - DNA, 16 bp, synthetic construct
  misc_feature 1..16: note = synthetic [barcode part1]
  source 1..16: mol_type = other DNA
tcaggaccacttgcct

SEQ ID NO: 12635 - DNA, 16 bp, synthetic construct
  misc_feature 1..16: note = synthetic [barcode part1]
  source 1..16: mol_type = other DNA
ataccaggtattcggc

SEQ ID NO: 12636 - DNA, 16 bp, synthetic construct
  misc_feature 1..16: note = synthetic [barcode part1]
  source 1..16: mol_type = other DNA
atatctccggtaatcc

SEQ ID NO: 12637 - DNA, 16 bp, synthetic construct
  misc_feature 1..16: note = synthetic [barcode part1]
  source 1..16: mol_type = other DNA
caagtcttctgtcgcg

SEQ ID NO: 12638 - DNA, 16 bp, synthetic construct
  misc_feature 1..16: note = synthetic [barcode part1]
  source 1..16: mol_type = other DNA
ttggtcagtcaaccag

SEQ ID NO: 12639 - DNA, 16 bp, synthetic construct
  misc_feature 1..16: note = synthetic [barcode part1]
  source 1..16: mol_type = other DNA
aacgaaggcgtaatct

SEQ ID NO: 12640 - DNA, 16 bp, synthetic construct
  misc_feature 1..16: note = synthetic [barcode part1]
  source 1..16: mol_type = other DNA
cgtagttgttattccg

SEQ ID NO: 12641 - DNA, 16 bp, synthetic construct
  misc_feature 1..16: note = synthetic [barcode part1]
  source 1..16: mol_type = other DNA
ttaggtgcctaccgtc

SEQ ID NO: 12642 - DNA, 16 bp, synthetic construct
  misc_feature 1..16: note = synthetic [barcode part1]
  source 1..16: mol_type = other DNA
actgacgatcctccgt

SEQ ID NO: 12643 - DNA, 16 bp, synthetic construct
  misc_feature 1..16: note = synthetic [barcode part1]
  source 1..16: mol_type = other DNA
tgttacttgagtctgc

SEQ ID NO: 12644 - DNA, 16 bp, synthetic construct
  misc_feature 1..16: note = synthetic [barcode part1]
  source 1..16: mol_type = other DNA
agtaaccacacagaac

SEQ ID NO: 12645 - DNA, 16 bp, synthetic construct
  misc_feature 1..16: note = synthetic [barcode part1]
  source 1..16: mol_type = other DNA
ttggtgttgtgcaacg

SEQ ID NO: 12646 - DNA, 16 bp, synthetic construct
  misc_feature 1..16: note = synthetic [barcode part1]
  source 1..16: mol_type = other DNA
agaaccggttatctcg

SEQ ID NO: 12647 - DNA, 16 bp, synthetic construct
  misc_feature 1..16: note = synthetic [barcode part1]
  source 1..16: mol_type = other DNA
ttgcggagttcaggtt

SEQ ID NO: 12648 - DNA, 16 bp, synthetic construct
  misc_feature 1..16: note = synthetic [barcode part1]
  source 1..16: mol_type = other DNA
acgatctattctcgtg

SEQ ID NO: 12649 - DNA, 16 bp, synthetic construct
  misc_feature 1..16: note = synthetic [barcode part1]
  source 1..16: mol_type = other DNA
gcctgaacgagtactt

SEQ ID NO: 12650 - DNA, 16 bp, synthetic construct
  misc_feature 1..16: note = synthetic [barcode part1]
  source 1..16: mol_type = other DNA
atccgcgtcagtatag

SEQ ID NO: 12651 - DNA, 16 bp, synthetic construct
  misc_feature 1..16: note = synthetic [barcode part1]
  source 1..16: mol_type = other DNA
caagaagaggaggtct

SEQ ID NO: 12652 - DNA, 16 bp, synthetic construct
  misc_feature 1..16: note = synthetic [barcode part1]
  source 1..16: mol_type = other DNA
cgttaggtgcctctgt

SEQ ID NO: 12653 - DNA, 16 bp, synthetic construct
  misc_feature 1..16: note = synthetic [barcode part1]
  source 1..16: mol_type = other DNA
cgagagtattcaacag

SEQ ID NO: 12654 - DNA, 16 bp, synthetic construct
  misc_feature 1..16: note = synthetic [barcode part1]
  source 1..16: mol_type = other DNA
tgtacttccgtcaggc

SEQ ID NO: 12655 - DNA, 16 bp, synthetic construct
  misc_feature 1..16: note = synthetic [barcode part1]
  source 1..16: mol_type = other DNA
agtgtcaatcgcgatc

SEQ ID NO: 12656 - DNA, 16 bp, synthetic construct
  misc_feature 1..16: note = synthetic [barcode part1]
  source 1..16: mol_type = other DNA
gaattgcgtaacctgc

SEQ ID NO: 12657 - DNA, 16 bp, synthetic construct
  misc_feature 1..16: note = synthetic [barcode part1]
  source 1..16: mol_type = other DNA
gtgtgtatcctaaggc

SEQ ID NO: 12658 - DNA, 16 bp, synthetic construct
  misc_feature 1..16: note = synthetic [barcode part1]
  source 1..16: mol_type = other DNA
tcggacgatagattcc

SEQ ID NO: 12659 - DNA, 16 bp, synthetic construct
  misc_feature 1..16: note = synthetic [barcode part1]
  source 1..16: mol_type = other DNA
aggcaggacggtatct

SEQ ID NO: 12660 - DNA, 16 bp, synthetic construct
  misc_feature 1..16: note = synthetic [barcode part1]
  source 1..16: mol_type = other DNA
taccagataggtcacc

SEQ ID NO: 12661 - DNA, 16 bp, synthetic construct
  misc_feature 1..16: note = synthetic [barcode part1]
  source 1..16: mol_type = other DNA
aacctccgacttgtgc

SEQ ID NO: 12662 - DNA, 16 bp, synthetic construct
  misc_feature 1..16: note = synthetic [barcode part1]
  source 1..16: mol_type = other DNA
agtccgcacctataag

SEQ ID NO: 12663 - DNA, 16 bp, synthetic construct
  misc_feature 1..16: note = synthetic [barcode part1]
  source 1..16: mol_type = other DNA
taggatcacacgtacc

SEQ ID NO: 12664 - DNA, 16 bp, synthetic construct
  misc_feature 1..16: note = synthetic [barcode part1]
  source 1..16: mol_type = other DNA
tgtggtgagtaggcgt

SEQ ID NO: 12665 - DNA, 16 bp, synthetic construct
  misc_feature 1..16: note = synthetic [barcode part1]
  source 1..16: mol_type = other DNA
tgatcacttgcgtgag

SEQ ID NO: 12666 - DNA, 16 bp, synthetic construct
  misc_feature 1..16: note = synthetic [barcode part1]
  source 1..16: mol_type = other DNA
cctgaggacactatac

SEQ ID NO: 12667 - DNA, 16 bp, synthetic construct
  misc_feature 1..16: note = synthetic [barcode part1]
  source 1..16: mol_type = other DNA
tcttcttctgaccggt

SEQ ID NO: 12668 - DNA, 16 bp, synthetic construct
  misc_feature 1..16: note = synthetic [barcode part1]
  source 1..16: mol_type = other DNA
cgcgacgtgaacaagt

SEQ ID NO: 12669 - DNA, 16 bp, synthetic construct
  misc_feature 1..16: note = synthetic [barcode part1]
  source 1..16: mol_type = other DNA
atcacagacttacctc

SEQ ID NO: 12670 - DNA, 16 bp, synthetic construct
  misc_feature 1..16: note = synthetic [barcode part1]
  source 1..16: mol_type = other DNA
acttgaacgcctgagt

SEQ ID NO: 12671 - DNA, 16 bp, synthetic construct
  misc_feature 1..16: note = synthetic [barcode part1]
  source 1..16: mol_type = other DNA
acagtaccacaacgtc

SEQ ID NO: 12672 - DNA, 16 bp, synthetic construct
  misc_feature 1..16: note = synthetic [barcode part1]
  source 1..16: mol_type = other DNA
tcaggttcctcgtgtg

SEQ ID NO: 12673 - DNA, 16 bp, synthetic construct
  misc_feature 1..16: note = synthetic [barcode part1]
  source 1..16: mol_type = other DNA
tataataggcggacgt

SEQ ID NO: 12674 - DNA, 16 bp, synthetic construct
  misc_feature 1..16: note = synthetic [barcode part1]
  source 1..16: mol_type = other DNA
tccgtactggtagtcc

SEQ ID NO: 12675 - DNA, 16 bp, synthetic construct
  misc_feature 1..16: note = synthetic [barcode part1]
  source 1..16: mol_type = other DNA
aagaccttctggagtc

SEQ ID NO: 12676 - DNA, 16 bp, synthetic construct
  misc_feature 1..16: note = synthetic [barcode part1]
  source 1..16: mol_type = other DNA
tcggcgtcttcaactg

SEQ ID NO: 12677 - DNA, 16 bp, synthetic construct
  misc_feature 1..16: note = synthetic [barcode part1]
  source 1..16: mol_type = other DNA
tcggataggacgacac

SEQ ID NO: 12678 - DNA, 16 bp, synthetic construct
  misc_feature 1..16: note = synthetic [barcode part1]
  source 1..16: mol_type = other DNA
atacggcggaggatct

SEQ ID NO: 12679 - DNA, 16 bp, synthetic construct
  misc_feature 1..16: note = synthetic [barcode part1]
  source 1..16: mol_type = other DNA
tccactcttgcggtag

SEQ ID NO: 12680 - DNA, 16 bp, synthetic construct
  misc_feature 1..16: note = synthetic [barcode part1]
  source 1..16: mol_type = other DNA
aacacgtgtcagtacc

SEQ ID NO: 12681 - DNA, 16 bp, synthetic construct
  misc_feature 1..16: note = synthetic [barcode part1]
  source 1..16: mol_type = other DNA
ccttcaatcctggtct

SEQ ID NO: 12682 - DNA, 16 bp, synthetic construct
  misc_feature 1..16: note = synthetic [barcode part1]
  source 1..16: mol_type = other DNA
attggacgtctagtgc

SEQ ID NO: 12683 - DNA, 16 bp, synthetic construct
  misc_feature 1..16: note = synthetic [barcode part1]
  source 1..16: mol_type = other DNA
tccaactccgatcctt

SEQ ID NO: 12684 - DNA, 16 bp, synthetic construct
  misc_feature 1..16: note = synthetic [barcode part1]
  source 1..16: mol_type = other DNA
actggacgcaggagtt

SEQ ID NO: 12685 - DNA, 16 bp, synthetic construct
  misc_feature 1..16: note = synthetic [barcode part1]
  source 1..16: mol_type = other DNA
aaccggtaactccagt

SEQ ID NO: 12686 - DNA, 16 bp, synthetic construct
  misc_feature 1..16: note = synthetic [barcode part1]
  source 1..16: mol_type = other DNA
atccgtaagtctgcag

SEQ ID NO: 12687 - DNA, 16 bp, synthetic construct
  misc_feature 1..16: note = synthetic [barcode part1]
  source 1..16: mol_type = other DNA
tccttctcgcgatatc

SEQ ID NO: 12688 - DNA, 16 bp, synthetic construct
  misc_feature 1..16: note = synthetic [barcode part1]
  source 1..16: mol_type = other DNA
tgttgccagacacctc

SEQ ID NO: 12689 - DNA, 16 bp, synthetic construct
  misc_feature 1..16: note = synthetic [barcode part1]
  source 1..16: mol_type = other DNA
gcgatagtcacacgag

SEQ ID NO: 12690 - DNA, 16 bp, synthetic construct
  misc_feature 1..16: note = synthetic [barcode part1]
  source 1..16: mol_type = other DNA
caagaccgtgcgtatt

SEQ ID NO: 12691 - DNA, 16 bp, synthetic construct
  misc_feature 1..16: note = synthetic [barcode part1]
  source 1..16: mol_type = other DNA
acagttgcgcgattac

SEQ ID NO: 12692 - DNA, 16 bp, synthetic construct
  misc_feature 1..16: note = synthetic [barcode part1]
  source 1..16: mol_type = other DNA
tcttactacgacggag

SEQ ID NO: 12693 - DNA, 16 bp, synthetic construct
  misc_feature 1..16: note = synthetic [barcode part1]
  source 1..16: mol_type = other DNA
ccaggtagtgataagt

SEQ ID NO: 12694 - DNA, 16 bp, synthetic construct
  misc_feature 1..16: note = synthetic [barcode part1]
  source 1..16: mol_type = other DNA
taccaggtaagagtgt

SEQ ID NO: 12695 - DNA, 16 bp, synthetic construct
  misc_feature 1..16: note = synthetic [barcode part1]
  source 1..16: mol_type = other DNA
acgtcctatactctcc

SEQ ID NO: 12696 - DNA, 16 bp, synthetic construct
  misc_feature 1..16: note = synthetic [barcode part1]
  source 1..16: mol_type = other DNA
gagtgagaatatcgtc

SEQ ID NO: 12697 - DNA, 16 bp, synthetic construct
  misc_feature 1..16: note = synthetic [barcode part1]
  source 1..16: mol_type = other DNA
tccaactgcaccgact

SEQ ID NO: 12698 - DNA, 16 bp, synthetic construct
  misc_feature 1..16: note = synthetic [barcode part1]
  source 1..16: mol_type = other DNA
acctgatcgtgaggag

SEQ ID NO: 12699 - DNA, 16 bp, synthetic construct
  misc_feature 1..16: note = synthetic [barcode part1]
  source 1..16: mol_type = other DNA
tatcgtgcacgtacag

SEQ ID NO: 12700 - DNA, 16 bp, synthetic construct
  misc_feature 1..16: note = synthetic [barcode part1]
  source 1..16: mol_type = other DNA
aggtaataagacggcg

SEQ ID NO: 12701 - DNA, 16 bp, synthetic construct
  misc_feature 1..16: note = synthetic [barcode part1]
  source 1..16: mol_type = other DNA
agaggcaactcgacac

SEQ ID NO: 12702 - DNA, 16 bp, synthetic construct
  misc_feature 1..16: note = synthetic [barcode part1]
  source 1..16: mol_type = other DNA
agacagaacgacgcct

SEQ ID NO: 12703 - DNA, 16 bp, synthetic construct
  misc_feature 1..16: note = synthetic [barcode part1]
  source 1..16: mol_type = other DNA
tatccttgcacgagag

SEQ ID NO: 12704 - DNA, 16 bp, synthetic construct
  misc_feature 1..16: note = synthetic [barcode part1]
  source 1..16: mol_type = other DNA
aggtcgacacaaccag

SEQ ID NO: 12705 - DNA, 16 bp, synthetic construct
  misc_feature 1..16: note = synthetic [barcode part1]
  source 1..16: mol_type = other DNA
gagaggcgttcggatt

SEQ ID NO: 12706 - DNA, 16 bp, synthetic construct
  misc_feature 1..16: note = synthetic [barcode part1]
  source 1..16: mol_type = other DNA
tgccgttactcggatc

SEQ ID NO: 12707 - DNA, 16 bp, synthetic construct
  misc_feature 1..16: note = synthetic [barcode part1]
  source 1..16: mol_type = other DNA
tgcctcgtctagacgt

SEQ ID NO: 12708 - DNA, 16 bp, synthetic construct
  misc_feature 1..16: note = synthetic [barcode part1]
  source 1..16: mol_type = other DNA
ccacagattcaacctt

SEQ ID NO: 12709 - DNA, 16 bp, synthetic construct
  misc_feature 1..16: note = synthetic [barcode part1]
  source 1..16: mol_type = other DNA
tatagagtggcggtcg

SEQ ID NO: 12710 - DNA, 16 bp, synthetic construct
  misc_feature 1..16: note = synthetic [barcode part1]
  source 1..16: mol_type = other DNA
cctagattccaatctg

SEQ ID NO: 12711 - DNA, 16 bp, synthetic construct
  misc_feature 1..16: note = synthetic [barcode part1]
  source 1..16: mol_type = other DNA
tccaagattctgaggc

SEQ ID NO: 12712 - DNA, 16 bp, synthetic construct
  misc_feature 1..16: note = synthetic [barcode part1]
  source 1..16: mol_type = other DNA
gactgcctctataccg

SEQ ID NO: 12713 - DNA, 16 bp, synthetic construct
  misc_feature 1..16: note = synthetic [barcode part1]
  source 1..16: mol_type = other DNA
ttgaccagtcacagtg

SEQ ID NO: 12714 - DNA, 16 bp, synthetic construct
  misc_feature 1..16: note = synthetic [barcode part1]
  source 1..16: mol_type = other DNA
ttaacggaggcgtgac

SEQ ID NO: 12715 - DNA, 16 bp, synthetic construct
  misc_feature 1..16: note = synthetic [barcode part1]
  source 1..16: mol_type = other DNA
gttaggttgttcctac

SEQ ID NO: 12716 - DNA, 16 bp, synthetic construct
  misc_feature 1..16: note = synthetic [barcode part1]
  source 1..16: mol_type = other DNA
ccacagatacttcgtt

SEQ ID NO: 12717 - DNA, 16 bp, synthetic construct
  misc_feature 1..16: note = synthetic [barcode part1]
  source 1..16: mol_type = other DNA
tgtgttgcacaaccag

SEQ ID NO: 12718 - DNA, 16 bp, synthetic construct
  misc_feature 1..16: note = synthetic [barcode part1]
  source 1..16: mol_type = other DNA
aattggcctctccttc

SEQ ID NO: 12719 - DNA, 16 bp, synthetic construct
  misc_feature 1..16: note = synthetic [barcode part1]
  source 1..16: mol_type = other DNA
gtctccgagtggtctt

SEQ ID NO: 12720 - DNA, 16 bp, synthetic construct
  misc_feature 1..16: note = synthetic [barcode part1]
  source 1..16: mol_type = other DNA
ccaatacttgatcctg

SEQ ID NO: 12721 - DNA, 16 bp, synthetic construct
  misc_feature 1..16: note = synthetic [barcode part1]
  source 1..16: mol_type = other DNA
gataagtcaggatctg

SEQ ID NO: 12722 - DNA, 16 bp, synthetic construct
  misc_feature 1..16: note = synthetic [barcode part1]
  source 1..16: mol_type = other DNA
actcgcgaattcgtag

SEQ ID NO: 12723 - DNA, 16 bp, synthetic construct
  misc_feature 1..16: note = synthetic [barcode part1]
  source 1..16: mol_type = other DNA
gatcagtctgatcgac

SEQ ID NO: 12724 - DNA, 16 bp, synthetic construct
  misc_feature 1..16: note = synthetic [barcode part1]
  source 1..16: mol_type = other DNA
ttggccggttgattag

SEQ ID NO: 12725 - DNA, 16 bp, synthetic construct
  misc_feature 1..16: note = synthetic [barcode part1]
  source 1..16: mol_type = other DNA
cagtgtgcgatctcct

SEQ ID NO: 12726 - DNA, 16 bp, synthetic construct
  misc_feature 1..16: note = synthetic [barcode part1]
  source 1..16: mol_type = other DNA
ttagtcttccacgaac

SEQ ID NO: 12727 - DNA, 16 bp, synthetic construct
  misc_feature 1..16: note = synthetic [barcode part1]
  source 1..16: mol_type = other DNA
tcggcgatattgagtc

SEQ ID NO: 12728 - DNA, 16 bp, synthetic construct
  misc_feature 1..16: note = synthetic [barcode part1]
  source 1..16: mol_type = other DNA
agtctccgtgtgactc

SEQ ID NO: 12729 - DNA, 16 bp, synthetic construct
  misc_feature 1..16: note = synthetic [barcode part1]
  source 1..16: mol_type = other DNA
acacaggcactcttag

SEQ ID NO: 12730 - DNA, 16 bp, synthetic construct
  misc_feature 1..16: note = synthetic [barcode part1]
  source 1..16: mol_type = other DNA
taacgtacctctggtt

SEQ ID NO: 12731 - DNA, 16 bp, synthetic construct
  misc_feature 1..16: note = synthetic [barcode part1]
  source 1..16: mol_type = other DNA
agacgccactctactc

SEQ ID NO: 12732 - DNA, 16 bp, synthetic construct
  misc_feature 1..16: note = synthetic [barcode part1]
  source 1..16: mol_type = other DNA
tacacgtctagagtcg

SEQ ID NO: 12733 - DNA, 16 bp, synthetic construct
  misc_feature 1..16: note = synthetic [barcode part1]
  source 1..16: mol_type = other DNA
cgcctgtgtggtactt

SEQ ID NO: 12734 - DNA, 16 bp, synthetic construct
  misc_feature 1..16: note = synthetic [barcode part1]
  source 1..16: mol_type = other DNA
actgactcgatcaacg

SEQ ID NO: 12735 - DNA, 16 bp, synthetic construct
  misc_feature 1..16: note = synthetic [barcode part1]
  source 1..16: mol_type = other DNA
atacttctcctcgtgc

SEQ ID NO: 12736 - DNA, 16 bp, synthetic construct
  misc_feature 1..16: note = synthetic [barcode part1]
  source 1..16: mol_type = other DNA
aacgcgacctaacgag

SEQ ID NO: 12737 - DNA, 16 bp, synthetic construct
  misc_feature 1..16: note = synthetic [barcode part1]
  source 1..16: mol_type = other DNA
ccggaatacggacagt

SEQ ID NO: 12738 - DNA, 16 bp, synthetic construct
  misc_feature 1..16: note = synthetic [barcode part1]
  source 1..16: mol_type = other DNA
taacacgaaggtaacc

SEQ ID NO: 12739 - DNA, 16 bp, synthetic construct
  misc_feature 1..16: note = synthetic [barcode part1]
  source 1..16: mol_type = other DNA
gtgttgatcctcggtc

SEQ ID NO: 12740 - DNA, 16 bp, synthetic construct
  misc_feature 1..16: note = synthetic [barcode part1]
  source 1..16: mol_type = other DNA
caggtgtgtacgactt

SEQ ID NO: 12741 - DNA, 16 bp, synthetic construct
  misc_feature 1..16: note = synthetic [barcode part1]
  source 1..16: mol_type = other DNA
aactgcaggccagaac

SEQ ID NO: 12742 - DNA, 16 bp, synthetic construct
  misc_feature 1..16: note = synthetic [barcode part1]
  source 1..16: mol_type = other DNA
cacctacaacaccacc

SEQ ID NO: 12743 - DNA, 16 bp, synthetic construct
  misc_feature 1..16: note = synthetic [barcode part1]
  source 1..16: mol_type = other DNA
gttaggcctactgagt

SEQ ID NO: 12744 - DNA, 16 bp, synthetic construct
  misc_feature 1..16: note = synthetic [barcode part1]
  source 1..16: mol_type = other DNA
tcgtgccgtagtctgt

SEQ ID NO: 12745 - DNA, 16 bp, synthetic construct
  misc_feature 1..16: note = synthetic [barcode part1]
  source 1..16: mol_type = other DNA
gactgtaggtccttcc

SEQ ID NO: 12746 - DNA, 16 bp, synthetic construct
  misc_feature 1..16: note = synthetic [barcode part1]
  source 1..16: mol_type = other DNA
aatctctaccgccttc

SEQ ID NO: 12747 - DNA, 16 bp, synthetic construct
  misc_feature 1..16: note = synthetic [barcode part1]
  source 1..16: mol_type = other DNA
caggattgtcgtaacc

SEQ ID NO: 12748 - DNA, 16 bp, synthetic construct
  misc_feature 1..16: note = synthetic [barcode part1]
  source 1..16: mol_type = other DNA
tccacacaccaccaac

SEQ ID NO: 12749 - DNA, 16 bp, synthetic construct
  misc_feature 1..16: note = synthetic [barcode part1]
  source 1..16: mol_type = other DNA
cgttcgcacgaatagt

SEQ ID NO: 12750 - DNA, 16 bp, synthetic construct
  misc_feature 1..16: note = synthetic [barcode part1]
  source 1..16: mol_type = other DNA
gaagtggacctgcaac

SEQ ID NO: 12751 - DNA, 16 bp, synthetic construct
  misc_feature 1..16: note = synthetic [barcode part1]
  source 1..16: mol_type = other DNA
aaccactgcgagagtg

SEQ ID NO: 12752 - DNA, 16 bp, synthetic construct
  misc_feature 1..16: note = synthetic [barcode part1]
  source 1..16: mol_type = other DNA
atcttgtctcggttcc

SEQ ID NO: 12753 - DNA, 16 bp, synthetic construct
  misc_feature 1..16: note = synthetic [barcode part1]
  source 1..16: mol_type = other DNA
tcagtccttgttgtcc

SEQ ID NO: 12754 - DNA, 16 bp, synthetic construct
  misc_feature 1..16: note = synthetic [barcode part1]
  source 1..16: mol_type = other DNA
taacgtaccggtgtgt

SEQ ID NO: 12755 - DNA, 16 bp, synthetic construct
  misc_feature 1..16: note = synthetic [barcode part1]
  source 1..16: mol_type = other DNA
gattatatcgacctcc

SEQ ID NO: 12756 - DNA, 16 bp, synthetic construct
  misc_feature 1..16: note = synthetic [barcode part1]
  source 1..16: mol_type = other DNA
gattattctacgtccg

SEQ ID NO: 12757 - DNA, 16 bp, synthetic construct
  misc_feature 1..16: note = synthetic [barcode part1]
  source 1..16: mol_type = other DNA
caggagatacagtcgc

SEQ ID NO: 12758 - DNA, 16 bp, synthetic construct
  misc_feature 1..16: note = synthetic [barcode part1]
  source 1..16: mol_type = other DNA
acgttagtctcaccgc

SEQ ID NO: 12759 - DNA, 16 bp, synthetic construct
  misc_feature 1..16: note = synthetic [barcode part1]
  source 1..16: mol_type = other DNA
gagatcgaaccgtgtg

SEQ ID NO: 12760 - DNA, 16 bp, synthetic construct
  misc_feature 1..16: note = synthetic [barcode part1]
  source 1..16: mol_type = other DNA
gatactccttgattcg

SEQ ID NO: 12761 - DNA, 16 bp, synthetic construct
  misc_feature 1..16: note = synthetic [barcode part1]
  source 1..16: mol_type = other DNA
atacctcgaggtgtgt

SEQ ID NO: 12762 - DNA, 16 bp, synthetic construct
  misc_feature 1..16: note = synthetic [barcode part1]
  source 1..16: mol_type = other DNA
agtgtcaactgtgacc

SEQ ID NO: 12763 - DNA, 16 bp, synthetic construct
  misc_feature 1..16: note = synthetic [barcode part1]
  source 1..16: mol_type = other DNA
atcctgttaccagtgt

SEQ ID NO: 12764 - DNA, 16 bp, synthetic construct
  misc_feature 1..16: note = synthetic [barcode part1]
  source 1..16: mol_type = other DNA
gcaggtagtgacgttg

SEQ ID NO: 12765 - DNA, 16 bp, synthetic construct
  misc_feature 1..16: note = synthetic [barcode part1]
  source 1..16: mol_type = other DNA
cggaggaagttaaggt

SEQ ID NO: 12766 - DNA, 16 bp, synthetic construct
  misc_feature 1..16: note = synthetic [barcode part1]
  source 1..16: mol_type = other DNA
tatcttcgcactcctg

SEQ ID NO: 12767 - DNA, 16 bp, synthetic construct
  misc_feature 1..16: note = synthetic [barcode part1]
  source 1..16: mol_type = other DNA
ttattcctgtaggtcg

SEQ ID NO: 12768 - DNA, 16 bp, synthetic construct
  misc_feature 1..16: note = synthetic [barcode part1]
  source 1..16: mol_type = other DNA
gccgtcttcgtgagtt

SEQ ID NO: 12769 - DNA, 16 bp, synthetic construct
  misc_feature 1..16: note = synthetic [barcode part1]
  source 1..16: mol_type = other DNA
tgaagtagtggtcgcg

SEQ ID NO: 12770 - DNA, 16 bp, synthetic construct
  misc_feature 1..16: note = synthetic [barcode part1]
  source 1..16: mol_type = other DNA
ttagtgcggaagattg

SEQ ID NO: 12771 - DNA, 16 bp, synthetic construct
  misc_feature 1..16: note = synthetic [barcode part1]
  source 1..16: mol_type = other DNA
gacaggaaggaactac

SEQ ID NO: 12772 - DNA, 16 bp, synthetic construct
  misc_feature 1..16: note = synthetic [barcode part1]
  source 1..16: mol_type = other DNA
cggtgacgtgttcttc

SEQ ID NO: 12773 - DNA, 16 bp, synthetic construct
  misc_feature 1..16: note = synthetic [barcode part1]
  source 1..16: mol_type = other DNA
gtgaggattgaaccgc

SEQ ID NO: 12774 - DNA, 16 bp, synthetic construct
  misc_feature 1..16: note = synthetic [barcode part1]
  source 1..16: mol_type = other DNA
atccaccttgtaacac

SEQ ID NO: 12775 - DNA, 16 bp, synthetic construct
  misc_feature 1..16: note = synthetic [barcode part1]
  source 1..16: mol_type = other DNA
aagtgttctcgtcgtt

SEQ ID NO: 12776 - DNA, 16 bp, synthetic construct
  misc_feature 1..16: note = synthetic [barcode part1]
  source 1..16: mol_type = other DNA
atacgtggttacggtc

SEQ ID NO: 12777 - DNA, 16 bp, synthetic construct
  misc_feature 1..16: note = synthetic [barcode part1]
  source 1..16: mol_type = other DNA
atagactcctctgact

SEQ ID NO: 12778 - DNA, 16 bp, synthetic construct
  misc_feature 1..16: note = synthetic [barcode part1]
  source 1..16: mol_type = other DNA
tcaggttgatcgtcag

SEQ ID NO: 12779 - DNA, 16 bp, synthetic construct
  misc_feature 1..16: note = synthetic [barcode part1]
  source 1..16: mol_type = other DNA
agagtatcgcaccttg

SEQ ID NO: 12780 - DNA, 16 bp, synthetic construct
  misc_feature 1..16: note = synthetic [barcode part1]
  source 1..16: mol_type = other DNA
tactccgtaggcactc

SEQ ID NO: 12781 - DNA, 16 bp, synthetic construct
  misc_feature 1..16: note = synthetic [barcode part1]
  source 1..16: mol_type = other DNA
aaggattaggagaccg

SEQ ID NO: 12782 - DNA, 16 bp, synthetic construct
  misc_feature 1..16: note = synthetic [barcode part1]
  source 1..16: mol_type = other DNA
acctagttcctgcgtg

SEQ ID NO: 12783 - DNA, 16 bp, synthetic construct
  misc_feature 1..16: note = synthetic [barcode part1]
  source 1..16: mol_type = other DNA
gatccggttaagttgc

SEQ ID NO: 12784 - DNA, 16 bp, synthetic construct
  misc_feature 1..16: note = synthetic [barcode part1]
  source 1..16: mol_type = other DNA
gttgaacttgtgttcc

SEQ ID NO: 12785 - DNA, 16 bp, synthetic construct
  misc_feature 1..16: note = synthetic [barcode part1]
  source 1..16: mol_type = other DNA
aagtcgcacttctact

SEQ ID NO: 12786 - DNA, 16 bp, synthetic construct
  misc_feature 1..16: note = synthetic [barcode part1]
  source 1..16: mol_type = other DNA
tgtggacactccacct

SEQ ID NO: 12787 - DNA, 16 bp, synthetic construct
  misc_feature 1..16: note = synthetic [barcode part1]
  source 1..16: mol_type = other DNA
cagtcctcacgcaatc

SEQ ID NO: 12788 - DNA, 16 bp, synthetic construct
  misc_feature 1..16: note = synthetic [barcode part1]
  source 1..16: mol_type = other DNA
acactcacctactgcg

SEQ ID NO: 12789 - DNA, 16 bp, synthetic construct
  misc_feature 1..16: note = synthetic [barcode part1]
  source 1..16: mol_type = other DNA
acggttaaggatcaac

SEQ ID NO: 12790 - DNA, 16 bp, synthetic construct
  misc_feature 1..16: note = synthetic [barcode part1]
  source 1..16: mol_type = other DNA
gacaagaccggacact

SEQ ID NO: 12791 - DNA, 16 bp, synthetic construct
  misc_feature 1..16: note = synthetic [barcode part1]
  source 1..16: mol_type = other DNA
tgatctctagtcgtgt

SEQ ID NO: 12792 - DNA, 16 bp, synthetic construct
  misc_feature 1..16: note = synthetic [barcode part1]
  source 1..16: mol_type = other DNA
taggttactggaccgt

SEQ ID NO: 12793 - DNA, 16 bp, synthetic construct
  misc_feature 1..16: note = synthetic [barcode part1]
  source 1..16: mol_type = other DNA
cgccaagaataacctc

SEQ ID NO: 12794 - DNA, 16 bp, synthetic construct
  misc_feature 1..16: note = synthetic [barcode part1]
  source 1..16: mol_type = other DNA
agaccgagattgagag

SEQ ID NO: 12795 - DNA, 16 bp, synthetic construct
  misc_feature 1..16: note = synthetic [barcode part1]
  source 1..16: mol_type = other DNA
gacgtgaccgttgaag

SEQ ID NO: 12796 - DNA, 16 bp, synthetic construct
  misc_feature 1..16: note = synthetic [barcode part1]
  source 1..16: mol_type = other DNA
tcttcgactgagaggt

SEQ ID NO: 12797 - DNA, 16 bp, synthetic construct
  misc_feature 1..16: note = synthetic [barcode part1]
  source 1..16: mol_type = other DNA
tagacctctacttcag

SEQ ID NO: 12798 - DNA, 16 bp, synthetic construct
  misc_feature 1..16: note = synthetic [barcode part1]
  source 1..16: mol_type = other DNA
aacagtcagaacgtac

SEQ ID NO: 12799 - DNA, 16 bp, synthetic construct
  misc_feature 1..16: note = synthetic [barcode part1]
  source 1..16: mol_type = other DNA
gacttctcagtctcct

SEQ ID NO: 12800 - DNA, 16 bp, synthetic construct
  misc_feature 1..16: note = synthetic [barcode part1]
  source 1..16: mol_type = other DNA
agacttactcggttct

SEQ ID NO: 12801 - DNA, 16 bp, synthetic construct
  misc_feature 1..16: note = synthetic [barcode part1]
  source 1..16: mol_type = other DNA
caatcgattggtcgac

SEQ ID NO: 12802 - DNA, 16 bp, synthetic construct
  misc_feature 1..16: note = synthetic [barcode part1]
  source 1..16: mol_type = other DNA
tgaataccggtcttct

SEQ ID NO: 12803 - DNA, 16 bp, synthetic construct
  misc_feature 1..16: note = synthetic [barcode part1]
  source 1..16: mol_type = other DNA
tgcacagtgcctcact

SEQ ID NO: 12804 - DNA, 16 bp, synthetic construct
  misc_feature 1..16: note = synthetic [barcode part1]
  source 1..16: mol_type = other DNA
gagaggtattcaagtc

SEQ ID NO: 12805 - DNA, 16 bp, synthetic construct
  misc_feature 1..16: note = synthetic [barcode part1]
  source 1..16: mol_type = other DNA
actgcaaccacagtac

SEQ ID NO: 12806 - DNA, 16 bp, synthetic construct
  misc_feature 1..16: note = synthetic [barcode part1]
  source 1..16: mol_type = other DNA
tggactagtgcaggac

SEQ ID NO: 12807 - DNA, 16 bp, synthetic construct
  misc_feature 1..16: note = synthetic [barcode part1]
  source 1..16: mol_type = other DNA
tgtcaacgatcctccg

SEQ ID NO: 12808 - DNA, 16 bp, synthetic construct
  misc_feature 1..16: note = synthetic [barcode part1]
  source 1..16: mol_type = other DNA
aagaaggattgcgacg

SEQ ID NO: 12809 - DNA, 16 bp, synthetic construct
  misc_feature 1..16: note = synthetic [barcode part1]
  source 1..16: mol_type = other DNA
agttgacctgagactc

SEQ ID NO: 12810 - DNA, 16 bp, synthetic construct
  misc_feature 1..16: note = synthetic [barcode part1]
  source 1..16: mol_type = other DNA
aggtaggagtgttgcc

SEQ ID NO: 12811 - DNA, 16 bp, synthetic construct
  misc_feature 1..16: note = synthetic [barcode part1]
  source 1..16: mol_type = other DNA
aacgcgttagtcgtgt

SEQ ID NO: 12812 - DNA, 16 bp, synthetic construct
  misc_feature 1..16: note = synthetic [barcode part1]
  source 1..16: mol_type = other DNA
ccttgtctgaatactg

SEQ ID NO: 12813 - DNA, 16 bp, synthetic construct
  misc_feature 1..16: note = synthetic [barcode part1]
  source 1..16: mol_type = other DNA
tactagatcgtgcctt

SEQ ID NO: 12814 - DNA, 16 bp, synthetic construct
  misc_feature 1..16: note = synthetic [barcode part1]
  source 1..16: mol_type = other DNA
atcaccaggttcaacg

SEQ ID NO: 12815 - DNA, 16 bp, synthetic construct
  misc_feature 1..16: note = synthetic [barcode part1]
  source 1..16: mol_type = other DNA
gtgaacttctcaccgc

SEQ ID NO: 12816 - DNA, 16 bp, synthetic construct
  misc_feature 1..16: note = synthetic [barcode part1]
  source 1..16: mol_type = other DNA
tggtacagaagtaacc

SEQ ID NO: 12817 - DNA, 16 bp, synthetic construct
  misc_feature 1..16: note = synthetic [barcode part1]
  source 1..16: mol_type = other DNA
ccgatcctagagaact

SEQ ID NO: 12818 - DNA, 16 bp, synthetic construct
  misc_feature 1..16: note = synthetic [barcode part1]
  source 1..16: mol_type = other DNA
gagacgacagatattc

SEQ ID NO: 12819 - DNA, 16 bp, synthetic construct
  misc_feature 1..16: note = synthetic [barcode part1]
  source 1..16: mol_type = other DNA
cgatcctactacacgc

SEQ ID NO: 12820 - DNA, 16 bp, synthetic construct
  misc_feature 1..16: note = synthetic [barcode part1]
  source 1..16: mol_type = other DNA
tgacgattcgacagtc

SEQ ID NO: 12821 - DNA, 16 bp, synthetic construct
  misc_feature 1..16: note = synthetic [barcode part1]
  source 1..16: mol_type = other DNA
actggatcaccgaatc

SEQ ID NO: 12822 - DNA, 16 bp, synthetic construct
  misc_feature 1..16: note = synthetic [barcode part1]
  source 1..16: mol_type = other DNA
atagtcgattggcacc

SEQ ID NO: 12823 - DNA, 16 bp, synthetic construct
  misc_feature 1..16: note = synthetic [barcode part1]
  source 1..16: mol_type = other DNA
tcgacggtgaattgtc

SEQ ID NO: 12824 - DNA, 16 bp, synthetic construct
  misc_feature 1..16: note = synthetic [barcode part1]
  source 1..16: mol_type = other DNA
gttccgttgaggaatc

SEQ ID NO: 12825 - DNA, 16 bp, synthetic construct
  misc_feature 1..16: note = synthetic [barcode part1]
  source 1..16: mol_type = other DNA
atagtattgcgcacgc

SEQ ID NO: 12826 - DNA, 16 bp, synthetic construct
  misc_feature 1..16: note = synthetic [barcode part1]
  source 1..16: mol_type = other DNA
tagacgtgccgtcttc

SEQ ID NO: 12827 - DNA, 16 bp, synthetic construct
  misc_feature 1..16: note = synthetic [barcode part1]
  source 1..16: mol_type = other DNA
aacagtcaagagtacc

SEQ ID NO: 12828 - DNA, 16 bp, synthetic construct
  misc_feature 1..16: note = synthetic [barcode part1]
  source 1..16: mol_type = other DNA
aacgcgtcacgtgatt

SEQ ID NO: 12829 - DNA, 16 bp, synthetic construct
  misc_feature 1..16: note = synthetic [barcode part1]
  source 1..16: mol_type = other DNA
tgtcttactgcaagtc

SEQ ID NO: 12830 - DNA, 16 bp, synthetic construct
  misc_feature 1..16: note = synthetic [barcode part1]
  source 1..16: mol_type = other DNA
gtgacgagacacactg

SEQ ID NO: 12831 - DNA, 16 bp, synthetic construct
  misc_feature 1..16: note = synthetic [barcode part1]
  source 1..16: mol_type = other DNA
cgttgtatacaacgcg

SEQ ID NO: 12832 - DNA, 16 bp, synthetic construct
  misc_feature 1..16: note = synthetic [barcode part1]
  source 1..16: mol_type = other DNA
gtacgatacacactgc

SEQ ID NO: 12833 - DNA, 16 bp, synthetic construct
  misc_feature 1..16: note = synthetic [barcode part1]
  source 1..16: mol_type = other DNA
attcttccgtgtaacg

SEQ ID NO: 12834 - DNA, 16 bp, synthetic construct
  misc_feature 1..16: note = synthetic [barcode part1]
  source 1..16: mol_type = other DNA
cgtgtccttacacctt

SEQ ID NO: 12835 - DNA, 16 bp, synthetic construct
  misc_feature 1..16: note = synthetic [barcode part1]
  source 1..16: mol_type = other DNA
gaccgtactcctcagt

SEQ ID NO: 12836 - DNA, 16 bp, synthetic construct
  misc_feature 1..16: note = synthetic [barcode part1]
  source 1..16: mol_type = other DNA
tcacctgttgtaacac

SEQ ID NO: 12837 - DNA, 16 bp, synthetic construct
  misc_feature 1..16: note = synthetic [barcode part1]
  source 1..16: mol_type = other DNA
ttcttgtggtagttcg

SEQ ID NO: 12838 - DNA, 16 bp, synthetic construct
  misc_feature 1..16: note = synthetic [barcode part1]
  source 1..16: mol_type = other DNA
tagtacgattacctcc

SEQ ID NO: 12839 - DNA, 16 bp, synthetic construct
  misc_feature 1..16: note = synthetic [barcode part1]
  source 1..16: mol_type = other DNA
gtggtacactggttgt

SEQ ID NO: 12840 - DNA, 16 bp, synthetic construct
  misc_feature 1..16: note = synthetic [barcode part1]
  source 1..16: mol_type = other DNA
acagtgcgattgacct

SEQ ID NO: 12841 - DNA, 16 bp, synthetic construct
  misc_feature 1..16: note = synthetic [barcode part1]
  source 1..16: mol_type = other DNA
agaatacgaccgttag

SEQ ID NO: 12842 - DNA, 16 bp, synthetic construct
  misc_feature 1..16: note = synthetic [barcode part1]
  source 1..16: mol_type = other DNA
ttccgtatcgaatcgt

SEQ ID NO: 12843 - DNA, 16 bp, synthetic construct
  misc_feature 1..16: note = synthetic [barcode part1]
  source 1..16: mol_type = other DNA
ttctgagttactcgtg

SEQ ID NO: 12844 - DNA, 16 bp, synthetic construct
  misc_feature 1..16: note = synthetic [barcode part1]
  source 1..16: mol_type = other DNA
gcgtctgaccttatcg

SEQ ID NO: 12845 - DNA, 16 bp, synthetic construct
  misc_feature 1..16: note = synthetic [barcode part1]
  source 1..16: mol_type = other DNA
acggagagtcgtcaac

SEQ ID NO: 12846 - DNA, 16 bp, synthetic construct
  misc_feature 1..16: note = synthetic [barcode part1]
  source 1..16: mol_type = other DNA
caactgtcgagaggtg

SEQ ID NO: 12847 - DNA, 16 bp, synthetic construct
  misc_feature 1..16: note = synthetic [barcode part1]
  source 1..16: mol_type = other DNA
cgtagttgttagagag

SEQ ID NO: 12848 - DNA, 16 bp, synthetic construct
  misc_feature 1..16: note = synthetic [barcode part1]
  source 1..16: mol_type = other DNA
accgcgactcacttac

SEQ ID NO: 12849 - DNA, 16 bp, synthetic construct
  misc_feature 1..16: note = synthetic [barcode part1]
  source 1..16: mol_type = other DNA
tctggaagtcgtagtc

SEQ ID NO: 12850 - DNA, 16 bp, synthetic construct
  misc_feature 1..16: note = synthetic [barcode part1]
  source 1..16: mol_type = other DNA
cgtccaccttagaatt

SEQ ID NO: 12851 - DNA, 16 bp, synthetic construct
  misc_feature 1..16: note = synthetic [barcode part1]
  source 1..16: mol_type = other DNA
gcagactacgttcagt

SEQ ID NO: 12852 - DNA, 16 bp, synthetic construct
  misc_feature 1..16: note = synthetic [barcode part1]
  source 1..16: mol_type = other DNA
cagttgtgcctaagtg

SEQ ID NO: 12853 - DNA, 16 bp, synthetic construct
  misc_feature 1..16: note = synthetic [barcode part1]
  source 1..16: mol_type = other DNA
taagtcgccgacaatc

SEQ ID NO: 12854 - DNA, 16 bp, synthetic construct
  misc_feature 1..16: note = synthetic [barcode part1]
  source 1..16: mol_type = other DNA
taggattgccaaccgt

SEQ ID NO: 12855 - DNA, 16 bp, synthetic construct
  misc_feature 1..16: note = synthetic [barcode part1]
  source 1..16: mol_type = other DNA
tagtcttgttgtacgc

SEQ ID NO: 12856 - DNA, 16 bp, synthetic construct
  misc_feature 1..16: note = synthetic [barcode part1]
  source 1..16: mol_type = other DNA
tgttcaggttgcctcg

SEQ ID NO: 12857 - DNA, 16 bp, synthetic construct
  misc_feature 1..16: note = synthetic [barcode part1]
  source 1..16: mol_type = other DNA
cgtatagttcgtggac

SEQ ID NO: 12858 - DNA, 16 bp, synthetic construct
  misc_feature 1..16: note = synthetic [barcode part1]
  source 1..16: mol_type = other DNA
tgttactcagatctgc

SEQ ID NO: 12859 - DNA, 16 bp, synthetic construct
  misc_feature 1..16: note = synthetic [barcode part1]
  source 1..16: mol_type = other DNA
gacgtcaacacacgtt

SEQ ID NO: 12860 - DNA, 16 bp, synthetic construct
  misc_feature 1..16: note = synthetic [barcode part1]
  source 1..16: mol_type = other DNA
tagttatctgttgccg

SEQ ID NO: 12861 - DNA, 16 bp, synthetic construct
  misc_feature 1..16: note = synthetic [barcode part1]
  source 1..16: mol_type = other DNA
gttagtaggcaacagt

SEQ ID NO: 12862 - DNA, 16 bp, synthetic construct
  misc_feature 1..16: note = synthetic [barcode part1]
  source 1..16: mol_type = other DNA
cgatacgtggtctcct

SEQ ID NO: 12863 - DNA, 16 bp, synthetic construct
  misc_feature 1..16: note = synthetic [barcode part1]
  source 1..16: mol_type = other DNA
acaagatcttgtcgcg

SEQ ID NO: 12864 - DNA, 16 bp, synthetic construct
  misc_feature 1..16: note = synthetic [barcode part1]
  source 1..16: mol_type = other DNA
gccaggcagtaattct

SEQ ID NO: 12865 - DNA, 16 bp, synthetic construct
  misc_feature 1..16: note = synthetic [barcode part1]
  source 1..16: mol_type = other DNA
cgttgttcctgacctt

SEQ ID NO: 12866 - DNA, 16 bp, synthetic construct
  misc_feature 1..16: note = synthetic [barcode part1]
  source 1..16: mol_type = other DNA
aagttccgagaaggag

SEQ ID NO: 12867 - DNA, 16 bp, synthetic construct
  misc_feature 1..16: note = synthetic [barcode part1]
  source 1..16: mol_type = other DNA
tcaatctgcggttgcc

SEQ ID NO: 12868 - DNA, 16 bp, synthetic construct
  misc_feature 1..16: note = synthetic [barcode part1]
  source 1..16: mol_type = other DNA
aagacctcgagatctc

SEQ ID NO: 12869 - DNA, 16 bp, synthetic construct
  misc_feature 1..16: note = synthetic [barcode part1]
  source 1..16: mol_type = other DNA
ttcgcgttgtatctcc

SEQ ID NO: 12870 - DNA, 16 bp, synthetic construct
  misc_feature 1..16: note = synthetic [barcode part1]
  source 1..16: mol_type = other DNA
actacgaggcggatac

SEQ ID NO: 12871 - DNA, 16 bp, synthetic construct
  misc_feature 1..16: note = synthetic [barcode part1]
  source 1..16: mol_type = other DNA
agatccagtctgaacc

SEQ ID NO: 12872 - DNA, 16 bp, synthetic construct
  misc_feature 1..16: note = synthetic [barcode part1]
  source 1..16: mol_type = other DNA
tgttatcttcacggac

SEQ ID NO: 12873 - DNA, 16 bp, synthetic construct
  misc_feature 1..16: note = synthetic [barcode part1]
  source 1..16: mol_type = other DNA
tccggcactgtattcg

SEQ ID NO: 12874 - DNA, 16 bp, synthetic construct
  misc_feature 1..16: note = synthetic [barcode part1]
  source 1..16: mol_type = other DNA
gaccaactgcagtgtt

SEQ ID NO: 12875 - DNA, 16 bp, synthetic construct
  misc_feature 1..16: note = synthetic [barcode part1]
  source 1..16: mol_type = other DNA
tacaatagaacaggcc

SEQ ID NO: 12876 - DNA, 16 bp, synthetic construct
  misc_feature 1..16: note = synthetic [barcode part1]
  source 1..16: mol_type = other DNA
ataggaattaggtcgc

SEQ ID NO: 12877 - DNA, 16 bp, synthetic construct
  misc_feature 1..16: note = synthetic [barcode part1]
  source 1..16: mol_type = other DNA
gtgacgatctacggag

SEQ ID NO: 12878 - DNA, 16 bp, synthetic construct
  misc_feature 1..16: note = synthetic [barcode part1]
  source 1..16: mol_type = other DNA
gtgttctccggtaatt

SEQ ID NO: 12879 - DNA, 16 bp, synthetic construct
  misc_feature 1..16: note = synthetic [barcode part1]
  source 1..16: mol_type = other DNA
tatctcggcctatagt

SEQ ID NO: 12880 - DNA, 16 bp, synthetic construct
  misc_feature 1..16: note = synthetic [barcode part1]
  source 1..16: mol_type = other DNA
gcctagaacggatctt

SEQ ID NO: 12881 - DNA, 16 bp, synthetic construct
  misc_feature 1..16: note = synthetic [barcode part1]
  source 1..16: mol_type = other DNA
cacaacacactgtgac

SEQ ID NO: 12882 - DNA, 16 bp, synthetic construct
  misc_feature 1..16: note = synthetic [barcode part1]
  source 1..16: mol_type = other DNA
gttgatctcaggactg

SEQ ID NO: 12883 - DNA, 16 bp, synthetic construct
  misc_feature 1..16: note = synthetic [barcode part1]
  source 1..16: mol_type = other DNA
cggtcaacttctcctt

SEQ ID NO: 12884 - DNA, 16 bp, synthetic construct
  misc_feature 1..16: note = synthetic [barcode part1]
  source 1..16: mol_type = other DNA
gaggacttgacacacg

SEQ ID NO: 12885 - DNA, 16 bp, synthetic construct
  misc_feature 1..16: note = synthetic [barcode part1]
  source 1..16: mol_type = other DNA
taagacctaaccgacc

SEQ ID NO: 12886 - DNA, 16 bp, synthetic construct
  misc_feature 1..16: note = synthetic [barcode part1]
  source 1..16: mol_type = other DNA
cgttgatccgaaggag

SEQ ID NO: 12887 - DNA, 16 bp, synthetic construct
  misc_feature 1..16: note = synthetic [barcode part1]
  source 1..16: mol_type = other DNA
acagtcgaccgatact

SEQ ID NO: 12888 - DNA, 16 bp, synthetic construct
  misc_feature 1..16: note = synthetic [barcode part1]
  source 1..16: mol_type = other DNA
atagaaggaccgccac

SEQ ID NO: 12889 - DNA, 16 bp, synthetic construct
  misc_feature 1..16: note = synthetic [barcode part1]
  source 1..16: mol_type = other DNA
aactggcaggagaagt

SEQ ID NO: 12890 - DNA, 16 bp, synthetic construct
  misc_feature 1..16: note = synthetic [barcode part1]
  source 1..16: mol_type = other DNA
gccacgaatctactcc

SEQ ID NO: 12891 - DNA, 16 bp, synthetic construct
  misc_feature 1..16: note = synthetic [barcode part1]
  source 1..16: mol_type = other DNA
aatcaccagactaccg

SEQ ID NO: 12892 - DNA, 16 bp, synthetic construct
  misc_feature 1..16: note = synthetic [barcode part1]
  source 1..16: mol_type = other DNA
gtatacggtacacgtc

SEQ ID NO: 12893 - DNA, 16 bp, synthetic construct
  misc_feature 1..16: note = synthetic [barcode part1]
  source 1..16: mol_type = other DNA
tatccgatctcgttag

SEQ ID NO: 12894 - DNA, 16 bp, synthetic construct
  misc_feature 1..16: note = synthetic [barcode part1]
  source 1..16: mol_type = other DNA
tagttcctacaaccgt

SEQ ID NO: 12895 - DNA, 16 bp, synthetic construct
  misc_feature 1..16: note = synthetic [barcode part1]
  source 1..16: mol_type = other DNA
cctagtcgactagaac

SEQ ID NO: 12896 - DNA, 16 bp, synthetic construct
  misc_feature 1..16: note = synthetic [barcode part1]
  source 1..16: mol_type = other DNA
tcttacggatccagtt

SEQ ID NO: 12897 - DNA, 16 bp, synthetic construct
  misc_feature 1..16: note = synthetic [barcode part1]
  source 1..16: mol_type = other DNA
acaactaccagttcct

SEQ ID NO: 12898 - DNA, 16 bp, synthetic construct
  misc_feature 1..16: note = synthetic [barcode part1]
  source 1..16: mol_type = other DNA
tacgccttactcctac

SEQ ID NO: 12899 - DNA, 16 bp, synthetic construct
  misc_feature 1..16: note = synthetic [barcode part1]
  source 1..16: mol_type = other DNA
atcctgcaggtgtctc

SEQ ID NO: 12900 - DNA, 16 bp, synthetic construct
  misc_feature 1..16: note = synthetic [barcode part1]
  source 1..16: mol_type = other DNA
taagtgacaaggttcg

SEQ ID NO: 12901 - DNA, 16 bp, synthetic construct
  misc_feature 1..16: note = synthetic [barcode part1]
  source 1..16: mol_type = other DNA
attcgcagtatccgag

SEQ ID NO: 12902 - DNA, 16 bp, synthetic construct
  misc_feature 1..16: note = synthetic [barcode part1]
  source 1..16: mol_type = other DNA
ttcgtactcagtggtt

SEQ ID NO: 12903 - DNA, 16 bp, synthetic construct
  misc_feature 1..16: note = synthetic [barcode part1]
  source 1..16: mol_type = other DNA
tgtgtcctactaagtc

SEQ ID NO: 12904 - DNA, 16 bp, synthetic construct
  misc_feature 1..16: note = synthetic [barcode part1]
  source 1..16: mol_type = other DNA
acttaggagacttgcc

SEQ ID NO: 12905 - DNA, 16 bp, synthetic construct
  misc_feature 1..16: note = synthetic [barcode part1]
  source 1..16: mol_type = other DNA
caagttccgaggtgag

SEQ ID NO: 12906 - DNA, 16 bp, synthetic construct
  misc_feature 1..16: note = synthetic [barcode part1]
  source 1..16: mol_type = other DNA
aacagaatcgaacgtc

SEQ ID NO: 12907 - DNA, 16 bp, synthetic construct
  misc_feature 1..16: note = synthetic [barcode part1]
  source 1..16: mol_type = other DNA
gtcctatagtgacggt

SEQ ID NO: 12908 - DNA, 16 bp, synthetic construct
  misc_feature 1..16: note = synthetic [barcode part1]
  source 1..16: mol_type = other DNA
gagtggtacacgatcg

SEQ ID NO: 12909 - DNA, 16 bp, synthetic construct
  misc_feature 1..16: note = synthetic [barcode part1]
  source 1..16: mol_type = other DNA
ccttacaccagtaact

SEQ ID NO: 12910 - DNA, 16 bp, synthetic construct
  misc_feature 1..16: note = synthetic [barcode part1]
  source 1..16: mol_type = other DNA
atagtgcagttggtcc

SEQ ID NO: 12911 - DNA, 16 bp, synthetic construct
  misc_feature 1..16: note = synthetic [barcode part1]
  source 1..16: mol_type = other DNA
agtggtcgacctaact

SEQ ID NO: 12912 - DNA, 16 bp, synthetic construct
  misc_feature 1..16: note = synthetic [barcode part1]
  source 1..16: mol_type = other DNA
aaggtggcacttggac

SEQ ID NO: 12913 - DNA, 16 bp, synthetic construct
  misc_feature 1..16: note = synthetic [barcode part1]
  source 1..16: mol_type = other DNA
tgcaggattgacgacg

SEQ ID NO: 12914 - DNA, 16 bp, synthetic construct
  misc_feature 1..16: note = synthetic [barcode part1]
  source 1..16: mol_type = other DNA
gtgtgattcaaggaac

SEQ ID NO: 12915 - DNA, 16 bp, synthetic construct
  misc_feature 1..16: note = synthetic [barcode part1]
  source 1..16: mol_type = other DNA
attctcgtcgccaggt

SEQ ID NO: 12916 - DNA, 16 bp, synthetic construct
  misc_feature 1..16: note = synthetic [barcode part1]
  source 1..16: mol_type = other DNA
aactcacgtggacttg

SEQ ID NO: 12917 - DNA, 16 bp, synthetic construct
  misc_feature 1..16: note = synthetic [barcode part1]
  source 1..16: mol_type = other DNA
cgagagattgaccttc

SEQ ID NO: 12918 - DNA, 16 bp, synthetic construct
  misc_feature 1..16: note = synthetic [barcode part1]
  source 1..16: mol_type = other DNA
ttggccttactgatac

SEQ ID NO: 12919 - DNA, 16 bp, synthetic construct
  misc_feature 1..16: note = synthetic [barcode part1]
  source 1..16: mol_type = other DNA
gtggagtacaggtctg

SEQ ID NO: 12920 - DNA, 16 bp, synthetic construct
  misc_feature 1..16: note = synthetic [barcode part1]
  source 1..16: mol_type = other DNA
atcctcacttgtgcct

SEQ ID NO: 12921 - DNA, 16 bp, synthetic construct
  misc_feature 1..16: note = synthetic [barcode part1]
  source 1..16: mol_type = other DNA
caacgagtcacaggtg

SEQ ID NO: 12922 - DNA, 16 bp, synthetic construct
  misc_feature 1..16: note = synthetic [barcode part1]
  source 1..16: mol_type = other DNA
tgaactccactacttg

SEQ ID NO: 12923 - DNA, 16 bp, synthetic construct
  misc_feature 1..16: note = synthetic [barcode part1]
  source 1..16: mol_type = other DNA
tggtgtgtcgagtgtt

SEQ ID NO: 12924 - DNA, 16 bp, synthetic construct
  misc_feature 1..16: note = synthetic [barcode part1]
  source 1..16: mol_type = other DNA
ccgcgtattaactccg

SEQ ID NO: 12925 - DNA, 16 bp, synthetic construct
  misc_feature 1..16: note = synthetic [barcode part1]
  source 1..16: mol_type = other DNA
tggtgtactggtacac

SEQ ID NO: 12926 - DNA, 16 bp, synthetic construct
  misc_feature 1..16: note = synthetic [barcode part1]
  source 1..16: mol_type = other DNA
atacagtaccacgcgt

SEQ ID NO: 12927 - DNA, 16 bp, synthetic construct
  misc_feature 1..16: note = synthetic [barcode part1]
  source 1..16: mol_type = other DNA
cgacttaccgttagag

SEQ ID NO: 12928 - DNA, 16 bp, synthetic construct
  misc_feature 1..16: note = synthetic [barcode part1]
  source 1..16: mol_type = other DNA
tgcgaagaggatacag

SEQ ID NO: 12929 - DNA, 16 bp, synthetic construct
  misc_feature 1..16: note = synthetic [barcode part1]
  source 1..16: mol_type = other DNA
acagtcttcacacttg

SEQ ID NO: 12930 - DNA, 16 bp, synthetic construct
  misc_feature 1..16: note = synthetic [barcode part1]
  source 1..16: mol_type = other DNA
agaacggtattcgaac

SEQ ID NO: 12931 - DNA, 16 bp, synthetic construct
  misc_feature 1..16: note = synthetic [barcode part1]
  source 1..16: mol_type = other DNA
gccggtatactgatac

SEQ ID NO: 12932 - DNA, 16 bp, synthetic construct
  misc_feature 1..16: note = synthetic [barcode part1]
  source 1..16: mol_type = other DNA
gcgagattgtcacttg

SEQ ID NO: 12933 - DNA, 16 bp, synthetic construct
  misc_feature 1..16: note = synthetic [barcode part1]
  source 1..16: mol_type = other DNA
taatacaggtcacgcc

SEQ ID NO: 12934 - DNA, 16 bp, synthetic construct
  misc_feature 1..16: note = synthetic [barcode part1]
  source 1..16: mol_type = other DNA
gaggaggcgtatatag

SEQ ID NO: 12935 - DNA, 16 bp, synthetic construct
  misc_feature 1..16: note = synthetic [barcode part1]
  source 1..16: mol_type = other DNA
attcaggaacaagacc

SEQ ID NO: 12936 - DNA, 16 bp, synthetic construct
  misc_feature 1..16: note = synthetic [barcode part1]
  source 1..16: mol_type = other DNA
accactaaggatacag

SEQ ID NO: 12937 - DNA, 16 bp, synthetic construct
  misc_feature 1..16: note = synthetic [barcode part1]
  source 1..16: mol_type = other DNA
tgtcgagagtagtcct

SEQ ID NO: 12938 - DNA, 16 bp, synthetic construct
  misc_feature 1..16: note = synthetic [barcode part1]
  source 1..16: mol_type = other DNA
gacaaggatcagagac

SEQ ID NO: 12939 - DNA, 16 bp, synthetic construct
  misc_feature 1..16: note = synthetic [barcode part1]
  source 1..16: mol_type = other DNA
ccttcaccaggaatag

SEQ ID NO: 12940 - DNA, 16 bp, synthetic construct
  misc_feature 1..16: note = synthetic [barcode part1]
  source 1..16: mol_type = other DNA
acaattgcggtgcact

SEQ ID NO: 12941 - DNA, 16 bp, synthetic construct
  misc_feature 1..16: note = synthetic [barcode part1]
  source 1..16: mol_type = other DNA
cggtagaaccttgttg

SEQ ID NO: 12942 - DNA, 16 bp, synthetic construct
  misc_feature 1..16: note = synthetic [barcode part1]
  source 1..16: mol_type = other DNA
tctctgaaccaacact

SEQ ID NO: 12943 - DNA, 16 bp, synthetic construct
  misc_feature 1..16: note = synthetic [barcode part1]
  source 1..16: mol_type = other DNA
atactcgtaggcgttg

SEQ ID NO: 12944 - DNA, 16 bp, synthetic construct
  misc_feature 1..16: note = synthetic [barcode part1]
  source 1..16: mol_type = other DNA
tcactgcgacacctac

SEQ ID NO: 12945 - DNA, 16 bp, synthetic construct
  misc_feature 1..16: note = synthetic [barcode part1]
  source 1..16: mol_type = other DNA
ttaaggattaggcacg

SEQ ID NO: 12946 - DNA, 16 bp, synthetic construct
  misc_feature 1..16: note = synthetic [barcode part1]
  source 1..16: mol_type = other DNA
gcgatattggtaccac

SEQ ID NO: 12947 - DNA, 16 bp, synthetic construct
  misc_feature 1..16: note = synthetic [barcode part1]
  source 1..16: mol_type = other DNA
ttcagacagtgcgttg

SEQ ID NO: 12948 - DNA, 16 bp, synthetic construct
  misc_feature 1..16: note = synthetic [barcode part1]
  source 1..16: mol_type = other DNA
cacacttgcggtctgt

SEQ ID NO: 12949 - DNA, 16 bp, synthetic construct
  misc_feature 1..16: note = synthetic [barcode part1]
  source 1..16: mol_type = other DNA
acgtatccgaactcag

SEQ ID NO: 12950 - DNA, 16 bp, synthetic construct
  misc_feature 1..16: note = synthetic [barcode part1]
  source 1..16: mol_type = other DNA
cgacctcacgtgttgt

SEQ ID NO: 12951 - DNA, 16 bp, synthetic construct
  misc_feature 1..16: note = synthetic [barcode part1]
  source 1..16: mol_type = other DNA
aacagtcttcttacgc

SEQ ID NO: 12952 - DNA, 16 bp, synthetic construct
  misc_feature 1..16: note = synthetic [barcode part1]
  source 1..16: mol_type = other DNA
agaccttagaggagag

SEQ ID NO: 12953 - DNA, 16 bp, synthetic construct
  misc_feature 1..16: note = synthetic [barcode part1]
  source 1..16: mol_type = other DNA
cgtcgtctgttctact

SEQ ID NO: 12954 - DNA, 16 bp, synthetic construct
  misc_feature 1..16: note = synthetic [barcode part1]
  source 1..16: mol_type = other DNA
gcgtagtcttcaatct

SEQ ID NO: 12955 - DNA, 16 bp, synthetic construct
  misc_feature 1..16: note = synthetic [barcode part1]
  source 1..16: mol_type = other DNA
cgagtacaccacctct

SEQ ID NO: 12956 - DNA, 16 bp, synthetic construct
  misc_feature 1..16: note = synthetic [barcode part1]
  source 1..16: mol_type = other DNA
atctgaggaacctgtc

SEQ ID NO: 12957 - DNA, 16 bp, synthetic construct
  misc_feature 1..16: note = synthetic [barcode part1]
  source 1..16: mol_type = other DNA
tactcgacgcgaattg

SEQ ID NO: 12958 - DNA, 16 bp, synthetic construct
  misc_feature 1..16: note = synthetic [barcode part1]
  source 1..16: mol_type = other DNA
tcacctcttggcgtag

SEQ ID NO: 12959 - DNA, 16 bp, synthetic construct
  misc_feature 1..16: note = synthetic [barcode part1]
  source 1..16: mol_type = other DNA
gaattgcgtggaggtc

SEQ ID NO: 12960 - DNA, 16 bp, synthetic construct
  misc_feature 1..16: note = synthetic [barcode part1]
  source 1..16: mol_type = other DNA
ataccgagaaggccac

SEQ ID NO: 12961 - DNA, 16 bp, synthetic construct
  misc_feature 1..16: note = synthetic [barcode part1]
  source 1..16: mol_type = other DNA
gtactacgtggtatcg

SEQ ID NO: 12962 - DNA, 16 bp, synthetic construct
  misc_feature 1..16: note = synthetic [barcode part1]
  source 1..16: mol_type = other DNA
acgtgcaagaagaggt

SEQ ID NO: 12963 - DNA, 16 bp, synthetic construct
  misc_feature 1..16: note = synthetic [barcode part1]
  source 1..16: mol_type = other DNA
gcaactgcgattacgt

SEQ ID NO: 12964 - DNA, 16 bp, synthetic construct
  misc_feature 1..16: note = synthetic [barcode part1]
  source 1..16: mol_type = other DNA
tactcttcggcaaccg

SEQ ID NO: 12965 - DNA, 16 bp, synthetic construct
  misc_feature 1..16: note = synthetic [barcode part1]
  source 1..16: mol_type = other DNA
tctccttctggagttc

SEQ ID NO: 12966 - DNA, 16 bp, synthetic construct
  misc_feature 1..16: note = synthetic [barcode part1]
  source 1..16: mol_type = other DNA
tacgagtacagactcc

SEQ ID NO: 12967 - DNA, 16 bp, synthetic construct
  misc_feature 1..16: note = synthetic [barcode part1]
  source 1..16: mol_type = other DNA
tctattgccttcggtc

SEQ ID NO: 12968 - DNA, 16 bp, synthetic construct
  misc_feature 1..16: note = synthetic [barcode part1]
  source 1..16: mol_type = other DNA
aatcgcagaccaggac

SEQ ID NO: 12969 - DNA, 16 bp, synthetic construct
  misc_feature 1..16: note = synthetic [barcode part1]
  source 1..16: mol_type = other DNA
accgtatactacttcg

SEQ ID NO: 12970 - DNA, 16 bp, synthetic construct
  misc_feature 1..16: note = synthetic [barcode part1]
  source 1..16: mol_type = other DNA
agtattgcgtggcgtt

SEQ ID NO: 12971 - DNA, 16 bp, synthetic construct
  misc_feature 1..16: note = synthetic [barcode part1]
  source 1..16: mol_type = other DNA
ccgtcagttcttatag

SEQ ID NO: 12972 - DNA, 16 bp, synthetic construct
  misc_feature 1..16: note = synthetic [barcode part1]
  source 1..16: mol_type = other DNA
gcctactgaaccttgc

SEQ ID NO: 12973 - DNA, 16 bp, synthetic construct
  misc_feature 1..16: note = synthetic [barcode part1]
  source 1..16: mol_type = other DNA
ttcgacctgtagtcgc

SEQ ID NO: 12974 - DNA, 16 bp, synthetic construct
  misc_feature 1..16: note = synthetic [barcode part1]
  source 1..16: mol_type = other DNA
cagaacgacttctcag

SEQ ID NO: 12975 - DNA, 16 bp, synthetic construct
  misc_feature 1..16: note = synthetic [barcode part1]
  source 1..16: mol_type = other DNA
tgccttacgaacgcct

SEQ ID NO: 12976 - DNA, 16 bp, synthetic construct
  misc_feature 1..16: note = synthetic [barcode part1]
  source 1..16: mol_type = other DNA
cctcgcaccagtagtt

SEQ ID NO: 12977 - DNA, 16 bp, synthetic construct
  misc_feature 1..16: note = synthetic [barcode part1]
  source 1..16: mol_type = other DNA
ttgccgtacaggttcc

SEQ ID NO: 12978 - DNA, 16 bp, synthetic construct
  misc_feature 1..16: note = synthetic [barcode part1]
  source 1..16: mol_type = other DNA
tggtatctgcctattg

SEQ ID NO: 12979 - DNA, 16 bp, synthetic construct
  misc_feature 1..16: note = synthetic [barcode part1]
  source 1..16: mol_type = other DNA
tcgaacacgaggtgac

SEQ ID NO: 12980 - DNA, 16 bp, synthetic construct
  misc_feature 1..16: note = synthetic [barcode part1]
  source 1..16: mol_type = other DNA
tcacaaggcaaggcac

SEQ ID NO: 12981 - DNA, 16 bp, synthetic construct
  misc_feature 1..16: note = synthetic [barcode part1]
  source 1..16: mol_type = other DNA
ttatcgcacttacggt

SEQ ID NO: 12982 - DNA, 16 bp, synthetic construct
  misc_feature 1..16: note = synthetic [barcode part1]
  source 1..16: mol_type = other DNA
cgatcctcaattgcgc

SEQ ID NO: 12983 - DNA, 16 bp, synthetic construct
  misc_feature 1..16: note = synthetic [barcode part1]
  source 1..16: mol_type = other DNA
tgcacagagtgtacct

SEQ ID NO: 12984 - DNA, 16 bp, synthetic construct
  misc_feature 1..16: note = synthetic [barcode part1]
  source 1..16: mol_type = other DNA
gtaatacggtcggtct

SEQ ID NO: 12985 - DNA, 16 bp, synthetic construct
  misc_feature 1..16: note = synthetic [barcode part1]
  source 1..16: mol_type = other DNA
gtaacgttgtgtacgc

SEQ ID NO: 12986 - DNA, 16 bp, synthetic construct
  misc_feature 1..16: note = synthetic [barcode part1]
  source 1..16: mol_type = other DNA
ttgtgaacaggtccgt

SEQ ID NO: 12987 - DNA, 16 bp, synthetic construct
  misc_feature 1..16: note = synthetic [barcode part1]
  source 1..16: mol_type = other DNA
taagaccactaaccgc

SEQ ID NO: 12988 - DNA, 16 bp, synthetic construct
  misc_feature 1..16: note = synthetic [barcode part1]
  source 1..16: mol_type = other DNA
cagagacacttagtag

SEQ ID NO: 12989 - DNA, 16 bp, synthetic construct
  misc_feature 1..16: note = synthetic [barcode part1]
  source 1..16: mol_type = other DNA
cactgcgtgtatacag

SEQ ID NO: 12990 - DNA, 16 bp, synthetic construct
  misc_feature 1..16: note = synthetic [barcode part1]
  source 1..16: mol_type = other DNA
gacagttgcacctctc

SEQ ID NO: 12991 - DNA, 16 bp, synthetic construct
  misc_feature 1..16: note = synthetic [barcode part1]
  source 1..16: mol_type = other DNA
ttggtgagtgattcgc

SEQ ID NO: 12992 - DNA, 16 bp, synthetic construct
  misc_feature 1..16: note = synthetic [barcode part1]
  source 1..16: mol_type = other DNA
ttagacgaacacctgc

SEQ ID NO: 12993 - DNA, 16 bp, synthetic construct
  misc_feature 1..16: note = synthetic [barcode part1]
  source 1..16: mol_type = other DNA
gttaataccaccgttc

SEQ ID NO: 12994 - DNA, 16 bp, synthetic construct
  misc_feature 1..16: note = synthetic [barcode part1]
  source 1..16: mol_type = other DNA
gtcctacgttctctac

SEQ ID NO: 12995 - DNA, 16 bp, synthetic construct
  misc_feature 1..16: note = synthetic [barcode part1]
  source 1..16: mol_type = other DNA
cgcacctggactactt

SEQ ID NO: 12996 - DNA, 16 bp, synthetic construct
  misc_feature 1..16: note = synthetic [barcode part1]
  source 1..16: mol_type = other DNA
agtgaggagtctatac

SEQ ID NO: 12997 - DNA, 16 bp, synthetic construct
  misc_feature 1..16: note = synthetic [barcode part1]
  source 1..16: mol_type = other DNA
attgaagtaacacgcg

SEQ ID NO: 12998 - DNA, 16 bp, synthetic construct
  misc_feature 1..16: note = synthetic [barcode part1]
  source 1..16: mol_type = other DNA
tcgtaacgttacgacg

SEQ ID NO: 12999 - DNA, 16 bp, synthetic construct
  misc_feature 1..16: note = synthetic [barcode part1]
  source 1..16: mol_type = other DNA
accagtggaaccaggt

SEQ ID NO: 13000 - DNA, 16 bp, synthetic construct
  misc_feature 1..16: note = synthetic [barcode part1]
  source 1..16: mol_type = other DNA
tgagatccagtaccac

SEQ ID NO: 13001 - DNA, 16 bp, synthetic construct
  misc_feature 1..16: note = synthetic [barcode part1]
  source 1..16: mol_type = other DNA
gtctgagacttgtggt

SEQ ID NO: 13002 - DNA, 16 bp, synthetic construct
  misc_feature 1..16: note = synthetic [barcode part1]
  source 1..16: mol_type = other DNA
tcgaactcgacaatcg

SEQ ID NO: 13003 - DNA, 16 bp, synthetic construct
  misc_feature 1..16: note = synthetic [barcode part1]
  source 1..16: mol_type = other DNA
tctccgtggtagttcg

SEQ ID NO: 13004 - DNA, 16 bp, synthetic construct
  misc_feature 1..16: note = synthetic [barcode part1]
  source 1..16: mol_type = other DNA
ttctgtagtcgccgac

SEQ ID NO: 13005 - DNA, 16 bp, synthetic construct
  misc_feature 1..16: note = synthetic [barcode part1]
  source 1..16: mol_type = other DNA
atcggtgttcgatctt

SEQ ID NO: 13006 - DNA, 16 bp, synthetic construct
  misc_feature 1..16: note = synthetic [barcode part1]
  source 1..16: mol_type = other DNA
tactgccggtatattc

SEQ ID NO: 13007 - DNA, 16 bp, synthetic construct
  misc_feature 1..16: note = synthetic [barcode part1]
  source 1..16: mol_type = other DNA
gttccaccagacctac

SEQ ID NO: 13008 - DNA, 16 bp, synthetic construct
  misc_feature 1..16: note = synthetic [barcode part1]
  source 1..16: mol_type = other DNA
aaggaccttgaaggag

SEQ ID NO: 13009 - DNA, 16 bp, synthetic construct
  misc_feature 1..16: note = synthetic [barcode part1]
  source 1..16: mol_type = other DNA
ccgtgcaatattggtg

SEQ ID NO: 13010 - DNA, 16 bp, synthetic construct
  misc_feature 1..16: note = synthetic [barcode part1]
  source 1..16: mol_type = other DNA
cacagtgttgtctact

SEQ ID NO: 13011 - DNA, 16 bp, synthetic construct
  misc_feature 1..16: note = synthetic [barcode part1]
  source 1..16: mol_type = other DNA
accagattagaccacc

SEQ ID NO: 13012 - DNA, 16 bp, synthetic construct
  misc_feature 1..16: note = synthetic [barcode part1]
  source 1..16: mol_type = other DNA
gaggtgtattaggccg

SEQ ID NO: 13013 - DNA, 16 bp, synthetic construct
  misc_feature 1..16: note = synthetic [barcode part1]
  source 1..16: mol_type = other DNA
ttggtctgcagttgtt

SEQ ID NO: 13014 - DNA, 16 bp, synthetic construct
  misc_feature 1..16: note = synthetic [barcode part1]
  source 1..16: mol_type = other DNA
gaatcaacaatcgcag

SEQ ID NO: 13015 - DNA, 16 bp, synthetic construct
  misc_feature 1..16: note = synthetic [barcode part1]
  source 1..16: mol_type = other DNA
cagtggtagtctggtt

SEQ ID NO: 13016 - DNA, 16 bp, synthetic construct
  misc_feature 1..16: note = synthetic [barcode part1]
  source 1..16: mol_type = other DNA
atctactcgtcgtggc

SEQ ID NO: 13017 - DNA, 16 bp, synthetic construct
  misc_feature 1..16: note = synthetic [barcode part1]
  source 1..16: mol_type = other DNA
gatcttcgtcggaagt

SEQ ID NO: 13018 - DNA, 16 bp, synthetic construct
  misc_feature 1..16: note = synthetic [barcode part1]
  source 1..16: mol_type = other DNA
tggaatctagttggcc

SEQ ID NO: 13019 - DNA, 16 bp, synthetic construct
  misc_feature 1..16: note = synthetic [barcode part1]
  source 1..16: mol_type = other DNA
ttggaactccggaatc

SEQ ID NO: 13020 - DNA, 16 bp, synthetic construct
  misc_feature 1..16: note = synthetic [barcode part1]
  source 1..16: mol_type = other DNA
gcgagatcgagtactg

SEQ ID NO: 13021 - DNA, 16 bp, synthetic construct
  misc_feature 1..16: note = synthetic [barcode part1]
  source 1..16: mol_type = other DNA
caatcttgtgtaccac

SEQ ID NO: 13022 - DNA, 16 bp, synthetic construct
  misc_feature 1..16: note = synthetic [barcode part1]
  source 1..16: mol_type = other DNA
gaatagtagttcgcag

SEQ ID NO: 13023 - DNA, 16 bp, synthetic construct
  misc_feature 1..16: note = synthetic [barcode part1]
  source 1..16: mol_type = other DNA
tgtacagattctctgc

SEQ ID NO: 13024 - DNA, 16 bp, synthetic construct
  misc_feature 1..16: note = synthetic [barcode part1]
  source 1..16: mol_type = other DNA
agacctggcaactact

SEQ ID NO: 13025 - DNA, 16 bp, synthetic construct
  misc_feature 1..16: note = synthetic [barcode part1]
  source 1..16: mol_type = other DNA
ttgtcaccttgccgtt

SEQ ID NO: 13026 - DNA, 16 bp, synthetic construct
  misc_feature 1..16: note = synthetic [barcode part1]
  source 1..16: mol_type = other DNA
aagtgttgagtgacgt

SEQ ID NO: 13027 - DNA, 16 bp, synthetic construct
  misc_feature 1..16: note = synthetic [barcode part1]
  source 1..16: mol_type = other DNA
caggagtggatcgttg

SEQ ID NO: 13028 - DNA, 16 bp, synthetic construct
  misc_feature 1..16: note = synthetic [barcode part1]
  source 1..16: mol_type = other DNA
aagtgaacgagattcc

SEQ ID NO: 13029 - DNA, 16 bp, synthetic construct
  misc_feature 1..16: note = synthetic [barcode part1]
  source 1..16: mol_type = other DNA
tgaacgccggtgaagt

SEQ ID NO: 13030 - DNA, 16 bp, synthetic construct
  misc_feature 1..16: note = synthetic [barcode part1]
  source 1..16: mol_type = other DNA
agtgccactctgaagt

SEQ ID NO: 13031 - DNA, 16 bp, synthetic construct
  misc_feature 1..16: note = synthetic [barcode part1]
  source 1..16: mol_type = other DNA
accacttacttcgcct

SEQ ID NO: 13032 - DNA, 16 bp, synthetic construct
  misc_feature 1..16: note = synthetic [barcode part1]
  source 1..16: mol_type = other DNA
ttacgcctgaactgcc

SEQ ID NO: 13033 - DNA, 16 bp, synthetic construct
  misc_feature 1..16: note = synthetic [barcode part1]
  source 1..16: mol_type = other DNA
acttggtaccactgag

SEQ ID NO: 13034 - DNA, 16 bp, synthetic construct
  misc_feature 1..16: note = synthetic [barcode part1]
  source 1..16: mol_type = other DNA
gtgtctcactactggc

SEQ ID NO: 13035 - DNA, 16 bp, synthetic construct
  misc_feature 1..16: note = synthetic [barcode part1]
  source 1..16: mol_type = other DNA
tcaactgtcgaccaag

SEQ ID NO: 13036 - DNA, 16 bp, synthetic construct
  misc_feature 1..16: note = synthetic [barcode part1]
  source 1..16: mol_type = other DNA
gagacctctacttact

SEQ ID NO: 13037 - DNA, 16 bp, synthetic construct
  misc_feature 1..16: note = synthetic [barcode part1]
  source 1..16: mol_type = other DNA
tcaacaaggaccacct

SEQ ID NO: 13038 - DNA, 16 bp, synthetic construct
  misc_feature 1..16: note = synthetic [barcode part1]
  source 1..16: mol_type = other DNA
tcctgacgtacttggc

SEQ ID NO: 13039 - DNA, 16 bp, synthetic construct
  misc_feature 1..16: note = synthetic [barcode part1]
  source 1..16: mol_type = other DNA
agtcacggagaccagt

SEQ ID NO: 13040 - DNA, 16 bp, synthetic construct
  misc_feature 1..16: note = synthetic [barcode part1]
  source 1..16: mol_type = other DNA
aactggtctagttggc

SEQ ID NO: 13041 - DNA, 16 bp, synthetic construct
  misc_feature 1..16: note = synthetic [barcode part1]
  source 1..16: mol_type = other DNA
cgttacactaaccgag

SEQ ID NO: 13042 - DNA, 16 bp, synthetic construct
  misc_feature 1..16: note = synthetic [barcode part1]
  source 1..16: mol_type = other DNA
acaacctctaccagag

SEQ ID NO: 13043 - DNA, 16 bp, synthetic construct
  misc_feature 1..16: note = synthetic [barcode part1]
  source 1..16: mol_type = other DNA
tcacaggatccgagtt

SEQ ID NO: 13044 - DNA, 16 bp, synthetic construct
  misc_feature 1..16: note = synthetic [barcode part1]
  source 1..16: mol_type = other DNA
acaatcgttggcctcc

SEQ ID NO: 13045 - DNA, 16 bp, synthetic construct
  misc_feature 1..16: note = synthetic [barcode part1]
  source 1..16: mol_type = other DNA
tagtgtgtggtcctcc

SEQ ID NO: 13046 - DNA, 16 bp, synthetic construct
  misc_feature 1..16: note = synthetic [barcode part1]
  source 1..16: mol_type = other DNA
gtaaggattgacggtt

SEQ ID NO: 13047 - DNA, 16 bp, synthetic construct
  misc_feature 1..16: note = synthetic [barcode part1]
  source 1..16: mol_type = other DNA
tgcgagtccgtagatt

SEQ ID NO: 13048 - DNA, 16 bp, synthetic construct
  misc_feature 1..16: note = synthetic [barcode part1]
  source 1..16: mol_type = other DNA
aacgccaattgcggtt

SEQ ID NO: 13049 - DNA, 16 bp, synthetic construct
  misc_feature 1..16: note = synthetic [barcode part1]
  source 1..16: mol_type = other DNA
tcttagttggccttcc

SEQ ID NO: 13050 - DNA, 16 bp, synthetic construct
  misc_feature 1..16: note = synthetic [barcode part1]
  source 1..16: mol_type = other DNA
tcttgttggcgcctag

SEQ ID NO: 13051 - DNA, 16 bp, synthetic construct
  misc_feature 1..16: note = synthetic [barcode part1]
  source 1..16: mol_type = other DNA
gcgcgagagtaatctg

SEQ ID NO: 13052 - DNA, 16 bp, synthetic construct
  misc_feature 1..16: note = synthetic [barcode part1]
  source 1..16: mol_type = other DNA
aaggcgtaatccggtg

SEQ ID NO: 13053 - DNA, 16 bp, synthetic construct
  misc_feature 1..16: note = synthetic [barcode part1]
  source 1..16: mol_type = other DNA
aggcgtcgtcctattc

SEQ ID NO: 13054 - DNA, 16 bp, synthetic construct
  misc_feature 1..16: note = synthetic [barcode part1]
  source 1..16: mol_type = other DNA
caagacgactcgagtg

SEQ ID NO: 13055 - DNA, 16 bp, synthetic construct
  misc_feature 1..16: note = synthetic [barcode part1]
  source 1..16: mol_type = other DNA
atcgatatctggcctt

SEQ ID NO: 13056 - DNA, 16 bp, synthetic construct
  misc_feature 1..16: note = synthetic [barcode part1]
  source 1..16: mol_type = other DNA
aggtaggccacttatc

SEQ ID NO: 13057 - DNA, 16 bp, synthetic construct
  misc_feature 1..16: note = synthetic [barcode part1]
  source 1..16: mol_type = other DNA
tcgtggacaagaagtt

SEQ ID NO: 13058 - DNA, 16 bp, synthetic construct
  misc_feature 1..16: note = synthetic [barcode part1]
  source 1..16: mol_type = other DNA
tcctcctaccgtgatt

SEQ ID NO: 13059 - DNA, 16 bp, synthetic construct
  misc_feature 1..16: note = synthetic [barcode part1]
  source 1..16: mol_type = other DNA
gccgcctaataagatc

SEQ ID NO: 13060 - DNA, 16 bp, synthetic construct
  misc_feature 1..16: note = synthetic [barcode part1]
  source 1..16: mol_type = other DNA
agaatccgtggtactc

SEQ ID NO: 13061 - DNA, 16 bp, synthetic construct
  misc_feature 1..16: note = synthetic [barcode part1]
  source 1..16: mol_type = other DNA
tactcaggacttgcag

SEQ ID NO: 13062 - DNA, 16 bp, synthetic construct
  misc_feature 1..16: note = synthetic [barcode part1]
  source 1..16: mol_type = other DNA
aacaccagtgtgtacc

SEQ ID NO: 13063 - DNA, 16 bp, synthetic construct
  misc_feature 1..16: note = synthetic [barcode part1]
  source 1..16: mol_type = other DNA
cacagttcgcactaag

SEQ ID NO: 13064 - DNA, 16 bp, synthetic construct
  misc_feature 1..16: note = synthetic [barcode part1]
  source 1..16: mol_type = other DNA
tagtctcgcgtcggtt

SEQ ID NO: 13065 - DNA, 16 bp, synthetic construct
  misc_feature 1..16: note = synthetic [barcode part1]
  source 1..16: mol_type = other DNA
gcgaactatcactctt

SEQ ID NO: 13066 - DNA, 16 bp, synthetic construct
  misc_feature 1..16: note = synthetic [barcode part1]
  source 1..16: mol_type = other DNA
aacgtcaacacgtgtc

SEQ ID NO: 13067 - DNA, 16 bp, synthetic construct
  misc_feature 1..16: note = synthetic [barcode part1]
  source 1..16: mol_type = other DNA
ttaataccggtgtgcg

SEQ ID NO: 13068 - DNA, 16 bp, synthetic construct
  misc_feature 1..16: note = synthetic [barcode part1]
  source 1..16: mol_type = other DNA
tatcacgcgtgtacag

SEQ ID NO: 13069 - DNA, 16 bp, synthetic construct
  misc_feature 1..16: note = synthetic [barcode part1]
  source 1..16: mol_type = other DNA
tcggacaacgataagt

SEQ ID NO: 13070 - DNA, 16 bp, synthetic construct
  misc_feature 1..16: note = synthetic [barcode part1]
  source 1..16: mol_type = other DNA
tctcgaactgcctacg

SEQ ID NO: 13071 - DNA, 16 bp, synthetic construct
  misc_feature 1..16: note = synthetic [barcode part1]
  source 1..16: mol_type = other DNA
tagtgactggtagtcc

SEQ ID NO: 13072 - DNA, 16 bp, synthetic construct
  misc_feature 1..16: note = synthetic [barcode part1]
  source 1..16: mol_type = other DNA
taggaggcacagttgc

SEQ ID NO: 13073 - DNA, 16 bp, synthetic construct
  misc_feature 1..16: note = synthetic [barcode part1]
  source 1..16: mol_type = other DNA
gcgaatccaatagagt

SEQ ID NO: 13074 - DNA, 16 bp, synthetic construct
  misc_feature 1..16: note = synthetic [barcode part1]
  source 1..16: mol_type = other DNA
cgtcggtatactagtg

SEQ ID NO: 13075 - DNA, 16 bp, synthetic construct
  misc_feature 1..16: note = synthetic [barcode part1]
  source 1..16: mol_type = other DNA
atcggtgtgaaggatt

SEQ ID NO: 13076 - DNA, 16 bp, synthetic construct
  misc_feature 1..16: note = synthetic [barcode part1]
  source 1..16: mol_type = other DNA
ttaactccactagtgc

SEQ ID NO: 13077 - DNA, 16 bp, synthetic construct
  misc_feature 1..16: note = synthetic [barcode part1]
  source 1..16: mol_type = other DNA
gtgccggtatattggt

SEQ ID NO: 13078 - DNA, 16 bp, synthetic construct
  misc_feature 1..16: note = synthetic [barcode part1]
  source 1..16: mol_type = other DNA
gcacgtcggtaacaag

SEQ ID NO: 13079 - DNA, 16 bp, synthetic construct
  misc_feature 1..16: note = synthetic [barcode part1]
  source 1..16: mol_type = other DNA
ttcgcaagagtgatag

SEQ ID NO: 13080 - DNA, 16 bp, synthetic construct
  misc_feature 1..16: note = synthetic [barcode part1]
  source 1..16: mol_type = other DNA
cgactgcacttaagtg

SEQ ID NO: 13081 - DNA, 16 bp, synthetic construct
  misc_feature 1..16: note = synthetic [barcode part1]
  source 1..16: mol_type = other DNA
tcctgatcgacagagt

SEQ ID NO: 13082 - DNA, 16 bp, synthetic construct
  misc_feature 1..16: note = synthetic [barcode part1]
  source 1..16: mol_type = other DNA
aggtctgaccttccgt

SEQ ID NO: 13083 - DNA, 16 bp, synthetic construct
  misc_feature 1..16: note = synthetic [barcode part1]
  source 1..16: mol_type = other DNA
ccagtaggcggaagtt

SEQ ID NO: 13084 - DNA, 16 bp, synthetic construct
  misc_feature 1..16: note = synthetic [barcode part1]
  source 1..16: mol_type = other DNA
taactggatcagtcgc

SEQ ID NO: 13085 - DNA, 16 bp, synthetic construct
  misc_feature 1..16: note = synthetic [barcode part1]
  source 1..16: mol_type = other DNA
tagtcaggtcaatcgc

SEQ ID NO: 13086 - DNA, 16 bp, synthetic construct
  misc_feature 1..16: note = synthetic [barcode part1]
  source 1..16: mol_type = other DNA
gaactacttcgtatcc

SEQ ID NO: 13087 - DNA, 16 bp, synthetic construct
  misc_feature 1..16: note = synthetic [barcode part1]
  source 1..16: mol_type = other DNA
tgagaccaccgtaact

SEQ ID NO: 13088 - DNA, 16 bp, synthetic construct
  misc_feature 1..16: note = synthetic [barcode part1]
  source 1..16: mol_type = other DNA
aagaggaccgagattg

SEQ ID NO: 13089 - DNA, 16 bp, synthetic construct
  misc_feature 1..16: note = synthetic [barcode part1]
  source 1..16: mol_type = other DNA
tccgatcagaaggttc

SEQ ID NO: 13090 - DNA, 16 bp, synthetic construct
  misc_feature 1..16: note = synthetic [barcode part1]
  source 1..16: mol_type = other DNA
gattgcgagagtcggt

SEQ ID NO: 13091 - DNA, 16 bp, synthetic construct
  misc_feature 1..16: note = synthetic [barcode part1]
  source 1..16: mol_type = other DNA
agacgccagtattcac

SEQ ID NO: 13092 - DNA, 16 bp, synthetic construct
  misc_feature 1..16: note = synthetic [barcode part1]
  source 1..16: mol_type = other DNA
tggcgattgtgttctt

SEQ ID NO: 13093 - DNA, 16 bp, synthetic construct
  misc_feature 1..16: note = synthetic [barcode part1]
  source 1..16: mol_type = other DNA
gccttaactgagactg

SEQ ID NO: 13094 - DNA, 16 bp, synthetic construct
  misc_feature 1..16: note = synthetic [barcode part1]
  source 1..16: mol_type = other DNA
gttaggtagacacggc

SEQ ID NO: 13095 - DNA, 16 bp, synthetic construct
  misc_feature 1..16: note = synthetic [barcode part1]
  source 1..16: mol_type = other DNA
ttcggaacgaccaatc

SEQ ID NO: 13096 - DNA, 16 bp, synthetic construct
  misc_feature 1..16: note = synthetic [barcode part1]
  source 1..16: mol_type = other DNA
aggccgttctaacaac

SEQ ID NO: 13097 - DNA, 16 bp, synthetic construct
  misc_feature 1..16: note = synthetic [barcode part1]
  source 1..16: mol_type = other DNA
acaggttaccagaggc

SEQ ID NO: 13098 - DNA, 16 bp, synthetic construct
  misc_feature 1..16: note = synthetic [barcode part1]
  source 1..16: mol_type = other DNA
tcgttgcagtactcgc

SEQ ID NO: 13099 - DNA, 16 bp, synthetic construct
  misc_feature 1..16: note = synthetic [barcode part1]
  source 1..16: mol_type = other DNA
cggtgaatcgtcttag

SEQ ID NO: 13100 - DNA, 16 bp, synthetic construct
  misc_feature 1..16: note = synthetic [barcode part1]
  source 1..16: mol_type = other DNA
tcttaactcctgtcgc

SEQ ID NO: 13101 - DNA, 16 bp, synthetic construct
  misc_feature 1..16: note = synthetic [barcode part1]
  source 1..16: mol_type = other DNA
aacgatacgagtgccg

SEQ ID NO: 13102 - DNA, 16 bp, synthetic construct
  misc_feature 1..16: note = synthetic [barcode part1]
  source 1..16: mol_type = other DNA
cactagttcggccttg

SEQ ID NO: 13103 - DNA, 16 bp, synthetic construct
  misc_feature 1..16: note = synthetic [barcode part1]
  source 1..16: mol_type = other DNA
gtgaacgccgtagtag

SEQ ID NO: 13104 - DNA, 16 bp, synthetic construct
  misc_feature 1..16: note = synthetic [barcode part1]
  source 1..16: mol_type = other DNA
cctacaagatagagtg

SEQ ID NO: 13105 - DNA, 16 bp, synthetic construct
  misc_feature 1..16: note = synthetic [barcode part1]
  source 1..16: mol_type = other DNA
acacctctcagtgacc

SEQ ID NO: 13106 - DNA, 16 bp, synthetic construct
  misc_feature 1..16: note = synthetic [barcode part1]
  source 1..16: mol_type = other DNA
tgtcggagtctccact

SEQ ID NO: 13107 - DNA, 16 bp, synthetic construct
  misc_feature 1..16: note = synthetic [barcode part1]
  source 1..16: mol_type = other DNA
attgaaccgtccttgt

SEQ ID NO: 13108 - DNA, 16 bp, synthetic construct
  misc_feature 1..16: note = synthetic [barcode part1]
  source 1..16: mol_type = other DNA
gaatccactacacgac

SEQ ID NO: 13109 - DNA, 16 bp, synthetic construct
  misc_feature 1..16: note = synthetic [barcode part1]
  source 1..16: mol_type = other DNA
gtatatactgaccggc

SEQ ID NO: 13110 - DNA, 16 bp, synthetic construct
  misc_feature 1..16: note = synthetic [barcode part1]
  source 1..16: mol_type = other DNA
tgttaggacgatctgc

SEQ ID NO: 13111 - DNA, 16 bp, synthetic construct
  misc_feature 1..16: note = synthetic [barcode part1]
  source 1..16: mol_type = other DNA
caataagtcgtgaacg

SEQ ID NO: 13112 - DNA, 16 bp, synthetic construct
  misc_feature 1..16: note = synthetic [barcode part1]
  source 1..16: mol_type = other DNA
aactattcgcctctag

SEQ ID NO: 13113 - DNA, 16 bp, synthetic construct
  misc_feature 1..16: note = synthetic [barcode part1]
  source 1..16: mol_type = other DNA
gactacttccgtgtcg

SEQ ID NO: 13114 - DNA, 16 bp, synthetic construct
  misc_feature 1..16: note = synthetic [barcode part1]
  source 1..16: mol_type = other DNA
attgcgtagagactag

SEQ ID NO: 13115 - DNA, 16 bp, synthetic construct
  misc_feature 1..16: note = synthetic [barcode part1]
  source 1..16: mol_type = other DNA
tgtagacgtaggtctc

SEQ ID NO: 13116 - DNA, 16 bp, synthetic construct
  misc_feature 1..16: note = synthetic [barcode part1]
  source 1..16: mol_type = other DNA
attctcaactcgacac

SEQ ID NO: 13117 - DNA, 16 bp, synthetic construct
  misc_feature 1..16: note = synthetic [barcode part1]
  source 1..16: mol_type = other DNA
aacgtgcctaacttct

SEQ ID NO: 13118 - DNA, 16 bp, synthetic construct
  misc_feature 1..16: note = synthetic [barcode part1]
  source 1..16: mol_type = other DNA
ccggcagatagaggtt

SEQ ID NO: 13119 - DNA, 16 bp, synthetic construct
  misc_feature 1..16: note = synthetic [barcode part1]
  source 1..16: mol_type = other DNA
cacaggtacgaacctt

SEQ ID NO: 13120 - DNA, 16 bp, synthetic construct
  misc_feature 1..16: note = synthetic [barcode part1]
  source 1..16: mol_type = other DNA
agacgagtgaacgaac

SEQ ID NO: 13121 - DNA, 16 bp, synthetic construct
  misc_feature 1..16: note = synthetic [barcode part1]
  source 1..16: mol_type = other DNA
aacctgagactaccac

SEQ ID NO: 13122 - DNA, 16 bp, synthetic construct
  misc_feature 1..16: note = synthetic [barcode part1]
  source 1..16: mol_type = other DNA
gtcactaggaacgcag

SEQ ID NO: 13123 - DNA, 16 bp, synthetic construct
  misc_feature 1..16: note = synthetic [barcode part1]
  source 1..16: mol_type = other DNA
atacggtggtctcctc

SEQ ID NO: 13124 - DNA, 16 bp, synthetic construct
  misc_feature 1..16: note = synthetic [barcode part1]
  source 1..16: mol_type = other DNA
ttcttgacacggttac

SEQ ID NO: 13125 - DNA, 16 bp, synthetic construct
  misc_feature 1..16: note = synthetic [barcode part1]
  source 1..16: mol_type = other DNA
gtaattgaggaccagt

SEQ ID NO: 13126 - DNA, 16 bp, synthetic construct
  misc_feature 1..16: note = synthetic [barcode part1]
  source 1..16: mol_type = other DNA
ttggacggacggagtt

SEQ ID NO: 13127 - DNA, 16 bp, synthetic construct
  misc_feature 1..16: note = synthetic [barcode part1]
  source 1..16: mol_type = other DNA
cagaacgccgttattg

SEQ ID NO: 13128 - DNA, 16 bp, synthetic construct
  misc_feature 1..16: note = synthetic [barcode part1]
  source 1..16: mol_type = other DNA
ccagttcacaactatc

SEQ ID NO: 13129 - DNA, 16 bp, synthetic construct
  misc_feature 1..16: note = synthetic [barcode part1]
  source 1..16: mol_type = other DNA
ttcttgtgagtcgccg

SEQ ID NO: 13130 - DNA, 16 bp, synthetic construct
  misc_feature 1..16: note = synthetic [barcode part1]
  source 1..16: mol_type = other DNA
atccagacagacactc

SEQ ID NO: 13131 - DNA, 16 bp, synthetic construct
  misc_feature 1..16: note = synthetic [barcode part1]
  source 1..16: mol_type = other DNA
tctccggatatcaact

SEQ ID NO: 13132 - DNA, 16 bp, synthetic construct
  misc_feature 1..16: note = synthetic [barcode part1]
  source 1..16: mol_type = other DNA
tgagttgttggtgacc

SEQ ID NO: 13133 - DNA, 16 bp, synthetic construct
  misc_feature 1..16: note = synthetic [barcode part1]
  source 1..16: mol_type = other DNA
gtggaagtagtggtcc

SEQ ID NO: 13134 - DNA, 16 bp, synthetic construct
  misc_feature 1..16: note = synthetic [barcode part1]
  source 1..16: mol_type = other DNA
gacgtataccgtacac

SEQ ID NO: 13135 - DNA, 16 bp, synthetic construct
  misc_feature 1..16: note = synthetic [barcode part1]
  source 1..16: mol_type = other DNA
tggtcttgtacactgt

SEQ ID NO: 13136 - DNA, 16 bp, synthetic construct
  misc_feature 1..16: note = synthetic [barcode part1]
  source 1..16: mol_type = other DNA
cagttctatcgtacgt

SEQ ID NO: 13137 - DNA, 16 bp, synthetic construct
  misc_feature 1..16: note = synthetic [barcode part1]
  source 1..16: mol_type = other DNA
gtatcgacgtaagtcc

SEQ ID NO: 13138 - DNA, 16 bp, synthetic construct
  misc_feature 1..16: note = synthetic [barcode part1]
  source 1..16: mol_type = other DNA
acacaacgactaagac

SEQ ID NO: 13139 - DNA, 16 bp, synthetic construct
  misc_feature 1..16: note = synthetic [barcode part1]
  source 1..16: mol_type = other DNA
tgttgaggaacgtggc

SEQ ID NO: 13140 - DNA, 16 bp, synthetic construct
  misc_feature 1..16: note = synthetic [barcode part1]
  source 1..16: mol_type = other DNA
tacgcgaactcgaact

SEQ ID NO: 13141 - DNA, 16 bp, synthetic construct
  misc_feature 1..16: note = synthetic [barcode part1]
  source 1..16: mol_type = other DNA
acagtgcgttacggtt

SEQ ID NO: 13142 - DNA, 16 bp, synthetic construct
  misc_feature 1..16: note = synthetic [barcode part1]
  source 1..16: mol_type = other DNA
tacaggcacggtaggt

SEQ ID NO: 13143 - DNA, 16 bp, synthetic construct
  misc_feature 1..16: note = synthetic [barcode part1]
  source 1..16: mol_type = other DNA
cggacctcttgaatag

SEQ ID NO: 13144 - DNA, 16 bp, synthetic construct
  misc_feature 1..16: note = synthetic [barcode part1]
  source 1..16: mol_type = other DNA
cgttaagtctgtactc

SEQ ID NO: 13145 - DNA, 16 bp, synthetic construct
  misc_feature 1..16: note = synthetic [barcode part1]
  source 1..16: mol_type = other DNA
tcagacttcgaaccag

SEQ ID NO: 13146 - DNA, 16 bp, synthetic construct
  misc_feature 1..16: note = synthetic [barcode part1]
  source 1..16: mol_type = other DNA
agtgaggtataagtcc

SEQ ID NO: 13147 - DNA, 16 bp, synthetic construct
  misc_feature 1..16: note = synthetic [barcode part1]
  source 1..16: mol_type = other DNA
taccaccttactgtcc

SEQ ID NO: 13148 - DNA, 16 bp, synthetic construct
  misc_feature 1..16: note = synthetic [barcode part1]
  source 1..16: mol_type = other DNA
agtgtacggccagaac

SEQ ID NO: 13149 - DNA, 16 bp, synthetic construct
  misc_feature 1..16: note = synthetic [barcode part1]
  source 1..16: mol_type = other DNA
atcggaggttgacacg

SEQ ID NO: 13150 - DNA, 16 bp, synthetic construct
  misc_feature 1..16: note = synthetic [barcode part1]
  source 1..16: mol_type = other DNA
caacgaggtaacagag

SEQ ID NO: 13151 - DNA, 16 bp, synthetic construct
  misc_feature 1..16: note = synthetic [barcode part1]
  source 1..16: mol_type = other DNA
tccaccttctggaacg

SEQ ID NO: 13152 - DNA, 16 bp, synthetic construct
  misc_feature 1..16: note = synthetic [barcode part1]
  source 1..16: mol_type = other DNA
atctgagacttcactc

SEQ ID NO: 13153 - DNA, 16 bp, synthetic construct
  misc_feature 1..16: note = synthetic [barcode part1]
  source 1..16: mol_type = other DNA
cgtctgcgtgatacct

SEQ ID NO: 13154 - DNA, 16 bp, synthetic construct
  misc_feature 1..16: note = synthetic [barcode part1]
  source 1..16: mol_type = other DNA
ttcttccgcgttacac

SEQ ID NO: 13155 - DNA, 16 bp, synthetic construct
  misc_feature 1..16: note = synthetic [barcode part1]
  source 1..16: mol_type = other DNA
acgaagattggcgatt

SEQ ID NO: 13156 - DNA, 16 bp, synthetic construct
  misc_feature 1..16: note = synthetic [barcode part1]
  source 1..16: mol_type = other DNA
aggttcgcactccact

SEQ ID NO: 13157 - DNA, 16 bp, synthetic construct
  misc_feature 1..16: note = synthetic [barcode part1]
  source 1..16: mol_type = other DNA
caatagtctggaccgt

SEQ ID NO: 13158 - DNA, 16 bp, synthetic construct
  misc_feature 1..16: note = synthetic [barcode part1]
  source 1..16: mol_type = other DNA
cacacctgacgattcc

SEQ ID NO: 13159 - DNA, 16 bp, synthetic construct
  misc_feature 1..16: note = synthetic [barcode part1]
  source 1..16: mol_type = other DNA
gactcggtccttgtac

SEQ ID NO: 13160 - DNA, 16 bp, synthetic construct
  misc_feature 1..16: note = synthetic [barcode part1]
  source 1..16: mol_type = other DNA
ttgttcgaggcagact

SEQ ID NO: 13161 - DNA, 16 bp, synthetic construct
  misc_feature 1..16: note = synthetic [barcode part1]
  source 1..16: mol_type = other DNA
ttctaatcgcgaacct

SEQ ID NO: 13162 - DNA, 16 bp, synthetic construct
  misc_feature 1..16: note = synthetic [barcode part1]
  source 1..16: mol_type = other DNA
tacagtgtgagacctc

SEQ ID NO: 13163 - DNA, 16 bp, synthetic construct
  misc_feature 1..16: note = synthetic [barcode part1]
  source 1..16: mol_type = other DNA
accaatcggaattccg

SEQ ID NO: 13164 - DNA, 16 bp, synthetic construct
  misc_feature 1..16: note = synthetic [barcode part1]
  source 1..16: mol_type = other DNA
gagatcgactgtcttg

SEQ ID NO: 13165 - DNA, 16 bp, synthetic construct
  misc_feature 1..16: note = synthetic [barcode part1]
  source 1..16: mol_type = other DNA
caacaggttgcaggtg

SEQ ID NO: 13166 - DNA, 16 bp, synthetic construct
  misc_feature 1..16: note = synthetic [barcode part1]
  source 1..16: mol_type = other DNA
aacgacgcgttacttg

SEQ ID NO: 13167 - DNA, 16 bp, synthetic construct
  misc_feature 1..16: note = synthetic [barcode part1]
  source 1..16: mol_type = other DNA
gcaagtgttgtaacag

SEQ ID NO: 13168 - DNA, 16 bp, synthetic construct
  misc_feature 1..16: note = synthetic [barcode part1]
  source 1..16: mol_type = other DNA
taacttccgaccacgc

SEQ ID NO: 13169 - DNA, 16 bp, synthetic construct
  misc_feature 1..16: note = synthetic [barcode part1]
  source 1..16: mol_type = other DNA
actgttggtcaggttg

SEQ ID NO: 13170 - DNA, 16 bp, synthetic construct
  misc_feature 1..16: note = synthetic [barcode part1]
  source 1..16: mol_type = other DNA
tgacagtaccagatcc

SEQ ID NO: 13171 - DNA, 16 bp, synthetic construct
  misc_feature 1..16: note = synthetic [barcode part1]
  source 1..16: mol_type = other DNA
agtcaggtagagagtg

SEQ ID NO: 13172 - DNA, 16 bp, synthetic construct
  misc_feature 1..16: note = synthetic [barcode part1]
  source 1..16: mol_type = other DNA
tcacctggcggtattc

SEQ ID NO: 13173 - DNA, 16 bp, synthetic construct
  misc_feature 1..16: note = synthetic [barcode part1]
  source 1..16: mol_type = other DNA
gacgaacgacactacg

SEQ ID NO: 13174 - DNA, 16 bp, synthetic construct
  misc_feature 1..16: note = synthetic [barcode part1]
  source 1..16: mol_type = other DNA
attcgttgtcttaggc

SEQ ID NO: 13175 - DNA, 16 bp, synthetic construct
  misc_feature 1..16: note = synthetic [barcode part1]
  source 1..16: mol_type = other DNA
taaggtagagtacctg

SEQ ID NO: 13176 - DNA, 16 bp, synthetic construct
  misc_feature 1..16: note = synthetic [barcode part1]
  source 1..16: mol_type = other DNA
ttcgccgtacgtcagt

SEQ ID NO: 13177 - DNA, 16 bp, synthetic construct
  misc_feature 1..16: note = synthetic [barcode part1]
  source 1..16: mol_type = other DNA
gtctctggatacgaac

SEQ ID NO: 13178 - DNA, 16 bp, synthetic construct
  misc_feature 1..16: note = synthetic [barcode part1]
  source 1..16: mol_type = other DNA
tgcagtgattcacctt

SEQ ID NO: 13179 - DNA, 16 bp, synthetic construct
  misc_feature 1..16: note = synthetic [barcode part1]
  source 1..16: mol_type = other DNA
attcgcaactaaggag

SEQ ID NO: 13180 - DNA, 16 bp, synthetic construct
  misc_feature 1..16: note = synthetic [barcode part1]
  source 1..16: mol_type = other DNA
ttacaagttaccgcct

SEQ ID NO: 13181 - DNA, 16 bp, synthetic construct
  misc_feature 1..16: note = synthetic [barcode part1]
  source 1..16: mol_type = other DNA
gtcctcaagattatcc

SEQ ID NO: 13182 - DNA, 16 bp, synthetic construct
  misc_feature 1..16: note = synthetic [barcode part1]
  source 1..16: mol_type = other DNA
taattcaggcggtctg

SEQ ID NO: 13183 - DNA, 16 bp, synthetic construct
  misc_feature 1..16: note = synthetic [barcode part1]
  source 1..16: mol_type = other DNA
tgcagatctcaccgtc

SEQ ID NO: 13184 - DNA, 16 bp, synthetic construct
  misc_feature 1..16: note = synthetic [barcode part1]
  source 1..16: mol_type = other DNA
ttgtctaggatcttgc

SEQ ID NO: 13185 - DNA, 16 bp, synthetic construct
  misc_feature 1..16: note = synthetic [barcode part1]
  source 1..16: mol_type = other DNA
cgtgtctctgtcagac

SEQ ID NO: 13186 - DNA, 16 bp, synthetic construct
  misc_feature 1..16: note = synthetic [barcode part1]
  source 1..16: mol_type = other DNA
ccgatctgagtacctc

SEQ ID NO: 13187 - DNA, 16 bp, synthetic construct
  misc_feature 1..16: note = synthetic [barcode part1]
  source 1..16: mol_type = other DNA
cggagagataccggtt

SEQ ID NO: 13188 - DNA, 16 bp, synthetic construct
  misc_feature 1..16: note = synthetic [barcode part1]
  source 1..16: mol_type = other DNA
gtatcaacggttcctt

SEQ ID NO: 13189 - DNA, 16 bp, synthetic construct
  misc_feature 1..16: note = synthetic [barcode part1]
  source 1..16: mol_type = other DNA
tacttgtagacggacc

SEQ ID NO: 13190 - DNA, 16 bp, synthetic construct
  misc_feature 1..16: note = synthetic [barcode part1]
  source 1..16: mol_type = other DNA
agtcacggaccgaagt

SEQ ID NO: 13191 - DNA, 16 bp, synthetic construct
  misc_feature 1..16: note = synthetic [barcode part1]
  source 1..16: mol_type = other DNA
tactcacagatctcgt

SEQ ID NO: 13192 - DNA, 16 bp, synthetic construct
  misc_feature 1..16: note = synthetic [barcode part1]
  source 1..16: mol_type = other DNA
ttggactaacctgacg

SEQ ID NO: 13193 - DNA, 16 bp, synthetic construct
  misc_feature 1..16: note = synthetic [barcode part1]
  source 1..16: mol_type = other DNA
tggaaggtagtgtatc

SEQ ID NO: 13194 - DNA, 16 bp, synthetic construct
  misc_feature 1..16: note = synthetic [barcode part1]
  source 1..16: mol_type = other DNA
gaggtgtctgaattag

SEQ ID NO: 13195 - DNA, 16 bp, synthetic construct
  misc_feature 1..16: note = synthetic [barcode part1]
  source 1..16: mol_type = other DNA
ttcaggaccagaactc

SEQ ID NO: 13196 - DNA, 16 bp, synthetic construct
  misc_feature 1..16: note = synthetic [barcode part1]
  source 1..16: mol_type = other DNA
tgtgcgatagaggatt

SEQ ID NO: 13197 - DNA, 16 bp, synthetic construct
  misc_feature 1..16: note = synthetic [barcode part1]
  source 1..16: mol_type = other DNA
agtcggaggtgtactg

SEQ ID NO: 13198 - DNA, 16 bp, synthetic construct
  misc_feature 1..16: note = synthetic [barcode part1]
  source 1..16: mol_type = other DNA
tctagtgttgtatccg

SEQ ID NO: 13199 - DNA, 16 bp, synthetic construct
  misc_feature 1..16: note = synthetic [barcode part1]
  source 1..16: mol_type = other DNA
aagaggtcgtctcact

SEQ ID NO: 13200 - DNA, 16 bp, synthetic construct
  misc_feature 1..16: note = synthetic [barcode part1]
  source 1..16: mol_type = other DNA
gatctcaatccgtccg

SEQ ID NO: 13201 - DNA, 16 bp, synthetic construct
  misc_feature 1..16: note = synthetic [barcode part1]
  source 1..16: mol_type = other DNA
cgtccttgttagaccg

SEQ ID NO: 13202 - DNA, 16 bp, synthetic construct
  misc_feature 1..16: note = synthetic [barcode part1]
  source 1..16: mol_type = other DNA
cacgtaatagaagacc

SEQ ID NO: 13203 - DNA, 16 bp, synthetic construct
  misc_feature 1..16: note = synthetic [barcode part1]
  source 1..16: mol_type = other DNA
attacttcgtccaggt

SEQ ID NO: 13204 - DNA, 16 bp, synthetic construct
  misc_feature 1..16: note = synthetic [barcode part1]
  source 1..16: mol_type = other DNA
caggatctgcagtgtt

SEQ ID NO: 13205 - DNA, 16 bp, synthetic construct
  misc_feature 1..16: note = synthetic [barcode part1]
  source 1..16: mol_type = other DNA
atctatctactacggc

SEQ ID NO: 13206 - DNA, 16 bp, synthetic construct
  misc_feature 1..16: note = synthetic [barcode part1]
  source 1..16: mol_type = other DNA
ataattgaggaccgac

SEQ ID NO: 13207 - DNA, 16 bp, synthetic construct
  misc_feature 1..16: note = synthetic [barcode part1]
  source 1..16: mol_type = other DNA
acagtgcctggaactt

SEQ ID NO: 13208 - DNA, 16 bp, synthetic construct
  misc_feature 1..16: note = synthetic [barcode part1]
  source 1..16: mol_type = other DNA
acgaaggtggcagttc

SEQ ID NO: 13209 - DNA, 16 bp, synthetic construct
  misc_feature 1..16: note = synthetic [barcode part1]
  source 1..16: mol_type = other DNA
tgtggtactcgaagtc

SEQ ID NO: 13210 - DNA, 16 bp, synthetic construct
  misc_feature 1..16: note = synthetic [barcode part1]
  source 1..16: mol_type = other DNA
tggtgatcacgccttc

SEQ ID NO: 13211 - DNA, 16 bp, synthetic construct
  misc_feature 1..16: note = synthetic [barcode part1]
  source 1..16: mol_type = other DNA
aggagtgaacgacctc

SEQ ID NO: 13212 - DNA, 16 bp, synthetic construct
  misc_feature 1..16: note = synthetic [barcode part1]
  source 1..16: mol_type = other DNA
cagtagttgcgaggac

SEQ ID NO: 13213 - DNA, 16 bp, synthetic construct
  misc_feature 1..16: note = synthetic [barcode part1]
  source 1..16: mol_type = other DNA
tcctgactataggttc

SEQ ID NO: 13214 - DNA, 16 bp, synthetic construct
  misc_feature 1..16: note = synthetic [barcode part1]
  source 1..16: mol_type = other DNA
cgaggtatctagttcg

SEQ ID NO: 13215 - DNA, 16 bp, synthetic construct
  misc_feature 1..16: note = synthetic [barcode part1]
  source 1..16: mol_type = other DNA
agtcgcctacctctag

SEQ ID NO: 13216 - DNA, 16 bp, synthetic construct
  misc_feature 1..16: note = synthetic [barcode part1]
  source 1..16: mol_type = other DNA
aacggtgtcacgaacg

SEQ ID NO: 13217 - DNA, 16 bp, synthetic construct
  misc_feature 1..16: note = synthetic [barcode part1]
  source 1..16: mol_type = other DNA
cgtgacagtccgttct

SEQ ID NO: 13218 - DNA, 16 bp, synthetic construct
  misc_feature 1..16: note = synthetic [barcode part1]
  source 1..16: mol_type = other DNA
gttatccgttccgtct

SEQ ID NO: 13219 - DNA, 16 bp, synthetic construct
  misc_feature 1..16: note = synthetic [barcode part1]
  source 1..16: mol_type = other DNA
caactgaactgaccac

SEQ ID NO: 13220 - DNA, 16 bp, synthetic construct
  misc_feature 1..16: note = synthetic [barcode part1]
  source 1..16: mol_type = other DNA
cctcacacgatagtcc

SEQ ID NO: 13221 - DNA, 16 bp, synthetic construct
  misc_feature 1..16: note = synthetic [barcode part1]
  source 1..16: mol_type = other DNA
tctctgagtactgact

SEQ ID NO: 13222 - DNA, 16 bp, synthetic construct
  misc_feature 1..16: note = synthetic [barcode part1]
  source 1..16: mol_type = other DNA
cctactcctacggtag

SEQ ID NO: 13223 - DNA, 16 bp, synthetic construct
  misc_feature 1..16: note = synthetic [barcode part1]
  source 1..16: mol_type = other DNA
gtagattccaggcgtt

SEQ ID NO: 13224 - DNA, 16 bp, synthetic construct
  misc_feature 1..16: note = synthetic [barcode part1]
  source 1..16: mol_type = other DNA
ttatcgtctacggatc

SEQ ID NO: 13225 - DNA, 16 bp, synthetic construct
  misc_feature 1..16: note = synthetic [barcode part1]
  source 1..16: mol_type = other DNA
actgttgcagttcgag

SEQ ID NO: 13226 - DNA, 16 bp, synthetic construct
  misc_feature 1..16: note = synthetic [barcode part1]
  source 1..16: mol_type = other DNA
acgtgacgtgtatcgt

SEQ ID NO: 13227 - DNA, 16 bp, synthetic construct
  misc_feature 1..16: note = synthetic [barcode part1]
  source 1..16: mol_type = other DNA
gtcctacgttcggatc

SEQ ID NO: 13228 - DNA, 16 bp, synthetic construct
  misc_feature 1..16: note = synthetic [barcode part1]
  source 1..16: mol_type = other DNA
acctcggaactagttg

SEQ ID NO: 13229 - DNA, 16 bp, synthetic construct
  misc_feature 1..16: note = synthetic [barcode part1]
  source 1..16: mol_type = other DNA
gttagtctgtgcacag

SEQ ID NO: 13230 - DNA, 16 bp, synthetic construct
  misc_feature 1..16: note = synthetic [barcode part1]
  source 1..16: mol_type = other DNA
aaggcgtaaggtacag

SEQ ID NO: 13231 - DNA, 16 bp, synthetic construct
  misc_feature 1..16: note = synthetic [barcode part1]
  source 1..16: mol_type = other DNA
gattacgactgtgcac

SEQ ID NO: 13232 - DNA, 16 bp, synthetic construct
  misc_feature 1..16: note = synthetic [barcode part1]
  source 1..16: mol_type = other DNA
aatacttgtcctccag

SEQ ID NO: 13233 - DNA, 16 bp, synthetic construct
  misc_feature 1..16: note = synthetic [barcode part1]
  source 1..16: mol_type = other DNA
tgtctaggactacacg

SEQ ID NO: 13234 - DNA, 16 bp, synthetic construct
  misc_feature 1..16: note = synthetic [barcode part1]
  source 1..16: mol_type = other DNA
gattaccttcggcaag

SEQ ID NO: 13235 - DNA, 16 bp, synthetic construct
  misc_feature 1..16: note = synthetic [barcode part1]
  source 1..16: mol_type = other DNA
tagtggcaatcaccgt

SEQ ID NO: 13236 - DNA, 16 bp, synthetic construct
  misc_feature 1..16: note = synthetic [barcode part1]
  source 1..16: mol_type = other DNA
taacgtcgtagtaccg

SEQ ID NO: 13237 - DNA, 16 bp, synthetic construct
  misc_feature 1..16: note = synthetic [barcode part1]
  source 1..16: mol_type = other DNA
tccaatcgcaccggtt

SEQ ID NO: 13238 - DNA, 16 bp, synthetic construct
  misc_feature 1..16: note = synthetic [barcode part1]
  source 1..16: mol_type = other DNA
agtcagtctccttctc

SEQ ID NO: 13239 - DNA, 16 bp, synthetic construct
  misc_feature 1..16: note = synthetic [barcode part1]
  source 1..16: mol_type = other DNA
gttctagaaccggttg

SEQ ID NO: 13240 - DNA, 16 bp, synthetic construct
  misc_feature 1..16: note = synthetic [barcode part1]
  source 1..16: mol_type = other DNA
cagaatcagagtcctc

SEQ ID NO: 13241 - DNA, 16 bp, synthetic construct
  misc_feature 1..16: note = synthetic [barcode part1]
  source 1..16: mol_type = other DNA
ataagagtggcctggc

SEQ ID NO: 13242 - DNA, 16 bp, synthetic construct
  misc_feature 1..16: note = synthetic [barcode part1]
  source 1..16: mol_type = other DNA
actggaccacttccgt

SEQ ID NO: 13243 - DNA, 16 bp, synthetic construct
  misc_feature 1..16: note = synthetic [barcode part1]
  source 1..16: mol_type = other DNA
cgataacttccacgcc

SEQ ID NO: 13244 - DNA, 16 bp, synthetic construct
  misc_feature 1..16: note = synthetic [barcode part1]
  source 1..16: mol_type = other DNA
gagttcggcgattgtt

SEQ ID NO: 13245 - DNA, 16 bp, synthetic construct
  misc_feature 1..16: note = synthetic [barcode part1]
  source 1..16: mol_type = other DNA
tctggaagattccgac

SEQ ID NO: 13246 - DNA, 16 bp, synthetic construct
  misc_feature 1..16: note = synthetic [barcode part1]
  source 1..16: mol_type = other DNA
gttacgtgactcacag

SEQ ID NO: 13247 - DNA, 16 bp, synthetic construct
  misc_feature 1..16: note = synthetic [barcode part1]
  source 1..16: mol_type = other DNA
tgcacggtagatctac

SEQ ID NO: 13248 - DNA, 16 bp, synthetic construct
  misc_feature 1..16: note = synthetic [barcode part1]
  source 1..16: mol_type = other DNA
aacacactgactgcac

SEQ ID NO: 13249 - DNA, 16 bp, synthetic construct
  misc_feature 1..16: note = synthetic [barcode part1]
  source 1..16: mol_type = other DNA
gttgacggacgtactt

SEQ ID NO: 13250 - DNA, 16 bp, synthetic construct
  misc_feature 1..16: note = synthetic [barcode part1]
  source 1..16: mol_type = other DNA
tgtgactggttgtgtg

SEQ ID NO: 13251 - DNA, 16 bp, synthetic construct
  misc_feature 1..16: note = synthetic [barcode part1]
  source 1..16: mol_type = other DNA
tgttcgtgttccaagt

SEQ ID NO: 13252 - DNA, 16 bp, synthetic construct
  misc_feature 1..16: note = synthetic [barcode part1]
  source 1..16: mol_type = other DNA
taggttcctacagacg

SEQ ID NO: 13253 - DNA, 16 bp, synthetic construct
  misc_feature 1..16: note = synthetic [barcode part1]
  source 1..16: mol_type = other DNA
tgttcacactccaagt

SEQ ID NO: 13254 - DNA, 16 bp, synthetic construct
  misc_feature 1..16: note = synthetic [barcode part1]
  source 1..16: mol_type = other DNA
taccgagttcgtgcct

SEQ ID NO: 13255 - DNA, 16 bp, synthetic construct
  misc_feature 1..16: note = synthetic [barcode part1]
  source 1..16: mol_type = other DNA
atcgaacgtagtccac

SEQ ID NO: 13256 - DNA, 16 bp, synthetic construct
  misc_feature 1..16: note = synthetic [barcode part1]
  source 1..16: mol_type = other DNA
cggtctcctaacttct

SEQ ID NO: 13257 - DNA, 16 bp, synthetic construct
  misc_feature 1..16: note = synthetic [barcode part1]
  source 1..16: mol_type = other DNA
aactgtgttcttcgac

SEQ ID NO: 13258 - DNA, 16 bp, synthetic construct
  misc_feature 1..16: note = synthetic [barcode part1]
  source 1..16: mol_type = other DNA
ataccagagaggccac

SEQ ID NO: 13259 - DNA, 16 bp, synthetic construct
  misc_feature 1..16: note = synthetic [barcode part1]
  source 1..16: mol_type = other DNA
aatcgtcagacgtaag

SEQ ID NO: 13260 - DNA, 16 bp, synthetic construct
  misc_feature 1..16: note = synthetic [barcode part1]
  source 1..16: mol_type = other DNA
gttacgtacacgatcg

SEQ ID NO: 13261 - DNA, 16 bp, synthetic construct
  misc_feature 1..16: note = synthetic [barcode part1]
  source 1..16: mol_type = other DNA
tatcggtcgactgtag

SEQ ID NO: 13262 - DNA, 16 bp, synthetic construct
  misc_feature 1..16: note = synthetic [barcode part1]
  source 1..16: mol_type = other DNA
acttcttgtgttgacg

SEQ ID NO: 13263 - DNA, 16 bp, synthetic construct
  misc_feature 1..16: note = synthetic [barcode part1]
  source 1..16: mol_type = other DNA
gtcaaggaggaagttg

SEQ ID NO: 13264 - DNA, 16 bp, synthetic construct
  misc_feature 1..16: note = synthetic [barcode part1]
  source 1..16: mol_type = other DNA
gcgtcttatcgagtcc

SEQ ID NO: 13265 - DNA, 16 bp, synthetic construct
  misc_feature 1..16: note = synthetic [barcode part1]
  source 1..16: mol_type = other DNA
acctcacgttcaggtc

SEQ ID NO: 13266 - DNA, 16 bp, synthetic construct
  misc_feature 1..16: note = synthetic [barcode part1]
  source 1..16: mol_type = other DNA
caccggtggaagattg

SEQ ID NO: 13267 - DNA, 16 bp, synthetic construct
  misc_feature 1..16: note = synthetic [barcode part1]
  source 1..16: mol_type = other DNA
acaaccgcgacgtatt

SEQ ID NO: 13268 - DNA, 16 bp, synthetic construct
  misc_feature 1..16: note = synthetic [barcode part1]
  source 1..16: mol_type = other DNA
ccgagaacaacttctg

SEQ ID NO: 13269 - DNA, 16 bp, synthetic construct
  misc_feature 1..16: note = synthetic [barcode part1]
  source 1..16: mol_type = other DNA
ttacacgttagtctcg

SEQ ID NO: 13270 - DNA, 16 bp, synthetic construct
  misc_feature 1..16: note = synthetic [barcode part1]
  source 1..16: mol_type = other DNA
ccaggtaagtgttcgt

SEQ ID NO: 13271 - DNA, 16 bp, synthetic construct
  misc_feature 1..16: note = synthetic [barcode part1]
  source 1..16: mol_type = other DNA
acaatatacaccgcgc

SEQ ID NO: 13272 - DNA, 16 bp, synthetic construct
  misc_feature 1..16: note = synthetic [barcode part1]
  source 1..16: mol_type = other DNA
atcgtgtctgaacacg

SEQ ID NO: 13273 - DNA, 16 bp, synthetic construct
  misc_feature 1..16: note = synthetic [barcode part1]
  source 1..16: mol_type = other DNA
acaattactccggttc

SEQ ID NO: 13274 - DNA, 16 bp, synthetic construct
  misc_feature 1..16: note = synthetic [barcode part1]
  source 1..16: mol_type = other DNA
tcacacttcacgtcct

SEQ ID NO: 13275 - DNA, 16 bp, synthetic construct
  misc_feature 1..16: note = synthetic [barcode part1]
  source 1..16: mol_type = other DNA
tcgcgaacgtcctgtt

SEQ ID NO: 13276 - DNA, 16 bp, synthetic construct
  misc_feature 1..16: note = synthetic [barcode part1]
  source 1..16: mol_type = other DNA
aacaccactagttggc

SEQ ID NO: 13277 - DNA, 16 bp, synthetic construct
  misc_feature 1..16: note = synthetic [barcode part1]
  source 1..16: mol_type = other DNA
gactggataggtccag

SEQ ID NO: 13278 - DNA, 16 bp, synthetic construct
  misc_feature 1..16: note = synthetic [barcode part1]
  source 1..16: mol_type = other DNA
ttcactaaggagtcgc

SEQ ID NO: 13279 - DNA, 16 bp, synthetic construct
  misc_feature 1..16: note = synthetic [barcode part1]
  source 1..16: mol_type = other DNA
gtgcggttgtaactac

SEQ ID NO: 13280 - DNA, 16 bp, synthetic construct
  misc_feature 1..16: note = synthetic [barcode part1]
  source 1..16: mol_type = other DNA
ttattgcgacgtccgc

SEQ ID NO: 13281 - DNA, 16 bp, synthetic construct
  misc_feature 1..16: note = synthetic [barcode part1]
  source 1..16: mol_type = other DNA
tgtcaggtgtcctcgt

SEQ ID NO: 13282 - DNA, 16 bp, synthetic construct
  misc_feature 1..16: note = synthetic [barcode part1]
  source 1..16: mol_type = other DNA
tctctccttctctcct

SEQ ID NO: 13283 - DNA, 16 bp, synthetic construct
  misc_feature 1..16: note = synthetic [barcode part1]
  source 1..16: mol_type = other DNA
gtcgcggaatatcact

SEQ ID NO: 13284 - DNA, 16 bp, synthetic construct
  misc_feature 1..16: note = synthetic [barcode part1]
  source 1..16: mol_type = other DNA
ttccacgaactatcac

SEQ ID NO: 13285 - DNA, 16 bp, synthetic construct
  misc_feature 1..16: note = synthetic [barcode part1]
  source 1..16: mol_type = other DNA
ttcaggatacacgcac

SEQ ID NO: 13286 - DNA, 16 bp, synthetic construct
  misc_feature 1..16: note = synthetic [barcode part1]
  source 1..16: mol_type = other DNA
gagtgtggatctgacg

SEQ ID NO: 13287 - DNA, 16 bp, synthetic construct
  misc_feature 1..16: note = synthetic [barcode part1]
  source 1..16: mol_type = other DNA
tggtccgacttgatag

SEQ ID NO: 13288 - DNA, 16 bp, synthetic construct
  misc_feature 1..16: note = synthetic [barcode part1]
  source 1..16: mol_type = other DNA
atagttggccggtact

SEQ ID NO: 13289 - DNA, 16 bp, synthetic construct
  misc_feature 1..16: note = synthetic [barcode part1]
  source 1..16: mol_type = other DNA
agattccgaagaggag

SEQ ID NO: 13290 - DNA, 16 bp, synthetic construct
  misc_feature 1..16: note = synthetic [barcode part1]
  source 1..16: mol_type = other DNA
acagtgtccggaattc

SEQ ID NO: 13291 - DNA, 16 bp, synthetic construct
  misc_feature 1..16: note = synthetic [barcode part1]
  source 1..16: mol_type = other DNA
ttgttgttccggacgc

SEQ ID NO: 13292 - DNA, 16 bp, synthetic construct
  misc_feature 1..16: note = synthetic [barcode part1]
  source 1..16: mol_type = other DNA
ccgtatatcttgatcg

SEQ ID NO: 13293 - DNA, 16 bp, synthetic construct
  misc_feature 1..16: note = synthetic [barcode part1]
  source 1..16: mol_type = other DNA
gtgtcggtctcgttac

SEQ ID NO: 13294 - DNA, 16 bp, synthetic construct
  misc_feature 1..16: note = synthetic [barcode part1]
  source 1..16: mol_type = other DNA
gtatctgatagtggag

SEQ ID NO: 13295 - DNA, 16 bp, synthetic construct
  misc_feature 1..16: note = synthetic [barcode part1]
  source 1..16: mol_type = other DNA
aggactcaagtctcgt

SEQ ID NO: 13296 - DNA, 16 bp, synthetic construct
  misc_feature 1..16: note = synthetic [barcode part1]
  source 1..16: mol_type = other DNA
gcaaccgtgtaattgc

SEQ ID NO: 13297 - DNA, 16 bp, synthetic construct
  misc_feature 1..16: note = synthetic [barcode part1]
  source 1..16: mol_type = other DNA
attgacgcgagagacc

SEQ ID NO: 13298 - DNA, 16 bp, synthetic construct
  misc_feature 1..16: note = synthetic [barcode part1]
  source 1..16: mol_type = other DNA
ccgtagatctgcaagt

SEQ ID NO: 13299 - DNA, 16 bp, synthetic construct
  misc_feature 1..16: note = synthetic [barcode part1]
  source 1..16: mol_type = other DNA
actggcacttgcaagt

SEQ ID NO: 13300 - DNA, 16 bp, synthetic construct
  misc_feature 1..16: note = synthetic [barcode part1]
  source 1..16: mol_type = other DNA
cggaattcctcaagac

SEQ ID NO: 13301 - DNA, 16 bp, synthetic construct
  misc_feature 1..16: note = synthetic [barcode part1]
  source 1..16: mol_type = other DNA
atccttacgaaggcac

SEQ ID NO: 13302 - DNA, 16 bp, synthetic construct
  misc_feature 1..16: note = synthetic [barcode part1]
  source 1..16: mol_type = other DNA
gttgttctcacaggtt

SEQ ID NO: 13303 - DNA, 16 bp, synthetic construct
  misc_feature 1..16: note = synthetic [barcode part1]
  source 1..16: mol_type = other DNA
acaacctgtcttcgcg

SEQ ID NO: 13304 - DNA, 16 bp, synthetic construct
  misc_feature 1..16: note = synthetic [barcode part1]
  source 1..16: mol_type = other DNA
gttactgtggtagtcg

SEQ ID NO: 13305 - DNA, 16 bp, synthetic construct
  misc_feature 1..16: note = synthetic [barcode part1]
  source 1..16: mol_type = other DNA
tgattcttatacggcc

SEQ ID NO: 13306 - DNA, 16 bp, synthetic construct
  misc_feature 1..16: note = synthetic [barcode part1]
  source 1..16: mol_type = other DNA
tggtccttagtgtgcc

SEQ ID NO: 13307 - DNA, 16 bp, synthetic construct
  misc_feature 1..16: note = synthetic [barcode part1]
  source 1..16: mol_type = other DNA
aggtattgtctcacct

SEQ ID NO: 13308 - DNA, 16 bp, synthetic construct
  misc_feature 1..16: note = synthetic [barcode part1]
  source 1..16: mol_type = other DNA
gttcctcgatcaagag

SEQ ID NO: 13309 - DNA, 16 bp, synthetic construct
  misc_feature 1..16: note = synthetic [barcode part1]
  source 1..16: mol_type = other DNA
ccttctggacgtactg

SEQ ID NO: 13310 - DNA, 16 bp, synthetic construct
  misc_feature 1..16: note = synthetic [barcode part1]
  source 1..16: mol_type = other DNA
cactgagtgaggacgt

SEQ ID NO: 13311 - DNA, 16 bp, synthetic construct
  misc_feature 1..16: note = synthetic [barcode part1]
  source 1..16: mol_type = other DNA
tctaacgcctgacaag

SEQ ID NO: 13312 - DNA, 16 bp, synthetic construct
  misc_feature 1..16: note = synthetic [barcode part1]
  source 1..16: mol_type = other DNA
gacgttaataccacgc

SEQ ID NO: 13313 - DNA, 16 bp, synthetic construct
  misc_feature 1..16: note = synthetic [barcode part1]
  source 1..16: mol_type = other DNA
atctcacctacgtagt

SEQ ID NO: 13314 - DNA, 16 bp, synthetic construct
  misc_feature 1..16: note = synthetic [barcode part1]
  source 1..16: mol_type = other DNA
aattactgtgaaggcg

SEQ ID NO: 13315 - DNA, 16 bp, synthetic construct
  misc_feature 1..16: note = synthetic [barcode part1]
  source 1..16: mol_type = other DNA
ttacgcaactacgcag

SEQ ID NO: 13316 - DNA, 16 bp, synthetic construct
  misc_feature 1..16: note = synthetic [barcode part1]
  source 1..16: mol_type = other DNA
accgagtcttatacct

SEQ ID NO: 13317 - DNA, 16 bp, synthetic construct
  misc_feature 1..16: note = synthetic [barcode part1]
  source 1..16: mol_type = other DNA
tcagacagagtggcac

SEQ ID NO: 13318 - DNA, 16 bp, synthetic construct
  misc_feature 1..16: note = synthetic [barcode part1]
  source 1..16: mol_type = other DNA
aactagagtctaggtg

SEQ ID NO: 13319 - DNA, 16 bp, synthetic construct
  misc_feature 1..16: note = synthetic [barcode part1]
  source 1..16: mol_type = other DNA
atcgatagtggccact

SEQ ID NO: 13320 - DNA, 16 bp, synthetic construct
  misc_feature 1..16: note = synthetic [barcode part1]
  source 1..16: mol_type = other DNA
ttccttctctcaaggc

SEQ ID NO: 13321 - DNA, 16 bp, synthetic construct
  misc_feature 1..16: note = synthetic [barcode part1]
  source 1..16: mol_type = other DNA
acactactacctactg

SEQ ID NO: 13322 - DNA, 16 bp, synthetic construct
  misc_feature 1..16: note = synthetic [barcode part1]
  source 1..16: mol_type = other DNA
tacctgtgaattccgt

SEQ ID NO: 13323 - DNA, 16 bp, synthetic construct
  misc_feature 1..16: note = synthetic [barcode part1]
  source 1..16: mol_type = other DNA
cgcgttcactcttact

SEQ ID NO: 13324 - DNA, 16 bp, synthetic construct
  misc_feature 1..16: note = synthetic [barcode part1]
  source 1..16: mol_type = other DNA
tcttacgcaacagtct

SEQ ID NO: 13325 - DNA, 16 bp, synthetic construct
  misc_feature 1..16: note = synthetic [barcode part1]
  source 1..16: mol_type = other DNA
acagttcgttcctgcg

SEQ ID NO: 13326 - DNA, 16 bp, synthetic construct
  misc_feature 1..16: note = synthetic [barcode part1]
  source 1..16: mol_type = other DNA
agtgacctgatccagt

SEQ ID NO: 13327 - DNA, 16 bp, synthetic construct
  misc_feature 1..16: note = synthetic [barcode part1]
  source 1..16: mol_type = other DNA
gcctgccaatatcacc

SEQ ID NO: 13328 - DNA, 16 bp, synthetic construct
  misc_feature 1..16: note = synthetic [barcode part1]
  source 1..16: mol_type = other DNA
cggactattagaccgt

SEQ ID NO: 13329 - DNA, 16 bp, synthetic construct
  misc_feature 1..16: note = synthetic [barcode part1]
  source 1..16: mol_type = other DNA
ccagagtgaacaagtt

SEQ ID NO: 13330 - DNA, 16 bp, synthetic construct
  misc_feature 1..16: note = synthetic [barcode part1]
  source 1..16: mol_type = other DNA
gaataacaaggtggcg

SEQ ID NO: 13331 - DNA, 16 bp, synthetic construct
  misc_feature 1..16: note = synthetic [barcode part1]
  source 1..16: mol_type = other DNA
gttggcaggtgtatct

SEQ ID NO: 13332 - DNA, 16 bp, synthetic construct
  misc_feature 1..16: note = synthetic [barcode part1]
  source 1..16: mol_type = other DNA
caggaggttctctagt

SEQ ID NO: 13333 - DNA, 16 bp, synthetic construct
  misc_feature 1..16: note = synthetic [barcode part1]
  source 1..16: mol_type = other DNA
caacttccgcagtcgt

SEQ ID NO: 13334 - DNA, 16 bp, synthetic construct
  misc_feature 1..16: note = synthetic [barcode part1]
  source 1..16: mol_type = other DNA
gtatctcagagtgcgt

SEQ ID NO: 13335 - DNA, 16 bp, synthetic construct
  misc_feature 1..16: note = synthetic [barcode part1]
  source 1..16: mol_type = other DNA
cgacaagtactgtctg

SEQ ID NO: 13336 - DNA, 16 bp, synthetic construct
  misc_feature 1..16: note = synthetic [barcode part1]
  source 1..16: mol_type = other DNA
acaagttacgcgacct

SEQ ID NO: 13337 - DNA, 16 bp, synthetic construct
  misc_feature 1..16: note = synthetic [barcode part1]
  source 1..16: mol_type = other DNA
taatcctgcaccaatc

SEQ ID NO: 13338 - DNA, 16 bp, synthetic construct
  misc_feature 1..16: note = synthetic [barcode part1]
  source 1..16: mol_type = other DNA
cagtgtggtcagaggt

SEQ ID NO: 13339 - DNA, 16 bp, synthetic construct
  misc_feature 1..16: note = synthetic [barcode part1]
  source 1..16: mol_type = other DNA
tctattctcgcctacg

SEQ ID NO: 13340 - DNA, 16 bp, synthetic construct
  misc_feature 1..16: note = synthetic [barcode part1]
  source 1..16: mol_type = other DNA
taaggtctcaactggc

SEQ ID NO: 13341 - DNA, 16 bp, synthetic construct
  misc_feature 1..16: note = synthetic [barcode part1]
  source 1..16: mol_type = other DNA
acgtctaacgaacctg

SEQ ID NO: 13342 - DNA, 16 bp, synthetic construct
  misc_feature 1..16: note = synthetic [barcode part1]
  source 1..16: mol_type = other DNA
caggttaaggaatacc

SEQ ID NO: 13343 - DNA, 16 bp, synthetic construct
  misc_feature 1..16: note = synthetic [barcode part1]
  source 1..16: mol_type = other DNA
gtgaacttgcgtcaac

SEQ ID NO: 13344 - DNA, 16 bp, synthetic construct
  misc_feature 1..16: note = synthetic [barcode part1]
  source 1..16: mol_type = other DNA
gaaggtctctctcaag

SEQ ID NO: 13345 - DNA, 16 bp, synthetic construct
  misc_feature 1..16: note = synthetic [barcode part1]
  source 1..16: mol_type = other DNA
tcaccactctagacgc

SEQ ID NO: 13346 - DNA, 16 bp, synthetic construct
  misc_feature 1..16: note = synthetic [barcode part1]
  source 1..16: mol_type = other DNA
aatcggcgacttcagt

SEQ ID NO: 13347 - DNA, 16 bp, synthetic construct
  misc_feature 1..16: note = synthetic [barcode part1]
  source 1..16: mol_type = other DNA
attcggatcgtcttac

SEQ ID NO: 13348 - DNA, 16 bp, synthetic construct
  misc_feature 1..16: note = synthetic [barcode part1]
  source 1..16: mol_type = other DNA
gtcgaacacgatctgt

SEQ ID NO: 13349 - DNA, 16 bp, synthetic construct
  misc_feature 1..16: note = synthetic [barcode part1]
  source 1..16: mol_type = other DNA
tggttctgtaccgatt

SEQ ID NO: 13350 - DNA, 16 bp, synthetic construct
  misc_feature 1..16: note = synthetic [barcode part1]
  source 1..16: mol_type = other DNA
ttcgaccgtgcgttac

SEQ ID NO: 13351 - DNA, 16 bp, synthetic construct
  misc_feature 1..16: note = synthetic [barcode part1]
  source 1..16: mol_type = other DNA
tcaggtgactctgcct

SEQ ID NO: 13352 - DNA, 16 bp, synthetic construct
  misc_feature 1..16: note = synthetic [barcode part1]
  source 1..16: mol_type = other DNA
taggttcggtgttcag

SEQ ID NO: 13353 - DNA, 16 bp, synthetic construct
  misc_feature 1..16: note = synthetic [barcode part1]
  source 1..16: mol_type = other DNA
tcgagtgtgaggcagt

SEQ ID NO: 13354 - DNA, 16 bp, synthetic construct
  misc_feature 1..16: note = synthetic [barcode part1]
  source 1..16: mol_type = other DNA
gtaccaagaggtgacc

SEQ ID NO: 13355 - DNA, 16 bp, synthetic construct
  misc_feature 1..16: note = synthetic [barcode part1]
  source 1..16: mol_type = other DNA
ttaggacgacggacac

SEQ ID NO: 13356 - DNA, 16 bp, synthetic construct
  misc_feature 1..16: note = synthetic [barcode part1]
  source 1..16: mol_type = other DNA
ttcacacagtcgccgt

SEQ ID NO: 13357 - DNA, 16 bp, synthetic construct
  misc_feature 1..16: note = synthetic [barcode part1]
  source 1..16: mol_type = other DNA
tctagacttgtgcgag

SEQ ID NO: 13358 - DNA, 16 bp, synthetic construct
  misc_feature 1..16: note = synthetic [barcode part1]
  source 1..16: mol_type = other DNA
gtcctatcgtcggtgt

SEQ ID NO: 13359 - DNA, 16 bp, synthetic construct
  misc_feature 1..16: note = synthetic [barcode part1]
  source 1..16: mol_type = other DNA
gtgcaatcgcacaatc

SEQ ID NO: 13360 - DNA, 16 bp, synthetic construct
  misc_feature 1..16: note = synthetic [barcode part1]
  source 1..16: mol_type = other DNA
accaagttgaaccacc

SEQ ID NO: 13361 - DNA, 16 bp, synthetic construct
  misc_feature 1..16: note = synthetic [barcode part1]
  source 1..16: mol_type = other DNA
atcgtagtggagttcc

SEQ ID NO: 13362 - DNA, 16 bp, synthetic construct
  misc_feature 1..16: note = synthetic [barcode part1]
  source 1..16: mol_type = other DNA
cgtctacgtcttggac

SEQ ID NO: 13363 - DNA, 16 bp, synthetic construct
  misc_feature 1..16: note = synthetic [barcode part1]
  source 1..16: mol_type = other DNA
ttgacacgtgtgtcag

SEQ ID NO: 13364 - DNA, 16 bp, synthetic construct
  misc_feature 1..16: note = synthetic [barcode part1]
  source 1..16: mol_type = other DNA
tctactagaagtggcc

SEQ ID NO: 13365 - DNA, 16 bp, synthetic construct
  misc_feature 1..16: note = synthetic [barcode part1]
  source 1..16: mol_type = other DNA
ccgtactcaaggatac

SEQ ID NO: 13366 - DNA, 16 bp, synthetic construct
  misc_feature 1..16: note = synthetic [barcode part1]
  source 1..16: mol_type = other DNA
cacacttccgtgtctt

SEQ ID NO: 13367 - DNA, 16 bp, synthetic construct
  misc_feature 1..16: note = synthetic [barcode part1]
  source 1..16: mol_type = other DNA
tacaagtacggcaagt

SEQ ID NO: 13368 - DNA, 16 bp, synthetic construct
  misc_feature 1..16: note = synthetic [barcode part1]
  source 1..16: mol_type = other DNA
gcggaccgattatact

SEQ ID NO: 13369 - DNA, 16 bp, synthetic construct
  misc_feature 1..16: note = synthetic [barcode part1]
  source 1..16: mol_type = other DNA
gtagtgcctggttagt

SEQ ID NO: 13370 - DNA, 16 bp, synthetic construct
  misc_feature 1..16: note = synthetic [barcode part1]
  source 1..16: mol_type = other DNA
agaggcgtatcgaatt

SEQ ID NO: 13371 - DNA, 16 bp, synthetic construct
  misc_feature 1..16: note = synthetic [barcode part1]
  source 1..16: mol_type = other DNA
gtctgattacacttcg

SEQ ID NO: 13372 - DNA, 16 bp, synthetic construct
  misc_feature 1..16: note = synthetic [barcode part1]
  source 1..16: mol_type = other DNA
gcctactcctgaagtc

SEQ ID NO: 13373 - DNA, 16 bp, synthetic construct
  misc_feature 1..16: note = synthetic [barcode part1]
  source 1..16: mol_type = other DNA
cggtgtagtcggaagt

SEQ ID NO: 13374 - DNA, 16 bp, synthetic construct
  misc_feature 1..16: note = synthetic [barcode part1]
  source 1..16: mol_type = other DNA
gaacggtccgatacag

SEQ ID NO: 13375 - DNA, 16 bp, synthetic construct
  misc_feature 1..16: note = synthetic [barcode part1]
  source 1..16: mol_type = other DNA
tacgactgaggattag

SEQ ID NO: 13376 - DNA, 16 bp, synthetic construct
  misc_feature 1..16: note = synthetic [barcode part1]
  source 1..16: mol_type = other DNA
agatcaaccagtcctg

SEQ ID NO: 13377 - DNA, 16 bp, synthetic construct
  misc_feature 1..16: note = synthetic [barcode part1]
  source 1..16: mol_type = other DNA
tgatcgagactccaac

SEQ ID NO: 13378 - DNA, 16 bp, synthetic construct
  misc_feature 1..16: note = synthetic [barcode part1]
  source 1..16: mol_type = other DNA
tcagtgtcagtcacag

SEQ ID NO: 13379 - DNA, 16 bp, synthetic construct
  misc_feature 1..16: note = synthetic [barcode part1]
  source 1..16: mol_type = other DNA
actggataggtgtaac

SEQ ID NO: 13380 - DNA, 16 bp, synthetic construct
  misc_feature 1..16: note = synthetic [barcode part1]
  source 1..16: mol_type = other DNA
tccagatcgagagacg

SEQ ID NO: 13381 - DNA, 16 bp, synthetic construct
  misc_feature 1..16: note = synthetic [barcode part1]
  source 1..16: mol_type = other DNA
agttgtcacctggtag

SEQ ID NO: 13382 - DNA, 16 bp, synthetic construct
  misc_feature 1..16: note = synthetic [barcode part1]
  source 1..16: mol_type = other DNA
cctcggaataggcaag

SEQ ID NO: 13383 - DNA, 16 bp, synthetic construct
  misc_feature 1..16: note = synthetic [barcode part1]
  source 1..16: mol_type = other DNA
tgaggcagaatacttg

SEQ ID NO: 13384 - DNA, 16 bp, synthetic construct
  misc_feature 1..16: note = synthetic [barcode part1]
  source 1..16: mol_type = other DNA
tgtgtgagacagtaac

SEQ ID NO: 13385 - DNA, 16 bp, synthetic construct
  misc_feature 1..16: note = synthetic [barcode part1]
  source 1..16: mol_type = other DNA
gtgacacgtcaactgt

SEQ ID NO: 13386 - DNA, 16 bp, synthetic construct
  misc_feature 1..16: note = synthetic [barcode part1]
  source 1..16: mol_type = other DNA
acagtgcgtcgtagtt

SEQ ID NO: 13387 - DNA, 16 bp, synthetic construct
  misc_feature 1..16: note = synthetic [barcode part1]
  source 1..16: mol_type = other DNA
tatcttcgaccactag

SEQ ID NO: 13388 - DNA, 16 bp, synthetic construct
  misc_feature 1..16: note = synthetic [barcode part1]
  source 1..16: mol_type = other DNA
gatctctgacctgcgt

SEQ ID NO: 13389 - DNA, 16 bp, synthetic construct
  misc_feature 1..16: note = synthetic [barcode part1]
  source 1..16: mol_type = other DNA
agtcttgcactacgag

SEQ ID NO: 13390 - DNA, 16 bp, synthetic construct
  misc_feature 1..16: note = synthetic [barcode part1]
  source 1..16: mol_type = other DNA
agtgcgcagaagatcc

SEQ ID NO: 13391 - DNA, 16 bp, synthetic construct
  misc_feature 1..16: note = synthetic [barcode part1]
  source 1..16: mol_type = other DNA
gatcttcggtccgtgt

SEQ ID NO: 13392 - DNA, 16 bp, synthetic construct
  misc_feature 1..16: note = synthetic [barcode part1]
  source 1..16: mol_type = other DNA
gtgacgttgtgtgtgt

SEQ ID NO: 13393 - DNA, 16 bp, synthetic construct
  misc_feature 1..16: note = synthetic [barcode part1]
  source 1..16: mol_type = other DNA
acgagtcaacctacgt

SEQ ID NO: 13394 - DNA, 16 bp, synthetic construct
  misc_feature 1..16: note = synthetic [barcode part1]
  source 1..16: mol_type = other DNA
tagtcgattggttggc

SEQ ID NO: 13395 - DNA, 16 bp, synthetic construct
  misc_feature 1..16: note = synthetic [barcode part1]
  source 1..16: mol_type = other DNA
acggtacgatcgatct

SEQ ID NO: 13396 - DNA, 16 bp, synthetic construct
  misc_feature 1..16: note = synthetic [barcode part1]
  source 1..16: mol_type = other DNA
tacagtgaggtggacc

SEQ ID NO: 13397 - DNA, 16 bp, synthetic construct
  misc_feature 1..16: note = synthetic [barcode part1]
  source 1..16: mol_type = other DNA
gcagtacaattccggt

SEQ ID NO: 13398 - DNA, 16 bp, synthetic construct
  misc_feature 1..16: note = synthetic [barcode part1]
  source 1..16: mol_type = other DNA
aacacctcggagaacg

SEQ ID NO: 13399 - DNA, 16 bp, synthetic construct
  misc_feature 1..16: note = synthetic [barcode part1]
  source 1..16: mol_type = other DNA
taggtggttatctgcg

SEQ ID NO: 13400 - DNA, 16 bp, synthetic construct
  misc_feature 1..16: note = synthetic [barcode part1]
  source 1..16: mol_type = other DNA
agactctctctccttg

SEQ ID NO: 13401 - DNA, 16 bp, synthetic construct
  misc_feature 1..16: note = synthetic [barcode part1]
  source 1..16: mol_type = other DNA
gacgttaccgaagttc

SEQ ID NO: 13402 - DNA, 16 bp, synthetic construct
  misc_feature 1..16: note = synthetic [barcode part1]
  source 1..16: mol_type = other DNA
ttcagaggtatacgcc

SEQ ID NO: 13403 - DNA, 16 bp, synthetic construct
  misc_feature 1..16: note = synthetic [barcode part1]
  source 1..16: mol_type = other DNA
tagtgcgaggataact

SEQ ID NO: 13404 - DNA, 16 bp, synthetic construct
  misc_feature 1..16: note = synthetic [barcode part1]
  source 1..16: mol_type = other DNA
gattcaggtactcttc

SEQ ID NO: 13405 - DNA, 16 bp, synthetic construct
  misc_feature 1..16: note = synthetic [barcode part1]
  source 1..16: mol_type = other DNA
aagtgtctgtccagac

SEQ ID NO: 13406 - DNA, 16 bp, synthetic construct
  misc_feature 1..16: note = synthetic [barcode part1]
  source 1..16: mol_type = other DNA
gttagtcagtctcgag

SEQ ID NO: 13407 - DNA, 16 bp, synthetic construct
  misc_feature 1..16: note = synthetic [barcode part1]
  source 1..16: mol_type = other DNA
acgaggatagtagttc

SEQ ID NO: 13408 - DNA, 16 bp, synthetic construct
  misc_feature 1..16: note = synthetic [barcode part1]
  source 1..16: mol_type = other DNA
gtgttaacaacggagt

SEQ ID NO: 13409 - DNA, 16 bp, synthetic construct
  misc_feature 1..16: note = synthetic [barcode part1]
  source 1..16: mol_type = other DNA
caacagttcgagtcac

SEQ ID NO: 13410 - DNA, 16 bp, synthetic construct
  misc_feature 1..16: note = synthetic [barcode part1]
  source 1..16: mol_type = other DNA
cgattgactaactggc

SEQ ID NO: 13411 - DNA, 16 bp, synthetic construct
  misc_feature 1..16: note = synthetic [barcode part1]
  source 1..16: mol_type = other DNA
ttctggcaggagttac

SEQ ID NO: 13412 - DNA, 16 bp, synthetic construct
  misc_feature 1..16: note = synthetic [barcode part1]
  source 1..16: mol_type = other DNA
tacggtaccacttgcc

SEQ ID NO: 13413 - DNA, 16 bp, synthetic construct
  misc_feature 1..16: note = synthetic [barcode part1]
  source 1..16: mol_type = other DNA
cggcgttaacagacag

SEQ ID NO: 13414 - DNA, 16 bp, synthetic construct
  misc_feature 1..16: note = synthetic [barcode part1]
  source 1..16: mol_type = other DNA
cgtcttggatatccgc

SEQ ID NO: 13415 - DNA, 16 bp, synthetic construct
  misc_feature 1..16: note = synthetic [barcode part1]
  source 1..16: mol_type = other DNA
tgccggtcaatatacg

SEQ ID NO: 13416 - DNA, 16 bp, synthetic construct
  misc_feature 1..16: note = synthetic [barcode part1]
  source 1..16: mol_type = other DNA
gaattgccgttctcgc

SEQ ID NO: 13417 - DNA, 16 bp, synthetic construct
  misc_feature 1..16: note = synthetic [barcode part1]
  source 1..16: mol_type = other DNA
actgtaacgcctgcct

SEQ ID NO: 13418 - DNA, 16 bp, synthetic construct
  misc_feature 1..16: note = synthetic [barcode part1]
  source 1..16: mol_type = other DNA
acctccttacacgacg

SEQ ID NO: 13419 - DNA, 16 bp, synthetic construct
  misc_feature 1..16: note = synthetic [barcode part1]
  source 1..16: mol_type = other DNA
aacaagtggacaggtg

SEQ ID NO: 13420 - DNA, 16 bp, synthetic construct
  misc_feature 1..16: note = synthetic [barcode part1]
  source 1..16: mol_type = other DNA
cacgacacctgtctgt

SEQ ID NO: 13421 - DNA, 16 bp, synthetic construct
  misc_feature 1..16: note = synthetic [barcode part1]
  source 1..16: mol_type = other DNA
tgcctcacttgaatac

SEQ ID NO: 13422 - DNA, 16 bp, synthetic construct
  misc_feature 1..16: note = synthetic [barcode part1]
  source 1..16: mol_type = other DNA
ccgtgttgagtcgttc

SEQ ID NO: 13423 - DNA, 16 bp, synthetic construct
  misc_feature 1..16: note = synthetic [barcode part1]
  source 1..16: mol_type = other DNA
caggagtagtgactcg

SEQ ID NO: 13424 - DNA, 16 bp, synthetic construct
  misc_feature 1..16: note = synthetic [barcode part1]
  source 1..16: mol_type = other DNA
caggtagttacgatag

SEQ ID NO: 13425 - DNA, 16 bp, synthetic construct
  misc_feature 1..16: note = synthetic [barcode part1]
  source 1..16: mol_type = other DNA
gtgccggttaatacgt

SEQ ID NO: 13426 - DNA, 16 bp, synthetic construct
  misc_feature 1..16: note = synthetic [barcode part1]
  source 1..16: mol_type = other DNA
atcagtggtagtcacc

SEQ ID NO: 13427 - DNA, 16 bp, synthetic construct
  misc_feature 1..16: note = synthetic [barcode part1]
  source 1..16: mol_type = other DNA
tagatcggtgttcttc

SEQ ID NO: 13428 - DNA, 16 bp, synthetic construct
  misc_feature 1..16: note = synthetic [barcode part1]
  source 1..16: mol_type = other DNA
attgtctggtgagacc

SEQ ID NO: 13429 - DNA, 16 bp, synthetic construct
  misc_feature 1..16: note = synthetic [barcode part1]
  source 1..16: mol_type = other DNA
tgaacacaagacggcc

SEQ ID NO: 13430 - DNA, 16 bp, synthetic construct
  misc_feature 1..16: note = synthetic [barcode part1]
  source 1..16: mol_type = other DNA
tggtcctataccaatc

SEQ ID NO: 13431 - DNA, 16 bp, synthetic construct
  misc_feature 1..16: note = synthetic [barcode part1]
  source 1..16: mol_type = other DNA
cgagaaggcacgttac

SEQ ID NO: 13432 - DNA, 16 bp, synthetic construct
  misc_feature 1..16: note = synthetic [barcode part1]
  source 1..16: mol_type = other DNA
cggttaggtcgcaatt

SEQ ID NO: 13433 - DNA, 16 bp, synthetic construct
  misc_feature 1..16: note = synthetic [barcode part1]
  source 1..16: mol_type = other DNA
agtatagtagactgcg

SEQ ID NO: 13434 - DNA, 16 bp, synthetic construct
  misc_feature 1..16: note = synthetic [barcode part1]
  source 1..16: mol_type = other DNA
tgaattggcacctctt

SEQ ID NO: 13435 - DNA, 16 bp, synthetic construct
  misc_feature 1..16: note = synthetic [barcode part1]
  source 1..16: mol_type = other DNA
caagtacgtgttcgac

SEQ ID NO: 13436 - DNA, 16 bp, synthetic construct
  misc_feature 1..16: note = synthetic [barcode part1]
  source 1..16: mol_type = other DNA
gtaacctatccggtag

SEQ ID NO: 13437 - DNA, 16 bp, synthetic construct
  misc_feature 1..16: note = synthetic [barcode part1]
  source 1..16: mol_type = other DNA
agtctggttccgcgtt

SEQ ID NO: 13438 - DNA, 16 bp, synthetic construct
  misc_feature 1..16: note = synthetic [barcode part1]
  source 1..16: mol_type = other DNA
acgaatcactagagac

SEQ ID NO: 13439 - DNA, 16 bp, synthetic construct
  misc_feature 1..16: note = synthetic [barcode part1]
  source 1..16: mol_type = other DNA
gattacacgactgcgt

SEQ ID NO: 13440 - DNA, 16 bp, synthetic construct
  misc_feature 1..16: note = synthetic [barcode part1]
  source 1..16: mol_type = other DNA
tcctcagttaagaggc

SEQ ID NO: 13441 - DNA, 16 bp, synthetic construct
  misc_feature 1..16: note = synthetic [barcode part1]
  source 1..16: mol_type = other DNA
attctgtgcgaggtac

SEQ ID NO: 13442 - DNA, 16 bp, synthetic construct
  misc_feature 1..16: note = synthetic [barcode part1]
  source 1..16: mol_type = other DNA
tgccgaggtctctatc

SEQ ID NO: 13443 - DNA, 16 bp, synthetic construct
  misc_feature 1..16: note = synthetic [barcode part1]
  source 1..16: mol_type = other DNA
tcgcgaatatcggtgt

SEQ ID NO: 13444 - DNA, 16 bp, synthetic construct
  misc_feature 1..16: note = synthetic [barcode part1]
  source 1..16: mol_type = other DNA
aggtctggcgattgtt

SEQ ID NO: 13445 - DNA, 16 bp, synthetic construct
  misc_feature 1..16: note = synthetic [barcode part1]
  source 1..16: mol_type = other DNA
cgtaggtattccgcct

SEQ ID NO: 13446 - DNA, 16 bp, synthetic construct
  misc_feature 1..16: note = synthetic [barcode part1]
  source 1..16: mol_type = other DNA
ataattgacgcgccac

SEQ ID NO: 13447 - DNA, 16 bp, synthetic construct
  misc_feature 1..16: note = synthetic [barcode part1]
  source 1..16: mol_type = other DNA
cgtaacgattcgtctt

SEQ ID NO: 13448 - DNA, 16 bp, synthetic construct
  misc_feature 1..16: note = synthetic [barcode part1]
  source 1..16: mol_type = other DNA
aggtggattacctacc

SEQ ID NO: 13449 - DNA, 16 bp, synthetic construct
  misc_feature 1..16: note = synthetic [barcode part1]
  source 1..16: mol_type = other DNA
taccgaagtgaggacc

SEQ ID NO: 13450 - DNA, 16 bp, synthetic construct
  misc_feature 1..16: note = synthetic [barcode part1]
  source 1..16: mol_type = other DNA
cctctctgtcgattgt

SEQ ID NO: 13451 - DNA, 16 bp, synthetic construct
  misc_feature 1..16: note = synthetic [barcode part1]
  source 1..16: mol_type = other DNA
tgtaggcacctcgtct

SEQ ID NO: 13452 - DNA, 16 bp, synthetic construct
  misc_feature 1..16: note = synthetic [barcode part1]
  source 1..16: mol_type = other DNA
ccgtataacgtcaacg

SEQ ID NO: 13453 - DNA, 16 bp, synthetic construct
  misc_feature 1..16: note = synthetic [barcode part1]
  source 1..16: mol_type = other DNA
accgaagaactctctg

SEQ ID NO: 13454 - DNA, 16 bp, synthetic construct
  misc_feature 1..16: note = synthetic [barcode part1]
  source 1..16: mol_type = other DNA
gcactaggtgtgactt

SEQ ID NO: 13455 - DNA, 16 bp, synthetic construct
  misc_feature 1..16: note = synthetic [barcode part1]
  source 1..16: mol_type = other DNA
agatatccagaacggt

SEQ ID NO: 13456 - DNA, 16 bp, synthetic construct
  misc_feature 1..16: note = synthetic [barcode part1]
  source 1..16: mol_type = other DNA
aacactcactccttag

SEQ ID NO: 13457 - DNA, 16 bp, synthetic construct
  misc_feature 1..16: note = synthetic [barcode part1]
  source 1..16: mol_type = other DNA
acctgtattaggcgtg

SEQ ID NO: 13458 - DNA, 16 bp, synthetic construct
  misc_feature 1..16: note = synthetic [barcode part1]
  source 1..16: mol_type = other DNA
tctggatcaccgatag

SEQ ID NO: 13459 - DNA, 16 bp, synthetic construct
  misc_feature 1..16: note = synthetic [barcode part1]
  source 1..16: mol_type = other DNA
gccagattcaccaagt

SEQ ID NO: 13460 - DNA, 16 bp, synthetic construct
  misc_feature 1..16: note = synthetic [barcode part1]
  source 1..16: mol_type = other DNA
taactcctcaggaggt

SEQ ID NO: 13461 - DNA, 16 bp, synthetic construct
  misc_feature 1..16: note = synthetic [barcode part1]
  source 1..16: mol_type = other DNA
agaacagtaggacggt

SEQ ID NO: 13462 - DNA, 16 bp, synthetic construct
  misc_feature 1..16: note = synthetic [barcode part1]
  source 1..16: mol_type = other DNA
tacgtccgtgacctac

SEQ ID NO: 13463 - DNA, 16 bp, synthetic construct
  misc_feature 1..16: note = synthetic [barcode part1]
  source 1..16: mol_type = other DNA
aacggtggacgtctag

SEQ ID NO: 13464 - DNA, 16 bp, synthetic construct
  misc_feature 1..16: note = synthetic [barcode part1]
  source 1..16: mol_type = other DNA
tacgtcagtcagtgtg

SEQ ID NO: 13465 - DNA, 16 bp, synthetic construct
  misc_feature 1..16: note = synthetic [barcode part1]
  source 1..16: mol_type = other DNA
tatacgaccaccgcct

SEQ ID NO: 13466 - DNA, 16 bp, synthetic construct
  misc_feature 1..16: note = synthetic [barcode part1]
  source 1..16: mol_type = other DNA
caatcggaggagaagt

SEQ ID NO: 13467 - DNA, 16 bp, synthetic construct
  misc_feature 1..16: note = synthetic [barcode part1]
  source 1..16: mol_type = other DNA
tgtgtctatccagtgt

SEQ ID NO: 13468 - DNA, 16 bp, synthetic construct
  misc_feature 1..16: note = synthetic [barcode part1]
  source 1..16: mol_type = other DNA
cacaatcacgcctaag

SEQ ID NO: 13469 - DNA, 16 bp, synthetic construct
  misc_feature 1..16: note = synthetic [barcode part1]
  source 1..16: mol_type = other DNA
gactctacctgcctag

SEQ ID NO: 13470 - DNA, 16 bp, synthetic construct
  misc_feature 1..16: note = synthetic [barcode part1]
  source 1..16: mol_type = other DNA
gttgtggcgagtaggt

SEQ ID NO: 13471 - DNA, 16 bp, synthetic construct
  misc_feature 1..16: note = synthetic [barcode part1]
  source 1..16: mol_type = other DNA
acgtgatcttcagttc

SEQ ID NO: 13472 - DNA, 16 bp, synthetic construct
  misc_feature 1..16: note = synthetic [barcode part1]
  source 1..16: mol_type = other DNA
caggagatccttcaac

SEQ ID NO: 13473 - DNA, 16 bp, synthetic construct
  misc_feature 1..16: note = synthetic [barcode part1]
  source 1..16: mol_type = other DNA
gaggagttgccttatc

SEQ ID NO: 13474 - DNA, 16 bp, synthetic construct
  misc_feature 1..16: note = synthetic [barcode part1]
  source 1..16: mol_type = other DNA
caccaggtgaaggtac

SEQ ID NO: 13475 - DNA, 16 bp, synthetic construct
  misc_feature 1..16: note = synthetic [barcode part1]
  source 1..16: mol_type = other DNA
attgcacacgcagttg

SEQ ID NO: 13476 - DNA, 16 bp, synthetic construct
  misc_feature 1..16: note = synthetic [barcode part1]
  source 1..16: mol_type = other DNA
taggtcacgcgtcttc

SEQ ID NO: 13477 - DNA, 16 bp, synthetic construct
  misc_feature 1..16: note = synthetic [barcode part1]
  source 1..16: mol_type = other DNA
agtatcctgtcttgtg

SEQ ID NO: 13478 - DNA, 16 bp, synthetic construct
  misc_feature 1..16: note = synthetic [barcode part1]
  source 1..16: mol_type = other DNA
ttctcggtgcgtaacc

SEQ ID NO: 13479 - DNA, 16 bp, synthetic construct
  misc_feature 1..16: note = synthetic [barcode part1]
  source 1..16: mol_type = other DNA
accaggaccttagttg

SEQ ID NO: 13480 - DNA, 16 bp, synthetic construct
  misc_feature 1..16: note = synthetic [barcode part1]
  source 1..16: mol_type = other DNA
acacctaggacaatag

SEQ ID NO: 13481 - DNA, 16 bp, synthetic construct
  misc_feature 1..16: note = synthetic [barcode part1]
  source 1..16: mol_type = other DNA
tgcagatagattcgcc

SEQ ID NO: 13482 - DNA, 16 bp, synthetic construct
  misc_feature 1..16: note = synthetic [barcode part1]
  source 1..16: mol_type = other DNA
ttaggtccggtaatcg

SEQ ID NO: 13483 - DNA, 16 bp, synthetic construct
  misc_feature 1..16: note = synthetic [barcode part1]
  source 1..16: mol_type = other DNA
tcttccttacaacgcc

SEQ ID NO: 13484 - DNA, 16 bp, synthetic construct
  misc_feature 1..16: note = synthetic [barcode part1]
  source 1..16: mol_type = other DNA
actcactgcagacagt

SEQ ID NO: 13485 - DNA, 16 bp, synthetic construct
  misc_feature 1..16: note = synthetic [barcode part1]
  source 1..16: mol_type = other DNA
gtaggtcgccactctt

SEQ ID NO: 13486 - DNA, 16 bp, synthetic construct
  misc_feature 1..16: note = synthetic [barcode part1]
  source 1..16: mol_type = other DNA
gtgacacactgactgt

SEQ ID NO: 13487 - DNA, 16 bp, synthetic construct
  misc_feature 1..16: note = synthetic [barcode part1]
  source 1..16: mol_type = other DNA
cggtatagatcgtacc

SEQ ID NO: 13488 - DNA, 16 bp, synthetic construct
  misc_feature 1..16: note = synthetic [barcode part1]
  source 1..16: mol_type = other DNA
aaggttactaagtgcg

SEQ ID NO: 13489 - DNA, 16 bp, synthetic construct
  misc_feature 1..16: note = synthetic [barcode part1]
  source 1..16: mol_type = other DNA
taaccaggaccaatcc

SEQ ID NO: 13490 - DNA, 16 bp, synthetic construct
  misc_feature 1..16: note = synthetic [barcode part1]
  source 1..16: mol_type = other DNA
cacgcgataccaatac

SEQ ID NO: 13491 - DNA, 16 bp, synthetic construct
  misc_feature 1..16: note = synthetic [barcode part1]
  source 1..16: mol_type = other DNA
ccagtctgttcggatc

SEQ ID NO: 13492 - DNA, 16 bp, synthetic construct
  misc_feature 1..16: note = synthetic [barcode part1]
  source 1..16: mol_type = other DNA
tactccgacttgcgac

SEQ ID NO: 13493 - DNA, 16 bp, synthetic construct
  misc_feature 1..16: note = synthetic [barcode part1]
  source 1..16: mol_type = other DNA
ccaaggcctgtctatc

SEQ ID NO: 13494 - DNA, 16 bp, synthetic construct
  misc_feature 1..16: note = synthetic [barcode part1]
  source 1..16: mol_type = other DNA
aactccactgtccgtg

SEQ ID NO: 13495 - DNA, 16 bp, synthetic construct
  misc_feature 1..16: note = synthetic [barcode part1]
  source 1..16: mol_type = other DNA
aactgtccgttagacg

SEQ ID NO: 13496 - DNA, 16 bp, synthetic construct
  misc_feature 1..16: note = synthetic [barcode part1]
  source 1..16: mol_type = other DNA
cagtgtacgacgagac

SEQ ID NO: 13497 - DNA, 16 bp, synthetic construct
  misc_feature 1..16: note = synthetic [barcode part1]
  source 1..16: mol_type = other DNA
ccaacttaggtactct

SEQ ID NO: 13498 - DNA, 16 bp, synthetic construct
  misc_feature 1..16: note = synthetic [barcode part1]
  source 1..16: mol_type = other DNA
gtgtctacgtcgttcg

SEQ ID NO: 13499 - DNA, 16 bp, synthetic construct
  misc_feature 1..16: note = synthetic [barcode part1]
  source 1..16: mol_type = other DNA
actacggtccactcgt

SEQ ID NO: 13500 - DNA, 16 bp, synthetic construct
  misc_feature 1..16: note = synthetic [barcode part1]
  source 1..16: mol_type = other DNA
ttcgcgtgacctagtc

SEQ ID NO: 13501 - DNA, 16 bp, synthetic construct
  misc_feature 1..16: note = synthetic [barcode part1]
  source 1..16: mol_type = other DNA
gaggacttgtgtggtg

SEQ ID NO: 13502 - DNA, 16 bp, synthetic construct
  misc_feature 1..16: note = synthetic [barcode part1]
  source 1..16: mol_type = other DNA
accaactgaagtctcg

SEQ ID NO: 13503 - DNA, 16 bp, synthetic construct
  misc_feature 1..16: note = synthetic [barcode part1]
  source 1..16: mol_type = other DNA
aattcaggccggactt

SEQ ID NO: 13504 - DNA, 16 bp, synthetic construct
  misc_feature 1..16: note = synthetic [barcode part1]
  source 1..16: mol_type = other DNA
ttcttgagttacacgc

SEQ ID NO: 13505 - DNA, 16 bp, synthetic construct
  misc_feature 1..16: note = synthetic [barcode part1]
  source 1..16: mol_type = other DNA
cctctacgacgatctg

SEQ ID NO: 13506 - DNA, 16 bp, synthetic construct
  misc_feature 1..16: note = synthetic [barcode part1]
  source 1..16: mol_type = other DNA
ttcgcaatctatcacg

SEQ ID NO: 13507 - DNA, 16 bp, synthetic construct
  misc_feature 1..16: note = synthetic [barcode part1]
  source 1..16: mol_type = other DNA
acttggaagacggtgc

SEQ ID NO: 13508 - DNA, 16 bp, synthetic construct
  misc_feature 1..16: note = synthetic [barcode part1]
  source 1..16: mol_type = other DNA
gcctgccttgtgatac

SEQ ID NO: 13509 - DNA, 16 bp, synthetic construct
  misc_feature 1..16: note = synthetic [barcode part1]
  source 1..16: mol_type = other DNA
aaggatactactggac

SEQ ID NO: 13510 - DNA, 16 bp, synthetic construct
  misc_feature 1..16: note = synthetic [barcode part1]
  source 1..16: mol_type = other DNA
cactaactcctccgag

SEQ ID NO: 13511 - DNA, 16 bp, synthetic construct
  misc_feature 1..16: note = synthetic [barcode part1]
  source 1..16: mol_type = other DNA
tcttgacgtactcagt

SEQ ID NO: 13512 - DNA, 16 bp, synthetic construct
  misc_feature 1..16: note = synthetic [barcode part1]
  source 1..16: mol_type = other DNA
aatatacgtgccggtc

SEQ ID NO: 13513 - DNA, 16 bp, synthetic construct
  misc_feature 1..16: note = synthetic [barcode part1]
  source 1..16: mol_type = other DNA
ccacaatattgtggcg

SEQ ID NO: 13514 - DNA, 16 bp, synthetic construct
  misc_feature 1..16: note = synthetic [barcode part1]
  source 1..16: mol_type = other DNA
atatcaacggtggaac

SEQ ID NO: 13515 - DNA, 16 bp, synthetic construct
  misc_feature 1..16: note = synthetic [barcode part1]
  source 1..16: mol_type = other DNA
agaatcacgacctctg

SEQ ID NO: 13516 - DNA, 16 bp, synthetic construct
  misc_feature 1..16: note = synthetic [barcode part1]
  source 1..16: mol_type = other DNA
caattctctccggttc

SEQ ID NO: 13517 - DNA, 16 bp, synthetic construct
  misc_feature 1..16: note = synthetic [barcode part1]
  source 1..16: mol_type = other DNA
gtgagtcaacctgtgt

SEQ ID NO: 13518 - DNA, 16 bp, synthetic construct
  misc_feature 1..16: note = synthetic [barcode part1]
  source 1..16: mol_type = other DNA
aagagtagacgcgaac

SEQ ID NO: 13519 - DNA, 16 bp, synthetic construct
  misc_feature 1..16: note = synthetic [barcode part1]
  source 1..16: mol_type = other DNA
tcaagtgtcgcgaatc

SEQ ID NO: 13520 - DNA, 16 bp, synthetic construct
  misc_feature 1..16: note = synthetic [barcode part1]
  source 1..16: mol_type = other DNA
taggtggtgtcgtgag

SEQ ID NO: 13521 - DNA, 16 bp, synthetic construct
  misc_feature 1..16: note = synthetic [barcode part1]
  source 1..16: mol_type = other DNA
aacaagaacgtagtcc

SEQ ID NO: 13522 - DNA, 16 bp, synthetic construct
  misc_feature 1..16: note = synthetic [barcode part1]
  source 1..16: mol_type = other DNA
tcttggcgtatccgac

SEQ ID NO: 13523 - DNA, 16 bp, synthetic construct
  misc_feature 1..16: note = synthetic [barcode part1]
  source 1..16: mol_type = other DNA
ttgtcaggttggactg

SEQ ID NO: 13524 - DNA, 16 bp, synthetic construct
  misc_feature 1..16: note = synthetic [barcode part1]
  source 1..16: mol_type = other DNA
aaccgcgtcttaattc

SEQ ID NO: 13525 - DNA, 16 bp, synthetic construct
  misc_feature 1..16: note = synthetic [barcode part1]
  source 1..16: mol_type = other DNA
tattgagagaccgcct

SEQ ID NO: 13526 - DNA, 16 bp, synthetic construct
  misc_feature 1..16: note = synthetic [barcode part1]
  source 1..16: mol_type = other DNA
gtccaccacttgttct

SEQ ID NO: 13527 - DNA, 16 bp, synthetic construct
  misc_feature 1..16: note = synthetic [barcode part1]
  source 1..16: mol_type = other DNA
tgcctctaaggtacag

SEQ ID NO: 13528 - DNA, 16 bp, synthetic construct
  misc_feature 1..16: note = synthetic [barcode part1]
  source 1..16: mol_type = other DNA
tctaatacgtcggacg

SEQ ID NO: 13529 - DNA, 16 bp, synthetic construct
  misc_feature 1..16: note = synthetic [barcode part1]
  source 1..16: mol_type = other DNA
tggagtggagtatccg

SEQ ID NO: 13530 - DNA, 16 bp, synthetic construct
  misc_feature 1..16: note = synthetic [barcode part1]
  source 1..16: mol_type = other DNA
actcggagtaagtcct

SEQ ID NO: 13531 - DNA, 16 bp, synthetic construct
  misc_feature 1..16: note = synthetic [barcode part1]
  source 1..16: mol_type = other DNA
aatccagtgcgtctcc

SEQ ID NO: 13532 - DNA, 16 bp, synthetic construct
  misc_feature 1..16: note = synthetic [barcode part1]
  source 1..16: mol_type = other DNA
tcttgagtactcgccg

SEQ ID NO: 13533 - DNA, 16 bp, synthetic construct
  misc_feature 1..16: note = synthetic [barcode part1]
  source 1..16: mol_type = other DNA
acgtgtatcggagttc

SEQ ID NO: 13534 - DNA, 16 bp, synthetic construct
  misc_feature 1..16: note = synthetic [barcode part1]
  source 1..16: mol_type = other DNA
caggattgaccagttc

SEQ ID NO: 13535 - DNA, 16 bp, synthetic construct
  misc_feature 1..16: note = synthetic [barcode part1]
  source 1..16: mol_type = other DNA
gtctattcaggacttc

SEQ ID NO: 13536 - DNA, 16 bp, synthetic construct
  misc_feature 1..16: note = synthetic [barcode part1]
  source 1..16: mol_type = other DNA
acgaataccacaacag

SEQ ID NO: 13537 - DNA, 16 bp, synthetic construct
  misc_feature 1..16: note = synthetic [barcode part1]
  source 1..16: mol_type = other DNA
gagagtactgttgagt

SEQ ID NO: 13538 - DNA, 16 bp, synthetic construct
  misc_feature 1..16: note = synthetic [barcode part1]
  source 1..16: mol_type = other DNA
atccggactgtagact

SEQ ID NO: 13539 - DNA, 16 bp, synthetic construct
  misc_feature 1..16: note = synthetic [barcode part1]
  source 1..16: mol_type = other DNA
agttagacgccggtag

SEQ ID NO: 13540 - DNA, 16 bp, synthetic construct
  misc_feature 1..16: note = synthetic [barcode part1]
  source 1..16: mol_type = other DNA
ccacgtctgttaagtt

SEQ ID NO: 13541 - DNA, 16 bp, synthetic construct
  misc_feature 1..16: note = synthetic [barcode part1]
  source 1..16: mol_type = other DNA
acctactgacactact

SEQ ID NO: 13542 - DNA, 16 bp, synthetic construct
  misc_feature 1..16: note = synthetic [barcode part1]
  source 1..16: mol_type = other DNA
gcagagattgaaccgc

SEQ ID NO: 13543 - DNA, 16 bp, synthetic construct
  misc_feature 1..16: note = synthetic [barcode part1]
  source 1..16: mol_type = other DNA
tcctctcttccaaggt

SEQ ID NO: 13544 - DNA, 16 bp, synthetic construct
  misc_feature 1..16: note = synthetic [barcode part1]
  source 1..16: mol_type = other DNA
cacacaatccacagac

SEQ ID NO: 13545 - DNA, 16 bp, synthetic construct
  misc_feature 1..16: note = synthetic [barcode part1]
  source 1..16: mol_type = other DNA
cacgtctactcggtac

SEQ ID NO: 13546 - DNA, 16 bp, synthetic construct
  misc_feature 1..16: note = synthetic [barcode part1]
  source 1..16: mol_type = other DNA
aggaacgtaggtcacc

SEQ ID NO: 13547 - DNA, 16 bp, synthetic construct
  misc_feature 1..16: note = synthetic [barcode part1]
  source 1..16: mol_type = other DNA
tgcgaactactacctt

SEQ ID NO: 13548 - DNA, 16 bp, synthetic construct
  misc_feature 1..16: note = synthetic [barcode part1]
  source 1..16: mol_type = other DNA
tctctaacttctcggc

SEQ ID NO: 13549 - DNA, 16 bp, synthetic construct
  misc_feature 1..16: note = synthetic [barcode part1]
  source 1..16: mol_type = other DNA
ttattcgccgcctatc

SEQ ID NO: 13550 - DNA, 16 bp, synthetic construct
  misc_feature 1..16: note = synthetic [barcode part1]
  source 1..16: mol_type = other DNA
gtctggaacttcactt

SEQ ID NO: 13551 - DNA, 16 bp, synthetic construct
  misc_feature 1..16: note = synthetic [barcode part1]
  source 1..16: mol_type = other DNA
tagttcgtcgttggag

SEQ ID NO: 13552 - DNA, 16 bp, synthetic construct
  misc_feature 1..16: note = synthetic [barcode part1]
  source 1..16: mol_type = other DNA
ttctctccgtggtatc

SEQ ID NO: 13553 - DNA, 16 bp, synthetic construct
  misc_feature 1..16: note = synthetic [barcode part1]
  source 1..16: mol_type = other DNA
aatcgcgccaaggagt

SEQ ID NO: 13554 - DNA, 16 bp, synthetic construct
  misc_feature 1..16: note = synthetic [barcode part1]
  source 1..16: mol_type = other DNA
aattacttgccaggcg

SEQ ID NO: 13555 - DNA, 16 bp, synthetic construct
  misc_feature 1..16: note = synthetic [barcode part1]
  source 1..16: mol_type = other DNA
gatcaacggccaattc

SEQ ID NO: 13556 - DNA, 16 bp, synthetic construct
  misc_feature 1..16: note = synthetic [barcode part1]
  source 1..16: mol_type = other DNA
ttcgtaggacactcag

SEQ ID NO: 13557 - DNA, 16 bp, synthetic construct
  misc_feature 1..16: note = synthetic [barcode part1]
  source 1..16: mol_type = other DNA
tccttctcaacgttgc

SEQ ID NO: 13558 - DNA, 16 bp, synthetic construct
  misc_feature 1..16: note = synthetic [barcode part1]
  source 1..16: mol_type = other DNA
ccagagagttaccttg

SEQ ID NO: 13559 - DNA, 16 bp, synthetic construct
  misc_feature 1..16: note = synthetic [barcode part1]
  source 1..16: mol_type = other DNA
atcctcgattctcacc

SEQ ID NO: 13560 - DNA, 16 bp, synthetic construct
  misc_feature 1..16: note = synthetic [barcode part1]
  source 1..16: mol_type = other DNA
tgtacgtccggaattg

SEQ ID NO: 13561 - DNA, 16 bp, synthetic construct
  misc_feature 1..16: note = synthetic [barcode part1]
  source 1..16: mol_type = other DNA
tgtcaccttgttgtcc

SEQ ID NO: 13562 - DNA, 16 bp, synthetic construct
  misc_feature 1..16: note = synthetic [barcode part1]
  source 1..16: mol_type = other DNA
gccgttgcgataattg

SEQ ID NO: 13563 - DNA, 16 bp, synthetic construct
  misc_feature 1..16: note = synthetic [barcode part1]
  source 1..16: mol_type = other DNA
tgcgtccgagttacct

SEQ ID NO: 13564 - DNA, 16 bp, synthetic construct
  misc_feature 1..16: note = synthetic [barcode part1]
  source 1..16: mol_type = other DNA
cgagagataaccacgc

SEQ ID NO: 13565 - DNA, 16 bp, synthetic construct
  misc_feature 1..16: note = synthetic [barcode part1]
  source 1..16: mol_type = other DNA
cagagttattgaccgc

SEQ ID NO: 13566 - DNA, 16 bp, synthetic construct
  misc_feature 1..16: note = synthetic [barcode part1]
  source 1..16: mol_type = other DNA
ttggtggacctctatt

SEQ ID NO: 13567 - DNA, 16 bp, synthetic construct
  misc_feature 1..16: note = synthetic [barcode part1]
  source 1..16: mol_type = other DNA
tggactgtcaggttgt

SEQ ID NO: 13568 - DNA, 16 bp, synthetic construct
  misc_feature 1..16: note = synthetic [barcode part1]
  source 1..16: mol_type = other DNA
ccaggattgagtaagt

SEQ ID NO: 13569 - DNA, 16 bp, synthetic construct
  misc_feature 1..16: note = synthetic [barcode part1]
  source 1..16: mol_type = other DNA
tggtcaggatctcagt

SEQ ID NO: 13570 - DNA, 16 bp, synthetic construct
  misc_feature 1..16: note = synthetic [barcode part1]
  source 1..16: mol_type = other DNA
attaccgtggcaactg

SEQ ID NO: 13571 - DNA, 16 bp, synthetic construct
  misc_feature 1..16: note = synthetic [barcode part1]
  source 1..16: mol_type = other DNA
ttgttgttccgagtac

SEQ ID NO: 13572 - DNA, 16 bp, synthetic construct
  misc_feature 1..16: note = synthetic [barcode part1]
  source 1..16: mol_type = other DNA
tgcgcaattaccactt

SEQ ID NO: 13573 - DNA, 16 bp, synthetic construct
  misc_feature 1..16: note = synthetic [barcode part1]
  source 1..16: mol_type = other DNA
cgaatcgaagaacact

SEQ ID NO: 13574 - DNA, 16 bp, synthetic construct
  misc_feature 1..16: note = synthetic [barcode part1]
  source 1..16: mol_type = other DNA
tctcagtggttgtgtt

SEQ ID NO: 13575 - DNA, 16 bp, synthetic construct
  misc_feature 1..16: note = synthetic [barcode part1]
  source 1..16: mol_type = other DNA
ccgattagttgaccag

SEQ ID NO: 13576 - DNA, 16 bp, synthetic construct
  misc_feature 1..16: note = synthetic [barcode part1]
  source 1..16: mol_type = other DNA
ccgaattcagtctgag

SEQ ID NO: 13577 - DNA, 16 bp, synthetic construct
  misc_feature 1..16: note = synthetic [barcode part1]
  source 1..16: mol_type = other DNA
gtctactgcctgtctt

SEQ ID NO: 13578 - DNA, 16 bp, synthetic construct
  misc_feature 1..16: note = synthetic [barcode part1]
  source 1..16: mol_type = other DNA
gtgcgtcctattgtcg

SEQ ID NO: 13579 - DNA, 16 bp, synthetic construct
  misc_feature 1..16: note = synthetic [barcode part1]
  source 1..16: mol_type = other DNA
tggcgatcgtaggagt

SEQ ID NO: 13580 - DNA, 16 bp, synthetic construct
  misc_feature 1..16: note = synthetic [barcode part1]
  source 1..16: mol_type = other DNA
gtatcaccgagacttg

SEQ ID NO: 13581 - DNA, 16 bp, synthetic construct
  misc_feature 1..16: note = synthetic [barcode part1]
  source 1..16: mol_type = other DNA
gaacgaggtctcagac

SEQ ID NO: 13582 - DNA, 16 bp, synthetic construct
  misc_feature 1..16: note = synthetic [barcode part1]
  source 1..16: mol_type = other DNA
gcaagtggcaacgttg

SEQ ID NO: 13583 - DNA, 16 bp, synthetic construct
  misc_feature 1..16: note = synthetic [barcode part1]
  source 1..16: mol_type = other DNA
tacttacggataggcc

SEQ ID NO: 13584 - DNA, 16 bp, synthetic construct
  misc_feature 1..16: note = synthetic [barcode part1]
  source 1..16: mol_type = other DNA
aactgcagttgcacac

SEQ ID NO: 13585 - DNA, 16 bp, synthetic construct
  misc_feature 1..16: note = synthetic [barcode part1]
  source 1..16: mol_type = other DNA
atcaagagtaccagtg

SEQ ID NO: 13586 - DNA, 16 bp, synthetic construct
  misc_feature 1..16: note = synthetic [barcode part1]
  source 1..16: mol_type = other DNA
ttggcgagtctagtgt

SEQ ID NO: 13587 - DNA, 16 bp, synthetic construct
  misc_feature 1..16: note = synthetic [barcode part1]
  source 1..16: mol_type = other DNA
ccttagatcgtgacag

SEQ ID NO: 13588 - DNA, 16 bp, synthetic construct
  misc_feature 1..16: note = synthetic [barcode part1]
  source 1..16: mol_type = other DNA
aattggcagagtctcc

SEQ ID NO: 13589 - DNA, 16 bp, synthetic construct
  misc_feature 1..16: note = synthetic [barcode part1]
  source 1..16: mol_type = other DNA
tgttgtctcaccacct

SEQ ID NO: 13590 - DNA, 16 bp, synthetic construct
  misc_feature 1..16: note = synthetic [barcode part1]
  source 1..16: mol_type = other DNA
gtacggattcgataag

SEQ ID NO: 13591 - DNA, 16 bp, synthetic construct
  misc_feature 1..16: note = synthetic [barcode part1]
  source 1..16: mol_type = other DNA
tctattcgacaccgcg

SEQ ID NO: 13592 - DNA, 16 bp, synthetic construct
  misc_feature 1..16: note = synthetic [barcode part1]
  source 1..16: mol_type = other DNA
gccgcgagatattact

SEQ ID NO: 13593 - DNA, 16 bp, synthetic construct
  misc_feature 1..16: note = synthetic [barcode part1]
  source 1..16: mol_type = other DNA
tcgccttgaagtaacg

SEQ ID NO: 13594 - DNA, 16 bp, synthetic construct
  misc_feature 1..16: note = synthetic [barcode part1]
  source 1..16: mol_type = other DNA
tccgactgttgcacac

SEQ ID NO: 13595 - DNA, 16 bp, synthetic construct
  misc_feature 1..16: note = synthetic [barcode part1]
  source 1..16: mol_type = other DNA
gcgtcttcagtggttc

SEQ ID NO: 13596 - DNA, 16 bp, synthetic construct
  misc_feature 1..16: note = synthetic [barcode part1]
  source 1..16: mol_type = other DNA
atctcagtggtcagtg

SEQ ID NO: 13597 - DNA, 16 bp, synthetic construct
  misc_feature 1..16: note = synthetic [barcode part1]
  source 1..16: mol_type = other DNA
tcaaggccactcgtct

SEQ ID NO: 13598 - DNA, 16 bp, synthetic construct
  misc_feature 1..16: note = synthetic [barcode part1]
  source 1..16: mol_type = other DNA
gagattctactgcgac

SEQ ID NO: 13599 - DNA, 16 bp, synthetic construct
  misc_feature 1..16: note = synthetic [barcode part1]
  source 1..16: mol_type = other DNA
tgcacgcaactgattg

SEQ ID NO: 13600 - DNA, 16 bp, synthetic construct
  misc_feature 1..16: note = synthetic [barcode part1]
  source 1..16: mol_type = other DNA
gtctaggtggatacct

SEQ ID NO: 13601 - DNA, 16 bp, synthetic construct
  misc_feature 1..16: note = synthetic [barcode part1]
  source 1..16: mol_type = other DNA
gatctggatcaggtct

SEQ ID NO: 13602 - DNA, 16 bp, synthetic construct
  misc_feature 1..16: note = synthetic [barcode part1]
  source 1..16: mol_type = other DNA
cggtcaataacaccgt

SEQ ID NO: 13603 - DNA, 16 bp, synthetic construct
  misc_feature 1..16: note = synthetic [barcode part1]
  source 1..16: mol_type = other DNA
gacctctctaagtgcc

SEQ ID NO: 13604 - DNA, 16 bp, synthetic construct
  misc_feature 1..16: note = synthetic [barcode part1]
  source 1..16: mol_type = other DNA
gtagtaccgtaacgtc

SEQ ID NO: 13605 - DNA, 16 bp, synthetic construct
  misc_feature 1..16: note = synthetic [barcode part1]
  source 1..16: mol_type = other DNA
cggattgtcggtgatt

SEQ ID NO: 13606 - DNA, 16 bp, synthetic construct
  misc_feature 1..16: note = synthetic [barcode part1]
  source 1..16: mol_type = other DNA
tcagtgagaacgtggc

SEQ ID NO: 13607 - DNA, 16 bp, synthetic construct
  misc_feature 1..16: note = synthetic [barcode part1]
  source 1..16: mol_type = other DNA
tgacgtaagaacgatc

SEQ ID NO: 13608 - DNA, 16 bp, synthetic construct
  misc_feature 1..16: note = synthetic [barcode part1]
  source 1..16: mol_type = other DNA
cctgcagatcctatcg

SEQ ID NO: 13609 - DNA, 16 bp, synthetic construct
  misc_feature 1..16: note = synthetic [barcode part1]
  source 1..16: mol_type = other DNA
agtctggtcggtgatt

SEQ ID NO: 13610 - DNA, 16 bp, synthetic construct
  misc_feature 1..16: note = synthetic [barcode part1]
  source 1..16: mol_type = other DNA
cggcgtacaacagaac

SEQ ID NO: 13611 - DNA, 16 bp, synthetic construct
  misc_feature 1..16: note = synthetic [barcode part1]
  source 1..16: mol_type = other DNA
tcgtgcgtcctgattg

SEQ ID NO: 13612 - DNA, 16 bp, synthetic construct
  misc_feature 1..16: note = synthetic [barcode part1]
  source 1..16: mol_type = other DNA
agactcagtctgagtc

SEQ ID NO: 13613 - DNA, 16 bp, synthetic construct
  misc_feature 1..16: note = synthetic [barcode part1]
  source 1..16: mol_type = other DNA
gcggaataagtccacg

SEQ ID NO: 13614 - DNA, 16 bp, synthetic construct
  misc_feature 1..16: note = synthetic [barcode part1]
  source 1..16: mol_type = other DNA
tatacctggtgatctc

SEQ ID NO: 13615 - DNA, 16 bp, synthetic construct
  misc_feature 1..16: note = synthetic [barcode part1]
  source 1..16: mol_type = other DNA
cacctcgtactcaggt

SEQ ID NO: 13616 - DNA, 16 bp, synthetic construct
  misc_feature 1..16: note = synthetic [barcode part1]
  source 1..16: mol_type = other DNA
tacgcaagtccaagtc

SEQ ID NO: 13617 - DNA, 16 bp, synthetic construct
  misc_feature 1..16: note = synthetic [barcode part1]
  source 1..16: mol_type = other DNA
tgtagtgcaccacaac

SEQ ID NO: 13618 - DNA, 16 bp, synthetic construct
  misc_feature 1..16: note = synthetic [barcode part1]
  source 1..16: mol_type = other DNA
ttgtggtcagtcagtg

SEQ ID NO: 13619 - DNA, 16 bp, synthetic construct
  misc_feature 1..16: note = synthetic [barcode part1]
  source 1..16: mol_type = other DNA
aggcaacggttcacag

SEQ ID NO: 13620 - DNA, 16 bp, synthetic construct
  misc_feature 1..16: note = synthetic [barcode part1]
  source 1..16: mol_type = other DNA
tccagaacgatcgatc

SEQ ID NO: 13621 - DNA, 16 bp, synthetic construct
  misc_feature 1..16: note = synthetic [barcode part1]
  source 1..16: mol_type = other DNA
acggaccaacttgtac

SEQ ID NO: 13622 - DNA, 16 bp, synthetic construct
  misc_feature 1..16: note = synthetic [barcode part1]
  source 1..16: mol_type = other DNA
gattgaaggcacgtcg

SEQ ID NO: 13623 - DNA, 16 bp, synthetic construct
  misc_feature 1..16: note = synthetic [barcode part1]
  source 1..16: mol_type = other DNA
aattgcctactaggcg

SEQ ID NO: 13624 - DNA, 16 bp, synthetic construct
  misc_feature 1..16: note = synthetic [barcode part1]
  source 1..16: mol_type = other DNA
ttcgccaactaggaac

SEQ ID NO: 13625 - DNA, 16 bp, synthetic construct
  misc_feature 1..16: note = synthetic [barcode part1]
  source 1..16: mol_type = other DNA
cgacaagattcacaag

SEQ ID NO: 13626 - DNA, 16 bp, synthetic construct
  misc_feature 1..16: note = synthetic [barcode part1]
  source 1..16: mol_type = other DNA
tactggtgactctccg

SEQ ID NO: 13627 - DNA, 16 bp, synthetic construct
  misc_feature 1..16: note = synthetic [barcode part1]
  source 1..16: mol_type = other DNA
cgcaatacaaggttcc

SEQ ID NO: 13628 - DNA, 16 bp, synthetic construct
  misc_feature 1..16: note = synthetic [barcode part1]
  source 1..16: mol_type = other DNA
gaccgaatcgcacaag

SEQ ID NO: 13629 - DNA, 16 bp, synthetic construct
  misc_feature 1..16: note = synthetic [barcode part1]
  source 1..16: mol_type = other DNA
gatccaagaggcacac

SEQ ID NO: 13630 - DNA, 16 bp, synthetic construct
  misc_feature 1..16: note = synthetic [barcode part1]
  source 1..16: mol_type = other DNA
aacaaccggcctaatc

SEQ ID NO: 13631 - DNA, 16 bp, synthetic construct
  misc_feature 1..16: note = synthetic [barcode part1]
  source 1..16: mol_type = other DNA
gcgtctccgacaactt

SEQ ID NO: 13632 - DNA, 16 bp, synthetic construct
  misc_feature 1..16: note = synthetic [barcode part1]
  source 1..16: mol_type = other DNA
gcactggatcaaggac

SEQ ID NO: 13633 - DNA, 16 bp, synthetic construct
  misc_feature 1..16: note = synthetic [barcode part1]
  source 1..16: mol_type = other DNA
aactccagtggtgttg

SEQ ID NO: 13634 - DNA, 16 bp, synthetic construct
  misc_feature 1..16: note = synthetic [barcode part1]
  source 1..16: mol_type = other DNA
tcgacagaacgactct

SEQ ID NO: 13635 - DNA, 16 bp, synthetic construct
  misc_feature 1..16: note = synthetic [barcode part1]
  source 1..16: mol_type = other DNA
agtggagaacctatac

SEQ ID NO: 13636 - DNA, 16 bp, synthetic construct
  misc_feature 1..16: note = synthetic [barcode part1]
  source 1..16: mol_type = other DNA
acgacacacactacgt

SEQ ID NO: 13637 - DNA, 16 bp, synthetic construct
  misc_feature 1..16: note = synthetic [barcode part1]
  source 1..16: mol_type = other DNA
agagtcgaggataacg

SEQ ID NO: 13638 - DNA, 16 bp, synthetic construct
  misc_feature 1..16: note = synthetic [barcode part1]
  source 1..16: mol_type = other DNA
gaggtacacacagaag

SEQ ID NO: 13639 - DNA, 16 bp, synthetic construct
  misc_feature 1..16: note = synthetic [barcode part1]
  source 1..16: mol_type = other DNA
tgacttcgcgtcggtt

SEQ ID NO: 13640 - DNA, 16 bp, synthetic construct
  misc_feature 1..16: note = synthetic [barcode part1]
  source 1..16: mol_type = other DNA
ccacttcttgaatacg

SEQ ID NO: 13641 - DNA, 16 bp, synthetic construct
  misc_feature 1..16: note = synthetic [barcode part1]
  source 1..16: mol_type = other DNA
gaatccggagtacctt

SEQ ID NO: 13642 - DNA, 16 bp, synthetic construct
  misc_feature 1..16: note = synthetic [barcode part1]
  source 1..16: mol_type = other DNA
tcaggatcacctattc

SEQ ID NO: 13643 - DNA, 16 bp, synthetic construct
  misc_feature 1..16: note = synthetic [barcode part1]
  source 1..16: mol_type = other DNA
tgtgttgaccaacgtg

SEQ ID NO: 13644 - DNA, 16 bp, synthetic construct
  misc_feature 1..16: note = synthetic [barcode part1]
  source 1..16: mol_type = other DNA
tgactacttcgacttg

SEQ ID NO: 13645 - DNA, 16 bp, synthetic construct
  misc_feature 1..16: note = synthetic [barcode part1]
  source 1..16: mol_type = other DNA
tccgcgcagaatatac

SEQ ID NO: 13646 - DNA, 16 bp, synthetic construct
  misc_feature 1..16: note = synthetic [barcode part1]
  source 1..16: mol_type = other DNA
ttcttactgagtcgtg

SEQ ID NO: 13647 - DNA, 16 bp, synthetic construct
  misc_feature 1..16: note = synthetic [barcode part1]
  source 1..16: mol_type = other DNA
cgccttagagttcgtc

SEQ ID NO: 13648 - DNA, 16 bp, synthetic construct
  misc_feature 1..16: note = synthetic [barcode part1]
  source 1..16: mol_type = other DNA
tagtacgtacgagtcc

SEQ ID NO: 13649 - DNA, 16 bp, synthetic construct
  misc_feature 1..16: note = synthetic [barcode part1]
  source 1..16: mol_type = other DNA
ttccggttcaagtatc

SEQ ID NO: 13650 - DNA, 16 bp, synthetic construct
  misc_feature 1..16: note = synthetic [barcode part1]
  source 1..16: mol_type = other DNA
tgaatatcgcgagtcc

SEQ ID NO: 13651 - DNA, 16 bp, synthetic construct
  misc_feature 1..16: note = synthetic [barcode part1]
  source 1..16: mol_type = other DNA
gaagtcgaaggatcag

SEQ ID NO: 13652 - DNA, 16 bp, synthetic construct
  misc_feature 1..16: note = synthetic [barcode part1]
  source 1..16: mol_type = other DNA
cgacacgcaattctcc

SEQ ID NO: 13653 - DNA, 16 bp, synthetic construct
  misc_feature 1..16: note = synthetic [barcode part1]
  source 1..16: mol_type = other DNA
ccgtatccaagttatc

SEQ ID NO: 13654 - DNA, 16 bp, synthetic construct
  misc_feature 1..16: note = synthetic [barcode part1]
  source 1..16: mol_type = other DNA
taacgtcggtatcgtg

SEQ ID NO: 13655 - DNA, 16 bp, synthetic construct
  misc_feature 1..16: note = synthetic [barcode part1]
  source 1..16: mol_type = other DNA
tcagactctccacacg

SEQ ID NO: 13656 - DNA, 16 bp, synthetic construct
  misc_feature 1..16: note = synthetic [barcode part1]
  source 1..16: mol_type = other DNA
acggaggcgattcagt

SEQ ID NO: 13657 - DNA, 16 bp, synthetic construct
  misc_feature 1..16: note = synthetic [barcode part1]
  source 1..16: mol_type = other DNA
atctgccacttgttcc

SEQ ID NO: 13658 - DNA, 16 bp, synthetic construct
  misc_feature 1..16: note = synthetic [barcode part1]
  source 1..16: mol_type = other DNA
tgttctggtggcaagt

SEQ ID NO: 13659 - DNA, 16 bp, synthetic construct
  misc_feature 1..16: note = synthetic [barcode part1]
  source 1..16: mol_type = other DNA
aagttgagtgccgacg

SEQ ID NO: 13660 - DNA, 16 bp, synthetic construct
  misc_feature 1..16: note = synthetic [barcode part1]
  source 1..16: mol_type = other DNA
gatcggtgtcgattgt

SEQ ID NO: 13661 - DNA, 16 bp, synthetic construct
  misc_feature 1..16: note = synthetic [barcode part1]
  source 1..16: mol_type = other DNA
gattataccggaagac

SEQ ID NO: 13662 - DNA, 16 bp, synthetic construct
  misc_feature 1..16: note = synthetic [barcode part1]
  source 1..16: mol_type = other DNA
aggtcagagaaggttg

SEQ ID NO: 13663 - DNA, 16 bp, synthetic construct
  misc_feature 1..16: note = synthetic [barcode part1]
  source 1..16: mol_type = other DNA
acttcgcagacgttcc

SEQ ID NO: 13664 - DNA, 16 bp, synthetic construct
  misc_feature 1..16: note = synthetic [barcode part1]
  source 1..16: mol_type = other DNA
agagtaggccttgtct

SEQ ID NO: 13665 - DNA, 16 bp, synthetic construct
  misc_feature 1..16: note = synthetic [barcode part1]
  source 1..16: mol_type = other DNA
tgtgcagacctgagtt

SEQ ID NO: 13666 - DNA, 16 bp, synthetic construct
  misc_feature 1..16: note = synthetic [barcode part1]
  source 1..16: mol_type = other DNA
aggaagtgcgaccact

SEQ ID NO: 13667 - DNA, 16 bp, synthetic construct
  misc_feature 1..16: note = synthetic [barcode part1]
  source 1..16: mol_type = other DNA
taactcgccacgtctg

SEQ ID NO: 13668 - DNA, 16 bp, synthetic construct
  misc_feature 1..16: note = synthetic [barcode part1]
  source 1..16: mol_type = other DNA
attaactcgtgcgcag

SEQ ID NO: 13669 - DNA, 16 bp, synthetic construct
  misc_feature 1..16: note = synthetic [barcode part1]
  source 1..16: mol_type = other DNA
gcaaccacaacgtact

SEQ ID NO: 13670 - DNA, 16 bp, synthetic construct
  misc_feature 1..16: note = synthetic [barcode part1]
  source 1..16: mol_type = other DNA
gtctggcaatctaacg

SEQ ID NO: 13671 - DNA, 16 bp, synthetic construct
  misc_feature 1..16: note = synthetic [barcode part1]
  source 1..16: mol_type = other DNA
gtcgcggttacttatt

SEQ ID NO: 13672 - DNA, 16 bp, synthetic construct
  misc_feature 1..16: note = synthetic [barcode part1]
  source 1..16: mol_type = other DNA
atcgtaatcgtggcgt

SEQ ID NO: 13673 - DNA, 16 bp, synthetic construct
  misc_feature 1..16: note = synthetic [barcode part1]
  source 1..16: mol_type = other DNA
gagacagtctactacc

SEQ ID NO: 13674 - DNA, 16 bp, synthetic construct
  misc_feature 1..16: note = synthetic [barcode part1]
  source 1..16: mol_type = other DNA
ttagagagattcgcag

SEQ ID NO: 13675 - DNA, 16 bp, synthetic construct
  misc_feature 1..16: note = synthetic [barcode part1]
  source 1..16: mol_type = other DNA
tgcgcactgtaatacg

SEQ ID NO: 13676 - DNA, 16 bp, synthetic construct
  misc_feature 1..16: note = synthetic [barcode part1]
  source 1..16: mol_type = other DNA
ttggatctgcactccg

SEQ ID NO: 13677 - DNA, 16 bp, synthetic construct
  misc_feature 1..16: note = synthetic [barcode part1]
  source 1..16: mol_type = other DNA
aggtcgatcttccaag

SEQ ID NO: 13678 - DNA, 16 bp, synthetic construct
  misc_feature 1..16: note = synthetic [barcode part1]
  source 1..16: mol_type = other DNA
ttcaatcgtcggcacc

SEQ ID NO: 13679 - DNA, 16 bp, synthetic construct
  misc_feature 1..16: note = synthetic [barcode part1]
  source 1..16: mol_type = other DNA
attcacgactaggaag

SEQ ID NO: 13680 - DNA, 16 bp, synthetic construct
  misc_feature 1..16: note = synthetic [barcode part1]
  source 1..16: mol_type = other DNA
taactggaactctggc

SEQ ID NO: 13681 - DNA, 16 bp, synthetic construct
  misc_feature 1..16: note = synthetic [barcode part1]
  source 1..16: mol_type = other DNA
gtagtgtacaccgtac

SEQ ID NO: 13682 - DNA, 16 bp, synthetic construct
  misc_feature 1..16: note = synthetic [barcode part1]
  source 1..16: mol_type = other DNA
tgaggactacctctag

SEQ ID NO: 13683 - DNA, 16 bp, synthetic construct
  misc_feature 1..16: note = synthetic [barcode part1]
  source 1..16: mol_type = other DNA
ccaacgattaccaggt

SEQ ID NO: 13684 - DNA, 16 bp, synthetic construct
  misc_feature 1..16: note = synthetic [barcode part1]
  source 1..16: mol_type = other DNA
taattcctggcgtatc

SEQ ID NO: 13685 - DNA, 16 bp, synthetic construct
  misc_feature 1..16: note = synthetic [barcode part1]
  source 1..16: mol_type = other DNA
tcgagttcggtagttg

SEQ ID NO: 13686 - DNA, 16 bp, synthetic construct
  misc_feature 1..16: note = synthetic [barcode part1]
  source 1..16: mol_type = other DNA
agaggtgcgttcttac

SEQ ID NO: 13687 - DNA, 16 bp, synthetic construct
  misc_feature 1..16: note = synthetic [barcode part1]
  source 1..16: mol_type = other DNA
acacacaacgtgtacc

SEQ ID NO: 13688 - DNA, 16 bp, synthetic construct
  misc_feature 1..16: note = synthetic [barcode part1]
  source 1..16: mol_type = other DNA
tgtcttaattcacggc

SEQ ID NO: 13689 - DNA, 16 bp, synthetic construct
  misc_feature 1..16: note = synthetic [barcode part1]
  source 1..16: mol_type = other DNA
ttccgattgcagatct

SEQ ID NO: 13690 - DNA, 16 bp, synthetic construct
  misc_feature 1..16: note = synthetic [barcode part1]
  source 1..16: mol_type = other DNA
tctagacacagtcgtg

SEQ ID NO: 13691 - DNA, 16 bp, synthetic construct
  misc_feature 1..16: note = synthetic [barcode part1]
  source 1..16: mol_type = other DNA
tggatacgaagtaacc

SEQ ID NO: 13692 - DNA, 16 bp, synthetic construct
  misc_feature 1..16: note = synthetic [barcode part1]
  source 1..16: mol_type = other DNA
agacgactctctagtg

SEQ ID NO: 13693 - DNA, 16 bp, synthetic construct
  misc_feature 1..16: note = synthetic [barcode part1]
  source 1..16: mol_type = other DNA
gaactcgttgtcactt

SEQ ID NO: 13694 - DNA, 16 bp, synthetic construct
  misc_feature 1..16: note = synthetic [barcode part1]
  source 1..16: mol_type = other DNA
aagtaggtccgttcgt

SEQ ID NO: 13695 - DNA, 16 bp, synthetic construct
  misc_feature 1..16: note = synthetic [barcode part1]
  source 1..16: mol_type = other DNA
tccacacttggaccac

SEQ ID NO: 13696 - DNA, 16 bp, synthetic construct
  misc_feature 1..16: note = synthetic [barcode part1]
  source 1..16: mol_type = other DNA
gcaagttgcacaactc

SEQ ID NO: 13697 - DNA, 16 bp, synthetic construct
  misc_feature 1..16: note = synthetic [barcode part1]
  source 1..16: mol_type = other DNA
ccactctcttcactag

SEQ ID NO: 13698 - DNA, 16 bp, synthetic construct
  misc_feature 1..16: note = synthetic [barcode part1]
  source 1..16: mol_type = other DNA
taattccgcaccgacc

SEQ ID NO: 13699 - DNA, 16 bp, synthetic construct
  misc_feature 1..16: note = synthetic [barcode part1]
  source 1..16: mol_type = other DNA
aactcttcctctggtc

SEQ ID NO: 13700 - DNA, 16 bp, synthetic construct
  misc_feature 1..16: note = synthetic [barcode part1]
  source 1..16: mol_type = other DNA
tggaacgtgccagtag

SEQ ID NO: 13701 - DNA, 16 bp, synthetic construct
  misc_feature 1..16: note = synthetic [barcode part1]
  source 1..16: mol_type = other DNA
gataccgaggatctct

SEQ ID NO: 13702 - DNA, 16 bp, synthetic construct
  misc_feature 1..16: note = synthetic [barcode part1]
  source 1..16: mol_type = other DNA
cggattgtggcaatct

SEQ ID NO: 13703 - DNA, 16 bp, synthetic construct
  misc_feature 1..16: note = synthetic [barcode part1]
  source 1..16: mol_type = other DNA
atacttaccacggacg

SEQ ID NO: 13704 - DNA, 16 bp, synthetic construct
  misc_feature 1..16: note = synthetic [barcode part1]
  source 1..16: mol_type = other DNA
ccaataacagaggtgt

SEQ ID NO: 13705 - DNA, 16 bp, synthetic construct
  misc_feature 1..16: note = synthetic [barcode part1]
  source 1..16: mol_type = other DNA
aataccgcgactagtc

SEQ ID NO: 13706 - DNA, 16 bp, synthetic construct
  misc_feature 1..16: note = synthetic [barcode part1]
  source 1..16: mol_type = other DNA
gtctcactaccttgtc

SEQ ID NO: 13707 - DNA, 16 bp, synthetic construct
  misc_feature 1..16: note = synthetic [barcode part1]
  source 1..16: mol_type = other DNA
tggaacgagacgtctg

SEQ ID NO: 13708 - DNA, 16 bp, synthetic construct
  misc_feature 1..16: note = synthetic [barcode part1]
  source 1..16: mol_type = other DNA
agtcgatcgtagtgtc

SEQ ID NO: 13709 - DNA, 16 bp, synthetic construct
  misc_feature 1..16: note = synthetic [barcode part1]
  source 1..16: mol_type = other DNA
tgacagtacgtcctcc

SEQ ID NO: 13710 - DNA, 16 bp, synthetic construct
  misc_feature 1..16: note = synthetic [barcode part1]
  source 1..16: mol_type = other DNA
gcctctggtctagtgt

SEQ ID NO: 13711 - DNA, 16 bp, synthetic construct
  misc_feature 1..16: note = synthetic [barcode part1]
  source 1..16: mol_type = other DNA
tatacgacgtcgacgt

SEQ ID NO: 13712 - DNA, 16 bp, synthetic construct
  misc_feature 1..16: note = synthetic [barcode part1]
  source 1..16: mol_type = other DNA
gactgtggtacgttgt

SEQ ID NO: 13713 - DNA, 16 bp, synthetic construct
  misc_feature 1..16: note = synthetic [barcode part1]
  source 1..16: mol_type = other DNA
gacgccgcagttaatt

SEQ ID NO: 13714 - DNA, 16 bp, synthetic construct
  misc_feature 1..16: note = synthetic [barcode part1]
  source 1..16: mol_type = other DNA
tgacgactgtattcct

SEQ ID NO: 13715 - DNA, 16 bp, synthetic construct
  misc_feature 1..16: note = synthetic [barcode part1]
  source 1..16: mol_type = other DNA
gtattggttggacgtc

SEQ ID NO: 13716 - DNA, 16 bp, synthetic construct
  misc_feature 1..16: note = synthetic [barcode part1]
  source 1..16: mol_type = other DNA
gtcgtgattcaggact

SEQ ID NO: 13717 - DNA, 16 bp, synthetic construct
  misc_feature 1..16: note = synthetic [barcode part1]
  source 1..16: mol_type = other DNA
gcctcgatatacacag

SEQ ID NO: 13718 - DNA, 16 bp, synthetic construct
  misc_feature 1..16: note = synthetic [barcode part1]
  source 1..16: mol_type = other DNA
tactgtcggtggtagt

SEQ ID NO: 13719 - DNA, 16 bp, synthetic construct
  misc_feature 1..16: note = synthetic [barcode part1]
  source 1..16: mol_type = other DNA
gtagaagaaggcacgt

SEQ ID NO: 13720 - DNA, 16 bp, synthetic construct
  misc_feature 1..16: note = synthetic [barcode part1]
  source 1..16: mol_type = other DNA
cgttgaataaggacac

SEQ ID NO: 13721 - DNA, 16 bp, synthetic construct
  misc_feature 1..16: note = synthetic [barcode part1]
  source 1..16: mol_type = other DNA
tctctccagaactcct

SEQ ID NO: 13722 - DNA, 16 bp, synthetic construct
  misc_feature 1..16: note = synthetic [barcode part1]
  source 1..16: mol_type = other DNA
ttcctagaccagtgtt

SEQ ID NO: 13723 - DNA, 16 bp, synthetic construct
  misc_feature 1..16: note = synthetic [barcode part1]
  source 1..16: mol_type = other DNA
ttgcagatctacggac

SEQ ID NO: 13724 - DNA, 16 bp, synthetic construct
  misc_feature 1..16: note = synthetic [barcode part1]
  source 1..16: mol_type = other DNA
cacactctctgacgac

SEQ ID NO: 13725 - DNA, 16 bp, synthetic construct
  misc_feature 1..16: note = synthetic [barcode part1]
  source 1..16: mol_type = other DNA
cgaatctgaactcgtg

SEQ ID NO: 13726 - DNA, 16 bp, synthetic construct
  misc_feature 1..16: note = synthetic [barcode part1]
  source 1..16: mol_type = other DNA
tatctgtgcagacgac

SEQ ID NO: 13727 - DNA, 16 bp, synthetic construct
  misc_feature 1..16: note = synthetic [barcode part1]
  source 1..16: mol_type = other DNA
tctcctgacttggacg

SEQ ID NO: 13728 - DNA, 16 bp, synthetic construct
  misc_feature 1..16: note = synthetic [barcode part1]
  source 1..16: mol_type = other DNA
caactggattggtcgt

SEQ ID NO: 13729 - DNA, 16 bp, synthetic construct
  misc_feature 1..16: note = synthetic [barcode part1]
  source 1..16: mol_type = other DNA
gcaagtctcttactgt

SEQ ID NO: 13730 - DNA, 16 bp, synthetic construct
  misc_feature 1..16: note = synthetic [barcode part1]
  source 1..16: mol_type = other DNA
gttcaagacttcgttc

SEQ ID NO: 13731 - DNA, 16 bp, synthetic construct
  misc_feature 1..16: note = synthetic [barcode part1]
  source 1..16: mol_type = other DNA
cagtagtaatccggtc

SEQ ID NO: 13732 - DNA, 16 bp, synthetic construct
  misc_feature 1..16: note = synthetic [barcode part1]
  source 1..16: mol_type = other DNA
gccttgcctgtacagt

SEQ ID NO: 13733 - DNA, 16 bp, synthetic construct
  misc_feature 1..16: note = synthetic [barcode part1]
  source 1..16: mol_type = other DNA
ttacgttgcgagagtc

SEQ ID NO: 13734 - DNA, 16 bp, synthetic construct
  misc_feature 1..16: note = synthetic [barcode part1]
  source 1..16: mol_type = other DNA
agtgtggacggtctag

SEQ ID NO: 13735 - DNA, 16 bp, synthetic construct
  misc_feature 1..16: note = synthetic [barcode part1]
  source 1..16: mol_type = other DNA
ccgtatctgttaggcc

SEQ ID NO: 13736 - DNA, 16 bp, synthetic construct
  misc_feature 1..16: note = synthetic [barcode part1]
  source 1..16: mol_type = other DNA
cgacgaatccgagtag

SEQ ID NO: 13737 - DNA, 16 bp, synthetic construct
  misc_feature 1..16: note = synthetic [barcode part1]
  source 1..16: mol_type = other DNA
gtattccacgccttct

SEQ ID NO: 13738 - DNA, 16 bp, synthetic construct
  misc_feature 1..16: note = synthetic [barcode part1]
  source 1..16: mol_type = other DNA
tggaatcaactggtcc

SEQ ID NO: 13739 - DNA, 16 bp, synthetic construct
  misc_feature 1..16: note = synthetic [barcode part1]
  source 1..16: mol_type = other DNA
aaccgtaagaaccggc

SEQ ID NO: 13740 - DNA, 16 bp, synthetic construct
  misc_feature 1..16: note = synthetic [barcode part1]
  source 1..16: mol_type = other DNA
gaactgtatccgacac

SEQ ID NO: 13741 - DNA, 16 bp, synthetic construct
  misc_feature 1..16: note = synthetic [barcode part1]
  source 1..16: mol_type = other DNA
aagtcactccacgtcc

SEQ ID NO: 13742 - DNA, 16 bp, synthetic construct
  misc_feature 1..16: note = synthetic [barcode part1]
  source 1..16: mol_type = other DNA
gcgcgtatatacgtac

SEQ ID NO: 13743 - DNA, 16 bp, synthetic construct
  misc_feature 1..16: note = synthetic [barcode part1]
  source 1..16: mol_type = other DNA
cctaattactggtgtc

SEQ ID NO: 13744 - DNA, 16 bp, synthetic construct
  misc_feature 1..16: note = synthetic [barcode part1]
  source 1..16: mol_type = other DNA
ttacgtgtgtacgacg

SEQ ID NO: 13745 - DNA, 16 bp, synthetic construct
  misc_feature 1..16: note = synthetic [barcode part1]
  source 1..16: mol_type = other DNA
taccaaccacagtcag

SEQ ID NO: 13746 - DNA, 16 bp, synthetic construct
  misc_feature 1..16: note = synthetic [barcode part1]
  source 1..16: mol_type = other DNA
agaagttcacggccag

SEQ ID NO: 13747 - DNA, 16 bp, synthetic construct
  misc_feature 1..16: note = synthetic [barcode part1]
  source 1..16: mol_type = other DNA
tgactcacttgtatcg

SEQ ID NO: 13748 - DNA, 16 bp, synthetic construct
  misc_feature 1..16: note = synthetic [barcode part1]
  source 1..16: mol_type = other DNA
aggattaaccacctcg

SEQ ID NO: 13749 - DNA, 16 bp, synthetic construct
  misc_feature 1..16: note = synthetic [barcode part1]
  source 1..16: mol_type = other DNA
ttctgttcctgtcgtg

SEQ ID NO: 13750 - DNA, 16 bp, synthetic construct
  misc_feature 1..16: note = synthetic [barcode part1]
  source 1..16: mol_type = other DNA
gttcgccacaatactt

SEQ ID NO: 13751 - DNA, 16 bp, synthetic construct
  misc_feature 1..16: note = synthetic [barcode part1]
  source 1..16: mol_type = other DNA
ataggattgccacctg

SEQ ID NO: 13752 - DNA, 16 bp, synthetic construct
  misc_feature 1..16: note = synthetic [barcode part1]
  source 1..16: mol_type = other DNA
ttgcacaactggtacg

SEQ ID NO: 13753 - DNA, 16 bp, synthetic construct
  misc_feature 1..16: note = synthetic [barcode part1]
  source 1..16: mol_type = other DNA
tagtcagtgaccgatc

SEQ ID NO: 13754 - DNA, 16 bp, synthetic construct
  misc_feature 1..16: note = synthetic [barcode part1]
  source 1..16: mol_type = other DNA
agaacagatctacggt

SEQ ID NO: 13755 - DNA, 16 bp, synthetic construct
  misc_feature 1..16: note = synthetic [barcode part1]
  source 1..16: mol_type = other DNA
agttcggtacagaagt

SEQ ID NO: 13756 - DNA, 16 bp, synthetic construct
  misc_feature 1..16: note = synthetic [barcode part1]
  source 1..16: mol_type = other DNA
tcctcgaatataccac

SEQ ID NO: 13757 - DNA, 16 bp, synthetic construct
  misc_feature 1..16: note = synthetic [barcode part1]
  source 1..16: mol_type = other DNA
actcgtacgtatcgag

SEQ ID NO: 13758 - DNA, 16 bp, synthetic construct
  misc_feature 1..16: note = synthetic [barcode part1]
  source 1..16: mol_type = other DNA
attggcacgttctatc

SEQ ID NO: 13759 - DNA, 16 bp, synthetic construct
  misc_feature 1..16: note = synthetic [barcode part1]
  source 1..16: mol_type = other DNA
tagaatcgcacgcgtt

SEQ ID NO: 13760 - DNA, 16 bp, synthetic construct
  misc_feature 1..16: note = synthetic [barcode part1]
  source 1..16: mol_type = other DNA
gtggattgccacttcc

SEQ ID NO: 13761 - DNA, 16 bp, synthetic construct
  misc_feature 1..16: note = synthetic [barcode part1]
  source 1..16: mol_type = other DNA
ttctacggttgttggt

SEQ ID NO: 13762 - DNA, 16 bp, synthetic construct
  misc_feature 1..16: note = synthetic [barcode part1]
  source 1..16: mol_type = other DNA
cctacggagtagagtg

SEQ ID NO: 13763 - DNA, 16 bp, synthetic construct
  misc_feature 1..16: note = synthetic [barcode part1]
  source 1..16: mol_type = other DNA
tgtggagtgtgagaag

SEQ ID NO: 13764 - DNA, 16 bp, synthetic construct
  misc_feature 1..16: note = synthetic [barcode part1]
  source 1..16: mol_type = other DNA
acagtctgtctctgcg

SEQ ID NO: 13765 - DNA, 16 bp, synthetic construct
  misc_feature 1..16: note = synthetic [barcode part1]
  source 1..16: mol_type = other DNA
tgaggaggaggttaac

SEQ ID NO: 13766 - DNA, 16 bp, synthetic construct
  misc_feature 1..16: note = synthetic [barcode part1]
  source 1..16: mol_type = other DNA
gacaacgattccactg

SEQ ID NO: 13767 - DNA, 16 bp, synthetic construct
  misc_feature 1..16: note = synthetic [barcode part1]
  source 1..16: mol_type = other DNA
tctagactctagtctg

SEQ ID NO: 13768 - DNA, 16 bp, synthetic construct
  misc_feature 1..16: note = synthetic [barcode part1]
  source 1..16: mol_type = other DNA
cgtaggtcaaggtggt

SEQ ID NO: 13769 - DNA, 16 bp, synthetic construct
  misc_feature 1..16: note = synthetic [barcode part1]
  source 1..16: mol_type = other DNA
acctagttgcgccttg

SEQ ID NO: 13770 - DNA, 16 bp, synthetic construct
  misc_feature 1..16: note = synthetic [barcode part1]
  source 1..16: mol_type = other DNA
aggtagacttggaact

SEQ ID NO: 13771 - DNA, 16 bp, synthetic construct
  misc_feature 1..16: note = synthetic [barcode part1]
  source 1..16: mol_type = other DNA
acaacacgttgaccac

SEQ ID NO: 13772 - DNA, 16 bp, synthetic construct
  misc_feature 1..16: note = synthetic [barcode part1]
  source 1..16: mol_type = other DNA
acggtgtcgatactgt

SEQ ID NO: 13773 - DNA, 16 bp, synthetic construct
  misc_feature 1..16: note = synthetic [barcode part1]
  source 1..16: mol_type = other DNA
acgtactagtgtgtcg

SEQ ID NO: 13774 - DNA, 16 bp, synthetic construct
  misc_feature 1..16: note = synthetic [barcode part1]
  source 1..16: mol_type = other DNA
atcaggccggactatt

SEQ ID NO: 13775 - DNA, 16 bp, synthetic construct
  misc_feature 1..16: note = synthetic [barcode part1]
  source 1..16: mol_type = other DNA
acctagtatactcctg

SEQ ID NO: 13776 - DNA, 16 bp, synthetic construct
  misc_feature 1..16: note = synthetic [barcode part1]
  source 1..16: mol_type = other DNA
agttctgactccagag

SEQ ID NO: 13777 - DNA, 16 bp, synthetic construct
  misc_feature 1..16: note = synthetic [barcode part1]
  source 1..16: mol_type = other DNA
attaggcaccttcgcc

SEQ ID NO: 13778 - DNA, 16 bp, synthetic construct
  misc_feature 1..16: note = synthetic [barcode part1]
  source 1..16: mol_type = other DNA
cagaatctgtaacgcc

SEQ ID NO: 13779 - DNA, 16 bp, synthetic construct
  misc_feature 1..16: note = synthetic [barcode part1]
  source 1..16: mol_type = other DNA
caatccagttcggtag

SEQ ID NO: 13780 - DNA, 16 bp, synthetic construct
  misc_feature 1..16: note = synthetic [barcode part1]
  source 1..16: mol_type = other DNA
tgtatcctaccggatt

SEQ ID NO: 13781 - DNA, 16 bp, synthetic construct
  misc_feature 1..16: note = synthetic [barcode part1]
  source 1..16: mol_type = other DNA
taggcgttggcagagt

SEQ ID NO: 13782 - DNA, 16 bp, synthetic construct
  misc_feature 1..16: note = synthetic [barcode part1]
  source 1..16: mol_type = other DNA
ataccggactggaggt

SEQ ID NO: 13783 - DNA, 16 bp, synthetic construct
  misc_feature 1..16: note = synthetic [barcode part1]
  source 1..16: mol_type = other DNA
ccgtccgaataagtac

SEQ ID NO: 13784 - DNA, 16 bp, synthetic construct
  misc_feature 1..16: note = synthetic [barcode part1]
  source 1..16: mol_type = other DNA
aaggcaaccacggact

SEQ ID NO: 13785 - DNA, 16 bp, synthetic construct
  misc_feature 1..16: note = synthetic [barcode part1]
  source 1..16: mol_type = other DNA
acacgattcagaagac

SEQ ID NO: 13786 - DNA, 16 bp, synthetic construct
  misc_feature 1..16: note = synthetic [barcode part1]
  source 1..16: mol_type = other DNA
cgtcgtgactagttag

SEQ ID NO: 13787 - DNA, 16 bp, synthetic construct
  misc_feature 1..16: note = synthetic [barcode part1]
  source 1..16: mol_type = other DNA
cacttgcgtggtatcc

SEQ ID NO: 13788 - DNA, 16 bp, synthetic construct
  misc_feature 1..16: note = synthetic [barcode part1]
  source 1..16: mol_type = other DNA
ccttacggactactgc

SEQ ID NO: 13789 - DNA, 16 bp, synthetic construct
  misc_feature 1..16: note = synthetic [barcode part1]
  source 1..16: mol_type = other DNA
aggtcaggtactgacg

SEQ ID NO: 13790 - DNA, 16 bp, synthetic construct
  misc_feature 1..16: note = synthetic [barcode part1]
  source 1..16: mol_type = other DNA
agtcttgaagtgaacg

SEQ ID NO: 13791 - DNA, 16 bp, synthetic construct
  misc_feature 1..16: note = synthetic [barcode part1]
  source 1..16: mol_type = other DNA
gacgtagtacttccag

SEQ ID NO: 13792 - DNA, 16 bp, synthetic construct
  misc_feature 1..16: note = synthetic [barcode part1]
  source 1..16: mol_type = other DNA
aaccacgaactaaggt

SEQ ID NO: 13793 - DNA, 16 bp, synthetic construct
  misc_feature 1..16: note = synthetic [barcode part1]
  source 1..16: mol_type = other DNA
tactatcctcgcaggc

SEQ ID NO: 13794 - DNA, 16 bp, synthetic construct
  misc_feature 1..16: note = synthetic [barcode part1]
  source 1..16: mol_type = other DNA
aggcgaattgtagtac

SEQ ID NO: 13795 - DNA, 16 bp, synthetic construct
  misc_feature 1..16: note = synthetic [barcode part1]
  source 1..16: mol_type = other DNA
gcgtctcgacctgatt

SEQ ID NO: 13796 - DNA, 16 bp, synthetic construct
  misc_feature 1..16: note = synthetic [barcode part1]
  source 1..16: mol_type = other DNA
agtcctaatccgtccg

SEQ ID NO: 13797 - DNA, 16 bp, synthetic construct
  misc_feature 1..16: note = synthetic [barcode part1]
  source 1..16: mol_type = other DNA
cagtcaactctaggac

SEQ ID NO: 13798 - DNA, 16 bp, synthetic construct
  misc_feature 1..16: note = synthetic [barcode part1]
  source 1..16: mol_type = other DNA
tattattgcgaccacc

SEQ ID NO: 13799 - DNA, 16 bp, synthetic construct
  misc_feature 1..16: note = synthetic [barcode part1]
  source 1..16: mol_type = other DNA
atcgtcctctagacgc

SEQ ID NO: 13800 - DNA, 16 bp, synthetic construct
  misc_feature 1..16: note = synthetic [barcode part1]
  source 1..16: mol_type = other DNA
caggcggataatattg

SEQ ID NO: 13801 - DNA, 16 bp, synthetic construct
  misc_feature 1..16: note = synthetic [barcode part1]
  source 1..16: mol_type = other DNA
ccagtcgtcaatcaag

SEQ ID NO: 13802 - DNA, 16 bp, synthetic construct
  misc_feature 1..16: note = synthetic [barcode part1]
  source 1..16: mol_type = other DNA
cacagagagagtgtag

SEQ ID NO: 13803 - DNA, 16 bp, synthetic construct
  misc_feature 1..16: note = synthetic [barcode part1]
  source 1..16: mol_type = other DNA
ttgagactactgcgac

SEQ ID NO: 13804 - DNA, 16 bp, synthetic construct
  misc_feature 1..16: note = synthetic [barcode part1]
  source 1..16: mol_type = other DNA
gtaacgtcgtaacgtc

SEQ ID NO: 13805 - DNA, 16 bp, synthetic construct
  misc_feature 1..16: note = synthetic [barcode part1]
  source 1..16: mol_type = other DNA
gtattgccttggaacg

SEQ ID NO: 13806 - DNA, 16 bp, synthetic construct
  misc_feature 1..16: note = synthetic [barcode part1]
  source 1..16: mol_type = other DNA
taccaggtgtctccgt

SEQ ID NO: 13807 - DNA, 16 bp, synthetic construct
  misc_feature 1..16: note = synthetic [barcode part1]
  source 1..16: mol_type = other DNA
cctatcgtatactgac

SEQ ID NO: 13808 - DNA, 16 bp, synthetic construct
  misc_feature 1..16: note = synthetic [barcode part1]
  source 1..16: mol_type = other DNA
gtaaccaacgtcgatc

SEQ ID NO: 13809 - DNA, 16 bp, synthetic construct
  misc_feature 1..16: note = synthetic [barcode part1]
  source 1..16: mol_type = other DNA
gatcttcgcgtaactt

SEQ ID NO: 13810 - DNA, 16 bp, synthetic construct
  misc_feature 1..16: note = synthetic [barcode part1]
  source 1..16: mol_type = other DNA
cagttacgaacacctg

SEQ ID NO: 13811 - DNA, 16 bp, synthetic construct
  misc_feature 1..16: note = synthetic [barcode part1]
  source 1..16: mol_type = other DNA
ccgatatacaccaacg

SEQ ID NO: 13812 - DNA, 16 bp, synthetic construct
  misc_feature 1..16: note = synthetic [barcode part1]
  source 1..16: mol_type = other DNA
gtactcctggtggttc

SEQ ID NO: 13813 - DNA, 16 bp, synthetic construct
  misc_feature 1..16: note = synthetic [barcode part1]
  source 1..16: mol_type = other DNA
actctcgcctgacaac

SEQ ID NO: 13814 - DNA, 16 bp, synthetic construct
  misc_feature 1..16: note = synthetic [barcode part1]
  source 1..16: mol_type = other DNA
taactaagtcgcggtc

SEQ ID NO: 13815 - DNA, 16 bp, synthetic construct
  misc_feature 1..16: note = synthetic [barcode part1]
  source 1..16: mol_type = other DNA
aattgcgttccaatcc

SEQ ID NO: 13816 - DNA, 16 bp, synthetic construct
  misc_feature 1..16: note = synthetic [barcode part1]
  source 1..16: mol_type = other DNA
tcttgcgttagtgatc

SEQ ID NO: 13817 - DNA, 16 bp, synthetic construct
  misc_feature 1..16: note = synthetic [barcode part1]
  source 1..16: mol_type = other DNA
gatctctgcacggtct

SEQ ID NO: 13818 - DNA, 16 bp, synthetic construct
  misc_feature 1..16: note = synthetic [barcode part1]
  source 1..16: mol_type = other DNA
aacggactcacttgtg

SEQ ID NO: 13819 - DNA, 16 bp, synthetic construct
  misc_feature 1..16: note = synthetic [barcode part1]
  source 1..16: mol_type = other DNA
gacacgcagagttgac

SEQ ID NO: 13820 - DNA, 16 bp, synthetic construct
  misc_feature 1..16: note = synthetic [barcode part1]
  source 1..16: mol_type = other DNA
tggcacctatctaccg

SEQ ID NO: 13821 - DNA, 16 bp, synthetic construct
  misc_feature 1..16: note = synthetic [barcode part1]
  source 1..16: mol_type = other DNA
ataccgaactactctc

SEQ ID NO: 13822 - DNA, 16 bp, synthetic construct
  misc_feature 1..16: note = synthetic [barcode part1]
  source 1..16: mol_type = other DNA
taagtaggaacctcag

SEQ ID NO: 13823 - DNA, 16 bp, synthetic construct
  misc_feature 1..16: note = synthetic [barcode part1]
  source 1..16: mol_type = other DNA
aaccaactgtgacacc

SEQ ID NO: 13824 - DNA, 16 bp, synthetic construct
  misc_feature 1..16: note = synthetic [barcode part1]
  source 1..16: mol_type = other DNA
acgtctcgattgtcgc

SEQ ID NO: 13825 - DNA, 16 bp, synthetic construct
  misc_feature 1..16: note = synthetic [barcode part1]
  source 1..16: mol_type = other DNA
accttcctctctcaag

SEQ ID NO: 13826 - DNA, 16 bp, synthetic construct
  misc_feature 1..16: note = synthetic [barcode part1]
  source 1..16: mol_type = other DNA
aggcactaagtggcgt

SEQ ID NO: 13827 - DNA, 16 bp, synthetic construct
  misc_feature 1..16: note = synthetic [barcode part1]
  source 1..16: mol_type = other DNA
tcgcacctatcttcgt

SEQ ID NO: 13828 - DNA, 16 bp, synthetic construct
  misc_feature 1..16: note = synthetic [barcode part1]
  source 1..16: mol_type = other DNA
attcactctcagagtc

SEQ ID NO: 13829 - DNA, 16 bp, synthetic construct
  misc_feature 1..16: note = synthetic [barcode part1]
  source 1..16: mol_type = other DNA
gttgatcttaaggccg

SEQ ID NO: 13830 - DNA, 16 bp, synthetic construct
  misc_feature 1..16: note = synthetic [barcode part1]
  source 1..16: mol_type = other DNA
tggccttgttagtgcc

SEQ ID NO: 13831 - DNA, 16 bp, synthetic construct
  misc_feature 1..16: note = synthetic [barcode part1]
  source 1..16: mol_type = other DNA
tgtcgcgtaatcagtg

SEQ ID NO: 13832 - DNA, 16 bp, synthetic construct
  misc_feature 1..16: note = synthetic [barcode part1]
  source 1..16: mol_type = other DNA
tgtggtagtgacgttc

SEQ ID NO: 13833 - DNA, 16 bp, synthetic construct
  misc_feature 1..16: note = synthetic [barcode part1]
  source 1..16: mol_type = other DNA
gtgtccgaacgaagtg

SEQ ID NO: 13834 - DNA, 16 bp, synthetic construct
  misc_feature 1..16: note = synthetic [barcode part1]
  source 1..16: mol_type = other DNA
tacgtaccacaacgtg

SEQ ID NO: 13835 - DNA, 16 bp, synthetic construct
  misc_feature 1..16: note = synthetic [barcode part1]
  source 1..16: mol_type = other DNA
cctaccaatatccaac

SEQ ID NO: 13836 - DNA, 16 bp, synthetic construct
  misc_feature 1..16: note = synthetic [barcode part1]
  source 1..16: mol_type = other DNA
accgattcttccttcg

SEQ ID NO: 13837 - DNA, 16 bp, synthetic construct
  misc_feature 1..16: note = synthetic [barcode part1]
  source 1..16: mol_type = other DNA
cgtatcacgcaatcag

SEQ ID NO: 13838 - DNA, 16 bp, synthetic construct
  misc_feature 1..16: note = synthetic [barcode part1]
  source 1..16: mol_type = other DNA
agaccgacacgtaacg

SEQ ID NO: 13839 - DNA, 16 bp, synthetic construct
  misc_feature 1..16: note = synthetic [barcode part1]
  source 1..16: mol_type = other DNA
cgttaacctctccgag

SEQ ID NO: 13840 - DNA, 16 bp, synthetic construct
  misc_feature 1..16: note = synthetic [barcode part1]
  source 1..16: mol_type = other DNA
cgcctataggtaagtc

SEQ ID NO: 13841 - DNA, 16 bp, synthetic construct
  misc_feature 1..16: note = synthetic [barcode part1]
  source 1..16: mol_type = other DNA
atcggatattcctgtc

SEQ ID NO: 13842 - DNA, 16 bp, synthetic construct
  misc_feature 1..16: note = synthetic [barcode part1]
  source 1..16: mol_type = other DNA
ccgttaaccaacaacg

SEQ ID NO: 13843 - DNA, 16 bp, synthetic construct
  misc_feature 1..16: note = synthetic [barcode part1]
  source 1..16: mol_type = other DNA
tggacaggtgaacaag

SEQ ID NO: 13844 - DNA, 16 bp, synthetic construct
  misc_feature 1..16: note = synthetic [barcode part1]
  source 1..16: mol_type = other DNA
gtggtgaccacgtaag

SEQ ID NO: 13845 - DNA, 16 bp, synthetic construct
  misc_feature 1..16: note = synthetic [barcode part1]
  source 1..16: mol_type = other DNA
gttaccaccaacaacg

SEQ ID NO: 13846 - DNA, 16 bp, synthetic construct
  misc_feature 1..16: note = synthetic [barcode part1]
  source 1..16: mol_type = other DNA
tagattagatccggcc

SEQ ID NO: 13847 - DNA, 16 bp, synthetic construct
  misc_feature 1..16: note = synthetic [barcode part1]
  source 1..16: mol_type = other DNA
tcaaggtacttgttcc

SEQ ID NO: 13848 - DNA, 16 bp, synthetic construct
  misc_feature 1..16: note = synthetic [barcode part1]
  source 1..16: mol_type = other DNA
tctctattggaccgcg

SEQ ID NO: 13849 - DNA, 16 bp, synthetic construct
  misc_feature 1..16: note = synthetic [barcode part1]
  source 1..16: mol_type = other DNA
aggaccaacacctgag

SEQ ID NO: 13850 - DNA, 16 bp, synthetic construct
  misc_feature 1..16: note = synthetic [barcode part1]
  source 1..16: mol_type = other DNA
acgagttcaataaggc

SEQ ID NO: 13851 - DNA, 16 bp, synthetic construct
  misc_feature 1..16: note = synthetic [barcode part1]
  source 1..16: mol_type = other DNA
taatagttcctcacgc

SEQ ID NO: 13852 - DNA, 16 bp, synthetic construct
  misc_feature 1..16: note = synthetic [barcode part1]
  source 1..16: mol_type = other DNA
gacgtgcactatacac

SEQ ID NO: 13853 - DNA, 16 bp, synthetic construct
  misc_feature 1..16: note = synthetic [barcode part1]
  source 1..16: mol_type = other DNA
accgtctgttcacgac

SEQ ID NO: 13854 - DNA, 16 bp, synthetic construct
  misc_feature 1..16: note = synthetic [barcode part1]
  source 1..16: mol_type = other DNA
cgtgacggatattgtc

SEQ ID NO: 13855 - DNA, 16 bp, synthetic construct
  misc_feature 1..16: note = synthetic [barcode part1]
  source 1..16: mol_type = other DNA
tgcgaaggacctaacg

SEQ ID NO: 13856 - DNA, 16 bp, synthetic construct
  misc_feature 1..16: note = synthetic [barcode part1]
  source 1..16: mol_type = other DNA
tagaagagttggcgcc

SEQ ID NO: 13857 - DNA, 16 bp, synthetic construct
  misc_feature 1..16: note = synthetic [barcode part1]
  source 1..16: mol_type = other DNA
ccactacaagtccgtc

SEQ ID NO: 13858 - DNA, 16 bp, synthetic construct
  misc_feature 1..16: note = synthetic [barcode part1]
  source 1..16: mol_type = other DNA
gtgtgcacgatcgatt

SEQ ID NO: 13859 - DNA, 16 bp, synthetic construct
  misc_feature 1..16: note = synthetic [barcode part1]
  source 1..16: mol_type = other DNA
tattccggacaggact

SEQ ID NO: 13860 - DNA, 16 bp, synthetic construct
  misc_feature 1..16: note = synthetic [barcode part1]
  source 1..16: mol_type = other DNA
tggatcaccttatacc

SEQ ID NO: 13861 - DNA, 16 bp, synthetic construct
  misc_feature 1..16: note = synthetic [barcode part1]
  source 1..16: mol_type = other DNA
cactcggttgatacag

SEQ ID NO: 13862 - DNA, 16 bp, synthetic construct
  misc_feature 1..16: note = synthetic [barcode part1]
  source 1..16: mol_type = other DNA
tctctcgacagagtag

SEQ ID NO: 13863 - DNA, 16 bp, synthetic construct
  misc_feature 1..16: note = synthetic [barcode part1]
  source 1..16: mol_type = other DNA
taaggataacgcggag

SEQ ID NO: 13864 - DNA, 16 bp, synthetic construct
  misc_feature 1..16: note = synthetic [barcode part1]
  source 1..16: mol_type = other DNA
aggttcagtagtcacc

SEQ ID NO: 13865 - DNA, 16 bp, synthetic construct
  misc_feature 1..16: note = synthetic [barcode part1]
  source 1..16: mol_type = other DNA
tgtggatcgtctgaac

SEQ ID NO: 13866 - DNA, 16 bp, synthetic construct
  misc_feature 1..16: note = synthetic [barcode part1]
  source 1..16: mol_type = other DNA
gcgccaggtataactt

SEQ ID NO: 13867 - DNA, 16 bp, synthetic construct
  misc_feature 1..16: note = synthetic [barcode part1]
  source 1..16: mol_type = other DNA
cactacctgaacctgc

SEQ ID NO: 13868 - DNA, 16 bp, synthetic construct
  misc_feature 1..16: note = synthetic [barcode part1]
  source 1..16: mol_type = other DNA
acctccacactgagtc

SEQ ID NO: 13869 - DNA, 16 bp, synthetic construct
  misc_feature 1..16: note = synthetic [barcode part1]
  source 1..16: mol_type = other DNA
tcgagactaggactct

SEQ ID NO: 13870 - DNA, 16 bp, synthetic construct
  misc_feature 1..16: note = synthetic [barcode part1]
  source 1..16: mol_type = other DNA
cgtacgagaacactct

SEQ ID NO: 13871 - DNA, 16 bp, synthetic construct
  misc_feature 1..16: note = synthetic [barcode part1]
  source 1..16: mol_type = other DNA
actgtagaggtaagtc

SEQ ID NO: 13872 - DNA, 16 bp, synthetic construct
  misc_feature 1..16: note = synthetic [barcode part1]
  source 1..16: mol_type = other DNA
tctgtatccgaaccgc

SEQ ID NO: 13873 - DNA, 16 bp, synthetic construct
  misc_feature 1..16: note = synthetic [barcode part1]
  source 1..16: mol_type = other DNA
gttgacaggcgtattc

SEQ ID NO: 13874 - DNA, 16 bp, synthetic construct
  misc_feature 1..16: note = synthetic [barcode part1]
  source 1..16: mol_type = other DNA
acgaataccacctacg

SEQ ID NO: 13875 - DNA, 16 bp, synthetic construct
  misc_feature 1..16: note = synthetic [barcode part1]
  source 1..16: mol_type = other DNA
aacgccgtcttaagac

SEQ ID NO: 13876 - DNA, 16 bp, synthetic construct
  misc_feature 1..16: note = synthetic [barcode part1]
  source 1..16: mol_type = other DNA
gtgtgcgcaatattgc

SEQ ID NO: 13877 - DNA, 16 bp, synthetic construct
  misc_feature 1..16: note = synthetic [barcode part1]
  source 1..16: mol_type = other DNA
aatctggataccttcc

SEQ ID NO: 13878 - DNA, 16 bp, synthetic construct
  misc_feature 1..16: note = synthetic [barcode part1]
  source 1..16: mol_type = other DNA
tcttccgagtgcactg

SEQ ID NO: 13879 - DNA, 16 bp, synthetic construct
  misc_feature 1..16: note = synthetic [barcode part1]
  source 1..16: mol_type = other DNA
taggtaacgccgcaag

SEQ ID NO: 13880 - DNA, 16 bp, synthetic construct
  misc_feature 1..16: note = synthetic [barcode part1]
  source 1..16: mol_type = other DNA
cgagaacgcaatccag

SEQ ID NO: 13881 - DNA, 16 bp, synthetic construct
  misc_feature 1..16: note = synthetic [barcode part1]
  source 1..16: mol_type = other DNA
gcgtcttggttgtcac

SEQ ID NO: 13882 - DNA, 16 bp, synthetic construct
  misc_feature 1..16: note = synthetic [barcode part1]
  source 1..16: mol_type = other DNA
tactcagtgcaagtcg

SEQ ID NO: 13883 - DNA, 16 bp, synthetic construct
  misc_feature 1..16: note = synthetic [barcode part1]
  source 1..16: mol_type = other DNA
aaccttgcactgtgag

SEQ ID NO: 13884 - DNA, 16 bp, synthetic construct
  misc_feature 1..16: note = synthetic [barcode part1]
  source 1..16: mol_type = other DNA
ccggaatcaggtgagt

SEQ ID NO: 13885 - DNA, 16 bp, synthetic construct
  misc_feature 1..16: note = synthetic [barcode part1]
  source 1..16: mol_type = other DNA
gcacagtctccgactt

SEQ ID NO: 13886 - DNA, 16 bp, synthetic construct
  misc_feature 1..16: note = synthetic [barcode part1]
  source 1..16: mol_type = other DNA
cgtggtagaacagatt

SEQ ID NO: 13887 - DNA, 16 bp, synthetic construct
  misc_feature 1..16: note = synthetic [barcode part1]
  source 1..16: mol_type = other DNA
tcgcaagtggaggact

SEQ ID NO: 13888 - DNA, 16 bp, synthetic construct
  misc_feature 1..16: note = synthetic [barcode part1]
  source 1..16: mol_type = other DNA
aactacgatcgtgtgc

SEQ ID NO: 13889 - DNA, 16 bp, synthetic construct
  misc_feature 1..16: note = synthetic [barcode part1]
  source 1..16: mol_type = other DNA
actcggatattgcctt

SEQ ID NO: 13890 - DNA, 16 bp, synthetic construct
  misc_feature 1..16: note = synthetic [barcode part1]
  source 1..16: mol_type = other DNA
gcgagaagacttgacc

SEQ ID NO: 13891 - DNA, 16 bp, synthetic construct
  misc_feature 1..16: note = synthetic [barcode part1]
  source 1..16: mol_type = other DNA
aaggcggaggttcact

SEQ ID NO: 13892 - DNA, 16 bp, synthetic construct
  misc_feature 1..16: note = synthetic [barcode part1]
  source 1..16: mol_type = other DNA
accacctctgtaggtc

SEQ ID NO: 13893 - DNA, 16 bp, synthetic construct
  misc_feature 1..16: note = synthetic [barcode part1]
  source 1..16: mol_type = other DNA
tgtatcgactgcgtag

SEQ ID NO: 13894 - DNA, 16 bp, synthetic construct
  misc_feature 1..16: note = synthetic [barcode part1]
  source 1..16: mol_type = other DNA
gcaataccaataccgc

SEQ ID NO: 13895 - DNA, 16 bp, synthetic construct
  misc_feature 1..16: note = synthetic [barcode part1]
  source 1..16: mol_type = other DNA
atcttaccagatctgc

SEQ ID NO: 13896 - DNA, 16 bp, synthetic construct
  misc_feature 1..16: note = synthetic [barcode part1]
  source 1..16: mol_type = other DNA
gtccgtccttatctgt

SEQ ID NO: 13897 - DNA, 16 bp, synthetic construct
  misc_feature 1..16: note = synthetic [barcode part1]
  source 1..16: mol_type = other DNA
cgagtgaggtatcacg

SEQ ID NO: 13898 - DNA, 16 bp, synthetic construct
  misc_feature 1..16: note = synthetic [barcode part1]
  source 1..16: mol_type = other DNA
tagtcgtgacgtgttg

SEQ ID NO: 13899 - DNA, 16 bp, synthetic construct
  misc_feature 1..16: note = synthetic [barcode part1]
  source 1..16: mol_type = other DNA
ccttctgtgaacttag

SEQ ID NO: 13900 - DNA, 16 bp, synthetic construct
  misc_feature 1..16: note = synthetic [barcode part1]
  source 1..16: mol_type = other DNA
acacaacaaccgaggc

SEQ ID NO: 13901 - DNA, 16 bp, synthetic construct
  misc_feature 1..16: note = synthetic [barcode part1]
  source 1..16: mol_type = other DNA
cgttactccacgcagt

SEQ ID NO: 13902 - DNA, 16 bp, synthetic construct
  misc_feature 1..16: note = synthetic [barcode part1]
  source 1..16: mol_type = other DNA
tattggcaaggagttg

SEQ ID NO: 13903 - DNA, 16 bp, synthetic construct
  misc_feature 1..16: note = synthetic [barcode part1]
  source 1..16: mol_type = other DNA
gtataagtctgcaccg

SEQ ID NO: 13904 - DNA, 16 bp, synthetic construct
  misc_feature 1..16: note = synthetic [barcode part1]
  source 1..16: mol_type = other DNA
cgattggtcaggactt

SEQ ID NO: 13905 - DNA, 16 bp, synthetic construct
  misc_feature 1..16: note = synthetic [barcode part1]
  source 1..16: mol_type = other DNA
gtgaagactgaatcgt

SEQ ID NO: 13906 - DNA, 16 bp, synthetic construct
  misc_feature 1..16: note = synthetic [barcode part1]
  source 1..16: mol_type = other DNA
cgttagactgtcgaac

SEQ ID NO: 13907 - DNA, 16 bp, synthetic construct
  misc_feature 1..16: note = synthetic [barcode part1]
  source 1..16: mol_type = other DNA
tccgtacaattatcgc

SEQ ID NO: 13908 - DNA, 16 bp, synthetic construct
  misc_feature 1..16: note = synthetic [barcode part1]
  source 1..16: mol_type = other DNA
gtaatcgaattcctcc

SEQ ID NO: 13909 - DNA, 16 bp, synthetic construct
  misc_feature 1..16: note = synthetic [barcode part1]
  source 1..16: mol_type = other DNA
actctgttcgtacagt

SEQ ID NO: 13910 - DNA, 16 bp, synthetic construct
  misc_feature 1..16: note = synthetic [barcode part1]
  source 1..16: mol_type = other DNA
ccagaatcctaagacc

SEQ ID NO: 13911 - DNA, 16 bp, synthetic construct
  misc_feature 1..16: note = synthetic [barcode part1]
  source 1..16: mol_type = other DNA
ccaaccttcacacgac

SEQ ID NO: 13912 - DNA, 16 bp, synthetic construct
  misc_feature 1..16: note = synthetic [barcode part1]
  source 1..16: mol_type = other DNA
gaagtatcacgaggag

SEQ ID NO: 13913 - DNA, 16 bp, synthetic construct
  misc_feature 1..16: note = synthetic [barcode part1]
  source 1..16: mol_type = other DNA
ccaggaacacgaactg

SEQ ID NO: 13914 - DNA, 16 bp, synthetic construct
  misc_feature 1..16: note = synthetic [barcode part1]
  source 1..16: mol_type = other DNA
gtggtgattgtcactg

SEQ ID NO: 13915 - DNA, 16 bp, synthetic construct
  misc_feature 1..16: note = synthetic [barcode part1]
  source 1..16: mol_type = other DNA
cacgcaggttcttcac

SEQ ID NO: 13916 - DNA, 16 bp, synthetic construct
  misc_feature 1..16: note = synthetic [barcode part1]
  source 1..16: mol_type = other DNA
cgtgttatagtacgcg

SEQ ID NO: 13917 - DNA, 16 bp, synthetic construct
  misc_feature 1..16: note = synthetic [barcode part1]
  source 1..16: mol_type = other DNA
tagacgttgcagatcc

SEQ ID NO: 13918 - DNA, 16 bp, synthetic construct
  misc_feature 1..16: note = synthetic [barcode part1]
  source 1..16: mol_type = other DNA
tagtcgattggccaac

SEQ ID NO: 13919 - DNA, 16 bp, synthetic construct
  misc_feature 1..16: note = synthetic [barcode part1]
  source 1..16: mol_type = other DNA
gactgacgtgtacgtt

SEQ ID NO: 13920 - DNA, 16 bp, synthetic construct
  misc_feature 1..16: note = synthetic [barcode part1]
  source 1..16: mol_type = other DNA
cgagaacgaacacaag

SEQ ID NO: 13921 - DNA, 16 bp, synthetic construct
  misc_feature 1..16: note = synthetic [barcode part1]
  source 1..16: mol_type = other DNA
gaagtcttagacagac

SEQ ID NO: 13922 - DNA, 16 bp, synthetic construct
  misc_feature 1..16: note = synthetic [barcode part1]
  source 1..16: mol_type = other DNA
accaactcgtgtacag

SEQ ID NO: 13923 - DNA, 16 bp, synthetic construct
  misc_feature 1..16: note = synthetic [barcode part1]
  source 1..16: mol_type = other DNA
tgacagtcaacgatcc

SEQ ID NO: 13924 - DNA, 16 bp, synthetic construct
  misc_feature 1..16: note = synthetic [barcode part1]
  source 1..16: mol_type = other DNA
ttcagtctgtgcgatt

SEQ ID NO: 13925 - DNA, 16 bp, synthetic construct
  misc_feature 1..16: note = synthetic [barcode part1]
  source 1..16: mol_type = other DNA
actggagtgtgtggtg

SEQ ID NO: 13926 - DNA, 16 bp, synthetic construct
  misc_feature 1..16: note = synthetic [barcode part1]
  source 1..16: mol_type = other DNA
cacctacctgtagtgc

SEQ ID NO: 13927 - DNA, 16 bp, synthetic construct
  misc_feature 1..16: note = synthetic [barcode part1]
  source 1..16: mol_type = other DNA
gacaggacaatccttc

SEQ ID NO: 13928 - DNA, 16 bp, synthetic construct
  misc_feature 1..16: note = synthetic [barcode part1]
  source 1..16: mol_type = other DNA
gtgtactggtagtaag

SEQ ID NO: 13929 - DNA, 16 bp, synthetic construct
  misc_feature 1..16: note = synthetic [barcode part1]
  source 1..16: mol_type = other DNA
gccttacaacgtattc

SEQ ID NO: 13930 - DNA, 16 bp, synthetic construct
  misc_feature 1..16: note = synthetic [barcode part1]
  source 1..16: mol_type = other DNA
tattgccagtggcagt

SEQ ID NO: 13931 - DNA, 16 bp, synthetic construct
  misc_feature 1..16: note = synthetic [barcode part1]
  source 1..16: mol_type = other DNA
ttcttacagtgatccg

SEQ ID NO: 13932 - DNA, 16 bp, synthetic construct
  misc_feature 1..16: note = synthetic [barcode part1]
  source 1..16: mol_type = other DNA
cgacctgcagagatag

SEQ ID NO: 13933 - DNA, 16 bp, synthetic construct
  misc_feature 1..16: note = synthetic [barcode part1]
  source 1..16: mol_type = other DNA
gccttgtataactacc

SEQ ID NO: 13934 - DNA, 16 bp, synthetic construct
  misc_feature 1..16: note = synthetic [barcode part1]
  source 1..16: mol_type = other DNA
gatctggtctccgtgt

SEQ ID NO: 13935 - DNA, 16 bp, synthetic construct
  misc_feature 1..16: note = synthetic [barcode part1]
  source 1..16: mol_type = other DNA
gtgcagatacttccag

SEQ ID NO: 13936 - DNA, 16 bp, synthetic construct
  misc_feature 1..16: note = synthetic [barcode part1]
  source 1..16: mol_type = other DNA
gttactcggcaagact

SEQ ID NO: 13937 - DNA, 16 bp, synthetic construct
  misc_feature 1..16: note = synthetic [barcode part1]
  source 1..16: mol_type = other DNA
gcaggccagaacaact

SEQ ID NO: 13938 - DNA, 16 bp, synthetic construct
  misc_feature 1..16: note = synthetic [barcode part1]
  source 1..16: mol_type = other DNA
cagttcttacgatcgt

SEQ ID NO: 13939 - DNA, 16 bp, synthetic construct
  misc_feature 1..16: note = synthetic [barcode part1]
  source 1..16: mol_type = other DNA
cctctaggtgttggtc

SEQ ID NO: 13940 - DNA, 16 bp, synthetic construct
  misc_feature 1..16: note = synthetic [barcode part1]
  source 1..16: mol_type = other DNA
actgacaccgtcgttc

SEQ ID NO: 13941 - DNA, 16 bp, synthetic construct
  misc_feature 1..16: note = synthetic [barcode part1]
  source 1..16: mol_type = other DNA
tcgttcgtgaacagac

SEQ ID NO: 13942 - DNA, 16 bp, synthetic construct
  misc_feature 1..16: note = synthetic [barcode part1]
  source 1..16: mol_type = other DNA
gactcaaggtcactac

SEQ ID NO: 13943 - DNA, 16 bp, synthetic construct
  misc_feature 1..16: note = synthetic [barcode part1]
  source 1..16: mol_type = other DNA
tacgacggtctattct

SEQ ID NO: 13944 - DNA, 16 bp, synthetic construct
  misc_feature 1..16: note = synthetic [barcode part1]
  source 1..16: mol_type = other DNA
tctccaagttgcgcgt

SEQ ID NO: 13945 - DNA, 16 bp, synthetic construct
  misc_feature 1..16: note = synthetic [barcode part1]
  source 1..16: mol_type = other DNA
tcaacctctaccacct

SEQ ID NO: 13946 - DNA, 16 bp, synthetic construct
  misc_feature 1..16: note = synthetic [barcode part1]
  source 1..16: mol_type = other DNA
gaatcgcacagagatt

SEQ ID NO: 13947 - DNA, 16 bp, synthetic construct
  misc_feature 1..16: note = synthetic [barcode part1]
  source 1..16: mol_type = other DNA
ccactgtgaataacgc

SEQ ID NO: 13948 - DNA, 16 bp, synthetic construct
  misc_feature 1..16: note = synthetic [barcode part1]
  source 1..16: mol_type = other DNA
atcaggttgttcttgc

SEQ ID NO: 13949 - DNA, 16 bp, synthetic construct
  misc_feature 1..16: note = synthetic [barcode part1]
  source 1..16: mol_type = other DNA
tcgcctagttctggac

SEQ ID NO: 13950 - DNA, 16 bp, synthetic construct
  misc_feature 1..16: note = synthetic [barcode part1]
  source 1..16: mol_type = other DNA
gtggccggtgttaatt

SEQ ID NO: 13951 - DNA, 16 bp, synthetic construct
  misc_feature 1..16: note = synthetic [barcode part1]
  source 1..16: mol_type = other DNA
cacttgtccgttcgtt

SEQ ID NO: 13952 - DNA, 16 bp, synthetic construct
  misc_feature 1..16: note = synthetic [barcode part1]
  source 1..16: mol_type = other DNA
tcgtcgttaagacgac

SEQ ID NO: 13953 - DNA, 16 bp, synthetic construct
  misc_feature 1..16: note = synthetic [barcode part1]
  source 1..16: mol_type = other DNA
tactgacacgtaccag

SEQ ID NO: 13954 - DNA, 16 bp, synthetic construct
  misc_feature 1..16: note = synthetic [barcode part1]
  source 1..16: mol_type = other DNA
tcaggacacctcaagt

SEQ ID NO: 13955 - DNA, 16 bp, synthetic construct
  misc_feature 1..16: note = synthetic [barcode part1]
  source 1..16: mol_type = other DNA
gatctagtatacctcc

SEQ ID NO: 13956 - DNA, 16 bp, synthetic construct
  misc_feature 1..16: note = synthetic [barcode part1]
  source 1..16: mol_type = other DNA
caccaccttcagtctt

SEQ ID NO: 13957 - DNA, 16 bp, synthetic construct
  misc_feature 1..16: note = synthetic [barcode part1]
  source 1..16: mol_type = other DNA
acgatcacaatcgtgc

SEQ ID NO: 13958 - DNA, 16 bp, synthetic construct
  misc_feature 1..16: note = synthetic [barcode part1]
  source 1..16: mol_type = other DNA
attgcacttccgttag

SEQ ID NO: 13959 - DNA, 16 bp, synthetic construct
  misc_feature 1..16: note = synthetic [barcode part1]
  source 1..16: mol_type = other DNA
tacctgtctcacctgt

SEQ ID NO: 13960 - DNA, 16 bp, synthetic construct
  misc_feature 1..16: note = synthetic [barcode part1]
  source 1..16: mol_type = other DNA
ttaccgagattcggtg

SEQ ID NO: 13961 - DNA, 16 bp, synthetic construct
  misc_feature 1..16: note = synthetic [barcode part1]
  source 1..16: mol_type = other DNA
agtgcagttcgtgttg

SEQ ID NO: 13962 - DNA, 16 bp, synthetic construct
  misc_feature 1..16: note = synthetic [barcode part1]
  source 1..16: mol_type = other DNA
gtgtacacgactaacc

SEQ ID NO: 13963 - DNA, 16 bp, synthetic construct
  misc_feature 1..16: note = synthetic [barcode part1]
  source 1..16: mol_type = other DNA
gcaagtggacactgtg

SEQ ID NO: 13964 - DNA, 16 bp, synthetic construct
  misc_feature 1..16: note = synthetic [barcode part1]
  source 1..16: mol_type = other DNA
atcctaggatcaaccg

SEQ ID NO: 13965 - DNA, 16 bp, synthetic construct
  misc_feature 1..16: note = synthetic [barcode part1]
  source 1..16: mol_type = other DNA
tgaaccaggagtatac

SEQ ID NO: 13966 - DNA, 16 bp, synthetic construct
  misc_feature 1..16: note = synthetic [barcode part1]
  source 1..16: mol_type = other DNA
tgtctcgcacctagac

SEQ ID NO: 13967 - DNA, 16 bp, synthetic construct
  misc_feature 1..16: note = synthetic [barcode part1]
  source 1..16: mol_type = other DNA
accaacttgtaacgcg

SEQ ID NO: 13968 - DNA, 16 bp, synthetic construct
  misc_feature 1..16: note = synthetic [barcode part1]
  source 1..16: mol_type = other DNA
caatacgacacagtcc

SEQ ID NO: 13969 - DNA, 16 bp, synthetic construct
  misc_feature 1..16: note = synthetic [barcode part1]
  source 1..16: mol_type = other DNA
caggactcagtcagtt

SEQ ID NO: 13970 - DNA, 16 bp, synthetic construct
  misc_feature 1..16: note = synthetic [barcode part1]
  source 1..16: mol_type = other DNA
tgcaacgcctgtctgt

SEQ ID NO: 13971 - DNA, 16 bp, synthetic construct
  misc_feature 1..16: note = synthetic [barcode part1]
  source 1..16: mol_type = other DNA
aatccgagattcggtc

SEQ ID NO: 13972 - DNA, 16 bp, synthetic construct
  misc_feature 1..16: note = synthetic [barcode part1]
  source 1..16: mol_type = other DNA
gtcgtgaatctatcct

SEQ ID NO: 13973 - DNA, 16 bp, synthetic construct
  misc_feature 1..16: note = synthetic [barcode part1]
  source 1..16: mol_type = other DNA
taccagatatcctcac

SEQ ID NO: 13974 - DNA, 16 bp, synthetic construct
  misc_feature 1..16: note = synthetic [barcode part1]
  source 1..16: mol_type = other DNA
acgcgatagaatcagt

SEQ ID NO: 13975 - DNA, 16 bp, synthetic construct
  misc_feature 1..16: note = synthetic [barcode part1]
  source 1..16: mol_type = other DNA
gttctaggactgactg

SEQ ID NO: 13976 - DNA, 16 bp, synthetic construct
  misc_feature 1..16: note = synthetic [barcode part1]
  source 1..16: mol_type = other DNA
tgattccggtcaaggt

SEQ ID NO: 13977 - DNA, 16 bp, synthetic construct
  misc_feature 1..16: note = synthetic [barcode part1]
  source 1..16: mol_type = other DNA
ataccgacgcaagttc

SEQ ID NO: 13978 - DNA, 16 bp, synthetic construct
  misc_feature 1..16: note = synthetic [barcode part1]
  source 1..16: mol_type = other DNA
ccttctcgagagaagt

SEQ ID NO: 13979 - DNA, 16 bp, synthetic construct
  misc_feature 1..16: note = synthetic [barcode part1]
  source 1..16: mol_type = other DNA
gcgttatcttggaacg

SEQ ID NO: 13980 - DNA, 16 bp, synthetic construct
  misc_feature 1..16: note = synthetic [barcode part1]
  source 1..16: mol_type = other DNA
acttcgcaggtactcc

SEQ ID NO: 13981 - DNA, 16 bp, synthetic construct
  misc_feature 1..16: note = synthetic [barcode part1]
  source 1..16: mol_type = other DNA
actcagtcgatccaag

SEQ ID NO: 13982 - DNA, 16 bp, synthetic construct
  misc_feature 1..16: note = synthetic [barcode part1]
  source 1..16: mol_type = other DNA
caggtcggtatctctc

SEQ ID NO: 13983 - DNA, 16 bp, synthetic construct
  misc_feature 1..16: note = synthetic [barcode part1]
  source 1..16: mol_type = other DNA
cactacctcgttatcc

SEQ ID NO: 13984 - DNA, 16 bp, synthetic construct
  misc_feature 1..16: note = synthetic [barcode part1]
  source 1..16: mol_type = other DNA
agaaggcagtatactc

SEQ ID NO: 13985 - DNA, 16 bp, synthetic construct
  misc_feature 1..16: note = synthetic [barcode part1]
  source 1..16: mol_type = other DNA
cggtaaggtaagtccg

SEQ ID NO: 13986 - DNA, 16 bp, synthetic construct
  misc_feature 1..16: note = synthetic [barcode part1]
  source 1..16: mol_type = other DNA
cagagaatacgcgatt

SEQ ID NO: 13987 - DNA, 16 bp, synthetic construct
  misc_feature 1..16: note = synthetic [barcode part1]
  source 1..16: mol_type = other DNA
caccgttcaggttcac

SEQ ID NO: 13988 - DNA, 16 bp, synthetic construct
  misc_feature 1..16: note = synthetic [barcode part1]
  source 1..16: mol_type = other DNA
gttagtcgtgtgtgtg

SEQ ID NO: 13989 - DNA, 16 bp, synthetic construct
  misc_feature 1..16: note = synthetic [barcode part1]
  source 1..16: mol_type = other DNA
gtataagttgcgcctg

SEQ ID NO: 13990 - DNA, 16 bp, synthetic construct
  misc_feature 1..16: note = synthetic [barcode part1]
  source 1..16: mol_type = other DNA
actgactaattggccg

SEQ ID NO: 13991 - DNA, 16 bp, synthetic construct
  misc_feature 1..16: note = synthetic [barcode part1]
  source 1..16: mol_type = other DNA
cacaagtcggatatcc

SEQ ID NO: 13992 - DNA, 16 bp, synthetic construct
  misc_feature 1..16: note = synthetic [barcode part1]
  source 1..16: mol_type = other DNA
gccgataacaaggcgt

SEQ ID NO: 13993 - DNA, 16 bp, synthetic construct
  misc_feature 1..16: note = synthetic [barcode part1]
  source 1..16: mol_type = other DNA
cacctacaagtcctgc

SEQ ID NO: 13994 - DNA, 16 bp, synthetic construct
  misc_feature 1..16: note = synthetic [barcode part1]
  source 1..16: mol_type = other DNA
gaagacgcgttcttac

SEQ ID NO: 13995 - DNA, 16 bp, synthetic construct
  misc_feature 1..16: note = synthetic [barcode part1]
  source 1..16: mol_type = other DNA
cggatatagtctgtgc

SEQ ID NO: 13996 - DNA, 16 bp, synthetic construct
  misc_feature 1..16: note = synthetic [barcode part1]
  source 1..16: mol_type = other DNA
gtatcttctccacacc

SEQ ID NO: 13997 - DNA, 16 bp, synthetic construct
  misc_feature 1..16: note = synthetic [barcode part1]
  source 1..16: mol_type = other DNA
gatcgacgcacgtatt

SEQ ID NO: 13998 - DNA, 16 bp, synthetic construct
  misc_feature 1..16: note = synthetic [barcode part1]
  source 1..16: mol_type = other DNA
cgaggttcgtaacgtt

SEQ ID NO: 13999 - DNA, 16 bp, synthetic construct
  misc_feature 1..16: note = synthetic [barcode part1]
  source 1..16: mol_type = other DNA
cgaggttgttgcgatt

SEQ ID NO: 14000 - DNA, 16 bp, synthetic construct
  misc_feature 1..16: note = synthetic [barcode part1]
  source 1..16: mol_type = other DNA
gttaacgacttcttgc

SEQ ID NO: 14001 - DNA, 16 bp, synthetic construct
  misc_feature 1..16: note = synthetic [barcode part1]
  source 1..16: mol_type = other DNA
tagtggccgtgttcct

SEQ ID NO: 14002 - DNA, 16 bp, synthetic construct
  misc_feature 1..16: note = synthetic [barcode part1]
  source 1..16: mol_type = other DNA
gtgaggttggaacaag

SEQ ID NO: 14003 - DNA, 16 bp, synthetic construct
  misc_feature 1..16: note = synthetic [barcode part1]
  source 1..16: mol_type = other DNA
cgatcggatcaattgc

SEQ ID NO: 14004 - DNA, 16 bp, synthetic construct
  misc_feature 1..16: note = synthetic [barcode part1]
  source 1..16: mol_type = other DNA
cctcgagttattcgcg

SEQ ID NO: 14005 - DNA, 16 bp, synthetic construct
  misc_feature 1..16: note = synthetic [barcode part1]
  source 1..16: mol_type = other DNA
gactgtgtgtggttgt

SEQ ID NO: 14006 - DNA, 16 bp, synthetic construct
  misc_feature 1..16: note = synthetic [barcode part1]
  source 1..16: mol_type = other DNA
agtacgttcagagaac

SEQ ID NO: 14007 - DNA, 16 bp, synthetic construct
  misc_feature 1..16: note = synthetic [barcode part1]
  source 1..16: mol_type = other DNA
gtgtcttcggcaacct

SEQ ID NO: 14008 - DNA, 16 bp, synthetic construct
  misc_feature 1..16: note = synthetic [barcode part1]
  source 1..16: mol_type = other DNA
cctaagacagtaccac

SEQ ID NO: 14009 - DNA, 16 bp, synthetic construct
  misc_feature 1..16: note = synthetic [barcode part1]
  source 1..16: mol_type = other DNA
gaccgaacagactcag

SEQ ID NO: 14010 - DNA, 16 bp, synthetic construct
  misc_feature 1..16: note = synthetic [barcode part1]
  source 1..16: mol_type = other DNA
agtgccaataccgtgt

SEQ ID NO: 14011 - DNA, 16 bp, synthetic construct
  misc_feature 1..16: note = synthetic [barcode part1]
  source 1..16: mol_type = other DNA
ttgtccgagtggatac

SEQ ID NO: 14012 - DNA, 16 bp, synthetic construct
  misc_feature 1..16: note = synthetic [barcode part1]
  source 1..16: mol_type = other DNA
ataccaacggcctcct

SEQ ID NO: 14013 - DNA, 16 bp, synthetic construct
  misc_feature 1..16: note = synthetic [barcode part1]
  source 1..16: mol_type = other DNA
acaaccactccgactc

SEQ ID NO: 14014 - DNA, 16 bp, synthetic construct
  misc_feature 1..16: note = synthetic [barcode part1]
  source 1..16: mol_type = other DNA
aacctccgtacgactc

SEQ ID NO: 14015 - DNA, 16 bp, synthetic construct
  misc_feature 1..16: note = synthetic [barcode part1]
  source 1..16: mol_type = other DNA
gatcgacctctaaggt

SEQ ID NO: 14016 - DNA, 16 bp, synthetic construct
  misc_feature 1..16: note = synthetic [barcode part1]
  source 1..16: mol_type = other DNA
gtgacactgaccagtt

SEQ ID NO: 14017 - DNA, 16 bp, synthetic construct
  misc_feature 1..16: note = synthetic [barcode part1]
  source 1..16: mol_type = other DNA
tccgttccactacgag

SEQ ID NO: 14018 - DNA, 16 bp, synthetic construct
  misc_feature 1..16: note = synthetic [barcode part1]
  source 1..16: mol_type = other DNA
gaccaacgatctcagt

SEQ ID NO: 14019 - DNA, 16 bp, synthetic construct
  misc_feature 1..16: note = synthetic [barcode part1]
  source 1..16: mol_type = other DNA
cgcagtatccagagtt

SEQ ID NO: 14020 - DNA, 16 bp, synthetic construct
  misc_feature 1..16: note = synthetic [barcode part1]
  source 1..16: mol_type = other DNA
atataaccggtcacgc

SEQ ID NO: 14021 - DNA, 16 bp, synthetic construct
  misc_feature 1..16: note = synthetic [barcode part1]
  source 1..16: mol_type = other DNA
cgtgattgaagtggcg

SEQ ID NO: 14022 - DNA, 16 bp, synthetic construct
  misc_feature 1..16: note = synthetic [barcode part1]
  source 1..16: mol_type = other DNA
cctacggaccttatcg

SEQ ID NO: 14023 - DNA, 16 bp, synthetic construct
  misc_feature 1..16: note = synthetic [barcode part1]
  source 1..16: mol_type = other DNA
tgtcctaataggtcct

SEQ ID NO: 14024 - DNA, 16 bp, synthetic construct
  misc_feature 1..16: note = synthetic [barcode part1]
  source 1..16: mol_type = other DNA
aggtcaccgagagtgt

SEQ ID NO: 14025 - DNA, 16 bp, synthetic construct
  misc_feature 1..16: note = synthetic [barcode part1]
  source 1..16: mol_type = other DNA
cgtaggtggtaagatt

SEQ ID NO: 14026 - DNA, 16 bp, synthetic construct
  misc_feature 1..16: note = synthetic [barcode part1]
  source 1..16: mol_type = other DNA
tgaacctggcaagacg

SEQ ID NO: 14027 - DNA, 16 bp, synthetic construct
  misc_feature 1..16: note = synthetic [barcode part1]
  source 1..16: mol_type = other DNA
cactattctacgcggc

SEQ ID NO: 14028 - DNA, 16 bp, synthetic construct
  misc_feature 1..16: note = synthetic [barcode part1]
  source 1..16: mol_type = other DNA
actactcgttccgtct

SEQ ID NO: 14029 - DNA, 16 bp, synthetic construct
  misc_feature 1..16: note = synthetic [barcode part1]
  source 1..16: mol_type = other DNA
ttactctgacctgtag

SEQ ID NO: 14030 - DNA, 16 bp, synthetic construct
  misc_feature 1..16: note = synthetic [barcode part1]
  source 1..16: mol_type = other DNA
actcctaggtggcctt

SEQ ID NO: 14031 - DNA, 16 bp, synthetic construct
  misc_feature 1..16: note = synthetic [barcode part1]
  source 1..16: mol_type = other DNA
gacggattatccactg

SEQ ID NO: 14032 - DNA, 16 bp, synthetic construct
  misc_feature 1..16: note = synthetic [barcode part1]
  source 1..16: mol_type = other DNA
gaacctgtgcctcgtt

SEQ ID NO: 14033 - DNA, 16 bp, synthetic construct
  misc_feature 1..16: note = synthetic [barcode part1]
  source 1..16: mol_type = other DNA
agtcagttcttcctcc

SEQ ID NO: 14034 - DNA, 16 bp, synthetic construct
  misc_feature 1..16: note = synthetic [barcode part1]
  source 1..16: mol_type = other DNA
gaagttattcctggcg

SEQ ID NO: 14035 - DNA, 16 bp, synthetic construct
  misc_feature 1..16: note = synthetic [barcode part1]
  source 1..16: mol_type = other DNA
tctagactccggttcg

SEQ ID NO: 14036 - DNA, 16 bp, synthetic construct
  misc_feature 1..16: note = synthetic [barcode part1]
  source 1..16: mol_type = other DNA
cagttgatagttggcc

SEQ ID NO: 14037 - DNA, 16 bp, synthetic construct
  misc_feature 1..16: note = synthetic [barcode part1]
  source 1..16: mol_type = other DNA
aggcgaggtcttgagt

SEQ ID NO: 14038 - DNA, 16 bp, synthetic construct
  misc_feature 1..16: note = synthetic [barcode part1]
  source 1..16: mol_type = other DNA
aggtggatctagaatc

SEQ ID NO: 14039 - DNA, 16 bp, synthetic construct
  misc_feature 1..16: note = synthetic [barcode part1]
  source 1..16: mol_type = other DNA
ttaacggactcagtgc

SEQ ID NO: 14040 - DNA, 16 bp, synthetic construct
  misc_feature 1..16: note = synthetic [barcode part1]
  source 1..16: mol_type = other DNA
caacgtattggacgtc

SEQ ID NO: 14041 - DNA, 16 bp, synthetic construct
  misc_feature 1..16: note = synthetic [barcode part1]
  source 1..16: mol_type = other DNA
tagatcgccaacgatc

SEQ ID NO: 14042 - DNA, 16 bp, synthetic construct
  misc_feature 1..16: note = synthetic [barcode part1]
  source 1..16: mol_type = other DNA
actccgcgttcagact

SEQ ID NO: 14043 - DNA, 16 bp, synthetic construct
  misc_feature 1..16: note = synthetic [barcode part1]
  source 1..16: mol_type = other DNA
ataaccaactgcgcgt

SEQ ID NO: 14044 - DNA, 16 bp, synthetic construct
  misc_feature 1..16: note = synthetic [barcode part1]
  source 1..16: mol_type = other DNA
gtcggtggtggaatac

SEQ ID NO: 14045 - DNA, 16 bp, synthetic construct
  misc_feature 1..16: note = synthetic [barcode part1]
  source 1..16: mol_type = other DNA
gcgaactggaacgact

SEQ ID NO: 14046 - DNA, 16 bp, synthetic construct
  misc_feature 1..16: note = synthetic [barcode part1]
  source 1..16: mol_type = other DNA
gatctctcgcaggtct

SEQ ID NO: 14047 - DNA, 16 bp, synthetic construct
  misc_feature 1..16: note = synthetic [barcode part1]
  source 1..16: mol_type = other DNA
cgtctcttggcctaag

SEQ ID NO: 14048 - DNA, 16 bp, synthetic construct
  misc_feature 1..16: note = synthetic [barcode part1]
  source 1..16: mol_type = other DNA
tatccaggagaatcag

SEQ ID NO: 14049 - DNA, 16 bp, synthetic construct
  misc_feature 1..16: note = synthetic [barcode part1]
  source 1..16: mol_type = other DNA
tataccgttccggtcg

SEQ ID NO: 14050 - DNA, 16 bp, synthetic construct
  misc_feature 1..16: note = synthetic [barcode part1]
  source 1..16: mol_type = other DNA
ccgcaagtaggagatc

SEQ ID NO: 14051 - DNA, 16 bp, synthetic construct
  misc_feature 1..16: note = synthetic [barcode part1]
  source 1..16: mol_type = other DNA
ttgcctctacggactg

SEQ ID NO: 14052 - DNA, 16 bp, synthetic construct
  misc_feature 1..16: note = synthetic [barcode part1]
  source 1..16: mol_type = other DNA
tagaagttgtcgaacg

SEQ ID NO: 14053 - DNA, 16 bp, synthetic construct
  misc_feature 1..16: note = synthetic [barcode part1]
  source 1..16: mol_type = other DNA
ccgcgtaagaatcgag

SEQ ID NO: 14054 - DNA, 16 bp, synthetic construct
  misc_feature 1..16: note = synthetic [barcode part1]
  source 1..16: mol_type = other DNA
ttctcggactacgtgc

SEQ ID NO: 14055 - DNA, 16 bp, synthetic construct
  misc_feature 1..16: note = synthetic [barcode part1]
  source 1..16: mol_type = other DNA
tggcgaaggataacag

SEQ ID NO: 14056 - DNA, 16 bp, synthetic construct
  misc_feature 1..16: note = synthetic [barcode part1]
  source 1..16: mol_type = other DNA
gaataaggataggcgc

SEQ ID NO: 14057 - DNA, 16 bp, synthetic construct
  misc_feature 1..16: note = synthetic [barcode part1]
  source 1..16: mol_type = other DNA
gtccacttaagacttc

SEQ ID NO: 14058 - DNA, 16 bp, synthetic construct
  misc_feature 1..16: note = synthetic [barcode part1]
  source 1..16: mol_type = other DNA
aatactggcgcacgtt

SEQ ID NO: 14059 - DNA, 16 bp, synthetic construct
  misc_feature 1..16: note = synthetic [barcode part1]
  source 1..16: mol_type = other DNA
cagaaggagttctctc

SEQ ID NO: 14060 - DNA, 16 bp, synthetic construct
  misc_feature 1..16: note = synthetic [barcode part1]
  source 1..16: mol_type = other DNA
cgtcactgttcggatc

SEQ ID NO: 14061 - DNA, 16 bp, synthetic construct
  misc_feature 1..16: note = synthetic [barcode part1]
  source 1..16: mol_type = other DNA
cgttctctagtgattg

SEQ ID NO: 14062 - DNA, 16 bp, synthetic construct
  misc_feature 1..16: note = synthetic [barcode part1]
  source 1..16: mol_type = other DNA
aggagaccttaacctc

SEQ ID NO: 14063 - DNA, 16 bp, synthetic construct
  misc_feature 1..16: note = synthetic [barcode part1]
  source 1..16: mol_type = other DNA
tggtacaccttcgacc

SEQ ID NO: 14064 - DNA, 16 bp, synthetic construct
  misc_feature 1..16: note = synthetic [barcode part1]
  source 1..16: mol_type = other DNA
taagtgactcgcctag

SEQ ID NO: 14065 - DNA, 16 bp, synthetic construct
  misc_feature 1..16: note = synthetic [barcode part1]
  source 1..16: mol_type = other DNA
gagtccgtgttctacc

SEQ ID NO: 14066 - DNA, 16 bp, synthetic construct
  misc_feature 1..16: note = synthetic [barcode part1]
  source 1..16: mol_type = other DNA
gcgcgatctccttaac

SEQ ID NO: 14067 - DNA, 16 bp, synthetic construct
  misc_feature 1..16: note = synthetic [barcode part1]
  source 1..16: mol_type = other DNA
agtactgcaactggtc

SEQ ID NO: 14068 - DNA, 16 bp, synthetic construct
  misc_feature 1..16: note = synthetic [barcode part1]
  source 1..16: mol_type = other DNA
aagtgaagttccagac

SEQ ID NO: 14069 - DNA, 16 bp, synthetic construct
  misc_feature 1..16: note = synthetic [barcode part1]
  source 1..16: mol_type = other DNA
tggttgattagtcggc

SEQ ID NO: 14070 - DNA, 16 bp, synthetic construct
  misc_feature 1..16: note = synthetic [barcode part1]
  source 1..16: mol_type = other DNA
ttgcaaggtagttgcc

SEQ ID NO: 14071 - DNA, 16 bp, synthetic construct
  misc_feature 1..16: note = synthetic [barcode part1]
  source 1..16: mol_type = other DNA
acaccttctctgcact

SEQ ID NO: 14072 - DNA, 16 bp, synthetic construct
  misc_feature 1..16: note = synthetic [barcode part1]
  source 1..16: mol_type = other DNA
aggatcgtacgaattg

SEQ ID NO: 14073 - DNA, 16 bp, synthetic construct
  misc_feature 1..16: note = synthetic [barcode part1]
  source 1..16: mol_type = other DNA
tccagaagtcagtcac

SEQ ID NO: 14074 - DNA, 16 bp, synthetic construct
  misc_feature 1..16: note = synthetic [barcode part1]
  source 1..16: mol_type = other DNA
ataggtacaaggttcg

SEQ ID NO: 14075 - DNA, 16 bp, synthetic construct
  misc_feature 1..16: note = synthetic [barcode part1]
  source 1..16: mol_type = other DNA
gccggatataattcgc

SEQ ID NO: 14076 - DNA, 16 bp, synthetic construct
  misc_feature 1..16: note = synthetic [barcode part1]
  source 1..16: mol_type = other DNA
gaaccgattgaggaag

SEQ ID NO: 14077 - DNA, 16 bp, synthetic construct
  misc_feature 1..16: note = synthetic [barcode part1]
  source 1..16: mol_type = other DNA
tgtcctcaccactgag

SEQ ID NO: 14078 - DNA, 16 bp, synthetic construct
  misc_feature 1..16: note = synthetic [barcode part1]
  source 1..16: mol_type = other DNA
gtgtgactcttgatct

SEQ ID NO: 14079 - DNA, 16 bp, synthetic construct
  misc_feature 1..16: note = synthetic [barcode part1]
  source 1..16: mol_type = other DNA
tctaactgtatcggtc

SEQ ID NO: 14080 - DNA, 16 bp, synthetic construct
  misc_feature 1..16: note = synthetic [barcode part1]
  source 1..16: mol_type = other DNA
tcacctgtggagttcc

SEQ ID NO: 14081 - DNA, 16 bp, synthetic construct
  misc_feature 1..16: note = synthetic [barcode part1]
  source 1..16: mol_type = other DNA
aatagtggcaagttcg

SEQ ID NO: 14082 - DNA, 16 bp, synthetic construct
  misc_feature 1..16: note = synthetic [barcode part1]
  source 1..16: mol_type = other DNA
gtaacctctaccgaag

SEQ ID NO: 14083 - DNA, 16 bp, synthetic construct
  misc_feature 1..16: note = synthetic [barcode part1]
  source 1..16: mol_type = other DNA
cgtgtgagtccagatt

SEQ ID NO: 14084 - DNA, 16 bp, synthetic construct
  misc_feature 1..16: note = synthetic [barcode part1]
  source 1..16: mol_type = other DNA
ttcgaagtgcgtgtac

SEQ ID NO: 14085 - DNA, 16 bp, synthetic construct
  misc_feature 1..16: note = synthetic [barcode part1]
  source 1..16: mol_type = other DNA
gtcgagtacttctgtt

SEQ ID NO: 14086 - DNA, 16 bp, synthetic construct
  misc_feature 1..16: note = synthetic [barcode part1]
  source 1..16: mol_type = other DNA
ccgactcactcaggtt

SEQ ID NO: 14087 - DNA, 16 bp, synthetic construct
  misc_feature 1..16: note = synthetic [barcode part1]
  source 1..16: mol_type = other DNA
tcagaggtcttgtcag

SEQ ID NO: 14088 - DNA, 16 bp, synthetic construct
  misc_feature 1..16: note = synthetic [barcode part1]
  source 1..16: mol_type = other DNA
cctgaggtcagaattc

SEQ ID NO: 14089 - DNA, 16 bp, synthetic construct
  misc_feature 1..16: note = synthetic [barcode part1]
  source 1..16: mol_type = other DNA
gtgtctcagttcggtc

SEQ ID NO: 14090 - DNA, 16 bp, synthetic construct
  misc_feature 1..16: note = synthetic [barcode part1]
  source 1..16: mol_type = other DNA
acggacaacgataccg

SEQ ID NO: 14091 - DNA, 16 bp, synthetic construct
  misc_feature 1..16: note = synthetic [barcode part1]
  source 1..16: mol_type = other DNA
cacgtgaggtaatagt

SEQ ID NO: 14092 - DNA, 16 bp, synthetic construct
  misc_feature 1..16: note = synthetic [barcode part1]
  source 1..16: mol_type = other DNA
gattcggtctcgcact

SEQ ID NO: 14093 - DNA, 16 bp, synthetic construct
  misc_feature 1..16: note = synthetic [barcode part1]
  source 1..16: mol_type = other DNA
cgaacttggcgaagtg

SEQ ID NO: 14094 - DNA, 16 bp, synthetic construct
  misc_feature 1..16: note = synthetic [barcode part1]
  source 1..16: mol_type = other DNA
agtggccagaacacac

SEQ ID NO: 14095 - DNA, 16 bp, synthetic construct
  misc_feature 1..16: note = synthetic [barcode part1]
  source 1..16: mol_type = other DNA
cgtcacgaactctaag

SEQ ID NO: 14096 - DNA, 16 bp, synthetic construct
  misc_feature 1..16: note = synthetic [barcode part1]
  source 1..16: mol_type = other DNA
gcgcactgataacgag

SEQ ID NO: 14097 - DNA, 16 bp, synthetic construct
  misc_feature 1..16: note = synthetic [barcode part1]
  source 1..16: mol_type = other DNA
atataacgcgttggcc

SEQ ID NO: 14098 - DNA, 16 bp, synthetic construct
  misc_feature 1..16: note = synthetic [barcode part1]
  source 1..16: mol_type = other DNA
acgactagtgcactac

SEQ ID NO: 14099 - DNA, 16 bp, synthetic construct
  misc_feature 1..16: note = synthetic [barcode part1]
  source 1..16: mol_type = other DNA
gtgaccaactgtgtgt

SEQ ID NO: 14100 - DNA, 16 bp, synthetic construct
  misc_feature 1..16: note = synthetic [barcode part1]
  source 1..16: mol_type = other DNA
atccacctgttgtggc

SEQ ID NO: 14101 - DNA, 16 bp, synthetic construct
  misc_feature 1..16: note = synthetic [barcode part1]
  source 1..16: mol_type = other DNA
acgtacaaggagagac

SEQ ID NO: 14102 - DNA, 16 bp, synthetic construct
  misc_feature 1..16: note = synthetic [barcode part1]
  source 1..16: mol_type = other DNA
tcaggtatcgccttgc

SEQ ID NO: 14103 - DNA, 16 bp, synthetic construct
  misc_feature 1..16: note = synthetic [barcode part1]
  source 1..16: mol_type = other DNA
aatccacagacttgcg

SEQ ID NO: 14104 - DNA, 16 bp, synthetic construct
  misc_feature 1..16: note = synthetic [barcode part1]
  source 1..16: mol_type = other DNA
tctataagacaaggcg

SEQ ID NO: 14105 - DNA, 16 bp, synthetic construct
  misc_feature 1..16: note = synthetic [barcode part1]
  source 1..16: mol_type = other DNA
tccaactcgtgcggtt

SEQ ID NO: 14106 - DNA, 16 bp, synthetic construct
  misc_feature 1..16: note = synthetic [barcode part1]
  source 1..16: mol_type = other DNA
gaacctaagtagtgac

SEQ ID NO: 14107 - DNA, 16 bp, synthetic construct
  misc_feature 1..16: note = synthetic [barcode part1]
  source 1..16: mol_type = other DNA
tcaataatccgacggc

SEQ ID NO: 14108 - DNA, 16 bp, synthetic construct
  misc_feature 1..16: note = synthetic [barcode part1]
  source 1..16: mol_type = other DNA
aactgcagttggtacc

SEQ ID NO: 14109 - DNA, 16 bp, synthetic construct
  misc_feature 1..16: note = synthetic [barcode part1]
  source 1..16: mol_type = other DNA
gaactgttgaatcgcc

SEQ ID NO: 14110 - DNA, 16 bp, synthetic construct
  misc_feature 1..16: note = synthetic [barcode part1]
  source 1..16: mol_type = other DNA
gtggattctggatacc

SEQ ID NO: 14111 - DNA, 16 bp, synthetic construct
  misc_feature 1..16: note = synthetic [barcode part1]
  source 1..16: mol_type = other DNA
tgccgccagtaataac

SEQ ID NO: 14112 - DNA, 16 bp, synthetic construct
  misc_feature 1..16: note = synthetic [barcode part1]
  source 1..16: mol_type = other DNA
caagtaagtggtactg

SEQ ID NO: 14113 - DNA, 16 bp, synthetic construct
  misc_feature 1..16: note = synthetic [barcode part1]
  source 1..16: mol_type = other DNA
cacttatcaggcgaac

SEQ ID NO: 14114 - DNA, 16 bp, synthetic construct
  misc_feature 1..16: note = synthetic [barcode part1]
  source 1..16: mol_type = other DNA
cggcaactacgttctc

SEQ ID NO: 14115 - DNA, 16 bp, synthetic construct
  misc_feature 1..16: note = synthetic [barcode part1]
  source 1..16: mol_type = other DNA
gttcggcaagacacag

SEQ ID NO: 14116 - DNA, 16 bp, synthetic construct
  misc_feature 1..16: note = synthetic [barcode part1]
  source 1..16: mol_type = other DNA
tctgattcgcaattgc

SEQ ID NO: 14117 - DNA, 16 bp, synthetic construct
  misc_feature 1..16: note = synthetic [barcode part1]
  source 1..16: mol_type = other DNA
aactgcgattgcacgt

SEQ ID NO: 14118 - DNA, 16 bp, synthetic construct
  misc_feature 1..16: note = synthetic [barcode part1]
  source 1..16: mol_type = other DNA
taacacaccggtacgt

SEQ ID NO: 14119 - DNA, 16 bp, synthetic construct
  misc_feature 1..16: note = synthetic [barcode part1]
  source 1..16: mol_type = other DNA
aatcggccagttgact

SEQ ID NO: 14120 - DNA, 16 bp, synthetic construct
  misc_feature 1..16: note = synthetic [barcode part1]
  source 1..16: mol_type = other DNA
agacctgcagaagatt

SEQ ID NO: 14121 - DNA, 16 bp, synthetic construct
  misc_feature 1..16: note = synthetic [barcode part1]
  source 1..16: mol_type = other DNA
gcaagttacgcgattc

SEQ ID NO: 14122 - DNA, 16 bp, synthetic construct
  misc_feature 1..16: note = synthetic [barcode part1]
  source 1..16: mol_type = other DNA
gtatacgtgtggtacc

SEQ ID NO: 14123 - DNA, 16 bp, synthetic construct
  misc_feature 1..16: note = synthetic [barcode part1]
  source 1..16: mol_type = other DNA
gtgtgacaattcctct

SEQ ID NO: 14124 - DNA, 16 bp, synthetic construct
  misc_feature 1..16: note = synthetic [barcode part1]
  source 1..16: mol_type = other DNA
cgtcggaactcttacc

SEQ ID NO: 14125 - DNA, 16 bp, synthetic construct
  misc_feature 1..16: note = synthetic [barcode part1]
  source 1..16: mol_type = other DNA
taacgtgtggcggaac

SEQ ID NO: 14126 - DNA, 16 bp, synthetic construct
  misc_feature 1..16: note = synthetic [barcode part1]
  source 1..16: mol_type = other DNA
ttcacagtggacactg

SEQ ID NO: 14127 - DNA, 16 bp, synthetic construct
  misc_feature 1..16: note = synthetic [barcode part1]
  source 1..16: mol_type = other DNA
ttcacgtcacaggagt

SEQ ID NO: 14128 - DNA, 16 bp, synthetic construct
  misc_feature 1..16: note = synthetic [barcode part1]
  source 1..16: mol_type = other DNA
cgccaactaatacacg

SEQ ID NO: 14129 - DNA, 16 bp, synthetic construct
  misc_feature 1..16: note = synthetic [barcode part1]
  source 1..16: mol_type = other DNA
tctcggtactatcctc

SEQ ID NO: 14130 - DNA, 16 bp, synthetic construct
  misc_feature 1..16: note = synthetic [barcode part1]
  source 1..16: mol_type = other DNA
gtgtatccagaggacg

SEQ ID NO: 14131 - DNA, 16 bp, synthetic construct
  misc_feature 1..16: note = synthetic [barcode part1]
  source 1..16: mol_type = other DNA
cacgttaccagttccg

SEQ ID NO: 14132 - DNA, 16 bp, synthetic construct
  misc_feature 1..16: note = synthetic [barcode part1]
  source 1..16: mol_type = other DNA
actcgcctgtcacagt

SEQ ID NO: 14133 - DNA, 16 bp, synthetic construct
  misc_feature 1..16: note = synthetic [barcode part1]
  source 1..16: mol_type = other DNA
cgccggaagtaatctt

SEQ ID NO: 14134 - DNA, 16 bp, synthetic construct
  misc_feature 1..16: note = synthetic [barcode part1]
  source 1..16: mol_type = other DNA
gcctatctgagacctc

SEQ ID NO: 14135 - DNA, 16 bp, synthetic construct
  misc_feature 1..16: note = synthetic [barcode part1]
  source 1..16: mol_type = other DNA
tcggcgtaatctctcg

SEQ ID NO: 14136 - DNA, 16 bp, synthetic construct
  misc_feature 1..16: note = synthetic [barcode part1]
  source 1..16: mol_type = other DNA
tctccgtgaaccgttg

SEQ ID NO: 14137 - DNA, 16 bp, synthetic construct
  misc_feature 1..16: note = synthetic [barcode part1]
  source 1..16: mol_type = other DNA
aactgaaggcagtgag

SEQ ID NO: 14138 - DNA, 16 bp, synthetic construct
  misc_feature 1..16: note = synthetic [barcode part1]
  source 1..16: mol_type = other DNA
aaggacgaagttgttc

SEQ ID NO: 14139 - DNA, 16 bp, synthetic construct
  misc_feature 1..16: note = synthetic [barcode part1]
  source 1..16: mol_type = other DNA
acttccgttcagtaac

SEQ ID NO: 14140 - DNA, 16 bp, synthetic construct
  misc_feature 1..16: note = synthetic [barcode part1]
  source 1..16: mol_type = other DNA
ttccggtccttatcac

SEQ ID NO: 14141 - DNA, 16 bp, synthetic construct
  misc_feature 1..16: note = synthetic [barcode part1]
  source 1..16: mol_type = other DNA
actacgatcgcagtac

SEQ ID NO: 14142 - DNA, 16 bp, synthetic construct
  misc_feature 1..16: note = synthetic [barcode part1]
  source 1..16: mol_type = other DNA
cgatactacgacactg

SEQ ID NO: 14143 - DNA, 16 bp, synthetic construct
  misc_feature 1..16: note = synthetic [barcode part1]
  source 1..16: mol_type = other DNA
agataggtaggcgagt

SEQ ID NO: 14144 - DNA, 16 bp, synthetic construct
  misc_feature 1..16: note = synthetic [barcode part1]
  source 1..16: mol_type = other DNA
accagaggattgagag

SEQ ID NO: 14145 - DNA, 16 bp, synthetic construct
  misc_feature 1..16: note = synthetic [barcode part1]
  source 1..16: mol_type = other DNA
tgcactaagttggaag

SEQ ID NO: 14146 - DNA, 16 bp, synthetic construct
  misc_feature 1..16: note = synthetic [barcode part1]
  source 1..16: mol_type = other DNA
accgtccgaacttatt

SEQ ID NO: 14147 - DNA, 16 bp, synthetic construct
  misc_feature 1..16: note = synthetic [barcode part1]
  source 1..16: mol_type = other DNA
gacacgtgtacgttgt

SEQ ID NO: 14148 - DNA, 16 bp, synthetic construct
  misc_feature 1..16: note = synthetic [barcode part1]
  source 1..16: mol_type = other DNA
ccgtgaattcgcaagt

SEQ ID NO: 14149 - DNA, 16 bp, synthetic construct
  misc_feature 1..16: note = synthetic [barcode part1]
  source 1..16: mol_type = other DNA
caccgttagtagtgac

SEQ ID NO: 14150 - DNA, 16 bp, synthetic construct
  misc_feature 1..16: note = synthetic [barcode part1]
  source 1..16: mol_type = other DNA
tactacgatcgcaacg

SEQ ID NO: 14151 - DNA, 16 bp, synthetic construct
  misc_feature 1..16: note = synthetic [barcode part1]
  source 1..16: mol_type = other DNA
gtgtctcctggtgatc

SEQ ID NO: 14152 - DNA, 16 bp, synthetic construct
  misc_feature 1..16: note = synthetic [barcode part1]
  source 1..16: mol_type = other DNA
taagtcgaggagtatc

SEQ ID NO: 14153 - DNA, 16 bp, synthetic construct
  misc_feature 1..16: note = synthetic [barcode part1]
  source 1..16: mol_type = other DNA
atcgtgtagtccgtag

SEQ ID NO: 14154 - DNA, 16 bp, synthetic construct
  misc_feature 1..16: note = synthetic [barcode part1]
  source 1..16: mol_type = other DNA
cacactagaccgagag

SEQ ID NO: 14155 - DNA, 16 bp, synthetic construct
  misc_feature 1..16: note = synthetic [barcode part1]
  source 1..16: mol_type = other DNA
gagactctgtcacagt

SEQ ID NO: 14156 - DNA, 16 bp, synthetic construct
  misc_feature 1..16: note = synthetic [barcode part1]
  source 1..16: mol_type = other DNA
attctacgtctagacc

SEQ ID NO: 14157 - DNA, 16 bp, synthetic construct
  misc_feature 1..16: note = synthetic [barcode part1]
  source 1..16: mol_type = other DNA
agacggtcaatccttg

SEQ ID NO: 14158 - DNA, 16 bp, synthetic construct
  misc_feature 1..16: note = synthetic [barcode part1]
  source 1..16: mol_type = other DNA
cgtcaccagacgttct

SEQ ID NO: 14159 - DNA, 16 bp, synthetic construct
  misc_feature 1..16: note = synthetic [barcode part1]
  source 1..16: mol_type = other DNA
gttcgaactcggatac

SEQ ID NO: 14160 - DNA, 16 bp, synthetic construct
  misc_feature 1..16: note = synthetic [barcode part1]
  source 1..16: mol_type = other DNA
agtcaggagatatctg

SEQ ID NO: 14161 - DNA, 16 bp, synthetic construct
  misc_feature 1..16: note = synthetic [barcode part1]
  source 1..16: mol_type = other DNA
tcggcgttctcaatcg

SEQ ID NO: 14162 - DNA, 16 bp, synthetic construct
  misc_feature 1..16: note = synthetic [barcode part1]
  source 1..16: mol_type = other DNA
acctaccgttctaggc

SEQ ID NO: 14163 - DNA, 16 bp, synthetic construct
  misc_feature 1..16: note = synthetic [barcode part1]
  source 1..16: mol_type = other DNA
accactccacttggac

SEQ ID NO: 14164 - DNA, 16 bp, synthetic construct
  misc_feature 1..16: note = synthetic [barcode part1]
  source 1..16: mol_type = other DNA
cacttagattgtcctg

SEQ ID NO: 14165 - DNA, 16 bp, synthetic construct
  misc_feature 1..16: note = synthetic [barcode part1]
  source 1..16: mol_type = other DNA
cgattcctacagttac

SEQ ID NO: 14166 - DNA, 16 bp, synthetic construct
  misc_feature 1..16: note = synthetic [barcode part1]
  source 1..16: mol_type = other DNA
tccaggccttgacttg

SEQ ID NO: 14167 - DNA, 16 bp, synthetic construct
  misc_feature 1..16: note = synthetic [barcode part1]
  source 1..16: mol_type = other DNA
tatagtgcgtcacggt

SEQ ID NO: 14168 - DNA, 16 bp, synthetic construct
  misc_feature 1..16: note = synthetic [barcode part1]
  source 1..16: mol_type = other DNA
ccacaagattccttgt

SEQ ID NO: 14169 - DNA, 16 bp, synthetic construct
  misc_feature 1..16: note = synthetic [barcode part1]
  source 1..16: mol_type = other DNA
gcgtcagtataccaac

SEQ ID NO: 14170 - DNA, 16 bp, synthetic construct
  misc_feature 1..16: note = synthetic [barcode part1]
  source 1..16: mol_type = other DNA
ccggaatctcagagtt

SEQ ID NO: 14171 - DNA, 16 bp, synthetic construct
  misc_feature 1..16: note = synthetic [barcode part1]
  source 1..16: mol_type = other DNA
agtgcgacaggttgtg

SEQ ID NO: 14172 - DNA, 16 bp, synthetic construct
  misc_feature 1..16: note = synthetic [barcode part1]
  source 1..16: mol_type = other DNA
attggcactcaattcc

SEQ ID NO: 14173 - DNA, 16 bp, synthetic construct
  misc_feature 1..16: note = synthetic [barcode part1]
  source 1..16: mol_type = other DNA
caccgaacaccaagtt

SEQ ID NO: 14174 - DNA, 16 bp, synthetic construct
  misc_feature 1..16: note = synthetic [barcode part1]
  source 1..16: mol_type = other DNA
aggatccgcgatatct

SEQ ID NO: 14175 - DNA, 16 bp, synthetic construct
  misc_feature 1..16: note = synthetic [barcode part1]
  source 1..16: mol_type = other DNA
gtacgactcggtcctt

SEQ ID NO: 14176 - DNA, 16 bp, synthetic construct
  misc_feature 1..16: note = synthetic [barcode part1]
  source 1..16: mol_type = other DNA
aaggcctgagttctgt

SEQ ID NO: 14177 - DNA, 16 bp, synthetic construct
  misc_feature 1..16: note = synthetic [barcode part1]
  source 1..16: mol_type = other DNA
ccaatctagtgtacct

SEQ ID NO: 14178 - DNA, 16 bp, synthetic construct
  misc_feature 1..16: note = synthetic [barcode part1]
  source 1..16: mol_type = other DNA
agtcttggcgaataag

SEQ ID NO: 14179 - DNA, 16 bp, synthetic construct
  misc_feature 1..16: note = synthetic [barcode part1]
  source 1..16: mol_type = other DNA
atcacgattacctgtc

SEQ ID NO: 14180 - DNA, 16 bp, synthetic construct
  misc_feature 1..16: note = synthetic [barcode part1]
  source 1..16: mol_type = other DNA
ttgagattctgtccgt

SEQ ID NO: 14181 - DNA, 16 bp, synthetic construct
  misc_feature 1..16: note = synthetic [barcode part1]
  source 1..16: mol_type = other DNA
accttacgcctaagtt

SEQ ID NO: 14182 - DNA, 16 bp, synthetic construct
  misc_feature 1..16: note = synthetic [barcode part1]
  source 1..16: mol_type = other DNA
aggttggtatacaacg

SEQ ID NO: 14183 - DNA, 16 bp, synthetic construct
  misc_feature 1..16: note = synthetic [barcode part1]
  source 1..16: mol_type = other DNA
atctcagtacgcgtag

SEQ ID NO: 14184 - DNA, 16 bp, synthetic construct
  misc_feature 1..16: note = synthetic [barcode part1]
  source 1..16: mol_type = other DNA
tgacgtgtcaacgtgt

SEQ ID NO: 14185 - DNA, 16 bp, synthetic construct
  misc_feature 1..16: note = synthetic [barcode part1]
  source 1..16: mol_type = other DNA
caacgcggtacttaac

SEQ ID NO: 14186 - DNA, 16 bp, synthetic construct
  misc_feature 1..16: note = synthetic [barcode part1]
  source 1..16: mol_type = other DNA
gttggtgcgttaacgt

SEQ ID NO: 14187 - DNA, 16 bp, synthetic construct
  misc_feature 1..16: note = synthetic [barcode part1]
  source 1..16: mol_type = other DNA
cgtagttcgaccttcg

SEQ ID NO: 14188 - DNA, 16 bp, synthetic construct
  misc_feature 1..16: note = synthetic [barcode part1]
  source 1..16: mol_type = other DNA
ttccgaactatctacg

SEQ ID NO: 14189 - DNA, 16 bp, synthetic construct
  misc_feature 1..16: note = synthetic [barcode part1]
  source 1..16: mol_type = other DNA
gtgacacttctggagt

SEQ ID NO: 14190 - DNA, 16 bp, synthetic construct
  misc_feature 1..16: note = synthetic [barcode part1]
  source 1..16: mol_type = other DNA
tcacaggttgccgtct

SEQ ID NO: 14191 - DNA, 16 bp, synthetic construct
  misc_feature 1..16: note = synthetic [barcode part1]
  source 1..16: mol_type = other DNA
tcgtctagacactgtt

SEQ ID NO: 14192 - DNA, 16 bp, synthetic construct
  misc_feature 1..16: note = synthetic [barcode part1]
  source 1..16: mol_type = other DNA
cgacctcacgttggtt

SEQ ID NO: 14193 - DNA, 16 bp, synthetic construct
  misc_feature 1..16: note = synthetic [barcode part1]
  source 1..16: mol_type = other DNA
ttgacgttgtgtgacg

SEQ ID NO: 14194 - DNA, 16 bp, synthetic construct
  misc_feature 1..16: note = synthetic [barcode part1]
  source 1..16: mol_type = other DNA
ttagaccggtcactag

SEQ ID NO: 14195 - DNA, 16 bp, synthetic construct
  misc_feature 1..16: note = synthetic [barcode part1]
  source 1..16: mol_type = other DNA
gtgtagttcctccgac

SEQ ID NO: 14196 - DNA, 16 bp, synthetic construct
  misc_feature 1..16: note = synthetic [barcode part1]
  source 1..16: mol_type = other DNA
ttacgagaagttggac

SEQ ID NO: 14197 - DNA, 16 bp, synthetic construct
  misc_feature 1..16: note = synthetic [barcode part1]
  source 1..16: mol_type = other DNA
agttaccgcgacttag

SEQ ID NO: 14198 - DNA, 16 bp, synthetic construct
  misc_feature 1..16: note = synthetic [barcode part1]
  source 1..16: mol_type = other DNA
actgcagtacctatct

SEQ ID NO: 14199 - DNA, 16 bp, synthetic construct
  misc_feature 1..16: note = synthetic [barcode part1]
  source 1..16: mol_type = other DNA
cagtggtaccaagtct

SEQ ID NO: 14200 - DNA, 16 bp, synthetic construct
  misc_feature 1..16: note = synthetic [barcode part1]
  source 1..16: mol_type = other DNA
gagaacgtccggtaac

SEQ ID NO: 14201 - DNA, 16 bp, synthetic construct
  misc_feature 1..16: note = synthetic [barcode part1]
  source 1..16: mol_type = other DNA
cctggaacaatcgact

SEQ ID NO: 14202 - DNA, 16 bp, synthetic construct
  misc_feature 1..16: note = synthetic [barcode part1]
  source 1..16: mol_type = other DNA
tggttctggttggagt

SEQ ID NO: 14203 - DNA, 16 bp, synthetic construct
  misc_feature 1..16: note = synthetic [barcode part1]
  source 1..16: mol_type = other DNA
acgccttaatcgtcgc

SEQ ID NO: 14204 - DNA, 16 bp, synthetic construct
  misc_feature 1..16: note = synthetic [barcode part1]
  source 1..16: mol_type = other DNA
ttgcctatccactcgt

SEQ ID NO: 14205 - DNA, 16 bp, synthetic construct
  misc_feature 1..16: note = synthetic [barcode part1]
  source 1..16: mol_type = other DNA
ccggtgtacgtattag

SEQ ID NO: 14206 - DNA, 16 bp, synthetic construct
  misc_feature 1..16: note = synthetic [barcode part1]
  source 1..16: mol_type = other DNA
aactggtggagagaac

SEQ ID NO: 14207 - DNA, 16 bp, synthetic construct
  misc_feature 1..16: note = synthetic [barcode part1]
  source 1..16: mol_type = other DNA
tctggttaccagtact

SEQ ID NO: 14208 - DNA, 16 bp, synthetic construct
  misc_feature 1..16: note = synthetic [barcode part1]
  source 1..16: mol_type = other DNA
tcctgtctgtctggag

SEQ ID NO: 14209 - DNA, 16 bp, synthetic construct
  misc_feature 1..16: note = synthetic [barcode part1]
  source 1..16: mol_type = other DNA
tctcaacctagacgtt

SEQ ID NO: 14210 - DNA, 16 bp, synthetic construct
  misc_feature 1..16: note = synthetic [barcode part1]
  source 1..16: mol_type = other DNA
tgtgacggtcttaggt

SEQ ID NO: 14211 - DNA, 16 bp, synthetic construct
  misc_feature 1..16: note = synthetic [barcode part1]
  source 1..16: mol_type = other DNA
tcctcaaccttggtct

SEQ ID NO: 14212 - DNA, 16 bp, synthetic construct
  misc_feature 1..16: note = synthetic [barcode part1]
  source 1..16: mol_type = other DNA
ttgacagaggtgtaac

SEQ ID NO: 14213 - DNA, 16 bp, synthetic construct
  misc_feature 1..16: note = synthetic [barcode part1]
  source 1..16: mol_type = other DNA
tcaaccaccaactgag

SEQ ID NO: 14214 - DNA, 16 bp, synthetic construct
  misc_feature 1..16: note = synthetic [barcode part1]
  source 1..16: mol_type = other DNA
agactacttgccagac

SEQ ID NO: 14215 - DNA, 16 bp, synthetic construct
  misc_feature 1..16: note = synthetic [barcode part1]
  source 1..16: mol_type = other DNA
cggcgcaagagtagtt

SEQ ID NO: 14216 - DNA, 16 bp, synthetic construct
  misc_feature 1..16: note = synthetic [barcode part1]
  source 1..16: mol_type = other DNA
attagtggtgagacgt

SEQ ID NO: 14217 - DNA, 16 bp, synthetic construct
  misc_feature 1..16: note = synthetic [barcode part1]
  source 1..16: mol_type = other DNA
gtgagtggcaatattg

SEQ ID NO: 14218 - DNA, 16 bp, synthetic construct
  misc_feature 1..16: note = synthetic [barcode part1]
  source 1..16: mol_type = other DNA
atcggacgacgatctt

SEQ ID NO: 14219 - DNA, 16 bp, synthetic construct
  misc_feature 1..16: note = synthetic [barcode part1]
  source 1..16: mol_type = other DNA
attccgatctcctctg

SEQ ID NO: 14220 - DNA, 16 bp, synthetic construct
  misc_feature 1..16: note = synthetic [barcode part1]
  source 1..16: mol_type = other DNA
cactactgtccggact

SEQ ID NO: 14221 - DNA, 16 bp, synthetic construct
  misc_feature 1..16: note = synthetic [barcode part1]
  source 1..16: mol_type = other DNA
aggtgtgaattgtcag

SEQ ID NO: 14222 - DNA, 16 bp, synthetic construct
  misc_feature 1..16: note = synthetic [barcode part1]
  source 1..16: mol_type = other DNA
ttatccgacagtgtct

SEQ ID NO: 14223 - DNA, 16 bp, synthetic construct
  misc_feature 1..16: note = synthetic [barcode part1]
  source 1..16: mol_type = other DNA
acctccaactcagtgc

SEQ ID NO: 14224 - DNA, 16 bp, synthetic construct
  misc_feature 1..16: note = synthetic [barcode part1]
  source 1..16: mol_type = other DNA
tctacgttgcactcct

SEQ ID NO: 14225 - DNA, 16 bp, synthetic construct
  misc_feature 1..16: note = synthetic [barcode part1]
  source 1..16: mol_type = other DNA
agttattgacggtccg

SEQ ID NO: 14226 - DNA, 16 bp, synthetic construct
  misc_feature 1..16: note = synthetic [barcode part1]
  source 1..16: mol_type = other DNA
gcgtcctccgacaatt

SEQ ID NO: 14227 - DNA, 16 bp, synthetic construct
  misc_feature 1..16: note = synthetic [barcode part1]
  source 1..16: mol_type = other DNA
ttgaagaccggcacag

SEQ ID NO: 14228 - DNA, 16 bp, synthetic construct
  misc_feature 1..16: note = synthetic [barcode part1]
  source 1..16: mol_type = other DNA
aatctgcgaacaacag

SEQ ID NO: 14229 - DNA, 16 bp, synthetic construct
  misc_feature 1..16: note = synthetic [barcode part1]
  source 1..16: mol_type = other DNA
gcgtataactgaccac

SEQ ID NO: 14230 - DNA, 16 bp, synthetic construct
  misc_feature 1..16: note = synthetic [barcode part1]
  source 1..16: mol_type = other DNA
gtagtggttcgacttg

SEQ ID NO: 14231 - DNA, 16 bp, synthetic construct
  misc_feature 1..16: note = synthetic [barcode part1]
  source 1..16: mol_type = other DNA
atctccgataatccac

SEQ ID NO: 14232 - DNA, 16 bp, synthetic construct
  misc_feature 1..16: note = synthetic [barcode part1]
  source 1..16: mol_type = other DNA
caagtatcacgccagt

SEQ ID NO: 14233 - DNA, 16 bp, synthetic construct
  misc_feature 1..16: note = synthetic [barcode part1]
  source 1..16: mol_type = other DNA
cgtgtaacttgcagac

SEQ ID NO: 14234 - DNA, 16 bp, synthetic construct
  misc_feature 1..16: note = synthetic [barcode part1]
  source 1..16: mol_type = other DNA
cgcacactgtgtatag

SEQ ID NO: 14235 - DNA, 16 bp, synthetic construct
  misc_feature 1..16: note = synthetic [barcode part1]
  source 1..16: mol_type = other DNA
cggaggatagtcgtgt

SEQ ID NO: 14236 - DNA, 16 bp, synthetic construct
  misc_feature 1..16: note = synthetic [barcode part1]
  source 1..16: mol_type = other DNA
aggtggatccgagatc

SEQ ID NO: 14237 - DNA, 16 bp, synthetic construct
  misc_feature 1..16: note = synthetic [barcode part1]
  source 1..16: mol_type = other DNA
ccgcacacctcttaag

SEQ ID NO: 14238 - DNA, 16 bp, synthetic construct
  misc_feature 1..16: note = synthetic [barcode part1]
  source 1..16: mol_type = other DNA
aaggcgacctattacc

SEQ ID NO: 14239 - DNA, 16 bp, synthetic construct
  misc_feature 1..16: note = synthetic [barcode part1]
  source 1..16: mol_type = other DNA
gactgagtgccagtag

SEQ ID NO: 14240 - DNA, 16 bp, synthetic construct
  misc_feature 1..16: note = synthetic [barcode part1]
  source 1..16: mol_type = other DNA
cagatcaatactctcc

SEQ ID NO: 14241 - DNA, 16 bp, synthetic construct
  misc_feature 1..16: note = synthetic [barcode part1]
  source 1..16: mol_type = other DNA
ttcgagactaaccgac

SEQ ID NO: 14242 - DNA, 16 bp, synthetic construct
  misc_feature 1..16: note = synthetic [barcode part1]
  source 1..16: mol_type = other DNA
aatcgacgcgtgtatc

SEQ ID NO: 14243 - DNA, 16 bp, synthetic construct
  misc_feature 1..16: note = synthetic [barcode part1]
  source 1..16: mol_type = other DNA
cgatcggcaatactac

SEQ ID NO: 14244 - DNA, 16 bp, synthetic construct
  misc_feature 1..16: note = synthetic [barcode part1]
  source 1..16: mol_type = other DNA
tctctaagtatcggtc

SEQ ID NO: 14245 - DNA, 16 bp, synthetic construct
  misc_feature 1..16: note = synthetic [barcode part1]
  source 1..16: mol_type = other DNA
tccaattgccggtgtc

SEQ ID NO: 14246 - DNA, 16 bp, synthetic construct
  misc_feature 1..16: note = synthetic [barcode part1]
  source 1..16: mol_type = other DNA
gaacaccttcactgtt

SEQ ID NO: 14247 - DNA, 16 bp, synthetic construct
  misc_feature 1..16: note = synthetic [barcode part1]
  source 1..16: mol_type = other DNA
cgtcggtccttctaag

SEQ ID NO: 14248 - DNA, 16 bp, synthetic construct
  misc_feature 1..16: note = synthetic [barcode part1]
  source 1..16: mol_type = other DNA
aaggagttactggtgt

SEQ ID NO: 14249 - DNA, 16 bp, synthetic construct
  misc_feature 1..16: note = synthetic [barcode part1]
  source 1..16: mol_type = other DNA
atcagtgtccgacctc

SEQ ID NO: 14250 - DNA, 16 bp, synthetic construct
  misc_feature 1..16: note = synthetic [barcode part1]
  source 1..16: mol_type = other DNA
aacggacagtaggtag

SEQ ID NO: 14251 - DNA, 16 bp, synthetic construct
  misc_feature 1..16: note = synthetic [barcode part1]
  source 1..16: mol_type = other DNA
taaggatccacactcg

SEQ ID NO: 14252 - DNA, 16 bp, synthetic construct
  misc_feature 1..16: note = synthetic [barcode part1]
  source 1..16: mol_type = other DNA
taccaggcggaagtgt

SEQ ID NO: 14253 - DNA, 16 bp, synthetic construct
  misc_feature 1..16: note = synthetic [barcode part1]
  source 1..16: mol_type = other DNA
tgatcaggactagtcc

SEQ ID NO: 14254 - DNA, 16 bp, synthetic construct
  misc_feature 1..16: note = synthetic [barcode part1]
  source 1..16: mol_type = other DNA
aggtgagagacctcac

SEQ ID NO: 14255 - DNA, 16 bp, synthetic construct
  misc_feature 1..16: note = synthetic [barcode part1]
  source 1..16: mol_type = other DNA
ccgttgcaacaaggtt

SEQ ID NO: 14256 - DNA, 16 bp, synthetic construct
  misc_feature 1..16: note = synthetic [barcode part1]
  source 1..16: mol_type = other DNA
ttgaggtgagtctcac

SEQ ID NO: 14257 - DNA, 16 bp, synthetic construct
  misc_feature 1..16: note = synthetic [barcode part1]
  source 1..16: mol_type = other DNA
actaagaggccagaag

SEQ ID NO: 14258 - DNA, 16 bp, synthetic construct
  misc_feature 1..16: note = synthetic [barcode part1]
  source 1..16: mol_type = other DNA
cctagaaccaaccaac

SEQ ID NO: 14259 - DNA, 16 bp, synthetic construct
  misc_feature 1..16: note = synthetic [barcode part1]
  source 1..16: mol_type = other DNA
tctcacggtataggac

SEQ ID NO: 14260 - DNA, 16 bp, synthetic construct
  misc_feature 1..16: note = synthetic [barcode part1]
  source 1..16: mol_type = other DNA
tattggcggtcttccg

SEQ ID NO: 14261 - DNA, 16 bp, synthetic construct
  misc_feature 1..16: note = synthetic [barcode part1]
  source 1..16: mol_type = other DNA
ttggtccagacgttcc

SEQ ID NO: 14262 - DNA, 16 bp, synthetic construct
  misc_feature 1..16: note = synthetic [barcode part1]
  source 1..16: mol_type = other DNA
tgtcggattcgtgcct

SEQ ID NO: 14263 - DNA, 16 bp, synthetic construct
  misc_feature 1..16: note = synthetic [barcode part1]
  source 1..16: mol_type = other DNA
gtctcctgcacgttag

SEQ ID NO: 14264 - DNA, 16 bp, synthetic construct
  misc_feature 1..16: note = synthetic [barcode part1]
  source 1..16: mol_type = other DNA
taggacgcggattcag

SEQ ID NO: 14265 - DNA, 16 bp, synthetic construct
  misc_feature 1..16: note = synthetic [barcode part1]
  source 1..16: mol_type = other DNA
gcagaagtccttacac

SEQ ID NO: 14266 - DNA, 16 bp, synthetic construct
  misc_feature 1..16: note = synthetic [barcode part1]
  source 1..16: mol_type = other DNA
tcttcggattgacgcc

SEQ ID NO: 14267 - DNA, 16 bp, synthetic construct
  misc_feature 1..16: note = synthetic [barcode part1]
  source 1..16: mol_type = other DNA
agtcagtcaaccaacc

SEQ ID NO: 14268 - DNA, 16 bp, synthetic construct
  misc_feature 1..16: note = synthetic [barcode part1]
  source 1..16: mol_type = other DNA
ttgaggcggacggatt

SEQ ID NO: 14269 - DNA, 16 bp, synthetic construct
  misc_feature 1..16: note = synthetic [barcode part1]
  source 1..16: mol_type = other DNA
tagtgaaggcaagacg

SEQ ID NO: 14270 - DNA, 16 bp, synthetic construct
  misc_feature 1..16: note = synthetic [barcode part1]
  source 1..16: mol_type = other DNA
tcttcgcaggtcactg

SEQ ID NO: 14271 - DNA, 16 bp, synthetic construct
  misc_feature 1..16: note = synthetic [barcode part1]
  source 1..16: mol_type = other DNA
tggactgcacaggagt

SEQ ID NO: 14272 - DNA, 16 bp, synthetic construct
  misc_feature 1..16: note = synthetic [barcode part1]
  source 1..16: mol_type = other DNA
gagtatccgaacgttc

SEQ ID NO: 14273 - DNA, 16 bp, synthetic construct
  misc_feature 1..16: note = synthetic [barcode part1]
  source 1..16: mol_type = other DNA
ttgcgtaggagaaccg

SEQ ID NO: 14274 - DNA, 16 bp, synthetic construct
  misc_feature 1..16: note = synthetic [barcode part1]
  source 1..16: mol_type = other DNA
tgaccaacacagtacc

SEQ ID NO: 14275 - DNA, 16 bp, synthetic construct
  misc_feature 1..16: note = synthetic [barcode part1]
  source 1..16: mol_type = other DNA
aggtggaagtgtcgtc

SEQ ID NO: 14276 - DNA, 16 bp, synthetic construct
  misc_feature 1..16: note = synthetic [barcode part1]
  source 1..16: mol_type = other DNA
tcgttacgaacgacgt

SEQ ID NO: 14277 - DNA, 16 bp, synthetic construct
  misc_feature 1..16: note = synthetic [barcode part1]
  source 1..16: mol_type = other DNA
gattaagtcactgccg

SEQ ID NO: 14278 - DNA, 16 bp, synthetic construct
  misc_feature 1..16: note = synthetic [barcode part1]
  source 1..16: mol_type = other DNA
tgttggagaactgtcc

SEQ ID NO: 14279 - DNA, 16 bp, synthetic construct
  misc_feature 1..16: note = synthetic [barcode part1]
  source 1..16: mol_type = other DNA
tctctaactggtctcc

SEQ ID NO: 14280 - DNA, 16 bp, synthetic construct
  misc_feature 1..16: note = synthetic [barcode part1]
  source 1..16: mol_type = other DNA
tagtcaaccgactggt

SEQ ID NO: 14281 - DNA, 16 bp, synthetic construct
  misc_feature 1..16: note = synthetic [barcode part1]
  source 1..16: mol_type = other DNA
aggttgtctcggtaac

SEQ ID NO: 14282 - DNA, 16 bp, synthetic construct
  misc_feature 1..16: note = synthetic [barcode part1]
  source 1..16: mol_type = other DNA
accaggtcaccttcgt

SEQ ID NO: 14283 - DNA, 16 bp, synthetic construct
  misc_feature 1..16: note = synthetic [barcode part1]
  source 1..16: mol_type = other DNA
tgcgcgtatcaactag

SEQ ID NO: 14284 - DNA, 16 bp, synthetic construct
  misc_feature 1..16: note = synthetic [barcode part1]
  source 1..16: mol_type = other DNA
aagacggcgttatctc

SEQ ID NO: 14285 - DNA, 16 bp, synthetic construct
  misc_feature 1..16: note = synthetic [barcode part1]
  source 1..16: mol_type = other DNA
taagttattccacgcc

SEQ ID NO: 14286 - DNA, 16 bp, synthetic construct
  misc_feature 1..16: note = synthetic [barcode part1]
  source 1..16: mol_type = other DNA
cctagtaacctccacg

SEQ ID NO: 14287 - DNA, 16 bp, synthetic construct
  misc_feature 1..16: note = synthetic [barcode part1]
  source 1..16: mol_type = other DNA
tctgtattcctgcgtc

SEQ ID NO: 14288 - DNA, 16 bp, synthetic construct
  misc_feature 1..16: note = synthetic [barcode part1]
  source 1..16: mol_type = other DNA
accacttgtgaatcct

SEQ ID NO: 14289 - DNA, 16 bp, synthetic construct
  misc_feature 1..16: note = synthetic [barcode part1]
  source 1..16: mol_type = other DNA
gcgttctatcgtcgac

SEQ ID NO: 14290 - DNA, 16 bp, synthetic construct
  misc_feature 1..16: note = synthetic [barcode part1]
  source 1..16: mol_type = other DNA
ttagtaacaggagtgc

SEQ ID NO: 14291 - DNA, 16 bp, synthetic construct
  misc_feature 1..16: note = synthetic [barcode part1]
  source 1..16: mol_type = other DNA
tggagagaactccttc

SEQ ID NO: 14292 - DNA, 16 bp, synthetic construct
  misc_feature 1..16: note = synthetic [barcode part1]
  source 1..16: mol_type = other DNA
ccaggataacgtcgtt

SEQ ID NO: 14293 - DNA, 16 bp, synthetic construct
  misc_feature 1..16: note = synthetic [barcode part1]
  source 1..16: mol_type = other DNA
ttgttcgcactcgtct

SEQ ID NO: 14294 - DNA, 16 bp, synthetic construct
  misc_feature 1..16: note = synthetic [barcode part1]
  source 1..16: mol_type = other DNA
attggcactgttatcc

SEQ ID NO: 14295 - DNA, 16 bp, synthetic construct
  misc_feature 1..16: note = synthetic [barcode part1]
  source 1..16: mol_type = other DNA
agagacgtaaggacac

SEQ ID NO: 14296 - DNA, 16 bp, synthetic construct
  misc_feature 1..16: note = synthetic [barcode part1]
  source 1..16: mol_type = other DNA
cgcaagacaactcgag

SEQ ID NO: 14297 - DNA, 16 bp, synthetic construct
  misc_feature 1..16: note = synthetic [barcode part1]
  source 1..16: mol_type = other DNA
gcctacgatcgttctg

SEQ ID NO: 14298 - DNA, 16 bp, synthetic construct
  misc_feature 1..16: note = synthetic [barcode part1]
  source 1..16: mol_type = other DNA
gcagttgttcttcagt

SEQ ID NO: 14299 - DNA, 16 bp, synthetic construct
  misc_feature 1..16: note = synthetic [barcode part1]
  source 1..16: mol_type = other DNA
gaggtgtaccaccaag

SEQ ID NO: 14300 - DNA, 16 bp, synthetic construct
  misc_feature 1..16: note = synthetic [barcode part1]
  source 1..16: mol_type = other DNA
tagtggcgacctagtt

SEQ ID NO: 14301 - DNA, 16 bp, synthetic construct
  misc_feature 1..16: note = synthetic [barcode part1]
  source 1..16: mol_type = other DNA
tcttggtcgcggatct

SEQ ID NO: 14302 - DNA, 16 bp, synthetic construct
  misc_feature 1..16: note = synthetic [barcode part1]
  source 1..16: mol_type = other DNA
taggcacaatcgcgtt

SEQ ID NO: 14303 - DNA, 16 bp, synthetic construct
  misc_feature 1..16: note = synthetic [barcode part1]
  source 1..16: mol_type = other DNA
gagtctactcgactcc

SEQ ID NO: 14304 - DNA, 16 bp, synthetic construct
  misc_feature 1..16: note = synthetic [barcode part1]
  source 1..16: mol_type = other DNA
agtctcaggacagacg

SEQ ID NO: 14305 - DNA, 16 bp, synthetic construct
  misc_feature 1..16: note = synthetic [barcode part1]
  source 1..16: mol_type = other DNA
ttattcagtgacgcct

SEQ ID NO: 14306 - DNA, 16 bp, synthetic construct
  misc_feature 1..16: note = synthetic [barcode part1]
  source 1..16: mol_type = other DNA
tgtaggtgacacttgc

SEQ ID NO: 14307 - DNA, 16 bp, synthetic construct
  misc_feature 1..16: note = synthetic [barcode part1]
  source 1..16: mol_type = other DNA
gtatacgcagtcaacc

SEQ ID NO: 14308 - DNA, 16 bp, synthetic construct
  misc_feature 1..16: note = synthetic [barcode part1]
  source 1..16: mol_type = other DNA
agaagacgaacgttct

SEQ ID NO: 14309 - DNA, 16 bp, synthetic construct
  misc_feature 1..16: note = synthetic [barcode part1]
  source 1..16: mol_type = other DNA
gaccgtagtgtatcgt

SEQ ID NO: 14310 - DNA, 16 bp, synthetic construct
  misc_feature 1..16: note = synthetic [barcode part1]
  source 1..16: mol_type = other DNA
atccaagtcgcgaatc

SEQ ID NO: 14311 - DNA, 16 bp, synthetic construct
  misc_feature 1..16: note = synthetic [barcode part1]
  source 1..16: mol_type = other DNA
tacgtctcggaccgtt

SEQ ID NO: 14312 - DNA, 16 bp, synthetic construct
  misc_feature 1..16: note = synthetic [barcode part1]
  source 1..16: mol_type = other DNA
tcggatagtctacgac

SEQ ID NO: 14313 - DNA, 16 bp, synthetic construct
  misc_feature 1..16: note = synthetic [barcode part1]
  source 1..16: mol_type = other DNA
cggtcttcgtaattac

SEQ ID NO: 14314 - DNA, 16 bp, synthetic construct
  misc_feature 1..16: note = synthetic [barcode part1]
  source 1..16: mol_type = other DNA
gcaatactggccaatc

SEQ ID NO: 14315 - DNA, 16 bp, synthetic construct
  misc_feature 1..16: note = synthetic [barcode part1]
  source 1..16: mol_type = other DNA
cctattgccttcgact

SEQ ID NO: 14316 - DNA, 16 bp, synthetic construct
  misc_feature 1..16: note = synthetic [barcode part1]
  source 1..16: mol_type = other DNA
tgtcagttgacacgtg

SEQ ID NO: 14317 - DNA, 16 bp, synthetic construct
  misc_feature 1..16: note = synthetic [barcode part1]
  source 1..16: mol_type = other DNA
tcggagtgcctacctt

SEQ ID NO: 14318 - DNA, 16 bp, synthetic construct
  misc_feature 1..16: note = synthetic [barcode part1]
  source 1..16: mol_type = other DNA
ccaggaatctcgttag

SEQ ID NO: 14319 - DNA, 16 bp, synthetic construct
  misc_feature 1..16: note = synthetic [barcode part1]
  source 1..16: mol_type = other DNA
gagtgacacacagtcg

SEQ ID NO: 14320 - DNA, 16 bp, synthetic construct
  misc_feature 1..16: note = synthetic [barcode part1]
  source 1..16: mol_type = other DNA
tggccggtataacgtt

SEQ ID NO: 14321 - DNA, 16 bp, synthetic construct
  misc_feature 1..16: note = synthetic [barcode part1]
  source 1..16: mol_type = other DNA
gtcacagacttcaggt

SEQ ID NO: 14322 - DNA, 16 bp, synthetic construct
  misc_feature 1..16: note = synthetic [barcode part1]
  source 1..16: mol_type = other DNA
ccgtcagtataagaag

SEQ ID NO: 14323 - DNA, 16 bp, synthetic construct
  misc_feature 1..16: note = synthetic [barcode part1]
  source 1..16: mol_type = other DNA
gatcagtgatcagtcc

SEQ ID NO: 14324 - DNA, 16 bp, synthetic construct
  misc_feature 1..16: note = synthetic [barcode part1]
  source 1..16: mol_type = other DNA
tgacggttgatccagt

SEQ ID NO: 14325 - DNA, 16 bp, synthetic construct
  misc_feature 1..16: note = synthetic [barcode part1]
  source 1..16: mol_type = other DNA
acaggttcctccaacc

SEQ ID NO: 14326 - DNA, 16 bp, synthetic construct
  misc_feature 1..16: note = synthetic [barcode part1]
  source 1..16: mol_type = other DNA
taccaaggaacacaac

SEQ ID NO: 14327 - DNA, 16 bp, synthetic construct
  misc_feature 1..16: note = synthetic [barcode part1]
  source 1..16: mol_type = other DNA
ccagtggcaggaatac

SEQ ID NO: 14328 - DNA, 16 bp, synthetic construct
  misc_feature 1..16: note = synthetic [barcode part1]
  source 1..16: mol_type = other DNA
acgtactggtacgttg

SEQ ID NO: 14329 - DNA, 16 bp, synthetic construct
  misc_feature 1..16: note = synthetic [barcode part1]
  source 1..16: mol_type = other DNA
ttgcacacagtcacag

SEQ ID NO: 14330 - DNA, 16 bp, synthetic construct
  misc_feature 1..16: note = synthetic [barcode part1]
  source 1..16: mol_type = other DNA
cctctaagtcggcgtt

SEQ ID NO: 14331 - DNA, 16 bp, synthetic construct
  misc_feature 1..16: note = synthetic [barcode part1]
  source 1..16: mol_type = other DNA
acttgtgcgtaagtcg

SEQ ID NO: 14332 - DNA, 16 bp, synthetic construct
  misc_feature 1..16: note = synthetic [barcode part1]
  source 1..16: mol_type = other DNA
gtactcacctaccacg

SEQ ID NO: 14333 - DNA, 16 bp, synthetic construct
  misc_feature 1..16: note = synthetic [barcode part1]
  source 1..16: mol_type = other DNA
acgaatacaagacctg

SEQ ID NO: 14334 - DNA, 16 bp, synthetic construct
  misc_feature 1..16: note = synthetic [barcode part1]
  source 1..16: mol_type = other DNA
attgcggtgcctgtct

SEQ ID NO: 14335 - DNA, 16 bp, synthetic construct
  misc_feature 1..16: note = synthetic [barcode part1]
  source 1..16: mol_type = other DNA
cacaactgccaaggag

SEQ ID NO: 14336 - DNA, 16 bp, synthetic construct
  misc_feature 1..16: note = synthetic [barcode part1]
  source 1..16: mol_type = other DNA
tgaccgagattgacct

SEQ ID NO: 14337 - DNA, 16 bp, synthetic construct
  misc_feature 1..16: note = synthetic [barcode part1]
  source 1..16: mol_type = other DNA
acgttagaccgtctcc

SEQ ID NO: 14338 - DNA, 16 bp, synthetic construct
  misc_feature 1..16: note = synthetic [barcode part1]
  source 1..16: mol_type = other DNA
tgcgtgacgtcttatt

SEQ ID NO: 14339 - DNA, 16 bp, synthetic construct
  misc_feature 1..16: note = synthetic [barcode part1]
  source 1..16: mol_type = other DNA
taacctggcaacctag

SEQ ID NO: 14340 - DNA, 16 bp, synthetic construct
  misc_feature 1..16: note = synthetic [barcode part1]
  source 1..16: mol_type = other DNA
aacggtcgtgccttct

SEQ ID NO: 14341 - DNA, 16 bp, synthetic construct
  misc_feature 1..16: note = synthetic [barcode part1]
  source 1..16: mol_type = other DNA
acggattcggtaggac

SEQ ID NO: 14342 - DNA, 16 bp, synthetic construct
  misc_feature 1..16: note = synthetic [barcode part1]
  source 1..16: mol_type = other DNA
ccttaagtctggagtg

SEQ ID NO: 14343 - DNA, 16 bp, synthetic construct
  misc_feature 1..16: note = synthetic [barcode part1]
  source 1..16: mol_type = other DNA
gaacggttgatcttcg

SEQ ID NO: 14344 - DNA, 16 bp, synthetic construct
  misc_feature 1..16: note = synthetic [barcode part1]
  source 1..16: mol_type = other DNA
ttctgtgcgatagtct

SEQ ID NO: 14345 - DNA, 16 bp, synthetic construct
  misc_feature 1..16: note = synthetic [barcode part1]
  source 1..16: mol_type = other DNA
atatcctctggcgacc

SEQ ID NO: 14346 - DNA, 16 bp, synthetic construct
  misc_feature 1..16: note = synthetic [barcode part1]
  source 1..16: mol_type = other DNA
cagaagaatcgacgtt

SEQ ID NO: 14347 - DNA, 16 bp, synthetic construct
  misc_feature 1..16: note = synthetic [barcode part1]
  source 1..16: mol_type = other DNA
tgttaggacgaggacc

SEQ ID NO: 14348 - DNA, 16 bp, synthetic construct
  misc_feature 1..16: note = synthetic [barcode part1]
  source 1..16: mol_type = other DNA
tgtaacggacagatac

SEQ ID NO: 14349 - DNA, 16 bp, synthetic construct
  misc_feature 1..16: note = synthetic [barcode part1]
  source 1..16: mol_type = other DNA
ccgttcgaagtaggtt

SEQ ID NO: 14350 - DNA, 16 bp, synthetic construct
  misc_feature 1..16: note = synthetic [barcode part1]
  source 1..16: mol_type = other DNA
ttgacagattcggtgc

SEQ ID NO: 14351 - DNA, 16 bp, synthetic construct
  misc_feature 1..16: note = synthetic [barcode part1]
  source 1..16: mol_type = other DNA
tgcgagttctaggtgt

SEQ ID NO: 14352 - DNA, 16 bp, synthetic construct
  misc_feature 1..16: note = synthetic [barcode part1]
  source 1..16: mol_type = other DNA
ttggtgaagacacaac

SEQ ID NO: 14353 - DNA, 16 bp, synthetic construct
  misc_feature 1..16: note = synthetic [barcode part1]
  source 1..16: mol_type = other DNA
cctatattcgaatcgc

SEQ ID NO: 14354 - DNA, 16 bp, synthetic construct
  misc_feature 1..16: note = synthetic [barcode part1]
  source 1..16: mol_type = other DNA
tcaggagttggcacag

SEQ ID NO: 14355 - DNA, 16 bp, synthetic construct
  misc_feature 1..16: note = synthetic [barcode part1]
  source 1..16: mol_type = other DNA
gagacctcactgtagt

SEQ ID NO: 14356 - DNA, 16 bp, synthetic construct
  misc_feature 1..16: note = synthetic [barcode part1]
  source 1..16: mol_type = other DNA
taacggtccttcgtgc

SEQ ID NO: 14357 - DNA, 16 bp, synthetic construct
  misc_feature 1..16: note = synthetic [barcode part1]
  source 1..16: mol_type = other DNA
caaccgcgataacgag

SEQ ID NO: 14358 - DNA, 16 bp, synthetic construct
  misc_feature 1..16: note = synthetic [barcode part1]
  source 1..16: mol_type = other DNA
tgttcttccggcagtg

SEQ ID NO: 14359 - DNA, 16 bp, synthetic construct
  misc_feature 1..16: note = synthetic [barcode part1]
  source 1..16: mol_type = other DNA
gtcaatcttgagaccg

SEQ ID NO: 14360 - DNA, 16 bp, synthetic construct
  misc_feature 1..16: note = synthetic [barcode part1]
  source 1..16: mol_type = other DNA
tgaacacagtcgtacc

SEQ ID NO: 14361 - DNA, 16 bp, synthetic construct
  misc_feature 1..16: note = synthetic [barcode part1]
  source 1..16: mol_type = other DNA
aaggtcggcacgattg

SEQ ID NO: 14362 - DNA, 16 bp, synthetic construct
  misc_feature 1..16: note = synthetic [barcode part1]
  source 1..16: mol_type = other DNA
acacgttgatagtgag

SEQ ID NO: 14363 - DNA, 16 bp, synthetic construct
  misc_feature 1..16: note = synthetic [barcode part1]
  source 1..16: mol_type = other DNA
cgaacacgatctgtgt

SEQ ID NO: 14364 - DNA, 16 bp, synthetic construct
  misc_feature 1..16: note = synthetic [barcode part1]
  source 1..16: mol_type = other DNA
gttcttactcgcactc

SEQ ID NO: 14365 - DNA, 16 bp, synthetic construct
  misc_feature 1..16: note = synthetic [barcode part1]
  source 1..16: mol_type = other DNA
gcagtattgcgatacc

SEQ ID NO: 14366 - DNA, 16 bp, synthetic construct
  misc_feature 1..16: note = synthetic [barcode part1]
  source 1..16: mol_type = other DNA
acggtataaggaggac

SEQ ID NO: 14367 - DNA, 16 bp, synthetic construct
  misc_feature 1..16: note = synthetic [barcode part1]
  source 1..16: mol_type = other DNA
ttgacggaagtcacct

SEQ ID NO: 14368 - DNA, 16 bp, synthetic construct
  misc_feature 1..16: note = synthetic [barcode part1]
  source 1..16: mol_type = other DNA
cgagtcacaacagtct

SEQ ID NO: 14369 - DNA, 16 bp, synthetic construct
  misc_feature 1..16: note = synthetic [barcode part1]
  source 1..16: mol_type = other DNA
gcaggtaagtgttgcg

SEQ ID NO: 14370 - DNA, 16 bp, synthetic construct
  misc_feature 1..16: note = synthetic [barcode part1]
  source 1..16: mol_type = other DNA
atcagactactcctac

SEQ ID NO: 14371 - DNA, 16 bp, synthetic construct
  misc_feature 1..16: note = synthetic [barcode part1]
  source 1..16: mol_type = other DNA
taaccgtacgactacg

SEQ ID NO: 14372 - DNA, 16 bp, synthetic construct
  misc_feature 1..16: note = synthetic [barcode part1]
  source 1..16: mol_type = other DNA
ttcttccgaagtctcc

SEQ ID NO: 14373 - DNA, 16 bp, synthetic construct
  misc_feature 1..16: note = synthetic [barcode part1]
  source 1..16: mol_type = other DNA
tacacacggagttctg

SEQ ID NO: 14374 - DNA, 16 bp, synthetic construct
  misc_feature 1..16: note = synthetic [barcode part1]
  source 1..16: mol_type = other DNA
cagtagtggtctagtc

SEQ ID NO: 14375 - DNA, 16 bp, synthetic construct
  misc_feature 1..16: note = synthetic [barcode part1]
  source 1..16: mol_type = other DNA
gtactggtgatagagt

SEQ ID NO: 14376 - DNA, 16 bp, synthetic construct
  misc_feature 1..16: note = synthetic [barcode part1]
  source 1..16: mol_type = other DNA
actagtcggccaattg

SEQ ID NO: 14377 - DNA, 16 bp, synthetic construct
  misc_feature 1..16: note = synthetic [barcode part1]
  source 1..16: mol_type = other DNA
taccaacttctaaccg

SEQ ID NO: 14378 - DNA, 16 bp, synthetic construct
  misc_feature 1..16: note = synthetic [barcode part1]
  source 1..16: mol_type = other DNA
caaccgaaggacttct

SEQ ID NO: 14379 - DNA, 16 bp, synthetic construct
  misc_feature 1..16: note = synthetic [barcode part1]
  source 1..16: mol_type = other DNA
tcctccttctcgaagt

SEQ ID NO: 14380 - DNA, 16 bp, synthetic construct
  misc_feature 1..16: note = synthetic [barcode part1]
  source 1..16: mol_type = other DNA
gtatccttctcgcgtt

SEQ ID NO: 14381 - DNA, 16 bp, synthetic construct
  misc_feature 1..16: note = synthetic [barcode part1]
  source 1..16: mol_type = other DNA
ccagataagtagaacc

SEQ ID NO: 14382 - DNA, 16 bp, synthetic construct
  misc_feature 1..16: note = synthetic [barcode part1]
  source 1..16: mol_type = other DNA
gaagaagtcctgagag

SEQ ID NO: 14383 - DNA, 16 bp, synthetic construct
  misc_feature 1..16: note = synthetic [barcode part1]
  source 1..16: mol_type = other DNA
tcgataatccgtacct

SEQ ID NO: 14384 - DNA, 16 bp, synthetic construct
  misc_feature 1..16: note = synthetic [barcode part1]
  source 1..16: mol_type = other DNA
tacctatccgtagtac

SEQ ID NO: 14385 - DNA, 16 bp, synthetic construct
  misc_feature 1..16: note = synthetic [barcode part1]
  source 1..16: mol_type = other DNA
aacactccacttcgcg

SEQ ID NO: 14386 - DNA, 16 bp, synthetic construct
  misc_feature 1..16: note = synthetic [barcode part1]
  source 1..16: mol_type = other DNA
cctgccagttacttct

SEQ ID NO: 14387 - DNA, 16 bp, synthetic construct
  misc_feature 1..16: note = synthetic [barcode part1]
  source 1..16: mol_type = other DNA
gttctcaacggaggtt

SEQ ID NO: 14388 - DNA, 16 bp, synthetic construct
  misc_feature 1..16: note = synthetic [barcode part1]
  source 1..16: mol_type = other DNA
gttccgttgttagtac

SEQ ID NO: 14389 - DNA, 16 bp, synthetic construct
  misc_feature 1..16: note = synthetic [barcode part1]
  source 1..16: mol_type = other DNA
gtggtgtacgtgtgtt

SEQ ID NO: 14390 - DNA, 16 bp, synthetic construct
  misc_feature 1..16: note = synthetic [barcode part1]
  source 1..16: mol_type = other DNA
gaggtggtagacgtct

SEQ ID NO: 14391 - DNA, 16 bp, synthetic construct
  misc_feature 1..16: note = synthetic [barcode part1]
  source 1..16: mol_type = other DNA
aaggacacgtctctgt

SEQ ID NO: 14392 - DNA, 16 bp, synthetic construct
  misc_feature 1..16: note = synthetic [barcode part1]
  source 1..16: mol_type = other DNA
ccgagataggcggatt

SEQ ID NO: 14393 - DNA, 16 bp, synthetic construct
  misc_feature 1..16: note = synthetic [barcode part1]
  source 1..16: mol_type = other DNA
ccaacaggaaccactt

SEQ ID NO: 14394 - DNA, 16 bp, synthetic construct
  misc_feature 1..16: note = synthetic [barcode part1]
  source 1..16: mol_type = other DNA
gcgcggaacaatctag

SEQ ID NO: 14395 - DNA, 16 bp, synthetic construct
  misc_feature 1..16: note = synthetic [barcode part1]
  source 1..16: mol_type = other DNA
aacctacaccttgccg

SEQ ID NO: 14396 - DNA, 16 bp, synthetic construct
  misc_feature 1..16: note = synthetic [barcode part1]
  source 1..16: mol_type = other DNA
cagtaaccgactcaac

SEQ ID NO: 14397 - DNA, 16 bp, synthetic construct
  misc_feature 1..16: note = synthetic [barcode part1]
  source 1..16: mol_type = other DNA
caattcgaacacgaag

SEQ ID NO: 14398 - DNA, 16 bp, synthetic construct
  misc_feature 1..16: note = synthetic [barcode part1]
  source 1..16: mol_type = other DNA
cacgaacgagttcact

SEQ ID NO: 14399 - DNA, 16 bp, synthetic construct
  misc_feature 1..16: note = synthetic [barcode part1]
  source 1..16: mol_type = other DNA
tgttcgtcggaattct

SEQ ID NO: 14400 - DNA, 16 bp, synthetic construct
  misc_feature 1..16: note = synthetic [barcode part1]
  source 1..16: mol_type = other DNA
ccttcaatagttgcgt

SEQ ID NO: 14401 - DNA, 16 bp, synthetic construct
  misc_feature 1..16: note = synthetic [barcode part1]
  source 1..16: mol_type = other DNA
gtggagttactcggag

SEQ ID NO: 14402 - DNA, 16 bp, synthetic construct
  misc_feature 1..16: note = synthetic [barcode part1]
  source 1..16: mol_type = other DNA
tcgtagtgtcgtagtg

SEQ ID NO: 14403 - DNA, 16 bp, synthetic construct
  misc_feature 1..16: note = synthetic [barcode part1]
  source 1..16: mol_type = other DNA
ccgtaagttgccgtct

SEQ ID NO: 14404 - DNA, 16 bp, synthetic construct
  misc_feature 1..16: note = synthetic [barcode part1]
  source 1..16: mol_type = other DNA
cgttgtcactccttac

SEQ ID NO: 14405 - DNA, 16 bp, synthetic construct
  misc_feature 1..16: note = synthetic [barcode part1]
  source 1..16: mol_type = other DNA
tcttcctcgtgtgtac

SEQ ID NO: 14406 - DNA, 16 bp, synthetic construct
  misc_feature 1..16: note = synthetic [barcode part1]
  source 1..16: mol_type = other DNA
cctaccgtgtaccagt

SEQ ID NO: 14407 - DNA, 16 bp, synthetic construct
  misc_feature 1..16: note = synthetic [barcode part1]
  source 1..16: mol_type = other DNA
actcaggtcacctcgt

SEQ ID NO: 14408 - DNA, 16 bp, synthetic construct
  misc_feature 1..16: note = synthetic [barcode part1]
  source 1..16: mol_type = other DNA
cgtacaggcaaggtgt

SEQ ID NO: 14409 - DNA, 16 bp, synthetic construct
  misc_feature 1..16: note = synthetic [barcode part1]
  source 1..16: mol_type = other DNA
gaaggcaacctaatac

SEQ ID NO: 14410 - DNA, 16 bp, synthetic construct
  misc_feature 1..16: note = synthetic [barcode part1]
  source 1..16: mol_type = other DNA
tcaggtgaacagaact

SEQ ID NO: 14411 - DNA, 16 bp, synthetic construct
  misc_feature 1..16: note = synthetic [barcode part1]
  source 1..16: mol_type = other DNA
agacttgaacacgtcc

SEQ ID NO: 14412 - DNA, 16 bp, synthetic construct
  misc_feature 1..16: note = synthetic [barcode part1]
  source 1..16: mol_type = other DNA
ttcggtcactacgtgc

SEQ ID NO: 14413 - DNA, 16 bp, synthetic construct
  misc_feature 1..16: note = synthetic [barcode part1]
  source 1..16: mol_type = other DNA
gccttctgttgtgcag

SEQ ID NO: 14414 - DNA, 16 bp, synthetic construct
  misc_feature 1..16: note = synthetic [barcode part1]
  source 1..16: mol_type = other DNA
ccagttcctacgtgac

SEQ ID NO: 14415 - DNA, 16 bp, synthetic construct
  misc_feature 1..16: note = synthetic [barcode part1]
  source 1..16: mol_type = other DNA
cgtacgaatctcttgt

SEQ ID NO: 14416 - DNA, 16 bp, synthetic construct
  misc_feature 1..16: note = synthetic [barcode part1]
  source 1..16: mol_type = other DNA
ttgcgcctaagaacgt

SEQ ID NO: 14417 - DNA, 16 bp, synthetic construct
  misc_feature 1..16: note = synthetic [barcode part1]
  source 1..16: mol_type = other DNA
cacgagtgtcctgtct

SEQ ID NO: 14418 - DNA, 16 bp, synthetic construct
  misc_feature 1..16: note = synthetic [barcode part1]
  source 1..16: mol_type = other DNA
gatacaacactagacg

SEQ ID NO: 14419 - DNA, 16 bp, synthetic construct
  misc_feature 1..16: note = synthetic [barcode part1]
  source 1..16: mol_type = other DNA
tatcgacagttaggag

SEQ ID NO: 14420 - DNA, 16 bp, synthetic construct
  misc_feature 1..16: note = synthetic [barcode part1]
  source 1..16: mol_type = other DNA
ttggtgtggccagaag

SEQ ID NO: 14421 - DNA, 16 bp, synthetic construct
  misc_feature 1..16: note = synthetic [barcode part1]
  source 1..16: mol_type = other DNA
tccaaggtgcggtatt

SEQ ID NO: 14422 - DNA, 16 bp, synthetic construct
  misc_feature 1..16: note = synthetic [barcode part1]
  source 1..16: mol_type = other DNA
ttaaggactggacgcg

SEQ ID NO: 14423 - DNA, 16 bp, synthetic construct
  misc_feature 1..16: note = synthetic [barcode part1]
  source 1..16: mol_type = other DNA
tggagacagaccgttg

SEQ ID NO: 14424 - DNA, 16 bp, synthetic construct
  misc_feature 1..16: note = synthetic [barcode part1]
  source 1..16: mol_type = other DNA
accgcagttcgttcac

SEQ ID NO: 14425 - DNA, 16 bp, synthetic construct
  misc_feature 1..16: note = synthetic [barcode part1]
  source 1..16: mol_type = other DNA
gtacgattggttgtgc

SEQ ID NO: 14426 - DNA, 16 bp, synthetic construct
  misc_feature 1..16: note = synthetic [barcode part1]
  source 1..16: mol_type = other DNA
agaccaggttacgcag

SEQ ID NO: 14427 - DNA, 16 bp, synthetic construct
  misc_feature 1..16: note = synthetic [barcode part1]
  source 1..16: mol_type = other DNA
tacttacaacggacgc

SEQ ID NO: 14428 - DNA, 16 bp, synthetic construct
  misc_feature 1..16: note = synthetic [barcode part1]
  source 1..16: mol_type = other DNA
agtagagaaggcgact

SEQ ID NO: 14429 - DNA, 16 bp, synthetic construct
  misc_feature 1..16: note = synthetic [barcode part1]
  source 1..16: mol_type = other DNA
gtgttctgactgccgt

SEQ ID NO: 14430 - DNA, 16 bp, synthetic construct
  misc_feature 1..16: note = synthetic [barcode part1]
  source 1..16: mol_type = other DNA
aagacgacgaacactt

SEQ ID NO: 14431 - DNA, 16 bp, synthetic construct
  misc_feature 1..16: note = synthetic [barcode part1]
  source 1..16: mol_type = other DNA
tcgtgatatacgcacg

SEQ ID NO: 14432 - DNA, 16 bp, synthetic construct
  misc_feature 1..16: note = synthetic [barcode part1]
  source 1..16: mol_type = other DNA
actcttaaggtgtggc

SEQ ID NO: 14433 - DNA, 16 bp, synthetic construct
  misc_feature 1..16: note = synthetic [barcode part1]
  source 1..16: mol_type = other DNA
caggtgaatctacctg

SEQ ID NO: 14434 - DNA, 16 bp, synthetic construct
  misc_feature 1..16: note = synthetic [barcode part1]
  source 1..16: mol_type = other DNA
aaggccaactagagag

SEQ ID NO: 14435 - DNA, 16 bp, synthetic construct
  misc_feature 1..16: note = synthetic [barcode part1]
  source 1..16: mol_type = other DNA
actattccgtccaggc

SEQ ID NO: 14436 - DNA, 16 bp, synthetic construct
  misc_feature 1..16: note = synthetic [barcode part1]
  source 1..16: mol_type = other DNA
gtagtaaggtgtactg

SEQ ID NO: 14437 - DNA, 16 bp, synthetic construct
  misc_feature 1..16: note = synthetic [barcode part1]
  source 1..16: mol_type = other DNA
ttgattccagactcac

SEQ ID NO: 14438 - DNA, 16 bp, synthetic construct
  misc_feature 1..16: note = synthetic [barcode part1]
  source 1..16: mol_type = other DNA
gtcgaagaatcaggag

SEQ ID NO: 14439 - DNA, 16 bp, synthetic construct
  misc_feature 1..16: note = synthetic [barcode part1]
  source 1..16: mol_type = other DNA
gcgacgtatattgcac

SEQ ID NO: 14440 - DNA, 16 bp, synthetic construct
  misc_feature 1..16: note = synthetic [barcode part1]
  source 1..16: mol_type = other DNA
cctctctgtcgtaact

SEQ ID NO: 14441 - DNA, 16 bp, synthetic construct
  misc_feature 1..16: note = synthetic [barcode part1]
  source 1..16: mol_type = other DNA
aattggagtagtcacg

SEQ ID NO: 14442 - DNA, 16 bp, synthetic construct
  misc_feature 1..16: note = synthetic [barcode part1]
  source 1..16: mol_type = other DNA
gtccacggtatagttg

SEQ ID NO: 14443 - DNA, 16 bp, synthetic construct
  misc_feature 1..16: note = synthetic [barcode part1]
  source 1..16: mol_type = other DNA
acaggcagataggtag

SEQ ID NO: 14444 - DNA, 16 bp, synthetic construct
  misc_feature 1..16: note = synthetic [barcode part1]
  source 1..16: mol_type = other DNA
tcgtaaggtctcttac

SEQ ID NO: 14445 - DNA, 16 bp, synthetic construct
  misc_feature 1..16: note = synthetic [barcode part1]
  source 1..16: mol_type = other DNA
gacgttgcacagtact

SEQ ID NO: 14446 - DNA, 16 bp, synthetic construct
  misc_feature 1..16: note = synthetic [barcode part1]
  source 1..16: mol_type = other DNA
tgacctatagagacag

SEQ ID NO: 14447 - DNA, 16 bp, synthetic construct
  misc_feature 1..16: note = synthetic [barcode part1]
  source 1..16: mol_type = other DNA
tcagacacagaacaac

SEQ ID NO: 14448 - DNA, 16 bp, synthetic construct
  misc_feature 1..16: note = synthetic [barcode part1]
  source 1..16: mol_type = other DNA
gccaagaattagtgtg

SEQ ID NO: 14449 - DNA, 16 bp, synthetic construct
  misc_feature 1..16: note = synthetic [barcode part1]
  source 1..16: mol_type = other DNA
attctcgtggatcact

SEQ ID NO: 14450 - DNA, 16 bp, synthetic construct
  misc_feature 1..16: note = synthetic [barcode part1]
  source 1..16: mol_type = other DNA
ttcctctccaggattc

SEQ ID NO: 14451 - DNA, 16 bp, synthetic construct
  misc_feature 1..16: note = synthetic [barcode part1]
  source 1..16: mol_type = other DNA
tatcactgcgaggtac

SEQ ID NO: 14452 - DNA, 16 bp, synthetic construct
  misc_feature 1..16: note = synthetic [barcode part1]
  source 1..16: mol_type = other DNA
gccacggtacctatct

SEQ ID NO: 14453 - DNA, 16 bp, synthetic construct
  misc_feature 1..16: note = synthetic [barcode part1]
  source 1..16: mol_type = other DNA
gcagattgaagactac

SEQ ID NO: 14454 - DNA, 16 bp, synthetic construct
  misc_feature 1..16: note = synthetic [barcode part1]
  source 1..16: mol_type = other DNA
tctcaatagttacgcc

SEQ ID NO: 14455 - DNA, 16 bp, synthetic construct
  misc_feature 1..16: note = synthetic [barcode part1]
  source 1..16: mol_type = other DNA
ccttacgcaacgatcc

SEQ ID NO: 14456 - DNA, 16 bp, synthetic construct
  misc_feature 1..16: note = synthetic [barcode part1]
  source 1..16: mol_type = other DNA
attggtgacaaccgtc

SEQ ID NO: 14457 - DNA, 16 bp, synthetic construct
  misc_feature 1..16: note = synthetic [barcode part1]
  source 1..16: mol_type = other DNA
tgtcaggcactggatt

SEQ ID NO: 14458 - DNA, 16 bp, synthetic construct
  misc_feature 1..16: note = synthetic [barcode part1]
  source 1..16: mol_type = other DNA
tgaagttgcgttgcgt

SEQ ID NO: 14459 - DNA, 16 bp, synthetic construct
  misc_feature 1..16: note = synthetic [barcode part1]
  source 1..16: mol_type = other DNA
ttgtgtccgttagact

SEQ ID NO: 14460 - DNA, 16 bp, synthetic construct
  misc_feature 1..16: note = synthetic [barcode part1]
  source 1..16: mol_type = other DNA
aattccgttcaggacg

SEQ ID NO: 14461 - DNA, 16 bp, synthetic construct
  misc_feature 1..16: note = synthetic [barcode part1]
  source 1..16: mol_type = other DNA
tataacgccacctgtt

SEQ ID NO: 14462 - DNA, 16 bp, synthetic construct
  misc_feature 1..16: note = synthetic [barcode part1]
  source 1..16: mol_type = other DNA
ttagtccaacgtgtct

SEQ ID NO: 14463 - DNA, 16 bp, synthetic construct
  misc_feature 1..16: note = synthetic [barcode part1]
  source 1..16: mol_type = other DNA
gagacacagtctgacg

SEQ ID NO: 14464 - DNA, 16 bp, synthetic construct
  misc_feature 1..16: note = synthetic [barcode part1]
  source 1..16: mol_type = other DNA
taggcgtcttctagtt

SEQ ID NO: 14465 - DNA, 16 bp, synthetic construct
  misc_feature 1..16: note = synthetic [barcode part1]
  source 1..16: mol_type = other DNA
atcaagtcggaccact

SEQ ID NO: 14466 - DNA, 16 bp, synthetic construct
  misc_feature 1..16: note = synthetic [barcode part1]
  source 1..16: mol_type = other DNA
acagtgtgttgaccac

SEQ ID NO: 14467 - DNA, 16 bp, synthetic construct
  misc_feature 1..16: note = synthetic [barcode part1]
  source 1..16: mol_type = other DNA
tagtcactcgtgcaag

SEQ ID NO: 14468 - DNA, 16 bp, synthetic construct
  misc_feature 1..16: note = synthetic [barcode part1]
  source 1..16: mol_type = other DNA
taaccgacggtatcac

SEQ ID NO: 14469 - DNA, 16 bp, synthetic construct
  misc_feature 1..16: note = synthetic [barcode part1]
  source 1..16: mol_type = other DNA
tgtgtccgagttgtcc

SEQ ID NO: 14470 - DNA, 16 bp, synthetic construct
  misc_feature 1..16: note = synthetic [barcode part1]
  source 1..16: mol_type = other DNA
ccggataacggcaagt

SEQ ID NO: 14471 - DNA, 16 bp, synthetic construct
  misc_feature 1..16: note = synthetic [barcode part1]
  source 1..16: mol_type = other DNA
ttgaagaacgtgactg

SEQ ID NO: 14472 - DNA, 16 bp, synthetic construct
  misc_feature 1..16: note = synthetic [barcode part1]
  source 1..16: mol_type = other DNA
gttgaatcttgtgcct

SEQ ID NO: 14473 - DNA, 16 bp, synthetic construct
  misc_feature 1..16: note = synthetic [barcode part1]
  source 1..16: mol_type = other DNA
tactggtactgacgtg

SEQ ID NO: 14474 - DNA, 16 bp, synthetic construct
  misc_feature 1..16: note = synthetic [barcode part1]
  source 1..16: mol_type = other DNA
acagagacgacctggt

SEQ ID NO: 14475 - DNA, 16 bp, synthetic construct
  misc_feature 1..16: note = synthetic [barcode part1]
  source 1..16: mol_type = other DNA
gtgcaccttaccactg

SEQ ID NO: 14476 - DNA, 16 bp, synthetic construct
  misc_feature 1..16: note = synthetic [barcode part1]
  source 1..16: mol_type = other DNA
taaccttactagtgcc

SEQ ID NO: 14477 - DNA, 16 bp, synthetic construct
  misc_feature 1..16: note = synthetic [barcode part1]
  source 1..16: mol_type = other DNA
tgtgttctccagtagt

SEQ ID NO: 14478 - DNA, 16 bp, synthetic construct
  misc_feature 1..16: note = synthetic [barcode part1]
  source 1..16: mol_type = other DNA
tgcgaacgcaagtctt

SEQ ID NO: 14479 - DNA, 16 bp, synthetic construct
  misc_feature 1..16: note = synthetic [barcode part1]
  source 1..16: mol_type = other DNA
acacttccgtgttcct

SEQ ID NO: 14480 - DNA, 16 bp, synthetic construct
  misc_feature 1..16: note = synthetic [barcode part1]
  source 1..16: mol_type = other DNA
ttccgacaatcgtgcc

SEQ ID NO: 14481 - DNA, 16 bp, synthetic construct
  misc_feature 1..16: note = synthetic [barcode part1]
  source 1..16: mol_type = other DNA
aacctgtcctactgcg

SEQ ID NO: 14482 - DNA, 16 bp, synthetic construct
  misc_feature 1..16: note = synthetic [barcode part1]
  source 1..16: mol_type = other DNA
agtgttggtgtacacc

SEQ ID NO: 14483 - DNA, 16 bp, synthetic construct
  misc_feature 1..16: note = synthetic [barcode part1]
  source 1..16: mol_type = other DNA
tagaccaggagtacgc

SEQ ID NO: 14484 - DNA, 16 bp, synthetic construct
  misc_feature 1..16: note = synthetic [barcode part1]
  source 1..16: mol_type = other DNA
gagtatacggcgatcg

SEQ ID NO: 14485 - DNA, 16 bp, synthetic construct
  misc_feature 1..16: note = synthetic [barcode part1]
  source 1..16: mol_type = other DNA
cgttgttgcaatcact

SEQ ID NO: 14486 - DNA, 16 bp, synthetic construct
  misc_feature 1..16: note = synthetic [barcode part1]
  source 1..16: mol_type = other DNA
ttcaggaccttggaac

SEQ ID NO: 14487 - DNA, 16 bp, synthetic construct
  misc_feature 1..16: note = synthetic [barcode part1]
  source 1..16: mol_type = other DNA
tgcagacctgccttgt

SEQ ID NO: 14488 - DNA, 16 bp, synthetic construct
  misc_feature 1..16: note = synthetic [barcode part1]
  source 1..16: mol_type = other DNA
cgatactgtgaacaag

SEQ ID NO: 14489 - DNA, 16 bp, synthetic construct
  misc_feature 1..16: note = synthetic [barcode part1]
  source 1..16: mol_type = other DNA
acgtgtgaaccaacct

SEQ ID NO: 14490 - DNA, 16 bp, synthetic construct
  misc_feature 1..16: note = synthetic [barcode part1]
  source 1..16: mol_type = other DNA
gtgcgtaatcgtggtt

SEQ ID NO: 14491 - DNA, 16 bp, synthetic construct
  misc_feature 1..16: note = synthetic [barcode part1]
  source 1..16: mol_type = other DNA
gattggttcgatcgac

SEQ ID NO: 14492 - DNA, 16 bp, synthetic construct
  misc_feature 1..16: note = synthetic [barcode part1]
  source 1..16: mol_type = other DNA
tgagtaagtctgtccg

SEQ ID NO: 14493 - DNA, 16 bp, synthetic construct
  misc_feature 1..16: note = synthetic [barcode part1]
  source 1..16: mol_type = other DNA
cgactctcacggttac

SEQ ID NO: 14494 - DNA, 16 bp, synthetic construct
  misc_feature 1..16: note = synthetic [barcode part1]
  source 1..16: mol_type = other DNA
gagagtctgtgcaacg

SEQ ID NO: 14495 - DNA, 16 bp, synthetic construct
  misc_feature 1..16: note = synthetic [barcode part1]
  source 1..16: mol_type = other DNA
aacaacactacgagtg

SEQ ID NO: 14496 - DNA, 16 bp, synthetic construct
  misc_feature 1..16: note = synthetic [barcode part1]
  source 1..16: mol_type = other DNA
taagtgcgcacctaac

SEQ ID NO: 14497 - DNA, 16 bp, synthetic construct
  misc_feature 1..16: note = synthetic [barcode part1]
  source 1..16: mol_type = other DNA
tgcgtaggtagtcact

SEQ ID NO: 14498 - DNA, 16 bp, synthetic construct
  misc_feature 1..16: note = synthetic [barcode part1]
  source 1..16: mol_type = other DNA
attcttgtgtcaggtc

SEQ ID NO: 14499 - DNA, 16 bp, synthetic construct
  misc_feature 1..16: note = synthetic [barcode part1]
  source 1..16: mol_type = other DNA
ttcaccagtactcagt

SEQ ID NO: 14500 - DNA, 16 bp, synthetic construct
  misc_feature 1..16: note = synthetic [barcode part1]
  source 1..16: mol_type = other DNA
gtacacttgtcttacg

SEQ ID NO: 14501 - DNA, 16 bp, synthetic construct
  misc_feature 1..16: note = synthetic [barcode part1]
  source 1..16: mol_type = other DNA
gcagttggatcctcct

SEQ ID NO: 14502 - DNA, 16 bp, synthetic construct
  misc_feature 1..16: note = synthetic [barcode part1]
  source 1..16: mol_type = other DNA
cagagtcacacgtact

SEQ ID NO: 14503 - DNA, 16 bp, synthetic construct
  misc_feature 1..16: note = synthetic [barcode part1]
  source 1..16: mol_type = other DNA
gtatcgaatatccggc

SEQ ID NO: 14504 - DNA, 16 bp, synthetic construct
  misc_feature 1..16: note = synthetic [barcode part1]
  source 1..16: mol_type = other DNA
gtccgttaacagacac

SEQ ID NO: 14505 - DNA, 16 bp, synthetic construct
  misc_feature 1..16: note = synthetic [barcode part1]
  source 1..16: mol_type = other DNA
tgtgatctcagacacg

SEQ ID NO: 14506 - DNA, 16 bp, synthetic construct
  misc_feature 1..16: note = synthetic [barcode part1]
  source 1..16: mol_type = other DNA
tggccaagttgcgatt

SEQ ID NO: 14507 - DNA, 16 bp, synthetic construct
  misc_feature 1..16: note = synthetic [barcode part1]
  source 1..16: mol_type = other DNA
tgacttgttcgtgccg

SEQ ID NO: 14508 - DNA, 16 bp, synthetic construct
  misc_feature 1..16: note = synthetic [barcode part1]
  source 1..16: mol_type = other DNA
cggactactctgcact

SEQ ID NO: 14509 - DNA, 16 bp, synthetic construct
  misc_feature 1..16: note = synthetic [barcode part1]
  source 1..16: mol_type = other DNA
atcgacaccaccgttc

SEQ ID NO: 14510 - DNA, 16 bp, synthetic construct
  misc_feature 1..16: note = synthetic [barcode part1]
  source 1..16: mol_type = other DNA
acagttgattacgcgc

SEQ ID NO: 14511 - DNA, 16 bp, synthetic construct
  misc_feature 1..16: note = synthetic [barcode part1]
  source 1..16: mol_type = other DNA
tcggtaagtaagaacc

SEQ ID NO: 14512 - DNA, 16 bp, synthetic construct
  misc_feature 1..16: note = synthetic [barcode part1]
  source 1..16: mol_type = other DNA
gtcaagttaaggacac

SEQ ID NO: 14513 - DNA, 16 bp, synthetic construct
  misc_feature 1..16: note = synthetic [barcode part1]
  source 1..16: mol_type = other DNA
gcgtaattgacacacc

SEQ ID NO: 14514 - DNA, 16 bp, synthetic construct
  misc_feature 1..16: note = synthetic [barcode part1]
  source 1..16: mol_type = other DNA
aacggagttaagtacc

SEQ ID NO: 14515 - DNA, 16 bp, synthetic construct
  misc_feature 1..16: note = synthetic [barcode part1]
  source 1..16: mol_type = other DNA
agatactcctgtcact

SEQ ID NO: 14516 - DNA, 16 bp, synthetic construct
  misc_feature 1..16: note = synthetic [barcode part1]
  source 1..16: mol_type = other DNA
tcaggttgactaccag

SEQ ID NO: 14517 - DNA, 16 bp, synthetic construct
  misc_feature 1..16: note = synthetic [barcode part1]
  source 1..16: mol_type = other DNA
tgtagaaggttcagtg

SEQ ID NO: 14518 - DNA, 16 bp, synthetic construct
  misc_feature 1..16: note = synthetic [barcode part1]
  source 1..16: mol_type = other DNA
tggtaactcctgtatc

SEQ ID NO: 14519 - DNA, 16 bp, synthetic construct
  misc_feature 1..16: note = synthetic [barcode part1]
  source 1..16: mol_type = other DNA
aggtgacggttgtgtg

SEQ ID NO: 14520 - DNA, 16 bp, synthetic construct
  misc_feature 1..16: note = synthetic [barcode part1]
  source 1..16: mol_type = other DNA
gtacctccagtgatcc

SEQ ID NO: 14521 - DNA, 16 bp, synthetic construct
  misc_feature 1..16: note = synthetic [barcode part1]
  source 1..16: mol_type = other DNA
cagatcgcgtagaggt

SEQ ID NO: 14522 - DNA, 16 bp, synthetic construct
  misc_feature 1..16: note = synthetic [barcode part1]
  source 1..16: mol_type = other DNA
tacttcaattcgcgac

SEQ ID NO: 14523 - DNA, 16 bp, synthetic construct
  misc_feature 1..16: note = synthetic [barcode part1]
  source 1..16: mol_type = other DNA
cgttatcagaccgagt

SEQ ID NO: 14524 - DNA, 16 bp, synthetic construct
  misc_feature 1..16: note = synthetic [barcode part1]
  source 1..16: mol_type = other DNA
gcgacggtgaattcag

SEQ ID NO: 14525 - DNA, 16 bp, synthetic construct
  misc_feature 1..16: note = synthetic [barcode part1]
  source 1..16: mol_type = other DNA
cgccgccacaactatt

SEQ ID NO: 14526 - DNA, 16 bp, synthetic construct
  misc_feature 1..16: note = synthetic [barcode part1]
  source 1..16: mol_type = other DNA
ccgacttcgtcagtac

SEQ ID NO: 14527 - DNA, 16 bp, synthetic construct
  misc_feature 1..16: note = synthetic [barcode part1]
  source 1..16: mol_type = other DNA
tcagtggatagagact

SEQ ID NO: 14528 - DNA, 16 bp, synthetic construct
  misc_feature 1..16: note = synthetic [barcode part1]
  source 1..16: mol_type = other DNA
tcaccaactccacgtg

SEQ ID NO: 14529 - DNA, 16 bp, synthetic construct
  misc_feature 1..16: note = synthetic [barcode part1]
  source 1..16: mol_type = other DNA
agaatcctcgtctgcc

SEQ ID NO: 14530 - DNA, 16 bp, synthetic construct
  misc_feature 1..16: note = synthetic [barcode part1]
  source 1..16: mol_type = other DNA
agaataccggtctaag

SEQ ID NO: 14531 - DNA, 16 bp, synthetic construct
  misc_feature 1..16: note = synthetic [barcode part1]
  source 1..16: mol_type = other DNA
tgcagttgcgtgattg

SEQ ID NO: 14532 - DNA, 16 bp, synthetic construct
  misc_feature 1..16: note = synthetic [barcode part1]
  source 1..16: mol_type = other DNA
tgaagtcacacacgtc

SEQ ID NO: 14533 - DNA, 16 bp, synthetic construct
  misc_feature 1..16: note = synthetic [barcode part1]
  source 1..16: mol_type = other DNA
tccgtggaggcaatag

SEQ ID NO: 14534 - DNA, 16 bp, synthetic construct
  misc_feature 1..16: note = synthetic [barcode part1]
  source 1..16: mol_type = other DNA
acacggtcgcaattgt

SEQ ID NO: 14535 - DNA, 16 bp, synthetic construct
  misc_feature 1..16: note = synthetic [barcode part1]
  source 1..16: mol_type = other DNA
cgttcgccgaagttct

SEQ ID NO: 14536 - DNA, 16 bp, synthetic construct
  misc_feature 1..16: note = synthetic [barcode part1]
  source 1..16: mol_type = other DNA
gatcacttctggcaag

SEQ ID NO: 14537 - DNA, 16 bp, synthetic construct
  misc_feature 1..16: note = synthetic [barcode part1]
  source 1..16: mol_type = other DNA
gattgcgtgtagtcgt

SEQ ID NO: 14538 - DNA, 16 bp, synthetic construct
  misc_feature 1..16: note = synthetic [barcode part1]
  source 1..16: mol_type = other DNA
acacgccgataacgag

SEQ ID NO: 14539 - DNA, 16 bp, synthetic construct
  misc_feature 1..16: note = synthetic [barcode part1]
  source 1..16: mol_type = other DNA
ccggaattctgcctgt

SEQ ID NO: 14540 - DNA, 16 bp, synthetic construct
  misc_feature 1..16: note = synthetic [barcode part1]
  source 1..16: mol_type = other DNA
gttggcagttcgaact

SEQ ID NO: 14541 - DNA, 16 bp, synthetic construct
  misc_feature 1..16: note = synthetic [barcode part1]
  source 1..16: mol_type = other DNA
ccttcctagttccagt

SEQ ID NO: 14542 - DNA, 16 bp, synthetic construct
  misc_feature 1..16: note = synthetic [barcode part1]
  source 1..16: mol_type = other DNA
actggttagtcggttg

SEQ ID NO: 14543 - DNA, 16 bp, synthetic construct
  misc_feature 1..16: note = synthetic [barcode part1]
  source 1..16: mol_type = other DNA
cagacagaacgtcgtg

SEQ ID NO: 14544 - DNA, 16 bp, synthetic construct
  misc_feature 1..16: note = synthetic [barcode part1]
  source 1..16: mol_type = other DNA
aatctctggaacggtc

SEQ ID NO: 14545 - DNA, 16 bp, synthetic construct
  misc_feature 1..16: note = synthetic [barcode part1]
  source 1..16: mol_type = other DNA
cagttctcacaactgt

SEQ ID NO: 14546 - DNA, 16 bp, synthetic construct
  misc_feature 1..16: note = synthetic [barcode part1]
  source 1..16: mol_type = other DNA
aactgtgtgtgcagtc

SEQ ID NO: 14547 - DNA, 16 bp, synthetic construct
  misc_feature 1..16: note = synthetic [barcode part1]
  source 1..16: mol_type = other DNA
gaaggtcctaatcctg

SEQ ID NO: 14548 - DNA, 16 bp, synthetic construct
  misc_feature 1..16: note = synthetic [barcode part1]
  source 1..16: mol_type = other DNA
gcaataagaaccggag

SEQ ID NO: 14549 - DNA, 16 bp, synthetic construct
  misc_feature 1..16: note = synthetic [barcode part1]
  source 1..16: mol_type = other DNA
atcgcggaatatcgtc

SEQ ID NO: 14550 - DNA, 16 bp, synthetic construct
  misc_feature 1..16: note = synthetic [barcode part1]
  source 1..16: mol_type = other DNA
agactgtaagtgcggc

SEQ ID NO: 14551 - DNA, 16 bp, synthetic construct
  misc_feature 1..16: note = synthetic [barcode part1]
  source 1..16: mol_type = other DNA
cgcgtctagtacaagt

SEQ ID NO: 14552 - DNA, 16 bp, synthetic construct
  misc_feature 1..16: note = synthetic [barcode part1]
  source 1..16: mol_type = other DNA
tcttgacctccactgt

SEQ ID NO: 14553 - DNA, 16 bp, synthetic construct
  misc_feature 1..16: note = synthetic [barcode part1]
  source 1..16: mol_type = other DNA
cgaagaattctggcct

SEQ ID NO: 14554 - DNA, 16 bp, synthetic construct
  misc_feature 1..16: note = synthetic [barcode part1]
  source 1..16: mol_type = other DNA
gagtgtcggtggaact

SEQ ID NO: 14555 - DNA, 16 bp, synthetic construct
  misc_feature 1..16: note = synthetic [barcode part1]
  source 1..16: mol_type = other DNA
agagagatctcctctg

SEQ ID NO: 14556 - DNA, 16 bp, synthetic construct
  misc_feature 1..16: note = synthetic [barcode part1]
  source 1..16: mol_type = other DNA
aactaatcgcggtacc

SEQ ID NO: 14557 - DNA, 16 bp, synthetic construct
  misc_feature 1..16: note = synthetic [barcode part1]
  source 1..16: mol_type = other DNA
tcagacaagacctgtc

SEQ ID NO: 14558 - DNA, 16 bp, synthetic construct
  misc_feature 1..16: note = synthetic [barcode part1]
  source 1..16: mol_type = other DNA
acgatcgacacactgt

SEQ ID NO: 14559 - DNA, 16 bp, synthetic construct
  misc_feature 1..16: note = synthetic [barcode part1]
  source 1..16: mol_type = other DNA
gttaggttgccgaatc

SEQ ID NO: 14560 - DNA, 16 bp, synthetic construct
  misc_feature 1..16: note = synthetic [barcode part1]
  source 1..16: mol_type = other DNA
ttataccactcggtac

SEQ ID NO: 14561 - DNA, 16 bp, synthetic construct
  misc_feature 1..16: note = synthetic [barcode part1]
  source 1..16: mol_type = other DNA
attcttggtctccacc

SEQ ID NO: 14562 - DNA, 16 bp, synthetic construct
  misc_feature 1..16: note = synthetic [barcode part1]
  source 1..16: mol_type = other DNA
gttctcaggcaatctt

SEQ ID NO: 14563 - DNA, 16 bp, synthetic construct
  misc_feature 1..16: note = synthetic [barcode part1]
  source 1..16: mol_type = other DNA
acaatagacggttacg

SEQ ID NO: 14564 - DNA, 16 bp, synthetic construct
  misc_feature 1..16: note = synthetic [barcode part1]
  source 1..16: mol_type = other DNA
taggtcggtcgaatct

SEQ ID NO: 14565 - DNA, 16 bp, synthetic construct
  misc_feature 1..16: note = synthetic [barcode part1]
  source 1..16: mol_type = other DNA
gagattaggagtggtg

SEQ ID NO: 14566 - DNA, 16 bp, synthetic construct
  misc_feature 1..16: note = synthetic [barcode part1]
  source 1..16: mol_type = other DNA
aggtatagtcagactg

SEQ ID NO: 14567 - DNA, 16 bp, synthetic construct
  misc_feature 1..16: note = synthetic [barcode part1]
  source 1..16: mol_type = other DNA
tccaggacttctctct

SEQ ID NO: 14568 - DNA, 16 bp, synthetic construct
  misc_feature 1..16: note = synthetic [barcode part1]
  source 1..16: mol_type = other DNA
tgaggactgtcagacg

SEQ ID NO: 14569 - DNA, 16 bp, synthetic construct
  misc_feature 1..16: note = synthetic [barcode part1]
  source 1..16: mol_type = other DNA
gacaggactaacgtgc

SEQ ID NO: 14570 - DNA, 16 bp, synthetic construct
  misc_feature 1..16: note = synthetic [barcode part1]
  source 1..16: mol_type = other DNA
ccggataacaagtcct

SEQ ID NO: 14571 - DNA, 16 bp, synthetic construct
  misc_feature 1..16: note = synthetic [barcode part1]
  source 1..16: mol_type = other DNA
acactggtcctaccgt

SEQ ID NO: 14572 - DNA, 16 bp, synthetic construct
  misc_feature 1..16: note = synthetic [barcode part1]
  source 1..16: mol_type = other DNA
gactggtactggttgt

SEQ ID NO: 14573 - DNA, 16 bp, synthetic construct
  misc_feature 1..16: note = synthetic [barcode part1]
  source 1..16: mol_type = other DNA
cggatcaaggacgtgt

SEQ ID NO: 14574 - DNA, 16 bp, synthetic construct
  misc_feature 1..16: note = synthetic [barcode part1]
  source 1..16: mol_type = other DNA
gtatagtcgactgcgt

SEQ ID NO: 14575 - DNA, 16 bp, synthetic construct
  misc_feature 1..16: note = synthetic [barcode part1]
  source 1..16: mol_type = other DNA
gacactgatatcgcgt

SEQ ID NO: 14576 - DNA, 16 bp, synthetic construct
  misc_feature 1..16: note = synthetic [barcode part1]
  source 1..16: mol_type = other DNA
tctacgttcagactgt

SEQ ID NO: 14577 - DNA, 16 bp, synthetic construct
  misc_feature 1..16: note = synthetic [barcode part1]
  source 1..16: mol_type = other DNA
taccgttcctacaagt

SEQ ID NO: 14578 - DNA, 16 bp, synthetic construct
  misc_feature 1..16: note = synthetic [barcode part1]
  source 1..16: mol_type = other DNA
gtgccactaggtagag

SEQ ID NO: 14579 - DNA, 16 bp, synthetic construct
  misc_feature 1..16: note = synthetic [barcode part1]
  source 1..16: mol_type = other DNA
gacgtgaggattaccg

SEQ ID NO: 14580 - DNA, 16 bp, synthetic construct
  misc_feature 1..16: note = synthetic [barcode part1]
  source 1..16: mol_type = other DNA
tctaactcggtgtatc

SEQ ID NO: 14581 - DNA, 16 bp, synthetic construct
  misc_feature 1..16: note = synthetic [barcode part1]
  source 1..16: mol_type = other DNA
agaggtcaatcttccg

SEQ ID NO: 14582 - DNA, 16 bp, synthetic construct
  misc_feature 1..16: note = synthetic [barcode part1]
  source 1..16: mol_type = other DNA
gatctagtatagaggc

SEQ ID NO: 14583 - DNA, 16 bp, synthetic construct
  misc_feature 1..16: note = synthetic [barcode part1]
  source 1..16: mol_type = other DNA
tctcttcaccgtagtc

SEQ ID NO: 14584 - DNA, 16 bp, synthetic construct
  misc_feature 1..16: note = synthetic [barcode part1]
  source 1..16: mol_type = other DNA
cgacgtagtgttcagt

SEQ ID NO: 14585 - DNA, 16 bp, synthetic construct
  misc_feature 1..16: note = synthetic [barcode part1]
  source 1..16: mol_type = other DNA
tgaataggcgagtgag

SEQ ID NO: 14586 - DNA, 16 bp, synthetic construct
  misc_feature 1..16: note = synthetic [barcode part1]
  source 1..16: mol_type = other DNA
tgtagtactcactcgt

SEQ ID NO: 14587 - DNA, 16 bp, synthetic construct
  misc_feature 1..16: note = synthetic [barcode part1]
  source 1..16: mol_type = other DNA
agattcgttcgcgaac

SEQ ID NO: 14588 - DNA, 16 bp, synthetic construct
  misc_feature 1..16: note = synthetic [barcode part1]
  source 1..16: mol_type = other DNA
caactaccactctgcg

SEQ ID NO: 14589 - DNA, 16 bp, synthetic construct
  misc_feature 1..16: note = synthetic [barcode part1]
  source 1..16: mol_type = other DNA
ttggtagtaggtcgtc

SEQ ID NO: 14590 - DNA, 16 bp, synthetic construct
  misc_feature 1..16: note = synthetic [barcode part1]
  source 1..16: mol_type = other DNA
gcgtagaagattactg

SEQ ID NO: 14591 - DNA, 16 bp, synthetic construct
  misc_feature 1..16: note = synthetic [barcode part1]
  source 1..16: mol_type = other DNA
aggtactgcctcactc

SEQ ID NO: 14592 - DNA, 16 bp, synthetic construct
  misc_feature 1..16: note = synthetic [barcode part1]
  source 1..16: mol_type = other DNA
cctattagtgtccggc

SEQ ID NO: 14593 - DNA, 16 bp, synthetic construct
  misc_feature 1..16: note = synthetic [barcode part1]
  source 1..16: mol_type = other DNA
acgaggtcctgagtag

SEQ ID NO: 14594 - DNA, 16 bp, synthetic construct
  misc_feature 1..16: note = synthetic [barcode part1]
  source 1..16: mol_type = other DNA
acgaccgtctcagttc

SEQ ID NO: 14595 - DNA, 16 bp, synthetic construct
  misc_feature 1..16: note = synthetic [barcode part1]
  source 1..16: mol_type = other DNA
gaataggcgaagtctt

SEQ ID NO: 14596 - DNA, 16 bp, synthetic construct
  misc_feature 1..16: note = synthetic [barcode part1]
  source 1..16: mol_type = other DNA
tcgaggtattcgtctt

SEQ ID NO: 14597 - DNA, 16 bp, synthetic construct
  misc_feature 1..16: note = synthetic [barcode part1]
  source 1..16: mol_type = other DNA
ttcgtgccggtaactc

SEQ ID NO: 14598 - DNA, 16 bp, synthetic construct
  misc_feature 1..16: note = synthetic [barcode part1]
  source 1..16: mol_type = other DNA
gagtctgaggccaagt

SEQ ID NO: 14599 - DNA, 16 bp, synthetic construct
  misc_feature 1..16: note = synthetic [barcode part1]
  source 1..16: mol_type = other DNA
aacctggacgccttct

SEQ ID NO: 14600 - DNA, 16 bp, synthetic construct
  misc_feature 1..16: note = synthetic [barcode part1]
  source 1..16: mol_type = other DNA
gcgaattaaccgtacc

SEQ ID NO: 14601 - DNA, 16 bp, synthetic construct
  misc_feature 1..16: note = synthetic [barcode part1]
  source 1..16: mol_type = other DNA
gtatcgtgttccgaag

SEQ ID NO: 14602 - DNA, 16 bp, synthetic construct
  misc_feature 1..16: note = synthetic [barcode part1]
  source 1..16: mol_type = other DNA
caggatcgtacgtact

SEQ ID NO: 14603 - DNA, 16 bp, synthetic construct
  misc_feature 1..16: note = synthetic [barcode part1]
  source 1..16: mol_type = other DNA
ttgatccgtggttgtt

SEQ ID NO: 14604 - DNA, 16 bp, synthetic construct
  misc_feature 1..16: note = synthetic [barcode part1]
  source 1..16: mol_type = other DNA
tgacgagatagacttg

SEQ ID NO: 14605 - DNA, 16 bp, synthetic construct
  misc_feature 1..16: note = synthetic [barcode part1]
  source 1..16: mol_type = other DNA
gacaattgcgcctcct

SEQ ID NO: 14606 - DNA, 16 bp, synthetic construct
  misc_feature 1..16: note = synthetic [barcode part1]
  source 1..16: mol_type = other DNA
aggcgataattcgtag

SEQ ID NO: 14607 - DNA, 16 bp, synthetic construct
  misc_feature 1..16: note = synthetic [barcode part1]
  source 1..16: mol_type = other DNA
accgcgttaacctctg

SEQ ID NO: 14608 - DNA, 16 bp, synthetic construct
  misc_feature 1..16: note = synthetic [barcode part1]
  source 1..16: mol_type = other DNA
ccttcgtggactgttg

SEQ ID NO: 14609 - DNA, 16 bp, synthetic construct
  misc_feature 1..16: note = synthetic [barcode part1]
  source 1..16: mol_type = other DNA
gcggtgtatattgtgc

SEQ ID NO: 14610 - DNA, 16 bp, synthetic construct
  misc_feature 1..16: note = synthetic [barcode part1]
  source 1..16: mol_type = other DNA
caagtacgaggcgatc

SEQ ID NO: 14611 - DNA, 16 bp, synthetic construct
  misc_feature 1..16: note = synthetic [barcode part1]
  source 1..16: mol_type = other DNA
cctctcttcggaactt

SEQ ID NO: 14612 - DNA, 16 bp, synthetic construct
  misc_feature 1..16: note = synthetic [barcode part1]
  source 1..16: mol_type = other DNA
acaacacgatctcgac

SEQ ID NO: 14613 - DNA, 16 bp, synthetic construct
  misc_feature 1..16: note = synthetic [barcode part1]
  source 1..16: mol_type = other DNA
gagtatcggtacctac

SEQ ID NO: 14614 - DNA, 16 bp, synthetic construct
  misc_feature 1..16: note = synthetic [barcode part1]
  source 1..16: mol_type = other DNA
taacaatcgacggtcc

SEQ ID NO: 14615 - DNA, 16 bp, synthetic construct
  misc_feature 1..16: note = synthetic [barcode part1]
  source 1..16: mol_type = other DNA
gccgtaaggtgttgtt

SEQ ID NO: 14616 - DNA, 16 bp, synthetic construct
  misc_feature 1..16: note = synthetic [barcode part1]
  source 1..16: mol_type = other DNA
gccaataccgtcgttc

SEQ ID NO: 14617 - DNA, 16 bp, synthetic construct
  misc_feature 1..16: note = synthetic [barcode part1]
  source 1..16: mol_type = other DNA
aggtatctaggcactc

SEQ ID NO: 14618 - DNA, 16 bp, synthetic construct
  misc_feature 1..16: note = synthetic [barcode part1]
  source 1..16: mol_type = other DNA
tcgaatcagagtgtag

SEQ ID NO: 14619 - DNA, 16 bp, synthetic construct
  misc_feature 1..16: note = synthetic [barcode part1]
  source 1..16: mol_type = other DNA
aattcctgagagtcgc

SEQ ID NO: 14620 - DNA, 16 bp, synthetic construct
  misc_feature 1..16: note = synthetic [barcode part1]
  source 1..16: mol_type = other DNA
caagacttacggtgtc

SEQ ID NO: 14621 - DNA, 16 bp, synthetic construct
  misc_feature 1..16: note = synthetic [barcode part1]
  source 1..16: mol_type = other DNA
agtctggacgcaaggt

SEQ ID NO: 14622 - DNA, 16 bp, synthetic construct
  misc_feature 1..16: note = synthetic [barcode part1]
  source 1..16: mol_type = other DNA
ccttcgttgaaggtag

SEQ ID NO: 14623 - DNA, 16 bp, synthetic construct
  misc_feature 1..16: note = synthetic [barcode part1]
  source 1..16: mol_type = other DNA
aagtgtcgatatccgc

SEQ ID NO: 14624 - DNA, 16 bp, synthetic construct
  misc_feature 1..16: note = synthetic [barcode part1]
  source 1..16: mol_type = other DNA
acttaggagtgaggcc

SEQ ID NO: 14625 - DNA, 16 bp, synthetic construct
  misc_feature 1..16: note = synthetic [barcode part1]
  source 1..16: mol_type = other DNA
atatctcgtcgagttc

SEQ ID NO: 14626 - DNA, 16 bp, synthetic construct
  misc_feature 1..16: note = synthetic [barcode part1]
  source 1..16: mol_type = other DNA
gaagtctataggtgac

SEQ ID NO: 14627 - DNA, 16 bp, synthetic construct
  misc_feature 1..16: note = synthetic [barcode part1]
  source 1..16: mol_type = other DNA
tctggaatctcaaggc

SEQ ID NO: 14628 - DNA, 16 bp, synthetic construct
  misc_feature 1..16: note = synthetic [barcode part1]
  source 1..16: mol_type = other DNA
acgtaggaggttgtcg

SEQ ID NO: 14629 - DNA, 16 bp, synthetic construct
  misc_feature 1..16: note = synthetic [barcode part1]
  source 1..16: mol_type = other DNA
ttactcggtccgttct

SEQ ID NO: 14630 - DNA, 16 bp, synthetic construct
  misc_feature 1..16: note = synthetic [barcode part1]
  source 1..16: mol_type = other DNA
tactggacgtcctcac

SEQ ID NO: 14631 - DNA, 16 bp, synthetic construct
  misc_feature 1..16: note = synthetic [barcode part1]
  source 1..16: mol_type = other DNA
agtctccttggcacac

SEQ ID NO: 14632 - DNA, 16 bp, synthetic construct
  misc_feature 1..16: note = synthetic [barcode part1]
  source 1..16: mol_type = other DNA
acctgtacaatctctg

SEQ ID NO: 14633 - DNA, 16 bp, synthetic construct
  misc_feature 1..16: note = synthetic [barcode part1]
  source 1..16: mol_type = other DNA
caactggcaatcgact

SEQ ID NO: 14634 - DNA, 16 bp, synthetic construct
  misc_feature 1..16: note = synthetic [barcode part1]
  source 1..16: mol_type = other DNA
tagtgtcgcgaataag

SEQ ID NO: 14635 - DNA, 16 bp, synthetic construct
  misc_feature 1..16: note = synthetic [barcode part1]
  source 1..16: mol_type = other DNA
ccggtacaaccaagag

SEQ ID NO: 14636 - DNA, 16 bp, synthetic construct
  misc_feature 1..16: note = synthetic [barcode part1]
  source 1..16: mol_type = other DNA
tgtgaacttactccac

SEQ ID NO: 14637 - DNA, 16 bp, synthetic construct
  misc_feature 1..16: note = synthetic [barcode part1]
  source 1..16: mol_type = other DNA
tgttatcagaccggac

SEQ ID NO: 14638 - DNA, 16 bp, synthetic construct
  misc_feature 1..16: note = synthetic [barcode part1]
  source 1..16: mol_type = other DNA
gtgattgttagaaggc

SEQ ID NO: 14639 - DNA, 16 bp, synthetic construct
  misc_feature 1..16: note = synthetic [barcode part1]
  source 1..16: mol_type = other DNA
acaatcacgacgcact

SEQ ID NO: 14640 - DNA, 16 bp, synthetic construct
  misc_feature 1..16: note = synthetic [barcode part1]
  source 1..16: mol_type = other DNA
aatacgtgactgaggt

SEQ ID NO: 14641 - DNA, 16 bp, synthetic construct
  misc_feature 1..16: note = synthetic [barcode part1]
  source 1..16: mol_type = other DNA
gttatctgtgaactcc

SEQ ID NO: 14642 - DNA, 16 bp, synthetic construct
  misc_feature 1..16: note = synthetic [barcode part1]
  source 1..16: mol_type = other DNA
atcgtcttaagtgcct

SEQ ID NO: 14643 - DNA, 16 bp, synthetic construct
  misc_feature 1..16: note = synthetic [barcode part1]
  source 1..16: mol_type = other DNA
cgtatagtgtcagtgc

SEQ ID NO: 14644 - DNA, 16 bp, synthetic construct
  misc_feature 1..16: note = synthetic [barcode part1]
  source 1..16: mol_type = other DNA
cgttaggccgttaagt

SEQ ID NO: 14645 - DNA, 16 bp, synthetic construct
  misc_feature 1..16: note = synthetic [barcode part1]
  source 1..16: mol_type = other DNA
atctccggacaacctc

SEQ ID NO: 14646 - DNA, 16 bp, synthetic construct
  misc_feature 1..16: note = synthetic [barcode part1]
  source 1..16: mol_type = other DNA
gtgacttcctgacaag

SEQ ID NO: 14647 - DNA, 16 bp, synthetic construct
  misc_feature 1..16: note = synthetic [barcode part1]
  source 1..16: mol_type = other DNA
acaacctcctacgtcg

SEQ ID NO: 14648 - DNA, 16 bp, synthetic construct
  misc_feature 1..16: note = synthetic [barcode part1]
  source 1..16: mol_type = other DNA
acctctgtgaattgtc

SEQ ID NO: 14649 - DNA, 16 bp, synthetic construct
  misc_feature 1..16: note = synthetic [barcode part1]
  source 1..16: mol_type = other DNA
tagatatcgtaccggc

SEQ ID NO: 14650 - DNA, 16 bp, synthetic construct
  misc_feature 1..16: note = synthetic [barcode part1]
  source 1..16: mol_type = other DNA
gtactctgattgtcgt

SEQ ID NO: 14651 - DNA, 16 bp, synthetic construct
  misc_feature 1..16: note = synthetic [barcode part1]
  source 1..16: mol_type = other DNA
atccaccgtcctgaac

SEQ ID NO: 14652 - DNA, 16 bp, synthetic construct
  misc_feature 1..16: note = synthetic [barcode part1]
  source 1..16: mol_type = other DNA
acaggagtgacttggc

SEQ ID NO: 14653 - DNA, 16 bp, synthetic construct
  misc_feature 1..16: note = synthetic [barcode part1]
  source 1..16: mol_type = other DNA
acggttacgtgtagtc

SEQ ID NO: 14654 - DNA, 16 bp, synthetic construct
  misc_feature 1..16: note = synthetic [barcode part1]
  source 1..16: mol_type = other DNA
tgcagtgcaagtaagt

SEQ ID NO: 14655 - DNA, 16 bp, synthetic construct
  misc_feature 1..16: note = synthetic [barcode part1]
  source 1..16: mol_type = other DNA
acacgcacgcaatact

SEQ ID NO: 14656 - DNA, 16 bp, synthetic construct
  misc_feature 1..16: note = synthetic [barcode part1]
  source 1..16: mol_type = other DNA
cacaggttatccgagt

SEQ ID NO: 14657 - DNA, 16 bp, synthetic construct
  misc_feature 1..16: note = synthetic [barcode part1]
  source 1..16: mol_type = other DNA
ttggtggacaactcgt

SEQ ID NO: 14658 - DNA, 16 bp, synthetic construct
  misc_feature 1..16: note = synthetic [barcode part1]
  source 1..16: mol_type = other DNA
ttgacagattcctacc

SEQ ID NO: 14659 - DNA, 16 bp, synthetic construct
  misc_feature 1..16: note = synthetic [barcode part1]
  source 1..16: mol_type = other DNA
cctgaccgcactaact

SEQ ID NO: 14660 - DNA, 16 bp, synthetic construct
  misc_feature 1..16: note = synthetic [barcode part1]
  source 1..16: mol_type = other DNA
gactgtaaccgtacac

SEQ ID NO: 14661 - DNA, 16 bp, synthetic construct
  misc_feature 1..16: note = synthetic [barcode part1]
  source 1..16: mol_type = other DNA
ataaggacggtagttc

SEQ ID NO: 14662 - DNA, 16 bp, synthetic construct
  misc_feature 1..16: note = synthetic [barcode part1]
  source 1..16: mol_type = other DNA
ttcttcaacgatcgtg

SEQ ID NO: 14663 - DNA, 16 bp, synthetic construct
  misc_feature 1..16: note = synthetic [barcode part1]
  source 1..16: mol_type = other DNA
gttgcaggttcgcctt

SEQ ID NO: 14664 - DNA, 16 bp, synthetic construct
  misc_feature 1..16: note = synthetic [barcode part1]
  source 1..16: mol_type = other DNA
taatcgccagaaggcg

SEQ ID NO: 14665 - DNA, 16 bp, synthetic construct
  misc_feature 1..16: note = synthetic [barcode part1]
  source 1..16: mol_type = other DNA
aagtaccgcagtggac

SEQ ID NO: 14666 - DNA, 16 bp, synthetic construct
  misc_feature 1..16: note = synthetic [barcode part1]
  source 1..16: mol_type = other DNA
atattgaaccgaaggc

SEQ ID NO: 14667 - DNA, 16 bp, synthetic construct
  misc_feature 1..16: note = synthetic [barcode part1]
  source 1..16: mol_type = other DNA
cactccagaataacgc

SEQ ID NO: 14668 - DNA, 16 bp, synthetic construct
  misc_feature 1..16: note = synthetic [barcode part1]
  source 1..16: mol_type = other DNA
ttgcaacggagttctg

SEQ ID NO: 14669 - DNA, 16 bp, synthetic construct
  misc_feature 1..16: note = synthetic [barcode part1]
  source 1..16: mol_type = other DNA
cgaccttattgtgtac

SEQ ID NO: 14670 - DNA, 16 bp, synthetic construct
  misc_feature 1..16: note = synthetic [barcode part1]
  source 1..16: mol_type = other DNA
aaccaacctccagaac

SEQ ID NO: 14671 - DNA, 16 bp, synthetic construct
  misc_feature 1..16: note = synthetic [barcode part1]
  source 1..16: mol_type = other DNA
agtcagttgtgtgcac

SEQ ID NO: 14672 - DNA, 16 bp, synthetic construct
  misc_feature 1..16: note = synthetic [barcode part1]
  source 1..16: mol_type = other DNA
attccgagaccgattg

SEQ ID NO: 14673 - DNA, 16 bp, synthetic construct
  misc_feature 1..16: note = synthetic [barcode part1]
  source 1..16: mol_type = other DNA
gagaaccagaagatcg

SEQ ID NO: 14674 - DNA, 16 bp, synthetic construct
  misc_feature 1..16: note = synthetic [barcode part1]
  source 1..16: mol_type = other DNA
tggtccgttacacctg

SEQ ID NO: 14675 - DNA, 16 bp, synthetic construct
  misc_feature 1..16: note = synthetic [barcode part1]
  source 1..16: mol_type = other DNA
actgtagacgagtaac

SEQ ID NO: 14676 - DNA, 16 bp, synthetic construct
  misc_feature 1..16: note = synthetic [barcode part1]
  source 1..16: mol_type = other DNA
tctgatcgtgtgccgt

SEQ ID NO: 14677 - DNA, 16 bp, synthetic construct
  misc_feature 1..16: note = synthetic [barcode part1]
  source 1..16: mol_type = other DNA
tcggcagtgtctctac

SEQ ID NO: 14678 - DNA, 16 bp, synthetic construct
  misc_feature 1..16: note = synthetic [barcode part1]
  source 1..16: mol_type = other DNA
gcgtcggtaactcctt

SEQ ID NO: 14679 - DNA, 16 bp, synthetic construct
  misc_feature 1..16: note = synthetic [barcode part1]
  source 1..16: mol_type = other DNA
tcgacttacgactgtt

SEQ ID NO: 14680 - DNA, 16 bp, synthetic construct
  misc_feature 1..16: note = synthetic [barcode part1]
  source 1..16: mol_type = other DNA
gaacacgcaatagttg

SEQ ID NO: 14681 - DNA, 16 bp, synthetic construct
  misc_feature 1..16: note = synthetic [barcode part1]
  source 1..16: mol_type = other DNA
tccgtataccgaactt

SEQ ID NO: 14682 - DNA, 16 bp, synthetic construct
  misc_feature 1..16: note = synthetic [barcode part1]
  source 1..16: mol_type = other DNA
attcgtgcgacctctg

SEQ ID NO: 14683 - DNA, 16 bp, synthetic construct
  misc_feature 1..16: note = synthetic [barcode part1]
  source 1..16: mol_type = other DNA
attgtccgtagatcct

SEQ ID NO: 14684 - DNA, 16 bp, synthetic construct
  misc_feature 1..16: note = synthetic [barcode part1]
  source 1..16: mol_type = other DNA
actcaacggttcagtg

SEQ ID NO: 14685 - DNA, 16 bp, synthetic construct
  misc_feature 1..16: note = synthetic [barcode part1]
  source 1..16: mol_type = other DNA
cctatagtcgtagacg

SEQ ID NO: 14686 - DNA, 16 bp, synthetic construct
  misc_feature 1..16: note = synthetic [barcode part1]
  source 1..16: mol_type = other DNA
caagaatcgcctctag

SEQ ID NO: 14687 - DNA, 16 bp, synthetic construct
  misc_feature 1..16: note = synthetic [barcode part1]
  source 1..16: mol_type = other DNA
atcgcgaggtgttgtt

SEQ ID NO: 14688 - DNA, 16 bp, synthetic construct
  misc_feature 1..16: note = synthetic [barcode part1]
  source 1..16: mol_type = other DNA
tcctcgattctccaac

SEQ ID NO: 14689 - DNA, 16 bp, synthetic construct
  misc_feature 1..16: note = synthetic [barcode part1]
  source 1..16: mol_type = other DNA
gacagactgccgtaag

SEQ ID NO: 14690 - DNA, 16 bp, synthetic construct
  misc_feature 1..16: note = synthetic [barcode part1]
  source 1..16: mol_type = other DNA
cctggtcgcaccaatt

SEQ ID NO: 14691 - DNA, 16 bp, synthetic construct
  misc_feature 1..16: note = synthetic [barcode part1]
  source 1..16: mol_type = other DNA
attggatcctgtacct

SEQ ID NO: 14692 - DNA, 16 bp, synthetic construct
  misc_feature 1..16: note = synthetic [barcode part1]
  source 1..16: mol_type = other DNA
tagttctatcgcgcgc

SEQ ID NO: 14693 - DNA, 16 bp, synthetic construct
  misc_feature 1..16: note = synthetic [barcode part1]
  source 1..16: mol_type = other DNA
tcgtatcagactgtct

SEQ ID NO: 14694 - DNA, 16 bp, synthetic construct
  misc_feature 1..16: note = synthetic [barcode part1]
  source 1..16: mol_type = other DNA
cgatcgacgtaacgtt

SEQ ID NO: 14695 - DNA, 16 bp, synthetic construct
  misc_feature 1..16: note = synthetic [barcode part1]
  source 1..16: mol_type = other DNA
gcgatcgatatcgatc

SEQ ID NO: 14696 - DNA, 16 bp, synthetic construct
  misc_feature 1..16: note = synthetic [barcode part1]
  source 1..16: mol_type = other DNA
accaagtacctgacac

SEQ ID NO: 14697 - DNA, 16 bp, synthetic construct
  misc_feature 1..16: note = synthetic [barcode part1]
  source 1..16: mol_type = other DNA
atccaccggtattgcc

SEQ ID NO: 14698 - DNA, 16 bp, synthetic construct
  misc_feature 1..16: note = synthetic [barcode part1]
  source 1..16: mol_type = other DNA
cacacgagtgagacgt

SEQ ID NO: 14699 - DNA, 16 bp, synthetic construct
  misc_feature 1..16: note = synthetic [barcode part1]
  source 1..16: mol_type = other DNA
ccaagacctcggaatt

SEQ ID NO: 14700 - DNA, 16 bp, synthetic construct
  misc_feature 1..16: note = synthetic [barcode part1]
  source 1..16: mol_type = other DNA
aattccggcggtattg

SEQ ID NO: 14701 - DNA, 16 bp, synthetic construct
  misc_feature 1..16: note = synthetic [barcode part1]
  source 1..16: mol_type = other DNA
tatctgccgaacgagt

SEQ ID NO: 14702 - DNA, 16 bp, synthetic construct
  misc_feature 1..16: note = synthetic [barcode part1]
  source 1..16: mol_type = other DNA
tcctagatcacggtag

SEQ ID NO: 14703 - DNA, 16 bp, synthetic construct
  misc_feature 1..16: note = synthetic [barcode part1]
  source 1..16: mol_type = other DNA
cgtagtacctagaacc

SEQ ID NO: 14704 - DNA, 16 bp, synthetic construct
  misc_feature 1..16: note = synthetic [barcode part1]
  source 1..16: mol_type = other DNA
tggcagaatctcgttg

SEQ ID NO: 14705 - DNA, 16 bp, synthetic construct
  misc_feature 1..16: note = synthetic [barcode part1]
  source 1..16: mol_type = other DNA
gcacgtattggagtct

SEQ ID NO: 14706 - DNA, 16 bp, synthetic construct
  misc_feature 1..16: note = synthetic [barcode part1]
  source 1..16: mol_type = other DNA
aaggaatctacgtgac

SEQ ID NO: 14707 - DNA, 16 bp, synthetic construct
  misc_feature 1..16: note = synthetic [barcode part1]
  source 1..16: mol_type = other DNA
gtcgttccactatctc

SEQ ID NO: 14708 - DNA, 16 bp, synthetic construct
  misc_feature 1..16: note = synthetic [barcode part1]
  source 1..16: mol_type = other DNA
gatctggaatccggtt

SEQ ID NO: 14709 - DNA, 16 bp, synthetic construct
  misc_feature 1..16: note = synthetic [barcode part1]
  source 1..16: mol_type = other DNA
cgtaactagagtaacg

SEQ ID NO: 14710 - DNA, 16 bp, synthetic construct
  misc_feature 1..16: note = synthetic [barcode part1]
  source 1..16: mol_type = other DNA
ttctaacaggacggtc

SEQ ID NO: 14711 - DNA, 16 bp, synthetic construct
  misc_feature 1..16: note = synthetic [barcode part1]
  source 1..16: mol_type = other DNA
tcgtcggattgaactg

SEQ ID NO: 14712 - DNA, 16 bp, synthetic construct
  misc_feature 1..16: note = synthetic [barcode part1]
  source 1..16: mol_type = other DNA
cggtctggtaacttag

SEQ ID NO: 14713 - DNA, 16 bp, synthetic construct
  misc_feature 1..16: note = synthetic [barcode part1]
  source 1..16: mol_type = other DNA
cctctcacggattcag

SEQ ID NO: 14714 - DNA, 16 bp, synthetic construct
  misc_feature 1..16: note = synthetic [barcode part1]
  source 1..16: mol_type = other DNA
aacgacgttcgttacg

SEQ ID NO: 14715 - DNA, 16 bp, synthetic construct
  misc_feature 1..16: note = synthetic [barcode part1]
  source 1..16: mol_type = other DNA
gtgtaacgcgttagtc

SEQ ID NO: 14716 - DNA, 16 bp, synthetic construct
  misc_feature 1..16: note = synthetic [barcode part1]
  source 1..16: mol_type = other DNA
agagtcggtattcaag

SEQ ID NO: 14717 - DNA, 16 bp, synthetic construct
  misc_feature 1..16: note = synthetic [barcode part1]
  source 1..16: mol_type = other DNA
ttcgaacgtccaagtg

SEQ ID NO: 14718 - DNA, 16 bp, synthetic construct
  misc_feature 1..16: note = synthetic [barcode part1]
  source 1..16: mol_type = other DNA
taaccggttggttggt

SEQ ID NO: 14719 - DNA, 16 bp, synthetic construct
  misc_feature 1..16: note = synthetic [barcode part1]
  source 1..16: mol_type = other DNA
ccgtatccgaatcacc

SEQ ID NO: 14720 - DNA, 16 bp, synthetic construct
  misc_feature 1..16: note = synthetic [barcode part1]
  source 1..16: mol_type = other DNA
ttcgacttggtcgcgt

SEQ ID NO: 14721 - DNA, 16 bp, synthetic construct
  misc_feature 1..16: note = synthetic [barcode part1]
  source 1..16: mol_type = other DNA
tatcgtccaccgacgt

SEQ ID NO: 14722 - DNA, 16 bp, synthetic construct
  misc_feature 1..16: note = synthetic [barcode part1]
  source 1..16: mol_type = other DNA
tcttggataggcggag

SEQ ID NO: 14723 - DNA, 16 bp, synthetic construct
  misc_feature 1..16: note = synthetic [barcode part1]
  source 1..16: mol_type = other DNA
taccgcctattaacgt

SEQ ID NO: 14724 - DNA, 16 bp, synthetic construct
  misc_feature 1..16: note = synthetic [barcode part1]
  source 1..16: mol_type = other DNA
tatacaggtgaggtgt

SEQ ID NO: 14725 - DNA, 16 bp, synthetic construct
  misc_feature 1..16: note = synthetic [barcode part1]
  source 1..16: mol_type = other DNA
aagagtgccgtactct

SEQ ID NO: 14726 - DNA, 16 bp, synthetic construct
  misc_feature 1..16: note = synthetic [barcode part1]
  source 1..16: mol_type = other DNA
atcgcgcactgagaag

SEQ ID NO: 14727 - DNA, 16 bp, synthetic construct
  misc_feature 1..16: note = synthetic [barcode part1]
  source 1..16: mol_type = other DNA
agtgttacacggcgtt

SEQ ID NO: 14728 - DNA, 16 bp, synthetic construct
  misc_feature 1..16: note = synthetic [barcode part1]
  source 1..16: mol_type = other DNA
tatcgttggtgacgac

SEQ ID NO: 14729 - DNA, 16 bp, synthetic construct
  misc_feature 1..16: note = synthetic [barcode part1]
  source 1..16: mol_type = other DNA
tataccgtgcggttag

SEQ ID NO: 14730 - DNA, 16 bp, synthetic construct
  misc_feature 1..16: note = synthetic [barcode part1]
  source 1..16: mol_type = other DNA
cagaaggcgactacac

SEQ ID NO: 14731 - DNA, 16 bp, synthetic construct
  misc_feature 1..16: note = synthetic [barcode part1]
  source 1..16: mol_type = other DNA
acagatccacactgac

SEQ ID NO: 14732 - DNA, 16 bp, synthetic construct
  misc_feature 1..16: note = synthetic [barcode part1]
  source 1..16: mol_type = other DNA
gattaaccacgcgtgt

SEQ ID NO: 14733 - DNA, 16 bp, synthetic construct
  misc_feature 1..16: note = synthetic [barcode part1]
  source 1..16: mol_type = other DNA
gatatcctcacacgag

SEQ ID NO: 14734 - DNA, 16 bp, synthetic construct
  misc_feature 1..16: note = synthetic [barcode part1]
  source 1..16: mol_type = other DNA
acgtcggttccgttac

SEQ ID NO: 14735 - DNA, 16 bp, synthetic construct
  misc_feature 1..16: note = synthetic [barcode part1]
  source 1..16: mol_type = other DNA
tcctcaacgaccgtgt

SEQ ID NO: 14736 - DNA, 16 bp, synthetic construct
  misc_feature 1..16: note = synthetic [barcode part1]
  source 1..16: mol_type = other DNA
cggtattaacaccacg

SEQ ID NO: 14737 - DNA, 16 bp, synthetic construct
  misc_feature 1..16: note = synthetic [barcode part1]
  source 1..16: mol_type = other DNA
ttcgcctgtgataccg

SEQ ID NO: 14738 - DNA, 16 bp, synthetic construct
  misc_feature 1..16: note = synthetic [barcode part1]
  source 1..16: mol_type = other DNA
cgcgcaattacacaac

SEQ ID NO: 14739 - DNA, 16 bp, synthetic construct
  misc_feature 1..16: note = synthetic [barcode part1]
  source 1..16: mol_type = other DNA
tggtggattactccag

SEQ ID NO: 14740 - DNA, 16 bp, synthetic construct
  misc_feature 1..16: note = synthetic [barcode part1]
  source 1..16: mol_type = other DNA
ataggttgaggatcgt

SEQ ID NO: 14741 - DNA, 16 bp, synthetic construct
  misc_feature 1..16: note = synthetic [barcode part1]
  source 1..16: mol_type = other DNA
tctggtaacgaaggcg

SEQ ID NO: 14742 - DNA, 16 bp, synthetic construct
  misc_feature 1..16: note = synthetic [barcode part1]
  source 1..16: mol_type = other DNA
actggcgcagaagatc

SEQ ID NO: 14743 - DNA, 16 bp, synthetic construct
  misc_feature 1..16: note = synthetic [barcode part1]
  source 1..16: mol_type = other DNA
caagtctcggagtgag

SEQ ID NO: 14744 - DNA, 16 bp, synthetic construct
  misc_feature 1..16: note = synthetic [barcode part1]
  source 1..16: mol_type = other DNA
acagtcagtacgttgc

SEQ ID NO: 14745 - DNA, 16 bp, synthetic construct
  misc_feature 1..16: note = synthetic [barcode part1]
  source 1..16: mol_type = other DNA
ccgataacgaactacc

SEQ ID NO: 14746 - DNA, 16 bp, synthetic construct
  misc_feature 1..16: note = synthetic [barcode part1]
  source 1..16: mol_type = other DNA
gtgtggaataaggacg

SEQ ID NO: 14747 - DNA, 16 bp, synthetic construct
  misc_feature 1..16: note = synthetic [barcode part1]
  source 1..16: mol_type = other DNA
tctcgcaatcaagttc

SEQ ID NO: 14748 - DNA, 16 bp, synthetic construct
  misc_feature 1..16: note = synthetic [barcode part1]
  source 1..16: mol_type = other DNA
tatactacggtgcgtg

SEQ ID NO: 14749 - DNA, 16 bp, synthetic construct
  misc_feature 1..16: note = synthetic [barcode part1]
  source 1..16: mol_type = other DNA
tgagacgaacagtgag

SEQ ID NO: 14750 - DNA, 16 bp, synthetic construct
  misc_feature 1..16: note = synthetic [barcode part1]
  source 1..16: mol_type = other DNA
cagacgcactactctc

SEQ ID NO: 14751 - DNA, 16 bp, synthetic construct
  misc_feature 1..16: note = synthetic [barcode part1]
  source 1..16: mol_type = other DNA
cggaccgaatctaact

SEQ ID NO: 14752 - DNA, 16 bp, synthetic construct
  misc_feature 1..16: note = synthetic [barcode part1]
  source 1..16: mol_type = other DNA
aacttctatatccggc

SEQ ID NO: 14753 - DNA, 16 bp, synthetic construct
  misc_feature 1..16: note = synthetic [barcode part1]
  source 1..16: mol_type = other DNA
tacgttggacttcttg

SEQ ID NO: 14754 - DNA, 16 bp, synthetic construct
  misc_feature 1..16: note = synthetic [barcode part1]
  source 1..16: mol_type = other DNA
cgaattgttccacgcc

SEQ ID NO: 14755 - DNA, 16 bp, synthetic construct
  misc_feature 1..16: note = synthetic [barcode part1]
  source 1..16: mol_type = other DNA
aagtacaggtccgacg

SEQ ID NO: 14756 - DNA, 16 bp, synthetic construct
  misc_feature 1..16: note = synthetic [barcode part1]
  source 1..16: mol_type = other DNA
ttcctcggaactgaag

SEQ ID NO: 14757 - DNA, 16 bp, synthetic construct
  misc_feature 1..16: note = synthetic [barcode part1]
  source 1..16: mol_type = other DNA
cgcaataccacctacc

SEQ ID NO: 14758 - DNA, 16 bp, synthetic construct
  misc_feature 1..16: note = synthetic [barcode part1]
  source 1..16: mol_type = other DNA
attcaggactctgttc

SEQ ID NO: 14759 - DNA, 16 bp, synthetic construct
  misc_feature 1..16: note = synthetic [barcode part1]
  source 1..16: mol_type = other DNA
gaggttggtacagtcg

SEQ ID NO: 14760 - DNA, 16 bp, synthetic construct
  misc_feature 1..16: note = synthetic [barcode part1]
  source 1..16: mol_type = other DNA
gaccaatataccacgc

SEQ ID NO: 14761 - DNA, 16 bp, synthetic construct
  misc_feature 1..16: note = synthetic [barcode part1]
  source 1..16: mol_type = other DNA
tgcgaatagatctgcc

SEQ ID NO: 14762 - DNA, 16 bp, synthetic construct
  misc_feature 1..16: note = synthetic [barcode part1]
  source 1..16: mol_type = other DNA
accgcaagtaggtggt

SEQ ID NO: 14763 - DNA, 16 bp, synthetic construct
  misc_feature 1..16: note = synthetic [barcode part1]
  source 1..16: mol_type = other DNA
cgattctgtgttgact

SEQ ID NO: 14764 - DNA, 16 bp, synthetic construct
  misc_feature 1..16: note = synthetic [barcode part1]
  source 1..16: mol_type = other DNA
tgtccgcctgtaacgt

SEQ ID NO: 14765 - DNA, 16 bp, synthetic construct
  misc_feature 1..16: note = synthetic [barcode part1]
  source 1..16: mol_type = other DNA
gtcgcgatacctactc

SEQ ID NO: 14766 - DNA, 16 bp, synthetic construct
  misc_feature 1..16: note = synthetic [barcode part1]
  source 1..16: mol_type = other DNA
agtcaggcaggtctag

SEQ ID NO: 14767 - DNA, 16 bp, synthetic construct
  misc_feature 1..16: note = synthetic [barcode part1]
  source 1..16: mol_type = other DNA
tgtatatcggcaccag

SEQ ID NO: 14768 - DNA, 16 bp, synthetic construct
  misc_feature 1..16: note = synthetic [barcode part1]
  source 1..16: mol_type = other DNA
tccagattcaccaccg

SEQ ID NO: 14769 - DNA, 16 bp, synthetic construct
  misc_feature 1..16: note = synthetic [barcode part1]
  source 1..16: mol_type = other DNA
ccgatagtcgttgagt

SEQ ID NO: 14770 - DNA, 16 bp, synthetic construct
  misc_feature 1..16: note = synthetic [barcode part1]
  source 1..16: mol_type = other DNA
tgagttcgcgaattcg

SEQ ID NO: 14771 - DNA, 16 bp, synthetic construct
  misc_feature 1..16: note = synthetic [barcode part1]
  source 1..16: mol_type = other DNA
agatcacgtctagtgc

SEQ ID NO: 14772 - DNA, 16 bp, synthetic construct
  misc_feature 1..16: note = synthetic [barcode part1]
  source 1..16: mol_type = other DNA
tcgaagtgtcttaggc

SEQ ID NO: 14773 - DNA, 16 bp, synthetic construct
  misc_feature 1..16: note = synthetic [barcode part1]
  source 1..16: mol_type = other DNA
tcggaatcttgagacc

SEQ ID NO: 14774 - DNA, 16 bp, synthetic construct
  misc_feature 1..16: note = synthetic [barcode part1]
  source 1..16: mol_type = other DNA
agacgttcctaccacc

SEQ ID NO: 14775 - DNA, 16 bp, synthetic construct
  misc_feature 1..16: note = synthetic [barcode part1]
  source 1..16: mol_type = other DNA
atcctagtggtcaacg

SEQ ID NO: 14776 - DNA, 16 bp, synthetic construct
  misc_feature 1..16: note = synthetic [barcode part1]
  source 1..16: mol_type = other DNA
agtactgccaatcgac

SEQ ID NO: 14777 - DNA, 16 bp, synthetic construct
  misc_feature 1..16: note = synthetic [barcode part1]
  source 1..16: mol_type = other DNA
gtgaatcaggaattgc

SEQ ID NO: 14778 - DNA, 16 bp, synthetic construct
  misc_feature 1..16: note = synthetic [barcode part1]
  source 1..16: mol_type = other DNA
agtgtggtattaggtg

SEQ ID NO: 14779 - DNA, 16 bp, synthetic construct
  misc_feature 1..16: note = synthetic [barcode part1]
  source 1..16: mol_type = other DNA
acagaccactagaagt

SEQ ID NO: 14780 - DNA, 16 bp, synthetic construct
  misc_feature 1..16: note = synthetic [barcode part1]
  source 1..16: mol_type = other DNA
tacggacctacaggtt

SEQ ID NO: 14781 - DNA, 16 bp, synthetic construct
  misc_feature 1..16: note = synthetic [barcode part1]
  source 1..16: mol_type = other DNA
aacgtactgcagttgc

SEQ ID NO: 14782 - DNA, 16 bp, synthetic construct
  misc_feature 1..16: note = synthetic [barcode part1]
  source 1..16: mol_type = other DNA
aggacttgtgaacggc

SEQ ID NO: 14783 - DNA, 16 bp, synthetic construct
  misc_feature 1..16: note = synthetic [barcode part1]
  source 1..16: mol_type = other DNA
tcacagattacgtggc

SEQ ID NO: 14784 - DNA, 16 bp, synthetic construct
  misc_feature 1..16: note = synthetic [barcode part1]
  source 1..16: mol_type = other DNA
atctgactacgttctg

SEQ ID NO: 14785 - DNA, 16 bp, synthetic construct
  misc_feature 1..16: note = synthetic [barcode part1]
  source 1..16: mol_type = other DNA
tcaactgtggtcaacg

SEQ ID NO: 14786 - DNA, 16 bp, synthetic construct
  misc_feature 1..16: note = synthetic [barcode part1]
  source 1..16: mol_type = other DNA
tatacggcactagtgc

SEQ ID NO: 14787 - DNA, 16 bp, synthetic construct
  misc_feature 1..16: note = synthetic [barcode part1]
  source 1..16: mol_type = other DNA
gtgaccgatacactac

SEQ ID NO: 14788 - DNA, 16 bp, synthetic construct
  misc_feature 1..16: note = synthetic [barcode part1]
  source 1..16: mol_type = other DNA
accggtggaatcagac

SEQ ID NO: 14789 - DNA, 16 bp, synthetic construct
  misc_feature 1..16: note = synthetic [barcode part1]
  source 1..16: mol_type = other DNA
attggcgattcttcgt

SEQ ID NO: 14790 - DNA, 16 bp, synthetic construct
  misc_feature 1..16: note = synthetic [barcode part1]
  source 1..16: mol_type = other DNA
aagaccggagaatcag

SEQ ID NO: 14791 - DNA, 16 bp, synthetic construct
  misc_feature 1..16: note = synthetic [barcode part1]
  source 1..16: mol_type = other DNA
tagtacgacgtggttc

SEQ ID NO: 14792 - DNA, 16 bp, synthetic construct
  misc_feature 1..16: note = synthetic [barcode part1]
  source 1..16: mol_type = other DNA
tcctcttgaggagaac

SEQ ID NO: 14793 - DNA, 16 bp, synthetic construct
  misc_feature 1..16: note = synthetic [barcode part1]
  source 1..16: mol_type = other DNA
aggatcgactgttctg

SEQ ID NO: 14794 - DNA, 16 bp, synthetic construct
  misc_feature 1..16: note = synthetic [barcode part1]
  source 1..16: mol_type = other DNA
gcagagattgacaatc

SEQ ID NO: 14795 - DNA, 16 bp, synthetic construct
  misc_feature 1..16: note = synthetic [barcode part1]
  source 1..16: mol_type = other DNA
tgactgtatagtcgcg

SEQ ID NO: 14796 - DNA, 16 bp, synthetic construct
  misc_feature 1..16: note = synthetic [barcode part1]
  source 1..16: mol_type = other DNA
tgtgttgaattcctcg

SEQ ID NO: 14797 - DNA, 16 bp, synthetic construct
  misc_feature 1..16: note = synthetic [barcode part1]
  source 1..16: mol_type = other DNA
gtcctgcaggtgttct

SEQ ID NO: 14798 - DNA, 16 bp, synthetic construct
  misc_feature 1..16: note = synthetic [barcode part1]
  source 1..16: mol_type = other DNA
cctctacgttcaatag

SEQ ID NO: 14799 - DNA, 16 bp, synthetic construct
  misc_feature 1..16: note = synthetic [barcode part1]
  source 1..16: mol_type = other DNA
agacaaggcctcaggt

SEQ ID NO: 14800 - DNA, 16 bp, synthetic construct
  misc_feature 1..16: note = synthetic [barcode part1]
  source 1..16: mol_type = other DNA
acggtccaataactcg

SEQ ID NO: 14801 - DNA, 16 bp, synthetic construct
  misc_feature 1..16: note = synthetic [barcode part1]
  source 1..16: mol_type = other DNA
tcagttctaccagtgt

SEQ ID NO: 14802 - DNA, 16 bp, synthetic construct
  misc_feature 1..16: note = synthetic [barcode part1]
  source 1..16: mol_type = other DNA
gtggacctcctatcac

SEQ ID NO: 14803 - DNA, 16 bp, synthetic construct
  misc_feature 1..16: note = synthetic [barcode part1]
  source 1..16: mol_type = other DNA
gttcagtaccaagtcg

SEQ ID NO: 14804 - DNA, 16 bp, synthetic construct
  misc_feature 1..16: note = synthetic [barcode part1]
  source 1..16: mol_type = other DNA
tgatacgtacgttggc

SEQ ID NO: 14805 - DNA, 16 bp, synthetic construct
  misc_feature 1..16: note = synthetic [barcode part1]
  source 1..16: mol_type = other DNA
ttacgttcgccgaacc

SEQ ID NO: 14806 - DNA, 16 bp, synthetic construct
  misc_feature 1..16: note = synthetic [barcode part1]
  source 1..16: mol_type = other DNA
gcacctcgtcactagt

SEQ ID NO: 14807 - DNA, 16 bp, synthetic construct
  misc_feature 1..16: note = synthetic [barcode part1]
  source 1..16: mol_type = other DNA
tgaagatcgttagacg

SEQ ID NO: 14808 - DNA, 16 bp, synthetic construct
  misc_feature 1..16: note = synthetic [barcode part1]
  source 1..16: mol_type = other DNA
atctgttgtcctgaac

SEQ ID NO: 14809 - DNA, 16 bp, synthetic construct
  misc_feature 1..16: note = synthetic [barcode part1]
  source 1..16: mol_type = other DNA
gtccttctctcaactg

SEQ ID NO: 14810 - DNA, 16 bp, synthetic construct
  misc_feature 1..16: note = synthetic [barcode part1]
  source 1..16: mol_type = other DNA
tgaagaacacacagtc

SEQ ID NO: 14811 - DNA, 16 bp, synthetic construct
  misc_feature 1..16: note = synthetic [barcode part1]
  source 1..16: mol_type = other DNA
tggactaatcaggtcc

SEQ ID NO: 14812 - DNA, 16 bp, synthetic construct
  misc_feature 1..16: note = synthetic [barcode part1]
  source 1..16: mol_type = other DNA
agaggtaggtaacctt

SEQ ID NO: 14813 - DNA, 16 bp, synthetic construct
  misc_feature 1..16: note = synthetic [barcode part1]
  source 1..16: mol_type = other DNA
cgaatcacacgaggac

SEQ ID NO: 14814 - DNA, 16 bp, synthetic construct
  misc_feature 1..16: note = synthetic [barcode part1]
  source 1..16: mol_type = other DNA
gttattcgagtctacc

SEQ ID NO: 14815 - DNA, 16 bp, synthetic construct
  misc_feature 1..16: note = synthetic [barcode part1]
  source 1..16: mol_type = other DNA
tgtgactaagagtcag

SEQ ID NO: 14816 - DNA, 16 bp, synthetic construct
  misc_feature 1..16: note = synthetic [barcode part1]
  source 1..16: mol_type = other DNA
ttacttccacggattg

SEQ ID NO: 14817 - DNA, 16 bp, synthetic construct
  misc_feature 1..16: note = synthetic [barcode part1]
  source 1..16: mol_type = other DNA
cctcgttgcgaatctg

SEQ ID NO: 14818 - DNA, 16 bp, synthetic construct
  misc_feature 1..16: note = synthetic [barcode part1]
  source 1..16: mol_type = other DNA
ttgcggatagactcgt

SEQ ID NO: 14819 - DNA, 16 bp, synthetic construct
  misc_feature 1..16: note = synthetic [barcode part1]
  source 1..16: mol_type = other DNA
cgttgtcgacgataac

SEQ ID NO: 14820 - DNA, 16 bp, synthetic construct
  misc_feature 1..16: note = synthetic [barcode part1]
  source 1..16: mol_type = other DNA
ttcaggtctcgtgaag

SEQ ID NO: 14821 - DNA, 16 bp, synthetic construct
  misc_feature 1..16: note = synthetic [barcode part1]
  source 1..16: mol_type = other DNA
cacaatcgttatctcg

SEQ ID NO: 14822 - DNA, 16 bp, synthetic construct
  misc_feature 1..16: note = synthetic [barcode part1]
  source 1..16: mol_type = other DNA
tcggcagatagagacc

SEQ ID NO: 14823 - DNA, 16 bp, synthetic construct
  misc_feature 1..16: note = synthetic [barcode part1]
  source 1..16: mol_type = other DNA
gttgagtagtggttcc

SEQ ID NO: 14824 - DNA, 16 bp, synthetic construct
  misc_feature 1..16: note = synthetic [barcode part1]
  source 1..16: mol_type = other DNA
tcgcaatcgtgtacag

SEQ ID NO: 14825 - DNA, 16 bp, synthetic construct
  misc_feature 1..16: note = synthetic [barcode part1]
  source 1..16: mol_type = other DNA
tcacgatatcgtgacg

SEQ ID NO: 14826 - DNA, 16 bp, synthetic construct
  misc_feature 1..16: note = synthetic [barcode part1]
  source 1..16: mol_type = other DNA
gatcaactgtgcgtac

SEQ ID NO: 14827 - DNA, 16 bp, synthetic construct
  misc_feature 1..16: note = synthetic [barcode part1]
  source 1..16: mol_type = other DNA
actactgcgatccaag

SEQ ID NO: 14828 - DNA, 16 bp, synthetic construct
  misc_feature 1..16: note = synthetic [barcode part1]
  source 1..16: mol_type = other DNA
gtcagatacctagtgc

SEQ ID NO: 14829 - DNA, 16 bp, synthetic construct
  misc_feature 1..16: note = synthetic [barcode part1]
  source 1..16: mol_type = other DNA
agttattggaccgtcg

SEQ ID NO: 14830 - DNA, 16 bp, synthetic construct
  misc_feature 1..16: note = synthetic [barcode part1]
  source 1..16: mol_type = other DNA
cctactatcggatact

SEQ ID NO: 14831 - DNA, 16 bp, synthetic construct
  misc_feature 1..16: note = synthetic [barcode part1]
  source 1..16: mol_type = other DNA
aattactcagaccgcg

SEQ ID NO: 14832 - DNA, 16 bp, synthetic construct
  misc_feature 1..16: note = synthetic [barcode part1]
  source 1..16: mol_type = other DNA
gacgtgaggtaatccg

SEQ ID NO: 14833 - DNA, 16 bp, synthetic construct
  misc_feature 1..16: note = synthetic [barcode part1]
  source 1..16: mol_type = other DNA
ttctagttctcaccgc

SEQ ID NO: 14834 - DNA, 16 bp, synthetic construct
  misc_feature 1..16: note = synthetic [barcode part1]
  source 1..16: mol_type = other DNA
tgaaccagaggacacc

SEQ ID NO: 14835 - DNA, 16 bp, synthetic construct
  misc_feature 1..16: note = synthetic [barcode part1]
  source 1..16: mol_type = other DNA
aaccaactgtggtgtc

SEQ ID NO: 14836 - DNA, 16 bp, synthetic construct
  misc_feature 1..16: note = synthetic [barcode part1]
  source 1..16: mol_type = other DNA
caatcaagaccgacct

SEQ ID NO: 14837 - DNA, 16 bp, synthetic construct
  misc_feature 1..16: note = synthetic [barcode part1]
  source 1..16: mol_type = other DNA
tccgactcaactgtgc

SEQ ID NO: 14838 - DNA, 16 bp, synthetic construct
  misc_feature 1..16: note = synthetic [barcode part1]
  source 1..16: mol_type = other DNA
accgttctctgagtgc

SEQ ID NO: 14839 - DNA, 16 bp, synthetic construct
  misc_feature 1..16: note = synthetic [barcode part1]
  source 1..16: mol_type = other DNA
tgcgattgacctacag

SEQ ID NO: 14840 - DNA, 16 bp, synthetic construct
  misc_feature 1..16: note = synthetic [barcode part1]
  source 1..16: mol_type = other DNA
gattctcgtatccagt

SEQ ID NO: 14841 - DNA, 16 bp, synthetic construct
  misc_feature 1..16: note = synthetic [barcode part1]
  source 1..16: mol_type = other DNA
ttacgagtcgttgttc

SEQ ID NO: 14842 - DNA, 16 bp, synthetic construct
  misc_feature 1..16: note = synthetic [barcode part1]
  source 1..16: mol_type = other DNA
agaccagtctcctaag

SEQ ID NO: 14843 - DNA, 16 bp, synthetic construct
  misc_feature 1..16: note = synthetic [barcode part1]
  source 1..16: mol_type = other DNA
tcacctcaagacagtg

SEQ ID NO: 14844 - DNA, 16 bp, synthetic construct
  misc_feature 1..16: note = synthetic [barcode part1]
  source 1..16: mol_type = other DNA
ttcaggtgtgatcgtg

SEQ ID NO: 14845 - DNA, 16 bp, synthetic construct
  misc_feature 1..16: note = synthetic [barcode part1]
  source 1..16: mol_type = other DNA
agatccacggaggatc

SEQ ID NO: 14846 - DNA, 16 bp, synthetic construct
  misc_feature 1..16: note = synthetic [barcode part1]
  source 1..16: mol_type = other DNA
ttcgccaccttatcac

SEQ ID NO: 14847 - DNA, 16 bp, synthetic construct
  misc_feature 1..16: note = synthetic [barcode part1]
  source 1..16: mol_type = other DNA
acagtgtgttgtggtc

SEQ ID NO: 14848 - DNA, 16 bp, synthetic construct
  misc_feature 1..16: note = synthetic [barcode part1]
  source 1..16: mol_type = other DNA
aatctccttctgccgt

SEQ ID NO: 14849 - DNA, 16 bp, synthetic construct
  misc_feature 1..16: note = synthetic [barcode part1]
  source 1..16: mol_type = other DNA
gtgcagaaggtgtaag

SEQ ID NO: 14850 - DNA, 16 bp, synthetic construct
  misc_feature 1..16: note = synthetic [barcode part1]
  source 1..16: mol_type = other DNA
tcgactctctgcgaac

SEQ ID NO: 14851 - DNA, 16 bp, synthetic construct
  misc_feature 1..16: note = synthetic [barcode part1]
  source 1..16: mol_type = other DNA
cacaacagtggtgttc

SEQ ID NO: 14852 - DNA, 16 bp, synthetic construct
  misc_feature 1..16: note = synthetic [barcode part1]
  source 1..16: mol_type = other DNA
cgaaggttatctccag

SEQ ID NO: 14853 - DNA, 16 bp, synthetic construct
  misc_feature 1..16: note = synthetic [barcode part1]
  source 1..16: mol_type = other DNA
acgagttgccagagac

SEQ ID NO: 14854 - DNA, 16 bp, synthetic construct
  misc_feature 1..16: note = synthetic [barcode part1]
  source 1..16: mol_type = other DNA
caggccaaggagtatc

SEQ ID NO: 14855 - DNA, 16 bp, synthetic construct
  misc_feature 1..16: note = synthetic [barcode part1]
  source 1..16: mol_type = other DNA
gcgttataagtgagtg

SEQ ID NO: 14856 - DNA, 16 bp, synthetic construct
  misc_feature 1..16: note = synthetic [barcode part1]
  source 1..16: mol_type = other DNA
taagttacacggagac

SEQ ID NO: 14857 - DNA, 16 bp, synthetic construct
  misc_feature 1..16: note = synthetic [barcode part1]
  source 1..16: mol_type = other DNA
gcacgcgtaatcagtt

SEQ ID NO: 14858 - DNA, 16 bp, synthetic construct
  misc_feature 1..16: note = synthetic [barcode part1]
  source 1..16: mol_type = other DNA
cctataccgtgagagt

SEQ ID NO: 14859 - DNA, 16 bp, synthetic construct
  misc_feature 1..16: note = synthetic [barcode part1]
  source 1..16: mol_type = other DNA
tagaagtaggcacgag

SEQ ID NO: 14860 - DNA, 16 bp, synthetic construct
  misc_feature 1..16: note = synthetic [barcode part1]
  source 1..16: mol_type = other DNA
agtgactgtgtaagac

SEQ ID NO: 14861 - DNA, 16 bp, synthetic construct
  misc_feature 1..16: note = synthetic [barcode part1]
  source 1..16: mol_type = other DNA
ccgaacaagatagtgt

SEQ ID NO: 14862 - DNA, 16 bp, synthetic construct
  misc_feature 1..16: note = synthetic [barcode part1]
  source 1..16: mol_type = other DNA
acgaatcgcgttcaac

SEQ ID NO: 14863 - DNA, 16 bp, synthetic construct
  misc_feature 1..16: note = synthetic [barcode part1]
  source 1..16: mol_type = other DNA
agtaccttagaaggtg

SEQ ID NO: 14864 - DNA, 16 bp, synthetic construct
  misc_feature 1..16: note = synthetic [barcode part1]
  source 1..16: mol_type = other DNA
cggagattgaattgtg

SEQ ID NO: 14865 - DNA, 16 bp, synthetic construct
  misc_feature 1..16: note = synthetic [barcode part1]
  source 1..16: mol_type = other DNA
gtgaatctccttggcc

SEQ ID NO: 14866 - DNA, 16 bp, synthetic construct
  misc_feature 1..16: note = synthetic [barcode part1]
  source 1..16: mol_type = other DNA
gtaatcgaccacacac

SEQ ID NO: 14867 - DNA, 16 bp, synthetic construct
  misc_feature 1..16: note = synthetic [barcode part1]
  source 1..16: mol_type = other DNA
cagactgatatctcct

SEQ ID NO: 14868 - DNA, 16 bp, synthetic construct
  misc_feature 1..16: note = synthetic [barcode part1]
  source 1..16: mol_type = other DNA
ttgttgccttgaacgt

SEQ ID NO: 14869 - DNA, 16 bp, synthetic construct
  misc_feature 1..16: note = synthetic [barcode part1]
  source 1..16: mol_type = other DNA
ttgtcgcagacagtac

SEQ ID NO: 14870 - DNA, 16 bp, synthetic construct
  misc_feature 1..16: note = synthetic [barcode part1]
  source 1..16: mol_type = other DNA
ttgaatacaaggcgac

SEQ ID NO: 14871 - DNA, 16 bp, synthetic construct
  misc_feature 1..16: note = synthetic [barcode part1]
  source 1..16: mol_type = other DNA
caggcgtgaaggttac

SEQ ID NO: 14872 - DNA, 16 bp, synthetic construct
  misc_feature 1..16: note = synthetic [barcode part1]
  source 1..16: mol_type = other DNA
cgttgtctaccttacc

SEQ ID NO: 14873 - DNA, 16 bp, synthetic construct
  misc_feature 1..16: note = synthetic [barcode part1]
  source 1..16: mol_type = other DNA
agaccgaagagttgag

SEQ ID NO: 14874 - DNA, 16 bp, synthetic construct
  misc_feature 1..16: note = synthetic [barcode part1]
  source 1..16: mol_type = other DNA
tacgtacaaccagtcg

SEQ ID NO: 14875 - DNA, 16 bp, synthetic construct
  misc_feature 1..16: note = synthetic [barcode part1]
  source 1..16: mol_type = other DNA
aagaagtacaaccacc

SEQ ID NO: 14876 - DNA, 16 bp, synthetic construct
  misc_feature 1..16: note = synthetic [barcode part1]
  source 1..16: mol_type = other DNA
tctcctctcttggagt

SEQ ID NO: 14877 - DNA, 16 bp, synthetic construct
  misc_feature 1..16: note = synthetic [barcode part1]
  source 1..16: mol_type = other DNA
gtgtctcttagtaacc

SEQ ID NO: 14878 - DNA, 16 bp, synthetic construct
  misc_feature 1..16: note = synthetic [barcode part1]
  source 1..16: mol_type = other DNA
aatcgtctatctccag

SEQ ID NO: 14879 - DNA, 16 bp, synthetic construct
  misc_feature 1..16: note = synthetic [barcode part1]
  source 1..16: mol_type = other DNA
tgtaacaggcaccgtt

SEQ ID NO: 14880 - DNA, 16 bp, synthetic construct
  misc_feature 1..16: note = synthetic [barcode part1]
  source 1..16: mol_type = other DNA
gactgacctagttggt

SEQ ID NO: 14881 - DNA, 16 bp, synthetic construct
  misc_feature 1..16: note = synthetic [barcode part1]
  source 1..16: mol_type = other DNA
actcgttcactcacct

SEQ ID NO: 14882 - DNA, 16 bp, synthetic construct
  misc_feature 1..16: note = synthetic [barcode part1]
  source 1..16: mol_type = other DNA
cgagagatacaaccgc

SEQ ID NO: 14883 - DNA, 16 bp, synthetic construct
  misc_feature 1..16: note = synthetic [barcode part1]
  source 1..16: mol_type = other DNA
gtcacctgtaataggc

SEQ ID NO: 14884 - DNA, 16 bp, synthetic construct
  misc_feature 1..16: note = synthetic [barcode part1]
  source 1..16: mol_type = other DNA
tgcgcgataccttgtc

SEQ ID NO: 14885 - DNA, 16 bp, synthetic construct
  misc_feature 1..16: note = synthetic [barcode part1]
  source 1..16: mol_type = other DNA
gtccgagtcacttcac

SEQ ID NO: 14886 - DNA, 16 bp, synthetic construct
  misc_feature 1..16: note = synthetic [barcode part1]
  source 1..16: mol_type = other DNA
aacttaggtgcgaagt

SEQ ID NO: 14887 - DNA, 16 bp, synthetic construct
  misc_feature 1..16: note = synthetic [barcode part1]
  source 1..16: mol_type = other DNA
cgcctacgaatcctgt

SEQ ID NO: 14888 - DNA, 16 bp, synthetic construct
  misc_feature 1..16: note = synthetic [barcode part1]
  source 1..16: mol_type = other DNA
acgacgtggttaacct

SEQ ID NO: 14889 - DNA, 16 bp, synthetic construct
  misc_feature 1..16: note = synthetic [barcode part1]
  source 1..16: mol_type = other DNA
aatcaaggtgatcgtg

SEQ ID NO: 14890 - DNA, 16 bp, synthetic construct
  misc_feature 1..16: note = synthetic [barcode part1]
  source 1..16: mol_type = other DNA
cgattctggaggatct

SEQ ID NO: 14891 - DNA, 16 bp, synthetic construct
  misc_feature 1..16: note = synthetic [barcode part1]
  source 1..16: mol_type = other DNA
gcaatacgtattgcgc

SEQ ID NO: 14892 - DNA, 16 bp, synthetic construct
  misc_feature 1..16: note = synthetic [barcode part1]
  source 1..16: mol_type = other DNA
gatccggttaacaacc

SEQ ID NO: 14893 - DNA, 16 bp, synthetic construct
  misc_feature 1..16: note = synthetic [barcode part1]
  source 1..16: mol_type = other DNA
tgcacgaggtagtggt

SEQ ID NO: 14894 - DNA, 16 bp, synthetic construct
  misc_feature 1..16: note = synthetic [barcode part1]
  source 1..16: mol_type = other DNA
tgtggatagtgttcgc

SEQ ID NO: 14895 - DNA, 16 bp, synthetic construct
  misc_feature 1..16: note = synthetic [barcode part1]
  source 1..16: mol_type = other DNA
tgaggttgtgttacgc

SEQ ID NO: 14896 - DNA, 16 bp, synthetic construct
  misc_feature 1..16: note = synthetic [barcode part1]
  source 1..16: mol_type = other DNA
acgaacttgtaccgac

SEQ ID NO: 14897 - DNA, 16 bp, synthetic construct
  misc_feature 1..16: note = synthetic [barcode part1]
  source 1..16: mol_type = other DNA
acacctcctaggttgc

SEQ ID NO: 14898 - DNA, 16 bp, synthetic construct
  misc_feature 1..16: note = synthetic [barcode part1]
  source 1..16: mol_type = other DNA
ttacgcactaacttcg

SEQ ID NO: 14899 - DNA, 16 bp, synthetic construct
  misc_feature 1..16: note = synthetic [barcode part1]
  source 1..16: mol_type = other DNA
acttccagacgatctt

SEQ ID NO: 14900 - DNA, 16 bp, synthetic construct
  misc_feature 1..16: note = synthetic [barcode part1]
  source 1..16: mol_type = other DNA
tgcgcctacagttcgt

SEQ ID NO: 14901 - DNA, 16 bp, synthetic construct
  misc_feature 1..16: note = synthetic [barcode part1]
  source 1..16: mol_type = other DNA
gatagtataccgcctg

SEQ ID NO: 14902 - DNA, 16 bp, synthetic construct
  misc_feature 1..16: note = synthetic [barcode part1]
  source 1..16: mol_type = other DNA
agacctacggaaggtc

SEQ ID NO: 14903 - DNA, 16 bp, synthetic construct
  misc_feature 1..16: note = synthetic [barcode part1]
  source 1..16: mol_type = other DNA
ccagtgattacgttct

SEQ ID NO: 14904 - DNA, 16 bp, synthetic construct
  misc_feature 1..16: note = synthetic [barcode part1]
  source 1..16: mol_type = other DNA
accacagtatcacggt

SEQ ID NO: 14905 - DNA, 16 bp, synthetic construct
  misc_feature 1..16: note = synthetic [barcode part1]
  source 1..16: mol_type = other DNA
cagaattctgaggcct

SEQ ID NO: 14906 - DNA, 16 bp, synthetic construct
  misc_feature 1..16: note = synthetic [barcode part1]
  source 1..16: mol_type = other DNA
gaatccgatctcttgt

SEQ ID NO: 14907 - DNA, 16 bp, synthetic construct
  misc_feature 1..16: note = synthetic [barcode part1]
  source 1..16: mol_type = other DNA
tacgtgttgaccagtg

SEQ ID NO: 14908 - DNA, 16 bp, synthetic construct
  misc_feature 1..16: note = synthetic [barcode part1]
  source 1..16: mol_type = other DNA
actatagtcgtccgtt

SEQ ID NO: 14909 - DNA, 16 bp, synthetic construct
  misc_feature 1..16: note = synthetic [barcode part1]
  source 1..16: mol_type = other DNA
tcactgatcttcgtag

SEQ ID NO: 14910 - DNA, 16 bp, synthetic construct
  misc_feature 1..16: note = synthetic [barcode part1]
  source 1..16: mol_type = other DNA
gtggtaccagttggtt

SEQ ID NO: 14911 - DNA, 16 bp, synthetic construct
  misc_feature 1..16: note = synthetic [barcode part1]
  source 1..16: mol_type = other DNA
cgactagtggtatcgt

SEQ ID NO: 14912 - DNA, 16 bp, synthetic construct
  misc_feature 1..16: note = synthetic [barcode part1]
  source 1..16: mol_type = other DNA
cggaattctccagaac

SEQ ID NO: 14913 - DNA, 16 bp, synthetic construct
  misc_feature 1..16: note = synthetic [barcode part1]
  source 1..16: mol_type = other DNA
aaggcgacaggataac

SEQ ID NO: 14914 - DNA, 16 bp, synthetic construct
  misc_feature 1..16: note = synthetic [barcode part1]
  source 1..16: mol_type = other DNA
tcgtacctattagacc

SEQ ID NO: 14915 - DNA, 16 bp, synthetic construct
  misc_feature 1..16: note = synthetic [barcode part1]
  source 1..16: mol_type = other DNA
cgtgcggcaagaagtt

SEQ ID NO: 14916 - DNA, 16 bp, synthetic construct
  misc_feature 1..16: note = synthetic [barcode part1]
  source 1..16: mol_type = other DNA
attggtcgaccaatcg

SEQ ID NO: 14917 - DNA, 16 bp, synthetic construct
  misc_feature 1..16: note = synthetic [barcode part1]
  source 1..16: mol_type = other DNA
atcctcacggaccact

SEQ ID NO: 14918 - DNA, 16 bp, synthetic construct
  misc_feature 1..16: note = synthetic [barcode part1]
  source 1..16: mol_type = other DNA
actgactggccaattg

SEQ ID NO: 14919 - DNA, 16 bp, synthetic construct
  misc_feature 1..16: note = synthetic [barcode part1]
  source 1..16: mol_type = other DNA
tctcgtactaggccgt

SEQ ID NO: 14920 - DNA, 16 bp, synthetic construct
  misc_feature 1..16: note = synthetic [barcode part1]
  source 1..16: mol_type = other DNA
aacttgcctaccttag

SEQ ID NO: 14921 - DNA, 16 bp, synthetic construct
  misc_feature 1..16: note = synthetic [barcode part1]
  source 1..16: mol_type = other DNA
gcgtagtaaggaactt

SEQ ID NO: 14922 - DNA, 16 bp, synthetic construct
  misc_feature 1..16: note = synthetic [barcode part1]
  source 1..16: mol_type = other DNA
taagtagtatccgccg

SEQ ID NO: 14923 - DNA, 16 bp, synthetic construct
  misc_feature 1..16: note = synthetic [barcode part1]
  source 1..16: mol_type = other DNA
gattggtatcggttgc

SEQ ID NO: 14924 - DNA, 16 bp, synthetic construct
  misc_feature 1..16: note = synthetic [barcode part1]
  source 1..16: mol_type = other DNA
gcgcacagatcttaac

SEQ ID NO: 14925 - DNA, 16 bp, synthetic construct
  misc_feature 1..16: note = synthetic [barcode part1]
  source 1..16: mol_type = other DNA
ttctctatctacggag

SEQ ID NO: 14926 - DNA, 16 bp, synthetic construct
  misc_feature 1..16: note = synthetic [barcode part1]
  source 1..16: mol_type = other DNA
aattccgcaccacaag

SEQ ID NO: 14927 - DNA, 16 bp, synthetic construct
  misc_feature 1..16: note = synthetic [barcode part1]
  source 1..16: mol_type = other DNA
gataagtgcgagtgag

SEQ ID NO: 14928 - DNA, 16 bp, synthetic construct
  misc_feature 1..16: note = synthetic [barcode part1]
  source 1..16: mol_type = other DNA
attcgaccacgccttg

SEQ ID NO: 14929 - DNA, 16 bp, synthetic construct
  misc_feature 1..16: note = synthetic [barcode part1]
  source 1..16: mol_type = other DNA
tctctaggccgatatt

SEQ ID NO: 14930 - DNA, 16 bp, synthetic construct
  misc_feature 1..16: note = synthetic [barcode part1]
  source 1..16: mol_type = other DNA
aacggaccttggagtg

SEQ ID NO: 14931 - DNA, 16 bp, synthetic construct
  misc_feature 1..16: note = synthetic [barcode part1]
  source 1..16: mol_type = other DNA
cgtaccttcgtacttc

SEQ ID NO: 14932 - DNA, 16 bp, synthetic construct
  misc_feature 1..16: note = synthetic [barcode part1]
  source 1..16: mol_type = other DNA
ttccgtctctatcgtg

SEQ ID NO: 14933 - DNA, 16 bp, synthetic construct
  misc_feature 1..16: note = synthetic [barcode part1]
  source 1..16: mol_type = other DNA
tcgttgccttgttgtc

SEQ ID NO: 14934 - DNA, 16 bp, synthetic construct
  misc_feature 1..16: note = synthetic [barcode part1]
  source 1..16: mol_type = other DNA
acggtcactgactcct

SEQ ID NO: 14935 - DNA, 16 bp, synthetic construct
  misc_feature 1..16: note = synthetic [barcode part1]
  source 1..16: mol_type = other DNA
cacgagtcgaatacct

SEQ ID NO: 14936 - DNA, 16 bp, synthetic construct
  misc_feature 1..16: note = synthetic [barcode part1]
  source 1..16: mol_type = other DNA
aaggagtcctgacctt

SEQ ID NO: 14937 - DNA, 16 bp, synthetic construct
  misc_feature 1..16: note = synthetic [barcode part1]
  source 1..16: mol_type = other DNA
tgcgatattgcctgcc

SEQ ID NO: 14938 - DNA, 16 bp, synthetic construct
  misc_feature 1..16: note = synthetic [barcode part1]
  source 1..16: mol_type = other DNA
accttaccaccgacgt

SEQ ID NO: 14939 - DNA, 16 bp, synthetic construct
  misc_feature 1..16: note = synthetic [barcode part1]
  source 1..16: mol_type = other DNA
acgttcacgtcgttcg

SEQ ID NO: 14940 - DNA, 16 bp, synthetic construct
  misc_feature 1..16: note = synthetic [barcode part1]
  source 1..16: mol_type = other DNA
aataaccacgtctcct

SEQ ID NO: 14941 - DNA, 16 bp, synthetic construct
  misc_feature 1..16: note = synthetic [barcode part1]
  source 1..16: mol_type = other DNA
acgtgtggtactacgt

SEQ ID NO: 14942 - DNA, 16 bp, synthetic construct
  misc_feature 1..16: note = synthetic [barcode part1]
  source 1..16: mol_type = other DNA
atccaccgaactccac

SEQ ID NO: 14943 - DNA, 16 bp, synthetic construct
  misc_feature 1..16: note = synthetic [barcode part1]
  source 1..16: mol_type = other DNA
agacaggagtactgcc

SEQ ID NO: 14944 - DNA, 16 bp, synthetic construct
  misc_feature 1..16: note = synthetic [barcode part1]
  source 1..16: mol_type = other DNA
accgtgatatcacggt

SEQ ID NO: 14945 - DNA, 16 bp, synthetic construct
  misc_feature 1..16: note = synthetic [barcode part1]
  source 1..16: mol_type = other DNA
gttctacgttcagact

SEQ ID NO: 14946 - DNA, 16 bp, synthetic construct
  misc_feature 1..16: note = synthetic [barcode part1]
  source 1..16: mol_type = other DNA
cgaggtactattgtcg

SEQ ID NO: 14947 - DNA, 16 bp, synthetic construct
  misc_feature 1..16: note = synthetic [barcode part1]
  source 1..16: mol_type = other DNA
tataatctctccgacg

SEQ ID NO: 14948 - DNA, 16 bp, synthetic construct
  misc_feature 1..16: note = synthetic [barcode part1]
  source 1..16: mol_type = other DNA
tgactctgcactaact

SEQ ID NO: 14949 - DNA, 16 bp, synthetic construct
  misc_feature 1..16: note = synthetic [barcode part1]
  source 1..16: mol_type = other DNA
cggtgatcgtgtcctt

SEQ ID NO: 14950 - DNA, 16 bp, synthetic construct
  misc_feature 1..16: note = synthetic [barcode part1]
  source 1..16: mol_type = other DNA
gtgtatacaacgccgt

SEQ ID NO: 14951 - DNA, 16 bp, synthetic construct
  misc_feature 1..16: note = synthetic [barcode part1]
  source 1..16: mol_type = other DNA
aattgtggaggagtct

SEQ ID NO: 14952 - DNA, 16 bp, synthetic construct
  misc_feature 1..16: note = synthetic [barcode part1]
  source 1..16: mol_type = other DNA
ccggtagattcttgcc

SEQ ID NO: 14953 - DNA, 16 bp, synthetic construct
  misc_feature 1..16: note = synthetic [barcode part1]
  source 1..16: mol_type = other DNA
tctgactcggcgtact

SEQ ID NO: 14954 - DNA, 16 bp, synthetic construct
  misc_feature 1..16: note = synthetic [barcode part1]
  source 1..16: mol_type = other DNA
tagttgcacggaatag

SEQ ID NO: 14955 - DNA, 16 bp, synthetic construct
  misc_feature 1..16: note = synthetic [barcode part1]
  source 1..16: mol_type = other DNA
ttattagaggacgcag

SEQ ID NO: 14956 - DNA, 16 bp, synthetic construct
  misc_feature 1..16: note = synthetic [barcode part1]
  source 1..16: mol_type = other DNA
ttcgagtccgttaccg

SEQ ID NO: 14957 - DNA, 16 bp, synthetic construct
  misc_feature 1..16: note = synthetic [barcode part1]
  source 1..16: mol_type = other DNA
ttactacactcgcggc

SEQ ID NO: 14958 - DNA, 16 bp, synthetic construct
  misc_feature 1..16: note = synthetic [barcode part1]
  source 1..16: mol_type = other DNA
ccgatctattcggacc

SEQ ID NO: 14959 - DNA, 16 bp, synthetic construct
  misc_feature 1..16: note = synthetic [barcode part1]
  source 1..16: mol_type = other DNA
atattcctagtccgac

SEQ ID NO: 14960 - DNA, 16 bp, synthetic construct
  misc_feature 1..16: note = synthetic [barcode part1]
  source 1..16: mol_type = other DNA
gacaatcctggcaatc

SEQ ID NO: 14961 - DNA, 16 bp, synthetic construct
  misc_feature 1..16: note = synthetic [barcode part1]
  source 1..16: mol_type = other DNA
gattcggccagtgatt

SEQ ID NO: 14962 - DNA, 16 bp, synthetic construct
  misc_feature 1..16: note = synthetic [barcode part1]
  source 1..16: mol_type = other DNA
tctacttcaaggttcg

SEQ ID NO: 14963 - DNA, 16 bp, synthetic construct
  misc_feature 1..16: note = synthetic [barcode part1]
  source 1..16: mol_type = other DNA
atcacgaacttgtctc

SEQ ID NO: 14964 - DNA, 16 bp, synthetic construct
  misc_feature 1..16: note = synthetic [barcode part1]
  source 1..16: mol_type = other DNA
caggtacttctcagtt

SEQ ID NO: 14965 - DNA, 16 bp, synthetic construct
  misc_feature 1..16: note = synthetic [barcode part1]
  source 1..16: mol_type = other DNA
tggacagtgttcactg

SEQ ID NO: 14966 - DNA, 16 bp, synthetic construct
  misc_feature 1..16: note = synthetic [barcode part1]
  source 1..16: mol_type = other DNA
tactacttccgcaggc

SEQ ID NO: 14967 - DNA, 16 bp, synthetic construct
  misc_feature 1..16: note = synthetic [barcode part1]
  source 1..16: mol_type = other DNA
cactcgcacttatcct

SEQ ID NO: 14968 - DNA, 16 bp, synthetic construct
  misc_feature 1..16: note = synthetic [barcode part1]
  source 1..16: mol_type = other DNA
ttcctgacagtgtgtt

SEQ ID NO: 14969 - DNA, 16 bp, synthetic construct
  misc_feature 1..16: note = synthetic [barcode part1]
  source 1..16: mol_type = other DNA
tacagacgtaggttcc

SEQ ID NO: 14970 - DNA, 16 bp, synthetic construct
  misc_feature 1..16: note = synthetic [barcode part1]
  source 1..16: mol_type = other DNA
gaattgtctcgcactt

SEQ ID NO: 14971 - DNA, 16 bp, synthetic construct
  misc_feature 1..16: note = synthetic [barcode part1]
  source 1..16: mol_type = other DNA
acaattgcgtgcgact

SEQ ID NO: 14972 - DNA, 16 bp, synthetic construct
  misc_feature 1..16: note = synthetic [barcode part1]
  source 1..16: mol_type = other DNA
tacgacttacggactg

SEQ ID NO: 14973 - DNA, 16 bp, synthetic construct
  misc_feature 1..16: note = synthetic [barcode part1]
  source 1..16: mol_type = other DNA
attgtatccttcgacg

SEQ ID NO: 14974 - DNA, 16 bp, synthetic construct
  misc_feature 1..16: note = synthetic [barcode part1]
  source 1..16: mol_type = other DNA
ttcggatattcctcag

SEQ ID NO: 14975 - DNA, 16 bp, synthetic construct
  misc_feature 1..16: note = synthetic [barcode part1]
  source 1..16: mol_type = other DNA
gacggtcttagtaacc

SEQ ID NO: 14976 - DNA, 16 bp, synthetic construct
  misc_feature 1..16: note = synthetic [barcode part1]
  source 1..16: mol_type = other DNA
accggcaacaattacc

SEQ ID NO: 14977 - DNA, 16 bp, synthetic construct
  misc_feature 1..16: note = synthetic [barcode part1]
  source 1..16: mol_type = other DNA
ttgcgtaggttctccg

SEQ ID NO: 14978 - DNA, 16 bp, synthetic construct
  misc_feature 1..16: note = synthetic [barcode part1]
  source 1..16: mol_type = other DNA
tcaattcagtggcgac

SEQ ID NO: 14979 - DNA, 16 bp, synthetic construct
  misc_feature 1..16: note = synthetic [barcode part1]
  source 1..16: mol_type = other DNA
actctagtggtgtcag

SEQ ID NO: 14980 - DNA, 16 bp, synthetic construct
  misc_feature 1..16: note = synthetic [barcode part1]
  source 1..16: mol_type = other DNA
cgagtccgaacagtag

SEQ ID NO: 14981 - DNA, 16 bp, synthetic construct
  misc_feature 1..16: note = synthetic [barcode part1]
  source 1..16: mol_type = other DNA
acagttcgcaggaacg

SEQ ID NO: 14982 - DNA, 16 bp, synthetic construct
  misc_feature 1..16: note = synthetic [barcode part1]
  source 1..16: mol_type = other DNA
gcactctatacgagac

SEQ ID NO: 14983 - DNA, 16 bp, synthetic construct
  misc_feature 1..16: note = synthetic [barcode part1]
  source 1..16: mol_type = other DNA
caatctctggcgcact

SEQ ID NO: 14984 - DNA, 16 bp, synthetic construct
  misc_feature 1..16: note = synthetic [barcode part1]
  source 1..16: mol_type = other DNA
acggtattcctgagac

SEQ ID NO: 14985 - DNA, 16 bp, synthetic construct
  misc_feature 1..16: note = synthetic [barcode part1]
  source 1..16: mol_type = other DNA
tgaacctgcagatctg

SEQ ID NO: 14986 - DNA, 16 bp, synthetic construct
  misc_feature 1..16: note = synthetic [barcode part1]
  source 1..16: mol_type = other DNA
ccgtacgtcttagtcg

SEQ ID NO: 14987 - DNA, 16 bp, synthetic construct
  misc_feature 1..16: note = synthetic [barcode part1]
  source 1..16: mol_type = other DNA
tcttgtacttccgtgc

SEQ ID NO: 14988 - DNA, 16 bp, synthetic construct
  misc_feature 1..16: note = synthetic [barcode part1]
  source 1..16: mol_type = other DNA
gacacaccagtgtact

SEQ ID NO: 14989 - DNA, 16 bp, synthetic construct
  misc_feature 1..16: note = synthetic [barcode part1]
  source 1..16: mol_type = other DNA
acaacaatctgcagag

SEQ ID NO: 14990 - DNA, 16 bp, synthetic construct
  misc_feature 1..16: note = synthetic [barcode part1]
  source 1..16: mol_type = other DNA
ttgaattgccgtcgag

SEQ ID NO: 14991 - DNA, 16 bp, synthetic construct
  misc_feature 1..16: note = synthetic [barcode part1]
  source 1..16: mol_type = other DNA
agtacactgcaaccac

SEQ ID NO: 14992 - DNA, 16 bp, synthetic construct
  misc_feature 1..16: note = synthetic [barcode part1]
  source 1..16: mol_type = other DNA
aataatcggaacgcac

SEQ ID NO: 14993 - DNA, 16 bp, synthetic construct
  misc_feature 1..16: note = synthetic [barcode part1]
  source 1..16: mol_type = other DNA
gttaacaacggccgtt

SEQ ID NO: 14994 - DNA, 16 bp, synthetic construct
  misc_feature 1..16: note = synthetic [barcode part1]
  source 1..16: mol_type = other DNA
ccttgcaatcgccaac

SEQ ID NO: 14995 - DNA, 16 bp, synthetic construct
  misc_feature 1..16: note = synthetic [barcode part1]
  source 1..16: mol_type = other DNA
agaggatctcggtctt

SEQ ID NO: 14996 - DNA, 16 bp, synthetic construct
  misc_feature 1..16: note = synthetic [barcode part1]
  source 1..16: mol_type = other DNA
attcgaggcgacagac

SEQ ID NO: 14997 - DNA, 16 bp, synthetic construct
  misc_feature 1..16: note = synthetic [barcode part1]
  source 1..16: mol_type = other DNA
ccgattcaggtacctc

SEQ ID NO: 14998 - DNA, 16 bp, synthetic construct
  misc_feature 1..16: note = synthetic [barcode part1]
  source 1..16: mol_type = other DNA
gtgaggtgtagtgaag

SEQ ID NO: 14999 - DNA, 16 bp, synthetic construct
  misc_feature 1..16: note = synthetic [barcode part1]
  source 1..16: mol_type = other DNA
caatcgtacctcttag

SEQ ID NO: 15000 - DNA, 16 bp, synthetic construct
  misc_feature 1..16: note = synthetic [barcode part1]
  source 1..16: mol_type = other DNA
attacctggacttgtc

SEQ ID NO: 15001 - DNA, 16 bp, synthetic construct
  misc_feature 1..16: note = synthetic [barcode part1]
  source 1..16: mol_type = other DNA
ttggtaagttcggcgt

SEQ ID NO: 15002 - DNA, 16 bp, synthetic construct
  misc_feature 1..16: note = synthetic [barcode part1]
  source 1..16: mol_type = other DNA
actcagagaacggtgc

SEQ ID NO: 15003 - DNA, 16 bp, synthetic construct
  misc_feature 1..16: note = synthetic [barcode part1]
  source 1..16: mol_type = other DNA
gtgcgaacagactgtg

SEQ ID NO: 15004 - DNA, 16 bp, synthetic construct
  misc_feature 1..16: note = synthetic [barcode part1]
  source 1..16: mol_type = other DNA
cagttccaactggaac

SEQ ID NO: 15005 - DNA, 16 bp, synthetic construct
  misc_feature 1..16: note = synthetic [barcode part1]
  source 1..16: mol_type = other DNA
gttcctccagtacacg

SEQ ID NO: 15006 - DNA, 16 bp, synthetic construct
  misc_feature 1..16: note = synthetic [barcode part1]
  source 1..16: mol_type = other DNA
gagatcgaagacagtg

SEQ ID NO: 15007 - DNA, 16 bp, synthetic construct
  misc_feature 1..16: note = synthetic [barcode part1]
  source 1..16: mol_type = other DNA
cgtcgagaagttatcc

SEQ ID NO: 15008 - DNA, 16 bp, synthetic construct
  misc_feature 1..16: note = synthetic [barcode part1]
  source 1..16: mol_type = other DNA
ttactaacttccgcag

SEQ ID NO: 15009 - DNA, 16 bp, synthetic construct
  misc_feature 1..16: note = synthetic [barcode part1]
  source 1..16: mol_type = other DNA
gttgcggttgttcacc

SEQ ID NO: 15010 - DNA, 16 bp, synthetic construct
  misc_feature 1..16: note = synthetic [barcode part1]
  source 1..16: mol_type = other DNA
ccgtcgttaagtgcct

SEQ ID NO: 15011 - DNA, 16 bp, synthetic construct
  misc_feature 1..16: note = synthetic [barcode part1]
  source 1..16: mol_type = other DNA
tagagtcacgttgtgc

SEQ ID NO: 15012 - DNA, 16 bp, synthetic construct
  misc_feature 1..16: note = synthetic [barcode part1]
  source 1..16: mol_type = other DNA
cacggtcagagtagtg

SEQ ID NO: 15013 - DNA, 16 bp, synthetic construct
  misc_feature 1..16: note = synthetic [barcode part1]
  source 1..16: mol_type = other DNA
ttgtcacacctcacct

SEQ ID NO: 15014 - DNA, 16 bp, synthetic construct
  misc_feature 1..16: note = synthetic [barcode part1]
  source 1..16: mol_type = other DNA
atcactccgttgtcct

SEQ ID NO: 15015 - DNA, 16 bp, synthetic construct
  misc_feature 1..16: note = synthetic [barcode part1]
  source 1..16: mol_type = other DNA
gcgtcgattggatatc

SEQ ID NO: 15016 - DNA, 16 bp, synthetic construct
  misc_feature 1..16: note = synthetic [barcode part1]
  source 1..16: mol_type = other DNA
tcttaatccggtgtgt

SEQ ID NO: 15017 - DNA, 16 bp, synthetic construct
  misc_feature 1..16: note = synthetic [barcode part1]
  source 1..16: mol_type = other DNA
agtgaccttcctgcgt

SEQ ID NO: 15018 - DNA, 16 bp, synthetic construct
  misc_feature 1..16: note = synthetic [barcode part1]
  source 1..16: mol_type = other DNA
aaccacacgattacgc

SEQ ID NO: 15019 - DNA, 16 bp, synthetic construct
  misc_feature 1..16: note = synthetic [barcode part1]
  source 1..16: mol_type = other DNA
gtacgatcagtgtgtc

SEQ ID NO: 15020 - DNA, 16 bp, synthetic construct
  misc_feature 1..16: note = synthetic [barcode part1]
  source 1..16: mol_type = other DNA
tcgccactactactct

SEQ ID NO: 15021 - DNA, 16 bp, synthetic construct
  misc_feature 1..16: note = synthetic [barcode part1]
  source 1..16: mol_type = other DNA
ttgtaggttaccgttc

SEQ ID NO: 15022 - DNA, 16 bp, synthetic construct
  misc_feature 1..16: note = synthetic [barcode part1]
  source 1..16: mol_type = other DNA
aacactggtcaaccac

SEQ ID NO: 15023 - DNA, 16 bp, synthetic construct
  misc_feature 1..16: note = synthetic [barcode part1]
  source 1..16: mol_type = other DNA
gacacgttgacgtgtt

SEQ ID NO: 15024 - DNA, 16 bp, synthetic construct
  misc_feature 1..16: note = synthetic [barcode part1]
  source 1..16: mol_type = other DNA
gagttaagttggtacg

SEQ ID NO: 15025 - DNA, 16 bp, synthetic construct
  misc_feature 1..16: note = synthetic [barcode part1]
  source 1..16: mol_type = other DNA
acctagatcacctcgc

SEQ ID NO: 15026 - DNA, 16 bp, synthetic construct
  misc_feature 1..16: note = synthetic [barcode part1]
  source 1..16: mol_type = other DNA
tgactggactaaccgt

SEQ ID NO: 15027 - DNA, 16 bp, synthetic construct
  misc_feature 1..16: note = synthetic [barcode part1]
  source 1..16: mol_type = other DNA
gttagaacagtgtgtg

SEQ ID NO: 15028 - DNA, 16 bp, synthetic construct
  misc_feature 1..16: note = synthetic [barcode part1]
  source 1..16: mol_type = other DNA
gttgcctcacctgaac

SEQ ID NO: 15029 - DNA, 16 bp, synthetic construct
  misc_feature 1..16: note = synthetic [barcode part1]
  source 1..16: mol_type = other DNA
aggtcttgtcacagtg

SEQ ID NO: 15030 - DNA, 16 bp, synthetic construct
  misc_feature 1..16: note = synthetic [barcode part1]
  source 1..16: mol_type = other DNA
accggcactcaatctc

SEQ ID NO: 15031 - DNA, 16 bp, synthetic construct
  misc_feature 1..16: note = synthetic [barcode part1]
  source 1..16: mol_type = other DNA
aatatctcgtcctacg

SEQ ID NO: 15032 - DNA, 16 bp, synthetic construct
  misc_feature 1..16: note = synthetic [barcode part1]
  source 1..16: mol_type = other DNA
ataatctctcggcgag

SEQ ID NO: 15033 - DNA, 16 bp, synthetic construct
  misc_feature 1..16: note = synthetic [barcode part1]
  source 1..16: mol_type = other DNA
tgtgaggaagaacgtg

SEQ ID NO: 15034 - DNA, 16 bp, synthetic construct
  misc_feature 1..16: note = synthetic [barcode part1]
  source 1..16: mol_type = other DNA
acaagagtcaacgact

SEQ ID NO: 15035 - DNA, 16 bp, synthetic construct
  misc_feature 1..16: note = synthetic [barcode part1]
  source 1..16: mol_type = other DNA
cgtagacaggtctact

SEQ ID NO: 15036 - DNA, 16 bp, synthetic construct
  misc_feature 1..16: note = synthetic [barcode part1]
  source 1..16: mol_type = other DNA
aggcgatatcgaagag

SEQ ID NO: 15037 - DNA, 16 bp, synthetic construct
  misc_feature 1..16: note = synthetic [barcode part1]
  source 1..16: mol_type = other DNA
ttagtggtacctccgc

SEQ ID NO: 15038 - DNA, 16 bp, synthetic construct
  misc_feature 1..16: note = synthetic [barcode part1]
  source 1..16: mol_type = other DNA
caatcacggtgtgttg

SEQ ID NO: 15039 - DNA, 16 bp, synthetic construct
  misc_feature 1..16: note = synthetic [barcode part1]
  source 1..16: mol_type = other DNA
gagaatatccggtggc

SEQ ID NO: 15040 - DNA, 16 bp, synthetic construct
  misc_feature 1..16: note = synthetic [barcode part1]
  source 1..16: mol_type = other DNA
tctaatccacgtagtc

SEQ ID NO: 15041 - DNA, 16 bp, synthetic construct
  misc_feature 1..16: note = synthetic [barcode part1]
  source 1..16: mol_type = other DNA
gagtcgcagactattc

SEQ ID NO: 15042 - DNA, 16 bp, synthetic construct
  misc_feature 1..16: note = synthetic [barcode part1]
  source 1..16: mol_type = other DNA
tgcgtaagtaaccacc

SEQ ID NO: 15043 - DNA, 16 bp, synthetic construct
  misc_feature 1..16: note = synthetic [barcode part1]
  source 1..16: mol_type = other DNA
acgacttcacctccag

SEQ ID NO: 15044 - DNA, 16 bp, synthetic construct
  misc_feature 1..16: note = synthetic [barcode part1]
  source 1..16: mol_type = other DNA
tggaaggcacgtagtc

SEQ ID NO: 15045 - DNA, 16 bp, synthetic construct
  misc_feature 1..16: note = synthetic [barcode part1]
  source 1..16: mol_type = other DNA
ccggtaataccggatt

SEQ ID NO: 15046 - DNA, 16 bp, synthetic construct
  misc_feature 1..16: note = synthetic [barcode part1]
  source 1..16: mol_type = other DNA
cggtgcgttgagtatt

SEQ ID NO: 15047 - DNA, 16 bp, synthetic construct
  misc_feature 1..16: note = synthetic [barcode part1]
  source 1..16: mol_type = other DNA
aattagtgcactgcgc

SEQ ID NO: 15048 - DNA, 16 bp, synthetic construct
  misc_feature 1..16: note = synthetic [barcode part1]
  source 1..16: mol_type = other DNA
ccgtagagacgtactt

SEQ ID NO: 15049 - DNA, 16 bp, synthetic construct
  misc_feature 1..16: note = synthetic [barcode part1]
  source 1..16: mol_type = other DNA
cgtatcctctgtatcc

SEQ ID NO: 15050 - DNA, 16 bp, synthetic construct
  misc_feature 1..16: note = synthetic [barcode part1]
  source 1..16: mol_type = other DNA
aatcaagaggtcggag

SEQ ID NO: 15051 - DNA, 16 bp, synthetic construct
  misc_feature 1..16: note = synthetic [barcode part1]
  source 1..16: mol_type = other DNA
aggtcactcgtgtcct

SEQ ID NO: 15052 - DNA, 16 bp, synthetic construct
  misc_feature 1..16: note = synthetic [barcode part1]
  source 1..16: mol_type = other DNA
ttccttcggaactctc

SEQ ID NO: 15053 - DNA, 16 bp, synthetic construct
  misc_feature 1..16: note = synthetic [barcode part1]
  source 1..16: mol_type = other DNA
caggacaagacactcg

SEQ ID NO: 15054 - DNA, 16 bp, synthetic construct
  misc_feature 1..16: note = synthetic [barcode part1]
  source 1..16: mol_type = other DNA
attagttaccggccag

SEQ ID NO: 15055 - DNA, 16 bp, synthetic construct
  misc_feature 1..16: note = synthetic [barcode part1]
  source 1..16: mol_type = other DNA
tacacagagtgacaac

SEQ ID NO: 15056 - DNA, 16 bp, synthetic construct
  misc_feature 1..16: note = synthetic [barcode part1]
  source 1..16: mol_type = other DNA
gtggttacgtgactac

SEQ ID NO: 15057 - DNA, 16 bp, synthetic construct
  misc_feature 1..16: note = synthetic [barcode part1]
  source 1..16: mol_type = other DNA
gcgtgtctattggtag

SEQ ID NO: 15058 - DNA, 16 bp, synthetic construct
  misc_feature 1..16: note = synthetic [barcode part1]
  source 1..16: mol_type = other DNA
tgcgtgcagttaactg

SEQ ID NO: 15059 - DNA, 16 bp, synthetic construct
  misc_feature 1..16: note = synthetic [barcode part1]
  source 1..16: mol_type = other DNA
cctcagttataccaac

SEQ ID NO: 15060 - DNA, 16 bp, synthetic construct
  misc_feature 1..16: note = synthetic [barcode part1]
  source 1..16: mol_type = other DNA
gcgtcgatcttcagtc

SEQ ID NO: 15061 - DNA, 16 bp, synthetic construct
  misc_feature 1..16: note = synthetic [barcode part1]
  source 1..16: mol_type = other DNA
ttctcaacaatcgtgc

SEQ ID NO: 15062 - DNA, 16 bp, synthetic construct
  misc_feature 1..16: note = synthetic [barcode part1]
  source 1..16: mol_type = other DNA
gaggaatcggagagtt

SEQ ID NO: 15063 - DNA, 16 bp, synthetic construct
  misc_feature 1..16: note = synthetic [barcode part1]
  source 1..16: mol_type = other DNA
ttatcgttccactgcc

SEQ ID NO: 15064 - DNA, 16 bp, synthetic construct
  misc_feature 1..16: note = synthetic [barcode part1]
  source 1..16: mol_type = other DNA
gtctctcaggaagttg

SEQ ID NO: 15065 - DNA, 16 bp, synthetic construct
  misc_feature 1..16: note = synthetic [barcode part1]
  source 1..16: mol_type = other DNA
tcggtctctgttactc

SEQ ID NO: 15066 - DNA, 16 bp, synthetic construct
  misc_feature 1..16: note = synthetic [barcode part1]
  source 1..16: mol_type = other DNA
gcgtatacagtaccac

SEQ ID NO: 15067 - DNA, 16 bp, synthetic construct
  misc_feature 1..16: note = synthetic [barcode part1]
  source 1..16: mol_type = other DNA
cagaatattgtcgccg

SEQ ID NO: 15068 - DNA, 16 bp, synthetic construct
  misc_feature 1..16: note = synthetic [barcode part1]
  source 1..16: mol_type = other DNA
tctgtcgcaataggac

SEQ ID NO: 15069 - DNA, 16 bp, synthetic construct
  misc_feature 1..16: note = synthetic [barcode part1]
  source 1..16: mol_type = other DNA
ttgccggaattaccag

SEQ ID NO: 15070 - DNA, 16 bp, synthetic construct
  misc_feature 1..16: note = synthetic [barcode part1]
  source 1..16: mol_type = other DNA
ttaactaacgcacgcg

SEQ ID NO: 15071 - DNA, 16 bp, synthetic construct
  misc_feature 1..16: note = synthetic [barcode part1]
  source 1..16: mol_type = other DNA
gaactggaggattgag

SEQ ID NO: 15072 - DNA, 16 bp, synthetic construct
  misc_feature 1..16: note = synthetic [barcode part1]
  source 1..16: mol_type = other DNA
agtcctctacggatcc

SEQ ID NO: 15073 - DNA, 16 bp, synthetic construct
  misc_feature 1..16: note = synthetic [barcode part1]
  source 1..16: mol_type = other DNA
ttctgccaggttcgtg

SEQ ID NO: 15074 - DNA, 16 bp, synthetic construct
  misc_feature 1..16: note = synthetic [barcode part1]
  source 1..16: mol_type = other DNA
ccagacgtcgttctac

SEQ ID NO: 15075 - DNA, 16 bp, synthetic construct
  misc_feature 1..16: note = synthetic [barcode part1]
  source 1..16: mol_type = other DNA
ataaggagtcgaatcc

SEQ ID NO: 15076 - DNA, 16 bp, synthetic construct
  misc_feature 1..16: note = synthetic [barcode part1]
  source 1..16: mol_type = other DNA
tcggcaaccacacctt

SEQ ID NO: 15077 - DNA, 16 bp, synthetic construct
  misc_feature 1..16: note = synthetic [barcode part1]
  source 1..16: mol_type = other DNA
atctgtcgtggcgtct

SEQ ID NO: 15078 - DNA, 16 bp, synthetic construct
  misc_feature 1..16: note = synthetic [barcode part1]
  source 1..16: mol_type = other DNA
ttcaacgatctctacg

SEQ ID NO: 15079 - DNA, 16 bp, synthetic construct
  misc_feature 1..16: note = synthetic [barcode part1]
  source 1..16: mol_type = other DNA
taggtattctcaccgt

SEQ ID NO: 15080 - DNA, 16 bp, synthetic construct
  misc_feature 1..16: note = synthetic [barcode part1]
  source 1..16: mol_type = other DNA
tcttgcgccaggttac

SEQ ID NO: 15081 - DNA, 16 bp, synthetic construct
  misc_feature 1..16: note = synthetic [barcode part1]
  source 1..16: mol_type = other DNA
tgcaatagtccgttct

SEQ ID NO: 15082 - DNA, 16 bp, synthetic construct
  misc_feature 1..16: note = synthetic [barcode part1]
  source 1..16: mol_type = other DNA
agatccactaccgtcc

SEQ ID NO: 15083 - DNA, 16 bp, synthetic construct
  misc_feature 1..16: note = synthetic [barcode part1]
  source 1..16: mol_type = other DNA
actacgtggagtggtg

SEQ ID NO: 15084 - DNA, 16 bp, synthetic construct
  misc_feature 1..16: note = synthetic [barcode part1]
  source 1..16: mol_type = other DNA
gaatcaacgactgtag

SEQ ID NO: 15085 - DNA, 16 bp, synthetic construct
  misc_feature 1..16: note = synthetic [barcode part1]
  source 1..16: mol_type = other DNA
cgcgcgataaggagtt

SEQ ID NO: 15086 - DNA, 16 bp, synthetic construct
  misc_feature 1..16: note = synthetic [barcode part1]
  source 1..16: mol_type = other DNA
ttacgagtgtctcgcc

SEQ ID NO: 15087 - DNA, 16 bp, synthetic construct
  misc_feature 1..16: note = synthetic [barcode part1]
  source 1..16: mol_type = other DNA
cgccaactcttggttg

SEQ ID NO: 15088 - DNA, 16 bp, synthetic construct
  misc_feature 1..16: note = synthetic [barcode part1]
  source 1..16: mol_type = other DNA
aactgactacgtacgc

SEQ ID NO: 15089 - DNA, 16 bp, synthetic construct
  misc_feature 1..16: note = synthetic [barcode part1]
  source 1..16: mol_type = other DNA
atacttctcggcggtc

SEQ ID NO: 15090 - DNA, 16 bp, synthetic construct
  misc_feature 1..16: note = synthetic [barcode part1]
  source 1..16: mol_type = other DNA
acaggtccttctgatt

SEQ ID NO: 15091 - DNA, 16 bp, synthetic construct
  misc_feature 1..16: note = synthetic [barcode part1]
  source 1..16: mol_type = other DNA
tacgtgattcaactcc

SEQ ID NO: 15092 - DNA, 16 bp, synthetic construct
  misc_feature 1..16: note = synthetic [barcode part1]
  source 1..16: mol_type = other DNA
ttgcagaaggtgtctc

SEQ ID NO: 15093 - DNA, 16 bp, synthetic construct
  misc_feature 1..16: note = synthetic [barcode part1]
  source 1..16: mol_type = other DNA
cggaattgatcggttc

SEQ ID NO: 15094 - DNA, 16 bp, synthetic construct
  misc_feature 1..16: note = synthetic [barcode part1]
  source 1..16: mol_type = other DNA
gtgaaggttagtaacc

SEQ ID NO: 15095 - DNA, 16 bp, synthetic construct
  misc_feature 1..16: note = synthetic [barcode part1]
  source 1..16: mol_type = other DNA
gttcagtacacttctg

SEQ ID NO: 15096 - DNA, 16 bp, synthetic construct
  misc_feature 1..16: note = synthetic [barcode part1]
  source 1..16: mol_type = other DNA
atccttatatcggacc

SEQ ID NO: 15097 - DNA, 16 bp, synthetic construct
  misc_feature 1..16: note = synthetic [barcode part1]
  source 1..16: mol_type = other DNA
ttctccgtatctcgtg

SEQ ID NO: 15098 - DNA, 16 bp, synthetic construct
  misc_feature 1..16: note = synthetic [barcode part1]
  source 1..16: mol_type = other DNA
cgataacaccgttgac

SEQ ID NO: 15099 - DNA, 16 bp, synthetic construct
  misc_feature 1..16: note = synthetic [barcode part1]
  source 1..16: mol_type = other DNA
atcgtactacggatcg

SEQ ID NO: 15100 - DNA, 16 bp, synthetic construct
  misc_feature 1..16: note = synthetic [barcode part1]
  source 1..16: mol_type = other DNA
tgtaatacctgaggcc

SEQ ID NO: 15101 - DNA, 16 bp, synthetic construct
  misc_feature 1..16: note = synthetic [barcode part1]
  source 1..16: mol_type = other DNA
gcaactacgtgtgatc

SEQ ID NO: 15102 - DNA, 16 bp, synthetic construct
  misc_feature 1..16: note = synthetic [barcode part1]
  source 1..16: mol_type = other DNA
gcacgtcaatacactg

SEQ ID NO: 15103 - DNA, 16 bp, synthetic construct
  misc_feature 1..16: note = synthetic [barcode part1]
  source 1..16: mol_type = other DNA
agattccggaatctcg

SEQ ID NO: 15104 - DNA, 16 bp, synthetic construct
  misc_feature 1..16: note = synthetic [barcode part1]
  source 1..16: mol_type = other DNA
ttattatatccgcggc

SEQ ID NO: 15105 - DNA, 16 bp, synthetic construct
  misc_feature 1..16: note = synthetic [barcode part1]
  source 1..16: mol_type = other DNA
cgcgtaacgttaacgt

SEQ ID NO: 15106 - DNA, 16 bp, synthetic construct
  misc_feature 1..16: note = synthetic [barcode part1]
  source 1..16: mol_type = other DNA
tcgtgaagaattggac

SEQ ID NO: 15107 - DNA, 16 bp, synthetic construct
  misc_feature 1..16: note = synthetic [barcode part1]
  source 1..16: mol_type = other DNA
actccacgtccaagtc

SEQ ID NO: 15108 - DNA, 16 bp, synthetic construct
  misc_feature 1..16: note = synthetic [barcode part1]
  source 1..16: mol_type = other DNA
tagactatctctgcgt

SEQ ID NO: 15109 - DNA, 16 bp, synthetic construct
  misc_feature 1..16: note = synthetic [barcode part1]
  source 1..16: mol_type = other DNA
tggttgatctcaggac

SEQ ID NO: 15110 - DNA, 16 bp, synthetic construct
  misc_feature 1..16: note = synthetic [barcode part1]
  source 1..16: mol_type = other DNA
aggatagactcacagt

SEQ ID NO: 15111 - DNA, 16 bp, synthetic construct
  misc_feature 1..16: note = synthetic [barcode part1]
  source 1..16: mol_type = other DNA
aacggtctgtactctt

SEQ ID NO: 15112 - DNA, 16 bp, synthetic construct
  misc_feature 1..16: note = synthetic [barcode part1]
  source 1..16: mol_type = other DNA
actgaactggaggcac

SEQ ID NO: 15113 - DNA, 16 bp, synthetic construct
  misc_feature 1..16: note = synthetic [barcode part1]
  source 1..16: mol_type = other DNA
aaggcaagaactcgtt

SEQ ID NO: 15114 - DNA, 16 bp, synthetic construct
  misc_feature 1..16: note = synthetic [barcode part1]
  source 1..16: mol_type = other DNA
attgacgcgttccacc

SEQ ID NO: 15115 - DNA, 16 bp, synthetic construct
  misc_feature 1..16: note = synthetic [barcode part1]
  source 1..16: mol_type = other DNA
tgtcgagtcgtatctt

SEQ ID NO: 15116 - DNA, 16 bp, synthetic construct
  misc_feature 1..16: note = synthetic [barcode part1]
  source 1..16: mol_type = other DNA
atcaggtgtgatctgc

SEQ ID NO: 15117 - DNA, 16 bp, synthetic construct
  misc_feature 1..16: note = synthetic [barcode part1]
  source 1..16: mol_type = other DNA
tgcggaaccgaactag

SEQ ID NO: 15118 - DNA, 16 bp, synthetic construct
  misc_feature 1..16: note = synthetic [barcode part1]
  source 1..16: mol_type = other DNA
caagtaacgccacgag

SEQ ID NO: 15119 - DNA, 16 bp, synthetic construct
  misc_feature 1..16: note = synthetic [barcode part1]
  source 1..16: mol_type = other DNA
gtcaagtatccttgtc

SEQ ID NO: 15120 - DNA, 16 bp, synthetic construct
  misc_feature 1..16: note = synthetic [barcode part1]
  source 1..16: mol_type = other DNA
gtgaatctcaacacgc

SEQ ID NO: 15121 - DNA, 16 bp, synthetic construct
  misc_feature 1..16: note = synthetic [barcode part1]
  source 1..16: mol_type = other DNA
gcggttaggtcgaagt

SEQ ID NO: 15122 - DNA, 16 bp, synthetic construct
  misc_feature 1..16: note = synthetic [barcode part1]
  source 1..16: mol_type = other DNA
tctggtcgccagtatc

SEQ ID NO: 15123 - DNA, 16 bp, synthetic construct
  misc_feature 1..16: note = synthetic [barcode part1]
  source 1..16: mol_type = other DNA
tcaacgaacagttcgc

SEQ ID NO: 15124 - DNA, 16 bp, synthetic construct
  misc_feature 1..16: note = synthetic [barcode part1]
  source 1..16: mol_type = other DNA
ccagtgcgattgagag

SEQ ID NO: 15125 - DNA, 16 bp, synthetic construct
  misc_feature 1..16: note = synthetic [barcode part1]
  source 1..16: mol_type = other DNA
gcgtaatcctcaattc

SEQ ID NO: 15126 - DNA, 16 bp, synthetic construct
  misc_feature 1..16: note = synthetic [barcode part1]
  source 1..16: mol_type = other DNA
aggatcgtgtggatcg

SEQ ID NO: 15127 - DNA, 16 bp, synthetic construct
  misc_feature 1..16: note = synthetic [barcode part1]
  source 1..16: mol_type = other DNA
gtctgcggttaaggag

SEQ ID NO: 15128 - DNA, 16 bp, synthetic construct
  misc_feature 1..16: note = synthetic [barcode part1]
  source 1..16: mol_type = other DNA
acaactgcacagttgc

SEQ ID NO: 15129 - DNA, 16 bp, synthetic construct
  misc_feature 1..16: note = synthetic [barcode part1]
  source 1..16: mol_type = other DNA
tctcctgtgccaacag

SEQ ID NO: 15130 - DNA, 16 bp, synthetic construct
  misc_feature 1..16: note = synthetic [barcode part1]
  source 1..16: mol_type = other DNA
gaattagaccgacgcg

SEQ ID NO: 15131 - DNA, 16 bp, synthetic construct
  misc_feature 1..16: note = synthetic [barcode part1]
  source 1..16: mol_type = other DNA
aacgttacgcacacgt

SEQ ID NO: 15132 - DNA, 16 bp, synthetic construct
  misc_feature 1..16: note = synthetic [barcode part1]
  source 1..16: mol_type = other DNA
tcgtaggaacggcagt

SEQ ID NO: 15133 - DNA, 16 bp, synthetic construct
  misc_feature 1..16: note = synthetic [barcode part1]
  source 1..16: mol_type = other DNA
accgcagagtattgtc

SEQ ID NO: 15134 - DNA, 16 bp, synthetic construct
  misc_feature 1..16: note = synthetic [barcode part1]
  source 1..16: mol_type = other DNA
gtgatcaaccggtatc

SEQ ID NO: 15135 - DNA, 16 bp, synthetic construct
  misc_feature 1..16: note = synthetic [barcode part1]
  source 1..16: mol_type = other DNA
cgtaactcgtgagttg

SEQ ID NO: 15136 - DNA, 16 bp, synthetic construct
  misc_feature 1..16: note = synthetic [barcode part1]
  source 1..16: mol_type = other DNA
accttcaaggtcactt

SEQ ID NO: 15137 - DNA, 16 bp, synthetic construct
  misc_feature 1..16: note = synthetic [barcode part1]
  source 1..16: mol_type = other DNA
taagtccacaggtctg

SEQ ID NO: 15138 - DNA, 16 bp, synthetic construct
  misc_feature 1..16: note = synthetic [barcode part1]
  source 1..16: mol_type = other DNA
attgtataccgtcctg

SEQ ID NO: 15139 - DNA, 16 bp, synthetic construct
  misc_feature 1..16: note = synthetic [barcode part1]
  source 1..16: mol_type = other DNA
gttacaaggcaccgtt

SEQ ID NO: 15140 - DNA, 16 bp, synthetic construct
  misc_feature 1..16: note = synthetic [barcode part1]
  source 1..16: mol_type = other DNA
gaacggtgcacttgag

SEQ ID NO: 15141 - DNA, 16 bp, synthetic construct
  misc_feature 1..16: note = synthetic [barcode part1]
  source 1..16: mol_type = other DNA
cctcagtagtccgtac

SEQ ID NO: 15142 - DNA, 16 bp, synthetic construct
  misc_feature 1..16: note = synthetic [barcode part1]
  source 1..16: mol_type = other DNA
tgtacctacggtccgt

SEQ ID NO: 15143 - DNA, 16 bp, synthetic construct
  misc_feature 1..16: note = synthetic [barcode part1]
  source 1..16: mol_type = other DNA
atatcgccttaaggcg

SEQ ID NO: 15144 - DNA, 16 bp, synthetic construct
  misc_feature 1..16: note = synthetic [barcode part1]
  source 1..16: mol_type = other DNA
aacaattcctcacacc

SEQ ID NO: 15145 - DNA, 16 bp, synthetic construct
  misc_feature 1..16: note = synthetic [barcode part1]
  source 1..16: mol_type = other DNA
cctctctgaagttcct

SEQ ID NO: 15146 - DNA, 16 bp, synthetic construct
  misc_feature 1..16: note = synthetic [barcode part1]
  source 1..16: mol_type = other DNA
acgcaagtccgacaag

SEQ ID NO: 15147 - DNA, 16 bp, synthetic construct
  misc_feature 1..16: note = synthetic [barcode part1]
  source 1..16: mol_type = other DNA
cgttggagagtcactt

SEQ ID NO: 15148 - DNA, 16 bp, synthetic construct
  misc_feature 1..16: note = synthetic [barcode part1]
  source 1..16: mol_type = other DNA
ttcgagacggttagtc

SEQ ID NO: 15149 - DNA, 16 bp, synthetic construct
  misc_feature 1..16: note = synthetic [barcode part1]
  source 1..16: mol_type = other DNA
gaacgtgtaacgaccg

SEQ ID NO: 15150 - DNA, 16 bp, synthetic construct
  misc_feature 1..16: note = synthetic [barcode part1]
  source 1..16: mol_type = other DNA
attccgagattgaccg

SEQ ID NO: 15151 - DNA, 16 bp, synthetic construct
  misc_feature 1..16: note = synthetic [barcode part1]
  source 1..16: mol_type = other DNA
gtcaatacgtcctgtt

SEQ ID NO: 15152 - DNA, 16 bp, synthetic construct
  misc_feature 1..16: note = synthetic [barcode part1]
  source 1..16: mol_type = other DNA
attacctgttcacgac

SEQ ID NO: 15153 - DNA, 16 bp, synthetic construct
  misc_feature 1..16: note = synthetic [barcode part1]
  source 1..16: mol_type = other DNA
ttcctaacaatcgcac

SEQ ID NO: 15154 - DNA, 16 bp, synthetic construct
  misc_feature 1..16: note = synthetic [barcode part1]
  source 1..16: mol_type = other DNA
caacgtgacgcaatct

SEQ ID NO: 15155 - DNA, 16 bp, synthetic construct
  misc_feature 1..16: note = synthetic [barcode part1]
  source 1..16: mol_type = other DNA
acctaaggcgacagac

SEQ ID NO: 15156 - DNA, 16 bp, synthetic construct
  misc_feature 1..16: note = synthetic [barcode part1]
  source 1..16: mol_type = other DNA
actctattgttccgcc

SEQ ID NO: 15157 - DNA, 16 bp, synthetic construct
  misc_feature 1..16: note = synthetic [barcode part1]
  source 1..16: mol_type = other DNA
cacactactggtcctg

SEQ ID NO: 15158 - DNA, 16 bp, synthetic construct
  misc_feature 1..16: note = synthetic [barcode part1]
  source 1..16: mol_type = other DNA
ttatccactgtggtac

SEQ ID NO: 15159 - DNA, 16 bp, synthetic construct
  misc_feature 1..16: note = synthetic [barcode part1]
  source 1..16: mol_type = other DNA
cgattgaaccgattgc

SEQ ID NO: 15160 - DNA, 16 bp, synthetic construct
  misc_feature 1..16: note = synthetic [barcode part1]
  source 1..16: mol_type = other DNA
tgcaggtccacagatt

SEQ ID NO: 15161 - DNA, 16 bp, synthetic construct
  misc_feature 1..16: note = synthetic [barcode part1]
  source 1..16: mol_type = other DNA
ttctgcactaggttgt

SEQ ID NO: 15162 - DNA, 16 bp, synthetic construct
  misc_feature 1..16: note = synthetic [barcode part1]
  source 1..16: mol_type = other DNA
tgtaattgccgtcttg

SEQ ID NO: 15163 - DNA, 16 bp, synthetic construct
  misc_feature 1..16: note = synthetic [barcode part1]
  source 1..16: mol_type = other DNA
gaaggatagtggtggt

SEQ ID NO: 15164 - DNA, 16 bp, synthetic construct
  misc_feature 1..16: note = synthetic [barcode part1]
  source 1..16: mol_type = other DNA
tgacctacttggtgag

SEQ ID NO: 15165 - DNA, 16 bp, synthetic construct
  misc_feature 1..16: note = synthetic [barcode part1]
  source 1..16: mol_type = other DNA
agtgaattcgttcgcg

SEQ ID NO: 15166 - DNA, 16 bp, synthetic construct
  misc_feature 1..16: note = synthetic [barcode part1]
  source 1..16: mol_type = other DNA
aaccgatcgtacacac

SEQ ID NO: 15167 - DNA, 16 bp, synthetic construct
  misc_feature 1..16: note = synthetic [barcode part1]
  source 1..16: mol_type = other DNA
tggttcctgatacgcc

SEQ ID NO: 15168 - DNA, 16 bp, synthetic construct
  misc_feature 1..16: note = synthetic [barcode part1]
  source 1..16: mol_type = other DNA
accggaataacgcgtg

SEQ ID NO: 15169 - DNA, 16 bp, synthetic construct
  misc_feature 1..16: note = synthetic [barcode part1]
  source 1..16: mol_type = other DNA
tagacacgaggtgacc

SEQ ID NO: 15170 - DNA, 16 bp, synthetic construct
  misc_feature 1..16: note = synthetic [barcode part1]
  source 1..16: mol_type = other DNA
tccgtcaacacgactc

SEQ ID NO: 15171 - DNA, 16 bp, synthetic construct
  misc_feature 1..16: note = synthetic [barcode part1]
  source 1..16: mol_type = other DNA
ttatcggcacggagag

SEQ ID NO: 15172 - DNA, 16 bp, synthetic construct
  misc_feature 1..16: note = synthetic [barcode part1]
  source 1..16: mol_type = other DNA
tcgatactctcaatcg

SEQ ID NO: 15173 - DNA, 16 bp, synthetic construct
  misc_feature 1..16: note = synthetic [barcode part1]
  source 1..16: mol_type = other DNA
aacctggtcaagtcgt

SEQ ID NO: 15174 - DNA, 16 bp, synthetic construct
  misc_feature 1..16: note = synthetic [barcode part1]
  source 1..16: mol_type = other DNA
tgtcgtctaggttcgc

SEQ ID NO: 15175 - DNA, 16 bp, synthetic construct
  misc_feature 1..16: note = synthetic [barcode part1]
  source 1..16: mol_type = other DNA
gagttggtgacgtacg

SEQ ID NO: 15176 - DNA, 16 bp, synthetic construct
  misc_feature 1..16: note = synthetic [barcode part1]
  source 1..16: mol_type = other DNA
cgtattcctcgcactt

SEQ ID NO: 15177 - DNA, 16 bp, synthetic construct
  misc_feature 1..16: note = synthetic [barcode part1]
  source 1..16: mol_type = other DNA
gtacgttggtgacgag

SEQ ID NO: 15178 - DNA, 16 bp, synthetic construct
  misc_feature 1..16: note = synthetic [barcode part1]
  source 1..16: mol_type = other DNA
taattccgttacacgc

SEQ ID NO: 15179 - DNA, 16 bp, synthetic construct
  misc_feature 1..16: note = synthetic [barcode part1]
  source 1..16: mol_type = other DNA
tgcctcactacggatc

SEQ ID NO: 15180 - DNA, 16 bp, synthetic construct
  misc_feature 1..16: note = synthetic [barcode part1]
  source 1..16: mol_type = other DNA
tgactagtgaccgatc

SEQ ID NO: 15181 - DNA, 16 bp, synthetic construct
  misc_feature 1..16: note = synthetic [barcode part1]
  source 1..16: mol_type = other DNA
atccagaggtacctac

SEQ ID NO: 15182 - DNA, 16 bp, synthetic construct
  misc_feature 1..16: note = synthetic [barcode part1]
  source 1..16: mol_type = other DNA
ataaggaagttgccac

SEQ ID NO: 15183 - DNA, 16 bp, synthetic construct
  misc_feature 1..16: note = synthetic [barcode part1]
  source 1..16: mol_type = other DNA
tcacgccttattgagt

SEQ ID NO: 15184 - DNA, 16 bp, synthetic construct
  misc_feature 1..16: note = synthetic [barcode part1]
  source 1..16: mol_type = other DNA
ttcttgttccggtaag

SEQ ID NO: 15185 - DNA, 16 bp, synthetic construct
  misc_feature 1..16: note = synthetic [barcode part1]
  source 1..16: mol_type = other DNA
cacaagtagtactcgc

SEQ ID NO: 15186 - DNA, 16 bp, synthetic construct
  misc_feature 1..16: note = synthetic [barcode part1]
  source 1..16: mol_type = other DNA
gccgatactacgtagt

SEQ ID NO: 15187 - DNA, 16 bp, synthetic construct
  misc_feature 1..16: note = synthetic [barcode part1]
  source 1..16: mol_type = other DNA
atcttcggtctagtgt

SEQ ID NO: 15188 - DNA, 16 bp, synthetic construct
  misc_feature 1..16: note = synthetic [barcode part1]
  source 1..16: mol_type = other DNA
gccgatacggaagact

SEQ ID NO: 15189 - DNA, 16 bp, synthetic construct
  misc_feature 1..16: note = synthetic [barcode part1]
  source 1..16: mol_type = other DNA
tgacggcaattcagtc

SEQ ID NO: 15190 - DNA, 16 bp, synthetic construct
  misc_feature 1..16: note = synthetic [barcode part1]
  source 1..16: mol_type = other DNA
gcacagagaacacaag

SEQ ID NO: 15191 - DNA, 16 bp, synthetic construct
  misc_feature 1..16: note = synthetic [barcode part1]
  source 1..16: mol_type = other DNA
acgtccgtgttgtctg

SEQ ID NO: 15192 - DNA, 16 bp, synthetic construct
  misc_feature 1..16: note = synthetic [barcode part1]
  source 1..16: mol_type = other DNA
tgtattcggcggtctc

SEQ ID NO: 15193 - DNA, 16 bp, synthetic construct
  misc_feature 1..16: note = synthetic [barcode part1]
  source 1..16: mol_type = other DNA
cggaaggtacacaatt

SEQ ID NO: 15194 - DNA, 16 bp, synthetic construct
  misc_feature 1..16: note = synthetic [barcode part1]
  source 1..16: mol_type = other DNA
aactgtgtgactgtgc

SEQ ID NO: 15195 - DNA, 16 bp, synthetic construct
  misc_feature 1..16: note = synthetic [barcode part1]
  source 1..16: mol_type = other DNA
acggtgaattcaggcg

SEQ ID NO: 15196 - DNA, 16 bp, synthetic construct
  misc_feature 1..16: note = synthetic [barcode part1]
  source 1..16: mol_type = other DNA
gtctcaaggaaggaag

SEQ ID NO: 15197 - DNA, 16 bp, synthetic construct
  misc_feature 1..16: note = synthetic [barcode part1]
  source 1..16: mol_type = other DNA
tccacgtagtcaccac

SEQ ID NO: 15198 - DNA, 16 bp, synthetic construct
  misc_feature 1..16: note = synthetic [barcode part1]
  source 1..16: mol_type = other DNA
aacgtggtgaactgcg

SEQ ID NO: 15199 - DNA, 16 bp, synthetic construct
  misc_feature 1..16: note = synthetic [barcode part1]
  source 1..16: mol_type = other DNA
gatacgttacggttgc

SEQ ID NO: 15200 - DNA, 16 bp, synthetic construct
  misc_feature 1..16: note = synthetic [barcode part1]
  source 1..16: mol_type = other DNA
taggttgttggaccac

SEQ ID NO: 15201 - DNA, 16 bp, synthetic construct
  misc_feature 1..16: note = synthetic [barcode part1]
  source 1..16: mol_type = other DNA
gaattaggtgcactag

SEQ ID NO: 15202 - DNA, 16 bp, synthetic construct
  misc_feature 1..16: note = synthetic [barcode part1]
  source 1..16: mol_type = other DNA
tcttggcagttacgcc

SEQ ID NO: 15203 - DNA, 16 bp, synthetic construct
  misc_feature 1..16: note = synthetic [barcode part1]
  source 1..16: mol_type = other DNA
tggtggtacacctcct

SEQ ID NO: 15204 - DNA, 16 bp, synthetic construct
  misc_feature 1..16: note = synthetic [barcode part1]
  source 1..16: mol_type = other DNA
taccgtccagatccac

SEQ ID NO: 15205 - DNA, 16 bp, synthetic construct
  misc_feature 1..16: note = synthetic [barcode part1]
  source 1..16: mol_type = other DNA
acttcttggaggatcg

SEQ ID NO: 15206 - DNA, 16 bp, synthetic construct
  misc_feature 1..16: note = synthetic [barcode part1]
  source 1..16: mol_type = other DNA
accgagaagaggattg

SEQ ID NO: 15207 - DNA, 16 bp, synthetic construct
  misc_feature 1..16: note = synthetic [barcode part1]
  source 1..16: mol_type = other DNA
gttctgtggtgtatct

SEQ ID NO: 15208 - DNA, 16 bp, synthetic construct
  misc_feature 1..16: note = synthetic [barcode part1]
  source 1..16: mol_type = other DNA
ccgtaagactcggatt

SEQ ID NO: 15209 - DNA, 16 bp, synthetic construct
  misc_feature 1..16: note = synthetic [barcode part1]
  source 1..16: mol_type = other DNA
tattgcctccggttct

SEQ ID NO: 15210 - DNA, 16 bp, synthetic construct
  misc_feature 1..16: note = synthetic [barcode part1]
  source 1..16: mol_type = other DNA
cgaagaggagagattc

SEQ ID NO: 15211 - DNA, 16 bp, synthetic construct
  misc_feature 1..16: note = synthetic [barcode part1]
  source 1..16: mol_type = other DNA
agtgactggttaccac

SEQ ID NO: 15212 - DNA, 16 bp, synthetic construct
  misc_feature 1..16: note = synthetic [barcode part1]
  source 1..16: mol_type = other DNA
ttagtcgccgactaag

SEQ ID NO: 15213 - DNA, 16 bp, synthetic construct
  misc_feature 1..16: note = synthetic [barcode part1]
  source 1..16: mol_type = other DNA
ttaaggtcagacgagt

SEQ ID NO: 15214 - DNA, 16 bp, synthetic construct
  misc_feature 1..16: note = synthetic [barcode part1]
  source 1..16: mol_type = other DNA
gcgtcaccttgtctag

SEQ ID NO: 15215 - DNA, 16 bp, synthetic construct
  misc_feature 1..16: note = synthetic [barcode part1]
  source 1..16: mol_type = other DNA
aggccactaggagtac

SEQ ID NO: 15216 - DNA, 16 bp, synthetic construct
  misc_feature 1..16: note = synthetic [barcode part1]
  source 1..16: mol_type = other DNA
tcaacgtacgtaccag

SEQ ID NO: 15217 - DNA, 16 bp, synthetic construct
  misc_feature 1..16: note = synthetic [barcode part1]
  source 1..16: mol_type = other DNA
aaggtgcgtcgtcaag

SEQ ID NO: 15218 - DNA, 16 bp, synthetic construct
  misc_feature 1..16: note = synthetic [barcode part1]
  source 1..16: mol_type = other DNA
cactggattgtactct

SEQ ID NO: 15219 - DNA, 16 bp, synthetic construct
  misc_feature 1..16: note = synthetic [barcode part1]
  source 1..16: mol_type = other DNA
agttggtcgcgtatac

SEQ ID NO: 15220 - DNA, 16 bp, synthetic construct
  misc_feature 1..16: note = synthetic [barcode part1]
  source 1..16: mol_type = other DNA
ttaggcacaggtatcc

SEQ ID NO: 15221 - DNA, 16 bp, synthetic construct
  misc_feature 1..16: note = synthetic [barcode part1]
  source 1..16: mol_type = other DNA
actctgattggtcgag

SEQ ID NO: 15222 - DNA, 16 bp, synthetic construct
  misc_feature 1..16: note = synthetic [barcode part1]
  source 1..16: mol_type = other DNA
agtacgtgtcagtgtc

SEQ ID NO: 15223 - DNA, 16 bp, synthetic construct
  misc_feature 1..16: note = synthetic [barcode part1]
  source 1..16: mol_type = other DNA
ttgacctggtgtgcct

SEQ ID NO: 15224 - DNA, 16 bp, synthetic construct
  misc_feature 1..16: note = synthetic [barcode part1]
  source 1..16: mol_type = other DNA
cgaattccaccgtctg

SEQ ID NO: 15225 - DNA, 16 bp, synthetic construct
  misc_feature 1..16: note = synthetic [barcode part1]
  source 1..16: mol_type = other DNA
actgaggcgtaaccag

SEQ ID NO: 15226 - DNA, 16 bp, synthetic construct
  misc_feature 1..16: note = synthetic [barcode part1]
  source 1..16: mol_type = other DNA
gagttactgagttgcc

SEQ ID NO: 15227 - DNA, 16 bp, synthetic construct
  misc_feature 1..16: note = synthetic [barcode part1]
  source 1..16: mol_type = other DNA
tgcggcaatagacgac

SEQ ID NO: 15228 - DNA, 16 bp, synthetic construct
  misc_feature 1..16: note = synthetic [barcode part1]
  source 1..16: mol_type = other DNA
tggcgtgagagtagtc

SEQ ID NO: 15229 - DNA, 16 bp, synthetic construct
  misc_feature 1..16: note = synthetic [barcode part1]
  source 1..16: mol_type = other DNA
gacactgcaaccaact

SEQ ID NO: 15230 - DNA, 16 bp, synthetic construct
  misc_feature 1..16: note = synthetic [barcode part1]
  source 1..16: mol_type = other DNA
cgtgaacagtgaagtt

SEQ ID NO: 15231 - DNA, 16 bp, synthetic construct
  misc_feature 1..16: note = synthetic [barcode part1]
  source 1..16: mol_type = other DNA
gatcacggattaaggt

SEQ ID NO: 15232 - DNA, 16 bp, synthetic construct
  misc_feature 1..16: note = synthetic [barcode part1]
  source 1..16: mol_type = other DNA
acgacaccgatcagtt

SEQ ID NO: 15233 - DNA, 16 bp, synthetic construct
  misc_feature 1..16: note = synthetic [barcode part1]
  source 1..16: mol_type = other DNA
tggagtcagaacctct

SEQ ID NO: 15234 - DNA, 16 bp, synthetic construct
  misc_feature 1..16: note = synthetic [barcode part1]
  source 1..16: mol_type = other DNA
tagtgactcttcgcgc

SEQ ID NO: 15235 - DNA, 16 bp, synthetic construct
  misc_feature 1..16: note = synthetic [barcode part1]
  source 1..16: mol_type = other DNA
taccactatccgaact

SEQ ID NO: 15236 - DNA, 16 bp, synthetic construct
  misc_feature 1..16: note = synthetic [barcode part1]
  source 1..16: mol_type = other DNA
tatagtacgttcgtcc

SEQ ID NO: 15237 - DNA, 16 bp, synthetic construct
  misc_feature 1..16: note = synthetic [barcode part1]
  source 1..16: mol_type = other DNA
aggtcgacaacgtacg

SEQ ID NO: 15238 - DNA, 16 bp, synthetic construct
  misc_feature 1..16: note = synthetic [barcode part1]
  source 1..16: mol_type = other DNA
cacagacaggtctgtt

SEQ ID NO: 15239 - DNA, 16 bp, synthetic construct
  misc_feature 1..16: note = synthetic [barcode part1]
  source 1..16: mol_type = other DNA
gagagaagaggtcttg

SEQ ID NO: 15240 - DNA, 16 bp, synthetic construct
  misc_feature 1..16: note = synthetic [barcode part1]
  source 1..16: mol_type = other DNA
gagtggtgatctgcag

SEQ ID NO: 15241 - DNA, 16 bp, synthetic construct
  misc_feature 1..16: note = synthetic [barcode part1]
  source 1..16: mol_type = other DNA
aagaggtgagtcaggt

SEQ ID NO: 15242 - DNA, 16 bp, synthetic construct
  misc_feature 1..16: note = synthetic [barcode part1]
  source 1..16: mol_type = other DNA
ccgagtacttgccact

SEQ ID NO: 15243 - DNA, 16 bp, synthetic construct
  misc_feature 1..16: note = synthetic [barcode part1]
  source 1..16: mol_type = other DNA
gtcttcggaatacgac

SEQ ID NO: 15244 - DNA, 16 bp, synthetic construct
  misc_feature 1..16: note = synthetic [barcode part1]
  source 1..16: mol_type = other DNA
caacttgcgagttgtg

SEQ ID NO: 15245 - DNA, 16 bp, synthetic construct
  misc_feature 1..16: note = synthetic [barcode part1]
  source 1..16: mol_type = other DNA
gtgaactcggtgagac

SEQ ID NO: 15246 - DNA, 16 bp, synthetic construct
  misc_feature 1..16: note = synthetic [barcode part1]
  source 1..16: mol_type = other DNA
ttgcgttgtaacctgt

SEQ ID NO: 15247 - DNA, 16 bp, synthetic construct
  misc_feature 1..16: note = synthetic [barcode part1]
  source 1..16: mol_type = other DNA
gtgaaggtaacagttc

SEQ ID NO: 15248 - DNA, 16 bp, synthetic construct
  misc_feature 1..16: note = synthetic [barcode part1]
  source 1..16: mol_type = other DNA
aattccttacactggc

SEQ ID NO: 15249 - DNA, 16 bp, synthetic construct
  misc_feature 1..16: note = synthetic [barcode part1]
  source 1..16: mol_type = other DNA
taattgacacggtgcc

SEQ ID NO: 15250 - DNA, 16 bp, synthetic construct
  misc_feature 1..16: note = synthetic [barcode part1]
  source 1..16: mol_type = other DNA
accaccgtgtaggaag

SEQ ID NO: 15251 - DNA, 16 bp, synthetic construct
  misc_feature 1..16: note = synthetic [barcode part1]
  source 1..16: mol_type = other DNA
agttgtcttcgtatcg

SEQ ID NO: 15252 - DNA, 16 bp, synthetic construct
  misc_feature 1..16: note = synthetic [barcode part1]
  source 1..16: mol_type = other DNA
agacttgtgtcagtgc

SEQ ID NO: 15253 - DNA, 16 bp, synthetic construct
  misc_feature 1..16: note = synthetic [barcode part1]
  source 1..16: mol_type = other DNA
cgaccaacaactggtt

SEQ ID NO: 15254 - DNA, 16 bp, synthetic construct
  misc_feature 1..16: note = synthetic [barcode part1]
  source 1..16: mol_type = other DNA
tagtctggtctccacg

SEQ ID NO: 15255 - DNA, 16 bp, synthetic construct
  misc_feature 1..16: note = synthetic [barcode part1]
  source 1..16: mol_type = other DNA
tcaccacaacgagatc

SEQ ID NO: 15256 - DNA, 16 bp, synthetic construct
  misc_feature 1..16: note = synthetic [barcode part1]
  source 1..16: mol_type = other DNA
gaacaatagttacgcg

SEQ ID NO: 15257 - DNA, 16 bp, synthetic construct
  misc_feature 1..16: note = synthetic [barcode part1]
  source 1..16: mol_type = other DNA
caccttccttctgtag

SEQ ID NO: 15258 - DNA, 16 bp, synthetic construct
  misc_feature 1..16: note = synthetic [barcode part1]
  source 1..16: mol_type = other DNA
tatagtgcacctacct

SEQ ID NO: 15259 - DNA, 16 bp, synthetic construct
  misc_feature 1..16: note = synthetic [barcode part1]
  source 1..16: mol_type = other DNA
gtcacagttactcact

SEQ ID NO: 15260 - DNA, 16 bp, synthetic construct
  misc_feature 1..16: note = synthetic [barcode part1]
  source 1..16: mol_type = other DNA
ttaacggtgaagacac

SEQ ID NO: 15261 - DNA, 16 bp, synthetic construct
  misc_feature 1..16: note = synthetic [barcode part1]
  source 1..16: mol_type = other DNA
aggtgagagtgtcacc

SEQ ID NO: 15262 - DNA, 16 bp, synthetic construct
  misc_feature 1..16: note = synthetic [barcode part1]
  source 1..16: mol_type = other DNA
cctgaaggccaattgt

SEQ ID NO: 15263 - DNA, 16 bp, synthetic construct
  misc_feature 1..16: note = synthetic [barcode part1]
  source 1..16: mol_type = other DNA
gtgtcggtcctactac

SEQ ID NO: 15264 - DNA, 16 bp, synthetic construct
  misc_feature 1..16: note = synthetic [barcode part1]
  source 1..16: mol_type = other DNA
tggtccggagtacaag

SEQ ID NO: 15265 - DNA, 16 bp, synthetic construct
  misc_feature 1..16: note = synthetic [barcode part1]
  source 1..16: mol_type = other DNA
atctcgagaggaagag

SEQ ID NO: 15266 - DNA, 16 bp, synthetic construct
  misc_feature 1..16: note = synthetic [barcode part1]
  source 1..16: mol_type = other DNA
ccgttacggattcgtc

SEQ ID NO: 15267 - DNA, 16 bp, synthetic construct
  misc_feature 1..16: note = synthetic [barcode part1]
  source 1..16: mol_type = other DNA
gtcttgccgttaatac

SEQ ID NO: 15268 - DNA, 16 bp, synthetic construct
  misc_feature 1..16: note = synthetic [barcode part1]
  source 1..16: mol_type = other DNA
aggtaatacgtgactg

SEQ ID NO: 15269 - DNA, 16 bp, synthetic construct
  misc_feature 1..16: note = synthetic [barcode part1]
  source 1..16: mol_type = other DNA
cacgtgcaactaactg

SEQ ID NO: 15270 - DNA, 16 bp, synthetic construct
  misc_feature 1..16: note = synthetic [barcode part1]
  source 1..16: mol_type = other DNA
tgatctccgacgcgtt

SEQ ID NO: 15271 - DNA, 16 bp, synthetic construct
  misc_feature 1..16: note = synthetic [barcode part1]
  source 1..16: mol_type = other DNA
gagtaaggtaacgtct

SEQ ID NO: 15272 - DNA, 16 bp, synthetic construct
  misc_feature 1..16: note = synthetic [barcode part1]
  source 1..16: mol_type = other DNA
cgaatcaaccgagttc

SEQ ID NO: 15273 - DNA, 16 bp, synthetic construct
  misc_feature 1..16: note = synthetic [barcode part1]
  source 1..16: mol_type = other DNA
aactatacgcgtgacc

SEQ ID NO: 15274 - DNA, 16 bp, synthetic construct
  misc_feature 1..16: note = synthetic [barcode part1]
  source 1..16: mol_type = other DNA
cgaccaaggttgatct

SEQ ID NO: 15275 - DNA, 16 bp, synthetic construct
  misc_feature 1..16: note = synthetic [barcode part1]
  source 1..16: mol_type = other DNA
caacgacggaacacgt

SEQ ID NO: 15276 - DNA, 16 bp, synthetic construct
  misc_feature 1..16: note = synthetic [barcode part1]
  source 1..16: mol_type = other DNA
atcgcctctgcaagtc

SEQ ID NO: 15277 - DNA, 16 bp, synthetic construct
  misc_feature 1..16: note = synthetic [barcode part1]
  source 1..16: mol_type = other DNA
aacttaggaccgtcgt

SEQ ID NO: 15278 - DNA, 16 bp, synthetic construct
  misc_feature 1..16: note = synthetic [barcode part1]
  source 1..16: mol_type = other DNA
tactgagaggtacggc

SEQ ID NO: 15279 - DNA, 16 bp, synthetic construct
  misc_feature 1..16: note = synthetic [barcode part1]
  source 1..16: mol_type = other DNA
cgtaatcgtgcaactg

SEQ ID NO: 15280 - DNA, 16 bp, synthetic construct
  misc_feature 1..16: note = synthetic [barcode part1]
  source 1..16: mol_type = other DNA
taggaggattacgtac

SEQ ID NO: 15281 - DNA, 16 bp, synthetic construct
  misc_feature 1..16: note = synthetic [barcode part1]
  source 1..16: mol_type = other DNA
gcactccagtctgact

SEQ ID NO: 15282 - DNA, 16 bp, synthetic construct
  misc_feature 1..16: note = synthetic [barcode part1]
  source 1..16: mol_type = other DNA
aactgtgtgtgactgc

SEQ ID NO: 15283 - DNA, 16 bp, synthetic construct
  misc_feature 1..16: note = synthetic [barcode part1]
  source 1..16: mol_type = other DNA
tgtcctaggacctatt

SEQ ID NO: 15284 - DNA, 16 bp, synthetic construct
  misc_feature 1..16: note = synthetic [barcode part1]
  source 1..16: mol_type = other DNA
atatcggattgtcctc

SEQ ID NO: 15285 - DNA, 16 bp, synthetic construct
  misc_feature 1..16: note = synthetic [barcode part1]
  source 1..16: mol_type = other DNA
aaggccaccagtgtag

SEQ ID NO: 15286 - DNA, 16 bp, synthetic construct
  misc_feature 1..16: note = synthetic [barcode part1]
  source 1..16: mol_type = other DNA
gatcaatccgatcggt

SEQ ID NO: 15287 - DNA, 16 bp, synthetic construct
  misc_feature 1..16: note = synthetic [barcode part1]
  source 1..16: mol_type = other DNA
caatcacgtaaggtag

SEQ ID NO: 15288 - DNA, 16 bp, synthetic construct
  misc_feature 1..16: note = synthetic [barcode part1]
  source 1..16: mol_type = other DNA
aaggaacttcacaggt

SEQ ID NO: 15289 - DNA, 16 bp, synthetic construct
  misc_feature 1..16: note = synthetic [barcode part1]
  source 1..16: mol_type = other DNA
ccgttacgagtagtac

SEQ ID NO: 15290 - DNA, 16 bp, synthetic construct
  misc_feature 1..16: note = synthetic [barcode part1]
  source 1..16: mol_type = other DNA
cgttccttaacgattg

SEQ ID NO: 15291 - DNA, 16 bp, synthetic construct
  misc_feature 1..16: note = synthetic [barcode part1]
  source 1..16: mol_type = other DNA
cctggtgtagagacag

SEQ ID NO: 15292 - DNA, 16 bp, synthetic construct
  misc_feature 1..16: note = synthetic [barcode part1]
  source 1..16: mol_type = other DNA
caaggtcaaggtctct

SEQ ID NO: 15293 - DNA, 16 bp, synthetic construct
  misc_feature 1..16: note = synthetic [barcode part1]
  source 1..16: mol_type = other DNA
gcagttgcctctcagt

SEQ ID NO: 15294 - DNA, 16 bp, synthetic construct
  misc_feature 1..16: note = synthetic [barcode part1]
  source 1..16: mol_type = other DNA
cagtctcgaagaatcc

SEQ ID NO: 15295 - DNA, 16 bp, synthetic construct
  misc_feature 1..16: note = synthetic [barcode part1]
  source 1..16: mol_type = other DNA
gtaccagtggccttct

SEQ ID NO: 15296 - DNA, 16 bp, synthetic construct
  misc_feature 1..16: note = synthetic [barcode part1]
  source 1..16: mol_type = other DNA
tgtcctaggacaacgt

SEQ ID NO: 15297 - DNA, 16 bp, synthetic construct
  misc_feature 1..16: note = synthetic [barcode part1]
  source 1..16: mol_type = other DNA
ttgatctgcggagtac

SEQ ID NO: 15298 - DNA, 16 bp, synthetic construct
  misc_feature 1..16: note = synthetic [barcode part1]
  source 1..16: mol_type = other DNA
gtacgtgtacacacgt

SEQ ID NO: 15299 - DNA, 16 bp, synthetic construct
  misc_feature 1..16: note = synthetic [barcode part1]
  source 1..16: mol_type = other DNA
gtacggtgattgaagt

SEQ ID NO: 15300 - DNA, 16 bp, synthetic construct
  misc_feature 1..16: note = synthetic [barcode part1]
  source 1..16: mol_type = other DNA
ccaaggcgtctatctc

SEQ ID NO: 15301 - DNA, 16 bp, synthetic construct
  misc_feature 1..16: note = synthetic [barcode part1]
  source 1..16: mol_type = other DNA
ttcggtaacagaggcg

SEQ ID NO: 15302 - DNA, 16 bp, synthetic construct
  misc_feature 1..16: note = synthetic [barcode part1]
  source 1..16: mol_type = other DNA
atccttaaggttgtcc

SEQ ID NO: 15303 - DNA, 16 bp, synthetic construct
  misc_feature 1..16: note = synthetic [barcode part1]
  source 1..16: mol_type = other DNA
tacacgttgactggtg

SEQ ID NO: 15304 - DNA, 16 bp, synthetic construct
  misc_feature 1..16: note = synthetic [barcode part1]
  source 1..16: mol_type = other DNA
tataggattgacggtg

SEQ ID NO: 15305 - DNA, 16 bp, synthetic construct
  misc_feature 1..16: note = synthetic [barcode part1]
  source 1..16: mol_type = other DNA
agtaagtacggtgccg

SEQ ID NO: 15306 - DNA, 16 bp, synthetic construct
  misc_feature 1..16: note = synthetic [barcode part1]
  source 1..16: mol_type = other DNA
aagtccagtggttacc

SEQ ID NO: 15307 - DNA, 16 bp, synthetic construct
  misc_feature 1..16: note = synthetic [barcode part1]
  source 1..16: mol_type = other DNA
tcttactccgtaggcg

SEQ ID NO: 15308 - DNA, 16 bp, synthetic construct
  misc_feature 1..16: note = synthetic [barcode part1]
  source 1..16: mol_type = other DNA
aataatcgaccaccgc

SEQ ID NO: 15309 - DNA, 16 bp, synthetic construct
  misc_feature 1..16: note = synthetic [barcode part1]
  source 1..16: mol_type = other DNA
tcctagaatccgtccg

SEQ ID NO: 15310 - DNA, 16 bp, synthetic construct
  misc_feature 1..16: note = synthetic [barcode part1]
  source 1..16: mol_type = other DNA
cactagtggaaccgag

SEQ ID NO: 15311 - DNA, 16 bp, synthetic construct
  misc_feature 1..16: note = synthetic [barcode part1]
  source 1..16: mol_type = other DNA
gtctcacgatacgtcc

SEQ ID NO: 15312 - DNA, 16 bp, synthetic construct
  misc_feature 1..16: note = synthetic [barcode part1]
  source 1..16: mol_type = other DNA
tgattaactccgaggc

SEQ ID NO: 15313 - DNA, 16 bp, synthetic construct
  misc_feature 1..16: note = synthetic [barcode part1]
  source 1..16: mol_type = other DNA
tccgttcttattcgcg

SEQ ID NO: 15314 - DNA, 16 bp, synthetic construct
  misc_feature 1..16: note = synthetic [barcode part1]
  source 1..16: mol_type = other DNA
gtctcaattgaccgag

SEQ ID NO: 15315 - DNA, 16 bp, synthetic construct
  misc_feature 1..16: note = synthetic [barcode part1]
  source 1..16: mol_type = other DNA
aggattcaacgaacac

SEQ ID NO: 15316 - DNA, 16 bp, synthetic construct
  misc_feature 1..16: note = synthetic [barcode part1]
  source 1..16: mol_type = other DNA
taccgttaacacgtct

SEQ ID NO: 15317 - DNA, 16 bp, synthetic construct
  misc_feature 1..16: note = synthetic [barcode part1]
  source 1..16: mol_type = other DNA
cgtgtagaacgtacct

SEQ ID NO: 15318 - DNA, 16 bp, synthetic construct
  misc_feature 1..16: note = synthetic [barcode part1]
  source 1..16: mol_type = other DNA
agatccgtggatctgt

SEQ ID NO: 15319 - DNA, 16 bp, synthetic construct
  misc_feature 1..16: note = synthetic [barcode part1]
  source 1..16: mol_type = other DNA
caggttgtatactcct

SEQ ID NO: 15320 - DNA, 16 bp, synthetic construct
  misc_feature 1..16: note = synthetic [barcode part1]
  source 1..16: mol_type = other DNA
attgtgcaatcgtgcg

SEQ ID NO: 15321 - DNA, 16 bp, synthetic construct
  misc_feature 1..16: note = synthetic [barcode part1]
  source 1..16: mol_type = other DNA
gcaaccgtacagttac

SEQ ID NO: 15322 - DNA, 16 bp, synthetic construct
  misc_feature 1..16: note = synthetic [barcode part1]
  source 1..16: mol_type = other DNA
gtgagttccttcaatc

SEQ ID NO: 15323 - DNA, 16 bp, synthetic construct
  misc_feature 1..16: note = synthetic [barcode part1]
  source 1..16: mol_type = other DNA
aggttcacgtcgatac

SEQ ID NO: 15324 - DNA, 16 bp, synthetic construct
  misc_feature 1..16: note = synthetic [barcode part1]
  source 1..16: mol_type = other DNA
cactctacctggacgt

SEQ ID NO: 15325 - DNA, 16 bp, synthetic construct
  misc_feature 1..16: note = synthetic [barcode part1]
  source 1..16: mol_type = other DNA
gtgaatatctaggacg

SEQ ID NO: 15326 - DNA, 16 bp, synthetic construct
  misc_feature 1..16: note = synthetic [barcode part1]
  source 1..16: mol_type = other DNA
acgtacgcaacactgt

SEQ ID NO: 15327 - DNA, 16 bp, synthetic construct
  misc_feature 1..16: note = synthetic [barcode part1]
  source 1..16: mol_type = other DNA
ccacgtgttgacttcg

SEQ ID NO: 15328 - DNA, 16 bp, synthetic construct
  misc_feature 1..16: note = synthetic [barcode part1]
  source 1..16: mol_type = other DNA
gaagtgcaactcgacg

SEQ ID NO: 15329 - DNA, 16 bp, synthetic construct
  misc_feature 1..16: note = synthetic [barcode part1]
  source 1..16: mol_type = other DNA
agaatactcggcggtg

SEQ ID NO: 15330 - DNA, 16 bp, synthetic construct
  misc_feature 1..16: note = synthetic [barcode part1]
  source 1..16: mol_type = other DNA
gtgcaattctcggtcc

SEQ ID NO: 15331 - DNA, 16 bp, synthetic construct
  misc_feature 1..16: note = synthetic [barcode part1]
  source 1..16: mol_type = other DNA
gtattgcaccttggag

SEQ ID NO: 15332 - DNA, 16 bp, synthetic construct
  misc_feature 1..16: note = synthetic [barcode part1]
  source 1..16: mol_type = other DNA
ccacctactacaacgc

SEQ ID NO: 15333 - DNA, 16 bp, synthetic construct
  misc_feature 1..16: note = synthetic [barcode part1]
  source 1..16: mol_type = other DNA
agtaagtcgcctactg

SEQ ID NO: 15334 - DNA, 16 bp, synthetic construct
  misc_feature 1..16: note = synthetic [barcode part1]
  source 1..16: mol_type = other DNA
tcaggcctacgtcttg

SEQ ID NO: 15335 - DNA, 16 bp, synthetic construct
  misc_feature 1..16: note = synthetic [barcode part1]
  source 1..16: mol_type = other DNA
tacacgtgtcacaacg

SEQ ID NO: 15336 - DNA, 16 bp, synthetic construct
  misc_feature 1..16: note = synthetic [barcode part1]
  source 1..16: mol_type = other DNA
ataatcgcctcctagt

SEQ ID NO: 15337 - DNA, 16 bp, synthetic construct
  misc_feature 1..16: note = synthetic [barcode part1]
  source 1..16: mol_type = other DNA
taatctcaccgcgtgc

SEQ ID NO: 15338 - DNA, 16 bp, synthetic construct
  misc_feature 1..16: note = synthetic [barcode part1]
  source 1..16: mol_type = other DNA
ttacctggcggcactt

SEQ ID NO: 15339 - DNA, 16 bp, synthetic construct
  misc_feature 1..16: note = synthetic [barcode part1]
  source 1..16: mol_type = other DNA
aataggttcgcggcag

SEQ ID NO: 15340 - DNA, 16 bp, synthetic construct
  misc_feature 1..16: note = synthetic [barcode part1]
  source 1..16: mol_type = other DNA
ttgactcctcacaagt

SEQ ID NO: 15341 - DNA, 16 bp, synthetic construct
  misc_feature 1..16: note = synthetic [barcode part1]
  source 1..16: mol_type = other DNA
atccagagtaggtctc

SEQ ID NO: 15342 - DNA, 16 bp, synthetic construct
  misc_feature 1..16: note = synthetic [barcode part1]
  source 1..16: mol_type = other DNA
gaacaggtgtctatcc

SEQ ID NO: 15343 - DNA, 16 bp, synthetic construct
  misc_feature 1..16: note = synthetic [barcode part1]
  source 1..16: mol_type = other DNA
tattccggtgagttct

SEQ ID NO: 15344 - DNA, 16 bp, synthetic construct
  misc_feature 1..16: note = synthetic [barcode part1]
  source 1..16: mol_type = other DNA
tcgtgcgagttggaag

SEQ ID NO: 15345 - DNA, 16 bp, synthetic construct
  misc_feature 1..16: note = synthetic [barcode part1]
  source 1..16: mol_type = other DNA
acctgtcggtgttacc

SEQ ID NO: 15346 - DNA, 16 bp, synthetic construct
  misc_feature 1..16: note = synthetic [barcode part1]
  source 1..16: mol_type = other DNA
ccttgtaccgagtcgt

SEQ ID NO: 15347 - DNA, 16 bp, synthetic construct
  misc_feature 1..16: note = synthetic [barcode part1]
  source 1..16: mol_type = other DNA
gccagtactgtgtagt

SEQ ID NO: 15348 - DNA, 16 bp, synthetic construct
  misc_feature 1..16: note = synthetic [barcode part1]
  source 1..16: mol_type = other DNA
atcggttcagtgtcag

SEQ ID NO: 15349 - DNA, 16 bp, synthetic construct
  misc_feature 1..16: note = synthetic [barcode part1]
  source 1..16: mol_type = other DNA
gtctgtacttctagtg

SEQ ID NO: 15350 - DNA, 16 bp, synthetic construct
  misc_feature 1..16: note = synthetic [barcode part1]
  source 1..16: mol_type = other DNA
aggtccaatccaggtt

SEQ ID NO: 15351 - DNA, 16 bp, synthetic construct
  misc_feature 1..16: note = synthetic [barcode part1]
  source 1..16: mol_type = other DNA
attagacgcggaagtt

SEQ ID NO: 15352 - DNA, 16 bp, synthetic construct
  misc_feature 1..16: note = synthetic [barcode part1]
  source 1..16: mol_type = other DNA
agaccacgcaacttgt

SEQ ID NO: 15353 - DNA, 16 bp, synthetic construct
  misc_feature 1..16: note = synthetic [barcode part1]
  source 1..16: mol_type = other DNA
atcggtattgttgtcc

SEQ ID NO: 15354 - DNA, 16 bp, synthetic construct
  misc_feature 1..16: note = synthetic [barcode part1]
  source 1..16: mol_type = other DNA
ccttctgatccgaacg

SEQ ID NO: 15355 - DNA, 16 bp, synthetic construct
  misc_feature 1..16: note = synthetic [barcode part1]
  source 1..16: mol_type = other DNA
gcagttgagaatcagt

SEQ ID NO: 15356 - DNA, 16 bp, synthetic construct
  misc_feature 1..16: note = synthetic [barcode part1]
  source 1..16: mol_type = other DNA
ttcgttagtgcagttc

SEQ ID NO: 15357 - DNA, 16 bp, synthetic construct
  misc_feature 1..16: note = synthetic [barcode part1]
  source 1..16: mol_type = other DNA
ttccaattcggcgcac

SEQ ID NO: 15358 - DNA, 16 bp, synthetic construct
  misc_feature 1..16: note = synthetic [barcode part1]
  source 1..16: mol_type = other DNA
tcacaaggaacactcc

SEQ ID NO: 15359 - DNA, 16 bp, synthetic construct
  misc_feature 1..16: note = synthetic [barcode part1]
  source 1..16: mol_type = other DNA
acgtgttgacacgttg

SEQ ID NO: 15360 - DNA, 16 bp, synthetic construct
  misc_feature 1..16: note = synthetic [barcode part1]
  source 1..16: mol_type = other DNA
gaggcaacgtctagac

SEQ ID NO: 15361 - DNA, 16 bp, synthetic construct
  misc_feature 1..16: note = synthetic [barcode part1]
  source 1..16: mol_type = other DNA
gtcctaccggattcac

SEQ ID NO: 15362 - DNA, 16 bp, synthetic construct
  misc_feature 1..16: note = synthetic [barcode part1]
  source 1..16: mol_type = other DNA
ttcctcgtgttagtag

SEQ ID NO: 15363 - DNA, 16 bp, synthetic construct
  misc_feature 1..16: note = synthetic [barcode part1]
  source 1..16: mol_type = other DNA
agtctactcacagacg

SEQ ID NO: 15364 - DNA, 16 bp, synthetic construct
  misc_feature 1..16: note = synthetic [barcode part1]
  source 1..16: mol_type = other DNA
cacttcggtaataggc

SEQ ID NO: 15365 - DNA, 16 bp, synthetic construct
  misc_feature 1..16: note = synthetic [barcode part1]
  source 1..16: mol_type = other DNA
tccacgtggagtatac

SEQ ID NO: 15366 - DNA, 16 bp, synthetic construct
  misc_feature 1..16: note = synthetic [barcode part1]
  source 1..16: mol_type = other DNA
gtgtgacctccgatct

SEQ ID NO: 15367 - DNA, 16 bp, synthetic construct
  misc_feature 1..16: note = synthetic [barcode part1]
  source 1..16: mol_type = other DNA
atcttcgcactagact

SEQ ID NO: 15368 - DNA, 16 bp, synthetic construct
  misc_feature 1..16: note = synthetic [barcode part1]
  source 1..16: mol_type = other DNA
tcgaacgaggtggtgt

SEQ ID NO: 15369 - DNA, 16 bp, synthetic construct
  misc_feature 1..16: note = synthetic [barcode part1]
  source 1..16: mol_type = other DNA
aggactcactctaggt

SEQ ID NO: 15370 - DNA, 16 bp, synthetic construct
  misc_feature 1..16: note = synthetic [barcode part1]
  source 1..16: mol_type = other DNA
cgtaatccgacttccg

SEQ ID NO: 15371 - DNA, 16 bp, synthetic construct
  misc_feature 1..16: note = synthetic [barcode part1]
  source 1..16: mol_type = other DNA
aaccgaccgactaact

SEQ ID NO: 15372 - DNA, 16 bp, synthetic construct
  misc_feature 1..16: note = synthetic [barcode part1]
  source 1..16: mol_type = other DNA
tgattgaacgccgtgt

SEQ ID NO: 15373 - DNA, 16 bp, synthetic construct
  misc_feature 1..16: note = synthetic [barcode part1]
  source 1..16: mol_type = other DNA
tcaggccttctgtacg

SEQ ID NO: 15374 - DNA, 16 bp, synthetic construct
  misc_feature 1..16: note = synthetic [barcode part1]
  source 1..16: mol_type = other DNA
aatattggccaaccgc

SEQ ID NO: 15375 - DNA, 16 bp, synthetic construct
  misc_feature 1..16: note = synthetic [barcode part1]
  source 1..16: mol_type = other DNA
aggcactctactccgt

SEQ ID NO: 15376 - DNA, 16 bp, synthetic construct
  misc_feature 1..16: note = synthetic [barcode part1]
  source 1..16: mol_type = other DNA
ttcctcctatacgcgt

SEQ ID NO: 15377 - DNA, 16 bp, synthetic construct
  misc_feature 1..16: note = synthetic [barcode part1]
  source 1..16: mol_type = other DNA
gaccttcagttcgtgc

SEQ ID NO: 15378 - DNA, 16 bp, synthetic construct
  misc_feature 1..16: note = synthetic [barcode part1]
  source 1..16: mol_type = other DNA
cgacagaattctgtcg

SEQ ID NO: 15379 - DNA, 16 bp, synthetic construct
  misc_feature 1..16: note = synthetic [barcode part1]
  source 1..16: mol_type = other DNA
gataagactccactgc

SEQ ID NO: 15380 - DNA, 16 bp, synthetic construct
  misc_feature 1..16: note = synthetic [barcode part1]
  source 1..16: mol_type = other DNA
acaacactcaggactc

SEQ ID NO: 15381 - DNA, 16 bp, synthetic construct
  misc_feature 1..16: note = synthetic [barcode part1]
  source 1..16: mol_type = other DNA
tccgtacttggtgacc

SEQ ID NO: 15382 - DNA, 16 bp, synthetic construct
  misc_feature 1..16: note = synthetic [barcode part1]
  source 1..16: mol_type = other DNA
ccaaccgttagttgag

SEQ ID NO: 15383 - DNA, 16 bp, synthetic construct
  misc_feature 1..16: note = synthetic [barcode part1]
  source 1..16: mol_type = other DNA
ttctcggactaatacc

SEQ ID NO: 15384 - DNA, 16 bp, synthetic construct
  misc_feature 1..16: note = synthetic [barcode part1]
  source 1..16: mol_type = other DNA
caattcctagtcgtgt

SEQ ID NO: 15385 - DNA, 16 bp, synthetic construct
  misc_feature 1..16: note = synthetic [barcode part1]
  source 1..16: mol_type = other DNA
tatcttctgcgaggag

SEQ ID NO: 15386 - DNA, 16 bp, synthetic construct
  misc_feature 1..16: note = synthetic [barcode part1]
  source 1..16: mol_type = other DNA
caacgaggtctacgag

SEQ ID NO: 15387 - DNA, 16 bp, synthetic construct
  misc_feature 1..16: note = synthetic [barcode part1]
  source 1..16: mol_type = other DNA
caattgaaccggtcgt

SEQ ID NO: 15388 - DNA, 16 bp, synthetic construct
  misc_feature 1..16: note = synthetic [barcode part1]
  source 1..16: mol_type = other DNA
ttcagtggtagaagtg

SEQ ID NO: 15389 - DNA, 16 bp, synthetic construct
  misc_feature 1..16: note = synthetic [barcode part1]
  source 1..16: mol_type = other DNA
acaaggcgtctataag

SEQ ID NO: 15390 - DNA, 16 bp, synthetic construct
  misc_feature 1..16: note = synthetic [barcode part1]
  source 1..16: mol_type = other DNA
gtactacgataccacg

SEQ ID NO: 15391 - DNA, 16 bp, synthetic construct
  misc_feature 1..16: note = synthetic [barcode part1]
  source 1..16: mol_type = other DNA
gactctactatctgtg

SEQ ID NO: 15392 - DNA, 16 bp, synthetic construct
  misc_feature 1..16: note = synthetic [barcode part1]
  source 1..16: mol_type = other DNA
tagtcacaagtcgaag

SEQ ID NO: 15393 - DNA, 16 bp, synthetic construct
  misc_feature 1..16: note = synthetic [barcode part1]
  source 1..16: mol_type = other DNA
gtagtcagatcagaac

SEQ ID NO: 15394 - DNA, 16 bp, synthetic construct
  misc_feature 1..16: note = synthetic [barcode part1]
  source 1..16: mol_type = other DNA
actgataaggccaagt

SEQ ID NO: 15395 - DNA, 16 bp, synthetic construct
  misc_feature 1..16: note = synthetic [barcode part1]
  source 1..16: mol_type = other DNA
aggccgtcgaagatac

SEQ ID NO: 15396 - DNA, 16 bp, synthetic construct
  misc_feature 1..16: note = synthetic [barcode part1]
  source 1..16: mol_type = other DNA
aacacgtaaccagaac

SEQ ID NO: 15397 - DNA, 16 bp, synthetic construct
  misc_feature 1..16: note = synthetic [barcode part1]
  source 1..16: mol_type = other DNA
aataggatcggtgcgc

SEQ ID NO: 15398 - DNA, 16 bp, synthetic construct
  misc_feature 1..16: note = synthetic [barcode part1]
  source 1..16: mol_type = other DNA
cctggttaagaagtcc

SEQ ID NO: 15399 - DNA, 16 bp, synthetic construct
  misc_feature 1..16: note = synthetic [barcode part1]
  source 1..16: mol_type = other DNA
tctgtcctaggtagag

SEQ ID NO: 15400 - DNA, 16 bp, synthetic construct
  misc_feature 1..16: note = synthetic [barcode part1]
  source 1..16: mol_type = other DNA
tgacttcgcgtattgt

SEQ ID NO: 15401 - DNA, 16 bp, synthetic construct
  misc_feature 1..16: note = synthetic [barcode part1]
  source 1..16: mol_type = other DNA
gtaatccgcgagaacg

SEQ ID NO: 15402 - DNA, 16 bp, synthetic construct
  misc_feature 1..16: note = synthetic [barcode part1]
  source 1..16: mol_type = other DNA
gtcaactactacggtg

SEQ ID NO: 15403 - DNA, 16 bp, synthetic construct
  misc_feature 1..16: note = synthetic [barcode part1]
  source 1..16: mol_type = other DNA
agtgaggtgcaggttc

SEQ ID NO: 15404 - DNA, 16 bp, synthetic construct
  misc_feature 1..16: note = synthetic [barcode part1]
  source 1..16: mol_type = other DNA
tcacaacgttggtcag

SEQ ID NO: 15405 - DNA, 16 bp, synthetic construct
  misc_feature 1..16: note = synthetic [barcode part1]
  source 1..16: mol_type = other DNA
cggtgcggttagaagt

SEQ ID NO: 15406 - DNA, 16 bp, synthetic construct
  misc_feature 1..16: note = synthetic [barcode part1]
  source 1..16: mol_type = other DNA
tcttgacggcctgtgt

SEQ ID NO: 15407 - DNA, 16 bp, synthetic construct
  misc_feature 1..16: note = synthetic [barcode part1]
  source 1..16: mol_type = other DNA
gtccgttcttgagacc

SEQ ID NO: 15408 - DNA, 16 bp, synthetic construct
  misc_feature 1..16: note = synthetic [barcode part1]
  source 1..16: mol_type = other DNA
tccttctgtactgcac

SEQ ID NO: 15409 - DNA, 16 bp, synthetic construct
  misc_feature 1..16: note = synthetic [barcode part1]
  source 1..16: mol_type = other DNA
gcagagacggttcaac

SEQ ID NO: 15410 - DNA, 16 bp, synthetic construct
  misc_feature 1..16: note = synthetic [barcode part1]
  source 1..16: mol_type = other DNA
gtggtgtagaactcct

SEQ ID NO: 15411 - DNA, 16 bp, synthetic construct
  misc_feature 1..16: note = synthetic [barcode part1]
  source 1..16: mol_type = other DNA
actgcgataagtaggt

SEQ ID NO: 15412 - DNA, 16 bp, synthetic construct
  misc_feature 1..16: note = synthetic [barcode part1]
  source 1..16: mol_type = other DNA
ccaggtacaaggcagt

SEQ ID NO: 15413 - DNA, 16 bp, synthetic construct
  misc_feature 1..16: note = synthetic [barcode part1]
  source 1..16: mol_type = other DNA
tcagacgtaaggtagt

SEQ ID NO: 15414 - DNA, 16 bp, synthetic construct
  misc_feature 1..16: note = synthetic [barcode part1]
  source 1..16: mol_type = other DNA
aacaccgaaggtctct

SEQ ID NO: 15415 - DNA, 16 bp, synthetic construct
  misc_feature 1..16: note = synthetic [barcode part1]
  source 1..16: mol_type = other DNA
cagatcacgtgtctcc

SEQ ID NO: 15416 - DNA, 16 bp, synthetic construct
  misc_feature 1..16: note = synthetic [barcode part1]
  source 1..16: mol_type = other DNA
gtgtgataatcctctc

SEQ ID NO: 15417 - DNA, 16 bp, synthetic construct
  misc_feature 1..16: note = synthetic [barcode part1]
  source 1..16: mol_type = other DNA
tggtgcacgtaagtct

SEQ ID NO: 15418 - DNA, 16 bp, synthetic construct
  misc_feature 1..16: note = synthetic [barcode part1]
  source 1..16: mol_type = other DNA
gtgacacgttgcaact

SEQ ID NO: 15419 - DNA, 16 bp, synthetic construct
  misc_feature 1..16: note = synthetic [barcode part1]
  source 1..16: mol_type = other DNA
gcggtggtattaatag

SEQ ID NO: 15420 - DNA, 16 bp, synthetic construct
  misc_feature 1..16: note = synthetic [barcode part1]
  source 1..16: mol_type = other DNA
cgtagacgaacggtgt

SEQ ID NO: 15421 - DNA, 16 bp, synthetic construct
  misc_feature 1..16: note = synthetic [barcode part1]
  source 1..16: mol_type = other DNA
tccagttgtcggcact

SEQ ID NO: 15422 - DNA, 16 bp, synthetic construct
  misc_feature 1..16: note = synthetic [barcode part1]
  source 1..16: mol_type = other DNA
gagtgtgacacagaag

SEQ ID NO: 15423 - DNA, 16 bp, synthetic construct
  misc_feature 1..16: note = synthetic [barcode part1]
  source 1..16: mol_type = other DNA
gtacacgttcctcctt

SEQ ID NO: 15424 - DNA, 16 bp, synthetic construct
  misc_feature 1..16: note = synthetic [barcode part1]
  source 1..16: mol_type = other DNA
accgagattgagagag

SEQ ID NO: 15425 - DNA, 16 bp, synthetic construct
  misc_feature 1..16: note = synthetic [barcode part1]
  source 1..16: mol_type = other DNA
ttctagtaactacgcc

SEQ ID NO: 15426 - DNA, 16 bp, synthetic construct
  misc_feature 1..16: note = synthetic [barcode part1]
  source 1..16: mol_type = other DNA
gcggtaatcgtgcaag

SEQ ID NO: 15427 - DNA, 16 bp, synthetic construct
  misc_feature 1..16: note = synthetic [barcode part1]
  source 1..16: mol_type = other DNA
tgtgtactggtaccag

SEQ ID NO: 15428 - DNA, 16 bp, synthetic construct
  misc_feature 1..16: note = synthetic [barcode part1]
  source 1..16: mol_type = other DNA
gagtgacacgtgatcg

SEQ ID NO: 15429 - DNA, 16 bp, synthetic construct
  misc_feature 1..16: note = synthetic [barcode part1]
  source 1..16: mol_type = other DNA
acgaactacgcagttc

SEQ ID NO: 15430 - DNA, 16 bp, synthetic construct
  misc_feature 1..16: note = synthetic [barcode part1]
  source 1..16: mol_type = other DNA
acgcaatccgatctcc

SEQ ID NO: 15431 - DNA, 16 bp, synthetic construct
  misc_feature 1..16: note = synthetic [barcode part1]
  source 1..16: mol_type = other DNA
gtgacagataatcacg

SEQ ID NO: 15432 - DNA, 16 bp, synthetic construct
  misc_feature 1..16: note = synthetic [barcode part1]
  source 1..16: mol_type = other DNA
acagtgtcaaccaacc

SEQ ID NO: 15433 - DNA, 16 bp, synthetic construct
  misc_feature 1..16: note = synthetic [barcode part1]
  source 1..16: mol_type = other DNA
gactcagtgtgttctt

SEQ ID NO: 15434 - DNA, 16 bp, synthetic construct
  misc_feature 1..16: note = synthetic [barcode part1]
  source 1..16: mol_type = other DNA
atatctagtcctgtcg

SEQ ID NO: 15435 - DNA, 16 bp, synthetic construct
  misc_feature 1..16: note = synthetic [barcode part1]
  source 1..16: mol_type = other DNA
acagactagtctacgc

SEQ ID NO: 15436 - DNA, 16 bp, synthetic construct
  misc_feature 1..16: note = synthetic [barcode part1]
  source 1..16: mol_type = other DNA
tctcgcagagaatacc

SEQ ID NO: 15437 - DNA, 16 bp, synthetic construct
  misc_feature 1..16: note = synthetic [barcode part1]
  source 1..16: mol_type = other DNA
acttgagacagtgaac

SEQ ID NO: 15438 - DNA, 16 bp, synthetic construct
  misc_feature 1..16: note = synthetic [barcode part1]
  source 1..16: mol_type = other DNA
ataccgaactatctcc

SEQ ID NO: 15439 - DNA, 16 bp, synthetic construct
  misc_feature 1..16: note = synthetic [barcode part1]
  source 1..16: mol_type = other DNA
tgaggcaacaaccacg

SEQ ID NO: 15440 - DNA, 16 bp, synthetic construct
  misc_feature 1..16: note = synthetic [barcode part1]
  source 1..16: mol_type = other DNA
tgatcactctggcctg

SEQ ID NO: 15441 - DNA, 16 bp, synthetic construct
  misc_feature 1..16: note = synthetic [barcode part1]
  source 1..16: mol_type = other DNA
tgatccagtggttcag

SEQ ID NO: 15442 - DNA, 16 bp, synthetic construct
  misc_feature 1..16: note = synthetic [barcode part1]
  source 1..16: mol_type = other DNA
gttctcgaggtcgttc

SEQ ID NO: 15443 - DNA, 16 bp, synthetic construct
  misc_feature 1..16: note = synthetic [barcode part1]
  source 1..16: mol_type = other DNA
agttacgcgattgcac

SEQ ID NO: 15444 - DNA, 16 bp, synthetic construct
  misc_feature 1..16: note = synthetic [barcode part1]
  source 1..16: mol_type = other DNA
tcacggaatcctccgt

SEQ ID NO: 15445 - DNA, 16 bp, synthetic construct
  misc_feature 1..16: note = synthetic [barcode part1]
  source 1..16: mol_type = other DNA
tcagtctcttgcaagt

SEQ ID NO: 15446 - DNA, 16 bp, synthetic construct
  misc_feature 1..16: note = synthetic [barcode part1]
  source 1..16: mol_type = other DNA
gactataacacgccgt

SEQ ID NO: 15447 - DNA, 16 bp, synthetic construct
  misc_feature 1..16: note = synthetic [barcode part1]
  source 1..16: mol_type = other DNA
gaacggacggaatctc

SEQ ID NO: 15448 - DNA, 16 bp, synthetic construct
  misc_feature 1..16: note = synthetic [barcode part1]
  source 1..16: mol_type = other DNA
acacagtgtgttgacc

SEQ ID NO: 15449 - DNA, 16 bp, synthetic construct
  misc_feature 1..16: note = synthetic [barcode part1]
  source 1..16: mol_type = other DNA
caactagtcgagatcc

SEQ ID NO: 15450 - DNA, 16 bp, synthetic construct
  misc_feature 1..16: note = synthetic [barcode part1]
  source 1..16: mol_type = other DNA
gtgtatctccgacctg

SEQ ID NO: 15451 - DNA, 16 bp, synthetic construct
  misc_feature 1..16: note = synthetic [barcode part1]
  source 1..16: mol_type = other DNA
gtactgtctgtggtag

SEQ ID NO: 15452 - DNA, 16 bp, synthetic construct
  misc_feature 1..16: note = synthetic [barcode part1]
  source 1..16: mol_type = other DNA
gagttatccgcgcctt

SEQ ID NO: 15453 - DNA, 16 bp, synthetic construct
  misc_feature 1..16: note = synthetic [barcode part1]
  source 1..16: mol_type = other DNA
aggtatcgcggtgaac

SEQ ID NO: 15454 - DNA, 16 bp, synthetic construct
  misc_feature 1..16: note = synthetic [barcode part1]
  source 1..16: mol_type = other DNA
tgcagttcgcaagttg

SEQ ID NO: 15455 - DNA, 16 bp, synthetic construct
  misc_feature 1..16: note = synthetic [barcode part1]
  source 1..16: mol_type = other DNA
aaggtctcacttgttc

SEQ ID NO: 15456 - DNA, 16 bp, synthetic construct
  misc_feature 1..16: note = synthetic [barcode part1]
  source 1..16: mol_type = other DNA
cactgttagaccaggt

SEQ ID NO: 15457 - DNA, 16 bp, synthetic construct
  misc_feature 1..16: note = synthetic [barcode part1]
  source 1..16: mol_type = other DNA
gaaccttcgactagtg

SEQ ID NO: 15458 - DNA, 16 bp, synthetic construct
  misc_feature 1..16: note = synthetic [barcode part1]
  source 1..16: mol_type = other DNA
accgcagtagacagac

SEQ ID NO: 15459 - DNA, 16 bp, synthetic construct
  misc_feature 1..16: note = synthetic [barcode part1]
  source 1..16: mol_type = other DNA
tccgtggtaagtatcg

SEQ ID NO: 15460 - DNA, 16 bp, synthetic construct
  misc_feature 1..16: note = synthetic [barcode part1]
  source 1..16: mol_type = other DNA
tcgttgttctaggtgt

SEQ ID NO: 15461 - DNA, 16 bp, synthetic construct
  misc_feature 1..16: note = synthetic [barcode part1]
  source 1..16: mol_type = other DNA
tagaggaatcacacgt

SEQ ID NO: 15462 - DNA, 16 bp, synthetic construct
  misc_feature 1..16: note = synthetic [barcode part1]
  source 1..16: mol_type = other DNA
gtaacactacgacacc

SEQ ID NO: 15463 - DNA, 16 bp, synthetic construct
  misc_feature 1..16: note = synthetic [barcode part1]
  source 1..16: mol_type = other DNA
ttataccgcagaggtc

SEQ ID NO: 15464 - DNA, 16 bp, synthetic construct
  misc_feature 1..16: note = synthetic [barcode part1]
  source 1..16: mol_type = other DNA
gataaccggaggtgtc

SEQ ID NO: 15465 - DNA, 16 bp, synthetic construct
  misc_feature 1..16: note = synthetic [barcode part1]
  source 1..16: mol_type = other DNA
tggtggtaacctggtt

SEQ ID NO: 15466 - DNA, 16 bp, synthetic construct
  misc_feature 1..16: note = synthetic [barcode part1]
  source 1..16: mol_type = other DNA
gtaggagttggatcgc

SEQ ID NO: 15467 - DNA, 16 bp, synthetic construct
  misc_feature 1..16: note = synthetic [barcode part1]
  source 1..16: mol_type = other DNA
attaagtctgtgcctc

SEQ ID NO: 15468 - DNA, 16 bp, synthetic construct
  misc_feature 1..16: note = synthetic [barcode part1]
  source 1..16: mol_type = other DNA
acctgtatacaccgag

SEQ ID NO: 15469 - DNA, 16 bp, synthetic construct
  misc_feature 1..16: note = synthetic [barcode part1]
  source 1..16: mol_type = other DNA
gaccttcaactacgcc

SEQ ID NO: 15470 - DNA, 16 bp, synthetic construct
  misc_feature 1..16: note = synthetic [barcode part1]
  source 1..16: mol_type = other DNA
gaggcgagatagagtt

SEQ ID NO: 15471 - DNA, 16 bp, synthetic construct
  misc_feature 1..16: note = synthetic [barcode part1]
  source 1..16: mol_type = other DNA
tacgttcgcgacctgt

SEQ ID NO: 15472 - DNA, 16 bp, synthetic construct
  misc_feature 1..16: note = synthetic [barcode part1]
  source 1..16: mol_type = other DNA
tcaactggaggaagag

SEQ ID NO: 15473 - DNA, 16 bp, synthetic construct
  misc_feature 1..16: note = synthetic [barcode part1]
  source 1..16: mol_type = other DNA
acgcacgttagaactc

SEQ ID NO: 15474 - DNA, 16 bp, synthetic construct
  misc_feature 1..16: note = synthetic [barcode part1]
  source 1..16: mol_type = other DNA
agaagacgagtgtctt

SEQ ID NO: 15475 - DNA, 16 bp, synthetic construct
  misc_feature 1..16: note = synthetic [barcode part1]
  source 1..16: mol_type = other DNA
gaaggtccttcaactg

SEQ ID NO: 15476 - DNA, 16 bp, synthetic construct
  misc_feature 1..16: note = synthetic [barcode part1]
  source 1..16: mol_type = other DNA
ttccgtggttatcaac

SEQ ID NO: 15477 - DNA, 16 bp, synthetic construct
  misc_feature 1..16: note = synthetic [barcode part1]
  source 1..16: mol_type = other DNA
tcgtgaatctgatctc

SEQ ID NO: 15478 - DNA, 16 bp, synthetic construct
  misc_feature 1..16: note = synthetic [barcode part1]
  source 1..16: mol_type = other DNA
tgagttaccttgcact

SEQ ID NO: 15479 - DNA, 16 bp, synthetic construct
  misc_feature 1..16: note = synthetic [barcode part1]
  source 1..16: mol_type = other DNA
atcagattctgcgtct

SEQ ID NO: 15480 - DNA, 16 bp, synthetic construct
  misc_feature 1..16: note = synthetic [barcode part1]
  source 1..16: mol_type = other DNA
tcaactcctgtcacct

SEQ ID NO: 15481 - DNA, 16 bp, synthetic construct
  misc_feature 1..16: note = synthetic [barcode part1]
  source 1..16: mol_type = other DNA
tctagactgttctgtg

SEQ ID NO: 15482 - DNA, 16 bp, synthetic construct
  misc_feature 1..16: note = synthetic [barcode part1]
  source 1..16: mol_type = other DNA
ttggcgactgtgcctt

SEQ ID NO: 15483 - DNA, 16 bp, synthetic construct
  misc_feature 1..16: note = synthetic [barcode part1]
  source 1..16: mol_type = other DNA
ccttgtgtcgaactgc

SEQ ID NO: 15484 - DNA, 16 bp, synthetic construct
  misc_feature 1..16: note = synthetic [barcode part1]
  source 1..16: mol_type = other DNA
aactacgagtcgaggc

SEQ ID NO: 15485 - DNA, 16 bp, synthetic construct
  misc_feature 1..16: note = synthetic [barcode part1]
  source 1..16: mol_type = other DNA
agaaggcgacgtactc

SEQ ID NO: 15486 - DNA, 16 bp, synthetic construct
  misc_feature 1..16: note = synthetic [barcode part1]
  source 1..16: mol_type = other DNA
atctggtaccaggttg

SEQ ID NO: 15487 - DNA, 16 bp, synthetic construct
  misc_feature 1..16: note = synthetic [barcode part1]
  source 1..16: mol_type = other DNA
gtcgaagtagtatacg

SEQ ID NO: 15488 - DNA, 16 bp, synthetic construct
  misc_feature 1..16: note = synthetic [barcode part1]
  source 1..16: mol_type = other DNA
tacaccttcaccaagt

SEQ ID NO: 15489 - DNA, 16 bp, synthetic construct
  misc_feature 1..16: note = synthetic [barcode part1]
  source 1..16: mol_type = other DNA
gacgccgtgtgatatt

SEQ ID NO: 15490 - DNA, 16 bp, synthetic construct
  misc_feature 1..16: note = synthetic [barcode part1]
  source 1..16: mol_type = other DNA
gtgactagaccaggac

SEQ ID NO: 15491 - DNA, 16 bp, synthetic construct
  misc_feature 1..16: note = synthetic [barcode part1]
  source 1..16: mol_type = other DNA
gaacgcagacctagtg

SEQ ID NO: 15492 - DNA, 16 bp, synthetic construct
  misc_feature 1..16: note = synthetic [barcode part1]
  source 1..16: mol_type = other DNA
tagaactcgtggcgtt

SEQ ID NO: 15493 - DNA, 16 bp, synthetic construct
  misc_feature 1..16: note = synthetic [barcode part1]
  source 1..16: mol_type = other DNA
aatagacgcctactcg

SEQ ID NO: 15494 - DNA, 16 bp, synthetic construct
  misc_feature 1..16: note = synthetic [barcode part1]
  source 1..16: mol_type = other DNA
agacagataggcaggt

SEQ ID NO: 15495 - DNA, 16 bp, synthetic construct
  misc_feature 1..16: note = synthetic [barcode part1]
  source 1..16: mol_type = other DNA
aggtataatcgtcgag

SEQ ID NO: 15496 - DNA, 16 bp, synthetic construct
  misc_feature 1..16: note = synthetic [barcode part1]
  source 1..16: mol_type = other DNA
tgaacgcaggataact

SEQ ID NO: 15497 - DNA, 16 bp, synthetic construct
  misc_feature 1..16: note = synthetic [barcode part1]
  source 1..16: mol_type = other DNA
acacactggtgacgag

SEQ ID NO: 15498 - DNA, 16 bp, synthetic construct
  misc_feature 1..16: note = synthetic [barcode part1]
  source 1..16: mol_type = other DNA
gcgatactgatcgact

SEQ ID NO: 15499 - DNA, 16 bp, synthetic construct
  misc_feature 1..16: note = synthetic [barcode part1]
  source 1..16: mol_type = other DNA
actcagaccgtcttgc

SEQ ID NO: 15500 - DNA, 16 bp, synthetic construct
  misc_feature 1..16: note = synthetic [barcode part1]
  source 1..16: mol_type = other DNA
atcttgtcagacttgc

SEQ ID NO: 15501 - DNA, 16 bp, synthetic construct
  misc_feature 1..16: note = synthetic [barcode part1]
  source 1..16: mol_type = other DNA
cctcgtgtgtactctt

SEQ ID NO: 15502 - DNA, 16 bp, synthetic construct
  misc_feature 1..16: note = synthetic [barcode part1]
  source 1..16: mol_type = other DNA
ttgacttccgtcactc

SEQ ID NO: 15503 - DNA, 16 bp, synthetic construct
  misc_feature 1..16: note = synthetic [barcode part1]
  source 1..16: mol_type = other DNA
gtcggtaaggtcaggt

SEQ ID NO: 15504 - DNA, 16 bp, synthetic construct
  misc_feature 1..16: note = synthetic [barcode part1]
  source 1..16: mol_type = other DNA
atagtcagactgaggt

SEQ ID NO: 15505 - DNA, 16 bp, synthetic construct
  misc_feature 1..16: note = synthetic [barcode part1]
  source 1..16: mol_type = other DNA
atcctagagaactccg

SEQ ID NO: 15506 - DNA, 16 bp, synthetic construct
  misc_feature 1..16: note = synthetic [barcode part1]
  source 1..16: mol_type = other DNA
acacgagttgcacttg

SEQ ID NO: 15507 - DNA, 16 bp, synthetic construct
  misc_feature 1..16: note = synthetic [barcode part1]
  source 1..16: mol_type = other DNA
gcaccttaatctaacc

SEQ ID NO: 15508 - DNA, 16 bp, synthetic construct
  misc_feature 1..16: note = synthetic [barcode part1]
  source 1..16: mol_type = other DNA
tccgatcacgttgacc

SEQ ID NO: 15509 - DNA, 16 bp, synthetic construct
  misc_feature 1..16: note = synthetic [barcode part1]
  source 1..16: mol_type = other DNA
gtgcaattcctaatcc

SEQ ID NO: 15510 - DNA, 16 bp, synthetic construct
  misc_feature 1..16: note = synthetic [barcode part1]
  source 1..16: mol_type = other DNA
cctcactagtagagtg

SEQ ID NO: 15511 - DNA, 16 bp, synthetic construct
  misc_feature 1..16: note = synthetic [barcode part1]
  source 1..16: mol_type = other DNA
gacgttgacacgtgtt

SEQ ID NO: 15512 - DNA, 16 bp, synthetic construct
  misc_feature 1..16: note = synthetic [barcode part1]
  source 1..16: mol_type = other DNA
tccggtgttattggag

SEQ ID NO: 15513 - DNA, 16 bp, synthetic construct
  misc_feature 1..16: note = synthetic [barcode part1]
  source 1..16: mol_type = other DNA
tgagatcgtactgtgc

SEQ ID NO: 15514 - DNA, 16 bp, synthetic construct
  misc_feature 1..16: note = synthetic [barcode part1]
  source 1..16: mol_type = other DNA
tgcgtcgttagtctcg

SEQ ID NO: 15515 - DNA, 16 bp, synthetic construct
  misc_feature 1..16: note = synthetic [barcode part1]
  source 1..16: mol_type = other DNA
cgtaatcactactctg

SEQ ID NO: 15516 - DNA, 16 bp, synthetic construct
  misc_feature 1..16: note = synthetic [barcode part1]
  source 1..16: mol_type = other DNA
attctgttcacgcaac

SEQ ID NO: 15517 - DNA, 16 bp, synthetic construct
  misc_feature 1..16: note = synthetic [barcode part1]
  source 1..16: mol_type = other DNA
tggacgtatcggaggt

SEQ ID NO: 15518 - DNA, 16 bp, synthetic construct
  misc_feature 1..16: note = synthetic [barcode part1]
  source 1..16: mol_type = other DNA
tcgtcggttaggttag

SEQ ID NO: 15519 - DNA, 16 bp, synthetic construct
  misc_feature 1..16: note = synthetic [barcode part1]
  source 1..16: mol_type = other DNA
ttagtcttgtcagtgc

SEQ ID NO: 15520 - DNA, 16 bp, synthetic construct
  misc_feature 1..16: note = synthetic [barcode part1]
  source 1..16: mol_type = other DNA
tgcctcttcggatcag

SEQ ID NO: 15521 - DNA, 16 bp, synthetic construct
  misc_feature 1..16: note = synthetic [barcode part1]
  source 1..16: mol_type = other DNA
gtgtcttctaggccgt

SEQ ID NO: 15522 - DNA, 16 bp, synthetic construct
  misc_feature 1..16: note = synthetic [barcode part1]
  source 1..16: mol_type = other DNA
ccttgataaggcggtt

SEQ ID NO: 15523 - DNA, 16 bp, synthetic construct
  misc_feature 1..16: note = synthetic [barcode part1]
  source 1..16: mol_type = other DNA
taggttcggcagaacg

SEQ ID NO: 15524 - DNA, 16 bp, synthetic construct
  misc_feature 1..16: note = synthetic [barcode part1]
  source 1..16: mol_type = other DNA
attaggtctcgcgcct

SEQ ID NO: 15525 - DNA, 16 bp, synthetic construct
  misc_feature 1..16: note = synthetic [barcode part1]
  source 1..16: mol_type = other DNA
tcgagttcttctgtag

SEQ ID NO: 15526 - DNA, 16 bp, synthetic construct
  misc_feature 1..16: note = synthetic [barcode part1]
  source 1..16: mol_type = other DNA
ccgattacaactggtg

SEQ ID NO: 15527 - DNA, 16 bp, synthetic construct
  misc_feature 1..16: note = synthetic [barcode part1]
  source 1..16: mol_type = other DNA
cctctgataattacgc

SEQ ID NO: 15528 - DNA, 16 bp, synthetic construct
  misc_feature 1..16: note = synthetic [barcode part1]
  source 1..16: mol_type = other DNA
ccgactcctcaattct

SEQ ID NO: 15529 - DNA, 16 bp, synthetic construct
  misc_feature 1..16: note = synthetic [barcode part1]
  source 1..16: mol_type = other DNA
tcgattcgagtgttct

SEQ ID NO: 15530 - DNA, 16 bp, synthetic construct
  misc_feature 1..16: note = synthetic [barcode part1]
  source 1..16: mol_type = other DNA
gatcagtcgatactgc

SEQ ID NO: 15531 - DNA, 16 bp, synthetic construct
  misc_feature 1..16: note = synthetic [barcode part1]
  source 1..16: mol_type = other DNA
ttcttacagactaccg

SEQ ID NO: 15532 - DNA, 16 bp, synthetic construct
  misc_feature 1..16: note = synthetic [barcode part1]
  source 1..16: mol_type = other DNA
cgttcacaacaccacc

SEQ ID NO: 15533 - DNA, 16 bp, synthetic construct
  misc_feature 1..16: note = synthetic [barcode part1]
  source 1..16: mol_type = other DNA
acgaattgtacggcct

SEQ ID NO: 15534 - DNA, 16 bp, synthetic construct
  misc_feature 1..16: note = synthetic [barcode part1]
  source 1..16: mol_type = other DNA
ttactcgacgaacggt

SEQ ID NO: 15535 - DNA, 16 bp, synthetic construct
  misc_feature 1..16: note = synthetic [barcode part1]
  source 1..16: mol_type = other DNA
atagtcctcgcactcg

SEQ ID NO: 15536 - DNA, 16 bp, synthetic construct
  misc_feature 1..16: note = synthetic [barcode part1]
  source 1..16: mol_type = other DNA
tacagtggaacggacc

SEQ ID NO: 15537 - DNA, 16 bp, synthetic construct
  misc_feature 1..16: note = synthetic [barcode part1]
  source 1..16: mol_type = other DNA
tgcggtgttcgttcac

SEQ ID NO: 15538 - DNA, 16 bp, synthetic construct
  misc_feature 1..16: note = synthetic [barcode part1]
  source 1..16: mol_type = other DNA
tgatctcttccggtct

SEQ ID NO: 15539 - DNA, 16 bp, synthetic construct
  misc_feature 1..16: note = synthetic [barcode part1]
  source 1..16: mol_type = other DNA
cgaacttgcctcactg

SEQ ID NO: 15540 - DNA, 16 bp, synthetic construct
  misc_feature 1..16: note = synthetic [barcode part1]
  source 1..16: mol_type = other DNA
acggagatcggcaatc

SEQ ID NO: 15541 - DNA, 16 bp, synthetic construct
  misc_feature 1..16: note = synthetic [barcode part1]
  source 1..16: mol_type = other DNA
atactaaggaacgacc

SEQ ID NO: 15542 - DNA, 16 bp, synthetic construct
  misc_feature 1..16: note = synthetic [barcode part1]
  source 1..16: mol_type = other DNA
tgaggttcagtcgatc

SEQ ID NO: 15543 - DNA, 16 bp, synthetic construct
  misc_feature 1..16: note = synthetic [barcode part1]
  source 1..16: mol_type = other DNA
tcctgtctgaagtgag

SEQ ID NO: 15544 - DNA, 16 bp, synthetic construct
  misc_feature 1..16: note = synthetic [barcode part1]
  source 1..16: mol_type = other DNA
gtctaagaagtccgtc

SEQ ID NO: 15545 - DNA, 16 bp, synthetic construct
  misc_feature 1..16: note = synthetic [barcode part1]
  source 1..16: mol_type = other DNA
agtagagtgtaccagt

SEQ ID NO: 15546 - DNA, 16 bp, synthetic construct
  misc_feature 1..16: note = synthetic [barcode part1]
  source 1..16: mol_type = other DNA
aaccggaactcttcag

SEQ ID NO: 15547 - DNA, 16 bp, synthetic construct
  misc_feature 1..16: note = synthetic [barcode part1]
  source 1..16: mol_type = other DNA
tgtgtcttaccgagtt

SEQ ID NO: 15548 - DNA, 16 bp, synthetic construct
  misc_feature 1..16: note = synthetic [barcode part1]
  source 1..16: mol_type = other DNA
gcctatagtacggttg

SEQ ID NO: 15549 - DNA, 16 bp, synthetic construct
  misc_feature 1..16: note = synthetic [barcode part1]
  source 1..16: mol_type = other DNA
tacgagtgaacggtgc

SEQ ID NO: 15550 - DNA, 16 bp, synthetic construct
  misc_feature 1..16: note = synthetic [barcode part1]
  source 1..16: mol_type = other DNA
acacgacagagaatct

SEQ ID NO: 15551 - DNA, 16 bp, synthetic construct
  misc_feature 1..16: note = synthetic [barcode part1]
  source 1..16: mol_type = other DNA
gtcctaatccttctcg

SEQ ID NO: 15552 - DNA, 16 bp, synthetic construct
  misc_feature 1..16: note = synthetic [barcode part1]
  source 1..16: mol_type = other DNA
agaggcgaatagttct

SEQ ID NO: 15553 - DNA, 16 bp, synthetic construct
  misc_feature 1..16: note = synthetic [barcode part1]
  source 1..16: mol_type = other DNA
cgtatcctcaccgaac

SEQ ID NO: 15554 - DNA, 16 bp, synthetic construct
  misc_feature 1..16: note = synthetic [barcode part1]
  source 1..16: mol_type = other DNA
ttgttcttcagacacg

SEQ ID NO: 15555 - DNA, 16 bp, synthetic construct
  misc_feature 1..16: note = synthetic [barcode part1]
  source 1..16: mol_type = other DNA
gaatccagacgataac

SEQ ID NO: 15556 - DNA, 16 bp, synthetic construct
  misc_feature 1..16: note = synthetic [barcode part1]
  source 1..16: mol_type = other DNA
ttaaggtggcgtcgtt

SEQ ID NO: 15557 - DNA, 16 bp, synthetic construct
  misc_feature 1..16: note = synthetic [barcode part1]
  source 1..16: mol_type = other DNA
cagtacgtcttactgt

SEQ ID NO: 15558 - DNA, 16 bp, synthetic construct
  misc_feature 1..16: note = synthetic [barcode part1]
  source 1..16: mol_type = other DNA
agtacgtacaccagtc

SEQ ID NO: 15559 - DNA, 16 bp, synthetic construct
  misc_feature 1..16: note = synthetic [barcode part1]
  source 1..16: mol_type = other DNA
atcaagaggaggactg

SEQ ID NO: 15560 - DNA, 16 bp, synthetic construct
  misc_feature 1..16: note = synthetic [barcode part1]
  source 1..16: mol_type = other DNA
tcgtccttaactctcg

SEQ ID NO: 15561 - DNA, 16 bp, synthetic construct
  misc_feature 1..16: note = synthetic [barcode part1]
  source 1..16: mol_type = other DNA
cgaactacgacttgac

SEQ ID NO: 15562 - DNA, 16 bp, synthetic construct
  misc_feature 1..16: note = synthetic [barcode part1]
  source 1..16: mol_type = other DNA
ccggtcttccaatctt

SEQ ID NO: 15563 - DNA, 16 bp, synthetic construct
  misc_feature 1..16: note = synthetic [barcode part1]
  source 1..16: mol_type = other DNA
cagtgcaagaacaact

SEQ ID NO: 15564 - DNA, 16 bp, synthetic construct
  misc_feature 1..16: note = synthetic [barcode part1]
  source 1..16: mol_type = other DNA
atcacggtcacctatt

SEQ ID NO: 15565 - DNA, 16 bp, synthetic construct
  misc_feature 1..16: note = synthetic [barcode part1]
  source 1..16: mol_type = other DNA
cgttgtccttgacttc

SEQ ID NO: 15566 - DNA, 16 bp, synthetic construct
  misc_feature 1..16: note = synthetic [barcode part1]
  source 1..16: mol_type = other DNA
gccaatagtagaacac

SEQ ID NO: 15567 - DNA, 16 bp, synthetic construct
  misc_feature 1..16: note = synthetic [barcode part1]
  source 1..16: mol_type = other DNA
atctcgagtacgtgtg

SEQ ID NO: 15568 - DNA, 16 bp, synthetic construct
  misc_feature 1..16: note = synthetic [barcode part1]
  source 1..16: mol_type = other DNA
aaggcctagactctgt

SEQ ID NO: 15569 - DNA, 16 bp, synthetic construct
  misc_feature 1..16: note = synthetic [barcode part1]
  source 1..16: mol_type = other DNA
taaccgagagacttcc

SEQ ID NO: 15570 - DNA, 16 bp, synthetic construct
  misc_feature 1..16: note = synthetic [barcode part1]
  source 1..16: mol_type = other DNA
acacggccagtatatc

SEQ ID NO: 15571 - DNA, 16 bp, synthetic construct
  misc_feature 1..16: note = synthetic [barcode part1]
  source 1..16: mol_type = other DNA
cgtaacgtatcgtggt

SEQ ID NO: 15572 - DNA, 16 bp, synthetic construct
  misc_feature 1..16: note = synthetic [barcode part1]
  source 1..16: mol_type = other DNA
tgttgacgaggtcgag

SEQ ID NO: 15573 - DNA, 16 bp, synthetic construct
  misc_feature 1..16: note = synthetic [barcode part1]
  source 1..16: mol_type = other DNA
gcagtagtctaatccg

SEQ ID NO: 15574 - DNA, 16 bp, synthetic construct
  misc_feature 1..16: note = synthetic [barcode part1]
  source 1..16: mol_type = other DNA
aagattgaactgcacg

SEQ ID NO: 15575 - DNA, 16 bp, synthetic construct
  misc_feature 1..16: note = synthetic [barcode part1]
  source 1..16: mol_type = other DNA
cctgttacgtgaatct

SEQ ID NO: 15576 - DNA, 16 bp, synthetic construct
  misc_feature 1..16: note = synthetic [barcode part1]
  source 1..16: mol_type = other DNA
acggttagagaggtcc

SEQ ID NO: 15577 - DNA, 16 bp, synthetic construct
  misc_feature 1..16: note = synthetic [barcode part1]
  source 1..16: mol_type = other DNA
acgtcggattgtctcc

SEQ ID NO: 15578 - DNA, 16 bp, synthetic construct
  misc_feature 1..16: note = synthetic [barcode part1]
  source 1..16: mol_type = other DNA
agtgactctccacacc

SEQ ID NO: 15579 - DNA, 16 bp, synthetic construct
  misc_feature 1..16: note = synthetic [barcode part1]
  source 1..16: mol_type = other DNA
acagatctcgagtgtc

SEQ ID NO: 15580 - DNA, 16 bp, synthetic construct
  misc_feature 1..16: note = synthetic [barcode part1]
  source 1..16: mol_type = other DNA
agtaagacagtgaggc

SEQ ID NO: 15581 - DNA, 16 bp, synthetic construct
  misc_feature 1..16: note = synthetic [barcode part1]
  source 1..16: mol_type = other DNA
ataccttgattgccac

SEQ ID NO: 15582 - DNA, 16 bp, synthetic construct
  misc_feature 1..16: note = synthetic [barcode part1]
  source 1..16: mol_type = other DNA
cgttccttgtaggaag

SEQ ID NO: 15583 - DNA, 16 bp, synthetic construct
  misc_feature 1..16: note = synthetic [barcode part1]
  source 1..16: mol_type = other DNA
acgtgtaaggatctcc

SEQ ID NO: 15584 - DNA, 16 bp, synthetic construct
  misc_feature 1..16: note = synthetic [barcode part1]
  source 1..16: mol_type = other DNA
attccttccgattccg

SEQ ID NO: 15585 - DNA, 16 bp, synthetic construct
  misc_feature 1..16: note = synthetic [barcode part1]
  source 1..16: mol_type = other DNA
agttgcgagagttagt

SEQ ID NO: 15586 - DNA, 16 bp, synthetic construct
  misc_feature 1..16: note = synthetic [barcode part1]
  source 1..16: mol_type = other DNA
gtgtggtcgattacgt

SEQ ID NO: 15587 - DNA, 16 bp, synthetic construct
  misc_feature 1..16: note = synthetic [barcode part1]
  source 1..16: mol_type = other DNA
cctctcaggtgtgttg

SEQ ID NO: 15588 - DNA, 16 bp, synthetic construct
  misc_feature 1..16: note = synthetic [barcode part1]
  source 1..16: mol_type = other DNA
acactactctggaacg

SEQ ID NO: 15589 - DNA, 16 bp, synthetic construct
  misc_feature 1..16: note = synthetic [barcode part1]
  source 1..16: mol_type = other DNA
tggttctcgatacgtt

SEQ ID NO: 15590 - DNA, 16 bp, synthetic construct
  misc_feature 1..16: note = synthetic [barcode part1]
  source 1..16: mol_type = other DNA
cgcggcaatagacagt

SEQ ID NO: 15591 - DNA, 16 bp, synthetic construct
  misc_feature 1..16: note = synthetic [barcode part1]
  source 1..16: mol_type = other DNA
gccacttccacgaatc

SEQ ID NO: 15592 - DNA, 16 bp, synthetic construct
  misc_feature 1..16: note = synthetic [barcode part1]
  source 1..16: mol_type = other DNA
atctctgtgtcctcgt

SEQ ID NO: 15593 - DNA, 16 bp, synthetic construct
  misc_feature 1..16: note = synthetic [barcode part1]
  source 1..16: mol_type = other DNA
gttgacaagacgttcc

SEQ ID NO: 15594 - DNA, 16 bp, synthetic construct
  misc_feature 1..16: note = synthetic [barcode part1]
  source 1..16: mol_type = other DNA
tagtaccgcaggtgag

SEQ ID NO: 15595 - DNA, 16 bp, synthetic construct
  misc_feature 1..16: note = synthetic [barcode part1]
  source 1..16: mol_type = other DNA
gccagactgagagtac

SEQ ID NO: 15596 - DNA, 16 bp, synthetic construct
  misc_feature 1..16: note = synthetic [barcode part1]
  source 1..16: mol_type = other DNA
cggcaacgtacaagac

SEQ ID NO: 15597 - DNA, 16 bp, synthetic construct
  misc_feature 1..16: note = synthetic [barcode part1]
  source 1..16: mol_type = other DNA
ttccttccgacactac

SEQ ID NO: 15598 - DNA, 16 bp, synthetic construct
  misc_feature 1..16: note = synthetic [barcode part1]
  source 1..16: mol_type = other DNA
gagtacgcaacggttg

SEQ ID NO: 15599 - DNA, 16 bp, synthetic construct
  misc_feature 1..16: note = synthetic [barcode part1]
  source 1..16: mol_type = other DNA
tcgtaggtacttcact

SEQ ID NO: 15600 - DNA, 16 bp, synthetic construct
  misc_feature 1..16: note = synthetic [barcode part1]
  source 1..16: mol_type = other DNA
tcctctggtaattgtg

SEQ ID NO: 15601 - DNA, 16 bp, synthetic construct
  misc_feature 1..16: note = synthetic [barcode part1]
  source 1..16: mol_type = other DNA
aataggtcgtcacaag

SEQ ID NO: 15602 - DNA, 16 bp, synthetic construct
  misc_feature 1..16: note = synthetic [barcode part1]
  source 1..16: mol_type = other DNA
caggccaagttgttac

SEQ ID NO: 15603 - DNA, 16 bp, synthetic construct
  misc_feature 1..16: note = synthetic [barcode part1]
  source 1..16: mol_type = other DNA
acgatcgcagtgtgtt

SEQ ID NO: 15604 - DNA, 16 bp, synthetic construct
  misc_feature 1..16: note = synthetic [barcode part1]
  source 1..16: mol_type = other DNA
actacgaggtagacgc

SEQ ID NO: 15605 - DNA, 16 bp, synthetic construct
  misc_feature 1..16: note = synthetic [barcode part1]
  source 1..16: mol_type = other DNA
atatcaagaaggtcgc

SEQ ID NO: 15606 - DNA, 16 bp, synthetic construct
  misc_feature 1..16: note = synthetic [barcode part1]
  source 1..16: mol_type = other DNA
tgaagaacgcgtaatc

SEQ ID NO: 15607 - DNA, 16 bp, synthetic construct
  misc_feature 1..16: note = synthetic [barcode part1]
  source 1..16: mol_type = other DNA
gtgcctgcagaacaag

SEQ ID NO: 15608 - DNA, 16 bp, synthetic construct
  misc_feature 1..16: note = synthetic [barcode part1]
  source 1..16: mol_type = other DNA
tacgtagatcttccac

SEQ ID NO: 15609 - DNA, 16 bp, synthetic construct
  misc_feature 1..16: note = synthetic [barcode part1]
  source 1..16: mol_type = other DNA
tcagttgactgcaacg

SEQ ID NO: 15610 - DNA, 16 bp, synthetic construct
  misc_feature 1..16: note = synthetic [barcode part1]
  source 1..16: mol_type = other DNA
agacgttcactgcctc

SEQ ID NO: 15611 - DNA, 16 bp, synthetic construct
  misc_feature 1..16: note = synthetic [barcode part1]
  source 1..16: mol_type = other DNA
gacacgatatcaagtg

SEQ ID NO: 15612 - DNA, 16 bp, synthetic construct
  misc_feature 1..16: note = synthetic [barcode part1]
  source 1..16: mol_type = other DNA
atagtcgtgcggttac

SEQ ID NO: 15613 - DNA, 16 bp, synthetic construct
  misc_feature 1..16: note = synthetic [barcode part1]
  source 1..16: mol_type = other DNA
gcaagttgttaaggac

SEQ ID NO: 15614 - DNA, 16 bp, synthetic construct
  misc_feature 1..16: note = synthetic [barcode part1]
  source 1..16: mol_type = other DNA
gacacgactatcggag

SEQ ID NO: 15615 - DNA, 16 bp, synthetic construct
  misc_feature 1..16: note = synthetic [barcode part1]
  source 1..16: mol_type = other DNA
gcgcaattacacggtt

SEQ ID NO: 15616 - DNA, 16 bp, synthetic construct
  misc_feature 1..16: note = synthetic [barcode part1]
  source 1..16: mol_type = other DNA
gcaatactagtcgacc

SEQ ID NO: 15617 - DNA, 16 bp, synthetic construct
  misc_feature 1..16: note = synthetic [barcode part1]
  source 1..16: mol_type = other DNA
tggttgaaggatctcc

SEQ ID NO: 15618 - DNA, 16 bp, synthetic construct
  misc_feature 1..16: note = synthetic [barcode part1]
  source 1..16: mol_type = other DNA
caacggacggatactg

SEQ ID NO: 15619 - DNA, 16 bp, synthetic construct
  misc_feature 1..16: note = synthetic [barcode part1]
  source 1..16: mol_type = other DNA
tgtgcaagaactagac

SEQ ID NO: 15620 - DNA, 16 bp, synthetic construct
  misc_feature 1..16: note = synthetic [barcode part1]
  source 1..16: mol_type = other DNA
gaagttcacggataac

SEQ ID NO: 15621 - DNA, 16 bp, synthetic construct
  misc_feature 1..16: note = synthetic [barcode part1]
  source 1..16: mol_type = other DNA
cacttgttgccgtggt

SEQ ID NO: 15622 - DNA, 16 bp, synthetic construct
  misc_feature 1..16: note = synthetic [barcode part1]
  source 1..16: mol_type = other DNA
tgacgaggtctataag

SEQ ID NO: 15623 - DNA, 16 bp, synthetic construct
  misc_feature 1..16: note = synthetic [barcode part1]
  source 1..16: mol_type = other DNA
aggagacgtagtcacc

SEQ ID NO: 15624 - DNA, 16 bp, synthetic construct
  misc_feature 1..16: note = synthetic [barcode part1]
  source 1..16: mol_type = other DNA
gtagagatagtccagt

SEQ ID NO: 15625 - DNA, 16 bp, synthetic construct
  misc_feature 1..16: note = synthetic [barcode part1]
  source 1..16: mol_type = other DNA
gagtcgtgatagtcct

SEQ ID NO: 15626 - DNA, 16 bp, synthetic construct
  misc_feature 1..16: note = synthetic [barcode part1]
  source 1..16: mol_type = other DNA
tacttcagtagacctc

SEQ ID NO: 15627 - DNA, 16 bp, synthetic construct
  misc_feature 1..16: note = synthetic [barcode part1]
  source 1..16: mol_type = other DNA
atctcgcgagtactcc

SEQ ID NO: 15628 - DNA, 16 bp, synthetic construct
  misc_feature 1..16: note = synthetic [barcode part1]
  source 1..16: mol_type = other DNA
acaaccgtcggaaggt

SEQ ID NO: 15629 - DNA, 16 bp, synthetic construct
  misc_feature 1..16: note = synthetic [barcode part1]
  source 1..16: mol_type = other DNA
agtgatattgcgaacg

SEQ ID NO: 15630 - DNA, 16 bp, synthetic construct
  misc_feature 1..16: note = synthetic [barcode part1]
  source 1..16: mol_type = other DNA
gcacgaacagactacg

SEQ ID NO: 15631 - DNA, 16 bp, synthetic construct
  misc_feature 1..16: note = synthetic [barcode part1]
  source 1..16: mol_type = other DNA
ttcgcgcgttgttggt

SEQ ID NO: 15632 - DNA, 16 bp, synthetic construct
  misc_feature 1..16: note = synthetic [barcode part1]
  source 1..16: mol_type = other DNA
agagaattcgtacgac

SEQ ID NO: 15633 - DNA, 16 bp, synthetic construct
  misc_feature 1..16: note = synthetic [barcode part1]
  source 1..16: mol_type = other DNA
cactgaagtaaggatc

SEQ ID NO: 15634 - DNA, 16 bp, synthetic construct
  misc_feature 1..16: note = synthetic [barcode part1]
  source 1..16: mol_type = other DNA
gttacctctcaagtgt

SEQ ID NO: 15635 - DNA, 16 bp, synthetic construct
  misc_feature 1..16: note = synthetic [barcode part1]
  source 1..16: mol_type = other DNA
tacaggcaacaggatt

SEQ ID NO: 15636 - DNA, 16 bp, synthetic construct
  misc_feature 1..16: note = synthetic [barcode part1]
  source 1..16: mol_type = other DNA
tgaacctgttcacgag

SEQ ID NO: 15637 - DNA, 16 bp, synthetic construct
  misc_feature 1..16: note = synthetic [barcode part1]
  source 1..16: mol_type = other DNA
gaattccaaggccttg

SEQ ID NO: 15638 - DNA, 16 bp, synthetic construct
  misc_feature 1..16: note = synthetic [barcode part1]
  source 1..16: mol_type = other DNA
cagattctgttacctg

SEQ ID NO: 15639 - DNA, 16 bp, synthetic construct
  misc_feature 1..16: note = synthetic [barcode part1]
  source 1..16: mol_type = other DNA
tccagtcgtacaccac

SEQ ID NO: 15640 - DNA, 16 bp, synthetic construct
  misc_feature 1..16: note = synthetic [barcode part1]
  source 1..16: mol_type = other DNA
tcgattccttacgagt

SEQ ID NO: 15641 - DNA, 16 bp, synthetic construct
  misc_feature 1..16: note = synthetic [barcode part1]
  source 1..16: mol_type = other DNA
atcactctgaacgtct

SEQ ID NO: 15642 - DNA, 16 bp, synthetic construct
  misc_feature 1..16: note = synthetic [barcode part1]
  source 1..16: mol_type = other DNA
gagtacttggaacggc

SEQ ID NO: 15643 - DNA, 16 bp, synthetic construct
  misc_feature 1..16: note = synthetic [barcode part1]
  source 1..16: mol_type = other DNA
agtaagtctgtccgtg

SEQ ID NO: 15644 - DNA, 16 bp, synthetic construct
  misc_feature 1..16: note = synthetic [barcode part1]
  source 1..16: mol_type = other DNA
agagtatcgcagagag

SEQ ID NO: 15645 - DNA, 16 bp, synthetic construct
  misc_feature 1..16: note = synthetic [barcode part1]
  source 1..16: mol_type = other DNA
tccgttcttgcaatag

SEQ ID NO: 15646 - DNA, 16 bp, synthetic construct
  misc_feature 1..16: note = synthetic [barcode part1]
  source 1..16: mol_type = other DNA
agtaacagttccaccg

SEQ ID NO: 15647 - DNA, 16 bp, synthetic construct
  misc_feature 1..16: note = synthetic [barcode part1]
  source 1..16: mol_type = other DNA
cacgttcacaactcgc

SEQ ID NO: 15648 - DNA, 16 bp, synthetic construct
  misc_feature 1..16: note = synthetic [barcode part1]
  source 1..16: mol_type = other DNA
tcgtgcgtgattgtag

SEQ ID NO: 15649 - DNA, 16 bp, synthetic construct
  misc_feature 1..16: note = synthetic [barcode part1]
  source 1..16: mol_type = other DNA
tctgttagaccgtatc

SEQ ID NO: 15650 - DNA, 16 bp, synthetic construct
  misc_feature 1..16: note = synthetic [barcode part1]
  source 1..16: mol_type = other DNA
agtgaagtcctcgact

SEQ ID NO: 15651 - DNA, 16 bp, synthetic construct
  misc_feature 1..16: note = synthetic [barcode part1]
  source 1..16: mol_type = other DNA
cactgtcgatatactc

SEQ ID NO: 15652 - DNA, 16 bp, synthetic construct
  misc_feature 1..16: note = synthetic [barcode part1]
  source 1..16: mol_type = other DNA
cggactctcactctag

SEQ ID NO: 15653 - DNA, 16 bp, synthetic construct
  misc_feature 1..16: note = synthetic [barcode part1]
  source 1..16: mol_type = other DNA
caacaacgccgttaac

SEQ ID NO: 15654 - DNA, 16 bp, synthetic construct
  misc_feature 1..16: note = synthetic [barcode part1]
  source 1..16: mol_type = other DNA
cacgaatcactattcc

SEQ ID NO: 15655 - DNA, 16 bp, synthetic construct
  misc_feature 1..16: note = synthetic [barcode part1]
  source 1..16: mol_type = other DNA
ttcggcgatcttcacg

SEQ ID NO: 15656 - DNA, 16 bp, synthetic construct
  misc_feature 1..16: note = synthetic [barcode part1]
  source 1..16: mol_type = other DNA
tcaggagagtcgtgtg

SEQ ID NO: 15657 - DNA, 16 bp, synthetic construct
  misc_feature 1..16: note = synthetic [barcode part1]
  source 1..16: mol_type = other DNA
accgcactgtattgag

SEQ ID NO: 15658 - DNA, 16 bp, synthetic construct
  misc_feature 1..16: note = synthetic [barcode part1]
  source 1..16: mol_type = other DNA
agaggcagtaattcac

SEQ ID NO: 15659 - DNA, 16 bp, synthetic construct
  misc_feature 1..16: note = synthetic [barcode part1]
  source 1..16: mol_type = other DNA
tcttggcgaccgtatc

SEQ ID NO: 15660 - DNA, 16 bp, synthetic construct
  misc_feature 1..16: note = synthetic [barcode part1]
  source 1..16: mol_type = other DNA
gagattcttgtctgtc

SEQ ID NO: 15661 - DNA, 16 bp, synthetic construct
  misc_feature 1..16: note = synthetic [barcode part1]
  source 1..16: mol_type = other DNA
tattgaggtcctcact

SEQ ID NO: 15662 - DNA, 16 bp, synthetic construct
  misc_feature 1..16: note = synthetic [barcode part1]
  source 1..16: mol_type = other DNA
acagttgtgtggtcac

SEQ ID NO: 15663 - DNA, 16 bp, synthetic construct
  misc_feature 1..16: note = synthetic [barcode part1]
  source 1..16: mol_type = other DNA
cgagatctgcagtact

SEQ ID NO: 15664 - DNA, 16 bp, synthetic construct
  misc_feature 1..16: note = synthetic [barcode part1]
  source 1..16: mol_type = other DNA
caaccggtggtattac

SEQ ID NO: 15665 - DNA, 16 bp, synthetic construct
  misc_feature 1..16: note = synthetic [barcode part1]
  source 1..16: mol_type = other DNA
atccgatcctcgtacg

SEQ ID NO: 15666 - DNA, 16 bp, synthetic construct
  misc_feature 1..16: note = synthetic [barcode part1]
  source 1..16: mol_type = other DNA
gtccggtagagtacag

SEQ ID NO: 15667 - DNA, 16 bp, synthetic construct
  misc_feature 1..16: note = synthetic [barcode part1]
  source 1..16: mol_type = other DNA
gagaacgcaagaacac

SEQ ID NO: 15668 - DNA, 16 bp, synthetic construct
  misc_feature 1..16: note = synthetic [barcode part1]
  source 1..16: mol_type = other DNA
gcgactattagtctct

SEQ ID NO: 15669 - DNA, 16 bp, synthetic construct
  misc_feature 1..16: note = synthetic [barcode part1]
  source 1..16: mol_type = other DNA
gtcggactaagttacc

SEQ ID NO: 15670 - DNA, 16 bp, synthetic construct
  misc_feature 1..16: note = synthetic [barcode part1]
  source 1..16: mol_type = other DNA
aagttgaccaggagag

SEQ ID NO: 15671 - DNA, 16 bp, synthetic construct
  misc_feature 1..16: note = synthetic [barcode part1]
  source 1..16: mol_type = other DNA
agtcgcgtgcaattac

SEQ ID NO: 15672 - DNA, 16 bp, synthetic construct
  misc_feature 1..16: note = synthetic [barcode part1]
  source 1..16: mol_type = other DNA
gcgttaggtgcaactt

SEQ ID NO: 15673 - DNA, 16 bp, synthetic construct
  misc_feature 1..16: note = synthetic [barcode part1]
  source 1..16: mol_type = other DNA
tatcgtcgagtacctt

SEQ ID NO: 15674 - DNA, 16 bp, synthetic construct
  misc_feature 1..16: note = synthetic [barcode part1]
  source 1..16: mol_type = other DNA
tgcggattgccgttct

SEQ ID NO: 15675 - DNA, 16 bp, synthetic construct
  misc_feature 1..16: note = synthetic [barcode part1]
  source 1..16: mol_type = other DNA
cgtgcaattcacgagt

SEQ ID NO: 15676 - DNA, 16 bp, synthetic construct
  misc_feature 1..16: note = synthetic [barcode part1]
  source 1..16: mol_type = other DNA
aaccggagatacaccg

SEQ ID NO: 15677 - DNA, 16 bp, synthetic construct
  misc_feature 1..16: note = synthetic [barcode part1]
  source 1..16: mol_type = other DNA
aaccttcacgcaatct

SEQ ID NO: 15678 - DNA, 16 bp, synthetic construct
  misc_feature 1..16: note = synthetic [barcode part1]
  source 1..16: mol_type = other DNA
tacgacagtagacggc

SEQ ID NO: 15679 - DNA, 16 bp, synthetic construct
  misc_feature 1..16: note = synthetic [barcode part1]
  source 1..16: mol_type = other DNA
tgaacgtcctcactgc

SEQ ID NO: 15680 - DNA, 16 bp, synthetic construct
  misc_feature 1..16: note = synthetic [barcode part1]
  source 1..16: mol_type = other DNA
gttgcggaacgagtac

SEQ ID NO: 15681 - DNA, 16 bp, synthetic construct
  misc_feature 1..16: note = synthetic [barcode part1]
  source 1..16: mol_type = other DNA
cagagacaacgatccg

SEQ ID NO: 15682 - DNA, 16 bp, synthetic construct
  misc_feature 1..16: note = synthetic [barcode part1]
  source 1..16: mol_type = other DNA
gactgtgagaatcagt

SEQ ID NO: 15683 - DNA, 16 bp, synthetic construct
  misc_feature 1..16: note = synthetic [barcode part1]
  source 1..16: mol_type = other DNA
gttggccttaagatcg

SEQ ID NO: 15684 - DNA, 16 bp, synthetic construct
  misc_feature 1..16: note = synthetic [barcode part1]
  source 1..16: mol_type = other DNA
tacggtggtggacagt

SEQ ID NO: 15685 - DNA, 16 bp, synthetic construct
  misc_feature 1..16: note = synthetic [barcode part1]
  source 1..16: mol_type = other DNA
tatacaatcacgcggc

SEQ ID NO: 15686 - DNA, 16 bp, synthetic construct
  misc_feature 1..16: note = synthetic [barcode part1]
  source 1..16: mol_type = other DNA
tgacgagaccttatcg

SEQ ID NO: 15687 - DNA, 16 bp, synthetic construct
  misc_feature 1..16: note = synthetic [barcode part1]
  source 1..16: mol_type = other DNA
taggaggacgtaccac

SEQ ID NO: 15688 - DNA, 16 bp, synthetic construct
  misc_feature 1..16: note = synthetic [barcode part1]
  source 1..16: mol_type = other DNA
taaggcgatctaagtg

SEQ ID NO: 15689 - DNA, 16 bp, synthetic construct
  misc_feature 1..16: note = synthetic [barcode part1]
  source 1..16: mol_type = other DNA
agactggagttctctg

SEQ ID NO: 15690 - DNA, 16 bp, synthetic construct
  misc_feature 1..16: note = synthetic [barcode part1]
  source 1..16: mol_type = other DNA
actctgtggacgtcct

SEQ ID NO: 15691 - DNA, 16 bp, synthetic construct
  misc_feature 1..16: note = synthetic [barcode part1]
  source 1..16: mol_type = other DNA
taacggtatcaccgac

SEQ ID NO: 15692 - DNA, 16 bp, synthetic construct
  misc_feature 1..16: note = synthetic [barcode part1]
  source 1..16: mol_type = other DNA
cgcaatagagttctgc

SEQ ID NO: 15693 - DNA, 16 bp, synthetic construct
  misc_feature 1..16: note = synthetic [barcode part1]
  source 1..16: mol_type = other DNA
tagaaccacgttacgc

SEQ ID NO: 15694 - DNA, 16 bp, synthetic construct
  misc_feature 1..16: note = synthetic [barcode part1]
  source 1..16: mol_type = other DNA
cacctcacggatatcc

SEQ ID NO: 15695 - DNA, 16 bp, synthetic construct
  misc_feature 1..16: note = synthetic [barcode part1]
  source 1..16: mol_type = other DNA
tggtcaagttacgacc

SEQ ID NO: 15696 - DNA, 16 bp, synthetic construct
  misc_feature 1..16: note = synthetic [barcode part1]
  source 1..16: mol_type = other DNA
tgatcctcggtcgtgt

SEQ ID NO: 15697 - DNA, 16 bp, synthetic construct
  misc_feature 1..16: note = synthetic [barcode part1]
  source 1..16: mol_type = other DNA
tcagtcaattacggcg

SEQ ID NO: 15698 - DNA, 16 bp, synthetic construct
  misc_feature 1..16: note = synthetic [barcode part1]
  source 1..16: mol_type = other DNA
tcggcacgagaagttg

SEQ ID NO: 15699 - DNA, 16 bp, synthetic construct
  misc_feature 1..16: note = synthetic [barcode part1]
  source 1..16: mol_type = other DNA
tgcgttctgtcgaacc

SEQ ID NO: 15700 - DNA, 16 bp, synthetic construct
  misc_feature 1..16: note = synthetic [barcode part1]
  source 1..16: mol_type = other DNA
cagatatctccactgt

SEQ ID NO: 15701 - DNA, 16 bp, synthetic construct
  misc_feature 1..16: note = synthetic [barcode part1]
  source 1..16: mol_type = other DNA
aatcgacggtcaactc

SEQ ID NO: 15702 - DNA, 16 bp, synthetic construct
  misc_feature 1..16: note = synthetic [barcode part1]
  source 1..16: mol_type = other DNA
tatcgccagatcgaac

SEQ ID NO: 15703 - DNA, 16 bp, synthetic construct
  misc_feature 1..16: note = synthetic [barcode part1]
  source 1..16: mol_type = other DNA
ttctcggatcacacgc

SEQ ID NO: 15704 - DNA, 16 bp, synthetic construct
  misc_feature 1..16: note = synthetic [barcode part1]
  source 1..16: mol_type = other DNA
tcgaaggattgtcctg

SEQ ID NO: 15705 - DNA, 16 bp, synthetic construct
  misc_feature 1..16: note = synthetic [barcode part1]
  source 1..16: mol_type = other DNA
gttattcacgagtctc

SEQ ID NO: 15706 - DNA, 16 bp, synthetic construct
  misc_feature 1..16: note = synthetic [barcode part1]
  source 1..16: mol_type = other DNA
caaggtcgattgacct

SEQ ID NO: 15707 - DNA, 16 bp, synthetic construct
  misc_feature 1..16: note = synthetic [barcode part1]
  source 1..16: mol_type = other DNA
aaggaacctatcgcct

SEQ ID NO: 15708 - DNA, 16 bp, synthetic construct
  misc_feature 1..16: note = synthetic [barcode part1]
  source 1..16: mol_type = other DNA
tctgactggagtcagt

SEQ ID NO: 15709 - DNA, 16 bp, synthetic construct
  misc_feature 1..16: note = synthetic [barcode part1]
  source 1..16: mol_type = other DNA
ttctcgatacgatcgt

SEQ ID NO: 15710 - DNA, 16 bp, synthetic construct
  misc_feature 1..16: note = synthetic [barcode part1]
  source 1..16: mol_type = other DNA
cgactctaggactaac

SEQ ID NO: 15711 - DNA, 16 bp, synthetic construct
  misc_feature 1..16: note = synthetic [barcode part1]
  source 1..16: mol_type = other DNA
aaccagtagtcggttc

SEQ ID NO: 15712 - DNA, 16 bp, synthetic construct
  misc_feature 1..16: note = synthetic [barcode part1]
  source 1..16: mol_type = other DNA
tcctaagaggcagacg

SEQ ID NO: 15713 - DNA, 16 bp, synthetic construct
  misc_feature 1..16: note = synthetic [barcode part1]
  source 1..16: mol_type = other DNA
ccagtaagtcttcgcc

SEQ ID NO: 15714 - DNA, 16 bp, synthetic construct
  misc_feature 1..16: note = synthetic [barcode part1]
  source 1..16: mol_type = other DNA
gaccacgtcaactctc

SEQ ID NO: 15715 - DNA, 16 bp, synthetic construct
  misc_feature 1..16: note = synthetic [barcode part1]
  source 1..16: mol_type = other DNA
aattctagaacggacg

SEQ ID NO: 15716 - DNA, 16 bp, synthetic construct
  misc_feature 1..16: note = synthetic [barcode part1]
  source 1..16: mol_type = other DNA
acaaccagtacgtcac

SEQ ID NO: 15717 - DNA, 16 bp, synthetic construct
  misc_feature 1..16: note = synthetic [barcode part1]
  source 1..16: mol_type = other DNA
tgccactacaattacc

SEQ ID NO: 15718 - DNA, 16 bp, synthetic construct
  misc_feature 1..16: note = synthetic [barcode part1]
  source 1..16: mol_type = other DNA
tcctcacttcgacgag

SEQ ID NO: 15719 - DNA, 16 bp, synthetic construct
  misc_feature 1..16: note = synthetic [barcode part1]
  source 1..16: mol_type = other DNA
cgacgtggagacaatc

SEQ ID NO: 15720 - DNA, 16 bp, synthetic construct
  misc_feature 1..16: note = synthetic [barcode part1]
  source 1..16: mol_type = other DNA
tccgcactagtaactt

SEQ ID NO: 15721 - DNA, 16 bp, synthetic construct
  misc_feature 1..16: note = synthetic [barcode part1]
  source 1..16: mol_type = other DNA
tcaggagtgtgccaag

SEQ ID NO: 15722 - DNA, 16 bp, synthetic construct
  misc_feature 1..16: note = synthetic [barcode part1]
  source 1..16: mol_type = other DNA
aggaaccgttgacgtg

SEQ ID NO: 15723 - DNA, 16 bp, synthetic construct
  misc_feature 1..16: note = synthetic [barcode part1]
  source 1..16: mol_type = other DNA
gtataattcgacctcc

SEQ ID NO: 15724 - DNA, 16 bp, synthetic construct
  misc_feature 1..16: note = synthetic [barcode part1]
  source 1..16: mol_type = other DNA
gttcaagaggtgatac

SEQ ID NO: 15725 - DNA, 16 bp, synthetic construct
  misc_feature 1..16: note = synthetic [barcode part1]
  source 1..16: mol_type = other DNA
atcgtcttgaacgtct

SEQ ID NO: 15726 - DNA, 16 bp, synthetic construct
  misc_feature 1..16: note = synthetic [barcode part1]
  source 1..16: mol_type = other DNA
tgtactccactggatt

SEQ ID NO: 15727 - DNA, 16 bp, synthetic construct
  misc_feature 1..16: note = synthetic [barcode part1]
  source 1..16: mol_type = other DNA
cgttgagaatacgagt

SEQ ID NO: 15728 - DNA, 16 bp, synthetic construct
  misc_feature 1..16: note = synthetic [barcode part1]
  source 1..16: mol_type = other DNA
gcgactcaagttactg

SEQ ID NO: 15729 - DNA, 16 bp, synthetic construct
  misc_feature 1..16: note = synthetic [barcode part1]
  source 1..16: mol_type = other DNA
agacggactcacttac

SEQ ID NO: 15730 - DNA, 16 bp, synthetic construct
  misc_feature 1..16: note = synthetic [barcode part1]
  source 1..16: mol_type = other DNA
gttactgcctctgcag

SEQ ID NO: 15731 - DNA, 16 bp, synthetic construct
  misc_feature 1..16: note = synthetic [barcode part1]
  source 1..16: mol_type = other DNA
gtacacgtcggttagt

SEQ ID NO: 15732 - DNA, 16 bp, synthetic construct
  misc_feature 1..16: note = synthetic [barcode part1]
  source 1..16: mol_type = other DNA
cgtgagttatccgagt

SEQ ID NO: 15733 - DNA, 16 bp, synthetic construct
  misc_feature 1..16: note = synthetic [barcode part1]
  source 1..16: mol_type = other DNA
cggtggcaacttagtt

SEQ ID NO: 15734 - DNA, 16 bp, synthetic construct
  misc_feature 1..16: note = synthetic [barcode part1]
  source 1..16: mol_type = other DNA
tgaagaagttgtgcac

SEQ ID NO: 15735 - DNA, 16 bp, synthetic construct
  misc_feature 1..16: note = synthetic [barcode part1]
  source 1..16: mol_type = other DNA
aaccacaacacgttgc

SEQ ID NO: 15736 - DNA, 16 bp, synthetic construct
  misc_feature 1..16: note = synthetic [barcode part1]
  source 1..16: mol_type = other DNA
tgattggactgcaacc

SEQ ID NO: 15737 - DNA, 16 bp, synthetic construct
  misc_feature 1..16: note = synthetic [barcode part1]
  source 1..16: mol_type = other DNA
cgccactacggttact

SEQ ID NO: 15738 - DNA, 16 bp, synthetic construct
  misc_feature 1..16: note = synthetic [barcode part1]
  source 1..16: mol_type = other DNA
agactcttgtagtgcg

SEQ ID NO: 15739 - DNA, 16 bp, synthetic construct
  misc_feature 1..16: note = synthetic [barcode part1]
  source 1..16: mol_type = other DNA
tacgcaatctagtctc

SEQ ID NO: 15740 - DNA, 16 bp, synthetic construct
  misc_feature 1..16: note = synthetic [barcode part1]
  source 1..16: mol_type = other DNA
tggttgtacgatcgtg

SEQ ID NO: 15741 - DNA, 16 bp, synthetic construct
  misc_feature 1..16: note = synthetic [barcode part1]
  source 1..16: mol_type = other DNA
taacggtctaagtcgc

SEQ ID NO: 15742 - DNA, 16 bp, synthetic construct
  misc_feature 1..16: note = synthetic [barcode part1]
  source 1..16: mol_type = other DNA
acacgcgtatacacac

SEQ ID NO: 15743 - DNA, 16 bp, synthetic construct
  misc_feature 1..16: note = synthetic [barcode part1]
  source 1..16: mol_type = other DNA
tgtgtggacctggatt

SEQ ID NO: 15744 - DNA, 16 bp, synthetic construct
  misc_feature 1..16: note = synthetic [barcode part1]
  source 1..16: mol_type = other DNA
tccgatctgcacaacc

SEQ ID NO: 15745 - DNA, 16 bp, synthetic construct
  misc_feature 1..16: note = synthetic [barcode part1]
  source 1..16: mol_type = other DNA
tatctctggaacgcag

SEQ ID NO: 15746 - DNA, 16 bp, synthetic construct
  misc_feature 1..16: note = synthetic [barcode part1]
  source 1..16: mol_type = other DNA
tactcgaaccacctcg

SEQ ID NO: 15747 - DNA, 16 bp, synthetic construct
  misc_feature 1..16: note = synthetic [barcode part1]
  source 1..16: mol_type = other DNA
aatcacacaaccgcgt

SEQ ID NO: 15748 - DNA, 16 bp, synthetic construct
  misc_feature 1..16: note = synthetic [barcode part1]
  source 1..16: mol_type = other DNA
gaagagtacgactgtt

SEQ ID NO: 15749 - DNA, 16 bp, synthetic construct
  misc_feature 1..16: note = synthetic [barcode part1]
  source 1..16: mol_type = other DNA
cgtaccgagttgagag

SEQ ID NO: 15750 - DNA, 16 bp, synthetic construct
  misc_feature 1..16: note = synthetic [barcode part1]
  source 1..16: mol_type = other DNA
tcttagtgtcgaaggc

SEQ ID NO: 15751 - DNA, 16 bp, synthetic construct
  misc_feature 1..16: note = synthetic [barcode part1]
  source 1..16: mol_type = other DNA
aacacgcaactaaggt

SEQ ID NO: 15752 - DNA, 16 bp, synthetic construct
  misc_feature 1..16: note = synthetic [barcode part1]
  source 1..16: mol_type = other DNA
aactggttcgagatcc

SEQ ID NO: 15753 - DNA, 16 bp, synthetic construct
  misc_feature 1..16: note = synthetic [barcode part1]
  source 1..16: mol_type = other DNA
tctacgtctagtggtt

SEQ ID NO: 15754 - DNA, 16 bp, synthetic construct
  misc_feature 1..16: note = synthetic [barcode part1]
  source 1..16: mol_type = other DNA
tcacctgacttcaggc

SEQ ID NO: 15755 - DNA, 16 bp, synthetic construct
  misc_feature 1..16: note = synthetic [barcode part1]
  source 1..16: mol_type = other DNA
aacgtcagtactgtgc

SEQ ID NO: 15756 - DNA, 16 bp, synthetic construct
  misc_feature 1..16: note = synthetic [barcode part1]
  source 1..16: mol_type = other DNA
acactgttccagaacg

SEQ ID NO: 15757 - DNA, 16 bp, synthetic construct
  misc_feature 1..16: note = synthetic [barcode part1]
  source 1..16: mol_type = other DNA
ccaagagtagtcttcg

SEQ ID NO: 15758 - DNA, 16 bp, synthetic construct
  misc_feature 1..16: note = synthetic [barcode part1]
  source 1..16: mol_type = other DNA
accttcagaaccactt

SEQ ID NO: 15759 - DNA, 16 bp, synthetic construct
  misc_feature 1..16: note = synthetic [barcode part1]
  source 1..16: mol_type = other DNA
gatacctctactactg

SEQ ID NO: 15760 - DNA, 16 bp, synthetic construct
  misc_feature 1..16: note = synthetic [barcode part1]
  source 1..16: mol_type = other DNA
gaatagacggaattcc

SEQ ID NO: 15761 - DNA, 16 bp, synthetic construct
  misc_feature 1..16: note = synthetic [barcode part1]
  source 1..16: mol_type = other DNA
accagacaacgtaagt

SEQ ID NO: 15762 - DNA, 16 bp, synthetic construct
  misc_feature 1..16: note = synthetic [barcode part1]
  source 1..16: mol_type = other DNA
ccagtggcctatatcc

SEQ ID NO: 15763 - DNA, 16 bp, synthetic construct
  misc_feature 1..16: note = synthetic [barcode part1]
  source 1..16: mol_type = other DNA
accttccagaggattg

SEQ ID NO: 15764 - DNA, 16 bp, synthetic construct
  misc_feature 1..16: note = synthetic [barcode part1]
  source 1..16: mol_type = other DNA
actcacagttgaagag

SEQ ID NO: 15765 - DNA, 16 bp, synthetic construct
  misc_feature 1..16: note = synthetic [barcode part1]
  source 1..16: mol_type = other DNA
tactcttgccgtcgag

SEQ ID NO: 15766 - DNA, 16 bp, synthetic construct
  misc_feature 1..16: note = synthetic [barcode part1]
  source 1..16: mol_type = other DNA
gtaattgttccgacct

SEQ ID NO: 15767 - DNA, 16 bp, synthetic construct
  misc_feature 1..16: note = synthetic [barcode part1]
  source 1..16: mol_type = other DNA
gagttgtcctgtgtcc

SEQ ID NO: 15768 - DNA, 16 bp, synthetic construct
  misc_feature 1..16: note = synthetic [barcode part1]
  source 1..16: mol_type = other DNA
gcgagaaggagatatc

SEQ ID NO: 15769 - DNA, 16 bp, synthetic construct
  misc_feature 1..16: note = synthetic [barcode part1]
  source 1..16: mol_type = other DNA
tatcactcgagtccgc

SEQ ID NO: 15770 - DNA, 16 bp, synthetic construct
  misc_feature 1..16: note = synthetic [barcode part1]
  source 1..16: mol_type = other DNA
cgagatccacaacact

SEQ ID NO: 15771 - DNA, 16 bp, synthetic construct
  misc_feature 1..16: note = synthetic [barcode part1]
  source 1..16: mol_type = other DNA
caattgacgtggcgtt

SEQ ID NO: 15772 - DNA, 16 bp, synthetic construct
  misc_feature 1..16: note = synthetic [barcode part1]
  source 1..16: mol_type = other DNA
ttatcgtggactcgcc

SEQ ID NO: 15773 - DNA, 16 bp, synthetic construct
  misc_feature 1..16: note = synthetic [barcode part1]
  source 1..16: mol_type = other DNA
atcaagaggagagtcg

SEQ ID NO: 15774 - DNA, 16 bp, synthetic construct
  misc_feature 1..16: note = synthetic [barcode part1]
  source 1..16: mol_type = other DNA
tctcacgtacacttcc

SEQ ID NO: 15775 - DNA, 16 bp, synthetic construct
  misc_feature 1..16: note = synthetic [barcode part1]
  source 1..16: mol_type = other DNA
attctcggtccggtgt

SEQ ID NO: 15776 - DNA, 16 bp, synthetic construct
  misc_feature 1..16: note = synthetic [barcode part1]
  source 1..16: mol_type = other DNA
aaggacgtgtcggatc

SEQ ID NO: 15777 - DNA, 16 bp, synthetic construct
  misc_feature 1..16: note = synthetic [barcode part1]
  source 1..16: mol_type = other DNA
gtagagagtcgaatct

SEQ ID NO: 15778 - DNA, 16 bp, synthetic construct
  misc_feature 1..16: note = synthetic [barcode part1]
  source 1..16: mol_type = other DNA
aactgtggtactgacc

SEQ ID NO: 15779 - DNA, 16 bp, synthetic construct
  misc_feature 1..16: note = synthetic [barcode part1]
  source 1..16: mol_type = other DNA
ttatccagacgttgtc

SEQ ID NO: 15780 - DNA, 16 bp, synthetic construct
  misc_feature 1..16: note = synthetic [barcode part1]
  source 1..16: mol_type = other DNA
ttccagttggtctcct

SEQ ID NO: 15781 - DNA, 16 bp, synthetic construct
  misc_feature 1..16: note = synthetic [barcode part1]
  source 1..16: mol_type = other DNA
tacggttggagattag

SEQ ID NO: 15782 - DNA, 16 bp, synthetic construct
  misc_feature 1..16: note = synthetic [barcode part1]
  source 1..16: mol_type = other DNA
atactgacctcgccgt

SEQ ID NO: 15783 - DNA, 16 bp, synthetic construct
  misc_feature 1..16: note = synthetic [barcode part1]
  source 1..16: mol_type = other DNA
tataacgtcgcgacgt

SEQ ID NO: 15784 - DNA, 16 bp, synthetic construct
  misc_feature 1..16: note = synthetic [barcode part1]
  source 1..16: mol_type = other DNA
agaccacagacacggt

SEQ ID NO: 15785 - DNA, 16 bp, synthetic construct
  misc_feature 1..16: note = synthetic [barcode part1]
  source 1..16: mol_type = other DNA
gtgacgaggtacgttg

SEQ ID NO: 15786 - DNA, 16 bp, synthetic construct
  misc_feature 1..16: note = synthetic [barcode part1]
  source 1..16: mol_type = other DNA
gtagtgtgactccaac

SEQ ID NO: 15787 - DNA, 16 bp, synthetic construct
  misc_feature 1..16: note = synthetic [barcode part1]
  source 1..16: mol_type = other DNA
acgtcaactcttagtc

SEQ ID NO: 15788 - DNA, 16 bp, synthetic construct
  misc_feature 1..16: note = synthetic [barcode part1]
  source 1..16: mol_type = other DNA
gcaacttatcttcgtg

SEQ ID NO: 15789 - DNA, 16 bp, synthetic construct
  misc_feature 1..16: note = synthetic [barcode part1]
  source 1..16: mol_type = other DNA
agtgatcaccactgac

SEQ ID NO: 15790 - DNA, 16 bp, synthetic construct
  misc_feature 1..16: note = synthetic [barcode part1]
  source 1..16: mol_type = other DNA
gtcgaattctgtactc

SEQ ID NO: 15791 - DNA, 16 bp, synthetic construct
  misc_feature 1..16: note = synthetic [barcode part1]
  source 1..16: mol_type = other DNA
tatcgacttgagagag

SEQ ID NO: 15792 - DNA, 16 bp, synthetic construct
  misc_feature 1..16: note = synthetic [barcode part1]
  source 1..16: mol_type = other DNA
agtgtcagttgtggtc

SEQ ID NO: 15793 - DNA, 16 bp, synthetic construct
  misc_feature 1..16: note = synthetic [barcode part1]
  source 1..16: mol_type = other DNA
tgtcgcgcagtattag

SEQ ID NO: 15794 - DNA, 16 bp, synthetic construct
  misc_feature 1..16: note = synthetic [barcode part1]
  source 1..16: mol_type = other DNA
cgcgcagaacaacagt

SEQ ID NO: 15795 - DNA, 16 bp, synthetic construct
  misc_feature 1..16: note = synthetic [barcode part1]
  source 1..16: mol_type = other DNA
cacaaggttagatcag

SEQ ID NO: 15796 - DNA, 16 bp, synthetic construct
  misc_feature 1..16: note = synthetic [barcode part1]
  source 1..16: mol_type = other DNA
tctcggccgtactagt

SEQ ID NO: 15797 - DNA, 16 bp, synthetic construct
  misc_feature 1..16: note = synthetic [barcode part1]
  source 1..16: mol_type = other DNA
cggcgatattatcgac

SEQ ID NO: 15798 - DNA, 16 bp, synthetic construct
  misc_feature 1..16: note = synthetic [barcode part1]
  source 1..16: mol_type = other DNA
cctctgagtcaacacc

SEQ ID NO: 15799 - DNA, 16 bp, synthetic construct
  misc_feature 1..16: note = synthetic [barcode part1]
  source 1..16: mol_type = other DNA
agtctgtgcgacgaag

SEQ ID NO: 15800 - DNA, 16 bp, synthetic construct
  misc_feature 1..16: note = synthetic [barcode part1]
  source 1..16: mol_type = other DNA
tcacgccgaattgcct

SEQ ID NO: 15801 - DNA, 16 bp, synthetic construct
  misc_feature 1..16: note = synthetic [barcode part1]
  source 1..16: mol_type = other DNA
gattcacacggatctg

SEQ ID NO: 15802 - DNA, 16 bp, synthetic construct
  misc_feature 1..16: note = synthetic [barcode part1]
  source 1..16: mol_type = other DNA
tcgacaacgagaacgc

SEQ ID NO: 15803 - DNA, 16 bp, synthetic construct
  misc_feature 1..16: note = synthetic [barcode part1]
  source 1..16: mol_type = other DNA
gatcgattggtaccac

SEQ ID NO: 15804 - DNA, 16 bp, synthetic construct
  misc_feature 1..16: note = synthetic [barcode part1]
  source 1..16: mol_type = other DNA
aacaagagtgtccaac

SEQ ID NO: 15805 - DNA, 16 bp, synthetic construct
  misc_feature 1..16: note = synthetic [barcode part1]
  source 1..16: mol_type = other DNA
accgcgttctctaacg

SEQ ID NO: 15806 - DNA, 16 bp, synthetic construct
  misc_feature 1..16: note = synthetic [barcode part1]
  source 1..16: mol_type = other DNA
actgcctctattctgc

SEQ ID NO: 15807 - DNA, 16 bp, synthetic construct
  misc_feature 1..16: note = synthetic [barcode part1]
  source 1..16: mol_type = other DNA
tgccggtgattgagag

SEQ ID NO: 15808 - DNA, 16 bp, synthetic construct
  misc_feature 1..16: note = synthetic [barcode part1]
  source 1..16: mol_type = other DNA
tacggtacttatctgc

SEQ ID NO: 15809 - DNA, 16 bp, synthetic construct
  misc_feature 1..16: note = synthetic [barcode part1]
  source 1..16: mol_type = other DNA
agtcagttaatcggcc

SEQ ID NO: 15810 - DNA, 16 bp, synthetic construct
  misc_feature 1..16: note = synthetic [barcode part1]
  source 1..16: mol_type = other DNA
tgttcagttggacacg

SEQ ID NO: 15811 - DNA, 16 bp, synthetic construct
  misc_feature 1..16: note = synthetic [barcode part1]
  source 1..16: mol_type = other DNA
ttatctcaatccgcag

SEQ ID NO: 15812 - DNA, 16 bp, synthetic construct
  misc_feature 1..16: note = synthetic [barcode part1]
  source 1..16: mol_type = other DNA
atccgtcagtgttgcc

SEQ ID NO: 15813 - DNA, 16 bp, synthetic construct
  misc_feature 1..16: note = synthetic [barcode part1]
  source 1..16: mol_type = other DNA
gcgcgagaacaacttg

SEQ ID NO: 15814 - DNA, 16 bp, synthetic construct
  misc_feature 1..16: note = synthetic [barcode part1]
  source 1..16: mol_type = other DNA
accacctagtatctac

SEQ ID NO: 15815 - DNA, 16 bp, synthetic construct
  misc_feature 1..16: note = synthetic [barcode part1]
  source 1..16: mol_type = other DNA
attgcgtgaagtggcg

SEQ ID NO: 15816 - DNA, 16 bp, synthetic construct
  misc_feature 1..16: note = synthetic [barcode part1]
  source 1..16: mol_type = other DNA
tcactcagtctgtcct

SEQ ID NO: 15817 - DNA, 16 bp, synthetic construct
  misc_feature 1..16: note = synthetic [barcode part1]
  source 1..16: mol_type = other DNA
ttagtgaggcggtctt

SEQ ID NO: 15818 - DNA, 16 bp, synthetic construct
  misc_feature 1..16: note = synthetic [barcode part1]
  source 1..16: mol_type = other DNA
aaggacgagatcgtcc

SEQ ID NO: 15819 - DNA, 16 bp, synthetic construct
  misc_feature 1..16: note = synthetic [barcode part1]
  source 1..16: mol_type = other DNA
acgacgactatcactg

SEQ ID NO: 15820 - DNA, 16 bp, synthetic construct
  misc_feature 1..16: note = synthetic [barcode part1]
  source 1..16: mol_type = other DNA
acctgcctatccactt

SEQ ID NO: 15821 - DNA, 16 bp, synthetic construct
  misc_feature 1..16: note = synthetic [barcode part1]
  source 1..16: mol_type = other DNA
acgaacgtgttgtaag

SEQ ID NO: 15822 - DNA, 16 bp, synthetic construct
  misc_feature 1..16: note = synthetic [barcode part1]
  source 1..16: mol_type = other DNA
cggatagaagtgaacg

SEQ ID NO: 15823 - DNA, 16 bp, synthetic construct
  misc_feature 1..16: note = synthetic [barcode part1]
  source 1..16: mol_type = other DNA
tcaacacctccgactg

SEQ ID NO: 15824 - DNA, 16 bp, synthetic construct
  misc_feature 1..16: note = synthetic [barcode part1]
  source 1..16: mol_type = other DNA
ttgcaacctccttctg

SEQ ID NO: 15825 - DNA, 16 bp, synthetic construct
  misc_feature 1..16: note = synthetic [barcode part1]
  source 1..16: mol_type = other DNA
actcctgcaagtcgtc

SEQ ID NO: 15826 - DNA, 16 bp, synthetic construct
  misc_feature 1..16: note = synthetic [barcode part1]
  source 1..16: mol_type = other DNA
tctgcactgattcggc

SEQ ID NO: 15827 - DNA, 16 bp, synthetic construct
  misc_feature 1..16: note = synthetic [barcode part1]
  source 1..16: mol_type = other DNA
aacagatcgccgtgag

SEQ ID NO: 15828 - DNA, 16 bp, synthetic construct
  misc_feature 1..16: note = synthetic [barcode part1]
  source 1..16: mol_type = other DNA
tcgactagtcgactag

SEQ ID NO: 15829 - DNA, 16 bp, synthetic construct
  misc_feature 1..16: note = synthetic [barcode part1]
  source 1..16: mol_type = other DNA
tagaccggcgtagagt

SEQ ID NO: 15830 - DNA, 16 bp, synthetic construct
  misc_feature 1..16: note = synthetic [barcode part1]
  source 1..16: mol_type = other DNA
gtctccacttggtgac

SEQ ID NO: 15831 - DNA, 16 bp, synthetic construct
  misc_feature 1..16: note = synthetic [barcode part1]
  source 1..16: mol_type = other DNA
tacgagtacgaacctc

SEQ ID NO: 15832 - DNA, 16 bp, synthetic construct
  misc_feature 1..16: note = synthetic [barcode part1]
  source 1..16: mol_type = other DNA
ttcactagaaggtcgc

SEQ ID NO: 15833 - DNA, 16 bp, synthetic construct
  misc_feature 1..16: note = synthetic [barcode part1]
  source 1..16: mol_type = other DNA
tattagtgtcgcgcag

SEQ ID NO: 15834 - DNA, 16 bp, synthetic construct
  misc_feature 1..16: note = synthetic [barcode part1]
  source 1..16: mol_type = other DNA
gactatccaagtcacg

SEQ ID NO: 15835 - DNA, 16 bp, synthetic construct
  misc_feature 1..16: note = synthetic [barcode part1]
  source 1..16: mol_type = other DNA
tactacctcgtcgtct

SEQ ID NO: 15836 - DNA, 16 bp, synthetic construct
  misc_feature 1..16: note = synthetic [barcode part1]
  source 1..16: mol_type = other DNA
agtcggaagattggag

SEQ ID NO: 15837 - DNA, 16 bp, synthetic construct
  misc_feature 1..16: note = synthetic [barcode part1]
  source 1..16: mol_type = other DNA
cctaggcagtagtgag

SEQ ID NO: 15838 - DNA, 16 bp, synthetic construct
  misc_feature 1..16: note = synthetic [barcode part1]
  source 1..16: mol_type = other DNA
tgacttctgcgtgatt

SEQ ID NO: 15839 - DNA, 16 bp, synthetic construct
  misc_feature 1..16: note = synthetic [barcode part1]
  source 1..16: mol_type = other DNA
tgtgccttaggttgcc

SEQ ID NO: 15840 - DNA, 16 bp, synthetic construct
  misc_feature 1..16: note = synthetic [barcode part1]
  source 1..16: mol_type = other DNA
ccggacaagacttatc

SEQ ID NO: 15841 - DNA, 16 bp, synthetic construct
  misc_feature 1..16: note = synthetic [barcode part1]
  source 1..16: mol_type = other DNA
tctcgaatctaggacg

SEQ ID NO: 15842 - DNA, 16 bp, synthetic construct
  misc_feature 1..16: note = synthetic [barcode part1]
  source 1..16: mol_type = other DNA
cgtgttattagttccg

SEQ ID NO: 15843 - DNA, 16 bp, synthetic construct
  misc_feature 1..16: note = synthetic [barcode part1]
  source 1..16: mol_type = other DNA
accacggtagaattcc

SEQ ID NO: 15844 - DNA, 16 bp, synthetic construct
  misc_feature 1..16: note = synthetic [barcode part1]
  source 1..16: mol_type = other DNA
cctcaacactgtcttc

SEQ ID NO: 15845 - DNA, 16 bp, synthetic construct
  misc_feature 1..16: note = synthetic [barcode part1]
  source 1..16: mol_type = other DNA
tccactatctcgtcgt

SEQ ID NO: 15846 - DNA, 16 bp, synthetic construct
  misc_feature 1..16: note = synthetic [barcode part1]
  source 1..16: mol_type = other DNA
gccgtaatcgtccact

SEQ ID NO: 15847 - DNA, 16 bp, synthetic construct
  misc_feature 1..16: note = synthetic [barcode part1]
  source 1..16: mol_type = other DNA
cacgataactcgcctc

SEQ ID NO: 15848 - DNA, 16 bp, synthetic construct
  misc_feature 1..16: note = synthetic [barcode part1]
  source 1..16: mol_type = other DNA
cgaacgatacttgtcg

SEQ ID NO: 15849 - DNA, 16 bp, synthetic construct
  misc_feature 1..16: note = synthetic [barcode part1]
  source 1..16: mol_type = other DNA
atatcgcgcggtattg

SEQ ID NO: 15850 - DNA, 16 bp, synthetic construct
  misc_feature 1..16: note = synthetic [barcode part1]
  source 1..16: mol_type = other DNA
cacaacttaacaggag

SEQ ID NO: 15851 - DNA, 16 bp, synthetic construct
  misc_feature 1..16: note = synthetic [barcode part1]
  source 1..16: mol_type = other DNA
ttgattcctgcacggc

SEQ ID NO: 15852 - DNA, 16 bp, synthetic construct
  misc_feature 1..16: note = synthetic [barcode part1]
  source 1..16: mol_type = other DNA
gactctcgtgcaactc

SEQ ID NO: 15853 - DNA, 16 bp, synthetic construct
  misc_feature 1..16: note = synthetic [barcode part1]
  source 1..16: mol_type = other DNA
tctgaaggttagtcgc

SEQ ID NO: 15854 - DNA, 16 bp, synthetic construct
  misc_feature 1..16: note = synthetic [barcode part1]
  source 1..16: mol_type = other DNA
acggattctcttgatc

SEQ ID NO: 15855 - DNA, 16 bp, synthetic construct
  misc_feature 1..16: note = synthetic [barcode part1]
  source 1..16: mol_type = other DNA
acttgaattcgccact

SEQ ID NO: 15856 - DNA, 16 bp, synthetic construct
  misc_feature 1..16: note = synthetic [barcode part1]
  source 1..16: mol_type = other DNA
gaggtgataggcactc

SEQ ID NO: 15857 - DNA, 16 bp, synthetic construct
  misc_feature 1..16: note = synthetic [barcode part1]
  source 1..16: mol_type = other DNA
ttactcgccacctgtt

SEQ ID NO: 15858 - DNA, 16 bp, synthetic construct
  misc_feature 1..16: note = synthetic [barcode part1]
  source 1..16: mol_type = other DNA
cagtcgattctgaggt

SEQ ID NO: 15859 - DNA, 16 bp, synthetic construct
  misc_feature 1..16: note = synthetic [barcode part1]
  source 1..16: mol_type = other DNA
aacaccttcgttgccg

SEQ ID NO: 15860 - DNA, 16 bp, synthetic construct
  misc_feature 1..16: note = synthetic [barcode part1]
  source 1..16: mol_type = other DNA
cgtcgaggtaagaacc

SEQ ID NO: 15861 - DNA, 16 bp, synthetic construct
  misc_feature 1..16: note = synthetic [barcode part1]
  source 1..16: mol_type = other DNA
gtccaccggtattatt

SEQ ID NO: 15862 - DNA, 16 bp, synthetic construct
  misc_feature 1..16: note = synthetic [barcode part1]
  source 1..16: mol_type = other DNA
cgaaccgtgtactctc

SEQ ID NO: 15863 - DNA, 16 bp, synthetic construct
  misc_feature 1..16: note = synthetic [barcode part1]
  source 1..16: mol_type = other DNA
acgaacgaatattgcg

SEQ ID NO: 15864 - DNA, 16 bp, synthetic construct
  misc_feature 1..16: note = synthetic [barcode part1]
  source 1..16: mol_type = other DNA
tacttgtgaaccttgc

SEQ ID NO: 15865 - DNA, 16 bp, synthetic construct
  misc_feature 1..16: note = synthetic [barcode part1]
  source 1..16: mol_type = other DNA
caactaggatcggttc

SEQ ID NO: 15866 - DNA, 16 bp, synthetic construct
  misc_feature 1..16: note = synthetic [barcode part1]
  source 1..16: mol_type = other DNA
gcaaggttaggtattg

SEQ ID NO: 15867 - DNA, 16 bp, synthetic construct
  misc_feature 1..16: note = synthetic [barcode part1]
  source 1..16: mol_type = other DNA
gcgtctccggtaatct

SEQ ID NO: 15868 - DNA, 16 bp, synthetic construct
  misc_feature 1..16: note = synthetic [barcode part1]
  source 1..16: mol_type = other DNA
acaagaggccaggtct

SEQ ID NO: 15869 - DNA, 16 bp, synthetic construct
  misc_feature 1..16: note = synthetic [barcode part1]
  source 1..16: mol_type = other DNA
cgttattactcgagtc

SEQ ID NO: 15870 - DNA, 16 bp, synthetic construct
  misc_feature 1..16: note = synthetic [barcode part1]
  source 1..16: mol_type = other DNA
gcgttaagtacttggc

SEQ ID NO: 15871 - DNA, 16 bp, synthetic construct
  misc_feature 1..16: note = synthetic [barcode part1]
  source 1..16: mol_type = other DNA
acttgtgtggtaagag

SEQ ID NO: 15872 - DNA, 16 bp, synthetic construct
  misc_feature 1..16: note = synthetic [barcode part1]
  source 1..16: mol_type = other DNA
tggttccttgacttcc

SEQ ID NO: 15873 - DNA, 16 bp, synthetic construct
  misc_feature 1..16: note = synthetic [barcode part1]
  source 1..16: mol_type = other DNA
actagtaggacgcctt

SEQ ID NO: 15874 - DNA, 16 bp, synthetic construct
  misc_feature 1..16: note = synthetic [barcode part1]
  source 1..16: mol_type = other DNA
aagactctcacttgtc

SEQ ID NO: 15875 - DNA, 16 bp, synthetic construct
  misc_feature 1..16: note = synthetic [barcode part1]
  source 1..16: mol_type = other DNA
atcctagactgcagtg

SEQ ID NO: 15876 - DNA, 16 bp, synthetic construct
  misc_feature 1..16: note = synthetic [barcode part1]
  source 1..16: mol_type = other DNA
ccttgactcgagtacc

SEQ ID NO: 15877 - DNA, 16 bp, synthetic construct
  misc_feature 1..16: note = synthetic [barcode part1]
  source 1..16: mol_type = other DNA
aggaaccacgtcaacg

SEQ ID NO: 15878 - DNA, 16 bp, synthetic construct
  misc_feature 1..16: note = synthetic [barcode part1]
  source 1..16: mol_type = other DNA
gcgtgtgaattggttc

SEQ ID NO: 15879 - DNA, 16 bp, synthetic construct
  misc_feature 1..16: note = synthetic [barcode part1]
  source 1..16: mol_type = other DNA
gcgaagtcctattacg

SEQ ID NO: 15880 - DNA, 16 bp, synthetic construct
  misc_feature 1..16: note = synthetic [barcode part1]
  source 1..16: mol_type = other DNA
ttcagacggatacctg

SEQ ID NO: 15881 - DNA, 16 bp, synthetic construct
  misc_feature 1..16: note = synthetic [barcode part1]
  source 1..16: mol_type = other DNA
gccacgttcgatatag

SEQ ID NO: 15882 - DNA, 16 bp, synthetic construct
  misc_feature 1..16: note = synthetic [barcode part1]
  source 1..16: mol_type = other DNA
tgagactactgtgacc

SEQ ID NO: 15883 - DNA, 16 bp, synthetic construct
  misc_feature 1..16: note = synthetic [barcode part1]
  source 1..16: mol_type = other DNA
aacgaagtgcgttagt

SEQ ID NO: 15884 - DNA, 16 bp, synthetic construct
  misc_feature 1..16: note = synthetic [barcode part1]
  source 1..16: mol_type = other DNA
ttcactgatatccggt

SEQ ID NO: 15885 - DNA, 16 bp, synthetic construct
  misc_feature 1..16: note = synthetic [barcode part1]
  source 1..16: mol_type = other DNA
attctgtggtgtactc

SEQ ID NO: 15886 - DNA, 16 bp, synthetic construct
  misc_feature 1..16: note = synthetic [barcode part1]
  source 1..16: mol_type = other DNA
gccgacagacaacaac

SEQ ID NO: 15887 - DNA, 16 bp, synthetic construct
  misc_feature 1..16: note = synthetic [barcode part1]
  source 1..16: mol_type = other DNA
cgcggtatactcgttc

SEQ ID NO: 15888 - DNA, 16 bp, synthetic construct
  misc_feature 1..16: note = synthetic [barcode part1]
  source 1..16: mol_type = other DNA
aggaattgtaccagtg

SEQ ID NO: 15889 - DNA, 16 bp, synthetic construct
  misc_feature 1..16: note = synthetic [barcode part1]
  source 1..16: mol_type = other DNA
gtcaatatcgcgcagt

SEQ ID NO: 15890 - DNA, 16 bp, synthetic construct
  misc_feature 1..16: note = synthetic [barcode part1]
  source 1..16: mol_type = other DNA
aacgactaagacacac

SEQ ID NO: 15891 - DNA, 16 bp, synthetic construct
  misc_feature 1..16: note = synthetic [barcode part1]
  source 1..16: mol_type = other DNA
aagacaggccttgtct

SEQ ID NO: 15892 - DNA, 16 bp, synthetic construct
  misc_feature 1..16: note = synthetic [barcode part1]
  source 1..16: mol_type = other DNA
gactctctcaacacgc

SEQ ID NO: 15893 - DNA, 16 bp, synthetic construct
  misc_feature 1..16: note = synthetic [barcode part1]
  source 1..16: mol_type = other DNA
gactacactctgattc

SEQ ID NO: 15894 - DNA, 16 bp, synthetic construct
  misc_feature 1..16: note = synthetic [barcode part1]
  source 1..16: mol_type = other DNA
ttgattcctcgtgaac

SEQ ID NO: 15895 - DNA, 16 bp, synthetic construct
  misc_feature 1..16: note = synthetic [barcode part1]
  source 1..16: mol_type = other DNA
tagtataggcctgtgc

SEQ ID NO: 15896 - DNA, 16 bp, synthetic construct
  misc_feature 1..16: note = synthetic [barcode part1]
  source 1..16: mol_type = other DNA
tactccactgtaggtt

SEQ ID NO: 15897 - DNA, 16 bp, synthetic construct
  misc_feature 1..16: note = synthetic [barcode part1]
  source 1..16: mol_type = other DNA
acctacttgttacggt

SEQ ID NO: 15898 - DNA, 16 bp, synthetic construct
  misc_feature 1..16: note = synthetic [barcode part1]
  source 1..16: mol_type = other DNA
ccgattccaaggaatc

SEQ ID NO: 15899 - DNA, 16 bp, synthetic construct
  misc_feature 1..16: note = synthetic [barcode part1]
  source 1..16: mol_type = other DNA
ccaataggttcttgtc

SEQ ID NO: 15900 - DNA, 16 bp, synthetic construct
  misc_feature 1..16: note = synthetic [barcode part1]
  source 1..16: mol_type = other DNA
tccgtcgtgatctctt

SEQ ID NO: 15901 - DNA, 16 bp, synthetic construct
  misc_feature 1..16: note = synthetic [barcode part1]
  source 1..16: mol_type = other DNA
ttatccttctccgacg

SEQ ID NO: 15902 - DNA, 16 bp, synthetic construct
  misc_feature 1..16: note = synthetic [barcode part1]
  source 1..16: mol_type = other DNA
gaggttctcacttgtt

SEQ ID NO: 15903 - DNA, 16 bp, synthetic construct
  misc_feature 1..16: note = synthetic [barcode part1]
  source 1..16: mol_type = other DNA
cggtagttacagaagt

SEQ ID NO: 15904 - DNA, 16 bp, synthetic construct
  misc_feature 1..16: note = synthetic [barcode part1]
  source 1..16: mol_type = other DNA
agtacacgttgtgcac

SEQ ID NO: 15905 - DNA, 16 bp, synthetic construct
  misc_feature 1..16: note = synthetic [barcode part1]
  source 1..16: mol_type = other DNA
tcaatctctcggtctc

SEQ ID NO: 15906 - DNA, 16 bp, synthetic construct
  misc_feature 1..16: note = synthetic [barcode part1]
  source 1..16: mol_type = other DNA
gacttggatatcctct

SEQ ID NO: 15907 - DNA, 16 bp, synthetic construct
  misc_feature 1..16: note = synthetic [barcode part1]
  source 1..16: mol_type = other DNA
agactggtacaatcag

SEQ ID NO: 15908 - DNA, 16 bp, synthetic construct
  misc_feature 1..16: note = synthetic [barcode part1]
  source 1..16: mol_type = other DNA
ttgtgagtaggtccac

SEQ ID NO: 15909 - DNA, 16 bp, synthetic construct
  misc_feature 1..16: note = synthetic [barcode part1]
  source 1..16: mol_type = other DNA
tgaagagtgatcgtgt

SEQ ID NO: 15910 - DNA, 16 bp, synthetic construct
  misc_feature 1..16: note = synthetic [barcode part1]
  source 1..16: mol_type = other DNA
gtattcggttcacgag

SEQ ID NO: 15911 - DNA, 16 bp, synthetic construct
  misc_feature 1..16: note = synthetic [barcode part1]
  source 1..16: mol_type = other DNA
acctgtaactacttcg

SEQ ID NO: 15912 - DNA, 16 bp, synthetic construct
  misc_feature 1..16: note = synthetic [barcode part1]
  source 1..16: mol_type = other DNA
tcttatacggcggcct

SEQ ID NO: 15913 - DNA, 16 bp, synthetic construct
  misc_feature 1..16: note = synthetic [barcode part1]
  source 1..16: mol_type = other DNA
gattacctccaacgag

SEQ ID NO: 15914 - DNA, 16 bp, synthetic construct
  misc_feature 1..16: note = synthetic [barcode part1]
  source 1..16: mol_type = other DNA
cgtgcaggataacgac

SEQ ID NO: 15915 - DNA, 16 bp, synthetic construct
  misc_feature 1..16: note = synthetic [barcode part1]
  source 1..16: mol_type = other DNA
tgcaacgagacaagtt

SEQ ID NO: 15916 - DNA, 16 bp, synthetic construct
  misc_feature 1..16: note = synthetic [barcode part1]
  source 1..16: mol_type = other DNA
taccaacacaccaacg

SEQ ID NO: 15917 - DNA, 16 bp, synthetic construct
  misc_feature 1..16: note = synthetic [barcode part1]
  source 1..16: mol_type = other DNA
tgatcggagagtctct

SEQ ID NO: 15918 - DNA, 16 bp, synthetic construct
  misc_feature 1..16: note = synthetic [barcode part1]
  source 1..16: mol_type = other DNA
tgcggtgcctattcac

SEQ ID NO: 15919 - DNA, 16 bp, synthetic construct
  misc_feature 1..16: note = synthetic [barcode part1]
  source 1..16: mol_type = other DNA
ttgtgagtgttgacgc

SEQ ID NO: 15920 - DNA, 16 bp, synthetic construct
  misc_feature 1..16: note = synthetic [barcode part1]
  source 1..16: mol_type = other DNA
tccaagtacggttgtg

SEQ ID NO: 15921 - DNA, 16 bp, synthetic construct
  misc_feature 1..16: note = synthetic [barcode part1]
  source 1..16: mol_type = other DNA
gattgaaggtgtatcg

SEQ ID NO: 15922 - DNA, 16 bp, synthetic construct
  misc_feature 1..16: note = synthetic [barcode part1]
  source 1..16: mol_type = other DNA
atatctagacaggacg

SEQ ID NO: 15923 - DNA, 16 bp, synthetic construct
  misc_feature 1..16: note = synthetic [barcode part1]
  source 1..16: mol_type = other DNA
tgaggcactcaattcg

SEQ ID NO: 15924 - DNA, 16 bp, synthetic construct
  misc_feature 1..16: note = synthetic [barcode part1]
  source 1..16: mol_type = other DNA
ttcaaccgtacactgt

SEQ ID NO: 15925 - DNA, 16 bp, synthetic construct
  misc_feature 1..16: note = synthetic [barcode part1]
  source 1..16: mol_type = other DNA
cgaccagtaaccaatc

SEQ ID NO: 15926 - DNA, 16 bp, synthetic construct
  misc_feature 1..16: note = synthetic [barcode part1]
  source 1..16: mol_type = other DNA
aggtcgaactgacacg

SEQ ID NO: 15927 - DNA, 16 bp, synthetic construct
  misc_feature 1..16: note = synthetic [barcode part1]
  source 1..16: mol_type = other DNA
acgtgtggatcttggt

SEQ ID NO: 15928 - DNA, 16 bp, synthetic construct
  misc_feature 1..16: note = synthetic [barcode part1]
  source 1..16: mol_type = other DNA
gacttgacacgccttc

SEQ ID NO: 15929 - DNA, 16 bp, synthetic construct
  misc_feature 1..16: note = synthetic [barcode part1]
  source 1..16: mol_type = other DNA
ccactaatacagagag

SEQ ID NO: 15930 - DNA, 16 bp, synthetic construct
  misc_feature 1..16: note = synthetic [barcode part1]
  source 1..16: mol_type = other DNA
gataaccgttgtcgac

SEQ ID NO: 15931 - DNA, 16 bp, synthetic construct
  misc_feature 1..16: note = synthetic [barcode part1]
  source 1..16: mol_type = other DNA
gcagtcagttgacact

SEQ ID NO: 15932 - DNA, 16 bp, synthetic construct
  misc_feature 1..16: note = synthetic [barcode part1]
  source 1..16: mol_type = other DNA
gagtacctaaggtagt

SEQ ID NO: 15933 - DNA, 16 bp, synthetic construct
  misc_feature 1..16: note = synthetic [barcode part1]
  source 1..16: mol_type = other DNA
ttgcagagacacactc

SEQ ID NO: 15934 - DNA, 16 bp, synthetic construct
  misc_feature 1..16: note = synthetic [barcode part1]
  source 1..16: mol_type = other DNA
gatcgactcggaatct

SEQ ID NO: 15935 - DNA, 16 bp, synthetic construct
  misc_feature 1..16: note = synthetic [barcode part1]
  source 1..16: mol_type = other DNA
ttgccgtgagtctacc

SEQ ID NO: 15936 - DNA, 16 bp, synthetic construct
  misc_feature 1..16: note = synthetic [barcode part1]
  source 1..16: mol_type = other DNA
ccttctcaaggtcctt

SEQ ID NO: 15937 - DNA, 16 bp, synthetic construct
  misc_feature 1..16: note = synthetic [barcode part1]
  source 1..16: mol_type = other DNA
tcagtaacacttccgt

SEQ ID NO: 15938 - DNA, 16 bp, synthetic construct
  misc_feature 1..16: note = synthetic [barcode part1]
  source 1..16: mol_type = other DNA
ccaagtattatcctgc

SEQ ID NO: 15939 - DNA, 16 bp, synthetic construct
  misc_feature 1..16: note = synthetic [barcode part1]
  source 1..16: mol_type = other DNA
cgagaggcaacgtact

SEQ ID NO: 15940 - DNA, 16 bp, synthetic construct
  misc_feature 1..16: note = synthetic [barcode part1]
  source 1..16: mol_type = other DNA
gatagtccgcgaagac

SEQ ID NO: 15941 - DNA, 16 bp, synthetic construct
  misc_feature 1..16: note = synthetic [barcode part1]
  source 1..16: mol_type = other DNA
atatccgccacctcag

SEQ ID NO: 15942 - DNA, 16 bp, synthetic construct
  misc_feature 1..16: note = synthetic [barcode part1]
  source 1..16: mol_type = other DNA
gtaatccttgccgaag

SEQ ID NO: 15943 - DNA, 16 bp, synthetic construct
  misc_feature 1..16: note = synthetic [barcode part1]
  source 1..16: mol_type = other DNA
aacctgaagtctggtc

SEQ ID NO: 15944 - DNA, 16 bp, synthetic construct
  misc_feature 1..16: note = synthetic [barcode part1]
  source 1..16: mol_type = other DNA
gttcgcgatatccaag

SEQ ID NO: 15945 - DNA, 16 bp, synthetic construct
  misc_feature 1..16: note = synthetic [barcode part1]
  source 1..16: mol_type = other DNA
gttgtctcgagtatct

SEQ ID NO: 15946 - DNA, 16 bp, synthetic construct
  misc_feature 1..16: note = synthetic [barcode part1]
  source 1..16: mol_type = other DNA
gcaattcgacacggag

SEQ ID NO: 15947 - DNA, 16 bp, synthetic construct
  misc_feature 1..16: note = synthetic [barcode part1]
  source 1..16: mol_type = other DNA
tatcgagacaaggatc

SEQ ID NO: 15948 - DNA, 16 bp, synthetic construct
  misc_feature 1..16: note = synthetic [barcode part1]
  source 1..16: mol_type = other DNA
tgagacgcactaatag

SEQ ID NO: 15949 - DNA, 16 bp, synthetic construct
  misc_feature 1..16: note = synthetic [barcode part1]
  source 1..16: mol_type = other DNA
ttgcgagtagatccgt

SEQ ID NO: 15950 - DNA, 16 bp, synthetic construct
  misc_feature 1..16: note = synthetic [barcode part1]
  source 1..16: mol_type = other DNA
tagagtccagtgttgc

SEQ ID NO: 15951 - DNA, 16 bp, synthetic construct
  misc_feature 1..16: note = synthetic [barcode part1]
  source 1..16: mol_type = other DNA
tggatcgtgtgcctct

SEQ ID NO: 15952 - DNA, 16 bp, synthetic construct
  misc_feature 1..16: note = synthetic [barcode part1]
  source 1..16: mol_type = other DNA
tgcacaataccaacgc

SEQ ID NO: 15953 - DNA, 16 bp, synthetic construct
  misc_feature 1..16: note = synthetic [barcode part1]
  source 1..16: mol_type = other DNA
tggtcaagtcgattgc

SEQ ID NO: 15954 - DNA, 16 bp, synthetic construct
  misc_feature 1..16: note = synthetic [barcode part1]
  source 1..16: mol_type = other DNA
gacacttcgtctcacg

SEQ ID NO: 15955 - DNA, 16 bp, synthetic construct
  misc_feature 1..16: note = synthetic [barcode part1]
  source 1..16: mol_type = other DNA
ataccgtatctgtctg

SEQ ID NO: 15956 - DNA, 16 bp, synthetic construct
  misc_feature 1..16: note = synthetic [barcode part1]
  source 1..16: mol_type = other DNA
cacactcactcctatc

SEQ ID NO: 15957 - DNA, 16 bp, synthetic construct
  misc_feature 1..16: note = synthetic [barcode part1]
  source 1..16: mol_type = other DNA
agaaggtgacacactt

SEQ ID NO: 15958 - DNA, 16 bp, synthetic construct
  misc_feature 1..16: note = synthetic [barcode part1]
  source 1..16: mol_type = other DNA
gcgacgtgttgattac

SEQ ID NO: 15959 - DNA, 16 bp, synthetic construct
  misc_feature 1..16: note = synthetic [barcode part1]
  source 1..16: mol_type = other DNA
tgccgacagagagttg

SEQ ID NO: 15960 - DNA, 16 bp, synthetic construct
  misc_feature 1..16: note = synthetic [barcode part1]
  source 1..16: mol_type = other DNA
tccactggatcgtacc

SEQ ID NO: 15961 - DNA, 16 bp, synthetic construct
  misc_feature 1..16: note = synthetic [barcode part1]
  source 1..16: mol_type = other DNA
aattgcgataccggtc

SEQ ID NO: 15962 - DNA, 16 bp, synthetic construct
  misc_feature 1..16: note = synthetic [barcode part1]
  source 1..16: mol_type = other DNA
tccgactcgattatac

SEQ ID NO: 15963 - DNA, 16 bp, synthetic construct
  misc_feature 1..16: note = synthetic [barcode part1]
  source 1..16: mol_type = other DNA
gtaagtccacagactc

SEQ ID NO: 15964 - DNA, 16 bp, synthetic construct
  misc_feature 1..16: note = synthetic [barcode part1]
  source 1..16: mol_type = other DNA
ttctcggtaactgcgc

SEQ ID NO: 15965 - DNA, 16 bp, synthetic construct
  misc_feature 1..16: note = synthetic [barcode part1]
  source 1..16: mol_type = other DNA
cggtatagaggactgc

SEQ ID NO: 15966 - DNA, 16 bp, synthetic construct
  misc_feature 1..16: note = synthetic [barcode part1]
  source 1..16: mol_type = other DNA
tgtggcagacgaacgt

SEQ ID NO: 15967 - DNA, 16 bp, synthetic construct
  misc_feature 1..16: note = synthetic [barcode part1]
  source 1..16: mol_type = other DNA
ttctgcactccacact

SEQ ID NO: 15968 - DNA, 16 bp, synthetic construct
  misc_feature 1..16: note = synthetic [barcode part1]
  source 1..16: mol_type = other DNA
tccacgtactggatcc

SEQ ID NO: 15969 - DNA, 16 bp, synthetic construct
  misc_feature 1..16: note = synthetic [barcode part1]
  source 1..16: mol_type = other DNA
tatcggtagagagttg

SEQ ID NO: 15970 - DNA, 16 bp, synthetic construct
  misc_feature 1..16: note = synthetic [barcode part1]
  source 1..16: mol_type = other DNA
gttgttcggacttact

SEQ ID NO: 15971 - DNA, 16 bp, synthetic construct
  misc_feature 1..16: note = synthetic [barcode part1]
  source 1..16: mol_type = other DNA
gagtcttaagactccg

SEQ ID NO: 15972 - DNA, 16 bp, synthetic construct
  misc_feature 1..16: note = synthetic [barcode part1]
  source 1..16: mol_type = other DNA
tggttctcggcgtgtt

SEQ ID NO: 15973 - DNA, 16 bp, synthetic construct
  misc_feature 1..16: note = synthetic [barcode part1]
  source 1..16: mol_type = other DNA
aaggtaacactcagac

SEQ ID NO: 15974 - DNA, 16 bp, synthetic construct
  misc_feature 1..16: note = synthetic [barcode part1]
  source 1..16: mol_type = other DNA
ttggaaccgtctattc

SEQ ID NO: 15975 - DNA, 16 bp, synthetic construct
  misc_feature 1..16: note = synthetic [barcode part1]
  source 1..16: mol_type = other DNA
agagtctcgagatctc

SEQ ID NO: 15976 - DNA, 16 bp, synthetic construct
  misc_feature 1..16: note = synthetic [barcode part1]
  source 1..16: mol_type = other DNA
gtaccaattctcagtc

SEQ ID NO: 15977 - DNA, 16 bp, synthetic construct
  misc_feature 1..16: note = synthetic [barcode part1]
  source 1..16: mol_type = other DNA
gaactaccgttaggtc

SEQ ID NO: 15978 - DNA, 16 bp, synthetic construct
  misc_feature 1..16: note = synthetic [barcode part1]
  source 1..16: mol_type = other DNA
cacctcaacggacttc

SEQ ID NO: 15979 - DNA, 16 bp, synthetic construct
  misc_feature 1..16: note = synthetic [barcode part1]
  source 1..16: mol_type = other DNA
aggaatacaccttcgc

SEQ ID NO: 15980 - DNA, 16 bp, synthetic construct
  misc_feature 1..16: note = synthetic [barcode part1]
  source 1..16: mol_type = other DNA
gtcgtatcgtgaactg

SEQ ID NO: 15981 - DNA, 16 bp, synthetic construct
  misc_feature 1..16: note = synthetic [barcode part1]
  source 1..16: mol_type = other DNA
aatccgaccgaatcac

SEQ ID NO: 15982 - DNA, 16 bp, synthetic construct
  misc_feature 1..16: note = synthetic [barcode part1]
  source 1..16: mol_type = other DNA
tgtacagtgccttgcc

SEQ ID NO: 15983 - DNA, 16 bp, synthetic construct
  misc_feature 1..16: note = synthetic [barcode part1]
  source 1..16: mol_type = other DNA
accgacgactccttac

SEQ ID NO: 15984 - DNA, 16 bp, synthetic construct
  misc_feature 1..16: note = synthetic [barcode part1]
  source 1..16: mol_type = other DNA
tcgtagagttctccgc

SEQ ID NO: 15985 - DNA, 16 bp, synthetic construct
  misc_feature 1..16: note = synthetic [barcode part1]
  source 1..16: mol_type = other DNA
gaggaacgagtacctc

SEQ ID NO: 15986 - DNA, 16 bp, synthetic construct
  misc_feature 1..16: note = synthetic [barcode part1]
  source 1..16: mol_type = other DNA
gccacttcgtctgaac

SEQ ID NO: 15987 - DNA, 16 bp, synthetic construct
  misc_feature 1..16: note = synthetic [barcode part1]
  source 1..16: mol_type = other DNA
gagtatcacgagtctc

SEQ ID NO: 15988 - DNA, 16 bp, synthetic construct
  misc_feature 1..16: note = synthetic [barcode part1]
  source 1..16: mol_type = other DNA
tccttaactccttggc

SEQ ID NO: 15989 - DNA, 16 bp, synthetic construct
  misc_feature 1..16: note = synthetic [barcode part1]
  source 1..16: mol_type = other DNA
tctcaattgtaccgac

SEQ ID NO: 15990 - DNA, 16 bp, synthetic construct
  misc_feature 1..16: note = synthetic [barcode part1]
  source 1..16: mol_type = other DNA
tggtaacaacttggcc

SEQ ID NO: 15991 - DNA, 16 bp, synthetic construct
  misc_feature 1..16: note = synthetic [barcode part1]
  source 1..16: mol_type = other DNA
agtctaggactaccac

SEQ ID NO: 15992 - DNA, 16 bp, synthetic construct
  misc_feature 1..16: note = synthetic [barcode part1]
  source 1..16: mol_type = other DNA
gcaatctcagatcgtg

SEQ ID NO: 15993 - DNA, 16 bp, synthetic construct
  misc_feature 1..16: note = synthetic [barcode part1]
  source 1..16: mol_type = other DNA
tgcctcgacttacggt

SEQ ID NO: 15994 - DNA, 16 bp, synthetic construct
  misc_feature 1..16: note = synthetic [barcode part1]
  source 1..16: mol_type = other DNA
atcctgaacgtcacag

SEQ ID NO: 15995 - DNA, 16 bp, synthetic construct
  misc_feature 1..16: note = synthetic [barcode part1]
  source 1..16: mol_type = other DNA
gtggattgaagtggcc

SEQ ID NO: 15996 - DNA, 16 bp, synthetic construct
  misc_feature 1..16: note = synthetic [barcode part1]
  source 1..16: mol_type = other DNA
atcctcgagtgactcc

SEQ ID NO: 15997 - DNA, 16 bp, synthetic construct
  misc_feature 1..16: note = synthetic [barcode part1]
  source 1..16: mol_type = other DNA
gtgattcacagtccag

SEQ ID NO: 15998 - DNA, 16 bp, synthetic construct
  misc_feature 1..16: note = synthetic [barcode part1]
  source 1..16: mol_type = other DNA
atcctcggaacacaac

SEQ ID NO: 15999 - DNA, 16 bp, synthetic construct
  misc_feature 1..16: note = synthetic [barcode part1]
  source 1..16: mol_type = other DNA
gtagaggatcgaattc

SEQ ID NO: 16000 - DNA, 16 bp, synthetic construct
  misc_feature 1..16: note = synthetic [barcode part1]
  source 1..16: mol_type = other DNA
cctcgtagactactgc

SEQ ID NO: 16001 - DNA, 16 bp, synthetic construct
  misc_feature 1..16: note = synthetic [barcode part1]
  source 1..16: mol_type = other DNA
tgtgtcctgttagatc

SEQ ID NO: 16002 - DNA, 16 bp, synthetic construct
  misc_feature 1..16: note = synthetic [barcode part1]
  source 1..16: mol_type = other DNA
gtctgaacttgtcgcc

SEQ ID NO: 16003 - DNA, 16 bp, synthetic construct
  misc_feature 1..16: note = synthetic [barcode part1]
  source 1..16: mol_type = other DNA
cgtcgaagtgatctgt

SEQ ID NO: 16004 - DNA, 16 bp, synthetic construct
  misc_feature 1..16: note = synthetic [barcode part1]
  source 1..16: mol_type = other DNA
tgcgtaaggaccgaac

SEQ ID NO: 16005 - DNA, 16 bp, synthetic construct
  misc_feature 1..16: note = synthetic [barcode part1]
  source 1..16: mol_type = other DNA
taggttcggtgagacg

SEQ ID NO: 16006 - DNA, 16 bp, synthetic construct
  misc_feature 1..16: note = synthetic [barcode part1]
  source 1..16: mol_type = other DNA
aattggcgagactctc

SEQ ID NO: 16007 - DNA, 16 bp, synthetic construct
  misc_feature 1..16: note = synthetic [barcode part1]
  source 1..16: mol_type = other DNA
aataccgccttctctc

SEQ ID NO: 16008 - DNA, 16 bp, synthetic construct
  misc_feature 1..16: note = synthetic [barcode part1]
  source 1..16: mol_type = other DNA
gtccgttgtcttggac

SEQ ID NO: 16009 - DNA, 16 bp, synthetic construct
  misc_feature 1..16: note = synthetic [barcode part1]
  source 1..16: mol_type = other DNA
tgcacaaggtgataac

SEQ ID NO: 16010 - DNA, 16 bp, synthetic construct
  misc_feature 1..16: note = synthetic [barcode part1]
  source 1..16: mol_type = other DNA
ttctcgaggttcctct

SEQ ID NO: 16011 - DNA, 16 bp, synthetic construct
  misc_feature 1..16: note = synthetic [barcode part1]
  source 1..16: mol_type = other DNA
tcgtgaactgtcgtcc

SEQ ID NO: 16012 - DNA, 16 bp, synthetic construct
  misc_feature 1..16: note = synthetic [barcode part1]
  source 1..16: mol_type = other DNA
cgagtacagtcacgtt

SEQ ID NO: 16013 - DNA, 16 bp, synthetic construct
  misc_feature 1..16: note = synthetic [barcode part1]
  source 1..16: mol_type = other DNA
actacgttggttcttg

SEQ ID NO: 16014 - DNA, 16 bp, synthetic construct
  misc_feature 1..16: note = synthetic [barcode part1]
  source 1..16: mol_type = other DNA
tgttctgactcgtagt

SEQ ID NO: 16015 - DNA, 16 bp, synthetic construct
  misc_feature 1..16: note = synthetic [barcode part1]
  source 1..16: mol_type = other DNA
aaggtgagtccgcagt

SEQ ID NO: 16016 - DNA, 16 bp, synthetic construct
  misc_feature 1..16: note = synthetic [barcode part1]
  source 1..16: mol_type = other DNA
aacggaacacgtcggt

SEQ ID NO: 16017 - DNA, 16 bp, synthetic construct
  misc_feature 1..16: note = synthetic [barcode part1]
  source 1..16: mol_type = other DNA
ccgtagacgaggaact

SEQ ID NO: 16018 - DNA, 16 bp, synthetic construct
  misc_feature 1..16: note = synthetic [barcode part1]
  source 1..16: mol_type = other DNA
agtgacttgacctgac

SEQ ID NO: 16019 - DNA, 16 bp, synthetic construct
  misc_feature 1..16: note = synthetic [barcode part1]
  source 1..16: mol_type = other DNA
cctagattaccggtag

SEQ ID NO: 16020 - DNA, 16 bp, synthetic construct
  misc_feature 1..16: note = synthetic [barcode part1]
  source 1..16: mol_type = other DNA
actgccttatcgttcc

SEQ ID NO: 16021 - DNA, 16 bp, synthetic construct
  misc_feature 1..16: note = synthetic [barcode part1]
  source 1..16: mol_type = other DNA
tgagatctgtggtacc

SEQ ID NO: 16022 - DNA, 16 bp, synthetic construct
  misc_feature 1..16: note = synthetic [barcode part1]
  source 1..16: mol_type = other DNA
ccaaggttgcctgtct

SEQ ID NO: 16023 - DNA, 16 bp, synthetic construct
  misc_feature 1..16: note = synthetic [barcode part1]
  source 1..16: mol_type = other DNA
ttgtgtgactgacgtg

SEQ ID NO: 16024 - DNA, 16 bp, synthetic construct
  misc_feature 1..16: note = synthetic [barcode part1]
  source 1..16: mol_type = other DNA
gacacgtgtgttgact

SEQ ID NO: 16025 - DNA, 16 bp, synthetic construct
  misc_feature 1..16: note = synthetic [barcode part1]
  source 1..16: mol_type = other DNA
ttgaggttatccgttc

SEQ ID NO: 16026 - DNA, 16 bp, synthetic construct
  misc_feature 1..16: note = synthetic [barcode part1]
  source 1..16: mol_type = other DNA
tcgccagtacagagag

SEQ ID NO: 16027 - DNA, 16 bp, synthetic construct
  misc_feature 1..16: note = synthetic [barcode part1]
  source 1..16: mol_type = other DNA
gcagagattcctgtac

SEQ ID NO: 16028 - DNA, 16 bp, synthetic construct
  misc_feature 1..16: note = synthetic [barcode part1]
  source 1..16: mol_type = other DNA
ttgataggtggaggtt

SEQ ID NO: 16029 - DNA, 16 bp, synthetic construct
  misc_feature 1..16: note = synthetic [barcode part1]
  source 1..16: mol_type = other DNA
aacgttgaccagttgc

SEQ ID NO: 16030 - DNA, 16 bp, synthetic construct
  misc_feature 1..16: note = synthetic [barcode part1]
  source 1..16: mol_type = other DNA
taccgtcttcacggac

SEQ ID NO: 16031 - DNA, 16 bp, synthetic construct
  misc_feature 1..16: note = synthetic [barcode part1]
  source 1..16: mol_type = other DNA
tgcgttcctgtatctc

SEQ ID NO: 16032 - DNA, 16 bp, synthetic construct
  misc_feature 1..16: note = synthetic [barcode part1]
  source 1..16: mol_type = other DNA
gtgccaaggttgtgtt

SEQ ID NO: 16033 - DNA, 16 bp, synthetic construct
  misc_feature 1..16: note = synthetic [barcode part1]
  source 1..16: mol_type = other DNA
agagtgactgccttgt

SEQ ID NO: 16034 - DNA, 16 bp, synthetic construct
  misc_feature 1..16: note = synthetic [barcode part1]
  source 1..16: mol_type = other DNA
cagtgatccgaatcac

SEQ ID NO: 16035 - DNA, 16 bp, synthetic construct
  misc_feature 1..16: note = synthetic [barcode part1]
  source 1..16: mol_type = other DNA
ttggtacagtcaagag

SEQ ID NO: 16036 - DNA, 16 bp, synthetic construct
  misc_feature 1..16: note = synthetic [barcode part1]
  source 1..16: mol_type = other DNA
tgtgtcaggagttaag

SEQ ID NO: 16037 - DNA, 16 bp, synthetic construct
  misc_feature 1..16: note = synthetic [barcode part1]
  source 1..16: mol_type = other DNA
gactagtgccaattgc

SEQ ID NO: 16038 - DNA, 16 bp, synthetic construct
  misc_feature 1..16: note = synthetic [barcode part1]
  source 1..16: mol_type = other DNA
actgtaggaacggacc

SEQ ID NO: 16039 - DNA, 16 bp, synthetic construct
  misc_feature 1..16: note = synthetic [barcode part1]
  source 1..16: mol_type = other DNA
tgtgaacttcactgtc

SEQ ID NO: 16040 - DNA, 16 bp, synthetic construct
  misc_feature 1..16: note = synthetic [barcode part1]
  source 1..16: mol_type = other DNA
ttgtgttgagtacggc

SEQ ID NO: 16041 - DNA, 16 bp, synthetic construct
  misc_feature 1..16: note = synthetic [barcode part1]
  source 1..16: mol_type = other DNA
tctgtgtggaggtact

SEQ ID NO: 16042 - DNA, 16 bp, synthetic construct
  misc_feature 1..16: note = synthetic [barcode part1]
  source 1..16: mol_type = other DNA
tctccgattcctcaac

SEQ ID NO: 16043 - DNA, 16 bp, synthetic construct
  misc_feature 1..16: note = synthetic [barcode part1]
  source 1..16: mol_type = other DNA
cgttacctcacgcaac

SEQ ID NO: 16044 - DNA, 16 bp, synthetic construct
  misc_feature 1..16: note = synthetic [barcode part1]
  source 1..16: mol_type = other DNA
ttggtagtgaggacgc

SEQ ID NO: 16045 - DNA, 16 bp, synthetic construct
  misc_feature 1..16: note = synthetic [barcode part1]
  source 1..16: mol_type = other DNA
acgcctcgatccagtt

SEQ ID NO: 16046 - DNA, 16 bp, synthetic construct
  misc_feature 1..16: note = synthetic [barcode part1]
  source 1..16: mol_type = other DNA
agtacgccttctcggt

SEQ ID NO: 16047 - DNA, 16 bp, synthetic construct
  misc_feature 1..16: note = synthetic [barcode part1]
  source 1..16: mol_type = other DNA
actggtgtccagtcct

SEQ ID NO: 16048 - DNA, 16 bp, synthetic construct
  misc_feature 1..16: note = synthetic [barcode part1]
  source 1..16: mol_type = other DNA
agtgatctcgaactgc

SEQ ID NO: 16049 - DNA, 16 bp, synthetic construct
  misc_feature 1..16: note = synthetic [barcode part1]
  source 1..16: mol_type = other DNA
ccacggacgttaatac

SEQ ID NO: 16050 - DNA, 16 bp, synthetic construct
  misc_feature 1..16: note = synthetic [barcode part1]
  source 1..16: mol_type = other DNA
ttcgtactgacaacct

SEQ ID NO: 16051 - DNA, 16 bp, synthetic construct
  misc_feature 1..16: note = synthetic [barcode part1]
  source 1..16: mol_type = other DNA
atcgaacttaccggac

SEQ ID NO: 16052 - DNA, 16 bp, synthetic construct
  misc_feature 1..16: note = synthetic [barcode part1]
  source 1..16: mol_type = other DNA
cctgtgtacacaagac

SEQ ID NO: 16053 - DNA, 16 bp, synthetic construct
  misc_feature 1..16: note = synthetic [barcode part1]
  source 1..16: mol_type = other DNA
ttacacctgttggact

SEQ ID NO: 16054 - DNA, 16 bp, synthetic construct
  misc_feature 1..16: note = synthetic [barcode part1]
  source 1..16: mol_type = other DNA
ataagtccgcgaacct

SEQ ID NO: 16055 - DNA, 16 bp, synthetic construct
  misc_feature 1..16: note = synthetic [barcode part1]
  source 1..16: mol_type = other DNA
gttagacgtgacctac

SEQ ID NO: 16056 - DNA, 16 bp, synthetic construct
  misc_feature 1..16: note = synthetic [barcode part1]
  source 1..16: mol_type = other DNA
tgttggattgtactcc

SEQ ID NO: 16057 - DNA, 16 bp, synthetic construct
  misc_feature 1..16: note = synthetic [barcode part1]
  source 1..16: mol_type = other DNA
ataccggtgtggatct

SEQ ID NO: 16058 - DNA, 16 bp, synthetic construct
  misc_feature 1..16: note = synthetic [barcode part1]
  source 1..16: mol_type = other DNA
acaggaaccgataact

SEQ ID NO: 16059 - DNA, 16 bp, synthetic construct
  misc_feature 1..16: note = synthetic [barcode part1]
  source 1..16: mol_type = other DNA
caacagtatcggactc

SEQ ID NO: 16060 - DNA, 16 bp, synthetic construct
  misc_feature 1..16: note = synthetic [barcode part1]
  source 1..16: mol_type = other DNA
taggactgtaccacac

SEQ ID NO: 16061 - DNA, 16 bp, synthetic construct
  misc_feature 1..16: note = synthetic [barcode part1]
  source 1..16: mol_type = other DNA
caaggacggactgttg

SEQ ID NO: 16062 - DNA, 16 bp, synthetic construct
  misc_feature 1..16: note = synthetic [barcode part1]
  source 1..16: mol_type = other DNA
gcagactacacctagt

SEQ ID NO: 16063 - DNA, 16 bp, synthetic construct
  misc_feature 1..16: note = synthetic [barcode part1]
  source 1..16: mol_type = other DNA
gaactggaactggaag

SEQ ID NO: 16064 - DNA, 16 bp, synthetic construct
  misc_feature 1..16: note = synthetic [barcode part1]
  source 1..16: mol_type = other DNA
tctactgcgcgagtct

SEQ ID NO: 16065 - DNA, 16 bp, synthetic construct
  misc_feature 1..16: note = synthetic [barcode part1]
  source 1..16: mol_type = other DNA
gacttactgccactcg

SEQ ID NO: 16066 - DNA, 16 bp, synthetic construct
  misc_feature 1..16: note = synthetic [barcode part1]
  source 1..16: mol_type = other DNA
tgacggcgaggtatac

SEQ ID NO: 16067 - DNA, 16 bp, synthetic construct
  misc_feature 1..16: note = synthetic [barcode part1]
  source 1..16: mol_type = other DNA
caccgagtctgataac

SEQ ID NO: 16068 - DNA, 16 bp, synthetic construct
  misc_feature 1..16: note = synthetic [barcode part1]
  source 1..16: mol_type = other DNA
tgaacacagtccacac

SEQ ID NO: 16069 - DNA, 16 bp, synthetic construct
  misc_feature 1..16: note = synthetic [barcode part1]
  source 1..16: mol_type = other DNA
actacagagtgtcacc

SEQ ID NO: 16070 - DNA, 16 bp, synthetic construct
  misc_feature 1..16: note = synthetic [barcode part1]
  source 1..16: mol_type = other DNA
acagttgtgacacgtc

SEQ ID NO: 16071 - DNA, 16 bp, synthetic construct
  misc_feature 1..16: note = synthetic [barcode part1]
  source 1..16: mol_type = other DNA
gtacaggactcttgtg

SEQ ID NO: 16072 - DNA, 16 bp, synthetic construct
  misc_feature 1..16: note = synthetic [barcode part1]
  source 1..16: mol_type = other DNA
caccttgtattcgaac

SEQ ID NO: 16073 - DNA, 16 bp, synthetic construct
  misc_feature 1..16: note = synthetic [barcode part1]
  source 1..16: mol_type = other DNA
agtacaacttggtgag

SEQ ID NO: 16074 - DNA, 16 bp, synthetic construct
  misc_feature 1..16: note = synthetic [barcode part1]
  source 1..16: mol_type = other DNA
agtgatattcggacag

SEQ ID NO: 16075 - DNA, 16 bp, synthetic construct
  misc_feature 1..16: note = synthetic [barcode part1]
  source 1..16: mol_type = other DNA
tatcgaacaaggacgt

SEQ ID NO: 16076 - DNA, 16 bp, synthetic construct
  misc_feature 1..16: note = synthetic [barcode part1]
  source 1..16: mol_type = other DNA
ttctgcaatcgttggt

SEQ ID NO: 16077 - DNA, 16 bp, synthetic construct
  misc_feature 1..16: note = synthetic [barcode part1]
  source 1..16: mol_type = other DNA
cgtagattgtcgcctc

SEQ ID NO: 16078 - DNA, 16 bp, synthetic construct
  misc_feature 1..16: note = synthetic [barcode part1]
  source 1..16: mol_type = other DNA
tgttacgcctcagaag

SEQ ID NO: 16079 - DNA, 16 bp, synthetic construct
  misc_feature 1..16: note = synthetic [barcode part1]
  source 1..16: mol_type = other DNA
caagattcgtgcgtgt

SEQ ID NO: 16080 - DNA, 16 bp, synthetic construct
  misc_feature 1..16: note = synthetic [barcode part1]
  source 1..16: mol_type = other DNA
cgtccagaaggtagtg

SEQ ID NO: 16081 - DNA, 16 bp, synthetic construct
  misc_feature 1..16: note = synthetic [barcode part1]
  source 1..16: mol_type = other DNA
ccagtccttacacggt

SEQ ID NO: 16082 - DNA, 16 bp, synthetic construct
  misc_feature 1..16: note = synthetic [barcode part1]
  source 1..16: mol_type = other DNA
gacacgattgtactcg

SEQ ID NO: 16083 - DNA, 16 bp, synthetic construct
  misc_feature 1..16: note = synthetic [barcode part1]
  source 1..16: mol_type = other DNA
accagtgccgtcactt

SEQ ID NO: 16084 - DNA, 16 bp, synthetic construct
  misc_feature 1..16: note = synthetic [barcode part1]
  source 1..16: mol_type = other DNA
cctgttcttcggagtg

SEQ ID NO: 16085 - DNA, 16 bp, synthetic construct
  misc_feature 1..16: note = synthetic [barcode part1]
  source 1..16: mol_type = other DNA
ttaactcgtggccacc

SEQ ID NO: 16086 - DNA, 16 bp, synthetic construct
  misc_feature 1..16: note = synthetic [barcode part1]
  source 1..16: mol_type = other DNA
gttcacttcgtagtgt

SEQ ID NO: 16087 - DNA, 16 bp, synthetic construct
  misc_feature 1..16: note = synthetic [barcode part1]
  source 1..16: mol_type = other DNA
tccggtgtgaattgtg

SEQ ID NO: 16088 - DNA, 16 bp, synthetic construct
  misc_feature 1..16: note = synthetic [barcode part1]
  source 1..16: mol_type = other DNA
cgaagtcggttgactt

SEQ ID NO: 16089 - DNA, 16 bp, synthetic construct
  misc_feature 1..16: note = synthetic [barcode part1]
  source 1..16: mol_type = other DNA
cgttggaagacacggt

SEQ ID NO: 16090 - DNA, 16 bp, synthetic construct
  misc_feature 1..16: note = synthetic [barcode part1]
  source 1..16: mol_type = other DNA
ttcgaagtctcgagac

SEQ ID NO: 16091 - DNA, 16 bp, synthetic construct
  misc_feature 1..16: note = synthetic [barcode part1]
  source 1..16: mol_type = other DNA
tccaccgcaatctctt

SEQ ID NO: 16092 - DNA, 16 bp, synthetic construct
  misc_feature 1..16: note = synthetic [barcode part1]
  source 1..16: mol_type = other DNA
cctagtcttaagaggc

SEQ ID NO: 16093 - DNA, 16 bp, synthetic construct
  misc_feature 1..16: note = synthetic [barcode part1]
  source 1..16: mol_type = other DNA
tctggtctcaaggaac

SEQ ID NO: 16094 - DNA, 16 bp, synthetic construct
  misc_feature 1..16: note = synthetic [barcode part1]
  source 1..16: mol_type = other DNA
gagtcgtacggaggtt

SEQ ID NO: 16095 - DNA, 16 bp, synthetic construct
  misc_feature 1..16: note = synthetic [barcode part1]
  source 1..16: mol_type = other DNA
cggagtctaatactgc

SEQ ID NO: 16096 - DNA, 16 bp, synthetic construct
  misc_feature 1..16: note = synthetic [barcode part1]
  source 1..16: mol_type = other DNA
agacaatatacgaccg

SEQ ID NO: 16097 - DNA, 16 bp, synthetic construct
  misc_feature 1..16: note = synthetic [barcode part1]
  source 1..16: mol_type = other DNA
ccgaagacgtagactg

SEQ ID NO: 16098 - DNA, 16 bp, synthetic construct
  misc_feature 1..16: note = synthetic [barcode part1]
  source 1..16: mol_type = other DNA
gcacttcgtatcttcc

SEQ ID NO: 16099 - DNA, 16 bp, synthetic construct
  misc_feature 1..16: note = synthetic [barcode part1]
  source 1..16: mol_type = other DNA
tctgccgccaagtgtt

SEQ ID NO: 16100 - DNA, 16 bp, synthetic construct
  misc_feature 1..16: note = synthetic [barcode part1]
  source 1..16: mol_type = other DNA
ttacctagatactgcc

SEQ ID NO: 16101 - DNA, 16 bp, synthetic construct
  misc_feature 1..16: note = synthetic [barcode part1]
  source 1..16: mol_type = other DNA
accttatcactggtac

SEQ ID NO: 16102 - DNA, 16 bp, synthetic construct
  misc_feature 1..16: note = synthetic [barcode part1]
  source 1..16: mol_type = other DNA
ttaatacggtcggaag

SEQ ID NO: 16103 - DNA, 16 bp, synthetic construct
  misc_feature 1..16: note = synthetic [barcode part1]
  source 1..16: mol_type = other DNA
atcctatcaagaggcc

SEQ ID NO: 16104 - DNA, 16 bp, synthetic construct
  misc_feature 1..16: note = synthetic [barcode part1]
  source 1..16: mol_type = other DNA
agatctgttcgcagac

SEQ ID NO: 16105 - DNA, 16 bp, synthetic construct
  misc_feature 1..16: note = synthetic [barcode part1]
  source 1..16: mol_type = other DNA
cgcggcgaatattatc

SEQ ID NO: 16106 - DNA, 16 bp, synthetic construct
  misc_feature 1..16: note = synthetic [barcode part1]
  source 1..16: mol_type = other DNA
agtcctcttggatatc

SEQ ID NO: 16107 - DNA, 16 bp, synthetic construct
  misc_feature 1..16: note = synthetic [barcode part1]
  source 1..16: mol_type = other DNA
cggttgactaaccagt

SEQ ID NO: 16108 - DNA, 16 bp, synthetic construct
  misc_feature 1..16: note = synthetic [barcode part1]
  source 1..16: mol_type = other DNA
cggcaatacgcagagt

SEQ ID NO: 16109 - DNA, 16 bp, synthetic construct
  misc_feature 1..16: note = synthetic [barcode part1]
  source 1..16: mol_type = other DNA
gtcaggatacacgacg

SEQ ID NO: 16110 - DNA, 16 bp, synthetic construct
  misc_feature 1..16: note = synthetic [barcode part1]
  source 1..16: mol_type = other DNA
ttgcaacgttgcaacg

SEQ ID NO: 16111 - DNA, 16 bp, synthetic construct
  misc_feature 1..16: note = synthetic [barcode part1]
  source 1..16: mol_type = other DNA
aaccaggatagttacg

SEQ ID NO: 16112 - DNA, 16 bp, synthetic construct
  misc_feature 1..16: note = synthetic [barcode part1]
  source 1..16: mol_type = other DNA
cagtaacctggtagtc

SEQ ID NO: 16113 - DNA, 16 bp, synthetic construct
  misc_feature 1..16: note = synthetic [barcode part1]
  source 1..16: mol_type = other DNA
tacgataggacctcgt

SEQ ID NO: 16114 - DNA, 16 bp, synthetic construct
  misc_feature 1..16: note = synthetic [barcode part1]
  source 1..16: mol_type = other DNA
cacggtaggtactgtt

SEQ ID NO: 16115 - DNA, 16 bp, synthetic construct
  misc_feature 1..16: note = synthetic [barcode part1]
  source 1..16: mol_type = other DNA
acgataccaatcgacc

SEQ ID NO: 16116 - DNA, 16 bp, synthetic construct
  misc_feature 1..16: note = synthetic [barcode part1]
  source 1..16: mol_type = other DNA
tcggcaggaattatcc

SEQ ID NO: 16117 - DNA, 16 bp, synthetic construct
  misc_feature 1..16: note = synthetic [barcode part1]
  source 1..16: mol_type = other DNA
actgtcaggaggtgtg

SEQ ID NO: 16118 - DNA, 16 bp, synthetic construct
  misc_feature 1..16: note = synthetic [barcode part1]
  source 1..16: mol_type = other DNA
cgacggtgttattgac

SEQ ID NO: 16119 - DNA, 16 bp, synthetic construct
  misc_feature 1..16: note = synthetic [barcode part1]
  source 1..16: mol_type = other DNA
gaaccacgagttacct

SEQ ID NO: 16120 - DNA, 16 bp, synthetic construct
  misc_feature 1..16: note = synthetic [barcode part1]
  source 1..16: mol_type = other DNA
ccaataccgtgatcag

SEQ ID NO: 16121 - DNA, 16 bp, synthetic construct
  misc_feature 1..16: note = synthetic [barcode part1]
  source 1..16: mol_type = other DNA
tgtgccttatcagatc

SEQ ID NO: 16122 - DNA, 16 bp, synthetic construct
  misc_feature 1..16: note = synthetic [barcode part1]
  source 1..16: mol_type = other DNA
tacagactcgcgaatc

SEQ ID NO: 16123 - DNA, 16 bp, synthetic construct
  misc_feature 1..16: note = synthetic [barcode part1]
  source 1..16: mol_type = other DNA
tacctccgttgagtcg

SEQ ID NO: 16124 - DNA, 16 bp, synthetic construct
  misc_feature 1..16: note = synthetic [barcode part1]
  source 1..16: mol_type = other DNA
tgcgaccgttatcctg

SEQ ID NO: 16125 - DNA, 16 bp, synthetic construct
  misc_feature 1..16: note = synthetic [barcode part1]
  source 1..16: mol_type = other DNA
gattggcagttggtct

SEQ ID NO: 16126 - DNA, 16 bp, synthetic construct
  misc_feature 1..16: note = synthetic [barcode part1]
  source 1..16: mol_type = other DNA
gttacgtggagattag

SEQ ID NO: 16127 - DNA, 16 bp, synthetic construct
  misc_feature 1..16: note = synthetic [barcode part1]
  source 1..16: mol_type = other DNA
tccttggtgcacaacc

SEQ ID NO: 16128 - DNA, 16 bp, synthetic construct
  misc_feature 1..16: note = synthetic [barcode part1]
  source 1..16: mol_type = other DNA
gtggattgcgttcaac

SEQ ID NO: 16129 - DNA, 16 bp, synthetic construct
  misc_feature 1..16: note = synthetic [barcode part1]
  source 1..16: mol_type = other DNA
acacgatcaactacgc

SEQ ID NO: 16130 - DNA, 16 bp, synthetic construct
  misc_feature 1..16: note = synthetic [barcode part1]
  source 1..16: mol_type = other DNA
acaagtagacgccgtg

SEQ ID NO: 16131 - DNA, 16 bp, synthetic construct
  misc_feature 1..16: note = synthetic [barcode part1]
  source 1..16: mol_type = other DNA
cgtcaatagaggaccg

SEQ ID NO: 16132 - DNA, 16 bp, synthetic construct
  misc_feature 1..16: note = synthetic [barcode part1]
  source 1..16: mol_type = other DNA
tgagaggacgtcagtc

SEQ ID NO: 16133 - DNA, 16 bp, synthetic construct
  misc_feature 1..16: note = synthetic [barcode part1]
  source 1..16: mol_type = other DNA
tgcgcggcaaggaatt

SEQ ID NO: 16134 - DNA, 16 bp, synthetic construct
  misc_feature 1..16: note = synthetic [barcode part1]
  source 1..16: mol_type = other DNA
accgcggttgttcact

SEQ ID NO: 16135 - DNA, 16 bp, synthetic construct
  misc_feature 1..16: note = synthetic [barcode part1]
  source 1..16: mol_type = other DNA
caaggacgttcaatag

SEQ ID NO: 16136 - DNA, 16 bp, synthetic construct
  misc_feature 1..16: note = synthetic [barcode part1]
  source 1..16: mol_type = other DNA
gaggatccaacgtgtg

SEQ ID NO: 16137 - DNA, 16 bp, synthetic construct
  misc_feature 1..16: note = synthetic [barcode part1]
  source 1..16: mol_type = other DNA
gtccaatcggttcaag

SEQ ID NO: 16138 - DNA, 16 bp, synthetic construct
  misc_feature 1..16: note = synthetic [barcode part1]
  source 1..16: mol_type = other DNA
tatcgaccttcctaag

SEQ ID NO: 16139 - DNA, 16 bp, synthetic construct
  misc_feature 1..16: note = synthetic [barcode part1]
  source 1..16: mol_type = other DNA
tgcggtcaaggtagtg

SEQ ID NO: 16140 - DNA, 16 bp, synthetic construct
  misc_feature 1..16: note = synthetic [barcode part1]
  source 1..16: mol_type = other DNA
tctccaacgtacagtt

SEQ ID NO: 16141 - DNA, 16 bp, synthetic construct
  misc_feature 1..16: note = synthetic [barcode part1]
  source 1..16: mol_type = other DNA
gcggtcgttccaactt

SEQ ID NO: 16142 - DNA, 16 bp, synthetic construct
  misc_feature 1..16: note = synthetic [barcode part1]
  source 1..16: mol_type = other DNA
ttgtgttgcggtctgc

SEQ ID NO: 16143 - DNA, 16 bp, synthetic construct
  misc_feature 1..16: note = synthetic [barcode part1]
  source 1..16: mol_type = other DNA
acagaggaacctggtc

SEQ ID NO: 16144 - DNA, 16 bp, synthetic construct
  misc_feature 1..16: note = synthetic [barcode part1]
  source 1..16: mol_type = other DNA
atcggaggttgtgcag

SEQ ID NO: 16145 - DNA, 16 bp, synthetic construct
  misc_feature 1..16: note = synthetic [barcode part1]
  source 1..16: mol_type = other DNA
tctgttgtcaggtgtt

SEQ ID NO: 16146 - DNA, 16 bp, synthetic construct
  misc_feature 1..16: note = synthetic [barcode part1]
  source 1..16: mol_type = other DNA
tgaaccgatcaccagt

SEQ ID NO: 16147 - DNA, 16 bp, synthetic construct
  misc_feature 1..16: note = synthetic [barcode part1]
  source 1..16: mol_type = other DNA
tactggatatccttgc

SEQ ID NO: 16148 - DNA, 16 bp, synthetic construct
  misc_feature 1..16: note = synthetic [barcode part1]
  source 1..16: mol_type = other DNA
ccacactctgttggac

SEQ ID NO: 16149 - DNA, 16 bp, synthetic construct
  misc_feature 1..16: note = synthetic [barcode part1]
  source 1..16: mol_type = other DNA
tggtactacaggcgag

SEQ ID NO: 16150 - DNA, 16 bp, synthetic construct
  misc_feature 1..16: note = synthetic [barcode part1]
  source 1..16: mol_type = other DNA
gttaacgtccgtgaac

SEQ ID NO: 16151 - DNA, 16 bp, synthetic construct
  misc_feature 1..16: note = synthetic [barcode part1]
  source 1..16: mol_type = other DNA
tcttcagtacgcgatt

SEQ ID NO: 16152 - DNA, 16 bp, synthetic construct
  misc_feature 1..16: note = synthetic [barcode part1]
  source 1..16: mol_type = other DNA
gcgttcgatcctactg

SEQ ID NO: 16153 - DNA, 16 bp, synthetic construct
  misc_feature 1..16: note = synthetic [barcode part1]
  source 1..16: mol_type = other DNA
aggtatcggtatctgc

SEQ ID NO: 16154 - DNA, 16 bp, synthetic construct
  misc_feature 1..16: note = synthetic [barcode part1]
  source 1..16: mol_type = other DNA
tatccgaagagtaacg

SEQ ID NO: 16155 - DNA, 16 bp, synthetic construct
  misc_feature 1..16: note = synthetic [barcode part1]
  source 1..16: mol_type = other DNA
gtatctgacctcgtcg

SEQ ID NO: 16156 - DNA, 16 bp, synthetic construct
  misc_feature 1..16: note = synthetic [barcode part1]
  source 1..16: mol_type = other DNA
gtgccagatcactctc

SEQ ID NO: 16157 - DNA, 16 bp, synthetic construct
  misc_feature 1..16: note = synthetic [barcode part1]
  source 1..16: mol_type = other DNA
gaggcagaagtaacgt

SEQ ID NO: 16158 - DNA, 16 bp, synthetic construct
  misc_feature 1..16: note = synthetic [barcode part1]
  source 1..16: mol_type = other DNA
gttacgataggacctc

SEQ ID NO: 16159 - DNA, 16 bp, synthetic construct
  misc_feature 1..16: note = synthetic [barcode part1]
  source 1..16: mol_type = other DNA
agactggcgtgatcag

SEQ ID NO: 16160 - DNA, 16 bp, synthetic construct
  misc_feature 1..16: note = synthetic [barcode part1]
  source 1..16: mol_type = other DNA
ttggttgtcgaccaag

SEQ ID NO: 16161 - DNA, 16 bp, synthetic construct
  misc_feature 1..16: note = synthetic [barcode part1]
  source 1..16: mol_type = other DNA
cggaatcggaactctt

SEQ ID NO: 16162 - DNA, 16 bp, synthetic construct
  misc_feature 1..16: note = synthetic [barcode part1]
  source 1..16: mol_type = other DNA
actgtcagttgaaccg

SEQ ID NO: 16163 - DNA, 16 bp, synthetic construct
  misc_feature 1..16: note = synthetic [barcode part1]
  source 1..16: mol_type = other DNA
gagtcgataatcacag

SEQ ID NO: 16164 - DNA, 16 bp, synthetic construct
  misc_feature 1..16: note = synthetic [barcode part1]
  source 1..16: mol_type = other DNA
cgcgttcgtaacctgt

SEQ ID NO: 16165 - DNA, 16 bp, synthetic construct
  misc_feature 1..16: note = synthetic [barcode part1]
  source 1..16: mol_type = other DNA
cgagaagaacttctcc

SEQ ID NO: 16166 - DNA, 16 bp, synthetic construct
  misc_feature 1..16: note = synthetic [barcode part1]
  source 1..16: mol_type = other DNA
gcacttcttgatagtc

SEQ ID NO: 16167 - DNA, 16 bp, synthetic construct
  misc_feature 1..16: note = synthetic [barcode part1]
  source 1..16: mol_type = other DNA
tgaattggtgcagagt

SEQ ID NO: 16168 - DNA, 16 bp, synthetic construct
  misc_feature 1..16: note = synthetic [barcode part1]
  source 1..16: mol_type = other DNA
gacacttagtgacaag

SEQ ID NO: 16169 - DNA, 16 bp, synthetic construct
  misc_feature 1..16: note = synthetic [barcode part1]
  source 1..16: mol_type = other DNA
ttgtgcagatctcttg

SEQ ID NO: 16170 - DNA, 16 bp, synthetic construct
  misc_feature 1..16: note = synthetic [barcode part1]
  source 1..16: mol_type = other DNA
atcggatagtgcaggc

SEQ ID NO: 16171 - DNA, 16 bp, synthetic construct
  misc_feature 1..16: note = synthetic [barcode part1]
  source 1..16: mol_type = other DNA
gtacttggtggattcg

SEQ ID NO: 16172 - DNA, 16 bp, synthetic construct
  misc_feature 1..16: note = synthetic [barcode part1]
  source 1..16: mol_type = other DNA
ttattccgtgcaatcg

SEQ ID NO: 16173 - DNA, 16 bp, synthetic construct
  misc_feature 1..16: note = synthetic [barcode part1]
  source 1..16: mol_type = other DNA
acaactaggaactggt

SEQ ID NO: 16174 - DNA, 16 bp, synthetic construct
  misc_feature 1..16: note = synthetic [barcode part1]
  source 1..16: mol_type = other DNA
gcgttaggttacttct

SEQ ID NO: 16175 - DNA, 16 bp, synthetic construct
  misc_feature 1..16: note = synthetic [barcode part1]
  source 1..16: mol_type = other DNA
actggtgactctccgt

SEQ ID NO: 16176 - DNA, 16 bp, synthetic construct
  misc_feature 1..16: note = synthetic [barcode part1]
  source 1..16: mol_type = other DNA
tctctcttaacaccgc

SEQ ID NO: 16177 - DNA, 16 bp, synthetic construct
  misc_feature 1..16: note = synthetic [barcode part1]
  source 1..16: mol_type = other DNA
gccagtaggcagtagt

SEQ ID NO: 16178 - DNA, 16 bp, synthetic construct
  misc_feature 1..16: note = synthetic [barcode part1]
  source 1..16: mol_type = other DNA
gacacactacgcgatt

SEQ ID NO: 16179 - DNA, 16 bp, synthetic construct
  misc_feature 1..16: note = synthetic [barcode part1]
  source 1..16: mol_type = other DNA
aaccgagttatcaccg

SEQ ID NO: 16180 - DNA, 16 bp, synthetic construct
  misc_feature 1..16: note = synthetic [barcode part1]
  source 1..16: mol_type = other DNA
cacacgaagtggtggt

SEQ ID NO: 16181 - DNA, 16 bp, synthetic construct
  misc_feature 1..16: note = synthetic [barcode part1]
  source 1..16: mol_type = other DNA
gtgaggttgaggtaag

SEQ ID NO: 16182 - DNA, 16 bp, synthetic construct
  misc_feature 1..16: note = synthetic [barcode part1]
  source 1..16: mol_type = other DNA
aactggcctctctctt

SEQ ID NO: 16183 - DNA, 16 bp, synthetic construct
  misc_feature 1..16: note = synthetic [barcode part1]
  source 1..16: mol_type = other DNA
cactcgtaacaccacc

SEQ ID NO: 16184 - DNA, 16 bp, synthetic construct
  misc_feature 1..16: note = synthetic [barcode part1]
  source 1..16: mol_type = other DNA
tcttagtgagacgacc

SEQ ID NO: 16185 - DNA, 16 bp, synthetic construct
  misc_feature 1..16: note = synthetic [barcode part1]
  source 1..16: mol_type = other DNA
acactctaactaccgt

SEQ ID NO: 16186 - DNA, 16 bp, synthetic construct
  misc_feature 1..16: note = synthetic [barcode part1]
  source 1..16: mol_type = other DNA
tgtactctcgtgtcct

SEQ ID NO: 16187 - DNA, 16 bp, synthetic construct
  misc_feature 1..16: note = synthetic [barcode part1]
  source 1..16: mol_type = other DNA
ccgtaaggtaaggcgt

SEQ ID NO: 16188 - DNA, 16 bp, synthetic construct
  misc_feature 1..16: note = synthetic [barcode part1]
  source 1..16: mol_type = other DNA
gtattctagtctggtc

SEQ ID NO: 16189 - DNA, 16 bp, synthetic construct
  misc_feature 1..16: note = synthetic [barcode part1]
  source 1..16: mol_type = other DNA
tacggatcttaggtgc

SEQ ID NO: 16190 - DNA, 16 bp, synthetic construct
  misc_feature 1..16: note = synthetic [barcode part1]
  source 1..16: mol_type = other DNA
gtctccagtaaggatc

SEQ ID NO: 16191 - DNA, 16 bp, synthetic construct
  misc_feature 1..16: note = synthetic [barcode part1]
  source 1..16: mol_type = other DNA
aagtacacgtgtctcg

SEQ ID NO: 16192 - DNA, 16 bp, synthetic construct
  misc_feature 1..16: note = synthetic [barcode part1]
  source 1..16: mol_type = other DNA
gtccgcagttacttcg

SEQ ID NO: 16193 - DNA, 16 bp, synthetic construct
  misc_feature 1..16: note = synthetic [barcode part1]
  source 1..16: mol_type = other DNA
gcgttatcaggcagag

SEQ ID NO: 16194 - DNA, 16 bp, synthetic construct
  misc_feature 1..16: note = synthetic [barcode part1]
  source 1..16: mol_type = other DNA
aagttgtgccttcgtt

SEQ ID NO: 16195 - DNA, 16 bp, synthetic construct
  misc_feature 1..16: note = synthetic [barcode part1]
  source 1..16: mol_type = other DNA
gtaactgtggttacgc

SEQ ID NO: 16196 - DNA, 16 bp, synthetic construct
  misc_feature 1..16: note = synthetic [barcode part1]
  source 1..16: mol_type = other DNA
aacacgtagaatcgac

SEQ ID NO: 16197 - DNA, 16 bp, synthetic construct
  misc_feature 1..16: note = synthetic [barcode part1]
  source 1..16: mol_type = other DNA
actctcgtgccagatc

SEQ ID NO: 16198 - DNA, 16 bp, synthetic construct
  misc_feature 1..16: note = synthetic [barcode part1]
  source 1..16: mol_type = other DNA
gaccgcgttaacctct

SEQ ID NO: 16199 - DNA, 16 bp, synthetic construct
  misc_feature 1..16: note = synthetic [barcode part1]
  source 1..16: mol_type = other DNA
tgagtcgtctcgtatt

SEQ ID NO: 16200 - DNA, 16 bp, synthetic construct
  misc_feature 1..16: note = synthetic [barcode part1]
  source 1..16: mol_type = other DNA
tgcaggccttgttacc

SEQ ID NO: 16201 - DNA, 16 bp, synthetic construct
  misc_feature 1..16: note = synthetic [barcode part1]
  source 1..16: mol_type = other DNA
gtcgattggaattccg

SEQ ID NO: 16202 - DNA, 16 bp, synthetic construct
  misc_feature 1..16: note = synthetic [barcode part1]
  source 1..16: mol_type = other DNA
gtgtgcaatatcgcgt

SEQ ID NO: 16203 - DNA, 16 bp, synthetic construct
  misc_feature 1..16: note = synthetic [barcode part1]
  source 1..16: mol_type = other DNA
gtagattctggcacgt

SEQ ID NO: 16204 - DNA, 16 bp, synthetic construct
  misc_feature 1..16: note = synthetic [barcode part1]
  source 1..16: mol_type = other DNA
cacactctaccagacc

SEQ ID NO: 16205 - DNA, 16 bp, synthetic construct
  misc_feature 1..16: note = synthetic [barcode part1]
  source 1..16: mol_type = other DNA
aggtctaccaccactc

SEQ ID NO: 16206 - DNA, 16 bp, synthetic construct
  misc_feature 1..16: note = synthetic [barcode part1]
  source 1..16: mol_type = other DNA
ttaagactccgtctgt

SEQ ID NO: 16207 - DNA, 16 bp, synthetic construct
  misc_feature 1..16: note = synthetic [barcode part1]
  source 1..16: mol_type = other DNA
gattcgtgataagacg

SEQ ID NO: 16208 - DNA, 16 bp, synthetic construct
  misc_feature 1..16: note = synthetic [barcode part1]
  source 1..16: mol_type = other DNA
gaagtaagtggatctc

SEQ ID NO: 16209 - DNA, 16 bp, synthetic construct
  misc_feature 1..16: note = synthetic [barcode part1]
  source 1..16: mol_type = other DNA
cggagagaatcttcct

SEQ ID NO: 16210 - DNA, 16 bp, synthetic construct
  misc_feature 1..16: note = synthetic [barcode part1]
  source 1..16: mol_type = other DNA
taagaactgttggacg

SEQ ID NO: 16211 - DNA, 16 bp, synthetic construct
  misc_feature 1..16: note = synthetic [barcode part1]
  source 1..16: mol_type = other DNA
gcctgccagtgttatc

SEQ ID NO: 16212 - DNA, 16 bp, synthetic construct
  misc_feature 1..16: note = synthetic [barcode part1]
  source 1..16: mol_type = other DNA
tatagttgcgtgaccg

SEQ ID NO: 16213 - DNA, 16 bp, synthetic construct
  misc_feature 1..16: note = synthetic [barcode part1]
  source 1..16: mol_type = other DNA
ccacggaatcctctac

SEQ ID NO: 16214 - DNA, 16 bp, synthetic construct
  misc_feature 1..16: note = synthetic [barcode part1]
  source 1..16: mol_type = other DNA
gcagattccttcaatc

SEQ ID NO: 16215 - DNA, 16 bp, synthetic construct
  misc_feature 1..16: note = synthetic [barcode part1]
  source 1..16: mol_type = other DNA
gaacgaaggcgtcgtt

SEQ ID NO: 16216 - DNA, 16 bp, synthetic construct
  misc_feature 1..16: note = synthetic [barcode part1]
  source 1..16: mol_type = other DNA
actgcggaatactgtc

SEQ ID NO: 16217 - DNA, 16 bp, synthetic construct
  misc_feature 1..16: note = synthetic [barcode part1]
  source 1..16: mol_type = other DNA
cagactagtattctcc

SEQ ID NO: 16218 - DNA, 16 bp, synthetic construct
  misc_feature 1..16: note = synthetic [barcode part1]
  source 1..16: mol_type = other DNA
atcaacctgcacacag

SEQ ID NO: 16219 - DNA, 16 bp, synthetic construct
  misc_feature 1..16: note = synthetic [barcode part1]
  source 1..16: mol_type = other DNA
agttcagttggcaacc

SEQ ID NO: 16220 - DNA, 16 bp, synthetic construct
  misc_feature 1..16: note = synthetic [barcode part1]
  source 1..16: mol_type = other DNA
aaggaagttccgagag

SEQ ID NO: 16221 - DNA, 16 bp, synthetic construct
  misc_feature 1..16: note = synthetic [barcode part1]
  source 1..16: mol_type = other DNA
tgtgaaccaccgttcc

SEQ ID NO: 16222 - DNA, 16 bp, synthetic construct
  misc_feature 1..16: note = synthetic [barcode part1]
  source 1..16: mol_type = other DNA
caccaccaggtgttct

SEQ ID NO: 16223 - DNA, 16 bp, synthetic construct
  misc_feature 1..16: note = synthetic [barcode part1]
  source 1..16: mol_type = other DNA
aagaatcgcgttaacg

SEQ ID NO: 16224 - DNA, 16 bp, synthetic construct
  misc_feature 1..16: note = synthetic [barcode part1]
  source 1..16: mol_type = other DNA
tccgacttggttgtgc

SEQ ID NO: 16225 - DNA, 16 bp, synthetic construct
  misc_feature 1..16: note = synthetic [barcode part1]
  source 1..16: mol_type = other DNA
cagtagtgaagtgcgc

SEQ ID NO: 16226 - DNA, 16 bp, synthetic construct
  misc_feature 1..16: note = synthetic [barcode part1]
  source 1..16: mol_type = other DNA
cctatcgcgtatcgac

SEQ ID NO: 16227 - DNA, 16 bp, synthetic construct
  misc_feature 1..16: note = synthetic [barcode part1]
  source 1..16: mol_type = other DNA
tgcctatccgttcact

SEQ ID NO: 16228 - DNA, 16 bp, synthetic construct
  misc_feature 1..16: note = synthetic [barcode part1]
  source 1..16: mol_type = other DNA
agttcagtggtgatcc

SEQ ID NO: 16229 - DNA, 16 bp, synthetic construct
  misc_feature 1..16: note = synthetic [barcode part1]
  source 1..16: mol_type = other DNA
cgtcctgttgttctgt

SEQ ID NO: 16230 - DNA, 16 bp, synthetic construct
  misc_feature 1..16: note = synthetic [barcode part1]
  source 1..16: mol_type = other DNA
atcgacttgcacgtag

SEQ ID NO: 16231 - DNA, 16 bp, synthetic construct
  misc_feature 1..16: note = synthetic [barcode part1]
  source 1..16: mol_type = other DNA
cgcaacgagtgaacac

SEQ ID NO: 16232 - DNA, 16 bp, synthetic construct
  misc_feature 1..16: note = synthetic [barcode part1]
  source 1..16: mol_type = other DNA
tatacgcgtatacgcg

SEQ ID NO: 16233 - DNA, 16 bp, synthetic construct
  misc_feature 1..16: note = synthetic [barcode part1]
  source 1..16: mol_type = other DNA
cgtaggaaccggattg

SEQ ID NO: 16234 - DNA, 16 bp, synthetic construct
  misc_feature 1..16: note = synthetic [barcode part1]
  source 1..16: mol_type = other DNA
gacctaacttcacgcc

SEQ ID NO: 16235 - DNA, 16 bp, synthetic construct
  misc_feature 1..16: note = synthetic [barcode part1]
  source 1..16: mol_type = other DNA
tcggtctcaggttcac

SEQ ID NO: 16236 - DNA, 16 bp, synthetic construct
  misc_feature 1..16: note = synthetic [barcode part1]
  source 1..16: mol_type = other DNA
gtctggaacgaactct

SEQ ID NO: 16237 - DNA, 16 bp, synthetic construct
  misc_feature 1..16: note = synthetic [barcode part1]
  source 1..16: mol_type = other DNA
tcgcgaagagtcaggt

SEQ ID NO: 16238 - DNA, 16 bp, synthetic construct
  misc_feature 1..16: note = synthetic [barcode part1]
  source 1..16: mol_type = other DNA
gattctcctctcgact

SEQ ID NO: 16239 - DNA, 16 bp, synthetic construct
  misc_feature 1..16: note = synthetic [barcode part1]
  source 1..16: mol_type = other DNA
gcggccagattagagt

SEQ ID NO: 16240 - DNA, 16 bp, synthetic construct
  misc_feature 1..16: note = synthetic [barcode part1]
  source 1..16: mol_type = other DNA
tacaaccgttgttctg

SEQ ID NO: 16241 - DNA, 16 bp, synthetic construct
  misc_feature 1..16: note = synthetic [barcode part1]
  source 1..16: mol_type = other DNA
cctactgaagagttgc

SEQ ID NO: 16242 - DNA, 16 bp, synthetic construct
  misc_feature 1..16: note = synthetic [barcode part1]
  source 1..16: mol_type = other DNA
acgcctgaatactcag

SEQ ID NO: 16243 - DNA, 16 bp, synthetic construct
  misc_feature 1..16: note = synthetic [barcode part1]
  source 1..16: mol_type = other DNA
actacgtacacctgag

SEQ ID NO: 16244 - DNA, 16 bp, synthetic construct
  misc_feature 1..16: note = synthetic [barcode part1]
  source 1..16: mol_type = other DNA
tcaattcttacgcgac

SEQ ID NO: 16245 - DNA, 16 bp, synthetic construct
  misc_feature 1..16: note = synthetic [barcode part1]
  source 1..16: mol_type = other DNA
cgagagactctaatcc

SEQ ID NO: 16246 - DNA, 16 bp, synthetic construct
  misc_feature 1..16: note = synthetic [barcode part1]
  source 1..16: mol_type = other DNA
ttaccagattggaccg

SEQ ID NO: 16247 - DNA, 16 bp, synthetic construct
  misc_feature 1..16: note = synthetic [barcode part1]
  source 1..16: mol_type = other DNA
aagactctcgtagtgc

SEQ ID NO: 16248 - DNA, 16 bp, synthetic construct
  misc_feature 1..16: note = synthetic [barcode part1]
  source 1..16: mol_type = other DNA
tccaatcgacctctct

SEQ ID NO: 16249 - DNA, 16 bp, synthetic construct
  misc_feature 1..16: note = synthetic [barcode part1]
  source 1..16: mol_type = other DNA
cagtcctggaattgac

SEQ ID NO: 16250 - DNA, 16 bp, synthetic construct
  misc_feature 1..16: note = synthetic [barcode part1]
  source 1..16: mol_type = other DNA
actcgtctactacggc

SEQ ID NO: 16251 - DNA, 16 bp, synthetic construct
  misc_feature 1..16: note = synthetic [barcode part1]
  source 1..16: mol_type = other DNA
aagtctctctcaggag

SEQ ID NO: 16252 - DNA, 16 bp, synthetic construct
  misc_feature 1..16: note = synthetic [barcode part1]
  source 1..16: mol_type = other DNA
tcagatctacgttctg

SEQ ID NO: 16253 - DNA, 16 bp, synthetic construct
  misc_feature 1..16: note = synthetic [barcode part1]
  source 1..16: mol_type = other DNA
aatacagacttggcag

SEQ ID NO: 16254 - DNA, 16 bp, synthetic construct
  misc_feature 1..16: note = synthetic [barcode part1]
  source 1..16: mol_type = other DNA
aggccaagaggttaag

SEQ ID NO: 16255 - DNA, 16 bp, synthetic construct
  misc_feature 1..16: note = synthetic [barcode part1]
  source 1..16: mol_type = other DNA
tataactgcgtggtcg

SEQ ID NO: 16256 - DNA, 16 bp, synthetic construct
  misc_feature 1..16: note = synthetic [barcode part1]
  source 1..16: mol_type = other DNA
ttcggtaagacgtaag

SEQ ID NO: 16257 - DNA, 16 bp, synthetic construct
  misc_feature 1..16: note = synthetic [barcode part1]
  source 1..16: mol_type = other DNA
cctaagagtgtacacc

SEQ ID NO: 16258 - DNA, 16 bp, synthetic construct
  misc_feature 1..16: note = synthetic [barcode part1]
  source 1..16: mol_type = other DNA
gtaccggttctcaacc

SEQ ID NO: 16259 - DNA, 16 bp, synthetic construct
  misc_feature 1..16: note = synthetic [barcode part1]
  source 1..16: mol_type = other DNA
gcggtaatccaattcg

SEQ ID NO: 16260 - DNA, 16 bp, synthetic construct
  misc_feature 1..16: note = synthetic [barcode part1]
  source 1..16: mol_type = other DNA
tcggagattcctagtg

SEQ ID NO: 16261 - DNA, 16 bp, synthetic construct
  misc_feature 1..16: note = synthetic [barcode part1]
  source 1..16: mol_type = other DNA
atctaggaacgtctgc

SEQ ID NO: 16262 - DNA, 16 bp, synthetic construct
  misc_feature 1..16: note = synthetic [barcode part1]
  source 1..16: mol_type = other DNA
gtggtcctacttccag

SEQ ID NO: 16263 - DNA, 16 bp, synthetic construct
  misc_feature 1..16: note = synthetic [barcode part1]
  source 1..16: mol_type = other DNA
cgtcgacgattggaag

SEQ ID NO: 16264 - DNA, 16 bp, synthetic construct
  misc_feature 1..16: note = synthetic [barcode part1]
  source 1..16: mol_type = other DNA
gaactgcgtccttatt

SEQ ID NO: 16265 - DNA, 16 bp, synthetic construct
  misc_feature 1..16: note = synthetic [barcode part1]
  source 1..16: mol_type = other DNA
tcgtgtagtattggcg

SEQ ID NO: 16266 - DNA, 16 bp, synthetic construct
  misc_feature 1..16: note = synthetic [barcode part1]
  source 1..16: mol_type = other DNA
acgaaggaactcggtc

SEQ ID NO: 16267 - DNA, 16 bp, synthetic construct
  misc_feature 1..16: note = synthetic [barcode part1]
  source 1..16: mol_type = other DNA
tgtccgtacttgtctc

SEQ ID NO: 16268 - DNA, 16 bp, synthetic construct
  misc_feature 1..16: note = synthetic [barcode part1]
  source 1..16: mol_type = other DNA
gacctcgagtggatag

SEQ ID NO: 16269 - DNA, 16 bp, synthetic construct
  misc_feature 1..16: note = synthetic [barcode part1]
  source 1..16: mol_type = other DNA
caggatcctgattggt

SEQ ID NO: 16270 - DNA, 16 bp, synthetic construct
  misc_feature 1..16: note = synthetic [barcode part1]
  source 1..16: mol_type = other DNA
aacacctatccttcag

SEQ ID NO: 16271 - DNA, 16 bp, synthetic construct
  misc_feature 1..16: note = synthetic [barcode part1]
  source 1..16: mol_type = other DNA
cggatactgcgaatct

SEQ ID NO: 16272 - DNA, 16 bp, synthetic construct
  misc_feature 1..16: note = synthetic [barcode part1]
  source 1..16: mol_type = other DNA
cgttgtcgacgtactc

SEQ ID NO: 16273 - DNA, 16 bp, synthetic construct
  misc_feature 1..16: note = synthetic [barcode part1]
  source 1..16: mol_type = other DNA
gcacaccagtgacaag

SEQ ID NO: 16274 - DNA, 16 bp, synthetic construct
  misc_feature 1..16: note = synthetic [barcode part1]
  source 1..16: mol_type = other DNA
atccaccttactcacc

SEQ ID NO: 16275 - DNA, 16 bp, synthetic construct
  misc_feature 1..16: note = synthetic [barcode part1]
  source 1..16: mol_type = other DNA
tgtggcgtctacttgc

SEQ ID NO: 16276 - DNA, 16 bp, synthetic construct
  misc_feature 1..16: note = synthetic [barcode part1]
  source 1..16: mol_type = other DNA
gtattagtcctgtcgt

SEQ ID NO: 16277 - DNA, 16 bp, synthetic construct
  misc_feature 1..16: note = synthetic [barcode part1]
  source 1..16: mol_type = other DNA
tatctctctctcgcag

SEQ ID NO: 16278 - DNA, 16 bp, synthetic construct
  misc_feature 1..16: note = synthetic [barcode part1]
  source 1..16: mol_type = other DNA
cgtgttaaggattgag

SEQ ID NO: 16279 - DNA, 16 bp, synthetic construct
  misc_feature 1..16: note = synthetic [barcode part1]
  source 1..16: mol_type = other DNA
cactcctccagatcag

SEQ ID NO: 16280 - DNA, 16 bp, synthetic construct
  misc_feature 1..16: note = synthetic [barcode part1]
  source 1..16: mol_type = other DNA
gactaactgtaacgcc

SEQ ID NO: 16281 - DNA, 16 bp, synthetic construct
  misc_feature 1..16: note = synthetic [barcode part1]
  source 1..16: mol_type = other DNA
tctgttaagttcacgc

SEQ ID NO: 16282 - DNA, 16 bp, synthetic construct
  misc_feature 1..16: note = synthetic [barcode part1]
  source 1..16: mol_type = other DNA
tacgatccgtaccaag

SEQ ID NO: 16283 - DNA, 16 bp, synthetic construct
  misc_feature 1..16: note = synthetic [barcode part1]
  source 1..16: mol_type = other DNA
cgcacttgagttattc

SEQ ID NO: 16284 - DNA, 16 bp, synthetic construct
  misc_feature 1..16: note = synthetic [barcode part1]
  source 1..16: mol_type = other DNA
gtgattcacgaggacg

SEQ ID NO: 16285 - DNA, 16 bp, synthetic construct
  misc_feature 1..16: note = synthetic [barcode part1]
  source 1..16: mol_type = other DNA
aagtccttgcgtgtag

SEQ ID NO: 16286 - DNA, 16 bp, synthetic construct
  misc_feature 1..16: note = synthetic [barcode part1]
  source 1..16: mol_type = other DNA
acaacggatccaggtg

SEQ ID NO: 16287 - DNA, 16 bp, synthetic construct
  misc_feature 1..16: note = synthetic [barcode part1]
  source 1..16: mol_type = other DNA
acgtatcttgttgtcg

SEQ ID NO: 16288 - DNA, 16 bp, synthetic construct
  misc_feature 1..16: note = synthetic [barcode part1]
  source 1..16: mol_type = other DNA
atcttcactcgtgtcc

SEQ ID NO: 16289 - DNA, 16 bp, synthetic construct
  misc_feature 1..16: note = synthetic [barcode part1]
  source 1..16: mol_type = other DNA
ttgaggcacctgcctt

SEQ ID NO: 16290 - DNA, 16 bp, synthetic construct
  misc_feature 1..16: note = synthetic [barcode part1]
  source 1..16: mol_type = other DNA
tcaattccaccggtgc

SEQ ID NO: 16291 - DNA, 16 bp, synthetic construct
  misc_feature 1..16: note = synthetic [barcode part1]
  source 1..16: mol_type = other DNA
agatccgtctagttct

SEQ ID NO: 16292 - DNA, 16 bp, synthetic construct
  misc_feature 1..16: note = synthetic [barcode part1]
  source 1..16: mol_type = other DNA
gagttcttgaccagtg

SEQ ID NO: 16293 - DNA, 16 bp, synthetic construct
  misc_feature 1..16: note = synthetic [barcode part1]
  source 1..16: mol_type = other DNA
cagtctagtcctcgtg

SEQ ID NO: 16294 - DNA, 16 bp, synthetic construct
  misc_feature 1..16: note = synthetic [barcode part1]
  source 1..16: mol_type = other DNA
cacgagtaacgttcgt

SEQ ID NO: 16295 - DNA, 16 bp, synthetic construct
  misc_feature 1..16: note = synthetic [barcode part1]
  source 1..16: mol_type = other DNA
ttcaaggcgaccaatc

SEQ ID NO: 16296 - DNA, 16 bp, synthetic construct
  misc_feature 1..16: note = synthetic [barcode part1]
  source 1..16: mol_type = other DNA
tactcgatcgacgtag

SEQ ID NO: 16297 - DNA, 16 bp, synthetic construct
  misc_feature 1..16: note = synthetic [barcode part1]
  source 1..16: mol_type = other DNA
actgagttgcctctgc

SEQ ID NO: 16298 - DNA, 16 bp, synthetic construct
  misc_feature 1..16: note = synthetic [barcode part1]
  source 1..16: mol_type = other DNA
tacgacgcgttgtagt

SEQ ID NO: 16299 - DNA, 16 bp, synthetic construct
  misc_feature 1..16: note = synthetic [barcode part1]
  source 1..16: mol_type = other DNA
cgtgaagttgagttag

SEQ ID NO: 16300 - DNA, 16 bp, synthetic construct
  misc_feature 1..16: note = synthetic [barcode part1]
  source 1..16: mol_type = other DNA
tcaagtatcacctcgt

SEQ ID NO: 16301 - DNA, 16 bp, synthetic construct
  misc_feature 1..16: note = synthetic [barcode part1]
  source 1..16: mol_type = other DNA
gcctgtcaagtcctgt

SEQ ID NO: 16302 - DNA, 16 bp, synthetic construct
  misc_feature 1..16: note = synthetic [barcode part1]
  source 1..16: mol_type = other DNA
ttgatagacggcctgt

SEQ ID NO: 16303 - DNA, 16 bp, synthetic construct
  misc_feature 1..16: note = synthetic [barcode part1]
  source 1..16: mol_type = other DNA
actcaacaccactgag

SEQ ID NO: 16304 - DNA, 16 bp, synthetic construct
  misc_feature 1..16: note = synthetic [barcode part1]
  source 1..16: mol_type = other DNA
ttgcgccgaatcacct

SEQ ID NO: 16305 - DNA, 16 bp, synthetic construct
  misc_feature 1..16: note = synthetic [barcode part1]
  source 1..16: mol_type = other DNA
agacaatcgcagattg

SEQ ID NO: 16306 - DNA, 16 bp, synthetic construct
  misc_feature 1..16: note = synthetic [barcode part1]
  source 1..16: mol_type = other DNA
atacctgtatcacctg

SEQ ID NO: 16307 - DNA, 16 bp, synthetic construct
  misc_feature 1..16: note = synthetic [barcode part1]
  source 1..16: mol_type = other DNA
accaacgattcttcgt

SEQ ID NO: 16308 - DNA, 16 bp, synthetic construct
  misc_feature 1..16: note = synthetic [barcode part1]
  source 1..16: mol_type = other DNA
agtcaacacacacacc

SEQ ID NO: 16309 - DNA, 16 bp, synthetic construct
  misc_feature 1..16: note = synthetic [barcode part1]
  source 1..16: mol_type = other DNA
tataacaacggcgtcc

SEQ ID NO: 16310 - DNA, 16 bp, synthetic construct
  misc_feature 1..16: note = synthetic [barcode part1]
  source 1..16: mol_type = other DNA
tgtcgagttcggtagt

SEQ ID NO: 16311 - DNA, 16 bp, synthetic construct
  misc_feature 1..16: note = synthetic [barcode part1]
  source 1..16: mol_type = other DNA
tctaatcgtgcgccac

SEQ ID NO: 16312 - DNA, 16 bp, synthetic construct
  misc_feature 1..16: note = synthetic [barcode part1]
  source 1..16: mol_type = other DNA
cctcgagacaagtgag

SEQ ID NO: 16313 - DNA, 16 bp, synthetic construct
  misc_feature 1..16: note = synthetic [barcode part1]
  source 1..16: mol_type = other DNA
cgtccactgagactct

SEQ ID NO: 16314 - DNA, 16 bp, synthetic construct
  misc_feature 1..16: note = synthetic [barcode part1]
  source 1..16: mol_type = other DNA
atacgtccgtctcacg

SEQ ID NO: 16315 - DNA, 16 bp, synthetic construct
  misc_feature 1..16: note = synthetic [barcode part1]
  source 1..16: mol_type = other DNA
ttccagatactcgttg

SEQ ID NO: 16316 - DNA, 16 bp, synthetic construct
  misc_feature 1..16: note = synthetic [barcode part1]
  source 1..16: mol_type = other DNA
gtggtcgccttgattc

SEQ ID NO: 16317 - DNA, 16 bp, synthetic construct
  misc_feature 1..16: note = synthetic [barcode part1]
  source 1..16: mol_type = other DNA
caatcttggttcctcc

SEQ ID NO: 16318 - DNA, 16 bp, synthetic construct
  misc_feature 1..16: note = synthetic [barcode part1]
  source 1..16: mol_type = other DNA
aacactgtgacgttgc

SEQ ID NO: 16319 - DNA, 16 bp, synthetic construct
  misc_feature 1..16: note = synthetic [barcode part1]
  source 1..16: mol_type = other DNA
acttaccgtggacagt

SEQ ID NO: 16320 - DNA, 16 bp, synthetic construct
  misc_feature 1..16: note = synthetic [barcode part1]
  source 1..16: mol_type = other DNA
actcttaacagaggcc

SEQ ID NO: 16321 - DNA, 16 bp, synthetic construct
  misc_feature 1..16: note = synthetic [barcode part1]
  source 1..16: mol_type = other DNA
ttggtcagtacacgtg

SEQ ID NO: 16322 - DNA, 16 bp, synthetic construct
  misc_feature 1..16: note = synthetic [barcode part1]
  source 1..16: mol_type = other DNA
tgcgcgatcactgttc

SEQ ID NO: 16323 - DNA, 16 bp, synthetic construct
  misc_feature 1..16: note = synthetic [barcode part1]
  source 1..16: mol_type = other DNA
actgacaataaccgcc

SEQ ID NO: 16324 - DNA, 16 bp, synthetic construct
  misc_feature 1..16: note = synthetic [barcode part1]
  source 1..16: mol_type = other DNA
gcaattggattctctc

SEQ ID NO: 16325 - DNA, 16 bp, synthetic construct
  misc_feature 1..16: note = synthetic [barcode part1]
  source 1..16: mol_type = other DNA
tcttcgatcaggaggt

SEQ ID NO: 16326 - DNA, 16 bp, synthetic construct
  misc_feature 1..16: note = synthetic [barcode part1]
  source 1..16: mol_type = other DNA
ttcacgtaaccactgt

SEQ ID NO: 16327 - DNA, 16 bp, synthetic construct
  misc_feature 1..16: note = synthetic [barcode part1]
  source 1..16: mol_type = other DNA
gtgtcctgtattctcc

SEQ ID NO: 16328 - DNA, 16 bp, synthetic construct
  misc_feature 1..16: note = synthetic [barcode part1]
  source 1..16: mol_type = other DNA
actaccaactgtcgag

SEQ ID NO: 16329 - DNA, 16 bp, synthetic construct
  misc_feature 1..16: note = synthetic [barcode part1]
  source 1..16: mol_type = other DNA
cgttactagtgtacct

SEQ ID NO: 16330 - DNA, 16 bp, synthetic construct
  misc_feature 1..16: note = synthetic [barcode part1]
  source 1..16: mol_type = other DNA
acttcacaggcgcctt

SEQ ID NO: 16331 - DNA, 16 bp, synthetic construct
  misc_feature 1..16: note = synthetic [barcode part1]
  source 1..16: mol_type = other DNA
cacaccttagattgtc

SEQ ID NO: 16332 - DNA, 16 bp, synthetic construct
  misc_feature 1..16: note = synthetic [barcode part1]
  source 1..16: mol_type = other DNA
attggacctgtattcc

SEQ ID NO: 16333 - DNA, 16 bp, synthetic construct
  misc_feature 1..16: note = synthetic [barcode part1]
  source 1..16: mol_type = other DNA
ccacttcactaggaag

SEQ ID NO: 16334 - DNA, 16 bp, synthetic construct
  misc_feature 1..16: note = synthetic [barcode part1]
  source 1..16: mol_type = other DNA
ccgattctgagttcgc

SEQ ID NO: 16335 - DNA, 16 bp, synthetic construct
  misc_feature 1..16: note = synthetic [barcode part1]
  source 1..16: mol_type = other DNA
gccaacgtactgatac

SEQ ID NO: 16336 - DNA, 16 bp, synthetic construct
  misc_feature 1..16: note = synthetic [barcode part1]
  source 1..16: mol_type = other DNA
accgatagttctccgc

SEQ ID NO: 16337 - DNA, 16 bp, synthetic construct
  misc_feature 1..16: note = synthetic [barcode part1]
  source 1..16: mol_type = other DNA
gaatcgtgacgattcc

SEQ ID NO: 16338 - DNA, 16 bp, synthetic construct
  misc_feature 1..16: note = synthetic [barcode part1]
  source 1..16: mol_type = other DNA
atagacctctcgtcgc

SEQ ID NO: 16339 - DNA, 16 bp, synthetic construct
  misc_feature 1..16: note = synthetic [barcode part1]
  source 1..16: mol_type = other DNA
atcgcgattgcaacgt

SEQ ID NO: 16340 - DNA, 16 bp, synthetic construct
  misc_feature 1..16: note = synthetic [barcode part1]
  source 1..16: mol_type = other DNA
acttgtggtacaaccg

SEQ ID NO: 16341 - DNA, 16 bp, synthetic construct
  misc_feature 1..16: note = synthetic [barcode part1]
  source 1..16: mol_type = other DNA
cgttctcttgaatcag

SEQ ID NO: 16342 - DNA, 16 bp, synthetic construct
  misc_feature 1..16: note = synthetic [barcode part1]
  source 1..16: mol_type = other DNA
agttaactgcgtgcgt

SEQ ID NO: 16343 - DNA, 16 bp, synthetic construct
  misc_feature 1..16: note = synthetic [barcode part1]
  source 1..16: mol_type = other DNA
cgagttatcggactac

SEQ ID NO: 16344 - DNA, 16 bp, synthetic construct
  misc_feature 1..16: note = synthetic [barcode part1]
  source 1..16: mol_type = other DNA
gtggcgtattgtagtc

SEQ ID NO: 16345 - DNA, 16 bp, synthetic construct
  misc_feature 1..16: note = synthetic [barcode part1]
  source 1..16: mol_type = other DNA
acttggtgtcaggttg

SEQ ID NO: 16346 - DNA, 16 bp, synthetic construct
  misc_feature 1..16: note = synthetic [barcode part1]
  source 1..16: mol_type = other DNA
gcgactattcctcggt

SEQ ID NO: 16347 - DNA, 16 bp, synthetic construct
  misc_feature 1..16: note = synthetic [barcode part1]
  source 1..16: mol_type = other DNA
tggttaactccggagt

SEQ ID NO: 16348 - DNA, 16 bp, synthetic construct
  misc_feature 1..16: note = synthetic [barcode part1]
  source 1..16: mol_type = other DNA
ttgttacctgcgaatc

SEQ ID NO: 16349 - DNA, 16 bp, synthetic construct
  misc_feature 1..16: note = synthetic [barcode part1]
  source 1..16: mol_type = other DNA
aattgcaccaacctct

SEQ ID NO: 16350 - DNA, 16 bp, synthetic construct
  misc_feature 1..16: note = synthetic [barcode part1]
  source 1..16: mol_type = other DNA
tcgaggacaattctcg

SEQ ID NO: 16351 - DNA, 16 bp, synthetic construct
  misc_feature 1..16: note = synthetic [barcode part1]
  source 1..16: mol_type = other DNA
cgcctgtcctaagact

SEQ ID NO: 16352 - DNA, 16 bp, synthetic construct
  misc_feature 1..16: note = synthetic [barcode part1]
  source 1..16: mol_type = other DNA
caatctgacctctgcg

SEQ ID NO: 16353 - DNA, 16 bp, synthetic construct
  misc_feature 1..16: note = synthetic [barcode part1]
  source 1..16: mol_type = other DNA
caacgttgtaagtgag

SEQ ID NO: 16354 - DNA, 16 bp, synthetic construct
  misc_feature 1..16: note = synthetic [barcode part1]
  source 1..16: mol_type = other DNA
aactcgacacacctcc

SEQ ID NO: 16355 - DNA, 16 bp, synthetic construct
  misc_feature 1..16: note = synthetic [barcode part1]
  source 1..16: mol_type = other DNA
actgacgacctgagtt

SEQ ID NO: 16356 - DNA, 16 bp, synthetic construct
  misc_feature 1..16: note = synthetic [barcode part1]
  source 1..16: mol_type = other DNA
actaggttggactgtc

SEQ ID NO: 16357 - DNA, 16 bp, synthetic construct
  misc_feature 1..16: note = synthetic [barcode part1]
  source 1..16: mol_type = other DNA
aactgactgtgtgtgc

SEQ ID NO: 16358 - DNA, 16 bp, synthetic construct
  misc_feature 1..16: note = synthetic [barcode part1]
  source 1..16: mol_type = other DNA
agatcacggtgtaggc

SEQ ID NO: 16359 - DNA, 16 bp, synthetic construct
  misc_feature 1..16: note = synthetic [barcode part1]
  source 1..16: mol_type = other DNA
gtgacttctcgtattg

SEQ ID NO: 16360 - DNA, 16 bp, synthetic construct
  misc_feature 1..16: note = synthetic [barcode part1]
  source 1..16: mol_type = other DNA
gtcacagacagtgtct

SEQ ID NO: 16361 - DNA, 16 bp, synthetic construct
  misc_feature 1..16: note = synthetic [barcode part1]
  source 1..16: mol_type = other DNA
agaggtgacaagagtc

SEQ ID NO: 16362 - DNA, 16 bp, synthetic construct
  misc_feature 1..16: note = synthetic [barcode part1]
  source 1..16: mol_type = other DNA
atactgattggcgcgt

SEQ ID NO: 16363 - DNA, 16 bp, synthetic construct
  misc_feature 1..16: note = synthetic [barcode part1]
  source 1..16: mol_type = other DNA
cgccgcgattaattag

SEQ ID NO: 16364 - DNA, 16 bp, synthetic construct
  misc_feature 1..16: note = synthetic [barcode part1]
  source 1..16: mol_type = other DNA
cgagattctctctctc

SEQ ID NO: 16365 - DNA, 16 bp, synthetic construct
  misc_feature 1..16: note = synthetic [barcode part1]
  source 1..16: mol_type = other DNA
aacagtacgcctggag

SEQ ID NO: 16366 - DNA, 16 bp, synthetic construct
  misc_feature 1..16: note = synthetic [barcode part1]
  source 1..16: mol_type = other DNA
gatcctcgtgtagtcc

SEQ ID NO: 16367 - DNA, 16 bp, synthetic construct
  misc_feature 1..16: note = synthetic [barcode part1]
  source 1..16: mol_type = other DNA
aacacaacggattacg

SEQ ID NO: 16368 - DNA, 16 bp, synthetic construct
  misc_feature 1..16: note = synthetic [barcode part1]
  source 1..16: mol_type = other DNA
agactcacctacagac

SEQ ID NO: 16369 - DNA, 16 bp, synthetic construct
  misc_feature 1..16: note = synthetic [barcode part1]
  source 1..16: mol_type = other DNA
caacttcgcgtcaatt

SEQ ID NO: 16370 - DNA, 16 bp, synthetic construct
  misc_feature 1..16: note = synthetic [barcode part1]
  source 1..16: mol_type = other DNA
caaggaagtgccggtt

SEQ ID NO: 16371 - DNA, 16 bp, synthetic construct
  misc_feature 1..16: note = synthetic [barcode part1]
  source 1..16: mol_type = other DNA
aacgacgtgtccgaag

SEQ ID NO: 16372 - DNA, 16 bp, synthetic construct
  misc_feature 1..16: note = synthetic [barcode part1]
  source 1..16: mol_type = other DNA
gaaccacggtacaggt

SEQ ID NO: 16373 - DNA, 16 bp, synthetic construct
  misc_feature 1..16: note = synthetic [barcode part1]
  source 1..16: mol_type = other DNA
tcaacagtactggacc

SEQ ID NO: 16374 - DNA, 16 bp, synthetic construct
  misc_feature 1..16: note = synthetic [barcode part1]
  source 1..16: mol_type = other DNA
atcgtgaaggttctgc

SEQ ID NO: 16375 - DNA, 16 bp, synthetic construct
  misc_feature 1..16: note = synthetic [barcode part1]
  source 1..16: mol_type = other DNA
cagtggtcctcacact

SEQ ID NO: 16376 - DNA, 16 bp, synthetic construct
  misc_feature 1..16: note = synthetic [barcode part1]
  source 1..16: mol_type = other DNA
tgtgacagtagacaac

SEQ ID NO: 16377 - DNA, 16 bp, synthetic construct
  misc_feature 1..16: note = synthetic [barcode part1]
  source 1..16: mol_type = other DNA
aacaagtatccgcctg

SEQ ID NO: 16378 - DNA, 16 bp, synthetic construct
  misc_feature 1..16: note = synthetic [barcode part1]
  source 1..16: mol_type = other DNA
tctctggtgtacgacc

SEQ ID NO: 16379 - DNA, 16 bp, synthetic construct
  misc_feature 1..16: note = synthetic [barcode part1]
  source 1..16: mol_type = other DNA
tgtacagtgccgatac

SEQ ID NO: 16380 - DNA, 16 bp, synthetic construct
  misc_feature 1..16: note = synthetic [barcode part1]
  source 1..16: mol_type = other DNA
acaacactgacactgc

SEQ ID NO: 16381 - DNA, 16 bp, synthetic construct
  misc_feature 1..16: note = synthetic [barcode part1]
  source 1..16: mol_type = other DNA
gtgtcaagattgcgtc

SEQ ID NO: 16382 - DNA, 16 bp, synthetic construct
  misc_feature 1..16: note = synthetic [barcode part1]
  source 1..16: mol_type = other DNA
caaccaaccggttaac

SEQ ID NO: 16383 - DNA, 16 bp, synthetic construct
  misc_feature 1..16: note = synthetic [barcode part1]
  source 1..16: mol_type = other DNA
aactggtccaaggttc

SEQ ID NO: 16384 - DNA, 16 bp, synthetic construct
  misc_feature 1..16: note = synthetic [barcode part1]
  source 1..16: mol_type = other DNA
tggacgtatcgcctct

SEQ ID NO: 16385 - DNA, 16 bp, synthetic construct
  misc_feature 1..16: note = synthetic [barcode part1]
  source 1..16: mol_type = other DNA
taagacagacacgttg

SEQ ID NO: 16386 - DNA, 16 bp, synthetic construct
  misc_feature 1..16: note = synthetic [barcode part1]
  source 1..16: mol_type = other DNA
tgtagtggagtggacc

SEQ ID NO: 16387 - DNA, 16 bp, synthetic construct
  misc_feature 1..16: note = synthetic [barcode part1]
  source 1..16: mol_type = other DNA
cgagaggacgtgttgt

SEQ ID NO: 16388 - DNA, 16 bp, synthetic construct
  misc_feature 1..16: note = synthetic [barcode part1]
  source 1..16: mol_type = other DNA
gtcctctcacgtaacg

SEQ ID NO: 16389 - DNA, 16 bp, synthetic construct
  misc_feature 1..16: note = synthetic [barcode part1]
  source 1..16: mol_type = other DNA
caacgagagtatctag

SEQ ID NO: 16390 - DNA, 16 bp, synthetic construct
  misc_feature 1..16: note = synthetic [barcode part1]
  source 1..16: mol_type = other DNA
gcgtccttagtctggt

SEQ ID NO: 16391 - DNA, 16 bp, synthetic construct
  misc_feature 1..16: note = synthetic [barcode part1]
  source 1..16: mol_type = other DNA
aggccggactgtatag

SEQ ID NO: 16392 - DNA, 16 bp, synthetic construct
  misc_feature 1..16: note = synthetic [barcode part1]
  source 1..16: mol_type = other DNA
cgcggttattattctg

SEQ ID NO: 16393 - DNA, 16 bp, synthetic construct
  misc_feature 1..16: note = synthetic [barcode part1]
  source 1..16: mol_type = other DNA
ttgtgaggacagtaac

SEQ ID NO: 16394 - DNA, 16 bp, synthetic construct
  misc_feature 1..16: note = synthetic [barcode part1]
  source 1..16: mol_type = other DNA
tcaatcgagtcgatcg

SEQ ID NO: 16395 - DNA, 16 bp, synthetic construct
  misc_feature 1..16: note = synthetic [barcode part1]
  source 1..16: mol_type = other DNA
ataccagacgcaactc

SEQ ID NO: 16396 - DNA, 16 bp, synthetic construct
  misc_feature 1..16: note = synthetic [barcode part1]
  source 1..16: mol_type = other DNA
gactctccgcaagttc

SEQ ID NO: 16397 - DNA, 16 bp, synthetic construct
  misc_feature 1..16: note = synthetic [barcode part1]
  source 1..16: mol_type = other DNA
tggacgcaggacaatc

SEQ ID NO: 16398 - DNA, 16 bp, synthetic construct
  misc_feature 1..16: note = synthetic [barcode part1]
  source 1..16: mol_type = other DNA
tgtctcgaggtgatac

SEQ ID NO: 16399 - DNA, 16 bp, synthetic construct
  misc_feature 1..16: note = synthetic [barcode part1]
  source 1..16: mol_type = other DNA
taacagaccacaagtg

SEQ ID NO: 16400 - DNA, 16 bp, synthetic construct
  misc_feature 1..16: note = synthetic [barcode part1]
  source 1..16: mol_type = other DNA
agactgtgtaagagtc

SEQ ID NO: 16401 - DNA, 16 bp, synthetic construct
  misc_feature 1..16: note = synthetic [barcode part1]
  source 1..16: mol_type = other DNA
gtccgtgaacttgtag

SEQ ID NO: 16402 - DNA, 16 bp, synthetic construct
  misc_feature 1..16: note = synthetic [barcode part1]
  source 1..16: mol_type = other DNA
caccggttctcttgag

SEQ ID NO: 16403 - DNA, 16 bp, synthetic construct
  misc_feature 1..16: note = synthetic [barcode part1]
  source 1..16: mol_type = other DNA
acgtacttaggtccag

SEQ ID NO: 16404 - DNA, 16 bp, synthetic construct
  misc_feature 1..16: note = synthetic [barcode part1]
  source 1..16: mol_type = other DNA
aacgactactgtcgac

SEQ ID NO: 16405 - DNA, 16 bp, synthetic construct
  misc_feature 1..16: note = synthetic [barcode part1]
  source 1..16: mol_type = other DNA
cgtaatacctgttcgt

SEQ ID NO: 16406 - DNA, 16 bp, synthetic construct
  misc_feature 1..16: note = synthetic [barcode part1]
  source 1..16: mol_type = other DNA
attataacgtccgcct

SEQ ID NO: 16407 - DNA, 16 bp, synthetic construct
  misc_feature 1..16: note = synthetic [barcode part1]
  source 1..16: mol_type = other DNA
tgacgttgatagacag

SEQ ID NO: 16408 - DNA, 16 bp, synthetic construct
  misc_feature 1..16: note = synthetic [barcode part1]
  source 1..16: mol_type = other DNA
ttccgcactggactac

SEQ ID NO: 16409 - DNA, 16 bp, synthetic construct
  misc_feature 1..16: note = synthetic [barcode part1]
  source 1..16: mol_type = other DNA
ttccaactacggatct

SEQ ID NO: 16410 - DNA, 16 bp, synthetic construct
  misc_feature 1..16: note = synthetic [barcode part1]
  source 1..16: mol_type = other DNA
gacacgcgttatacac

SEQ ID NO: 16411 - DNA, 16 bp, synthetic construct
  misc_feature 1..16: note = synthetic [barcode part1]
  source 1..16: mol_type = other DNA
gcggatagtcttggag

SEQ ID NO: 16412 - DNA, 16 bp, synthetic construct
  misc_feature 1..16: note = synthetic [barcode part1]
  source 1..16: mol_type = other DNA
ttggtccgtgagatac

SEQ ID NO: 16413 - DNA, 16 bp, synthetic construct
  misc_feature 1..16: note = synthetic [barcode part1]
  source 1..16: mol_type = other DNA
tgtcgtagatcgactg

SEQ ID NO: 16414 - DNA, 16 bp, synthetic construct
  misc_feature 1..16: note = synthetic [barcode part1]
  source 1..16: mol_type = other DNA
aagtggagtaggcagt

SEQ ID NO: 16415 - DNA, 16 bp, synthetic construct
  misc_feature 1..16: note = synthetic [barcode part1]
  source 1..16: mol_type = other DNA
gatctcagaataggtg

SEQ ID NO: 16416 - DNA, 16 bp, synthetic construct
  misc_feature 1..16: note = synthetic [barcode part1]
  source 1..16: mol_type = other DNA
ttgcgccagtacaagt

SEQ ID NO: 16417 - DNA, 16 bp, synthetic construct
  misc_feature 1..16: note = synthetic [barcode part1]
  source 1..16: mol_type = other DNA
tcttatcagtgcctag

SEQ ID NO: 16418 - DNA, 16 bp, synthetic construct
  misc_feature 1..16: note = synthetic [barcode part1]
  source 1..16: mol_type = other DNA
ttgcaaggtccagatc

SEQ ID NO: 16419 - DNA, 16 bp, synthetic construct
  misc_feature 1..16: note = synthetic [barcode part1]
  source 1..16: mol_type = other DNA
acaagttgaaggtcgt

SEQ ID NO: 16420 - DNA, 16 bp, synthetic construct
  misc_feature 1..16: note = synthetic [barcode part1]
  source 1..16: mol_type = other DNA
tatctgtctcactcgc

SEQ ID NO: 16421 - DNA, 16 bp, synthetic construct
  misc_feature 1..16: note = synthetic [barcode part1]
  source 1..16: mol_type = other DNA
gaagtattggcgaccg

SEQ ID NO: 16422 - DNA, 16 bp, synthetic construct
  misc_feature 1..16: note = synthetic [barcode part1]
  source 1..16: mol_type = other DNA
gcgtattcgttgacag

SEQ ID NO: 16423 - DNA, 16 bp, synthetic construct
  misc_feature 1..16: note = synthetic [barcode part1]
  source 1..16: mol_type = other DNA
gtcagttaactccgag

SEQ ID NO: 16424 - DNA, 16 bp, synthetic construct
  misc_feature 1..16: note = synthetic [barcode part1]
  source 1..16: mol_type = other DNA
tatcggatctgacgac

SEQ ID NO: 16425 - DNA, 16 bp, synthetic construct
  misc_feature 1..16: note = synthetic [barcode part1]
  source 1..16: mol_type = other DNA
gaccaatctggtcaac

SEQ ID NO: 16426 - DNA, 16 bp, synthetic construct
  misc_feature 1..16: note = synthetic [barcode part1]
  source 1..16: mol_type = other DNA
ccaggacgcgaataac

SEQ ID NO: 16427 - DNA, 16 bp, synthetic construct
  misc_feature 1..16: note = synthetic [barcode part1]
  source 1..16: mol_type = other DNA
agttggtcaacgtcac

SEQ ID NO: 16428 - DNA, 16 bp, synthetic construct
  misc_feature 1..16: note = synthetic [barcode part1]
  source 1..16: mol_type = other DNA
caactaggttgaccac

SEQ ID NO: 16429 - DNA, 16 bp, synthetic construct
  misc_feature 1..16: note = synthetic [barcode part1]
  source 1..16: mol_type = other DNA
agacggactacggtac

SEQ ID NO: 16430 - DNA, 16 bp, synthetic construct
  misc_feature 1..16: note = synthetic [barcode part1]
  source 1..16: mol_type = other DNA
tgcaagtgttcgcaac

SEQ ID NO: 16431 - DNA, 16 bp, synthetic construct
  misc_feature 1..16: note = synthetic [barcode part1]
  source 1..16: mol_type = other DNA
actcgtatacgtcgag

SEQ ID NO: 16432 - DNA, 16 bp, synthetic construct
  misc_feature 1..16: note = synthetic [barcode part1]
  source 1..16: mol_type = other DNA
tacgtgttgacgtcag

SEQ ID NO: 16433 - DNA, 16 bp, synthetic construct
  misc_feature 1..16: note = synthetic [barcode part1]
  source 1..16: mol_type = other DNA
cactgaggacaactct

SEQ ID NO: 16434 - DNA, 16 bp, synthetic construct
  misc_feature 1..16: note = synthetic [barcode part1]
  source 1..16: mol_type = other DNA
acagtctgcagagacg

SEQ ID NO: 16435 - DNA, 16 bp, synthetic construct
  misc_feature 1..16: note = synthetic [barcode part1]
  source 1..16: mol_type = other DNA
ccggttcacaaccgtt

SEQ ID NO: 16436 - DNA, 16 bp, synthetic construct
  misc_feature 1..16: note = synthetic [barcode part1]
  source 1..16: mol_type = other DNA
actgtggtagagtcct

SEQ ID NO: 16437 - DNA, 16 bp, synthetic construct
  misc_feature 1..16: note = synthetic [barcode part1]
  source 1..16: mol_type = other DNA
ttacggatcacacgac

SEQ ID NO: 16438 - DNA, 16 bp, synthetic construct
  misc_feature 1..16: note = synthetic [barcode part1]
  source 1..16: mol_type = other DNA
ttcggtaaggtacaag

SEQ ID NO: 16439 - DNA, 16 bp, synthetic construct
  misc_feature 1..16: note = synthetic [barcode part1]
  source 1..16: mol_type = other DNA
agtaaccgtgtagaac

SEQ ID NO: 16440 - DNA, 16 bp, synthetic construct
  misc_feature 1..16: note = synthetic [barcode part1]
  source 1..16: mol_type = other DNA
tgtaataccacttgcc

SEQ ID NO: 16441 - DNA, 16 bp, synthetic construct
  misc_feature 1..16: note = synthetic [barcode part1]
  source 1..16: mol_type = other DNA
ttccgtgttgataacc

SEQ ID NO: 16442 - DNA, 16 bp, synthetic construct
  misc_feature 1..16: note = synthetic [barcode part1]
  source 1..16: mol_type = other DNA
gagtgttcttatcgtc

SEQ ID NO: 16443 - DNA, 16 bp, synthetic construct
  misc_feature 1..16: note = synthetic [barcode part1]
  source 1..16: mol_type = other DNA
tatctctgcgttcctg

SEQ ID NO: 16444 - DNA, 16 bp, synthetic construct
  misc_feature 1..16: note = synthetic [barcode part1]
  source 1..16: mol_type = other DNA
cgacacctgttcgttg

SEQ ID NO: 16445 - DNA, 16 bp, synthetic construct
  misc_feature 1..16: note = synthetic [barcode part1]
  source 1..16: mol_type = other DNA
acgcggtatactgatc

SEQ ID NO: 16446 - DNA, 16 bp, synthetic construct
  misc_feature 1..16: note = synthetic [barcode part1]
  source 1..16: mol_type = other DNA
atagaggccggactgt

SEQ ID NO: 16447 - DNA, 16 bp, synthetic construct
  misc_feature 1..16: note = synthetic [barcode part1]
  source 1..16: mol_type = other DNA
cgcgatagtcttgagt

SEQ ID NO: 16448 - DNA, 16 bp, synthetic construct
  misc_feature 1..16: note = synthetic [barcode part1]
  source 1..16: mol_type = other DNA
tgcagttgtgcctaag

SEQ ID NO: 16449 - DNA, 16 bp, synthetic construct
  misc_feature 1..16: note = synthetic [barcode part1]
  source 1..16: mol_type = other DNA
tggaactgaccttgac

SEQ ID NO: 16450 - DNA, 16 bp, synthetic construct
  misc_feature 1..16: note = synthetic [barcode part1]
  source 1..16: mol_type = other DNA
tcttaatcggcggagt

SEQ ID NO: 16451 - DNA, 16 bp, synthetic construct
  misc_feature 1..16: note = synthetic [barcode part1]
  source 1..16: mol_type = other DNA
gaaggcactacacttc

SEQ ID NO: 16452 - DNA, 16 bp, synthetic construct
  misc_feature 1..16: note = synthetic [barcode part1]
  source 1..16: mol_type = other DNA
agtcagtgttgcaacc

SEQ ID NO: 16453 - DNA, 16 bp, synthetic construct
  misc_feature 1..16: note = synthetic [barcode part1]
  source 1..16: mol_type = other DNA
aatctggattgtcggc

SEQ ID NO: 16454 - DNA, 16 bp, synthetic construct
  misc_feature 1..16: note = synthetic [barcode part1]
  source 1..16: mol_type = other DNA
caccagaagtgcaggt

SEQ ID NO: 16455 - DNA, 16 bp, synthetic construct
  misc_feature 1..16: note = synthetic [barcode part1]
  source 1..16: mol_type = other DNA
cacctgtggtgttacc

SEQ ID NO: 16456 - DNA, 16 bp, synthetic construct
  misc_feature 1..16: note = synthetic [barcode part1]
  source 1..16: mol_type = other DNA
actcgcctcacttact

SEQ ID NO: 16457 - DNA, 16 bp, synthetic construct
  misc_feature 1..16: note = synthetic [barcode part1]
  source 1..16: mol_type = other DNA
accaggacacgtagtg

SEQ ID NO: 16458 - DNA, 16 bp, synthetic construct
  misc_feature 1..16: note = synthetic [barcode part1]
  source 1..16: mol_type = other DNA
gtcctgtacaaggtac

SEQ ID NO: 16459 - DNA, 16 bp, synthetic construct
  misc_feature 1..16: note = synthetic [barcode part1]
  source 1..16: mol_type = other DNA
cgagaggtgtgcaact

SEQ ID NO: 16460 - DNA, 16 bp, synthetic construct
  misc_feature 1..16: note = synthetic [barcode part1]
  source 1..16: mol_type = other DNA
cgtaatataggcaggt

SEQ ID NO: 16461 - DNA, 16 bp, synthetic construct
  misc_feature 1..16: note = synthetic [barcode part1]
  source 1..16: mol_type = other DNA
gttagtgccacacaac

SEQ ID NO: 16462 - DNA, 16 bp, synthetic construct
  misc_feature 1..16: note = synthetic [barcode part1]
  source 1..16: mol_type = other DNA
tgttgtcgcagttact

SEQ ID NO: 16463 - DNA, 16 bp, synthetic construct
  misc_feature 1..16: note = synthetic [barcode part1]
  source 1..16: mol_type = other DNA
tccgttaatacgacct

SEQ ID NO: 16464 - DNA, 16 bp, synthetic construct
  misc_feature 1..16: note = synthetic [barcode part1]
  source 1..16: mol_type = other DNA
ttaccacggatctgtt

SEQ ID NO: 16465 - DNA, 16 bp, synthetic construct
  misc_feature 1..16: note = synthetic [barcode part1]
  source 1..16: mol_type = other DNA
ataaggacgcaccttc

SEQ ID NO: 16466 - DNA, 16 bp, synthetic construct
  misc_feature 1..16: note = synthetic [barcode part1]
  source 1..16: mol_type = other DNA
agtcaacgtactgtgc

SEQ ID NO: 16467 - DNA, 16 bp, synthetic construct
  misc_feature 1..16: note = synthetic [barcode part1]
  source 1..16: mol_type = other DNA
tgccaggaacacgaac

SEQ ID NO: 16468 - DNA, 16 bp, synthetic construct
  misc_feature 1..16: note = synthetic [barcode part1]
  source 1..16: mol_type = other DNA
tgagtgcgtcgtcctt

SEQ ID NO: 16469 - DNA, 16 bp, synthetic construct
  misc_feature 1..16: note = synthetic [barcode part1]
  source 1..16: mol_type = other DNA
gatcgacagttccagt

SEQ ID NO: 16470 - DNA, 16 bp, synthetic construct
  misc_feature 1..16: note = synthetic [barcode part1]
  source 1..16: mol_type = other DNA
tacaacacgaggcctt

SEQ ID NO: 16471 - DNA, 16 bp, synthetic construct
  misc_feature 1..16: note = synthetic [barcode part1]
  source 1..16: mol_type = other DNA
cagtatcttactcgtg

SEQ ID NO: 16472 - DNA, 16 bp, synthetic construct
  misc_feature 1..16: note = synthetic [barcode part1]
  source 1..16: mol_type = other DNA
actacacaacctgcag

SEQ ID NO: 16473 - DNA, 16 bp, synthetic construct
  misc_feature 1..16: note = synthetic [barcode part1]
  source 1..16: mol_type = other DNA
gcctcttaagatcgag

SEQ ID NO: 16474 - DNA, 16 bp, synthetic construct
  misc_feature 1..16: note = synthetic [barcode part1]
  source 1..16: mol_type = other DNA
gcctcgattggttaag

SEQ ID NO: 16475 - DNA, 16 bp, synthetic construct
  misc_feature 1..16: note = synthetic [barcode part1]
  source 1..16: mol_type = other DNA
gtcgattgaagtcctg

SEQ ID NO: 16476 - DNA, 16 bp, synthetic construct
  misc_feature 1..16: note = synthetic [barcode part1]
  source 1..16: mol_type = other DNA
accaatccttcaggag

SEQ ID NO: 16477 - DNA, 16 bp, synthetic construct
  misc_feature 1..16: note = synthetic [barcode part1]
  source 1..16: mol_type = other DNA
gactacttgagtcacg

SEQ ID NO: 16478 - DNA, 16 bp, synthetic construct
  misc_feature 1..16: note = synthetic [barcode part1]
  source 1..16: mol_type = other DNA
acttcgcgtgagatac

SEQ ID NO: 16479 - DNA, 16 bp, synthetic construct
  misc_feature 1..16: note = synthetic [barcode part1]
  source 1..16: mol_type = other DNA
agagaacgcctggact

SEQ ID NO: 16480 - DNA, 16 bp, synthetic construct
  misc_feature 1..16: note = synthetic [barcode part1]
  source 1..16: mol_type = other DNA
caagaccgtcgtgatt

SEQ ID NO: 16481 - DNA, 16 bp, synthetic construct
  misc_feature 1..16: note = synthetic [barcode part1]
  source 1..16: mol_type = other DNA
tgtgtgatatcctgtc

SEQ ID NO: 16482 - DNA, 16 bp, synthetic construct
  misc_feature 1..16: note = synthetic [barcode part1]
  source 1..16: mol_type = other DNA
accttactactggtgt

SEQ ID NO: 16483 - DNA, 16 bp, synthetic construct
  misc_feature 1..16: note = synthetic [barcode part1]
  source 1..16: mol_type = other DNA
gttcctatcacgtcct

SEQ ID NO: 16484 - DNA, 16 bp, synthetic construct
  misc_feature 1..16: note = synthetic [barcode part1]
  source 1..16: mol_type = other DNA
gtcacaactgtggtac

SEQ ID NO: 16485 - DNA, 16 bp, synthetic construct
  misc_feature 1..16: note = synthetic [barcode part1]
  source 1..16: mol_type = other DNA
gcacgaagagttaccg

SEQ ID NO: 16486 - DNA, 16 bp, synthetic construct
  misc_feature 1..16: note = synthetic [barcode part1]
  source 1..16: mol_type = other DNA
tcttggcaactcgtgc

SEQ ID NO: 16487 - DNA, 16 bp, synthetic construct
  misc_feature 1..16: note = synthetic [barcode part1]
  source 1..16: mol_type = other DNA
ttggcgcggttaagag

SEQ ID NO: 16488 - DNA, 16 bp, synthetic construct
  misc_feature 1..16: note = synthetic [barcode part1]
  source 1..16: mol_type = other DNA
gatctgtcgttacttg

SEQ ID NO: 16489 - DNA, 16 bp, synthetic construct
  misc_feature 1..16: note = synthetic [barcode part1]
  source 1..16: mol_type = other DNA
cacctaaccagtacag

SEQ ID NO: 16490 - DNA, 16 bp, synthetic construct
  misc_feature 1..16: note = synthetic [barcode part1]
  source 1..16: mol_type = other DNA
atctccggtaggaatc

SEQ ID NO: 16491 - DNA, 16 bp, synthetic construct
  misc_feature 1..16: note = synthetic [barcode part1]
  source 1..16: mol_type = other DNA
ttacttactgcgacgt

SEQ ID NO: 16492 - DNA, 16 bp, synthetic construct
  misc_feature 1..16: note = synthetic [barcode part1]
  source 1..16: mol_type = other DNA
agaggcggagttacct

SEQ ID NO: 16493 - DNA, 16 bp, synthetic construct
  misc_feature 1..16: note = synthetic [barcode part1]
  source 1..16: mol_type = other DNA
gatccaagtcaagtcc

SEQ ID NO: 16494 - DNA, 16 bp, synthetic construct
  misc_feature 1..16: note = synthetic [barcode part1]
  source 1..16: mol_type = other DNA
aggtcacctcacacct

SEQ ID NO: 16495 - DNA, 16 bp, synthetic construct
  misc_feature 1..16: note = synthetic [barcode part1]
  source 1..16: mol_type = other DNA
caatattggacgaacg

SEQ ID NO: 16496 - DNA, 16 bp, synthetic construct
  misc_feature 1..16: note = synthetic [barcode part1]
  source 1..16: mol_type = other DNA
tcacagttggtcaacg

SEQ ID NO: 16497 - DNA, 16 bp, synthetic construct
  misc_feature 1..16: note = synthetic [barcode part1]
  source 1..16: mol_type = other DNA
cgaacacagtcacact

SEQ ID NO: 16498 - DNA, 16 bp, synthetic construct
  misc_feature 1..16: note = synthetic [barcode part1]
  source 1..16: mol_type = other DNA
acctcgccttaactct

SEQ ID NO: 16499 - DNA, 16 bp, synthetic construct
  misc_feature 1..16: note = synthetic [barcode part1]
  source 1..16: mol_type = other DNA
agacttgtccacgaac

SEQ ID NO: 16500 - DNA, 16 bp, synthetic construct
  misc_feature 1..16: note = synthetic [barcode part1]
  source 1..16: mol_type = other DNA
gtgagaagactgccgt

SEQ ID NO: 16501 - DNA, 16 bp, synthetic construct
  misc_feature 1..16: note = synthetic [barcode part1]
  source 1..16: mol_type = other DNA
tcgaagtcctagagtc

SEQ ID NO: 16502 - DNA, 16 bp, synthetic construct
  misc_feature 1..16: note = synthetic [barcode part1]
  source 1..16: mol_type = other DNA
tgcactcacggttcac

SEQ ID NO: 16503 - DNA, 16 bp, synthetic construct
  misc_feature 1..16: note = synthetic [barcode part1]
  source 1..16: mol_type = other DNA
ttgactcaacacacct

SEQ ID NO: 16504 - DNA, 16 bp, synthetic construct
  misc_feature 1..16: note = synthetic [barcode part1]
  source 1..16: mol_type = other DNA
tccagaacagttgacc

SEQ ID NO: 16505 - DNA, 16 bp, synthetic construct
  misc_feature 1..16: note = synthetic [barcode part1]
  source 1..16: mol_type = other DNA
agactcgttcacgagt

SEQ ID NO: 16506 - DNA, 16 bp, synthetic construct
  misc_feature 1..16: note = synthetic [barcode part1]
  source 1..16: mol_type = other DNA
gcacacacaacgttgt

SEQ ID NO: 16507 - DNA, 16 bp, synthetic construct
  misc_feature 1..16: note = synthetic [barcode part1]
  source 1..16: mol_type = other DNA
caaccttccagtcctt

SEQ ID NO: 16508 - DNA, 16 bp, synthetic construct
  misc_feature 1..16: note = synthetic [barcode part1]
  source 1..16: mol_type = other DNA
cctatcgacacttggc

SEQ ID NO: 16509 - DNA, 16 bp, synthetic construct
  misc_feature 1..16: note = synthetic [barcode part1]
  source 1..16: mol_type = other DNA
tcggttatcctgagag

SEQ ID NO: 16510 - DNA, 16 bp, synthetic construct
  misc_feature 1..16: note = synthetic [barcode part1]
  source 1..16: mol_type = other DNA
tcggtcgtagttagtg

SEQ ID NO: 16511 - DNA, 16 bp, synthetic construct
  misc_feature 1..16: note = synthetic [barcode part1]
  source 1..16: mol_type = other DNA
agtaccggaagttcct

SEQ ID NO: 16512 - DNA, 16 bp, synthetic construct
  misc_feature 1..16: note = synthetic [barcode part1]
  source 1..16: mol_type = other DNA
cacacagagacacctt

SEQ ID NO: 16513 - DNA, 16 bp, synthetic construct
  misc_feature 1..16: note = synthetic [barcode part1]
  source 1..16: mol_type = other DNA
caacacgcgactctct

SEQ ID NO: 16514 - DNA, 16 bp, synthetic construct
  misc_feature 1..16: note = synthetic [barcode part1]
  source 1..16: mol_type = other DNA
gaactacgcagttcac

SEQ ID NO: 16515 - DNA, 16 bp, synthetic construct
  misc_feature 1..16: note = synthetic [barcode part1]
  source 1..16: mol_type = other DNA
tcagtagacgaaggcc

SEQ ID NO: 16516 - DNA, 16 bp, synthetic construct
  misc_feature 1..16: note = synthetic [barcode part1]
  source 1..16: mol_type = other DNA
gtgatctcacctccag

SEQ ID NO: 16517 - DNA, 16 bp, synthetic construct
  misc_feature 1..16: note = synthetic [barcode part1]
  source 1..16: mol_type = other DNA
tggtctactcgtaccg

SEQ ID NO: 16518 - DNA, 16 bp, synthetic construct
  misc_feature 1..16: note = synthetic [barcode part1]
  source 1..16: mol_type = other DNA
tctaccgtgtaagttc

SEQ ID NO: 16519 - DNA, 16 bp, synthetic construct
  misc_feature 1..16: note = synthetic [barcode part1]
  source 1..16: mol_type = other DNA
cacaatcctctgttag

SEQ ID NO: 16520 - DNA, 16 bp, synthetic construct
  misc_feature 1..16: note = synthetic [barcode part1]
  source 1..16: mol_type = other DNA
attgtgcgcgtagttg

SEQ ID NO: 16521 - DNA, 16 bp, synthetic construct
  misc_feature 1..16: note = synthetic [barcode part1]
  source 1..16: mol_type = other DNA
gagtatcagacggtgc

SEQ ID NO: 16522 - DNA, 16 bp, synthetic construct
  misc_feature 1..16: note = synthetic [barcode part1]
  source 1..16: mol_type = other DNA
ttcaccggtgcagttc

SEQ ID NO: 16523 - DNA, 16 bp, synthetic construct
  misc_feature 1..16: note = synthetic [barcode part1]
  source 1..16: mol_type = other DNA
cgcagatactcacagt

SEQ ID NO: 16524 - DNA, 16 bp, synthetic construct
  misc_feature 1..16: note = synthetic [barcode part1]
  source 1..16: mol_type = other DNA
tctggatatctctcag

SEQ ID NO: 16525 - DNA, 16 bp, synthetic construct
  misc_feature 1..16: note = synthetic [barcode part1]
  source 1..16: mol_type = other DNA
tcacaagacgaagtac

SEQ ID NO: 16526 - DNA, 16 bp, synthetic construct
  misc_feature 1..16: note = synthetic [barcode part1]
  source 1..16: mol_type = other DNA
tggatcttcgcctcag

SEQ ID NO: 16527 - DNA, 16 bp, synthetic construct
  misc_feature 1..16: note = synthetic [barcode part1]
  source 1..16: mol_type = other DNA
actaggtgagtgcgac

SEQ ID NO: 16528 - DNA, 16 bp, synthetic construct
  misc_feature 1..16: note = synthetic [barcode part1]
  source 1..16: mol_type = other DNA
ttactaacacgccttg

SEQ ID NO: 16529 - DNA, 16 bp, synthetic construct
  misc_feature 1..16: note = synthetic [barcode part1]
  source 1..16: mol_type = other DNA
aacggactaagatctg

SEQ ID NO: 16530 - DNA, 16 bp, synthetic construct
  misc_feature 1..16: note = synthetic [barcode part1]
  source 1..16: mol_type = other DNA
atacgcgtcgagactt

SEQ ID NO: 16531 - DNA, 16 bp, synthetic construct
  misc_feature 1..16: note = synthetic [barcode part1]
  source 1..16: mol_type = other DNA
gcctcgtaagttaggt

SEQ ID NO: 16532 - DNA, 16 bp, synthetic construct
  misc_feature 1..16: note = synthetic [barcode part1]
  source 1..16: mol_type = other DNA
ccgtcaccttgaacgt

SEQ ID NO: 16533 - DNA, 16 bp, synthetic construct
  misc_feature 1..16: note = synthetic [barcode part1]
  source 1..16: mol_type = other DNA
tggcgtacctcactgt

SEQ ID NO: 16534 - DNA, 16 bp, synthetic construct
  misc_feature 1..16: note = synthetic [barcode part1]
  source 1..16: mol_type = other DNA
taatctcaccgtacac

SEQ ID NO: 16535 - DNA, 16 bp, synthetic construct
  misc_feature 1..16: note = synthetic [barcode part1]
  source 1..16: mol_type = other DNA
ccagacagagtggtgt

SEQ ID NO: 16536 - DNA, 16 bp, synthetic construct
  misc_feature 1..16: note = synthetic [barcode part1]
  source 1..16: mol_type = other DNA
acaagatcgaggtgag

SEQ ID NO: 16537 - DNA, 16 bp, synthetic construct
  misc_feature 1..16: note = synthetic [barcode part1]
  source 1..16: mol_type = other DNA
gcgtaccacaaggtag

SEQ ID NO: 16538 - DNA, 16 bp, synthetic construct
  misc_feature 1..16: note = synthetic [barcode part1]
  source 1..16: mol_type = other DNA
cactgattagtacgcg

SEQ ID NO: 16539 - DNA, 16 bp, synthetic construct
  misc_feature 1..16: note = synthetic [barcode part1]
  source 1..16: mol_type = other DNA
ttcggtcgtatatcac

SEQ ID NO: 16540 - DNA, 16 bp, synthetic construct
  misc_feature 1..16: note = synthetic [barcode part1]
  source 1..16: mol_type = other DNA
ttgaatactgcggacc

SEQ ID NO: 16541 - DNA, 16 bp, synthetic construct
  misc_feature 1..16: note = synthetic [barcode part1]
  source 1..16: mol_type = other DNA
ttgtgtcgcgaagact

SEQ ID NO: 16542 - DNA, 16 bp, synthetic construct
  misc_feature 1..16: note = synthetic [barcode part1]
  source 1..16: mol_type = other DNA
ttggcctattcaggcc

SEQ ID NO: 16543 - DNA, 16 bp, synthetic construct
  misc_feature 1..16: note = synthetic [barcode part1]
  source 1..16: mol_type = other DNA
acctgatctctgtgcg

SEQ ID NO: 16544 - DNA, 16 bp, synthetic construct
  misc_feature 1..16: note = synthetic [barcode part1]
  source 1..16: mol_type = other DNA
gttgttccactgtcct

SEQ ID NO: 16545 - DNA, 16 bp, synthetic construct
  misc_feature 1..16: note = synthetic [barcode part1]
  source 1..16: mol_type = other DNA
gtagacctcctgtcgt

SEQ ID NO: 16546 - DNA, 16 bp, synthetic construct
  misc_feature 1..16: note = synthetic [barcode part1]
  source 1..16: mol_type = other DNA
aacgagatcggcgtgt

SEQ ID NO: 16547 - DNA, 16 bp, synthetic construct
  misc_feature 1..16: note = synthetic [barcode part1]
  source 1..16: mol_type = other DNA
gcgttccttgaattgt

SEQ ID NO: 16548 - DNA, 16 bp, synthetic construct
  misc_feature 1..16: note = synthetic [barcode part1]
  source 1..16: mol_type = other DNA
ttcgatctgcacgatt

SEQ ID NO: 16549 - DNA, 16 bp, synthetic construct
  misc_feature 1..16: note = synthetic [barcode part1]
  source 1..16: mol_type = other DNA
tgttcacgtggtgcct

SEQ ID NO: 16550 - DNA, 16 bp, synthetic construct
  misc_feature 1..16: note = synthetic [barcode part1]
  source 1..16: mol_type = other DNA
caggcgttagtaaggc

SEQ ID NO: 16551 - DNA, 16 bp, synthetic construct
  misc_feature 1..16: note = synthetic [barcode part1]
  source 1..16: mol_type = other DNA
gtgcgcaactaactac

SEQ ID NO: 16552 - DNA, 16 bp, synthetic construct
  misc_feature 1..16: note = synthetic [barcode part1]
  source 1..16: mol_type = other DNA
gtacctaggacttgtg

SEQ ID NO: 16553 - DNA, 16 bp, synthetic construct
  misc_feature 1..16: note = synthetic [barcode part1]
  source 1..16: mol_type = other DNA
tcgtctggatagacac

SEQ ID NO: 16554 - DNA, 16 bp, synthetic construct
  misc_feature 1..16: note = synthetic [barcode part1]
  source 1..16: mol_type = other DNA
taccgcgtcttaagag

SEQ ID NO: 16555 - DNA, 16 bp, synthetic construct
  misc_feature 1..16: note = synthetic [barcode part1]
  source 1..16: mol_type = other DNA
actacacttggcgtag

SEQ ID NO: 16556 - DNA, 16 bp, synthetic construct
  misc_feature 1..16: note = synthetic [barcode part1]
  source 1..16: mol_type = other DNA
gtgattgccagtcctc

SEQ ID NO: 16557 - DNA, 16 bp, synthetic construct
  misc_feature 1..16: note = synthetic [barcode part1]
  source 1..16: mol_type = other DNA
gatcacacgattgcac

SEQ ID NO: 16558 - DNA, 16 bp, synthetic construct
  misc_feature 1..16: note = synthetic [barcode part1]
  source 1..16: mol_type = other DNA
tacactccgccagact

SEQ ID NO: 16559 - DNA, 16 bp, synthetic construct
  misc_feature 1..16: note = synthetic [barcode part1]
  source 1..16: mol_type = other DNA
gaactcgcagaagatt

SEQ ID NO: 16560 - DNA, 16 bp, synthetic construct
  misc_feature 1..16: note = synthetic [barcode part1]
  source 1..16: mol_type = other DNA
tctccgtgtagtccag

SEQ ID NO: 16561 - DNA, 16 bp, synthetic construct
  misc_feature 1..16: note = synthetic [barcode part1]
  source 1..16: mol_type = other DNA
aacctgagaggtgcac

SEQ ID NO: 16562 - DNA, 16 bp, synthetic construct
  misc_feature 1..16: note = synthetic [barcode part1]
  source 1..16: mol_type = other DNA
aaggcggaggtctgtt

SEQ ID NO: 16563 - DNA, 16 bp, synthetic construct
  misc_feature 1..16: note = synthetic [barcode part1]
  source 1..16: mol_type = other DNA
cagtaatagaacgcgt

SEQ ID NO: 16564 - DNA, 16 bp, synthetic construct
  misc_feature 1..16: note = synthetic [barcode part1]
  source 1..16: mol_type = other DNA
acactgaagaagtcac

SEQ ID NO: 16565 - DNA, 16 bp, synthetic construct
  misc_feature 1..16: note = synthetic [barcode part1]
  source 1..16: mol_type = other DNA
tatccgcgcgatactc

SEQ ID NO: 16566 - DNA, 16 bp, synthetic construct
  misc_feature 1..16: note = synthetic [barcode part1]
  source 1..16: mol_type = other DNA
cgcagaagtgtagaag

SEQ ID NO: 16567 - DNA, 16 bp, synthetic construct
  misc_feature 1..16: note = synthetic [barcode part1]
  source 1..16: mol_type = other DNA
gaattcgtctgatctc

SEQ ID NO: 16568 - DNA, 16 bp, synthetic construct
  misc_feature 1..16: note = synthetic [barcode part1]
  source 1..16: mol_type = other DNA
gactcaggactactgt

SEQ ID NO: 16569 - DNA, 16 bp, synthetic construct
  misc_feature 1..16: note = synthetic [barcode part1]
  source 1..16: mol_type = other DNA
tccagttgaaggacct

SEQ ID NO: 16570 - DNA, 16 bp, synthetic construct
  misc_feature 1..16: note = synthetic [barcode part1]
  source 1..16: mol_type = other DNA
cgtatcaattggcgtg

SEQ ID NO: 16571 - DNA, 16 bp, synthetic construct
  misc_feature 1..16: note = synthetic [barcode part1]
  source 1..16: mol_type = other DNA
aacgcgtgacctctct

SEQ ID NO: 16572 - DNA, 16 bp, synthetic construct
  misc_feature 1..16: note = synthetic [barcode part1]
  source 1..16: mol_type = other DNA
aggcgtactcctatag

SEQ ID NO: 16573 - DNA, 16 bp, synthetic construct
  misc_feature 1..16: note = synthetic [barcode part1]
  source 1..16: mol_type = other DNA
taactgcgccttccag

SEQ ID NO: 16574 - DNA, 16 bp, synthetic construct
  misc_feature 1..16: note = synthetic [barcode part1]
  source 1..16: mol_type = other DNA
aggagactgagaagtc

SEQ ID NO: 16575 - DNA, 16 bp, synthetic construct
  misc_feature 1..16: note = synthetic [barcode part1]
  source 1..16: mol_type = other DNA
ttccgcgacacttctt

SEQ ID NO: 16576 - DNA, 16 bp, synthetic construct
  misc_feature 1..16: note = synthetic [barcode part1]
  source 1..16: mol_type = other DNA
gccacaattcgtccgt

SEQ ID NO: 16577 - DNA, 16 bp, synthetic construct
  misc_feature 1..16: note = synthetic [barcode part1]
  source 1..16: mol_type = other DNA
cgcgaactactgtctc

SEQ ID NO: 16578 - DNA, 16 bp, synthetic construct
  misc_feature 1..16: note = synthetic [barcode part1]
  source 1..16: mol_type = other DNA
tagatcacgacctggt

SEQ ID NO: 16579 - DNA, 16 bp, synthetic construct
  misc_feature 1..16: note = synthetic [barcode part1]
  source 1..16: mol_type = other DNA
gaggtggttcgaacgt

SEQ ID NO: 16580 - DNA, 16 bp, synthetic construct
  misc_feature 1..16: note = synthetic [barcode part1]
  source 1..16: mol_type = other DNA
ataaggtcgtcgttcg

SEQ ID NO: 16581 - DNA, 16 bp, synthetic construct
  misc_feature 1..16: note = synthetic [barcode part1]
  source 1..16: mol_type = other DNA
ccgccgtctataagtc

SEQ ID NO: 16582 - DNA, 16 bp, synthetic construct
  misc_feature 1..16: note = synthetic [barcode part1]
  source 1..16: mol_type = other DNA
gagactcgcagtactt

SEQ ID NO: 16583 - DNA, 16 bp, synthetic construct
  misc_feature 1..16: note = synthetic [barcode part1]
  source 1..16: mol_type = other DNA
cactcacctcagaacc

SEQ ID NO: 16584 - DNA, 16 bp, synthetic construct
  misc_feature 1..16: note = synthetic [barcode part1]
  source 1..16: mol_type = other DNA
tctggaacttctcctc

SEQ ID NO: 16585 - DNA, 16 bp, synthetic construct
  misc_feature 1..16: note = synthetic [barcode part1]
  source 1..16: mol_type = other DNA
cggtacgtaataagac

SEQ ID NO: 16586 - DNA, 16 bp, synthetic construct
  misc_feature 1..16: note = synthetic [barcode part1]
  source 1..16: mol_type = other DNA
gtacgagtattagacg

SEQ ID NO: 16587 - DNA, 16 bp, synthetic construct
  misc_feature 1..16: note = synthetic [barcode part1]
  source 1..16: mol_type = other DNA
tgttacgaagactccg

SEQ ID NO: 16588 - DNA, 16 bp, synthetic construct
  misc_feature 1..16: note = synthetic [barcode part1]
  source 1..16: mol_type = other DNA
cacagtgacttactct

SEQ ID NO: 16589 - DNA, 16 bp, synthetic construct
  misc_feature 1..16: note = synthetic [barcode part1]
  source 1..16: mol_type = other DNA
tgtagacggtaagatc

SEQ ID NO: 16590 - DNA, 16 bp, synthetic construct
  misc_feature 1..16: note = synthetic [barcode part1]
  source 1..16: mol_type = other DNA
accttgcctgttgttc

SEQ ID NO: 16591 - DNA, 16 bp, synthetic construct
  misc_feature 1..16: note = synthetic [barcode part1]
  source 1..16: mol_type = other DNA
tggtgacaaccactgt

SEQ ID NO: 16592 - DNA, 16 bp, synthetic construct
  misc_feature 1..16: note = synthetic [barcode part1]
  source 1..16: mol_type = other DNA
gtattcgccgccttag

SEQ ID NO: 16593 - DNA, 16 bp, synthetic construct
  misc_feature 1..16: note = synthetic [barcode part1]
  source 1..16: mol_type = other DNA
gaatctcttgaccgag

SEQ ID NO: 16594 - DNA, 16 bp, synthetic construct
  misc_feature 1..16: note = synthetic [barcode part1]
  source 1..16: mol_type = other DNA
cgccgttatccaggtt

SEQ ID NO: 16595 - DNA, 16 bp, synthetic construct
  misc_feature 1..16: note = synthetic [barcode part1]
  source 1..16: mol_type = other DNA
tgttatagtcacggcg

SEQ ID NO: 16596 - DNA, 16 bp, synthetic construct
  misc_feature 1..16: note = synthetic [barcode part1]
  source 1..16: mol_type = other DNA
agtgttaggtctcggt

SEQ ID NO: 16597 - DNA, 16 bp, synthetic construct
  misc_feature 1..16: note = synthetic [barcode part1]
  source 1..16: mol_type = other DNA
gtaactgtggtcgtac

SEQ ID NO: 16598 - DNA, 16 bp, synthetic construct
  misc_feature 1..16: note = synthetic [barcode part1]
  source 1..16: mol_type = other DNA
gcaaggacggtctaac

SEQ ID NO: 16599 - DNA, 16 bp, synthetic construct
  misc_feature 1..16: note = synthetic [barcode part1]
  source 1..16: mol_type = other DNA
acttgttccacggcac

SEQ ID NO: 16600 - DNA, 16 bp, synthetic construct
  misc_feature 1..16: note = synthetic [barcode part1]
  source 1..16: mol_type = other DNA
agactaactggttccg

SEQ ID NO: 16601 - DNA, 16 bp, synthetic construct
  misc_feature 1..16: note = synthetic [barcode part1]
  source 1..16: mol_type = other DNA
tcaatctctcgcaggc

SEQ ID NO: 16602 - DNA, 16 bp, synthetic construct
  misc_feature 1..16: note = synthetic [barcode part1]
  source 1..16: mol_type = other DNA
cgtagtgccactcact

SEQ ID NO: 16603 - DNA, 16 bp, synthetic construct
  misc_feature 1..16: note = synthetic [barcode part1]
  source 1..16: mol_type = other DNA
cgactgaagtcgatct

SEQ ID NO: 16604 - DNA, 16 bp, synthetic construct
  misc_feature 1..16: note = synthetic [barcode part1]
  source 1..16: mol_type = other DNA
actacacgtgtggttg

SEQ ID NO: 16605 - DNA, 16 bp, synthetic construct
  misc_feature 1..16: note = synthetic [barcode part1]
  source 1..16: mol_type = other DNA
aatcgaatccgatccg

SEQ ID NO: 16606 - DNA, 16 bp, synthetic construct
  misc_feature 1..16: note = synthetic [barcode part1]
  source 1..16: mol_type = other DNA
acgcaataggatcaac

SEQ ID NO: 16607 - DNA, 16 bp, synthetic construct
  misc_feature 1..16: note = synthetic [barcode part1]
  source 1..16: mol_type = other DNA
gattcctgaaggtcgt

SEQ ID NO: 16608 - DNA, 16 bp, synthetic construct
  misc_feature 1..16: note = synthetic [barcode part1]
  source 1..16: mol_type = other DNA
actcctctaatcacag

SEQ ID NO: 16609 - DNA, 16 bp, synthetic construct
  misc_feature 1..16: note = synthetic [barcode part1]
  source 1..16: mol_type = other DNA
ccgtgttctatcaggc

SEQ ID NO: 16610 - DNA, 16 bp, synthetic construct
  misc_feature 1..16: note = synthetic [barcode part1]
  source 1..16: mol_type = other DNA
attacgcactatctcg

SEQ ID NO: 16611 - DNA, 16 bp, synthetic construct
  misc_feature 1..16: note = synthetic [barcode part1]
  source 1..16: mol_type = other DNA
cagtggttcagatcgt

SEQ ID NO: 16612 - DNA, 16 bp, synthetic construct
  misc_feature 1..16: note = synthetic [barcode part1]
  source 1..16: mol_type = other DNA
aactccaacaacaccg

SEQ ID NO: 16613 - DNA, 16 bp, synthetic construct
  misc_feature 1..16: note = synthetic [barcode part1]
  source 1..16: mol_type = other DNA
actgtagaggttctgc

SEQ ID NO: 16614 - DNA, 16 bp, synthetic construct
  misc_feature 1..16: note = synthetic [barcode part1]
  source 1..16: mol_type = other DNA
actgtagtgttacggc

SEQ ID NO: 16615 - DNA, 16 bp, synthetic construct
  misc_feature 1..16: note = synthetic [barcode part1]
  source 1..16: mol_type = other DNA
tctgacttacgtggtt

SEQ ID NO: 16616 - DNA, 16 bp, synthetic construct
  misc_feature 1..16: note = synthetic [barcode part1]
  source 1..16: mol_type = other DNA
agtaccttaaggagtg

SEQ ID NO: 16617 - DNA, 16 bp, synthetic construct
  misc_feature 1..16: note = synthetic [barcode part1]
  source 1..16: mol_type = other DNA
gacaacttcaagtcgc

SEQ ID NO: 16618 - DNA, 16 bp, synthetic construct
  misc_feature 1..16: note = synthetic [barcode part1]
  source 1..16: mol_type = other DNA
gcgatatactgtgacc

SEQ ID NO: 16619 - DNA, 16 bp, synthetic construct
  misc_feature 1..16: note = synthetic [barcode part1]
  source 1..16: mol_type = other DNA
tggcagaaggtctgtg

SEQ ID NO: 16620 - DNA, 16 bp, synthetic construct
  misc_feature 1..16: note = synthetic [barcode part1]
  source 1..16: mol_type = other DNA
tctatcttggacggag

SEQ ID NO: 16621 - DNA, 16 bp, synthetic construct
  misc_feature 1..16: note = synthetic [barcode part1]
  source 1..16: mol_type = other DNA
cacttgaagttacgcg

SEQ ID NO: 16622 - DNA, 16 bp, synthetic construct
  misc_feature 1..16: note = synthetic [barcode part1]
  source 1..16: mol_type = other DNA
accacagatctcaggt

SEQ ID NO: 16623 - DNA, 16 bp, synthetic construct
  misc_feature 1..16: note = synthetic [barcode part1]
  source 1..16: mol_type = other DNA
acgtgtatagtcggtc

SEQ ID NO: 16624 - DNA, 16 bp, synthetic construct
  misc_feature 1..16: note = synthetic [barcode part1]
  source 1..16: mol_type = other DNA
gcaatcagtcgtgtac

SEQ ID NO: 16625 - DNA, 16 bp, synthetic construct
  misc_feature 1..16: note = synthetic [barcode part1]
  source 1..16: mol_type = other DNA
tcgagacagacagatt

SEQ ID NO: 16626 - DNA, 16 bp, synthetic construct
  misc_feature 1..16: note = synthetic [barcode part1]
  source 1..16: mol_type = other DNA
ttacacctgagtcgtt

SEQ ID NO: 16627 - DNA, 16 bp, synthetic construct
  misc_feature 1..16: note = synthetic [barcode part1]
  source 1..16: mol_type = other DNA
ccacaatctcttctcg

SEQ ID NO: 16628 - DNA, 16 bp, synthetic construct
  misc_feature 1..16: note = synthetic [barcode part1]
  source 1..16: mol_type = other DNA
tacacactcgagatcg

SEQ ID NO: 16629 - DNA, 16 bp, synthetic construct
  misc_feature 1..16: note = synthetic [barcode part1]
  source 1..16: mol_type = other DNA
ccgaagtcgttcacct

SEQ ID NO: 16630 - DNA, 16 bp, synthetic construct
  misc_feature 1..16: note = synthetic [barcode part1]
  source 1..16: mol_type = other DNA
acggcggattcaagtg

SEQ ID NO: 16631 - DNA, 16 bp, synthetic construct
  misc_feature 1..16: note = synthetic [barcode part1]
  source 1..16: mol_type = other DNA
accgtatccgaatacg

SEQ ID NO: 16632 - DNA, 16 bp, synthetic construct
  misc_feature 1..16: note = synthetic [barcode part1]
  source 1..16: mol_type = other DNA
tcgtgtatcaattccg

SEQ ID NO: 16633 - DNA, 16 bp, synthetic construct
  misc_feature 1..16: note = synthetic [barcode part1]
  source 1..16: mol_type = other DNA
cacggcgatctacctt

SEQ ID NO: 16634 - DNA, 16 bp, synthetic construct
  misc_feature 1..16: note = synthetic [barcode part1]
  source 1..16: mol_type = other DNA
tgaatcgaaccgtcac

SEQ ID NO: 16635 - DNA, 16 bp, synthetic construct
  misc_feature 1..16: note = synthetic [barcode part1]
  source 1..16: mol_type = other DNA
aggttctcctcagaag

SEQ ID NO: 16636 - DNA, 16 bp, synthetic construct
  misc_feature 1..16: note = synthetic [barcode part1]
  source 1..16: mol_type = other DNA
tgttgactggtacacg

SEQ ID NO: 16637 - DNA, 16 bp, synthetic construct
  misc_feature 1..16: note = synthetic [barcode part1]
  source 1..16: mol_type = other DNA
ataacagacgactacg

SEQ ID NO: 16638 - DNA, 16 bp, synthetic construct
  misc_feature 1..16: note = synthetic [barcode part1]
  source 1..16: mol_type = other DNA
aagtagtgaccacgcg

SEQ ID NO: 16639 - DNA, 16 bp, synthetic construct
  misc_feature 1..16: note = synthetic [barcode part1]
  source 1..16: mol_type = other DNA
gcctcttctagtcttg

SEQ ID NO: 16640 - DNA, 16 bp, synthetic construct
  misc_feature 1..16: note = synthetic [barcode part1]
  source 1..16: mol_type = other DNA
ttatagaacggaacgc

SEQ ID NO: 16641 - DNA, 16 bp, synthetic construct
  misc_feature 1..16: note = synthetic [barcode part1]
  source 1..16: mol_type = other DNA
tctctgaggagagtct

SEQ ID NO: 16642 - DNA, 16 bp, synthetic construct
  misc_feature 1..16: note = synthetic [barcode part1]
  source 1..16: mol_type = other DNA
attcttcactagtgcg

SEQ ID NO: 16643 - DNA, 16 bp, synthetic construct
  misc_feature 1..16: note = synthetic [barcode part1]
  source 1..16: mol_type = other DNA
taatcctatcacacgc

SEQ ID NO: 16644 - DNA, 16 bp, synthetic construct
  misc_feature 1..16: note = synthetic [barcode part1]
  source 1..16: mol_type = other DNA
aattgcgttcctcaac

SEQ ID NO: 16645 - DNA, 16 bp, synthetic construct
  misc_feature 1..16: note = synthetic [barcode part1]
  source 1..16: mol_type = other DNA
tctggaatacagtgcc

SEQ ID NO: 16646 - DNA, 16 bp, synthetic construct
  misc_feature 1..16: note = synthetic [barcode part1]
  source 1..16: mol_type = other DNA
tcgaggattgacgcag

SEQ ID NO: 16647 - DNA, 16 bp, synthetic construct
  misc_feature 1..16: note = synthetic [barcode part1]
  source 1..16: mol_type = other DNA
tacacgtcagttggtg

SEQ ID NO: 16648 - DNA, 16 bp, synthetic construct
  misc_feature 1..16: note = synthetic [barcode part1]
  source 1..16: mol_type = other DNA
cgttgccgaacacctt

SEQ ID NO: 16649 - DNA, 16 bp, synthetic construct
  misc_feature 1..16: note = synthetic [barcode part1]
  source 1..16: mol_type = other DNA
tgaatcctagacaccg

SEQ ID NO: 16650 - DNA, 16 bp, synthetic construct
  misc_feature 1..16: note = synthetic [barcode part1]
  source 1..16: mol_type = other DNA
gtcctcagtaatccgc

SEQ ID NO: 16651 - DNA, 16 bp, synthetic construct
  misc_feature 1..16: note = synthetic [barcode part1]
  source 1..16: mol_type = other DNA
atctgagtgagacggc

SEQ ID NO: 16652 - DNA, 16 bp, synthetic construct
  misc_feature 1..16: note = synthetic [barcode part1]
  source 1..16: mol_type = other DNA
acgcaagtggatcacg

SEQ ID NO: 16653 - DNA, 16 bp, synthetic construct
  misc_feature 1..16: note = synthetic [barcode part1]
  source 1..16: mol_type = other DNA
tgcctctaatctaacg

SEQ ID NO: 16654 - DNA, 16 bp, synthetic construct
  misc_feature 1..16: note = synthetic [barcode part1]
  source 1..16: mol_type = other DNA
aatacttccgtgcgag

SEQ ID NO: 16655 - DNA, 16 bp, synthetic construct
  misc_feature 1..16: note = synthetic [barcode part1]
  source 1..16: mol_type = other DNA
agagaacagtgtgtct

SEQ ID NO: 16656 - DNA, 16 bp, synthetic construct
  misc_feature 1..16: note = synthetic [barcode part1]
  source 1..16: mol_type = other DNA
tgactgtctgttatcg

SEQ ID NO: 16657 - DNA, 16 bp, synthetic construct
  misc_feature 1..16: note = synthetic [barcode part1]
  source 1..16: mol_type = other DNA
aacttctggaggttgc

SEQ ID NO: 16658 - DNA, 16 bp, synthetic construct
  misc_feature 1..16: note = synthetic [barcode part1]
  source 1..16: mol_type = other DNA
gaaccgaactagtgcg

SEQ ID NO: 16659 - DNA, 16 bp, synthetic construct
  misc_feature 1..16: note = synthetic [barcode part1]
  source 1..16: mol_type = other DNA
ttattccgagacggtg

SEQ ID NO: 16660 - DNA, 16 bp, synthetic construct
  misc_feature 1..16: note = synthetic [barcode part1]
  source 1..16: mol_type = other DNA
attcgagttcgttacc

SEQ ID NO: 16661 - DNA, 16 bp, synthetic construct
  misc_feature 1..16: note = synthetic [barcode part1]
  source 1..16: mol_type = other DNA
tccagttgcgtcaatt

SEQ ID NO: 16662 - DNA, 16 bp, synthetic construct
  misc_feature 1..16: note = synthetic [barcode part1]
  source 1..16: mol_type = other DNA
ccggcagataggaact

SEQ ID NO: 16663 - DNA, 16 bp, synthetic construct
  misc_feature 1..16: note = synthetic [barcode part1]
  source 1..16: mol_type = other DNA
ttatccaagtaccacc

SEQ ID NO: 16664 - DNA, 16 bp, synthetic construct
  misc_feature 1..16: note = synthetic [barcode part1]
  source 1..16: mol_type = other DNA
aacacacgatctcttc

SEQ ID NO: 16665 - DNA, 16 bp, synthetic construct
  misc_feature 1..16: note = synthetic [barcode part1]
  source 1..16: mol_type = other DNA
gcgaaggttccgtatt

SEQ ID NO: 16666 - DNA, 16 bp, synthetic construct
  misc_feature 1..16: note = synthetic [barcode part1]
  source 1..16: mol_type = other DNA
tggtgccggtaagtag

SEQ ID NO: 16667 - DNA, 16 bp, synthetic construct
  misc_feature 1..16: note = synthetic [barcode part1]
  source 1..16: mol_type = other DNA
tcaggcgagtgagatc

SEQ ID NO: 16668 - DNA, 16 bp, synthetic construct
  misc_feature 1..16: note = synthetic [barcode part1]
  source 1..16: mol_type = other DNA
tgttgtgcagtgtcag

SEQ ID NO: 16669 - DNA, 16 bp, synthetic construct
  misc_feature 1..16: note = synthetic [barcode part1]
  source 1..16: mol_type = other DNA
ccaattcttcacgagt

SEQ ID NO: 16670 - DNA, 16 bp, synthetic construct
  misc_feature 1..16: note = synthetic [barcode part1]
  source 1..16: mol_type = other DNA
tgaatcgtcttgtacc

SEQ ID NO: 16671 - DNA, 16 bp, synthetic construct
  misc_feature 1..16: note = synthetic [barcode part1]
  source 1..16: mol_type = other DNA
gaacttctagttggcg

SEQ ID NO: 16672 - DNA, 16 bp, synthetic construct
  misc_feature 1..16: note = synthetic [barcode part1]
  source 1..16: mol_type = other DNA
tattctcggtcgccag

SEQ ID NO: 16673 - DNA, 16 bp, synthetic construct
  misc_feature 1..16: note = synthetic [barcode part1]
  source 1..16: mol_type = other DNA
cgtacaactcaacttc

SEQ ID NO: 16674 - DNA, 16 bp, synthetic construct
  misc_feature 1..16: note = synthetic [barcode part1]
  source 1..16: mol_type = other DNA
cggagttctctgaagt

SEQ ID NO: 16675 - DNA, 16 bp, synthetic construct
  misc_feature 1..16: note = synthetic [barcode part1]
  source 1..16: mol_type = other DNA
gaacgacctaagtgcg

SEQ ID NO: 16676 - DNA, 16 bp, synthetic construct
  misc_feature 1..16: note = synthetic [barcode part1]
  source 1..16: mol_type = other DNA
tgtgtcagtgtaccag

SEQ ID NO: 16677 - DNA, 16 bp, synthetic construct
  misc_feature 1..16: note = synthetic [barcode part1]
  source 1..16: mol_type = other DNA
agatctaggatcaggt

SEQ ID NO: 16678 - DNA, 16 bp, synthetic construct
  misc_feature 1..16: note = synthetic [barcode part1]
  source 1..16: mol_type = other DNA
agtgttccgaggaacg

SEQ ID NO: 16679 - DNA, 16 bp, synthetic construct
  misc_feature 1..16: note = synthetic [barcode part1]
  source 1..16: mol_type = other DNA
tgactgttattctgcg

SEQ ID NO: 16680 - DNA, 16 bp, synthetic construct
  misc_feature 1..16: note = synthetic [barcode part1]
  source 1..16: mol_type = other DNA
ttgcacttctggtagt

SEQ ID NO: 16681 - DNA, 16 bp, synthetic construct
  misc_feature 1..16: note = synthetic [barcode part1]
  source 1..16: mol_type = other DNA
aagttagtctcggtcg

SEQ ID NO: 16682 - DNA, 16 bp, synthetic construct
  misc_feature 1..16: note = synthetic [barcode part1]
  source 1..16: mol_type = other DNA
tacgacaacgaacggc

SEQ ID NO: 16683 - DNA, 16 bp, synthetic construct
  misc_feature 1..16: note = synthetic [barcode part1]
  source 1..16: mol_type = other DNA
gtactcttcctgcgtt

SEQ ID NO: 16684 - DNA, 16 bp, synthetic construct
  misc_feature 1..16: note = synthetic [barcode part1]
  source 1..16: mol_type = other DNA
aggagatcctagtcct

SEQ ID NO: 16685 - DNA, 16 bp, synthetic construct
  misc_feature 1..16: note = synthetic [barcode part1]
  source 1..16: mol_type = other DNA
gccaagtacggagact

SEQ ID NO: 16686 - DNA, 16 bp, synthetic construct
  misc_feature 1..16: note = synthetic [barcode part1]
  source 1..16: mol_type = other DNA
gtgtgtaaggaccttc

SEQ ID NO: 16687 - DNA, 16 bp, synthetic construct
  misc_feature 1..16: note = synthetic [barcode part1]
  source 1..16: mol_type = other DNA
gtccaggaccttactc

SEQ ID NO: 16688 - DNA, 16 bp, synthetic construct
  misc_feature 1..16: note = synthetic [barcode part1]
  source 1..16: mol_type = other DNA
cctggttctagagaac

SEQ ID NO: 16689 - DNA, 16 bp, synthetic construct
  misc_feature 1..16: note = synthetic [barcode part1]
  source 1..16: mol_type = other DNA
acgcggtgaagttgac

SEQ ID NO: 16690 - DNA, 16 bp, synthetic construct
  misc_feature 1..16: note = synthetic [barcode part1]
  source 1..16: mol_type = other DNA
caattcgtcacgcctg

SEQ ID NO: 16691 - DNA, 16 bp, synthetic construct
  misc_feature 1..16: note = synthetic [barcode part1]
  source 1..16: mol_type = other DNA
tagagtacacttcgcg

SEQ ID NO: 16692 - DNA, 16 bp, synthetic construct
  misc_feature 1..16: note = synthetic [barcode part1]
  source 1..16: mol_type = other DNA
cgagtgcaggaattgc

SEQ ID NO: 16693 - DNA, 16 bp, synthetic construct
  misc_feature 1..16: note = synthetic [barcode part1]
  source 1..16: mol_type = other DNA
agtgattcacgttcct

SEQ ID NO: 16694 - DNA, 16 bp, synthetic construct
  misc_feature 1..16: note = synthetic [barcode part1]
  source 1..16: mol_type = other DNA
gatcacggaagtcggt

SEQ ID NO: 16695 - DNA, 16 bp, synthetic construct
  misc_feature 1..16: note = synthetic [barcode part1]
  source 1..16: mol_type = other DNA
atccgagtgtcgtcct

SEQ ID NO: 16696 - DNA, 16 bp, synthetic construct
  misc_feature 1..16: note = synthetic [barcode part1]
  source 1..16: mol_type = other DNA
ccagttcacctcttac

SEQ ID NO: 16697 - DNA, 16 bp, synthetic construct
  misc_feature 1..16: note = synthetic [barcode part1]
  source 1..16: mol_type = other DNA
gcagattattgaaggc

SEQ ID NO: 16698 - DNA, 16 bp, synthetic construct
  misc_feature 1..16: note = synthetic [barcode part1]
  source 1..16: mol_type = other DNA
gtctctcagttaggag

SEQ ID NO: 16699 - DNA, 16 bp, synthetic construct
  misc_feature 1..16: note = synthetic [barcode part1]
  source 1..16: mol_type = other DNA
cacgcaatcgccactt

SEQ ID NO: 16700 - DNA, 16 bp, synthetic construct
  misc_feature 1..16: note = synthetic [barcode part1]
  source 1..16: mol_type = other DNA
ccggtaacctacacct

SEQ ID NO: 16701 - DNA, 16 bp, synthetic construct
  misc_feature 1..16: note = synthetic [barcode part1]
  source 1..16: mol_type = other DNA
actcagagtgagtctc

SEQ ID NO: 16702 - DNA, 16 bp, synthetic construct
  misc_feature 1..16: note = synthetic [barcode part1]
  source 1..16: mol_type = other DNA
actatagatccgcctt

SEQ ID NO: 16703 - DNA, 16 bp, synthetic construct
  misc_feature 1..16: note = synthetic [barcode part1]
  source 1..16: mol_type = other DNA
gttcaactgacgactg

SEQ ID NO: 16704 - DNA, 16 bp, synthetic construct
  misc_feature 1..16: note = synthetic [barcode part1]
  source 1..16: mol_type = other DNA
gtggagataacggtcc

SEQ ID NO: 16705 - DNA, 16 bp, synthetic construct
  misc_feature 1..16: note = synthetic [barcode part1]
  source 1..16: mol_type = other DNA
cactctggatatccgc

SEQ ID NO: 16706 - DNA, 16 bp, synthetic construct
  misc_feature 1..16: note = synthetic [barcode part1]
  source 1..16: mol_type = other DNA
ccttagttggcaaggt

SEQ ID NO: 16707 - DNA, 16 bp, synthetic construct
  misc_feature 1..16: note = synthetic [barcode part1]
  source 1..16: mol_type = other DNA
agttggttatacgcgc

SEQ ID NO: 16708 - DNA, 16 bp, synthetic construct
  misc_feature 1..16: note = synthetic [barcode part1]
  source 1..16: mol_type = other DNA
gcctccaactcttgtt

SEQ ID NO: 16709 - DNA, 16 bp, synthetic construct
  misc_feature 1..16: note = synthetic [barcode part1]
  source 1..16: mol_type = other DNA
actaggttgagaacac

SEQ ID NO: 16710 - DNA, 16 bp, synthetic construct
  misc_feature 1..16: note = synthetic [barcode part1]
  source 1..16: mol_type = other DNA
caggattgccaactac

SEQ ID NO: 16711 - DNA, 16 bp, synthetic construct
  misc_feature 1..16: note = synthetic [barcode part1]
  source 1..16: mol_type = other DNA
cagttgaccgaagttc

SEQ ID NO: 16712 - DNA, 16 bp, synthetic construct
  misc_feature 1..16: note = synthetic [barcode part1]
  source 1..16: mol_type = other DNA
ccagttcacggaatac

SEQ ID NO: 16713 - DNA, 16 bp, synthetic construct
  misc_feature 1..16: note = synthetic [barcode part1]
  source 1..16: mol_type = other DNA
gttcctctcagttctg

SEQ ID NO: 16714 - DNA, 16 bp, synthetic construct
  misc_feature 1..16: note = synthetic [barcode part1]
  source 1..16: mol_type = other DNA
tgttgcaaccacagtg

SEQ ID NO: 16715 - DNA, 16 bp, synthetic construct
  misc_feature 1..16: note = synthetic [barcode part1]
  source 1..16: mol_type = other DNA
ttgacacttggtcttg

SEQ ID NO: 16716 - DNA, 16 bp, synthetic construct
  misc_feature 1..16: note = synthetic [barcode part1]
  source 1..16: mol_type = other DNA
tccgtgtattactgac

SEQ ID NO: 16717 - DNA, 16 bp, synthetic construct
  misc_feature 1..16: note = synthetic [barcode part1]
  source 1..16: mol_type = other DNA
cgacaatacgcaaggc

SEQ ID NO: 16718 - DNA, 16 bp, synthetic construct
  misc_feature 1..16: note = synthetic [barcode part1]
  source 1..16: mol_type = other DNA
gttgttcgtaagtcct

SEQ ID NO: 16719 - DNA, 16 bp, synthetic construct
  misc_feature 1..16: note = synthetic [barcode part1]
  source 1..16: mol_type = other DNA
tcacacagtactggtg

SEQ ID NO: 16720 - DNA, 16 bp, synthetic construct
  misc_feature 1..16: note = synthetic [barcode part1]
  source 1..16: mol_type = other DNA
tgatcagttggttggc

SEQ ID NO: 16721 - DNA, 16 bp, synthetic construct
  misc_feature 1..16: note = synthetic [barcode part1]
  source 1..16: mol_type = other DNA
tggcgtaacgtgatct

SEQ ID NO: 16722 - DNA, 16 bp, synthetic construct
  misc_feature 1..16: note = synthetic [barcode part1]
  source 1..16: mol_type = other DNA
agaccacggtaatcct

SEQ ID NO: 16723 - DNA, 16 bp, synthetic construct
  misc_feature 1..16: note = synthetic [barcode part1]
  source 1..16: mol_type = other DNA
caacgatcctccacac

SEQ ID NO: 16724 - DNA, 16 bp, synthetic construct
  misc_feature 1..16: note = synthetic [barcode part1]
  source 1..16: mol_type = other DNA
aacctaaggtcgtcgt

SEQ ID NO: 16725 - DNA, 16 bp, synthetic construct
  misc_feature 1..16: note = synthetic [barcode part1]
  source 1..16: mol_type = other DNA
ataggtcaatccgtgc

SEQ ID NO: 16726 - DNA, 16 bp, synthetic construct
  misc_feature 1..16: note = synthetic [barcode part1]
  source 1..16: mol_type = other DNA
cgaagttgagaaggac

SEQ ID NO: 16727 - DNA, 16 bp, synthetic construct
  misc_feature 1..16: note = synthetic [barcode part1]
  source 1..16: mol_type = other DNA
ttagacgttgccttac

SEQ ID NO: 16728 - DNA, 16 bp, synthetic construct
  misc_feature 1..16: note = synthetic [barcode part1]
  source 1..16: mol_type = other DNA
tcaacctatccgaact

SEQ ID NO: 16729 - DNA, 16 bp, synthetic construct
  misc_feature 1..16: note = synthetic [barcode part1]
  source 1..16: mol_type = other DNA
tgcacaagtaaccgtc

SEQ ID NO: 16730 - DNA, 16 bp, synthetic construct
  misc_feature 1..16: note = synthetic [barcode part1]
  source 1..16: mol_type = other DNA
atctagatccaccact

SEQ ID NO: 16731 - DNA, 16 bp, synthetic construct
  misc_feature 1..16: note = synthetic [barcode part1]
  source 1..16: mol_type = other DNA
cggaacttcaactggt

SEQ ID NO: 16732 - DNA, 16 bp, synthetic construct
  misc_feature 1..16: note = synthetic [barcode part1]
  source 1..16: mol_type = other DNA
aagacctctcacctgc

SEQ ID NO: 16733 - DNA, 16 bp, synthetic construct
  misc_feature 1..16: note = synthetic [barcode part1]
  source 1..16: mol_type = other DNA
ttagttcctcacgaac

SEQ ID NO: 16734 - DNA, 16 bp, synthetic construct
  misc_feature 1..16: note = synthetic [barcode part1]
  source 1..16: mol_type = other DNA
acgccgagtataactc

SEQ ID NO: 16735 - DNA, 16 bp, synthetic construct
  misc_feature 1..16: note = synthetic [barcode part1]
  source 1..16: mol_type = other DNA
tggttgtcaccaacag

SEQ ID NO: 16736 - DNA, 16 bp, synthetic construct
  misc_feature 1..16: note = synthetic [barcode part1]
  source 1..16: mol_type = other DNA
tgccagaacttctact

SEQ ID NO: 16737 - DNA, 16 bp, synthetic construct
  misc_feature 1..16: note = synthetic [barcode part1]
  source 1..16: mol_type = other DNA
ttgtggattgttgtcc

SEQ ID NO: 16738 - DNA, 16 bp, synthetic construct
  misc_feature 1..16: note = synthetic [barcode part1]
  source 1..16: mol_type = other DNA
ttggtcctgttagtac

SEQ ID NO: 16739 - DNA, 16 bp, synthetic construct
  misc_feature 1..16: note = synthetic [barcode part1]
  source 1..16: mol_type = other DNA
tccgatcgtacactgc

SEQ ID NO: 16740 - DNA, 16 bp, synthetic construct
  misc_feature 1..16: note = synthetic [barcode part1]
  source 1..16: mol_type = other DNA
gcaagtgatctatccg

SEQ ID NO: 16741 - DNA, 16 bp, synthetic construct
  misc_feature 1..16: note = synthetic [barcode part1]
  source 1..16: mol_type = other DNA
tagattatacgcctcc

SEQ ID NO: 16742 - DNA, 16 bp, synthetic construct
  misc_feature 1..16: note = synthetic [barcode part1]
  source 1..16: mol_type = other DNA
gttcgaaccacctcac

SEQ ID NO: 16743 - DNA, 16 bp, synthetic construct
  misc_feature 1..16: note = synthetic [barcode part1]
  source 1..16: mol_type = other DNA
ccttgaccaacaagac

SEQ ID NO: 16744 - DNA, 16 bp, synthetic construct
  misc_feature 1..16: note = synthetic [barcode part1]
  source 1..16: mol_type = other DNA
agtgtgttgtgtgacc

SEQ ID NO: 16745 - DNA, 16 bp, synthetic construct
  misc_feature 1..16: note = synthetic [barcode part1]
  source 1..16: mol_type = other DNA
ttgcagttggtgtcag

SEQ ID NO: 16746 - DNA, 16 bp, synthetic construct
  misc_feature 1..16: note = synthetic [barcode part1]
  source 1..16: mol_type = other DNA
atataacggaactggc

SEQ ID NO: 16747 - DNA, 16 bp, synthetic construct
  misc_feature 1..16: note = synthetic [barcode part1]
  source 1..16: mol_type = other DNA
gcactctaatctggcc

SEQ ID NO: 16748 - DNA, 16 bp, synthetic construct
  misc_feature 1..16: note = synthetic [barcode part1]
  source 1..16: mol_type = other DNA
cgtagagtggcagttg

SEQ ID NO: 16749 - DNA, 16 bp, synthetic construct
  misc_feature 1..16: note = synthetic [barcode part1]
  source 1..16: mol_type = other DNA
gactggttcaggatct

SEQ ID NO: 16750 - DNA, 16 bp, synthetic construct
  misc_feature 1..16: note = synthetic [barcode part1]
  source 1..16: mol_type = other DNA
ttcagagtggcactac

SEQ ID NO: 16751 - DNA, 16 bp, synthetic construct
  misc_feature 1..16: note = synthetic [barcode part1]
  source 1..16: mol_type = other DNA
gcagaccgattgtatc

SEQ ID NO: 16752 - DNA, 16 bp, synthetic construct
  misc_feature 1..16: note = synthetic [barcode part1]
  source 1..16: mol_type = other DNA
tgttgcagttggtcag

SEQ ID NO: 16753 - DNA, 16 bp, synthetic construct
  misc_feature 1..16: note = synthetic [barcode part1]
  source 1..16: mol_type = other DNA
agtactagtgcgcgtt

SEQ ID NO: 16754 - DNA, 16 bp, synthetic construct
  misc_feature 1..16: note = synthetic [barcode part1]
  source 1..16: mol_type = other DNA
cctgatccaactacgc

SEQ ID NO: 16755 - DNA, 16 bp, synthetic construct
  misc_feature 1..16: note = synthetic [barcode part1]
  source 1..16: mol_type = other DNA
tggtcaatacacacgc

SEQ ID NO: 16756 - DNA, 16 bp, synthetic construct
  misc_feature 1..16: note = synthetic [barcode part1]
  source 1..16: mol_type = other DNA
gcaaggaattgaactc

SEQ ID NO: 16757 - DNA, 16 bp, synthetic construct
  misc_feature 1..16: note = synthetic [barcode part1]
  source 1..16: mol_type = other DNA
cgaagactacttccag

SEQ ID NO: 16758 - DNA, 16 bp, synthetic construct
  misc_feature 1..16: note = synthetic [barcode part1]
  source 1..16: mol_type = other DNA
ccactacttatctcgc

SEQ ID NO: 16759 - DNA, 16 bp, synthetic construct
  misc_feature 1..16: note = synthetic [barcode part1]
  source 1..16: mol_type = other DNA
caggaactaggtcacg

SEQ ID NO: 16760 - DNA, 16 bp, synthetic construct
  misc_feature 1..16: note = synthetic [barcode part1]
  source 1..16: mol_type = other DNA
acgagttaaggaccgc

SEQ ID NO: 16761 - DNA, 16 bp, synthetic construct
  misc_feature 1..16: note = synthetic [barcode part1]
  source 1..16: mol_type = other DNA
tacgacactgcgatac

SEQ ID NO: 16762 - DNA, 16 bp, synthetic construct
  misc_feature 1..16: note = synthetic [barcode part1]
  source 1..16: mol_type = other DNA
tgttgaggtccagtac

SEQ ID NO: 16763 - DNA, 16 bp, synthetic construct
  misc_feature 1..16: note = synthetic [barcode part1]
  source 1..16: mol_type = other DNA
tcgccgtgtgaatcct

SEQ ID NO: 16764 - DNA, 16 bp, synthetic construct
  misc_feature 1..16: note = synthetic [barcode part1]
  source 1..16: mol_type = other DNA
cgacttctagtcgtgc

SEQ ID NO: 16765 - DNA, 16 bp, synthetic construct
  misc_feature 1..16: note = synthetic [barcode part1]
  source 1..16: mol_type = other DNA
cactactggcgtgtct

SEQ ID NO: 16766 - DNA, 16 bp, synthetic construct
  misc_feature 1..16: note = synthetic [barcode part1]
  source 1..16: mol_type = other DNA
tggtgtgtcttactgt

SEQ ID NO: 16767 - DNA, 16 bp, synthetic construct
  misc_feature 1..16: note = synthetic [barcode part1]
  source 1..16: mol_type = other DNA
cggccttgcgtattgt

SEQ ID NO: 16768 - DNA, 16 bp, synthetic construct
  misc_feature 1..16: note = synthetic [barcode part1]
  source 1..16: mol_type = other DNA
gcaacagataactacg

SEQ ID NO: 16769 - DNA, 16 bp, synthetic construct
  misc_feature 1..16: note = synthetic [barcode part1]
  source 1..16: mol_type = other DNA
gtatctcggtctaact

SEQ ID NO: 16770 - DNA, 16 bp, synthetic construct
  misc_feature 1..16: note = synthetic [barcode part1]
  source 1..16: mol_type = other DNA
cggatagtccagagtg

SEQ ID NO: 16771 - DNA, 16 bp, synthetic construct
  misc_feature 1..16: note = synthetic [barcode part1]
  source 1..16: mol_type = other DNA
atagtccgcctgatag

SEQ ID NO: 16772 - DNA, 16 bp, synthetic construct
  misc_feature 1..16: note = synthetic [barcode part1]
  source 1..16: mol_type = other DNA
gccttaagtacacacg

SEQ ID NO: 16773 - DNA, 16 bp, synthetic construct
  misc_feature 1..16: note = synthetic [barcode part1]
  source 1..16: mol_type = other DNA
gagtgagtatcgtaac

SEQ ID NO: 16774 - DNA, 16 bp, synthetic construct
  misc_feature 1..16: note = synthetic [barcode part1]
  source 1..16: mol_type = other DNA
attccgaccttccttg

SEQ ID NO: 16775 - DNA, 16 bp, synthetic construct
  misc_feature 1..16: note = synthetic [barcode part1]
  source 1..16: mol_type = other DNA
agataaggtctgcctc

SEQ ID NO: 16776 - DNA, 16 bp, synthetic construct
  misc_feature 1..16: note = synthetic [barcode part1]
  source 1..16: mol_type = other DNA
cagatcgagaatacgt

SEQ ID NO: 16777 - DNA, 16 bp, synthetic construct
  misc_feature 1..16: note = synthetic [barcode part1]
  source 1..16: mol_type = other DNA
ccgcacaggttaagag

SEQ ID NO: 16778 - DNA, 16 bp, synthetic construct
  misc_feature 1..16: note = synthetic [barcode part1]
  source 1..16: mol_type = other DNA
ttaacctgttcaggtc

SEQ ID NO: 16779 - DNA, 16 bp, synthetic construct
  misc_feature 1..16: note = synthetic [barcode part1]
  source 1..16: mol_type = other DNA
caccttctgtatcctg

SEQ ID NO: 16780 - DNA, 16 bp, synthetic construct
  misc_feature 1..16: note = synthetic [barcode part1]
  source 1..16: mol_type = other DNA
tcggtgactatactct

SEQ ID NO: 16781 - DNA, 16 bp, synthetic construct
  misc_feature 1..16: note = synthetic [barcode part1]
  source 1..16: mol_type = other DNA
accttagtagttggcg

SEQ ID NO: 16782 - DNA, 16 bp, synthetic construct
  misc_feature 1..16: note = synthetic [barcode part1]
  source 1..16: mol_type = other DNA
tcaggactattgcggt

SEQ ID NO: 16783 - DNA, 16 bp, synthetic construct
  misc_feature 1..16: note = synthetic [barcode part1]
  source 1..16: mol_type = other DNA
aactctccgtggacct

SEQ ID NO: 16784 - DNA, 16 bp, synthetic construct
  misc_feature 1..16: note = synthetic [barcode part1]
  source 1..16: mol_type = other DNA
cgttaaggtaacctgc

SEQ ID NO: 16785 - DNA, 16 bp, synthetic construct
  misc_feature 1..16: note = synthetic [barcode part1]
  source 1..16: mol_type = other DNA
tctaggttggactcag

SEQ ID NO: 16786 - DNA, 16 bp, synthetic construct
  misc_feature 1..16: note = synthetic [barcode part1]
  source 1..16: mol_type = other DNA
agaaccgttagtacag

SEQ ID NO: 16787 - DNA, 16 bp, synthetic construct
  misc_feature 1..16: note = synthetic [barcode part1]
  source 1..16: mol_type = other DNA
aggtgaagacgccact

SEQ ID NO: 16788 - DNA, 16 bp, synthetic construct
  misc_feature 1..16: note = synthetic [barcode part1]
  source 1..16: mol_type = other DNA
gtcctggaacttcaag

SEQ ID NO: 16789 - DNA, 16 bp, synthetic construct
  misc_feature 1..16: note = synthetic [barcode part1]
  source 1..16: mol_type = other DNA
acgcagacagactgtg

SEQ ID NO: 16790 - DNA, 16 bp, synthetic construct
  misc_feature 1..16: note = synthetic [barcode part1]
  source 1..16: mol_type = other DNA
tggatcggacttgact

SEQ ID NO: 16791 - DNA, 16 bp, synthetic construct
  misc_feature 1..16: note = synthetic [barcode part1]
  source 1..16: mol_type = other DNA
gttacaactgtccgtt

SEQ ID NO: 16792 - DNA, 16 bp, synthetic construct
  misc_feature 1..16: note = synthetic [barcode part1]
  source 1..16: mol_type = other DNA
gccaagtcactcctgt

SEQ ID NO: 16793 - DNA, 16 bp, synthetic construct
  misc_feature 1..16: note = synthetic [barcode part1]
  source 1..16: mol_type = other DNA
ttcggttacactggtt

SEQ ID NO: 16794 - DNA, 16 bp, synthetic construct
  misc_feature 1..16: note = synthetic [barcode part1]
  source 1..16: mol_type = other DNA
cgcacttgcctagtac

SEQ ID NO: 16795 - DNA, 16 bp, synthetic construct
  misc_feature 1..16: note = synthetic [barcode part1]
  source 1..16: mol_type = other DNA
acacaaccgcgtaatc

SEQ ID NO: 16796 - DNA, 16 bp, synthetic construct
  misc_feature 1..16: note = synthetic [barcode part1]
  source 1..16: mol_type = other DNA
cgtctctgccaagttg

SEQ ID NO: 16797 - DNA, 16 bp, synthetic construct
  misc_feature 1..16: note = synthetic [barcode part1]
  source 1..16: mol_type = other DNA
acctatcgcaatacct

SEQ ID NO: 16798 - DNA, 16 bp, synthetic construct
  misc_feature 1..16: note = synthetic [barcode part1]
  source 1..16: mol_type = other DNA
acagtgtgtcacagtc

SEQ ID NO: 16799 - DNA, 16 bp, synthetic construct
  misc_feature 1..16: note = synthetic [barcode part1]
  source 1..16: mol_type = other DNA
caacttccttctcggt

SEQ ID NO: 16800 - DNA, 16 bp, synthetic construct
  misc_feature 1..16: note = synthetic [barcode part1]
  source 1..16: mol_type = other DNA
tggagacagtgtagag

SEQ ID NO: 16801 - DNA, 16 bp, synthetic construct
  misc_feature 1..16: note = synthetic [barcode part1]
  source 1..16: mol_type = other DNA
tgtcagagtccagtac

SEQ ID NO: 16802 - DNA, 16 bp, synthetic construct
  misc_feature 1..16: note = synthetic [barcode part1]
  source 1..16: mol_type = other DNA
aagtgcggttactaag

SEQ ID NO: 16803 - DNA, 16 bp, synthetic construct
  misc_feature 1..16: note = synthetic [barcode part1]
  source 1..16: mol_type = other DNA
aggcagttcgagtgtg

SEQ ID NO: 16804 - DNA, 16 bp, synthetic construct
  misc_feature 1..16: note = synthetic [barcode part1]
  source 1..16: mol_type = other DNA
actgtactggtctccg

SEQ ID NO: 16805 - DNA, 16 bp, synthetic construct
  misc_feature 1..16: note = synthetic [barcode part1]
  source 1..16: mol_type = other DNA
tactgcactgaagtcg

SEQ ID NO: 16806 - DNA, 16 bp, synthetic construct
  misc_feature 1..16: note = synthetic [barcode part1]
  source 1..16: mol_type = other DNA
tagtgaacttggacag

SEQ ID NO: 16807 - DNA, 16 bp, synthetic construct
  misc_feature 1..16: note = synthetic [barcode part1]
  source 1..16: mol_type = other DNA
ttctcctaatcggtcc

SEQ ID NO: 16808 - DNA, 16 bp, synthetic construct
  misc_feature 1..16: note = synthetic [barcode part1]
  source 1..16: mol_type = other DNA
tggaatcaaggtcctc

SEQ ID NO: 16809 - DNA, 16 bp, synthetic construct
  misc_feature 1..16: note = synthetic [barcode part1]
  source 1..16: mol_type = other DNA
ccgttaacgtactccg

SEQ ID NO: 16810 - DNA, 16 bp, synthetic construct
  misc_feature 1..16: note = synthetic [barcode part1]
  source 1..16: mol_type = other DNA
gtcttcacgtcgaatt

SEQ ID NO: 16811 - DNA, 16 bp, synthetic construct
  misc_feature 1..16: note = synthetic [barcode part1]
  source 1..16: mol_type = other DNA
cacgacagtccgtctt

SEQ ID NO: 16812 - DNA, 16 bp, synthetic construct
  misc_feature 1..16: note = synthetic [barcode part1]
  source 1..16: mol_type = other DNA
aagtccgtgttctgtt

SEQ ID NO: 16813 - DNA, 16 bp, synthetic construct
  misc_feature 1..16: note = synthetic [barcode part1]
  source 1..16: mol_type = other DNA
cgattgttatcctacg

SEQ ID NO: 16814 - DNA, 16 bp, synthetic construct
  misc_feature 1..16: note = synthetic [barcode part1]
  source 1..16: mol_type = other DNA
ttaatagttcgcgtcc

SEQ ID NO: 16815 - DNA, 16 bp, synthetic construct
  misc_feature 1..16: note = synthetic [barcode part1]
  source 1..16: mol_type = other DNA
gaggaacgcctaagtc

SEQ ID NO: 16816 - DNA, 16 bp, synthetic construct
  misc_feature 1..16: note = synthetic [barcode part1]
  source 1..16: mol_type = other DNA
tgttccgcctggatac

SEQ ID NO: 16817 - DNA, 16 bp, synthetic construct
  misc_feature 1..16: note = synthetic [barcode part1]
  source 1..16: mol_type = other DNA
ccgaacgattctattc

SEQ ID NO: 16818 - DNA, 16 bp, synthetic construct
  misc_feature 1..16: note = synthetic [barcode part1]
  source 1..16: mol_type = other DNA
tgagaggactgacgtc

SEQ ID NO: 16819 - DNA, 16 bp, synthetic construct
  misc_feature 1..16: note = synthetic [barcode part1]
  source 1..16: mol_type = other DNA
agactgcaacgcaggt

SEQ ID NO: 16820 - DNA, 16 bp, synthetic construct
  misc_feature 1..16: note = synthetic [barcode part1]
  source 1..16: mol_type = other DNA
caactccacaccaacc

SEQ ID NO: 16821 - DNA, 16 bp, synthetic construct
  misc_feature 1..16: note = synthetic [barcode part1]
  source 1..16: mol_type = other DNA
tctccgataactacac

SEQ ID NO: 16822 - DNA, 16 bp, synthetic construct
  misc_feature 1..16: note = synthetic [barcode part1]
  source 1..16: mol_type = other DNA
ataccgttctactcag

SEQ ID NO: 16823 - DNA, 16 bp, synthetic construct
  misc_feature 1..16: note = synthetic [barcode part1]
  source 1..16: mol_type = other DNA
caacgttggacagacg

SEQ ID NO: 16824 - DNA, 16 bp, synthetic construct
  misc_feature 1..16: note = synthetic [barcode part1]
  source 1..16: mol_type = other DNA
cgtactattccgattg

SEQ ID NO: 16825 - DNA, 16 bp, synthetic construct
  misc_feature 1..16: note = synthetic [barcode part1]
  source 1..16: mol_type = other DNA
ttcgcctgtagtattg

SEQ ID NO: 16826 - DNA, 16 bp, synthetic construct
  misc_feature 1..16: note = synthetic [barcode part1]
  source 1..16: mol_type = other DNA
caagtggagataggtg

SEQ ID NO: 16827 - DNA, 16 bp, synthetic construct
  misc_feature 1..16: note = synthetic [barcode part1]
  source 1..16: mol_type = other DNA
gcctactggatcctac

SEQ ID NO: 16828 - DNA, 16 bp, synthetic construct
  misc_feature 1..16: note = synthetic [barcode part1]
  source 1..16: mol_type = other DNA
attgcgttctccgacg

SEQ ID NO: 16829 - DNA, 16 bp, synthetic construct
  misc_feature 1..16: note = synthetic [barcode part1]
  source 1..16: mol_type = other DNA
gcgttaattctactgc

SEQ ID NO: 16830 - DNA, 16 bp, synthetic construct
  misc_feature 1..16: note = synthetic [barcode part1]
  source 1..16: mol_type = other DNA
ttgtccgttacgatac

SEQ ID NO: 16831 - DNA, 16 bp, synthetic construct
  misc_feature 1..16: note = synthetic [barcode part1]
  source 1..16: mol_type = other DNA
cagtccgattcagtag

SEQ ID NO: 16832 - DNA, 16 bp, synthetic construct
  misc_feature 1..16: note = synthetic [barcode part1]
  source 1..16: mol_type = other DNA
cgaatctccacaagtg

SEQ ID NO: 16833 - DNA, 16 bp, synthetic construct
  misc_feature 1..16: note = synthetic [barcode part1]
  source 1..16: mol_type = other DNA
taccgaagaacgcgac

SEQ ID NO: 16834 - DNA, 16 bp, synthetic construct
  misc_feature 1..16: note = synthetic [barcode part1]
  source 1..16: mol_type = other DNA
caggatctatacgcgt

SEQ ID NO: 16835 - DNA, 16 bp, synthetic construct
  misc_feature 1..16: note = synthetic [barcode part1]
  source 1..16: mol_type = other DNA
agtgcagacggttcag

SEQ ID NO: 16836 - DNA, 16 bp, synthetic construct
  misc_feature 1..16: note = synthetic [barcode part1]
  source 1..16: mol_type = other DNA
gttgaacacaggaatc

SEQ ID NO: 16837 - DNA, 16 bp, synthetic construct
  misc_feature 1..16: note = synthetic [barcode part1]
  source 1..16: mol_type = other DNA
tacgcgaacggttact

SEQ ID NO: 16838 - DNA, 16 bp, synthetic construct
  misc_feature 1..16: note = synthetic [barcode part1]
  source 1..16: mol_type = other DNA
gagtgagattcacctc

SEQ ID NO: 16839 - DNA, 16 bp, synthetic construct
  misc_feature 1..16: note = synthetic [barcode part1]
  source 1..16: mol_type = other DNA
agtacggtgaactgcg

SEQ ID NO: 16840 - DNA, 16 bp, synthetic construct
  misc_feature 1..16: note = synthetic [barcode part1]
  source 1..16: mol_type = other DNA
ccgagaccttatctgc

SEQ ID NO: 16841 - DNA, 16 bp, synthetic construct
  misc_feature 1..16: note = synthetic [barcode part1]
  source 1..16: mol_type = other DNA
tacttcaggcgttcgc

SEQ ID NO: 16842 - DNA, 16 bp, synthetic construct
  misc_feature 1..16: note = synthetic [barcode part1]
  source 1..16: mol_type = other DNA
ccaacagtggagacgt

SEQ ID NO: 16843 - DNA, 16 bp, synthetic construct
  misc_feature 1..16: note = synthetic [barcode part1]
  source 1..16: mol_type = other DNA
tcaactgccaaggttg

SEQ ID NO: 16844 - DNA, 16 bp, synthetic construct
  misc_feature 1..16: note = synthetic [barcode part1]
  source 1..16: mol_type = other DNA
aactaatcaaccggcc

SEQ ID NO: 16845 - DNA, 16 bp, synthetic construct
  misc_feature 1..16: note = synthetic [barcode part1]
  source 1..16: mol_type = other DNA
gcaagtgcaaggttcg

SEQ ID NO: 16846 - DNA, 16 bp, synthetic construct
  misc_feature 1..16: note = synthetic [barcode part1]
  source 1..16: mol_type = other DNA
cgtctcactgtagacc

SEQ ID NO: 16847 - DNA, 16 bp, synthetic construct
  misc_feature 1..16: note = synthetic [barcode part1]
  source 1..16: mol_type = other DNA
ccagtagagtgactct

SEQ ID NO: 16848 - DNA, 16 bp, synthetic construct
  misc_feature 1..16: note = synthetic [barcode part1]
  source 1..16: mol_type = other DNA
agatcgtcggaggtac

SEQ ID NO: 16849 - DNA, 16 bp, synthetic construct
  misc_feature 1..16: note = synthetic [barcode part1]
  source 1..16: mol_type = other DNA
cctgatacttgcgtcg

SEQ ID NO: 16850 - DNA, 16 bp, synthetic construct
  misc_feature 1..16: note = synthetic [barcode part1]
  source 1..16: mol_type = other DNA
cgccactcttgtaggt

SEQ ID NO: 16851 - DNA, 16 bp, synthetic construct
  misc_feature 1..16: note = synthetic [barcode part1]
  source 1..16: mol_type = other DNA
cctgattgcgtcggtt

SEQ ID NO: 16852 - DNA, 16 bp, synthetic construct
  misc_feature 1..16: note = synthetic [barcode part1]
  source 1..16: mol_type = other DNA
cggaattattacggcc

SEQ ID NO: 16853 - DNA, 16 bp, synthetic construct
  misc_feature 1..16: note = synthetic [barcode part1]
  source 1..16: mol_type = other DNA
aggtcttgaggaagag

SEQ ID NO: 16854 - DNA, 16 bp, synthetic construct
  misc_feature 1..16: note = synthetic [barcode part1]
  source 1..16: mol_type = other DNA
tctcgcgcagtgactt

SEQ ID NO: 16855 - DNA, 16 bp, synthetic construct
  misc_feature 1..16: note = synthetic [barcode part1]
  source 1..16: mol_type = other DNA
gtagtaccacacgtac

SEQ ID NO: 16856 - DNA, 16 bp, synthetic construct
  misc_feature 1..16: note = synthetic [barcode part1]
  source 1..16: mol_type = other DNA
ccacggttagttagtg

SEQ ID NO: 16857 - DNA, 16 bp, synthetic construct
  misc_feature 1..16: note = synthetic [barcode part1]
  source 1..16: mol_type = other DNA
cgactgatacggtgtt

SEQ ID NO: 16858 - DNA, 16 bp, synthetic construct
  misc_feature 1..16: note = synthetic [barcode part1]
  source 1..16: mol_type = other DNA
tcctgaaggacgagtg

SEQ ID NO: 16859 - DNA, 16 bp, synthetic construct
  misc_feature 1..16: note = synthetic [barcode part1]
  source 1..16: mol_type = other DNA
gcgtaattcttccaac

SEQ ID NO: 16860 - DNA, 16 bp, synthetic construct
  misc_feature 1..16: note = synthetic [barcode part1]
  source 1..16: mol_type = other DNA
acggttgtcttaacct

SEQ ID NO: 16861 - DNA, 16 bp, synthetic construct
  misc_feature 1..16: note = synthetic [barcode part1]
  source 1..16: mol_type = other DNA
cgttacttggatctgt

SEQ ID NO: 16862 - DNA, 16 bp, synthetic construct
  misc_feature 1..16: note = synthetic [barcode part1]
  source 1..16: mol_type = other DNA
cacggattatcacctt

SEQ ID NO: 16863 - DNA, 16 bp, synthetic construct
  misc_feature 1..16: note = synthetic [barcode part1]
  source 1..16: mol_type = other DNA
aggttcagtgatcgtc

SEQ ID NO: 16864 - DNA, 16 bp, synthetic construct
  misc_feature 1..16: note = synthetic [barcode part1]
  source 1..16: mol_type = other DNA
cacctgttacctactc

SEQ ID NO: 16865 - DNA, 16 bp, synthetic construct
  misc_feature 1..16: note = synthetic [barcode part1]
  source 1..16: mol_type = other DNA
cactaaggttcagtgc

SEQ ID NO: 16866 - DNA, 16 bp, synthetic construct
  misc_feature 1..16: note = synthetic [barcode part1]
  source 1..16: mol_type = other DNA
aagtggccacgaatcg

SEQ ID NO: 16867 - DNA, 16 bp, synthetic construct
  misc_feature 1..16: note = synthetic [barcode part1]
  source 1..16: mol_type = other DNA
tcgacttacttggact

SEQ ID NO: 16868 - DNA, 16 bp, synthetic construct
  misc_feature 1..16: note = synthetic [barcode part1]
  source 1..16: mol_type = other DNA
gtggactggaggttgt

SEQ ID NO: 16869 - DNA, 16 bp, synthetic construct
  misc_feature 1..16: note = synthetic [barcode part1]
  source 1..16: mol_type = other DNA
aatctaaccagtggcc

SEQ ID NO: 16870 - DNA, 16 bp, synthetic construct
  misc_feature 1..16: note = synthetic [barcode part1]
  source 1..16: mol_type = other DNA
gtgcagtgtcagtgtt

SEQ ID NO: 16871 - DNA, 16 bp, synthetic construct
  misc_feature 1..16: note = synthetic [barcode part1]
  source 1..16: mol_type = other DNA
aacgcgatctgtactg

SEQ ID NO: 16872 - DNA, 16 bp, synthetic construct
  misc_feature 1..16: note = synthetic [barcode part1]
  source 1..16: mol_type = other DNA
acgatacaaggtcctc

SEQ ID NO: 16873 - DNA, 16 bp, synthetic construct
  misc_feature 1..16: note = synthetic [barcode part1]
  source 1..16: mol_type = other DNA
ccacactataggagtc

SEQ ID NO: 16874 - DNA, 16 bp, synthetic construct
  misc_feature 1..16: note = synthetic [barcode part1]
  source 1..16: mol_type = other DNA
gattcctccgagtatt

SEQ ID NO: 16875 - DNA, 16 bp, synthetic construct
  misc_feature 1..16: note = synthetic [barcode part1]
  source 1..16: mol_type = other DNA
agtcgactctcagagt

SEQ ID NO: 16876 - DNA, 16 bp, synthetic construct
  misc_feature 1..16: note = synthetic [barcode part1]
  source 1..16: mol_type = other DNA
gaattgagtcgtgtag

SEQ ID NO: 16877 - DNA, 16 bp, synthetic construct
  misc_feature 1..16: note = synthetic [barcode part1]
  source 1..16: mol_type = other DNA
accgcgaacaatatcc

SEQ ID NO: 16878 - DNA, 16 bp, synthetic construct
  misc_feature 1..16: note = synthetic [barcode part1]
  source 1..16: mol_type = other DNA
tggttgtgagtcggag

SEQ ID NO: 16879 - DNA, 16 bp, synthetic construct
  misc_feature 1..16: note = synthetic [barcode part1]
  source 1..16: mol_type = other DNA
caggtagaacgtcacg

SEQ ID NO: 16880 - DNA, 16 bp, synthetic construct
  misc_feature 1..16: note = synthetic [barcode part1]
  source 1..16: mol_type = other DNA
acttgccagtgtcacc

SEQ ID NO: 16881 - DNA, 16 bp, synthetic construct
  misc_feature 1..16: note = synthetic [barcode part1]
  source 1..16: mol_type = other DNA
agtgcgtgagactggt

SEQ ID NO: 16882 - DNA, 16 bp, synthetic construct
  misc_feature 1..16: note = synthetic [barcode part1]
  source 1..16: mol_type = other DNA
ccaccactgttacctt

SEQ ID NO: 16883 - DNA, 16 bp, synthetic construct
  misc_feature 1..16: note = synthetic [barcode part1]
  source 1..16: mol_type = other DNA
tggtctccacgtagtc

SEQ ID NO: 16884 - DNA, 16 bp, synthetic construct
  misc_feature 1..16: note = synthetic [barcode part1]
  source 1..16: mol_type = other DNA
ttcgagtgcaattgcg

SEQ ID NO: 16885 - DNA, 16 bp, synthetic construct
  misc_feature 1..16: note = synthetic [barcode part1]
  source 1..16: mol_type = other DNA
gataccgcacggtatt

SEQ ID NO: 16886 - DNA, 16 bp, synthetic construct
  misc_feature 1..16: note = synthetic [barcode part1]
  source 1..16: mol_type = other DNA
agtgcgtgtataccgt

SEQ ID NO: 16887 - DNA, 16 bp, synthetic construct
  misc_feature 1..16: note = synthetic [barcode part1]
  source 1..16: mol_type = other DNA
gagtatcgtaggtctc

SEQ ID NO: 16888 - DNA, 16 bp, synthetic construct
  misc_feature 1..16: note = synthetic [barcode part1]
  source 1..16: mol_type = other DNA
aactccaggacgagtg

SEQ ID NO: 16889 - DNA, 16 bp, synthetic construct
  misc_feature 1..16: note = synthetic [barcode part1]
  source 1..16: mol_type = other DNA
gccagaagtaccagtg

SEQ ID NO: 16890 - DNA, 16 bp, synthetic construct
  misc_feature 1..16: note = synthetic [barcode part1]
  source 1..16: mol_type = other DNA
cggatccgttctgttg

SEQ ID NO: 16891 - DNA, 16 bp, synthetic construct
  misc_feature 1..16: note = synthetic [barcode part1]
  source 1..16: mol_type = other DNA
gcctagatagagtagt

SEQ ID NO: 16892 - DNA, 16 bp, synthetic construct
  misc_feature 1..16: note = synthetic [barcode part1]
  source 1..16: mol_type = other DNA
gagactcaagtcctgt

SEQ ID NO: 16893 - DNA, 16 bp, synthetic construct
  misc_feature 1..16: note = synthetic [barcode part1]
  source 1..16: mol_type = other DNA
tcttgtaccagactac

SEQ ID NO: 16894 - DNA, 16 bp, synthetic construct
  misc_feature 1..16: note = synthetic [barcode part1]
  source 1..16: mol_type = other DNA
ttaccgcaacaagacc

SEQ ID NO: 16895 - DNA, 16 bp, synthetic construct
  misc_feature 1..16: note = synthetic [barcode part1]
  source 1..16: mol_type = other DNA
cgtcgacagagtcaag

SEQ ID NO: 16896 - DNA, 16 bp, synthetic construct
  misc_feature 1..16: note = synthetic [barcode part1]
  source 1..16: mol_type = other DNA
tgccagacgaagacgt

SEQ ID NO: 16897 - DNA, 16 bp, synthetic construct
  misc_feature 1..16: note = synthetic [barcode part1]
  source 1..16: mol_type = other DNA
aagagttcacgtagtg

SEQ ID NO: 16898 - DNA, 16 bp, synthetic construct
  misc_feature 1..16: note = synthetic [barcode part1]
  source 1..16: mol_type = other DNA
acagacgatagtgttg

SEQ ID NO: 16899 - DNA, 16 bp, synthetic construct
  misc_feature 1..16: note = synthetic [barcode part1]
  source 1..16: mol_type = other DNA
aagacttcacctacct

SEQ ID NO: 16900 - DNA, 16 bp, synthetic construct
  misc_feature 1..16: note = synthetic [barcode part1]
  source 1..16: mol_type = other DNA
tgtaggcgtcttatct

SEQ ID NO: 16901 - DNA, 16 bp, synthetic construct
  misc_feature 1..16: note = synthetic [barcode part1]
  source 1..16: mol_type = other DNA
gacgaggaagacagtt

SEQ ID NO: 16902 - DNA, 16 bp, synthetic construct
  misc_feature 1..16: note = synthetic [barcode part1]
  source 1..16: mol_type = other DNA
accgtgcagagatcag

SEQ ID NO: 16903 - DNA, 16 bp, synthetic construct
  misc_feature 1..16: note = synthetic [barcode part1]
  source 1..16: mol_type = other DNA
tccgatcacactggtc

SEQ ID NO: 16904 - DNA, 16 bp, synthetic construct
  misc_feature 1..16: note = synthetic [barcode part1]
  source 1..16: mol_type = other DNA
gagacgacttaggtgc

SEQ ID NO: 16905 - DNA, 16 bp, synthetic construct
  misc_feature 1..16: note = synthetic [barcode part1]
  source 1..16: mol_type = other DNA
cgtagtacaggattcc

SEQ ID NO: 16906 - DNA, 16 bp, synthetic construct
  misc_feature 1..16: note = synthetic [barcode part1]
  source 1..16: mol_type = other DNA
aggcctgaatagtaac

SEQ ID NO: 16907 - DNA, 16 bp, synthetic construct
  misc_feature 1..16: note = synthetic [barcode part1]
  source 1..16: mol_type = other DNA
atccagataggcgttc

SEQ ID NO: 16908 - DNA, 16 bp, synthetic construct
  misc_feature 1..16: note = synthetic [barcode part1]
  source 1..16: mol_type = other DNA
gagaacacttggcggt

SEQ ID NO: 16909 - DNA, 16 bp, synthetic construct
  misc_feature 1..16: note = synthetic [barcode part1]
  source 1..16: mol_type = other DNA
ccgatctatcttccac

SEQ ID NO: 16910 - DNA, 16 bp, synthetic construct
  misc_feature 1..16: note = synthetic [barcode part1]
  source 1..16: mol_type = other DNA
actcgttggtgttact

SEQ ID NO: 16911 - DNA, 16 bp, synthetic construct
  misc_feature 1..16: note = synthetic [barcode part1]
  source 1..16: mol_type = other DNA
cgagaacctattagag

SEQ ID NO: 16912 - DNA, 16 bp, synthetic construct
  misc_feature 1..16: note = synthetic [barcode part1]
  source 1..16: mol_type = other DNA
cgtctcgatctgtggt

SEQ ID NO: 16913 - DNA, 16 bp, synthetic construct
  misc_feature 1..16: note = synthetic [barcode part1]
  source 1..16: mol_type = other DNA
actagaacctcgatcg

SEQ ID NO: 16914 - DNA, 16 bp, synthetic construct
  misc_feature 1..16: note = synthetic [barcode part1]
  source 1..16: mol_type = other DNA
acgtacaactacggtc

SEQ ID NO: 16915 - DNA, 16 bp, synthetic construct
  misc_feature 1..16: note = synthetic [barcode part1]
  source 1..16: mol_type = other DNA
agtgcgcacgtattac

SEQ ID NO: 16916 - DNA, 16 bp, synthetic construct
  misc_feature 1..16: note = synthetic [barcode part1]
  source 1..16: mol_type = other DNA
atacgtgattgtggcc

SEQ ID NO: 16917 - DNA, 16 bp, synthetic construct
  misc_feature 1..16: note = synthetic [barcode part1]
  source 1..16: mol_type = other DNA
cgtcggtctaattccg

SEQ ID NO: 16918 - DNA, 16 bp, synthetic construct
  misc_feature 1..16: note = synthetic [barcode part1]
  source 1..16: mol_type = other DNA
cgtctactccagagtc

SEQ ID NO: 16919 - DNA, 16 bp, synthetic construct
  misc_feature 1..16: note = synthetic [barcode part1]
  source 1..16: mol_type = other DNA
gcaacttagaccactg

SEQ ID NO: 16920 - DNA, 16 bp, synthetic construct
  misc_feature 1..16: note = synthetic [barcode part1]
  source 1..16: mol_type = other DNA
tcgttgatctctgtag

SEQ ID NO: 16921 - DNA, 16 bp, synthetic construct
  misc_feature 1..16: note = synthetic [barcode part1]
  source 1..16: mol_type = other DNA
acttgttagtgtcgtc

SEQ ID NO: 16922 - DNA, 16 bp, synthetic construct
  misc_feature 1..16: note = synthetic [barcode part1]
  source 1..16: mol_type = other DNA
aatcgaccgtgtgtac

SEQ ID NO: 16923 - DNA, 16 bp, synthetic construct
  misc_feature 1..16: note = synthetic [barcode part1]
  source 1..16: mol_type = other DNA
taatcagagtcggcct

SEQ ID NO: 16924 - DNA, 16 bp, synthetic construct
  misc_feature 1..16: note = synthetic [barcode part1]
  source 1..16: mol_type = other DNA
ttcgtgcaccgagttc

SEQ ID NO: 16925 - DNA, 16 bp, synthetic construct
  misc_feature 1..16: note = synthetic [barcode part1]
  source 1..16: mol_type = other DNA
cacagacgtgagttct

SEQ ID NO: 16926 - DNA, 16 bp, synthetic construct
  misc_feature 1..16: note = synthetic [barcode part1]
  source 1..16: mol_type = other DNA
taccaagattctcacc

SEQ ID NO: 16927 - DNA, 16 bp, synthetic construct
  misc_feature 1..16: note = synthetic [barcode part1]
  source 1..16: mol_type = other DNA
acgtaataaccgaggt

SEQ ID NO: 16928 - DNA, 16 bp, synthetic construct
  misc_feature 1..16: note = synthetic [barcode part1]
  source 1..16: mol_type = other DNA
atctccgcaccgaatc

SEQ ID NO: 16929 - DNA, 16 bp, synthetic construct
  misc_feature 1..16: note = synthetic [barcode part1]
  source 1..16: mol_type = other DNA
atcttggaacctcgag

SEQ ID NO: 16930 - DNA, 16 bp, synthetic construct
  misc_feature 1..16: note = synthetic [barcode part1]
  source 1..16: mol_type = other DNA
aagtgcgcgacgattg

SEQ ID NO: 16931 - DNA, 16 bp, synthetic construct
  misc_feature 1..16: note = synthetic [barcode part1]
  source 1..16: mol_type = other DNA
tggcaactgactcagt

SEQ ID NO: 16932 - DNA, 16 bp, synthetic construct
  misc_feature 1..16: note = synthetic [barcode part1]
  source 1..16: mol_type = other DNA
cgttacttcgcacggt

SEQ ID NO: 16933 - DNA, 16 bp, synthetic construct
  misc_feature 1..16: note = synthetic [barcode part1]
  source 1..16: mol_type = other DNA
acgtactaggttgaag

SEQ ID NO: 16934 - DNA, 16 bp, synthetic construct
  misc_feature 1..16: note = synthetic [barcode part1]
  source 1..16: mol_type = other DNA
ttctatcagtgaggcg

SEQ ID NO: 16935 - DNA, 16 bp, synthetic construct
  misc_feature 1..16: note = synthetic [barcode part1]
  source 1..16: mol_type = other DNA
cgcacacaaccaattg

SEQ ID NO: 16936 - DNA, 16 bp, synthetic construct
  misc_feature 1..16: note = synthetic [barcode part1]
  source 1..16: mol_type = other DNA
gcagacaagacaagtg

SEQ ID NO: 16937 - DNA, 16 bp, synthetic construct
  misc_feature 1..16: note = synthetic [barcode part1]
  source 1..16: mol_type = other DNA
tcttgcgtgatagttc

SEQ ID NO: 16938 - DNA, 16 bp, synthetic construct
  misc_feature 1..16: note = synthetic [barcode part1]
  source 1..16: mol_type = other DNA
agactctcgcaatacg

SEQ ID NO: 16939 - DNA, 16 bp, synthetic construct
  misc_feature 1..16: note = synthetic [barcode part1]
  source 1..16: mol_type = other DNA
tgacgtatcgaacacc

SEQ ID NO: 16940 - DNA, 16 bp, synthetic construct
  misc_feature 1..16: note = synthetic [barcode part1]
  source 1..16: mol_type = other DNA
tctgtgattgttccag

SEQ ID NO: 16941 - DNA, 16 bp, synthetic construct
  misc_feature 1..16: note = synthetic [barcode part1]
  source 1..16: mol_type = other DNA
caacgataattcggcc

SEQ ID NO: 16942 - DNA, 16 bp, synthetic construct
  misc_feature 1..16: note = synthetic [barcode part1]
  source 1..16: mol_type = other DNA
ccgtgtcagatcacct

SEQ ID NO: 16943 - DNA, 16 bp, synthetic construct
  misc_feature 1..16: note = synthetic [barcode part1]
  source 1..16: mol_type = other DNA
tcacggatctgattct

SEQ ID NO: 16944 - DNA, 16 bp, synthetic construct
  misc_feature 1..16: note = synthetic [barcode part1]
  source 1..16: mol_type = other DNA
gtgtcgactcctaatt

SEQ ID NO: 16945 - DNA, 16 bp, synthetic construct
  misc_feature 1..16: note = synthetic [barcode part1]
  source 1..16: mol_type = other DNA
acttcgccaccagtac

SEQ ID NO: 16946 - DNA, 16 bp, synthetic construct
  misc_feature 1..16: note = synthetic [barcode part1]
  source 1..16: mol_type = other DNA
cctagtctacggtcac

SEQ ID NO: 16947 - DNA, 16 bp, synthetic construct
  misc_feature 1..16: note = synthetic [barcode part1]
  source 1..16: mol_type = other DNA
aggcaacgatctatag

SEQ ID NO: 16948 - DNA, 16 bp, synthetic construct
  misc_feature 1..16: note = synthetic [barcode part1]
  source 1..16: mol_type = other DNA
tcactccactgagaag

SEQ ID NO: 16949 - DNA, 16 bp, synthetic construct
  misc_feature 1..16: note = synthetic [barcode part1]
  source 1..16: mol_type = other DNA
gtgagtgcagaacctg

SEQ ID NO: 16950 - DNA, 16 bp, synthetic construct
  misc_feature 1..16: note = synthetic [barcode part1]
  source 1..16: mol_type = other DNA
agttgtgtcagagaac

SEQ ID NO: 16951 - DNA, 16 bp, synthetic construct
  misc_feature 1..16: note = synthetic [barcode part1]
  source 1..16: mol_type = other DNA
ttcagttagagtcggc

SEQ ID NO: 16952 - DNA, 16 bp, synthetic construct
  misc_feature 1..16: note = synthetic [barcode part1]
  source 1..16: mol_type = other DNA
gtgttacacttacctg

SEQ ID NO: 16953 - DNA, 16 bp, synthetic construct
  misc_feature 1..16: note = synthetic [barcode part1]
  source 1..16: mol_type = other DNA
ataccgtgcggacaag

SEQ ID NO: 16954 - DNA, 16 bp, synthetic construct
  misc_feature 1..16: note = synthetic [barcode part1]
  source 1..16: mol_type = other DNA
agttacgatcgtgcac

SEQ ID NO: 16955 - DNA, 16 bp, synthetic construct
  misc_feature 1..16: note = synthetic [barcode part1]
  source 1..16: mol_type = other DNA
tagtattcgcctgttg

SEQ ID NO: 16956 - DNA, 16 bp, synthetic construct
  misc_feature 1..16: note = synthetic [barcode part1]
  source 1..16: mol_type = other DNA
aagtatctccggacgt

SEQ ID NO: 16957 - DNA, 16 bp, synthetic construct
  misc_feature 1..16: note = synthetic [barcode part1]
  source 1..16: mol_type = other DNA
atacgaaccgtgtctg

SEQ ID NO: 16958 - DNA, 16 bp, synthetic construct
  misc_feature 1..16: note = synthetic [barcode part1]
  source 1..16: mol_type = other DNA
cgagacaataatcgtg

SEQ ID NO: 16959 - DNA, 16 bp, synthetic construct
  misc_feature 1..16: note = synthetic [barcode part1]
  source 1..16: mol_type = other DNA
taccgttcactagtgt

SEQ ID NO: 16960 - DNA, 16 bp, synthetic construct
  misc_feature 1..16: note = synthetic [barcode part1]
  source 1..16: mol_type = other DNA
gacacagtctataccg

SEQ ID NO: 16961 - DNA, 16 bp, synthetic construct
  misc_feature 1..16: note = synthetic [barcode part1]
  source 1..16: mol_type = other DNA
tattggcgagactaag

SEQ ID NO: 16962 - DNA, 16 bp, synthetic construct
  misc_feature 1..16: note = synthetic [barcode part1]
  source 1..16: mol_type = other DNA
ccgtgtcgaatacagt

SEQ ID NO: 16963 - DNA, 16 bp, synthetic construct
  misc_feature 1..16: note = synthetic [barcode part1]
  source 1..16: mol_type = other DNA
cgagttgccaacaact

SEQ ID NO: 16964 - DNA, 16 bp, synthetic construct
  misc_feature 1..16: note = synthetic [barcode part1]
  source 1..16: mol_type = other DNA
ttccaatagttgtgcc

SEQ ID NO: 16965 - DNA, 16 bp, synthetic construct
  misc_feature 1..16: note = synthetic [barcode part1]
  source 1..16: mol_type = other DNA
ccttgtgagaacgtac

SEQ ID NO: 16966 - DNA, 16 bp, synthetic construct
  misc_feature 1..16: note = synthetic [barcode part1]
  source 1..16: mol_type = other DNA
tgaccaacgcgtatac

SEQ ID NO: 16967 - DNA, 16 bp, synthetic construct
  misc_feature 1..16: note = synthetic [barcode part1]
  source 1..16: mol_type = other DNA
agactctatcacgacg

SEQ ID NO: 16968 - DNA, 16 bp, synthetic construct
  misc_feature 1..16: note = synthetic [barcode part1]
  source 1..16: mol_type = other DNA
ttgttcagtccgttcc

SEQ ID NO: 16969 - DNA, 16 bp, synthetic construct
  misc_feature 1..16: note = synthetic [barcode part1]
  source 1..16: mol_type = other DNA
gaggagtataactgtc

SEQ ID NO: 16970 - DNA, 16 bp, synthetic construct
  misc_feature 1..16: note = synthetic [barcode part1]
  source 1..16: mol_type = other DNA
ttgataaggatacggc

SEQ ID NO: 16971 - DNA, 16 bp, synthetic construct
  misc_feature 1..16: note = synthetic [barcode part1]
  source 1..16: mol_type = other DNA
tactccgagtgagatc

SEQ ID NO: 16972 - DNA, 16 bp, synthetic construct
  misc_feature 1..16: note = synthetic [barcode part1]
  source 1..16: mol_type = other DNA
ttgactggtcaaccag

SEQ ID NO: 16973 - DNA, 16 bp, synthetic construct
  misc_feature 1..16: note = synthetic [barcode part1]
  source 1..16: mol_type = other DNA
gtgatacaccgtgatc

SEQ ID NO: 16974 - DNA, 16 bp, synthetic construct
  misc_feature 1..16: note = synthetic [barcode part1]
  source 1..16: mol_type = other DNA
ttctccttcaaggtcc

SEQ ID NO: 16975 - DNA, 16 bp, synthetic construct
  misc_feature 1..16: note = synthetic [barcode part1]
  source 1..16: mol_type = other DNA
aatcggcgtcaactgt

SEQ ID NO: 16976 - DNA, 16 bp, synthetic construct
  misc_feature 1..16: note = synthetic [barcode part1]
  source 1..16: mol_type = other DNA
acaactggtgtcagtc

SEQ ID NO: 16977 - DNA, 16 bp, synthetic construct
  misc_feature 1..16: note = synthetic [barcode part1]
  source 1..16: mol_type = other DNA
tccaacctgtgtaatc

SEQ ID NO: 16978 - DNA, 16 bp, synthetic construct
  misc_feature 1..16: note = synthetic [barcode part1]
  source 1..16: mol_type = other DNA
cctaccaagaacgatc

SEQ ID NO: 16979 - DNA, 16 bp, synthetic construct
  misc_feature 1..16: note = synthetic [barcode part1]
  source 1..16: mol_type = other DNA
gatctaacacggaagt

SEQ ID NO: 16980 - DNA, 16 bp, synthetic construct
  misc_feature 1..16: note = synthetic [barcode part1]
  source 1..16: mol_type = other DNA
tctcgcggatctggtt

SEQ ID NO: 16981 - DNA, 16 bp, synthetic construct
  misc_feature 1..16: note = synthetic [barcode part1]
  source 1..16: mol_type = other DNA
tgaatcaggtccgact

SEQ ID NO: 16982 - DNA, 16 bp, synthetic construct
  misc_feature 1..16: note = synthetic [barcode part1]
  source 1..16: mol_type = other DNA
gtcttacggtacactt

SEQ ID NO: 16983 - DNA, 16 bp, synthetic construct
  misc_feature 1..16: note = synthetic [barcode part1]
  source 1..16: mol_type = other DNA
gaagattacgcactag

SEQ ID NO: 16984 - DNA, 16 bp, synthetic construct
  misc_feature 1..16: note = synthetic [barcode part1]
  source 1..16: mol_type = other DNA
tacggaccgttattct

SEQ ID NO: 16985 - DNA, 16 bp, synthetic construct
  misc_feature 1..16: note = synthetic [barcode part1]
  source 1..16: mol_type = other DNA
ttatctcgaccacgcg

SEQ ID NO: 16986 - DNA, 16 bp, synthetic construct
  misc_feature 1..16: note = synthetic [barcode part1]
  source 1..16: mol_type = other DNA
aatcagtgtgtcgcgt

SEQ ID NO: 16987 - DNA, 16 bp, synthetic construct
  misc_feature 1..16: note = synthetic [barcode part1]
  source 1..16: mol_type = other DNA
cctgacttatacaacc

SEQ ID NO: 16988 - DNA, 16 bp, synthetic construct
  misc_feature 1..16: note = synthetic [barcode part1]
  source 1..16: mol_type = other DNA
tactgcagttgaccag

SEQ ID NO: 16989 - DNA, 16 bp, synthetic construct
  misc_feature 1..16: note = synthetic [barcode part1]
  source 1..16: mol_type = other DNA
tctggagtggttggtt

SEQ ID NO: 16990 - DNA, 16 bp, synthetic construct
  misc_feature 1..16: note = synthetic [barcode part1]
  source 1..16: mol_type = other DNA
ttcgtgtggagacact

SEQ ID NO: 16991 - DNA, 16 bp, synthetic construct
  misc_feature 1..16: note = synthetic [barcode part1]
  source 1..16: mol_type = other DNA
gaattcgatcctctac

SEQ ID NO: 16992 - DNA, 16 bp, synthetic construct
  misc_feature 1..16: note = synthetic [barcode part1]
  source 1..16: mol_type = other DNA
tgtacacagtcaaccg

SEQ ID NO: 16993 - DNA, 16 bp, synthetic construct
  misc_feature 1..16: note = synthetic [barcode part1]
  source 1..16: mol_type = other DNA
ttgtacgatcgcacag

SEQ ID NO: 16994 - DNA, 16 bp, synthetic construct
  misc_feature 1..16: note = synthetic [barcode part1]
  source 1..16: mol_type = other DNA
cggtgaattcgttgtg

SEQ ID NO: 16995 - DNA, 16 bp, synthetic construct
  misc_feature 1..16: note = synthetic [barcode part1]
  source 1..16: mol_type = other DNA
tgaagtacgagagacg

SEQ ID NO: 16996 - DNA, 16 bp, synthetic construct
  misc_feature 1..16: note = synthetic [barcode part1]
  source 1..16: mol_type = other DNA
tccggttaagactgac

SEQ ID NO: 16997 - DNA, 16 bp, synthetic construct
  misc_feature 1..16: note = synthetic [barcode part1]
  source 1..16: mol_type = other DNA
ttgcgatcgattggtg

SEQ ID NO: 16998 - DNA, 16 bp, synthetic construct
  misc_feature 1..16: note = synthetic [barcode part1]
  source 1..16: mol_type = other DNA
tcagtgtacacaccag

SEQ ID NO: 16999 - DNA, 16 bp, synthetic construct
  misc_feature 1..16: note = synthetic [barcode part1]
  source 1..16: mol_type = other DNA
atctaagtctgccact

SEQ ID NO: 17000 - DNA, 16 bp, synthetic construct
  misc_feature 1..16: note = synthetic [barcode part1]
  source 1..16: mol_type = other DNA
gatcacagatcgaggc

SEQ ID NO: 17001 - DNA, 16 bp, synthetic construct
  misc_feature 1..16: note = synthetic [barcode part1]
  source 1..16: mol_type = other DNA
cctcaacttctcgatc

SEQ ID NO: 17002 - DNA, 16 bp, synthetic construct
  misc_feature 1..16: note = synthetic [barcode part1]
  source 1..16: mol_type = other DNA
ttaacgactgcacctt

SEQ ID NO: 17003 - DNA, 16 bp, synthetic construct
  misc_feature 1..16: note = synthetic [barcode part1]
  source 1..16: mol_type = other DNA
ccgttgtcttactacc

SEQ ID NO: 17004 - DNA, 16 bp, synthetic construct
  misc_feature 1..16: note = synthetic [barcode part1]
  source 1..16: mol_type = other DNA
agtctgttcacaggtg

SEQ ID NO: 17005 - DNA, 16 bp, synthetic construct
  misc_feature 1..16: note = synthetic [barcode part1]
  source 1..16: mol_type = other DNA
tgcacttggcgacctt

SEQ ID NO: 17006 - DNA, 16 bp, synthetic construct
  misc_feature 1..16: note = synthetic [barcode part1]
  source 1..16: mol_type = other DNA
acctattctacctgcc

SEQ ID NO: 17007 - DNA, 16 bp, synthetic construct
  misc_feature 1..16: note = synthetic [barcode part1]
  source 1..16: mol_type = other DNA
cgacacgcaatctctc

SEQ ID NO: 17008 - DNA, 16 bp, synthetic construct
  misc_feature 1..16: note = synthetic [barcode part1]
  source 1..16: mol_type = other DNA
cggcagtaattactgc

SEQ ID NO: 17009 - DNA, 16 bp, synthetic construct
  misc_feature 1..16: note = synthetic [barcode part1]
  source 1..16: mol_type = other DNA
gaggcgacctattgtt

SEQ ID NO: 17010 - DNA, 16 bp, synthetic construct
  misc_feature 1..16: note = synthetic [barcode part1]
  source 1..16: mol_type = other DNA
acgagaggttactaac

SEQ ID NO: 17011 - DNA, 16 bp, synthetic construct
  misc_feature 1..16: note = synthetic [barcode part1]
  source 1..16: mol_type = other DNA
gttcgaagagtggcac

SEQ ID NO: 17012 - DNA, 16 bp, synthetic construct
  misc_feature 1..16: note = synthetic [barcode part1]
  source 1..16: mol_type = other DNA
cgactgcacttctcag

SEQ ID NO: 17013 - DNA, 16 bp, synthetic construct
  misc_feature 1..16: note = synthetic [barcode part1]
  source 1..16: mol_type = other DNA
taattctcagtcgcgt

SEQ ID NO: 17014 - DNA, 16 bp, synthetic construct
  misc_feature 1..16: note = synthetic [barcode part1]
  source 1..16: mol_type = other DNA
attctacgcagtcgcc

SEQ ID NO: 17015 - DNA, 16 bp, synthetic construct
  misc_feature 1..16: note = synthetic [barcode part1]
  source 1..16: mol_type = other DNA
aagtctgagattggac

SEQ ID NO: 17016 - DNA, 16 bp, synthetic construct
  misc_feature 1..16: note = synthetic [barcode part1]
  source 1..16: mol_type = other DNA
gatatcgtgtgacacc

SEQ ID NO: 17017 - DNA, 16 bp, synthetic construct
  misc_feature 1..16: note = synthetic [barcode part1]
  source 1..16: mol_type = other DNA
ttgcagtgtacacgtg

SEQ ID NO: 17018 - DNA, 16 bp, synthetic construct
  misc_feature 1..16: note = synthetic [barcode part1]
  source 1..16: mol_type = other DNA
cgtgtctaagtgtgac

SEQ ID NO: 17019 - DNA, 16 bp, synthetic construct
  misc_feature 1..16: note = synthetic [barcode part1]
  source 1..16: mol_type = other DNA
acgagacgtcctattg

SEQ ID NO: 17020 - DNA, 16 bp, synthetic construct
  misc_feature 1..16: note = synthetic [barcode part1]
  source 1..16: mol_type = other DNA
gcaggataggtgatag

SEQ ID NO: 17021 - DNA, 16 bp, synthetic construct
  misc_feature 1..16: note = synthetic [barcode part1]
  source 1..16: mol_type = other DNA
gtggttgtggtacact

SEQ ID NO: 17022 - DNA, 16 bp, synthetic construct
  misc_feature 1..16: note = synthetic [barcode part1]
  source 1..16: mol_type = other DNA
tccacgcagttattgt

SEQ ID NO: 17023 - DNA, 16 bp, synthetic construct
  misc_feature 1..16: note = synthetic [barcode part1]
  source 1..16: mol_type = other DNA
atccttgcggattact

SEQ ID NO: 17024 - DNA, 16 bp, synthetic construct
  misc_feature 1..16: note = synthetic [barcode part1]
  source 1..16: mol_type = other DNA
ccgttacggatctacc

SEQ ID NO: 17025 - DNA, 16 bp, synthetic construct
  misc_feature 1..16: note = synthetic [barcode part1]
  source 1..16: mol_type = other DNA
gccggattgagaacac

SEQ ID NO: 17026 - DNA, 16 bp, synthetic construct
  misc_feature 1..16: note = synthetic [barcode part1]
  source 1..16: mol_type = other DNA
tggatcggactactgt

SEQ ID NO: 17027 - DNA, 16 bp, synthetic construct
  misc_feature 1..16: note = synthetic [barcode part1]
  source 1..16: mol_type = other DNA
agttacgtggttacgc

SEQ ID NO: 17028 - DNA, 16 bp, synthetic construct
  misc_feature 1..16: note = synthetic [barcode part1]
  source 1..16: mol_type = other DNA
taggtgtcctccagtc

SEQ ID NO: 17029 - DNA, 16 bp, synthetic construct
  misc_feature 1..16: note = synthetic [barcode part1]
  source 1..16: mol_type = other DNA
tgtctccttggcaacg

SEQ ID NO: 17030 - DNA, 16 bp, synthetic construct
  misc_feature 1..16: note = synthetic [barcode part1]
  source 1..16: mol_type = other DNA
gcaggttcgatctcct

SEQ ID NO: 17031 - DNA, 16 bp, synthetic construct
  misc_feature 1..16: note = synthetic [barcode part1]
  source 1..16: mol_type = other DNA
ccggtcagtcaattag

SEQ ID NO: 17032 - DNA, 16 bp, synthetic construct
  misc_feature 1..16: note = synthetic [barcode part1]
  source 1..16: mol_type = other DNA
aggcaactcaggtgtg

SEQ ID NO: 17033 - DNA, 16 bp, synthetic construct
  misc_feature 1..16: note = synthetic [barcode part1]
  source 1..16: mol_type = other DNA
ccgcgttctgtcaagt

SEQ ID NO: 17034 - DNA, 16 bp, synthetic construct
  misc_feature 1..16: note = synthetic [barcode part1]
  source 1..16: mol_type = other DNA
cgtacctgtaactcgc

SEQ ID NO: 17035 - DNA, 16 bp, synthetic construct
  misc_feature 1..16: note = synthetic [barcode part1]
  source 1..16: mol_type = other DNA
gcggattagttgcgtt

SEQ ID NO: 17036 - DNA, 16 bp, synthetic construct
  misc_feature 1..16: note = synthetic [barcode part1]
  source 1..16: mol_type = other DNA
aggtatctcgcaagtc

SEQ ID NO: 17037 - DNA, 16 bp, synthetic construct
  misc_feature 1..16: note = synthetic [barcode part1]
  source 1..16: mol_type = other DNA
gttacaccagtcctcg

SEQ ID NO: 17038 - DNA, 16 bp, synthetic construct
  misc_feature 1..16: note = synthetic [barcode part1]
  source 1..16: mol_type = other DNA
cagtactacgaacaag

SEQ ID NO: 17039 - DNA, 16 bp, synthetic construct
  misc_feature 1..16: note = synthetic [barcode part1]
  source 1..16: mol_type = other DNA
ttgtgcagtaccaacg

SEQ ID NO: 17040 - DNA, 16 bp, synthetic construct
  misc_feature 1..16: note = synthetic [barcode part1]
  source 1..16: mol_type = other DNA
tacgtggaagtgtcct

SEQ ID NO: 17041 - DNA, 16 bp, synthetic construct
  misc_feature 1..16: note = synthetic [barcode part1]
  source 1..16: mol_type = other DNA
gcgagattcgtgagtg

SEQ ID NO: 17042 - DNA, 16 bp, synthetic construct
  misc_feature 1..16: note = synthetic [barcode part1]
  source 1..16: mol_type = other DNA
tgtcttggttcgtagt

SEQ ID NO: 17043 - DNA, 16 bp, synthetic construct
  misc_feature 1..16: note = synthetic [barcode part1]
  source 1..16: mol_type = other DNA
taccacaactgcaacg

SEQ ID NO: 17044 - DNA, 16 bp, synthetic construct
  misc_feature 1..16: note = synthetic [barcode part1]
  source 1..16: mol_type = other DNA
acgaaccaacctgtgt

SEQ ID NO: 17045 - DNA, 16 bp, synthetic construct
  misc_feature 1..16: note = synthetic [barcode part1]
  source 1..16: mol_type = other DNA
gaggatctgacacgtg

SEQ ID NO: 17046 - DNA, 16 bp, synthetic construct
  misc_feature 1..16: note = synthetic [barcode part1]
  source 1..16: mol_type = other DNA
aatagttaggacgcac

SEQ ID NO: 17047 - DNA, 16 bp, synthetic construct
  misc_feature 1..16: note = synthetic [barcode part1]
  source 1..16: mol_type = other DNA
gtgcagtacaccagtt

SEQ ID NO: 17048 - DNA, 16 bp, synthetic construct
  misc_feature 1..16: note = synthetic [barcode part1]
  source 1..16: mol_type = other DNA
gcacaattcaactctc

SEQ ID NO: 17049 - DNA, 16 bp, synthetic construct
  misc_feature 1..16: note = synthetic [barcode part1]
  source 1..16: mol_type = other DNA
caccagactatatcct

SEQ ID NO: 17050 - DNA, 16 bp, synthetic construct
  misc_feature 1..16: note = synthetic [barcode part1]
  source 1..16: mol_type = other DNA
cactccttaacgaccg

SEQ ID NO: 17051 - DNA, 16 bp, synthetic construct
  misc_feature 1..16: note = synthetic [barcode part1]
  source 1..16: mol_type = other DNA
gcacgacgaagaatcc

SEQ ID NO: 17052 - DNA, 16 bp, synthetic construct
  misc_feature 1..16: note = synthetic [barcode part1]
  source 1..16: mol_type = other DNA
ttaacctgtctcctgc

SEQ ID NO: 17053 - DNA, 16 bp, synthetic construct
  misc_feature 1..16: note = synthetic [barcode part1]
  source 1..16: mol_type = other DNA
ttccacctgagtgtcg

SEQ ID NO: 17054 - DNA, 16 bp, synthetic construct
  misc_feature 1..16: note = synthetic [barcode part1]
  source 1..16: mol_type = other DNA
cgactagttaaccggt

SEQ ID NO: 17055 - DNA, 16 bp, synthetic construct
  misc_feature 1..16: note = synthetic [barcode part1]
  source 1..16: mol_type = other DNA
cgttgatatactggcg

SEQ ID NO: 17056 - DNA, 16 bp, synthetic construct
  misc_feature 1..16: note = synthetic [barcode part1]
  source 1..16: mol_type = other DNA
acagaggttggcgatc

SEQ ID NO: 17057 - DNA, 16 bp, synthetic construct
  misc_feature 1..16: note = synthetic [barcode part1]
  source 1..16: mol_type = other DNA
gaaggtccgcaactag

SEQ ID NO: 17058 - DNA, 16 bp, synthetic construct
  misc_feature 1..16: note = synthetic [barcode part1]
  source 1..16: mol_type = other DNA
actaagtactcggcgt

SEQ ID NO: 17059 - DNA, 16 bp, synthetic construct
  misc_feature 1..16: note = synthetic [barcode part1]
  source 1..16: mol_type = other DNA
aacctcctcgatacgc

SEQ ID NO: 17060 - DNA, 16 bp, synthetic construct
  misc_feature 1..16: note = synthetic [barcode part1]
  source 1..16: mol_type = other DNA
atcggcagacgtactt

SEQ ID NO: 17061 - DNA, 16 bp, synthetic construct
  misc_feature 1..16: note = synthetic [barcode part1]
  source 1..16: mol_type = other DNA
cactaagtagaggcgc

SEQ ID NO: 17062 - DNA, 16 bp, synthetic construct
  misc_feature 1..16: note = synthetic [barcode part1]
  source 1..16: mol_type = other DNA
tgcgcgaagattaggc

SEQ ID NO: 17063 - DNA, 16 bp, synthetic construct
  misc_feature 1..16: note = synthetic [barcode part1]
  source 1..16: mol_type = other DNA
atatcctcgacaatcc

SEQ ID NO: 17064 - DNA, 16 bp, synthetic construct
  misc_feature 1..16: note = synthetic [barcode part1]
  source 1..16: mol_type = other DNA
agagaacttacacggt

SEQ ID NO: 17065 - DNA, 16 bp, synthetic construct
  misc_feature 1..16: note = synthetic [barcode part1]
  source 1..16: mol_type = other DNA
ttccgtactagatcgt

SEQ ID NO: 17066 - DNA, 16 bp, synthetic construct
  misc_feature 1..16: note = synthetic [barcode part1]
  source 1..16: mol_type = other DNA
actgttcttcgagtgt

SEQ ID NO: 17067 - DNA, 16 bp, synthetic construct
  misc_feature 1..16: note = synthetic [barcode part1]
  source 1..16: mol_type = other DNA
tgcagtagttctggac

SEQ ID NO: 17068 - DNA, 16 bp, synthetic construct
  misc_feature 1..16: note = synthetic [barcode part1]
  source 1..16: mol_type = other DNA
acggcaagagtgtctg

SEQ ID NO: 17069 - DNA, 16 bp, synthetic construct
  misc_feature 1..16: note = synthetic [barcode part1]
  source 1..16: mol_type = other DNA
gtctgatccgagttag

SEQ ID NO: 17070 - DNA, 16 bp, synthetic construct
  misc_feature 1..16: note = synthetic [barcode part1]
  source 1..16: mol_type = other DNA
gccaattatcgcaacg

SEQ ID NO: 17071 - DNA, 16 bp, synthetic construct
  misc_feature 1..16: note = synthetic [barcode part1]
  source 1..16: mol_type = other DNA
tagactcgcgaattcg

SEQ ID NO: 17072 - DNA, 16 bp, synthetic construct
  misc_feature 1..16: note = synthetic [barcode part1]
  source 1..16: mol_type = other DNA
gaaccgacaatacgcg

SEQ ID NO: 17073 - DNA, 16 bp, synthetic construct
  misc_feature 1..16: note = synthetic [barcode part1]
  source 1..16: mol_type = other DNA
gaccttcgttaggaac

SEQ ID NO: 17074 - DNA, 16 bp, synthetic construct
  misc_feature 1..16: note = synthetic [barcode part1]
  source 1..16: mol_type = other DNA
tgccactcgttaatac

SEQ ID NO: 17075 - DNA, 16 bp, synthetic construct
  misc_feature 1..16: note = synthetic [barcode part1]
  source 1..16: mol_type = other DNA
tggaatagagtgttcg

SEQ ID NO: 17076 - DNA, 16 bp, synthetic construct
  misc_feature 1..16: note = synthetic [barcode part1]
  source 1..16: mol_type = other DNA
tcagacaagactcacc

SEQ ID NO: 17077 - DNA, 16 bp, synthetic construct
  misc_feature 1..16: note = synthetic [barcode part1]
  source 1..16: mol_type = other DNA
agactaccggaggtac

SEQ ID NO: 17078 - DNA, 16 bp, synthetic construct
  misc_feature 1..16: note = synthetic [barcode part1]
  source 1..16: mol_type = other DNA
cagttctgttggtgtt

SEQ ID NO: 17079 - DNA, 16 bp, synthetic construct
  misc_feature 1..16: note = synthetic [barcode part1]
  source 1..16: mol_type = other DNA
aagaatctaacgcgtg

SEQ ID NO: 17080 - DNA, 16 bp, synthetic construct
  misc_feature 1..16: note = synthetic [barcode part1]
  source 1..16: mol_type = other DNA
cactctctcaagttag

SEQ ID NO: 17081 - DNA, 16 bp, synthetic construct
  misc_feature 1..16: note = synthetic [barcode part1]
  source 1..16: mol_type = other DNA
agattgcgtctctatc

SEQ ID NO: 17082 - DNA, 16 bp, synthetic construct
  misc_feature 1..16: note = synthetic [barcode part1]
  source 1..16: mol_type = other DNA
agacctggagtcaggt

SEQ ID NO: 17083 - DNA, 16 bp, synthetic construct
  misc_feature 1..16: note = synthetic [barcode part1]
  source 1..16: mol_type = other DNA
aacaactccttgcgtt

SEQ ID NO: 17084 - DNA, 16 bp, synthetic construct
  misc_feature 1..16: note = synthetic [barcode part1]
  source 1..16: mol_type = other DNA
aacgattcacggaagt

SEQ ID NO: 17085 - DNA, 16 bp, synthetic construct
  misc_feature 1..16: note = synthetic [barcode part1]
  source 1..16: mol_type = other DNA
tggtactattcgttcg

SEQ ID NO: 17086 - DNA, 16 bp, synthetic construct
  misc_feature 1..16: note = synthetic [barcode part1]
  source 1..16: mol_type = other DNA
agaagtattcggcaac

SEQ ID NO: 17087 - DNA, 16 bp, synthetic construct
  misc_feature 1..16: note = synthetic [barcode part1]
  source 1..16: mol_type = other DNA
cacggacagatctatc

SEQ ID NO: 17088 - DNA, 16 bp, synthetic construct
  misc_feature 1..16: note = synthetic [barcode part1]
  source 1..16: mol_type = other DNA
tgaacgcagagtagtt

SEQ ID NO: 17089 - DNA, 16 bp, synthetic construct
  misc_feature 1..16: note = synthetic [barcode part1]
  source 1..16: mol_type = other DNA
gcacaagttgtgtctg

SEQ ID NO: 17090 - DNA, 16 bp, synthetic construct
  misc_feature 1..16: note = synthetic [barcode part1]
  source 1..16: mol_type = other DNA
tcgcggttgattaacg

SEQ ID NO: 17091 - DNA, 16 bp, synthetic construct
  misc_feature 1..16: note = synthetic [barcode part1]
  source 1..16: mol_type = other DNA
gccacttagtgagatc

SEQ ID NO: 17092 - DNA, 16 bp, synthetic construct
  misc_feature 1..16: note = synthetic [barcode part1]
  source 1..16: mol_type = other DNA
gtaggacaccttactg

SEQ ID NO: 17093 - DNA, 16 bp, synthetic construct
  misc_feature 1..16: note = synthetic [barcode part1]
  source 1..16: mol_type = other DNA
tcctagtatacctggt

SEQ ID NO: 17094 - DNA, 16 bp, synthetic construct
  misc_feature 1..16: note = synthetic [barcode part1]
  source 1..16: mol_type = other DNA
cgaaccacacacctct

SEQ ID NO: 17095 - DNA, 16 bp, synthetic construct
  misc_feature 1..16: note = synthetic [barcode part1]
  source 1..16: mol_type = other DNA
attgcctcaccgttct

SEQ ID NO: 17096 - DNA, 16 bp, synthetic construct
  misc_feature 1..16: note = synthetic [barcode part1]
  source 1..16: mol_type = other DNA
tctgtccacttgtctg

SEQ ID NO: 17097 - DNA, 16 bp, synthetic construct
  misc_feature 1..16: note = synthetic [barcode part1]
  source 1..16: mol_type = other DNA
gttgtgtgatcacgtg

SEQ ID NO: 17098 - DNA, 16 bp, synthetic construct
  misc_feature 1..16: note = synthetic [barcode part1]
  source 1..16: mol_type = other DNA
cagtgcgccttattgc

SEQ ID NO: 17099 - DNA, 16 bp, synthetic construct
  misc_feature 1..16: note = synthetic [barcode part1]
  source 1..16: mol_type = other DNA
gcagaccaggacaatc

SEQ ID NO: 17100 - DNA, 16 bp, synthetic construct
  misc_feature 1..16: note = synthetic [barcode part1]
  source 1..16: mol_type = other DNA
actattccgtcgtctc

SEQ ID NO: 17101 - DNA, 16 bp, synthetic construct
  misc_feature 1..16: note = synthetic [barcode part1]
  source 1..16: mol_type = other DNA
ttgtcagtgcaagaag

SEQ ID NO: 17102 - DNA, 16 bp, synthetic construct
  misc_feature 1..16: note = synthetic [barcode part1]
  source 1..16: mol_type = other DNA
caggccttggagtaag

SEQ ID NO: 17103 - DNA, 16 bp, synthetic construct
  misc_feature 1..16: note = synthetic [barcode part1]
  source 1..16: mol_type = other DNA
agtaacagtctgtgag

SEQ ID NO: 17104 - DNA, 16 bp, synthetic construct
  misc_feature 1..16: note = synthetic [barcode part1]
  source 1..16: mol_type = other DNA
gccgacgatagttgtt

SEQ ID NO: 17105 - DNA, 16 bp, synthetic construct
  misc_feature 1..16: note = synthetic [barcode part1]
  source 1..16: mol_type = other DNA
acggcgtaactctaac

SEQ ID NO: 17106 - DNA, 16 bp, synthetic construct
  misc_feature 1..16: note = synthetic [barcode part1]
  source 1..16: mol_type = other DNA
tcctattacggcgaag

SEQ ID NO: 17107 - DNA, 16 bp, synthetic construct
  misc_feature 1..16: note = synthetic [barcode part1]
  source 1..16: mol_type = other DNA
aactagtgcacgcact

SEQ ID NO: 17108 - DNA, 16 bp, synthetic construct
  misc_feature 1..16: note = synthetic [barcode part1]
  source 1..16: mol_type = other DNA
acactcaacctacgag

SEQ ID NO: 17109 - DNA, 16 bp, synthetic construct
  misc_feature 1..16: note = synthetic [barcode part1]
  source 1..16: mol_type = other DNA
gttacggtcgtagtgt

SEQ ID NO: 17110 - DNA, 16 bp, synthetic construct
  misc_feature 1..16: note = synthetic [barcode part1]
  source 1..16: mol_type = other DNA
gtcagatacaagagtc

SEQ ID NO: 17111 - DNA, 16 bp, synthetic construct
  misc_feature 1..16: note = synthetic [barcode part1]
  source 1..16: mol_type = other DNA
cctcctctaattgacc

SEQ ID NO: 17112 - DNA, 16 bp, synthetic construct
  misc_feature 1..16: note = synthetic [barcode part1]
  source 1..16: mol_type = other DNA
tccaccgaggatagtt

SEQ ID NO: 17113 - DNA, 16 bp, synthetic construct
  misc_feature 1..16: note = synthetic [barcode part1]
  source 1..16: mol_type = other DNA
ccagatagtggatctc

SEQ ID NO: 17114 - DNA, 16 bp, synthetic construct
  misc_feature 1..16: note = synthetic [barcode part1]
  source 1..16: mol_type = other DNA
tagttctcggccgtac

SEQ ID NO: 17115 - DNA, 16 bp, synthetic construct
  misc_feature 1..16: note = synthetic [barcode part1]
  source 1..16: mol_type = other DNA
cctaccactagacacc

SEQ ID NO: 17116 - DNA, 16 bp, synthetic construct
  misc_feature 1..16: note = synthetic [barcode part1]
  source 1..16: mol_type = other DNA
taacagtgccgagtct

SEQ ID NO: 17117 - DNA, 16 bp, synthetic construct
  misc_feature 1..16: note = synthetic [barcode part1]
  source 1..16: mol_type = other DNA
gaagattataccgacg

SEQ ID NO: 17118 - DNA, 16 bp, synthetic construct
  misc_feature 1..16: note = synthetic [barcode part1]
  source 1..16: mol_type = other DNA
tcttcggcacgtaacc

SEQ ID NO: 17119 - DNA, 16 bp, synthetic construct
  misc_feature 1..16: note = synthetic [barcode part1]
  source 1..16: mol_type = other DNA
ttagttctcacgcggc

SEQ ID NO: 17120 - DNA, 16 bp, synthetic construct
  misc_feature 1..16: note = synthetic [barcode part1]
  source 1..16: mol_type = other DNA
gattcaccgagacgag

SEQ ID NO: 17121 - DNA, 16 bp, synthetic construct
  misc_feature 1..16: note = synthetic [barcode part1]
  source 1..16: mol_type = other DNA
tcagttgcacagtacg

SEQ ID NO: 17122 - DNA, 16 bp, synthetic construct
  misc_feature 1..16: note = synthetic [barcode part1]
  source 1..16: mol_type = other DNA
tcctctgagtagtgag

SEQ ID NO: 17123 - DNA, 16 bp, synthetic construct
  misc_feature 1..16: note = synthetic [barcode part1]
  source 1..16: mol_type = other DNA
tccgttgcgcgaattc

SEQ ID NO: 17124 - DNA, 16 bp, synthetic construct
  misc_feature 1..16: note = synthetic [barcode part1]
  source 1..16: mol_type = other DNA
accaacggtgactgtt

SEQ ID NO: 17125 - DNA, 16 bp, synthetic construct
  misc_feature 1..16: note = synthetic [barcode part1]
  source 1..16: mol_type = other DNA
cggcaatcaatccagt

SEQ ID NO: 17126 - DNA, 16 bp, synthetic construct
  misc_feature 1..16: note = synthetic [barcode part1]
  source 1..16: mol_type = other DNA
cgcctatattctagac

SEQ ID NO: 17127 - DNA, 16 bp, synthetic construct
  misc_feature 1..16: note = synthetic [barcode part1]
  source 1..16: mol_type = other DNA
cacgtaagtggaacgc

SEQ ID NO: 17128 - DNA, 16 bp, synthetic construct
  misc_feature 1..16: note = synthetic [barcode part1]
  source 1..16: mol_type = other DNA
aattgcgccagaaggc

SEQ ID NO: 17129 - DNA, 16 bp, synthetic construct
  misc_feature 1..16: note = synthetic [barcode part1]
  source 1..16: mol_type = other DNA
gagacttctcgaagtc

SEQ ID NO: 17130 - DNA, 16 bp, synthetic construct
  misc_feature 1..16: note = synthetic [barcode part1]
  source 1..16: mol_type = other DNA
ttggcctggattgaac

SEQ ID NO: 17131 - DNA, 16 bp, synthetic construct
  misc_feature 1..16: note = synthetic [barcode part1]
  source 1..16: mol_type = other DNA
tgtagacgagtctacc

SEQ ID NO: 17132 - DNA, 16 bp, synthetic construct
  misc_feature 1..16: note = synthetic [barcode part1]
  source 1..16: mol_type = other DNA
atattcaccacaggcg

SEQ ID NO: 17133 - DNA, 16 bp, synthetic construct
  misc_feature 1..16: note = synthetic [barcode part1]
  source 1..16: mol_type = other DNA
ccagttctctgcagac

SEQ ID NO: 17134 - DNA, 16 bp, synthetic construct
  misc_feature 1..16: note = synthetic [barcode part1]
  source 1..16: mol_type = other DNA
gactggaagacacctg

SEQ ID NO: 17135 - DNA, 16 bp, synthetic construct
  misc_feature 1..16: note = synthetic [barcode part1]
  source 1..16: mol_type = other DNA
gcaatcagagatcggc

SEQ ID NO: 17136 - DNA, 16 bp, synthetic construct
  misc_feature 1..16: note = synthetic [barcode part1]
  source 1..16: mol_type = other DNA
tacgaggacactcttg

SEQ ID NO: 17137 - DNA, 16 bp, synthetic construct
  misc_feature 1..16: note = synthetic [barcode part1]
  source 1..16: mol_type = other DNA
cctgattgagactggt

SEQ ID NO: 17138 - DNA, 16 bp, synthetic construct
  misc_feature 1..16: note = synthetic [barcode part1]
  source 1..16: mol_type = other DNA
tgttagagtctccgtt

SEQ ID NO: 17139 - DNA, 16 bp, synthetic construct
  misc_feature 1..16: note = synthetic [barcode part1]
  source 1..16: mol_type = other DNA
tgtctcgtaggtgtcc

SEQ ID NO: 17140 - DNA, 16 bp, synthetic construct
  misc_feature 1..16: note = synthetic [barcode part1]
  source 1..16: mol_type = other DNA
accagagtaactgtag

SEQ ID NO: 17141 - DNA, 16 bp, synthetic construct
  misc_feature 1..16: note = synthetic [barcode part1]
  source 1..16: mol_type = other DNA
tgcgtcttgtcttcac

SEQ ID NO: 17142 - DNA, 16 bp, synthetic construct
  misc_feature 1..16: note = synthetic [barcode part1]
  source 1..16: mol_type = other DNA
gtgcagtacgtcaact

SEQ ID NO: 17143 - DNA, 16 bp, synthetic construct
  misc_feature 1..16: note = synthetic [barcode part1]
  source 1..16: mol_type = other DNA
ccacttgtcacgacac

SEQ ID NO: 17144 - DNA, 16 bp, synthetic construct
  misc_feature 1..16: note = synthetic [barcode part1]
  source 1..16: mol_type = other DNA
tattcctagagacgcg

SEQ ID NO: 17145 - DNA, 16 bp, synthetic construct
  misc_feature 1..16: note = synthetic [barcode part1]
  source 1..16: mol_type = other DNA
atcttctctccaaccg

SEQ ID NO: 17146 - DNA, 16 bp, synthetic construct
  misc_feature 1..16: note = synthetic [barcode part1]
  source 1..16: mol_type = other DNA
atcagatcctacacct

SEQ ID NO: 17147 - DNA, 16 bp, synthetic construct
  misc_feature 1..16: note = synthetic [barcode part1]
  source 1..16: mol_type = other DNA
acgcgtgatacgtatc

SEQ ID NO: 17148 - DNA, 16 bp, synthetic construct
  misc_feature 1..16: note = synthetic [barcode part1]
  source 1..16: mol_type = other DNA
tcgtatcaggtgtggt

SEQ ID NO: 17149 - DNA, 16 bp, synthetic construct
  misc_feature 1..16: note = synthetic [barcode part1]
  source 1..16: mol_type = other DNA
agtcgttggcaatctg

SEQ ID NO: 17150 - DNA, 16 bp, synthetic construct
  misc_feature 1..16: note = synthetic [barcode part1]
  source 1..16: mol_type = other DNA
gcggttcacaagagtg

SEQ ID NO: 17151 - DNA, 16 bp, synthetic construct
  misc_feature 1..16: note = synthetic [barcode part1]
  source 1..16: mol_type = other DNA
gaggccttatctattc

SEQ ID NO: 17152 - DNA, 16 bp, synthetic construct
  misc_feature 1..16: note = synthetic [barcode part1]
  source 1..16: mol_type = other DNA
acaataggttcgagtg

SEQ ID NO: 17153 - DNA, 16 bp, synthetic construct
  misc_feature 1..16: note = synthetic [barcode part1]
  source 1..16: mol_type = other DNA
atagtcgagagtcggc

SEQ ID NO: 17154 - DNA, 16 bp, synthetic construct
  misc_feature 1..16: note = synthetic [barcode part1]
  source 1..16: mol_type = other DNA
gtcctgtcttgtggac

SEQ ID NO: 17155 - DNA, 16 bp, synthetic construct
  misc_feature 1..16: note = synthetic [barcode part1]
  source 1..16: mol_type = other DNA
gacactgtggttggtt

SEQ ID NO: 17156 - DNA, 16 bp, synthetic construct
  misc_feature 1..16: note = synthetic [barcode part1]
  source 1..16: mol_type = other DNA
tccgtggactctgttg

SEQ ID NO: 17157 - DNA, 16 bp, synthetic construct
  misc_feature 1..16: note = synthetic [barcode part1]
  source 1..16: mol_type = other DNA
actggacctgttgagt

SEQ ID NO: 17158 - DNA, 16 bp, synthetic construct
  misc_feature 1..16: note = synthetic [barcode part1]
  source 1..16: mol_type = other DNA
gagtatcagtgaagtc

SEQ ID NO: 17159 - DNA, 16 bp, synthetic construct
  misc_feature 1..16: note = synthetic [barcode part1]
  source 1..16: mol_type = other DNA
aaccacggagagacct

SEQ ID NO: 17160 - DNA, 16 bp, synthetic construct
  misc_feature 1..16: note = synthetic [barcode part1]
  source 1..16: mol_type = other DNA
ccgatccgcgattact

SEQ ID NO: 17161 - DNA, 16 bp, synthetic construct
  misc_feature 1..16: note = synthetic [barcode part1]
  source 1..16: mol_type = other DNA
cctgaatactcttcag

SEQ ID NO: 17162 - DNA, 16 bp, synthetic construct
  misc_feature 1..16: note = synthetic [barcode part1]
  source 1..16: mol_type = other DNA
tggcgtgatacttgac

SEQ ID NO: 17163 - DNA, 16 bp, synthetic construct
  misc_feature 1..16: note = synthetic [barcode part1]
  source 1..16: mol_type = other DNA
tcctcaggttgtatac

SEQ ID NO: 17164 - DNA, 16 bp, synthetic construct
  misc_feature 1..16: note = synthetic [barcode part1]
  source 1..16: mol_type = other DNA
tggtaggagtgcctag

SEQ ID NO: 17165 - DNA, 16 bp, synthetic construct
  misc_feature 1..16: note = synthetic [barcode part1]
  source 1..16: mol_type = other DNA
actagacagtgcggac

SEQ ID NO: 17166 - DNA, 16 bp, synthetic construct
  misc_feature 1..16: note = synthetic [barcode part1]
  source 1..16: mol_type = other DNA
aggaataacttccgcc

SEQ ID NO: 17167 - DNA, 16 bp, synthetic construct
  misc_feature 1..16: note = synthetic [barcode part1]
  source 1..16: mol_type = other DNA
actgacgttcgcaagt

SEQ ID NO: 17168 - DNA, 16 bp, synthetic construct
  misc_feature 1..16: note = synthetic [barcode part1]
  source 1..16: mol_type = other DNA
gtcctgtaacagtgac

SEQ ID NO: 17169 - DNA, 16 bp, synthetic construct
  misc_feature 1..16: note = synthetic [barcode part1]
  source 1..16: mol_type = other DNA
ttccgtgtagtccgac

SEQ ID NO: 17170 - DNA, 16 bp, synthetic construct
  misc_feature 1..16: note = synthetic [barcode part1]
  source 1..16: mol_type = other DNA
aactaatcaacgccgc

SEQ ID NO: 17171 - DNA, 16 bp, synthetic construct
  misc_feature 1..16: note = synthetic [barcode part1]
  source 1..16: mol_type = other DNA
cggccttgaagaactt

SEQ ID NO: 17172 - DNA, 16 bp, synthetic construct
  misc_feature 1..16: note = synthetic [barcode part1]
  source 1..16: mol_type = other DNA
cactgaaggtgacttc

SEQ ID NO: 17173 - DNA, 16 bp, synthetic construct
  misc_feature 1..16: note = synthetic [barcode part1]
  source 1..16: mol_type = other DNA
agttgcagtcagtacc

SEQ ID NO: 17174 - DNA, 16 bp, synthetic construct
  misc_feature 1..16: note = synthetic [barcode part1]
  source 1..16: mol_type = other DNA
accagtacttgacttc

SEQ ID NO: 17175 - DNA, 16 bp, synthetic construct
  misc_feature 1..16: note = synthetic [barcode part1]
  source 1..16: mol_type = other DNA
tctctagtggttgtgt

SEQ ID NO: 17176 - DNA, 16 bp, synthetic construct
  misc_feature 1..16: note = synthetic [barcode part1]
  source 1..16: mol_type = other DNA
gttgaggtggtcacag

SEQ ID NO: 17177 - DNA, 16 bp, synthetic construct
  misc_feature 1..16: note = synthetic [barcode part1]
  source 1..16: mol_type = other DNA
acaggtccaattctct

SEQ ID NO: 17178 - DNA, 16 bp, synthetic construct
  misc_feature 1..16: note = synthetic [barcode part1]
  source 1..16: mol_type = other DNA
gaagacgtcactaggc

SEQ ID NO: 17179 - DNA, 16 bp, synthetic construct
  misc_feature 1..16: note = synthetic [barcode part1]
  source 1..16: mol_type = other DNA
ttccagagtccgttcg

SEQ ID NO: 17180 - DNA, 16 bp, synthetic construct
  misc_feature 1..16: note = synthetic [barcode part1]
  source 1..16: mol_type = other DNA
tcttaggttcacctag

SEQ ID NO: 17181 - DNA, 16 bp, synthetic construct
  misc_feature 1..16: note = synthetic [barcode part1]
  source 1..16: mol_type = other DNA
cactaccacaattacc

SEQ ID NO: 17182 - DNA, 16 bp, synthetic construct
  misc_feature 1..16: note = synthetic [barcode part1]
  source 1..16: mol_type = other DNA
taccacaagtctcgag

SEQ ID NO: 17183 - DNA, 16 bp, synthetic construct
  misc_feature 1..16: note = synthetic [barcode part1]
  source 1..16: mol_type = other DNA
tcaagactggaacctc

SEQ ID NO: 17184 - DNA, 16 bp, synthetic construct
  misc_feature 1..16: note = synthetic [barcode part1]
  source 1..16: mol_type = other DNA
ccgtgtgtatacaacg

SEQ ID NO: 17185 - DNA, 16 bp, synthetic construct
  misc_feature 1..16: note = synthetic [barcode part1]
  source 1..16: mol_type = other DNA
gtcgaagttccaactg

SEQ ID NO: 17186 - DNA, 16 bp, synthetic construct
  misc_feature 1..16: note = synthetic [barcode part1]
  source 1..16: mol_type = other DNA
ttacgagaggccgaac

SEQ ID NO: 17187 - DNA, 16 bp, synthetic construct
  misc_feature 1..16: note = synthetic [barcode part1]
  source 1..16: mol_type = other DNA
tgacactgacgaatag

SEQ ID NO: 17188 - DNA, 16 bp, synthetic construct
  misc_feature 1..16: note = synthetic [barcode part1]
  source 1..16: mol_type = other DNA
ttgcaggttcggcctt

SEQ ID NO: 17189 - DNA, 16 bp, synthetic construct
  misc_feature 1..16: note = synthetic [barcode part1]
  source 1..16: mol_type = other DNA
ttcggtaggtaatccg

SEQ ID NO: 17190 - DNA, 16 bp, synthetic construct
  misc_feature 1..16: note = synthetic [barcode part1]
  source 1..16: mol_type = other DNA
atagttaccgacttcc

SEQ ID NO: 17191 - DNA, 16 bp, synthetic construct
  misc_feature 1..16: note = synthetic [barcode part1]
  source 1..16: mol_type = other DNA
accgtataggacgacg

SEQ ID NO: 17192 - DNA, 16 bp, synthetic construct
  misc_feature 1..16: note = synthetic [barcode part1]
  source 1..16: mol_type = other DNA
ccagttatcctcttcg

SEQ ID NO: 17193 - DNA, 16 bp, synthetic construct
  misc_feature 1..16: note = synthetic [barcode part1]
  source 1..16: mol_type = other DNA
acacctctcgaaccac

SEQ ID NO: 17194 - DNA, 16 bp, synthetic construct
  misc_feature 1..16: note = synthetic [barcode part1]
  source 1..16: mol_type = other DNA
tcgttaccaagtacct

SEQ ID NO: 17195 - DNA, 16 bp, synthetic construct
  misc_feature 1..16: note = synthetic [barcode part1]
  source 1..16: mol_type = other DNA
gccgcctaatacctac

SEQ ID NO: 17196 - DNA, 16 bp, synthetic construct
  misc_feature 1..16: note = synthetic [barcode part1]
  source 1..16: mol_type = other DNA
cggcaatcacgttcct

SEQ ID NO: 17197 - DNA, 16 bp, synthetic construct
  misc_feature 1..16: note = synthetic [barcode part1]
  source 1..16: mol_type = other DNA
tggtgagagacaacag

SEQ ID NO: 17198 - DNA, 16 bp, synthetic construct
  misc_feature 1..16: note = synthetic [barcode part1]
  source 1..16: mol_type = other DNA
cggtaaggtctacgag

SEQ ID NO: 17199 - DNA, 16 bp, synthetic construct
  misc_feature 1..16: note = synthetic [barcode part1]
  source 1..16: mol_type = other DNA
atataacggtctcctc

SEQ ID NO: 17200 - DNA, 16 bp, synthetic construct
  misc_feature 1..16: note = synthetic [barcode part1]
  source 1..16: mol_type = other DNA
tgcacctcctagtgac

SEQ ID NO: 17201 - DNA, 16 bp, synthetic construct
  misc_feature 1..16: note = synthetic [barcode part1]
  source 1..16: mol_type = other DNA
ttacgactcggaactg

SEQ ID NO: 17202 - DNA, 16 bp, synthetic construct
  misc_feature 1..16: note = synthetic [barcode part1]
  source 1..16: mol_type = other DNA
agtacggcctatatcg

SEQ ID NO: 17203 - DNA, 16 bp, synthetic construct
  misc_feature 1..16: note = synthetic [barcode part1]
  source 1..16: mol_type = other DNA
gttaccagtcagactg

SEQ ID NO: 17204 - DNA, 16 bp, synthetic construct
  misc_feature 1..16: note = synthetic [barcode part1]
  source 1..16: mol_type = other DNA
caatcttacacgttgc

SEQ ID NO: 17205 - DNA, 16 bp, synthetic construct
  misc_feature 1..16: note = synthetic [barcode part1]
  source 1..16: mol_type = other DNA
caacgagtcgtagacg

SEQ ID NO: 17206 - DNA, 16 bp, synthetic construct
  misc_feature 1..16: note = synthetic [barcode part1]
  source 1..16: mol_type = other DNA
tcaacacaagaagtcg

SEQ ID NO: 17207 - DNA, 16 bp, synthetic construct
  misc_feature 1..16: note = synthetic [barcode part1]
  source 1..16: mol_type = other DNA
gcgagtaatagtatcg

SEQ ID NO: 17208 - DNA, 16 bp, synthetic construct
  misc_feature 1..16: note = synthetic [barcode part1]
  source 1..16: mol_type = other DNA
acgattcaatacggag

SEQ ID NO: 17209 - DNA, 16 bp, synthetic construct
  misc_feature 1..16: note = synthetic [barcode part1]
  source 1..16: mol_type = other DNA
cctatattgacagtcc

SEQ ID NO: 17210 - DNA, 16 bp, synthetic construct
  misc_feature 1..16: note = synthetic [barcode part1]
  source 1..16: mol_type = other DNA
tcaagtgtggagtaac

SEQ ID NO: 17211 - DNA, 16 bp, synthetic construct
  misc_feature 1..16: note = synthetic [barcode part1]
  source 1..16: mol_type = other DNA
ccgcaactggtattag

SEQ ID NO: 17212 - DNA, 16 bp, synthetic construct
  misc_feature 1..16: note = synthetic [barcode part1]
  source 1..16: mol_type = other DNA
tgcacctaagtgcaac

SEQ ID NO: 17213 - DNA, 16 bp, synthetic construct
  misc_feature 1..16: note = synthetic [barcode part1]
  source 1..16: mol_type = other DNA
ccgtgttggattgtcc

SEQ ID NO: 17214 - DNA, 16 bp, synthetic construct
  misc_feature 1..16: note = synthetic [barcode part1]
  source 1..16: mol_type = other DNA
ttggtacgaggaaccg

SEQ ID NO: 17215 - DNA, 16 bp, synthetic construct
  misc_feature 1..16: note = synthetic [barcode part1]
  source 1..16: mol_type = other DNA
tgcacaatctggcctc

SEQ ID NO: 17216 - DNA, 16 bp, synthetic construct
  misc_feature 1..16: note = synthetic [barcode part1]
  source 1..16: mol_type = other DNA
atataggcaagttgcg

SEQ ID NO: 17217 - DNA, 16 bp, synthetic construct
  misc_feature 1..16: note = synthetic [barcode part1]
  source 1..16: mol_type = other DNA
tagagttggtctcggt

SEQ ID NO: 17218 - DNA, 16 bp, synthetic construct
  misc_feature 1..16: note = synthetic [barcode part1]
  source 1..16: mol_type = other DNA
tgccgtgtgatatcag

SEQ ID NO: 17219 - DNA, 16 bp, synthetic construct
  misc_feature 1..16: note = synthetic [barcode part1]
  source 1..16: mol_type = other DNA
tcacctgacaggtaac

SEQ ID NO: 17220 - DNA, 16 bp, synthetic construct
  misc_feature 1..16: note = synthetic [barcode part1]
  source 1..16: mol_type = other DNA
aattacgcctcaacct

SEQ ID NO: 17221 - DNA, 16 bp, synthetic construct
  misc_feature 1..16: note = synthetic [barcode part1]
  source 1..16: mol_type = other DNA
agataggataacgcct

SEQ ID NO: 17222 - DNA, 16 bp, synthetic construct
  misc_feature 1..16: note = synthetic [barcode part1]
  source 1..16: mol_type = other DNA
agaaggtccgtcactt

SEQ ID NO: 17223 - DNA, 16 bp, synthetic construct
  misc_feature 1..16: note = synthetic [barcode part1]
  source 1..16: mol_type = other DNA
tattcgtcgttacgac

SEQ ID NO: 17224 - DNA, 16 bp, synthetic construct
  misc_feature 1..16: note = synthetic [barcode part1]
  source 1..16: mol_type = other DNA
gagacacaccagatcg

SEQ ID NO: 17225 - DNA, 16 bp, synthetic construct
  misc_feature 1..16: note = synthetic [barcode part1]
  source 1..16: mol_type = other DNA
tcagaacgaacggacc

SEQ ID NO: 17226 - DNA, 16 bp, synthetic construct
  misc_feature 1..16: note = synthetic [barcode part1]
  source 1..16: mol_type = other DNA
cagtatcgtccacctg

SEQ ID NO: 17227 - DNA, 16 bp, synthetic construct
  misc_feature 1..16: note = synthetic [barcode part1]
  source 1..16: mol_type = other DNA
ccacgacgtattgtag

SEQ ID NO: 17228 - DNA, 16 bp, synthetic construct
  misc_feature 1..16: note = synthetic [barcode part1]
  source 1..16: mol_type = other DNA
ttcacgcggaatacac

SEQ ID NO: 17229 - DNA, 16 bp, synthetic construct
  misc_feature 1..16: note = synthetic [barcode part1]
  source 1..16: mol_type = other DNA
tcaggactaaggcctt

SEQ ID NO: 17230 - DNA, 16 bp, synthetic construct
  misc_feature 1..16: note = synthetic [barcode part1]
  source 1..16: mol_type = other DNA
acgaacgagtgtcgtg

SEQ ID NO: 17231 - DNA, 16 bp, synthetic construct
  misc_feature 1..16: note = synthetic [barcode part1]
  source 1..16: mol_type = other DNA
tctaggtagaccggag

SEQ ID NO: 17232 - DNA, 16 bp, synthetic construct
  misc_feature 1..16: note = synthetic [barcode part1]
  source 1..16: mol_type = other DNA
cagagacagtgactcg

SEQ ID NO: 17233 - DNA, 16 bp, synthetic construct
  misc_feature 1..16: note = synthetic [barcode part1]
  source 1..16: mol_type = other DNA
gcgtagtactacgtgt

SEQ ID NO: 17234 - DNA, 16 bp, synthetic construct
  misc_feature 1..16: note = synthetic [barcode part1]
  source 1..16: mol_type = other DNA
gcgcactatagaatag

SEQ ID NO: 17235 - DNA, 16 bp, synthetic construct
  misc_feature 1..16: note = synthetic [barcode part1]
  source 1..16: mol_type = other DNA
gcctagatagacacct

SEQ ID NO: 17236 - DNA, 16 bp, synthetic construct
  misc_feature 1..16: note = synthetic [barcode part1]
  source 1..16: mol_type = other DNA
gtactgaactgtcttc

SEQ ID NO: 17237 - DNA, 16 bp, synthetic construct
  misc_feature 1..16: note = synthetic [barcode part1]
  source 1..16: mol_type = other DNA
actcttaccgttgaac

SEQ ID NO: 17238 - DNA, 16 bp, synthetic construct
  misc_feature 1..16: note = synthetic [barcode part1]
  source 1..16: mol_type = other DNA
cgcagtacgagattct

SEQ ID NO: 17239 - DNA, 16 bp, synthetic construct
  misc_feature 1..16: note = synthetic [barcode part1]
  source 1..16: mol_type = other DNA
aacctctccaggcact

SEQ ID NO: 17240 - DNA, 16 bp, synthetic construct
  misc_feature 1..16: note = synthetic [barcode part1]
  source 1..16: mol_type = other DNA
accggtcgattaatcg

SEQ ID NO: 17241 - DNA, 16 bp, synthetic construct
  misc_feature 1..16: note = synthetic [barcode part1]
  source 1..16: mol_type = other DNA
atcgtacaacctgcag

SEQ ID NO: 17242 - DNA, 16 bp, synthetic construct
  misc_feature 1..16: note = synthetic [barcode part1]
  source 1..16: mol_type = other DNA
acacgcgttaagatcc

SEQ ID NO: 17243 - DNA, 16 bp, synthetic construct
  misc_feature 1..16: note = synthetic [barcode part1]
  source 1..16: mol_type = other DNA
tgaaccagatcactgc

SEQ ID NO: 17244 - DNA, 16 bp, synthetic construct
  misc_feature 1..16: note = synthetic [barcode part1]
  source 1..16: mol_type = other DNA
ttgtatcacgacttgc

SEQ ID NO: 17245 - DNA, 16 bp, synthetic construct
  misc_feature 1..16: note = synthetic [barcode part1]
  source 1..16: mol_type = other DNA
tcggtgcctaattccg

SEQ ID NO: 17246 - DNA, 16 bp, synthetic construct
  misc_feature 1..16: note = synthetic [barcode part1]
  source 1..16: mol_type = other DNA
gacaacctggtgactt

SEQ ID NO: 17247 - DNA, 16 bp, synthetic construct
  misc_feature 1..16: note = synthetic [barcode part1]
  source 1..16: mol_type = other DNA
taggtctgtctgtgag

SEQ ID NO: 17248 - DNA, 16 bp, synthetic construct
  misc_feature 1..16: note = synthetic [barcode part1]
  source 1..16: mol_type = other DNA
ttcttggtacggttgt

SEQ ID NO: 17249 - DNA, 16 bp, synthetic construct
  misc_feature 1..16: note = synthetic [barcode part1]
  source 1..16: mol_type = other DNA
gcaactgtaatcgcgt

SEQ ID NO: 17250 - DNA, 16 bp, synthetic construct
  misc_feature 1..16: note = synthetic [barcode part1]
  source 1..16: mol_type = other DNA
tgacggatctgaatag

SEQ ID NO: 17251 - DNA, 16 bp, synthetic construct
  misc_feature 1..16: note = synthetic [barcode part1]
  source 1..16: mol_type = other DNA
actcctatcgtgcctt

SEQ ID NO: 17252 - DNA, 16 bp, synthetic construct
  misc_feature 1..16: note = synthetic [barcode part1]
  source 1..16: mol_type = other DNA
gttcttgtcacgcctt

SEQ ID NO: 17253 - DNA, 16 bp, synthetic construct
  misc_feature 1..16: note = synthetic [barcode part1]
  source 1..16: mol_type = other DNA
ttggaacagacaagtc

SEQ ID NO: 17254 - DNA, 16 bp, synthetic construct
  misc_feature 1..16: note = synthetic [barcode part1]
  source 1..16: mol_type = other DNA
tgtcctaagatccgtt

SEQ ID NO: 17255 - DNA, 16 bp, synthetic construct
  misc_feature 1..16: note = synthetic [barcode part1]
  source 1..16: mol_type = other DNA
tacttaccacctgtcc

SEQ ID NO: 17256 - DNA, 16 bp, synthetic construct
  misc_feature 1..16: note = synthetic [barcode part1]
  source 1..16: mol_type = other DNA
ccgattccaccgatac

SEQ ID NO: 17257 - DNA, 16 bp, synthetic construct
  misc_feature 1..16: note = synthetic [barcode part1]
  source 1..16: mol_type = other DNA
tgcgattgaagatcag

SEQ ID NO: 17258 - DNA, 16 bp, synthetic construct
  misc_feature 1..16: note = synthetic [barcode part1]
  source 1..16: mol_type = other DNA
tcttacaccagtagtc

SEQ ID NO: 17259 - DNA, 16 bp, synthetic construct
  misc_feature 1..16: note = synthetic [barcode part1]
  source 1..16: mol_type = other DNA
ttgcgaatcgcgtaac

SEQ ID NO: 17260 - DNA, 16 bp, synthetic construct
  misc_feature 1..16: note = synthetic [barcode part1]
  source 1..16: mol_type = other DNA
atcttgtgtgaggcac

SEQ ID NO: 17261 - DNA, 16 bp, synthetic construct
  misc_feature 1..16: note = synthetic [barcode part1]
  source 1..16: mol_type = other DNA
tgttgttcgtcggcac

SEQ ID NO: 17262 - DNA, 16 bp, synthetic construct
  misc_feature 1..16: note = synthetic [barcode part1]
  source 1..16: mol_type = other DNA
agtctcctgacagaac

SEQ ID NO: 17263 - DNA, 16 bp, synthetic construct
  misc_feature 1..16: note = synthetic [barcode part1]
  source 1..16: mol_type = other DNA
tgaaccagtgtcctcc

SEQ ID NO: 17264 - DNA, 16 bp, synthetic construct
  misc_feature 1..16: note = synthetic [barcode part1]
  source 1..16: mol_type = other DNA
ttgtcgccttatcacc

SEQ ID NO: 17265 - DNA, 16 bp, synthetic construct
  misc_feature 1..16: note = synthetic [barcode part1]
  source 1..16: mol_type = other DNA
agttcctcgcaccagt

SEQ ID NO: 17266 - DNA, 16 bp, synthetic construct
  misc_feature 1..16: note = synthetic [barcode part1]
  source 1..16: mol_type = other DNA
cagtgtggatctgtgt

SEQ ID NO: 17267 - DNA, 16 bp, synthetic construct
  misc_feature 1..16: note = synthetic [barcode part1]
  source 1..16: mol_type = other DNA
cacgtcgtgtaatcag

SEQ ID NO: 17268 - DNA, 16 bp, synthetic construct
  misc_feature 1..16: note = synthetic [barcode part1]
  source 1..16: mol_type = other DNA
gtatctgtcactctag

SEQ ID NO: 17269 - DNA, 16 bp, synthetic construct
  misc_feature 1..16: note = synthetic [barcode part1]
  source 1..16: mol_type = other DNA
acctagagacggaacc

SEQ ID NO: 17270 - DNA, 16 bp, synthetic construct
  misc_feature 1..16: note = synthetic [barcode part1]
  source 1..16: mol_type = other DNA
gtgttgaggaatagtc

SEQ ID NO: 17271 - DNA, 16 bp, synthetic construct
  misc_feature 1..16: note = synthetic [barcode part1]
  source 1..16: mol_type = other DNA
cggaagtagattatcg

SEQ ID NO: 17272 - DNA, 16 bp, synthetic construct
  misc_feature 1..16: note = synthetic [barcode part1]
  source 1..16: mol_type = other DNA
tgactacacctaggtg

SEQ ID NO: 17273 - DNA, 16 bp, synthetic construct
  misc_feature 1..16: note = synthetic [barcode part1]
  source 1..16: mol_type = other DNA
agacctgcgaatctgt

SEQ ID NO: 17274 - DNA, 16 bp, synthetic construct
  misc_feature 1..16: note = synthetic [barcode part1]
  source 1..16: mol_type = other DNA
tgcgtcggaagtcaag

SEQ ID NO: 17275 - DNA, 16 bp, synthetic construct
  misc_feature 1..16: note = synthetic [barcode part1]
  source 1..16: mol_type = other DNA
cgtagtacactcgtcc

SEQ ID NO: 17276 - DNA, 16 bp, synthetic construct
  misc_feature 1..16: note = synthetic [barcode part1]
  source 1..16: mol_type = other DNA
gtagagagaaggcgtt

SEQ ID NO: 17277 - DNA, 16 bp, synthetic construct
  misc_feature 1..16: note = synthetic [barcode part1]
  source 1..16: mol_type = other DNA
caagtctggtgtctag

SEQ ID NO: 17278 - DNA, 16 bp, synthetic construct
  misc_feature 1..16: note = synthetic [barcode part1]
  source 1..16: mol_type = other DNA
gtgcagtaagattggt

SEQ ID NO: 17279 - DNA, 16 bp, synthetic construct
  misc_feature 1..16: note = synthetic [barcode part1]
  source 1..16: mol_type = other DNA
gcctattgacgagtgt

SEQ ID NO: 17280 - DNA, 16 bp, synthetic construct
  misc_feature 1..16: note = synthetic [barcode part1]
  source 1..16: mol_type = other DNA
aagtggaacttcgagt

SEQ ID NO: 17281 - DNA, 16 bp, synthetic construct
  misc_feature 1..16: note = synthetic [barcode part1]
  source 1..16: mol_type = other DNA
aagtagtccaggtgcg

SEQ ID NO: 17282 - DNA, 16 bp, synthetic construct
  misc_feature 1..16: note = synthetic [barcode part1]
  source 1..16: mol_type = other DNA
acggaaccagacgttg

SEQ ID NO: 17283 - DNA, 16 bp, synthetic construct
  misc_feature 1..16: note = synthetic [barcode part1]
  source 1..16: mol_type = other DNA
ttgttacacaggttcc

SEQ ID NO: 17284 - DNA, 16 bp, synthetic construct
  misc_feature 1..16: note = synthetic [barcode part1]
  source 1..16: mol_type = other DNA
gagtcgagttgcgtag

SEQ ID NO: 17285 - DNA, 16 bp, synthetic construct
  misc_feature 1..16: note = synthetic [barcode part1]
  source 1..16: mol_type = other DNA
ttggtagagtgtgaac

SEQ ID NO: 17286 - DNA, 16 bp, synthetic construct
  misc_feature 1..16: note = synthetic [barcode part1]
  source 1..16: mol_type = other DNA
atagaagtggcctaac

SEQ ID NO: 17287 - DNA, 16 bp, synthetic construct
  misc_feature 1..16: note = synthetic [barcode part1]
  source 1..16: mol_type = other DNA
tgagttggatcactgc

SEQ ID NO: 17288 - DNA, 16 bp, synthetic construct
  misc_feature 1..16: note = synthetic [barcode part1]
  source 1..16: mol_type = other DNA
gtatacgactgcaacc

SEQ ID NO: 17289 - DNA, 16 bp, synthetic construct
  misc_feature 1..16: note = synthetic [barcode part1]
  source 1..16: mol_type = other DNA
tgagtacagaagtcac

SEQ ID NO: 17290 - DNA, 16 bp, synthetic construct
  misc_feature 1..16: note = synthetic [barcode part1]
  source 1..16: mol_type = other DNA
gcacaccgacaacaag

SEQ ID NO: 17291 - DNA, 16 bp, synthetic construct
  misc_feature 1..16: note = synthetic [barcode part1]
  source 1..16: mol_type = other DNA
tccacgcaatctgatt

SEQ ID NO: 17292 - DNA, 16 bp, synthetic construct
  misc_feature 1..16: note = synthetic [barcode part1]
  source 1..16: mol_type = other DNA
tctacgccggtctaac

SEQ ID NO: 17293 - DNA, 16 bp, synthetic construct
  misc_feature 1..16: note = synthetic [barcode part1]
  source 1..16: mol_type = other DNA
attattggtgcgagag

SEQ ID NO: 17294 - DNA, 16 bp, synthetic construct
  misc_feature 1..16: note = synthetic [barcode part1]
  source 1..16: mol_type = other DNA
ccaatcttgttggtgt

SEQ ID NO: 17295 - DNA, 16 bp, synthetic construct
  misc_feature 1..16: note = synthetic [barcode part1]
  source 1..16: mol_type = other DNA
ttctgtatcggatcac

SEQ ID NO: 17296 - DNA, 16 bp, synthetic construct
  misc_feature 1..16: note = synthetic [barcode part1]
  source 1..16: mol_type = other DNA
taggcagacctattcg

SEQ ID NO: 17297 - DNA, 16 bp, synthetic construct
  misc_feature 1..16: note = synthetic [barcode part1]
  source 1..16: mol_type = other DNA
acagtcgaggattagt

SEQ ID NO: 17298 - DNA, 16 bp, synthetic construct
  misc_feature 1..16: note = synthetic [barcode part1]
  source 1..16: mol_type = other DNA
gaatccgcaccttatt

SEQ ID NO: 17299 - DNA, 16 bp, synthetic construct
  misc_feature 1..16: note = synthetic [barcode part1]
  source 1..16: mol_type = other DNA
gtagactgaggaccac

SEQ ID NO: 17300 - DNA, 16 bp, synthetic construct
  misc_feature 1..16: note = synthetic [barcode part1]
  source 1..16: mol_type = other DNA
gcgttcttacgtcttc

SEQ ID NO: 17301 - DNA, 16 bp, synthetic construct
  misc_feature 1..16: note = synthetic [barcode part1]
  source 1..16: mol_type = other DNA
aacgccggttgattac

SEQ ID NO: 17302 - DNA, 16 bp, synthetic construct
  misc_feature 1..16: note = synthetic [barcode part1]
  source 1..16: mol_type = other DNA
tactaggcagactgtc

SEQ ID NO: 17303 - DNA, 16 bp, synthetic construct
  misc_feature 1..16: note = synthetic [barcode part1]
  source 1..16: mol_type = other DNA
ttcggttgtcagtact

SEQ ID NO: 17304 - DNA, 16 bp, synthetic construct
  misc_feature 1..16: note = synthetic [barcode part1]
  source 1..16: mol_type = other DNA
tcacggagtctgaact

SEQ ID NO: 17305 - DNA, 16 bp, synthetic construct
  misc_feature 1..16: note = synthetic [barcode part1]
  source 1..16: mol_type = other DNA
taggatcaaccttggc

SEQ ID NO: 17306 - DNA, 16 bp, synthetic construct
  misc_feature 1..16: note = synthetic [barcode part1]
  source 1..16: mol_type = other DNA
acactacgtaacaccg

SEQ ID NO: 17307 - DNA, 16 bp, synthetic construct
  misc_feature 1..16: note = synthetic [barcode part1]
  source 1..16: mol_type = other DNA
tggactgcgatagtct

SEQ ID NO: 17308 - DNA, 16 bp, synthetic construct
  misc_feature 1..16: note = synthetic [barcode part1]
  source 1..16: mol_type = other DNA
cctacacttggatcgc

SEQ ID NO: 17309 - DNA, 16 bp, synthetic construct
  misc_feature 1..16: note = synthetic [barcode part1]
  source 1..16: mol_type = other DNA
ttacgagtcgtacgac

SEQ ID NO: 17310 - DNA, 16 bp, synthetic construct
  misc_feature 1..16: note = synthetic [barcode part1]
  source 1..16: mol_type = other DNA
acggatctcagtacgt

SEQ ID NO: 17311 - DNA, 16 bp, synthetic construct
  misc_feature 1..16: note = synthetic [barcode part1]
  source 1..16: mol_type = other DNA
agtcacagtgtcagtc

SEQ ID NO: 17312 - DNA, 16 bp, synthetic construct
  misc_feature 1..16: note = synthetic [barcode part1]
  source 1..16: mol_type = other DNA
ttgcgagacctagact

SEQ ID NO: 17313 - DNA, 16 bp, synthetic construct
  misc_feature 1..16: note = synthetic [barcode part1]
  source 1..16: mol_type = other DNA
ccgaataagactcacc

SEQ ID NO: 17314 - DNA, 16 bp, synthetic construct
  misc_feature 1..16: note = synthetic [barcode part1]
  source 1..16: mol_type = other DNA
caacgactgtatctct

SEQ ID NO: 17315 - DNA, 16 bp, synthetic construct
  misc_feature 1..16: note = synthetic [barcode part1]
  source 1..16: mol_type = other DNA
ttaccgactcttgtag

SEQ ID NO: 17316 - DNA, 16 bp, synthetic construct
  misc_feature 1..16: note = synthetic [barcode part1]
  source 1..16: mol_type = other DNA
acgagttgacctacac

SEQ ID NO: 17317 - DNA, 16 bp, synthetic construct
  misc_feature 1..16: note = synthetic [barcode part1]
  source 1..16: mol_type = other DNA
gagtcagatcgacgtg

SEQ ID NO: 17318 - DNA, 16 bp, synthetic construct
  misc_feature 1..16: note = synthetic [barcode part1]
  source 1..16: mol_type = other DNA
ttacggtgattccgag

SEQ ID NO: 17319 - DNA, 16 bp, synthetic construct
  misc_feature 1..16: note = synthetic [barcode part1]
  source 1..16: mol_type = other DNA
atccgttagtaggcgt

SEQ ID NO: 17320 - DNA, 16 bp, synthetic construct
  misc_feature 1..16: note = synthetic [barcode part1]
  source 1..16: mol_type = other DNA
aagtgtaggtcactag

SEQ ID NO: 17321 - DNA, 16 bp, synthetic construct
  misc_feature 1..16: note = synthetic [barcode part1]
  source 1..16: mol_type = other DNA
agtcttgagtatcgcg

SEQ ID NO: 17322 - DNA, 16 bp, synthetic construct
  misc_feature 1..16: note = synthetic [barcode part1]
  source 1..16: mol_type = other DNA
attcactggcaccgtc

SEQ ID NO: 17323 - DNA, 16 bp, synthetic construct
  misc_feature 1..16: note = synthetic [barcode part1]
  source 1..16: mol_type = other DNA
cggattgtacaagagt

SEQ ID NO: 17324 - DNA, 16 bp, synthetic construct
  misc_feature 1..16: note = synthetic [barcode part1]
  source 1..16: mol_type = other DNA
gcgaagatcttgtacc

SEQ ID NO: 17325 - DNA, 16 bp, synthetic construct
  misc_feature 1..16: note = synthetic [barcode part1]
  source 1..16: mol_type = other DNA
ttcttagtgcgcaatc

SEQ ID NO: 17326 - DNA, 16 bp, synthetic construct
  misc_feature 1..16: note = synthetic [barcode part1]
  source 1..16: mol_type = other DNA
actctaggtcaaccag

SEQ ID NO: 17327 - DNA, 16 bp, synthetic construct
  misc_feature 1..16: note = synthetic [barcode part1]
  source 1..16: mol_type = other DNA
acacgatccaattctc

SEQ ID NO: 17328 - DNA, 16 bp, synthetic construct
  misc_feature 1..16: note = synthetic [barcode part1]
  source 1..16: mol_type = other DNA
gaagtcttctgtctac

SEQ ID NO: 17329 - DNA, 16 bp, synthetic construct
  misc_feature 1..16: note = synthetic [barcode part1]
  source 1..16: mol_type = other DNA
attggcactactactc

SEQ ID NO: 17330 - DNA, 16 bp, synthetic construct
  misc_feature 1..16: note = synthetic [barcode part1]
  source 1..16: mol_type = other DNA
atccaccacttgtctc

SEQ ID NO: 17331 - DNA, 16 bp, synthetic construct
  misc_feature 1..16: note = synthetic [barcode part1]
  source 1..16: mol_type = other DNA
atcctgcgtgattgcc

SEQ ID NO: 17332 - DNA, 16 bp, synthetic construct
  misc_feature 1..16: note = synthetic [barcode part1]
  source 1..16: mol_type = other DNA
ccttcaggccgatatc

SEQ ID NO: 17333 - DNA, 16 bp, synthetic construct
  misc_feature 1..16: note = synthetic [barcode part1]
  source 1..16: mol_type = other DNA
cctggaactaaggtct

SEQ ID NO: 17334 - DNA, 16 bp, synthetic construct
  misc_feature 1..16: note = synthetic [barcode part1]
  source 1..16: mol_type = other DNA
gcgttggtatactgac

SEQ ID NO: 17335 - DNA, 16 bp, synthetic construct
  misc_feature 1..16: note = synthetic [barcode part1]
  source 1..16: mol_type = other DNA
tacggcagaattccgt

SEQ ID NO: 17336 - DNA, 16 bp, synthetic construct
  misc_feature 1..16: note = synthetic [barcode part1]
  source 1..16: mol_type = other DNA
tgttcgtggcaccgtt

SEQ ID NO: 17337 - DNA, 16 bp, synthetic construct
  misc_feature 1..16: note = synthetic [barcode part1]
  source 1..16: mol_type = other DNA
tccacctgttccagag

SEQ ID NO: 17338 - DNA, 16 bp, synthetic construct
  misc_feature 1..16: note = synthetic [barcode part1]
  source 1..16: mol_type = other DNA
tactgaggagtgtggc

SEQ ID NO: 17339 - DNA, 16 bp, synthetic construct
  misc_feature 1..16: note = synthetic [barcode part1]
  source 1..16: mol_type = other DNA
aatcgcaattgacgcc

SEQ ID NO: 17340 - DNA, 16 bp, synthetic construct
  misc_feature 1..16: note = synthetic [barcode part1]
  source 1..16: mol_type = other DNA
tcagacgcctaccact

SEQ ID NO: 17341 - DNA, 16 bp, synthetic construct
  misc_feature 1..16: note = synthetic [barcode part1]
  source 1..16: mol_type = other DNA
gccaatatccgtgaac

SEQ ID NO: 17342 - DNA, 16 bp, synthetic construct
  misc_feature 1..16: note = synthetic [barcode part1]
  source 1..16: mol_type = other DNA
cactgttgtgagacgt

SEQ ID NO: 17343 - DNA, 16 bp, synthetic construct
  misc_feature 1..16: note = synthetic [barcode part1]
  source 1..16: mol_type = other DNA
accttccaatcggaag

SEQ ID NO: 17344 - DNA, 16 bp, synthetic construct
  misc_feature 1..16: note = synthetic [barcode part1]
  source 1..16: mol_type = other DNA
tacctgtcactacagt

SEQ ID NO: 17345 - DNA, 16 bp, synthetic construct
  misc_feature 1..16: note = synthetic [barcode part1]
  source 1..16: mol_type = other DNA
agagataagatcgtcc

SEQ ID NO: 17346 - DNA, 16 bp, synthetic construct
  misc_feature 1..16: note = synthetic [barcode part1]
  source 1..16: mol_type = other DNA
tattgaatccacgtcc

SEQ ID NO: 17347 - DNA, 16 bp, synthetic construct
  misc_feature 1..16: note = synthetic [barcode part1]
  source 1..16: mol_type = other DNA
gaataagtccacctgc

SEQ ID NO: 17348 - DNA, 16 bp, synthetic construct
  misc_feature 1..16: note = synthetic [barcode part1]
  source 1..16: mol_type = other DNA
tcctagttcaacgtgt

SEQ ID NO: 17349 - DNA, 16 bp, synthetic construct
  misc_feature 1..16: note = synthetic [barcode part1]
  source 1..16: mol_type = other DNA
tccggttgtgtatcgc

SEQ ID NO: 17350 - DNA, 16 bp, synthetic construct
  misc_feature 1..16: note = synthetic [barcode part1]
  source 1..16: mol_type = other DNA
cgttgccttcagtctt

SEQ ID NO: 17351 - DNA, 16 bp, synthetic construct
  misc_feature 1..16: note = synthetic [barcode part1]
  source 1..16: mol_type = other DNA
aacacaatctggtgag

SEQ ID NO: 17352 - DNA, 16 bp, synthetic construct
  misc_feature 1..16: note = synthetic [barcode part1]
  source 1..16: mol_type = other DNA
caactacacaatcgcg

SEQ ID NO: 17353 - DNA, 16 bp, synthetic construct
  misc_feature 1..16: note = synthetic [barcode part1]
  source 1..16: mol_type = other DNA
cgttggacttacgcct

SEQ ID NO: 17354 - DNA, 16 bp, synthetic construct
  misc_feature 1..16: note = synthetic [barcode part1]
  source 1..16: mol_type = other DNA
agacgcagtatccttg

SEQ ID NO: 17355 - DNA, 16 bp, synthetic construct
  misc_feature 1..16: note = synthetic [barcode part1]
  source 1..16: mol_type = other DNA
gcacacaaccacaact

SEQ ID NO: 17356 - DNA, 16 bp, synthetic construct
  misc_feature 1..16: note = synthetic [barcode part1]
  source 1..16: mol_type = other DNA
tctagtcactgcgcgt

SEQ ID NO: 17357 - DNA, 16 bp, synthetic construct
  misc_feature 1..16: note = synthetic [barcode part1]
  source 1..16: mol_type = other DNA
gtcctacgcagttgtc

SEQ ID NO: 17358 - DNA, 16 bp, synthetic construct
  misc_feature 1..16: note = synthetic [barcode part1]
  source 1..16: mol_type = other DNA
aactgacgtgtgtgtc

SEQ ID NO: 17359 - DNA, 16 bp, synthetic construct
  misc_feature 1..16: note = synthetic [barcode part1]
  source 1..16: mol_type = other DNA
ttcttggaagaggcct

SEQ ID NO: 17360 - DNA, 16 bp, synthetic construct
  misc_feature 1..16: note = synthetic [barcode part1]
  source 1..16: mol_type = other DNA
ccagaattgaacgaac

SEQ ID NO: 17361 - DNA, 16 bp, synthetic construct
  misc_feature 1..16: note = synthetic [barcode part1]
  source 1..16: mol_type = other DNA
tctcagaacagtgtcg

SEQ ID NO: 17362 - DNA, 16 bp, synthetic construct
  misc_feature 1..16: note = synthetic [barcode part1]
  source 1..16: mol_type = other DNA
gaatcaccgaggacac

SEQ ID NO: 17363 - DNA, 16 bp, synthetic construct
  misc_feature 1..16: note = synthetic [barcode part1]
  source 1..16: mol_type = other DNA
tgcgttcgttcttacc

SEQ ID NO: 17364 - DNA, 16 bp, synthetic construct
  misc_feature 1..16: note = synthetic [barcode part1]
  source 1..16: mol_type = other DNA
tactgagtgaggatac

SEQ ID NO: 17365 - DNA, 16 bp, synthetic construct
  misc_feature 1..16: note = synthetic [barcode part1]
  source 1..16: mol_type = other DNA
gacaccggtattacac

SEQ ID NO: 17366 - DNA, 16 bp, synthetic construct
  misc_feature 1..16: note = synthetic [barcode part1]
  source 1..16: mol_type = other DNA
tgtacgacagattcgc

SEQ ID NO: 17367 - DNA, 16 bp, synthetic construct
  misc_feature 1..16: note = synthetic [barcode part1]
  source 1..16: mol_type = other DNA
tacactgcctcctgag

SEQ ID NO: 17368 - DNA, 16 bp, synthetic construct
  misc_feature 1..16: note = synthetic [barcode part1]
  source 1..16: mol_type = other DNA
acacggtcgtgtagtt

SEQ ID NO: 17369 - DNA, 16 bp, synthetic construct
  misc_feature 1..16: note = synthetic [barcode part1]
  source 1..16: mol_type = other DNA
ttgtcttcggcaagag

SEQ ID NO: 17370 - DNA, 16 bp, synthetic construct
  misc_feature 1..16: note = synthetic [barcode part1]
  source 1..16: mol_type = other DNA
gactctcgtgcctaac

SEQ ID NO: 17371 - DNA, 16 bp, synthetic construct
  misc_feature 1..16: note = synthetic [barcode part1]
  source 1..16: mol_type = other DNA
cctctctcggttgatt

SEQ ID NO: 17372 - DNA, 16 bp, synthetic construct
  misc_feature 1..16: note = synthetic [barcode part1]
  source 1..16: mol_type = other DNA
gtaggacactctatcg

SEQ ID NO: 17373 - DNA, 16 bp, synthetic construct
  misc_feature 1..16: note = synthetic [barcode part1]
  source 1..16: mol_type = other DNA
cgactgaagaacctct

SEQ ID NO: 17374 - DNA, 16 bp, synthetic construct
  misc_feature 1..16: note = synthetic [barcode part1]
  source 1..16: mol_type = other DNA
cgtactcacctctatc

SEQ ID NO: 17375 - DNA, 16 bp, synthetic construct
  misc_feature 1..16: note = synthetic [barcode part1]
  source 1..16: mol_type = other DNA
taggactcacacacac

SEQ ID NO: 17376 - DNA, 16 bp, synthetic construct
  misc_feature 1..16: note = synthetic [barcode part1]
  source 1..16: mol_type = other DNA
agtcctcagtctatac

SEQ ID NO: 17377 - DNA, 16 bp, synthetic construct
  misc_feature 1..16: note = synthetic [barcode part1]
  source 1..16: mol_type = other DNA
ttgagtgcgtctagac

SEQ ID NO: 17378 - DNA, 16 bp, synthetic construct
  misc_feature 1..16: note = synthetic [barcode part1]
  source 1..16: mol_type = other DNA
agtccagtagtggtct

SEQ ID NO: 17379 - DNA, 16 bp, synthetic construct
  misc_feature 1..16: note = synthetic [barcode part1]
  source 1..16: mol_type = other DNA
acacacacaaccagtc

SEQ ID NO: 17380 - DNA, 16 bp, synthetic construct
  misc_feature 1..16: note = synthetic [barcode part1]
  source 1..16: mol_type = other DNA
tgttaccacctgaact

SEQ ID NO: 17381 - DNA, 16 bp, synthetic construct
  misc_feature 1..16: note = synthetic [barcode part1]
  source 1..16: mol_type = other DNA
gtgcctctcgagttgt

SEQ ID NO: 17382 - DNA, 16 bp, synthetic construct
  misc_feature 1..16: note = synthetic [barcode part1]
  source 1..16: mol_type = other DNA
aatcttcaaggcgacc

SEQ ID NO: 17383 - DNA, 16 bp, synthetic construct
  misc_feature 1..16: note = synthetic [barcode part1]
  source 1..16: mol_type = other DNA
taacgcgagtcgtgtt

SEQ ID NO: 17384 - DNA, 16 bp, synthetic construct
  misc_feature 1..16: note = synthetic [barcode part1]
  source 1..16: mol_type = other DNA
aacctacctcagacag

SEQ ID NO: 17385 - DNA, 16 bp, synthetic construct
  misc_feature 1..16: note = synthetic [barcode part1]
  source 1..16: mol_type = other DNA
tgacgtacgtattggc

SEQ ID NO: 17386 - DNA, 16 bp, synthetic construct
  misc_feature 1..16: note = synthetic [barcode part1]
  source 1..16: mol_type = other DNA
cgttgtcacaactgcc

SEQ ID NO: 17387 - DNA, 16 bp, synthetic construct
  misc_feature 1..16: note = synthetic [barcode part1]
  source 1..16: mol_type = other DNA
gcctgagtctactacc

SEQ ID NO: 17388 - DNA, 16 bp, synthetic construct
  misc_feature 1..16: note = synthetic [barcode part1]
  source 1..16: mol_type = other DNA
cgagtatcaatctctc

SEQ ID NO: 17389 - DNA, 16 bp, synthetic construct
  misc_feature 1..16: note = synthetic [barcode part1]
  source 1..16: mol_type = other DNA
tatcgaggttcaacgc

SEQ ID NO: 17390 - DNA, 16 bp, synthetic construct
  misc_feature 1..16: note = synthetic [barcode part1]
  source 1..16: mol_type = other DNA
gtgagtgagtgaacag

SEQ ID NO: 17391 - DNA, 16 bp, synthetic construct
  misc_feature 1..16: note = synthetic [barcode part1]
  source 1..16: mol_type = other DNA
tcgttccgtgcctaag

SEQ ID NO: 17392 - DNA, 16 bp, synthetic construct
  misc_feature 1..16: note = synthetic [barcode part1]
  source 1..16: mol_type = other DNA
ttcacttggataggcg

SEQ ID NO: 17393 - DNA, 16 bp, synthetic construct
  misc_feature 1..16: note = synthetic [barcode part1]
  source 1..16: mol_type = other DNA
gtgtgcgaacttcaac

SEQ ID NO: 17394 - DNA, 16 bp, synthetic construct
  misc_feature 1..16: note = synthetic [barcode part1]
  source 1..16: mol_type = other DNA
ccaagacagaccttgt

SEQ ID NO: 17395 - DNA, 16 bp, synthetic construct
  misc_feature 1..16: note = synthetic [barcode part1]
  source 1..16: mol_type = other DNA
gtgactaccgaaggac

SEQ ID NO: 17396 - DNA, 16 bp, synthetic construct
  misc_feature 1..16: note = synthetic [barcode part1]
  source 1..16: mol_type = other DNA
gtcctcaatagaggtc

SEQ ID NO: 17397 - DNA, 16 bp, synthetic construct
  misc_feature 1..16: note = synthetic [barcode part1]
  source 1..16: mol_type = other DNA
taccaccgaacactcc

SEQ ID NO: 17398 - DNA, 16 bp, synthetic construct
  misc_feature 1..16: note = synthetic [barcode part1]
  source 1..16: mol_type = other DNA
tgttccgtccgaacac

SEQ ID NO: 17399 - DNA, 16 bp, synthetic construct
  misc_feature 1..16: note = synthetic [barcode part1]
  source 1..16: mol_type = other DNA
gcgtaacgaagttagt

SEQ ID NO: 17400 - DNA, 16 bp, synthetic construct
  misc_feature 1..16: note = synthetic [barcode part1]
  source 1..16: mol_type = other DNA
gagataagtccgtggc

SEQ ID NO: 17401 - DNA, 16 bp, synthetic construct
  misc_feature 1..16: note = synthetic [barcode part1]
  source 1..16: mol_type = other DNA
tgagacgacggaatag

SEQ ID NO: 17402 - DNA, 16 bp, synthetic construct
  misc_feature 1..16: note = synthetic [barcode part1]
  source 1..16: mol_type = other DNA
cctcctcttaagactc

SEQ ID NO: 17403 - DNA, 16 bp, synthetic construct
  misc_feature 1..16: note = synthetic [barcode part1]
  source 1..16: mol_type = other DNA
aacactctctgtggag

SEQ ID NO: 17404 - DNA, 16 bp, synthetic construct
  misc_feature 1..16: note = synthetic [barcode part1]
  source 1..16: mol_type = other DNA
agtcgtacaaccgtac

SEQ ID NO: 17405 - DNA, 16 bp, synthetic construct
  misc_feature 1..16: note = synthetic [barcode part1]
  source 1..16: mol_type = other DNA
ttggtgagaactgtcc

SEQ ID NO: 17406 - DNA, 16 bp, synthetic construct
  misc_feature 1..16: note = synthetic [barcode part1]
  source 1..16: mol_type = other DNA
gaaggtcaatcctctg

SEQ ID NO: 17407 - DNA, 16 bp, synthetic construct
  misc_feature 1..16: note = synthetic [barcode part1]
  source 1..16: mol_type = other DNA
tccttcttcgattggc

SEQ ID NO: 17408 - DNA, 16 bp, synthetic construct
  misc_feature 1..16: note = synthetic [barcode part1]
  source 1..16: mol_type = other DNA
ttggacttacgagaag

SEQ ID NO: 17409 - DNA, 16 bp, synthetic construct
  misc_feature 1..16: note = synthetic [barcode part1]
  source 1..16: mol_type = other DNA
gcgccttccagtaact

SEQ ID NO: 17410 - DNA, 16 bp, synthetic construct
  misc_feature 1..16: note = synthetic [barcode part1]
  source 1..16: mol_type = other DNA
aggttctcgattgacg

SEQ ID NO: 17411 - DNA, 16 bp, synthetic construct
  misc_feature 1..16: note = synthetic [barcode part1]
  source 1..16: mol_type = other DNA
tctacgcactattgac

SEQ ID NO: 17412 - DNA, 16 bp, synthetic construct
  misc_feature 1..16: note = synthetic [barcode part1]
  source 1..16: mol_type = other DNA
gcgtctgcctattacg

SEQ ID NO: 17413 - DNA, 16 bp, synthetic construct
  misc_feature 1..16: note = synthetic [barcode part1]
  source 1..16: mol_type = other DNA
tatccacaacgtcact

SEQ ID NO: 17414 - DNA, 16 bp, synthetic construct
  misc_feature 1..16: note = synthetic [barcode part1]
  source 1..16: mol_type = other DNA
agacagacgaagtctt

SEQ ID NO: 17415 - DNA, 16 bp, synthetic construct
  misc_feature 1..16: note = synthetic [barcode part1]
  source 1..16: mol_type = other DNA
tctggtccttcaactc

SEQ ID NO: 17416 - DNA, 16 bp, synthetic construct
  misc_feature 1..16: note = synthetic [barcode part1]
  source 1..16: mol_type = other DNA
gtagagaaccgtcggt

SEQ ID NO: 17417 - DNA, 16 bp, synthetic construct
  misc_feature 1..16: note = synthetic [barcode part1]
  source 1..16: mol_type = other DNA
ttaccgtcgtcgtctt

SEQ ID NO: 17418 - DNA, 16 bp, synthetic construct
  misc_feature 1..16: note = synthetic [barcode part1]
  source 1..16: mol_type = other DNA
gcactgacaacttctt

SEQ ID NO: 17419 - DNA, 16 bp, synthetic construct
  misc_feature 1..16: note = synthetic [barcode part1]
  source 1..16: mol_type = other DNA
actccacagactagac

SEQ ID NO: 17420 - DNA, 16 bp, synthetic construct
  misc_feature 1..16: note = synthetic [barcode part1]
  source 1..16: mol_type = other DNA
agtatcagtgccacgt

SEQ ID NO: 17421 - DNA, 16 bp, synthetic construct
  misc_feature 1..16: note = synthetic [barcode part1]
  source 1..16: mol_type = other DNA
ttgaacgatctcactc

SEQ ID NO: 17422 - DNA, 16 bp, synthetic construct
  misc_feature 1..16: note = synthetic [barcode part1]
  source 1..16: mol_type = other DNA
tgtgccggatcagaag

SEQ ID NO: 17423 - DNA, 16 bp, synthetic construct
  misc_feature 1..16: note = synthetic [barcode part1]
  source 1..16: mol_type = other DNA
aatccagaggaatacc

SEQ ID NO: 17424 - DNA, 16 bp, synthetic construct
  misc_feature 1..16: note = synthetic [barcode part1]
  source 1..16: mol_type = other DNA
tggtcgaagtctcagt

SEQ ID NO: 17425 - DNA, 16 bp, synthetic construct
  misc_feature 1..16: note = synthetic [barcode part1]
  source 1..16: mol_type = other DNA
tgttgacctagagaag

SEQ ID NO: 17426 - DNA, 16 bp, synthetic construct
  misc_feature 1..16: note = synthetic [barcode part1]
  source 1..16: mol_type = other DNA
tgatagacgttcagag

SEQ ID NO: 17427 - DNA, 16 bp, synthetic construct
  misc_feature 1..16: note = synthetic [barcode part1]
  source 1..16: mol_type = other DNA
ccaagtagacgttcac

SEQ ID NO: 17428 - DNA, 16 bp, synthetic construct
  misc_feature 1..16: note = synthetic [barcode part1]
  source 1..16: mol_type = other DNA
ttactctaatccgcag

SEQ ID NO: 17429 - DNA, 16 bp, synthetic construct
  misc_feature 1..16: note = synthetic [barcode part1]
  source 1..16: mol_type = other DNA
agttgatcgacgtcgt

SEQ ID NO: 17430 - DNA, 16 bp, synthetic construct
  misc_feature 1..16: note = synthetic [barcode part1]
  source 1..16: mol_type = other DNA
tcacagtagaactccg

SEQ ID NO: 17431 - DNA, 16 bp, synthetic construct
  misc_feature 1..16: note = synthetic [barcode part1]
  source 1..16: mol_type = other DNA
tctgatccgcgcaact

SEQ ID NO: 17432 - DNA, 16 bp, synthetic construct
  misc_feature 1..16: note = synthetic [barcode part1]
  source 1..16: mol_type = other DNA
aagtcggttgatcctg

SEQ ID NO: 17433 - DNA, 16 bp, synthetic construct
  misc_feature 1..16: note = synthetic [barcode part1]
  source 1..16: mol_type = other DNA
tggcgacctcttgtac

SEQ ID NO: 17434 - DNA, 16 bp, synthetic construct
  misc_feature 1..16: note = synthetic [barcode part1]
  source 1..16: mol_type = other DNA
tgtgtcactagttctg

SEQ ID NO: 17435 - DNA, 16 bp, synthetic construct
  misc_feature 1..16: note = synthetic [barcode part1]
  source 1..16: mol_type = other DNA
tcggtggtacctctac

SEQ ID NO: 17436 - DNA, 16 bp, synthetic construct
  misc_feature 1..16: note = synthetic [barcode part1]
  source 1..16: mol_type = other DNA
gataccaccaattggc

SEQ ID NO: 17437 - DNA, 16 bp, synthetic construct
  misc_feature 1..16: note = synthetic [barcode part1]
  source 1..16: mol_type = other DNA
aaggtaatagacgtcc

SEQ ID NO: 17438 - DNA, 16 bp, synthetic construct
  misc_feature 1..16: note = synthetic [barcode part1]
  source 1..16: mol_type = other DNA
tctccaacgtaactgt

SEQ ID NO: 17439 - DNA, 16 bp, synthetic construct
  misc_feature 1..16: note = synthetic [barcode part1]
  source 1..16: mol_type = other DNA
caagaccgagactctt

SEQ ID NO: 17440 - DNA, 16 bp, synthetic construct
  misc_feature 1..16: note = synthetic [barcode part1]
  source 1..16: mol_type = other DNA
acttctgcgccagact

SEQ ID NO: 17441 - DNA, 16 bp, synthetic construct
  misc_feature 1..16: note = synthetic [barcode part1]
  source 1..16: mol_type = other DNA
acacgtacgtaacgtc

SEQ ID NO: 17442 - DNA, 16 bp, synthetic construct
  misc_feature 1..16: note = synthetic [barcode part1]
  source 1..16: mol_type = other DNA
agacagacctgttcgt

SEQ ID NO: 17443 - DNA, 16 bp, synthetic construct
  misc_feature 1..16: note = synthetic [barcode part1]
  source 1..16: mol_type = other DNA
cctgcgtatacagagt

SEQ ID NO: 17444 - DNA, 16 bp, synthetic construct
  misc_feature 1..16: note = synthetic [barcode part1]
  source 1..16: mol_type = other DNA
cgagtatacgcctaac

SEQ ID NO: 17445 - DNA, 16 bp, synthetic construct
  misc_feature 1..16: note = synthetic [barcode part1]
  source 1..16: mol_type = other DNA
cacgagacggtaatcg

SEQ ID NO: 17446 - DNA, 16 bp, synthetic construct
  misc_feature 1..16: note = synthetic [barcode part1]
  source 1..16: mol_type = other DNA
cgccttaggtacctac

SEQ ID NO: 17447 - DNA, 16 bp, synthetic construct
  misc_feature 1..16: note = synthetic [barcode part1]
  source 1..16: mol_type = other DNA
ttactgtgacggaacc

SEQ ID NO: 17448 - DNA, 16 bp, synthetic construct
  misc_feature 1..16: note = synthetic [barcode part1]
  source 1..16: mol_type = other DNA
ttaggcgaggtctact

SEQ ID NO: 17449 - DNA, 16 bp, synthetic construct
  misc_feature 1..16: note = synthetic [barcode part1]
  source 1..16: mol_type = other DNA
cgtagtactacctatc

SEQ ID NO: 17450 - DNA, 16 bp, synthetic construct
  misc_feature 1..16: note = synthetic [barcode part1]
  source 1..16: mol_type = other DNA
acggttgtcgaggagt

SEQ ID NO: 17451 - DNA, 16 bp, synthetic construct
  misc_feature 1..16: note = synthetic [barcode part1]
  source 1..16: mol_type = other DNA
cctaaggcggttgatt

SEQ ID NO: 17452 - DNA, 16 bp, synthetic construct
  misc_feature 1..16: note = synthetic [barcode part1]
  source 1..16: mol_type = other DNA
cacaaggccttatacg

SEQ ID NO: 17453 - DNA, 16 bp, synthetic construct
  misc_feature 1..16: note = synthetic [barcode part1]
  source 1..16: mol_type = other DNA
ttgtatctgagtcacc

SEQ ID NO: 17454 - DNA, 16 bp, synthetic construct
  misc_feature 1..16: note = synthetic [barcode part1]
  source 1..16: mol_type = other DNA
aggacaagacggagtt

SEQ ID NO: 17455 - DNA, 16 bp, synthetic construct
  misc_feature 1..16: note = synthetic [barcode part1]
  source 1..16: mol_type = other DNA
cgtgatataccgtgac

SEQ ID NO: 17456 - DNA, 16 bp, synthetic construct
  misc_feature 1..16: note = synthetic [barcode part1]
  source 1..16: mol_type = other DNA
gtgaccagtcaacgtt

SEQ ID NO: 17457 - DNA, 16 bp, synthetic construct
  misc_feature 1..16: note = synthetic [barcode part1]
  source 1..16: mol_type = other DNA
ttaggtcgtatccttg

SEQ ID NO: 17458 - DNA, 16 bp, synthetic construct
  misc_feature 1..16: note = synthetic [barcode part1]
  source 1..16: mol_type = other DNA
tatcggtgagaagttg

SEQ ID NO: 17459 - DNA, 16 bp, synthetic construct
  misc_feature 1..16: note = synthetic [barcode part1]
  source 1..16: mol_type = other DNA
tgtagaacagttcgag

SEQ ID NO: 17460 - DNA, 16 bp, synthetic construct
  misc_feature 1..16: note = synthetic [barcode part1]
  source 1..16: mol_type = other DNA
ccgatctagacacctc

SEQ ID NO: 17461 - DNA, 16 bp, synthetic construct
  misc_feature 1..16: note = synthetic [barcode part1]
  source 1..16: mol_type = other DNA
cctctaattccgacct

SEQ ID NO: 17462 - DNA, 16 bp, synthetic construct
  misc_feature 1..16: note = synthetic [barcode part1]
  source 1..16: mol_type = other DNA
cgtgtccaatacgagt

SEQ ID NO: 17463 - DNA, 16 bp, synthetic construct
  misc_feature 1..16: note = synthetic [barcode part1]
  source 1..16: mol_type = other DNA
acactcctgacttggc

SEQ ID NO: 17464 - DNA, 16 bp, synthetic construct
  misc_feature 1..16: note = synthetic [barcode part1]
  source 1..16: mol_type = other DNA
gcagtcagaggaacct

SEQ ID NO: 17465 - DNA, 16 bp, synthetic construct
  misc_feature 1..16: note = synthetic [barcode part1]
  source 1..16: mol_type = other DNA
attggcgtactgacgt

SEQ ID NO: 17466 - DNA, 16 bp, synthetic construct
  misc_feature 1..16: note = synthetic [barcode part1]
  source 1..16: mol_type = other DNA
cgtatagactcaggtc

SEQ ID NO: 17467 - DNA, 16 bp, synthetic construct
  misc_feature 1..16: note = synthetic [barcode part1]
  source 1..16: mol_type = other DNA
attgcgaggtgaatac

SEQ ID NO: 17468 - DNA, 16 bp, synthetic construct
  misc_feature 1..16: note = synthetic [barcode part1]
  source 1..16: mol_type = other DNA
gtactaccgagtggag

SEQ ID NO: 17469 - DNA, 16 bp, synthetic construct
  misc_feature 1..16: note = synthetic [barcode part1]
  source 1..16: mol_type = other DNA
tggtcaaggaacttcc

SEQ ID NO: 17470 - DNA, 16 bp, synthetic construct
  misc_feature 1..16: note = synthetic [barcode part1]
  source 1..16: mol_type = other DNA
gccttacttacacaac

SEQ ID NO: 17471 - DNA, 16 bp, synthetic construct
  misc_feature 1..16: note = synthetic [barcode part1]
  source 1..16: mol_type = other DNA
tgatcacagattggag

SEQ ID NO: 17472 - DNA, 16 bp, synthetic construct
  misc_feature 1..16: note = synthetic [barcode part1]
  source 1..16: mol_type = other DNA
atacttcgaagacgcc

SEQ ID NO: 17473 - DNA, 16 bp, synthetic construct
  misc_feature 1..16: note = synthetic [barcode part1]
  source 1..16: mol_type = other DNA
gtgcacgtgattaacc

SEQ ID NO: 17474 - DNA, 16 bp, synthetic construct
  misc_feature 1..16: note = synthetic [barcode part1]
  source 1..16: mol_type = other DNA
gccaattaaccggttg

SEQ ID NO: 17475 - DNA, 16 bp, synthetic construct
  misc_feature 1..16: note = synthetic [barcode part1]
  source 1..16: mol_type = other DNA
aggtctgtattccgtt

SEQ ID NO: 17476 - DNA, 16 bp, synthetic construct
  misc_feature 1..16: note = synthetic [barcode part1]
  source 1..16: mol_type = other DNA
agataacgtcgaggag

SEQ ID NO: 17477 - DNA, 16 bp, synthetic construct
  misc_feature 1..16: note = synthetic [barcode part1]
  source 1..16: mol_type = other DNA
caggtatagttcgcac

SEQ ID NO: 17478 - DNA, 16 bp, synthetic construct
  misc_feature 1..16: note = synthetic [barcode part1]
  source 1..16: mol_type = other DNA
acggatcactgcctct

SEQ ID NO: 17479 - DNA, 16 bp, synthetic construct
  misc_feature 1..16: note = synthetic [barcode part1]
  source 1..16: mol_type = other DNA
tccagaagtgttgtgc

SEQ ID NO: 17480 - DNA, 16 bp, synthetic construct
  misc_feature 1..16: note = synthetic [barcode part1]
  source 1..16: mol_type = other DNA
cgaaggtagacgtaag

SEQ ID NO: 17481 - DNA, 16 bp, synthetic construct
  misc_feature 1..16: note = synthetic [barcode part1]
  source 1..16: mol_type = other DNA
gcagagagagagtatc

SEQ ID NO: 17482 - DNA, 16 bp, synthetic construct
  misc_feature 1..16: note = synthetic [barcode part1]
  source 1..16: mol_type = other DNA
aagataaccgtggact

SEQ ID NO: 17483 - DNA, 16 bp, synthetic construct
  misc_feature 1..16: note = synthetic [barcode part1]
  source 1..16: mol_type = other DNA
actgaactcgcactcc

SEQ ID NO: 17484 - DNA, 16 bp, synthetic construct
  misc_feature 1..16: note = synthetic [barcode part1]
  source 1..16: mol_type = other DNA
gccgtgttaataagag

SEQ ID NO: 17485 - DNA, 16 bp, synthetic construct
  misc_feature 1..16: note = synthetic [barcode part1]
  source 1..16: mol_type = other DNA
cgatactggtaagtag

SEQ ID NO: 17486 - DNA, 16 bp, synthetic construct
  misc_feature 1..16: note = synthetic [barcode part1]
  source 1..16: mol_type = other DNA
atctgtgcgatagaag

SEQ ID NO: 17487 - DNA, 16 bp, synthetic construct
  misc_feature 1..16: note = synthetic [barcode part1]
  source 1..16: mol_type = other DNA
agtgaggtgtgaattc

SEQ ID NO: 17488 - DNA, 16 bp, synthetic construct
  misc_feature 1..16: note = synthetic [barcode part1]
  source 1..16: mol_type = other DNA
tcctcctcgtgatact

SEQ ID NO: 17489 - DNA, 16 bp, synthetic construct
  misc_feature 1..16: note = synthetic [barcode part1]
  source 1..16: mol_type = other DNA
tgttgttccactgtcc

SEQ ID NO: 17490 - DNA, 16 bp, synthetic construct
  misc_feature 1..16: note = synthetic [barcode part1]
  source 1..16: mol_type = other DNA
ttgagaacacaggttg

SEQ ID NO: 17491 - DNA, 16 bp, synthetic construct
  misc_feature 1..16: note = synthetic [barcode part1]
  source 1..16: mol_type = other DNA
cctgatctcagtcttc

SEQ ID NO: 17492 - DNA, 16 bp, synthetic construct
  misc_feature 1..16: note = synthetic [barcode part1]
  source 1..16: mol_type = other DNA
ttgagtctcttacgtg

SEQ ID NO: 17493 - DNA, 16 bp, synthetic construct
  misc_feature 1..16: note = synthetic [barcode part1]
  source 1..16: mol_type = other DNA
ccacagaccgttgtct

SEQ ID NO: 17494 - DNA, 16 bp, synthetic construct
  misc_feature 1..16: note = synthetic [barcode part1]
  source 1..16: mol_type = other DNA
caccgtcacttggact

SEQ ID NO: 17495 - DNA, 16 bp, synthetic construct
  misc_feature 1..16: note = synthetic [barcode part1]
  source 1..16: mol_type = other DNA
acggtgtatcgactgt

SEQ ID NO: 17496 - DNA, 16 bp, synthetic construct
  misc_feature 1..16: note = synthetic [barcode part1]
  source 1..16: mol_type = other DNA
acacctcctagtggtc

SEQ ID NO: 17497 - DNA, 16 bp, synthetic construct
  misc_feature 1..16: note = synthetic [barcode part1]
  source 1..16: mol_type = other DNA
aacaagactagtacgc

SEQ ID NO: 17498 - DNA, 16 bp, synthetic construct
  misc_feature 1..16: note = synthetic [barcode part1]
  source 1..16: mol_type = other DNA
cactgtagaccgattg

SEQ ID NO: 17499 - DNA, 16 bp, synthetic construct
  misc_feature 1..16: note = synthetic [barcode part1]
  source 1..16: mol_type = other DNA
aggaccacacaggttg

SEQ ID NO: 17500 - DNA, 16 bp, synthetic construct
  misc_feature 1..16: note = synthetic [barcode part1]
  source 1..16: mol_type = other DNA
gtggcgtagttctaac

SEQ ID NO: 17501 - DNA, 16 bp, synthetic construct
  misc_feature 1..16: note = synthetic [barcode part1]
  source 1..16: mol_type = other DNA
aaggacacgtcggact

SEQ ID NO: 17502 - DNA, 16 bp, synthetic construct
  misc_feature 1..16: note = synthetic [barcode part1]
  source 1..16: mol_type = other DNA
tgcctatcagacaggt

SEQ ID NO: 17503 - DNA, 16 bp, synthetic construct
  misc_feature 1..16: note = synthetic [barcode part1]
  source 1..16: mol_type = other DNA
accgaacacttgacgt

SEQ ID NO: 17504 - DNA, 16 bp, synthetic construct
  misc_feature 1..16: note = synthetic [barcode part1]
  source 1..16: mol_type = other DNA
aacgtctgcagttgtg

SEQ ID NO: 17505 - DNA, 16 bp, synthetic construct
  misc_feature 1..16: note = synthetic [barcode part1]
  source 1..16: mol_type = other DNA
acctgatccgataacg

SEQ ID NO: 17506 - DNA, 16 bp, synthetic construct
  misc_feature 1..16: note = synthetic [barcode part1]
  source 1..16: mol_type = other DNA
tagtccttagtcgtgt

SEQ ID NO: 17507 - DNA, 16 bp, synthetic construct
  misc_feature 1..16: note = synthetic [barcode part1]
  source 1..16: mol_type = other DNA
tgttgtccgccagtgt

SEQ ID NO: 17508 - DNA, 16 bp, synthetic construct
  misc_feature 1..16: note = synthetic [barcode part1]
  source 1..16: mol_type = other DNA
tatactcaggcacgac

SEQ ID NO: 17509 - DNA, 16 bp, synthetic construct
  misc_feature 1..16: note = synthetic [barcode part1]
  source 1..16: mol_type = other DNA
cctgcactaacgacct

SEQ ID NO: 17510 - DNA, 16 bp, synthetic construct
  misc_feature 1..16: note = synthetic [barcode part1]
  source 1..16: mol_type = other DNA
gatctagttggcgatc

SEQ ID NO: 17511 - DNA, 16 bp, synthetic construct
  misc_feature 1..16: note = synthetic [barcode part1]
  source 1..16: mol_type = other DNA
atcgcagaccttgagt

SEQ ID NO: 17512 - DNA, 16 bp, synthetic construct
  misc_feature 1..16: note = synthetic [barcode part1]
  source 1..16: mol_type = other DNA
acgcaacgactcctct

SEQ ID NO: 17513 - DNA, 16 bp, synthetic construct
  misc_feature 1..16: note = synthetic [barcode part1]
  source 1..16: mol_type = other DNA
agtcctctcttgtcac

SEQ ID NO: 17514 - DNA, 16 bp, synthetic construct
  misc_feature 1..16: note = synthetic [barcode part1]
  source 1..16: mol_type = other DNA
tccacacaagatacgc

SEQ ID NO: 17515 - DNA, 16 bp, synthetic construct
  misc_feature 1..16: note = synthetic [barcode part1]
  source 1..16: mol_type = other DNA
cacggtgtacctatcc

SEQ ID NO: 17516 - DNA, 16 bp, synthetic construct
  misc_feature 1..16: note = synthetic [barcode part1]
  source 1..16: mol_type = other DNA
gcgatcaggtcaaggt

SEQ ID NO: 17517 - DNA, 16 bp, synthetic construct
  misc_feature 1..16: note = synthetic [barcode part1]
  source 1..16: mol_type = other DNA
acaattgcacggtcgt

SEQ ID NO: 17518 - DNA, 16 bp, synthetic construct
  misc_feature 1..16: note = synthetic [barcode part1]
  source 1..16: mol_type = other DNA
ttatcggccttacgcg

SEQ ID NO: 17519 - DNA, 16 bp, synthetic construct
  misc_feature 1..16: note = synthetic [barcode part1]
  source 1..16: mol_type = other DNA
ttcaataccacactcg

SEQ ID NO: 17520 - DNA, 16 bp, synthetic construct
  misc_feature 1..16: note = synthetic [barcode part1]
  source 1..16: mol_type = other DNA
gtccgtccaagatcct

SEQ ID NO: 17521 - DNA, 16 bp, synthetic construct
  misc_feature 1..16: note = synthetic [barcode part1]
  source 1..16: mol_type = other DNA
gtgaactaccgtctcc

SEQ ID NO: 17522 - DNA, 16 bp, synthetic construct
  misc_feature 1..16: note = synthetic [barcode part1]
  source 1..16: mol_type = other DNA
agaccacagactgtct

SEQ ID NO: 17523 - DNA, 16 bp, synthetic construct
  misc_feature 1..16: note = synthetic [barcode part1]
  source 1..16: mol_type = other DNA
caggattctaaggtcc

SEQ ID NO: 17524 - DNA, 16 bp, synthetic construct
  misc_feature 1..16: note = synthetic [barcode part1]
  source 1..16: mol_type = other DNA
taccgagacctagtgt

SEQ ID NO: 17525 - DNA, 16 bp, synthetic construct
  misc_feature 1..16: note = synthetic [barcode part1]
  source 1..16: mol_type = other DNA
gatatatctccgatcc

SEQ ID NO: 17526 - DNA, 16 bp, synthetic construct
  misc_feature 1..16: note = synthetic [barcode part1]
  source 1..16: mol_type = other DNA
gtcctaagaccagttg

SEQ ID NO: 17527 - DNA, 16 bp, synthetic construct
  misc_feature 1..16: note = synthetic [barcode part1]
  source 1..16: mol_type = other DNA
tccttccgcacgtatt

SEQ ID NO: 17528 - DNA, 16 bp, synthetic construct
  misc_feature 1..16: note = synthetic [barcode part1]
  source 1..16: mol_type = other DNA
aacctcaacctgtccg

SEQ ID NO: 17529 - DNA, 16 bp, synthetic construct
  misc_feature 1..16: note = synthetic [barcode part1]
  source 1..16: mol_type = other DNA
gcgccgagttacttct

SEQ ID NO: 17530 - DNA, 16 bp, synthetic construct
  misc_feature 1..16: note = synthetic [barcode part1]
  source 1..16: mol_type = other DNA
acagttgcagtacgtc

SEQ ID NO: 17531 - DNA, 16 bp, synthetic construct
  misc_feature 1..16: note = synthetic [barcode part1]
  source 1..16: mol_type = other DNA
actcgtcaataggcac

SEQ ID NO: 17532 - DNA, 16 bp, synthetic construct
  misc_feature 1..16: note = synthetic [barcode part1]
  source 1..16: mol_type = other DNA
gcgcaataatcttcct

SEQ ID NO: 17533 - DNA, 16 bp, synthetic construct
  misc_feature 1..16: note = synthetic [barcode part1]
  source 1..16: mol_type = other DNA
tggtggttcagactgt

SEQ ID NO: 17534 - DNA, 16 bp, synthetic construct
  misc_feature 1..16: note = synthetic [barcode part1]
  source 1..16: mol_type = other DNA
tctatcagaaggccac

SEQ ID NO: 17535 - DNA, 16 bp, synthetic construct
  misc_feature 1..16: note = synthetic [barcode part1]
  source 1..16: mol_type = other DNA
gaacgagttgcctatc

SEQ ID NO: 17536 - DNA, 16 bp, synthetic construct
  misc_feature 1..16: note = synthetic [barcode part1]
  source 1..16: mol_type = other DNA
tattcctgtgcaggag

SEQ ID NO: 17537 - DNA, 16 bp, synthetic construct
  misc_feature 1..16: note = synthetic [barcode part1]
  source 1..16: mol_type = other DNA
atccttgcggaagtgt

SEQ ID NO: 17538 - DNA, 16 bp, synthetic construct
  misc_feature 1..16: note = synthetic [barcode part1]
  source 1..16: mol_type = other DNA
tggcgtctgagtagag

SEQ ID NO: 17539 - DNA, 16 bp, synthetic construct
  misc_feature 1..16: note = synthetic [barcode part1]
  source 1..16: mol_type = other DNA
gcctgagtactgtctc

SEQ ID NO: 17540 - DNA, 16 bp, synthetic construct
  misc_feature 1..16: note = synthetic [barcode part1]
  source 1..16: mol_type = other DNA
aatcacgcacgtgatc

SEQ ID NO: 17541 - DNA, 16 bp, synthetic construct
  misc_feature 1..16: note = synthetic [barcode part1]
  source 1..16: mol_type = other DNA
cctgcgtatcagacct

SEQ ID NO: 17542 - DNA, 16 bp, synthetic construct
  misc_feature 1..16: note = synthetic [barcode part1]
  source 1..16: mol_type = other DNA
ttcctggaatctctcc

SEQ ID NO: 17543 - DNA, 16 bp, synthetic construct
  misc_feature 1..16: note = synthetic [barcode part1]
  source 1..16: mol_type = other DNA
agtgtgtggttagaac

SEQ ID NO: 17544 - DNA, 16 bp, synthetic construct
  misc_feature 1..16: note = synthetic [barcode part1]
  source 1..16: mol_type = other DNA
aggagtctgactatag

SEQ ID NO: 17545 - DNA, 16 bp, synthetic construct
  misc_feature 1..16: note = synthetic [barcode part1]
  source 1..16: mol_type = other DNA
cctgtcacctctaatc

SEQ ID NO: 17546 - DNA, 16 bp, synthetic construct
  misc_feature 1..16: note = synthetic [barcode part1]
  source 1..16: mol_type = other DNA
tacttctaacctggtg

SEQ ID NO: 17547 - DNA, 16 bp, synthetic construct
  misc_feature 1..16: note = synthetic [barcode part1]
  source 1..16: mol_type = other DNA
gcctgttacgatattc

SEQ ID NO: 17548 - DNA, 16 bp, synthetic construct
  misc_feature 1..16: note = synthetic [barcode part1]
  source 1..16: mol_type = other DNA
tctcacacgcgttctt

SEQ ID NO: 17549 - DNA, 16 bp, synthetic construct
  misc_feature 1..16: note = synthetic [barcode part1]
  source 1..16: mol_type = other DNA
cgaggtcgttaactac

SEQ ID NO: 17550 - DNA, 16 bp, synthetic construct
  misc_feature 1..16: note = synthetic [barcode part1]
  source 1..16: mol_type = other DNA
actaggtaacgtgaac

SEQ ID NO: 17551 - DNA, 16 bp, synthetic construct
  misc_feature 1..16: note = synthetic [barcode part1]
  source 1..16: mol_type = other DNA
cctatcgcacagactc

SEQ ID NO: 17552 - DNA, 16 bp, synthetic construct
  misc_feature 1..16: note = synthetic [barcode part1]
  source 1..16: mol_type = other DNA
acgccttaccgaactc

SEQ ID NO: 17553 - DNA, 16 bp, synthetic construct
  misc_feature 1..16: note = synthetic [barcode part1]
  source 1..16: mol_type = other DNA
gatcttgagtaccgtg

SEQ ID NO: 17554 - DNA, 16 bp, synthetic construct
  misc_feature 1..16: note = synthetic [barcode part1]
  source 1..16: mol_type = other DNA
tgtagtaaggcgaact

SEQ ID NO: 17555 - DNA, 16 bp, synthetic construct
  misc_feature 1..16: note = synthetic [barcode part1]
  source 1..16: mol_type = other DNA
ttgcagatcgccgttc

SEQ ID NO: 17556 - DNA, 16 bp, synthetic construct
  misc_feature 1..16: note = synthetic [barcode part1]
  source 1..16: mol_type = other DNA
tctggtagagtacaag

SEQ ID NO: 17557 - DNA, 16 bp, synthetic construct
  misc_feature 1..16: note = synthetic [barcode part1]
  source 1..16: mol_type = other DNA
acactggaggataact

SEQ ID NO: 17558 - DNA, 16 bp, synthetic construct
  misc_feature 1..16: note = synthetic [barcode part1]
  source 1..16: mol_type = other DNA
gacgcacttagtctcc

SEQ ID NO: 17559 - DNA, 16 bp, synthetic construct
  misc_feature 1..16: note = synthetic [barcode part1]
  source 1..16: mol_type = other DNA
gtgactggtaccaact

SEQ ID NO: 17560 - DNA, 16 bp, synthetic construct
  misc_feature 1..16: note = synthetic [barcode part1]
  source 1..16: mol_type = other DNA
agaagagttccttccg

SEQ ID NO: 17561 - DNA, 16 bp, synthetic construct
  misc_feature 1..16: note = synthetic [barcode part1]
  source 1..16: mol_type = other DNA
tcctacactaacggtt

SEQ ID NO: 17562 - DNA, 16 bp, synthetic construct
  misc_feature 1..16: note = synthetic [barcode part1]
  source 1..16: mol_type = other DNA
tgcacttgcggagatt

SEQ ID NO: 17563 - DNA, 16 bp, synthetic construct
  misc_feature 1..16: note = synthetic [barcode part1]
  source 1..16: mol_type = other DNA
tcctccagatagtgag

SEQ ID NO: 17564 - DNA, 16 bp, synthetic construct
  misc_feature 1..16: note = synthetic [barcode part1]
  source 1..16: mol_type = other DNA
tgttgaggagtgtaac

SEQ ID NO: 17565 - DNA, 16 bp, synthetic construct
  misc_feature 1..16: note = synthetic [barcode part1]
  source 1..16: mol_type = other DNA
atcttcgacggagact

SEQ ID NO: 17566 - DNA, 16 bp, synthetic construct
  misc_feature 1..16: note = synthetic [barcode part1]
  source 1..16: mol_type = other DNA
agttgtgtgtggttgc

SEQ ID NO: 17567 - DNA, 16 bp, synthetic construct
  misc_feature 1..16: note = synthetic [barcode part1]
  source 1..16: mol_type = other DNA
ccaacctgatatactc

SEQ ID NO: 17568 - DNA, 16 bp, synthetic construct
  misc_feature 1..16: note = synthetic [barcode part1]
  source 1..16: mol_type = other DNA
cacacctctcagtgac

SEQ ID NO: 17569 - DNA, 16 bp, synthetic construct
  misc_feature 1..16: note = synthetic [barcode part1]
  source 1..16: mol_type = other DNA
gacggagtgtggatct

SEQ ID NO: 17570 - DNA, 16 bp, synthetic construct
  misc_feature 1..16: note = synthetic [barcode part1]
  source 1..16: mol_type = other DNA
gtgtacaatcacggtc

SEQ ID NO: 17571 - DNA, 16 bp, synthetic construct
  misc_feature 1..16: note = synthetic [barcode part1]
  source 1..16: mol_type = other DNA
accgatactcaacttc

SEQ ID NO: 17572 - DNA, 16 bp, synthetic construct
  misc_feature 1..16: note = synthetic [barcode part1]
  source 1..16: mol_type = other DNA
tgtgccttatcttcgc

SEQ ID NO: 17573 - DNA, 16 bp, synthetic construct
  misc_feature 1..16: note = synthetic [barcode part1]
  source 1..16: mol_type = other DNA
cgaactgcgattcagt

SEQ ID NO: 17574 - DNA, 16 bp, synthetic construct
  misc_feature 1..16: note = synthetic [barcode part1]
  source 1..16: mol_type = other DNA
ttcggtacaaggatag

SEQ ID NO: 17575 - DNA, 16 bp, synthetic construct
  misc_feature 1..16: note = synthetic [barcode part1]
  source 1..16: mol_type = other DNA
gatatcagtgccgtgt

SEQ ID NO: 17576 - DNA, 16 bp, synthetic construct
  misc_feature 1..16: note = synthetic [barcode part1]
  source 1..16: mol_type = other DNA
gaacactacaataggc

SEQ ID NO: 17577 - DNA, 16 bp, synthetic construct
  misc_feature 1..16: note = synthetic [barcode part1]
  source 1..16: mol_type = other DNA
taaccaggtcgtgatc

SEQ ID NO: 17578 - DNA, 16 bp, synthetic construct
  misc_feature 1..16: note = synthetic [barcode part1]
  source 1..16: mol_type = other DNA
tgcagttaccgtcctg

SEQ ID NO: 17579 - DNA, 16 bp, synthetic construct
  misc_feature 1..16: note = synthetic [barcode part1]
  source 1..16: mol_type = other DNA
gtgttacttgtctgtg

SEQ ID NO: 17580 - DNA, 16 bp, synthetic construct
  misc_feature 1..16: note = synthetic [barcode part1]
  source 1..16: mol_type = other DNA
acgacttaggtcgttg

SEQ ID NO: 17581 - DNA, 16 bp, synthetic construct
  misc_feature 1..16: note = synthetic [barcode part1]
  source 1..16: mol_type = other DNA
tcctgacgtacgatcc

SEQ ID NO: 17582 - DNA, 16 bp, synthetic construct
  misc_feature 1..16: note = synthetic [barcode part1]
  source 1..16: mol_type = other DNA
aacgtatcacgcgact

SEQ ID NO: 17583 - DNA, 16 bp, synthetic construct
  misc_feature 1..16: note = synthetic [barcode part1]
  source 1..16: mol_type = other DNA
gcggtattcctgaagt

SEQ ID NO: 17584 - DNA, 16 bp, synthetic construct
  misc_feature 1..16: note = synthetic [barcode part1]
  source 1..16: mol_type = other DNA
atctgtccaggatctt

SEQ ID NO: 17585 - DNA, 16 bp, synthetic construct
  misc_feature 1..16: note = synthetic [barcode part1]
  source 1..16: mol_type = other DNA
caaccaagatcgatcc

SEQ ID NO: 17586 - DNA, 16 bp, synthetic construct
  misc_feature 1..16: note = synthetic [barcode part1]
  source 1..16: mol_type = other DNA
caagtaatagagtccg

SEQ ID NO: 17587 - DNA, 16 bp, synthetic construct
  misc_feature 1..16: note = synthetic [barcode part1]
  source 1..16: mol_type = other DNA
atagaacgcctcactg

SEQ ID NO: 17588 - DNA, 16 bp, synthetic construct
  misc_feature 1..16: note = synthetic [barcode part1]
  source 1..16: mol_type = other DNA
ttgcaccggatcgttc

SEQ ID NO: 17589 - DNA, 16 bp, synthetic construct
  misc_feature 1..16: note = synthetic [barcode part1]
  source 1..16: mol_type = other DNA
acttgcagtacctgag

SEQ ID NO: 17590 - DNA, 16 bp, synthetic construct
  misc_feature 1..16: note = synthetic [barcode part1]
  source 1..16: mol_type = other DNA
tggttggcaaccgatt

SEQ ID NO: 17591 - DNA, 16 bp, synthetic construct
  misc_feature 1..16: note = synthetic [barcode part1]
  source 1..16: mol_type = other DNA
ttgagaaggttgtacg

SEQ ID NO: 17592 - DNA, 16 bp, synthetic construct
  misc_feature 1..16: note = synthetic [barcode part1]
  source 1..16: mol_type = other DNA
tctcaaccgcggatct

SEQ ID NO: 17593 - DNA, 16 bp, synthetic construct
  misc_feature 1..16: note = synthetic [barcode part1]
  source 1..16: mol_type = other DNA
accagattaccgaacc

SEQ ID NO: 17594 - DNA, 16 bp, synthetic construct
  misc_feature 1..16: note = synthetic [barcode part1]
  source 1..16: mol_type = other DNA
gagacacaccaccaag

SEQ ID NO: 17595 - DNA, 16 bp, synthetic construct
  misc_feature 1..16: note = synthetic [barcode part1]
  source 1..16: mol_type = other DNA
ttacttcgtcggagag

SEQ ID NO: 17596 - DNA, 16 bp, synthetic construct
  misc_feature 1..16: note = synthetic [barcode part1]
  source 1..16: mol_type = other DNA
tacaccaacaccaacg

SEQ ID NO: 17597 - DNA, 16 bp, synthetic construct
  misc_feature 1..16: note = synthetic [barcode part1]
  source 1..16: mol_type = other DNA
gtattcttggtagtcc

SEQ ID NO: 17598 - DNA, 16 bp, synthetic construct
  misc_feature 1..16: note = synthetic [barcode part1]
  source 1..16: mol_type = other DNA
tcaagtgtgttacctc

SEQ ID NO: 17599 - DNA, 16 bp, synthetic construct
  misc_feature 1..16: note = synthetic [barcode part1]
  source 1..16: mol_type = other DNA
gacaggacttctagtc

SEQ ID NO: 17600 - DNA, 16 bp, synthetic construct
  misc_feature 1..16: note = synthetic [barcode part1]
  source 1..16: mol_type = other DNA
aatccactctactgtg

SEQ ID NO: 17601 - DNA, 16 bp, synthetic construct
  misc_feature 1..16: note = synthetic [barcode part1]
  source 1..16: mol_type = other DNA
taacacgtctcgccac

SEQ ID NO: 17602 - DNA, 16 bp, synthetic construct
  misc_feature 1..16: note = synthetic [barcode part1]
  source 1..16: mol_type = other DNA
aattcctcgactctcc

SEQ ID NO: 17603 - DNA, 16 bp, synthetic construct
  misc_feature 1..16: note = synthetic [barcode part1]
  source 1..16: mol_type = other DNA
agaatctccacggtgt

SEQ ID NO: 17604 - DNA, 16 bp, synthetic construct
  misc_feature 1..16: note = synthetic [barcode part1]
  source 1..16: mol_type = other DNA
tgtaacctgacttctg

SEQ ID NO: 17605 - DNA, 16 bp, synthetic construct
  misc_feature 1..16: note = synthetic [barcode part1]
  source 1..16: mol_type = other DNA
gaaggtaccacactct

SEQ ID NO: 17606 - DNA, 16 bp, synthetic construct
  misc_feature 1..16: note = synthetic [barcode part1]
  source 1..16: mol_type = other DNA
tgatacacgactctct

SEQ ID NO: 17607 - DNA, 16 bp, synthetic construct
  misc_feature 1..16: note = synthetic [barcode part1]
  source 1..16: mol_type = other DNA
agtggttgaggacacc

SEQ ID NO: 17608 - DNA, 16 bp, synthetic construct
  misc_feature 1..16: note = synthetic [barcode part1]
  source 1..16: mol_type = other DNA
atcactccacttaggt

SEQ ID NO: 17609 - DNA, 16 bp, synthetic construct
  misc_feature 1..16: note = synthetic [barcode part1]
  source 1..16: mol_type = other DNA
agagaacaggtactct

SEQ ID NO: 17610 - DNA, 16 bp, synthetic construct
  misc_feature 1..16: note = synthetic [barcode part1]
  source 1..16: mol_type = other DNA
gagtaatcggcagaag

SEQ ID NO: 17611 - DNA, 16 bp, synthetic construct
  misc_feature 1..16: note = synthetic [barcode part1]
  source 1..16: mol_type = other DNA
taattgaccagtcggc

SEQ ID NO: 17612 - DNA, 16 bp, synthetic construct
  misc_feature 1..16: note = synthetic [barcode part1]
  source 1..16: mol_type = other DNA
tacgtcagtcaacacg

SEQ ID NO: 17613 - DNA, 16 bp, synthetic construct
  misc_feature 1..16: note = synthetic [barcode part1]
  source 1..16: mol_type = other DNA
ttgaccagatcaaccg

SEQ ID NO: 17614 - DNA, 16 bp, synthetic construct
  misc_feature 1..16: note = synthetic [barcode part1]
  source 1..16: mol_type = other DNA
tgttccacctaggcgt

SEQ ID NO: 17615 - DNA, 16 bp, synthetic construct
  misc_feature 1..16: note = synthetic [barcode part1]
  source 1..16: mol_type = other DNA
cctccgaccttaactt

SEQ ID NO: 17616 - DNA, 16 bp, synthetic construct
  misc_feature 1..16: note = synthetic [barcode part1]
  source 1..16: mol_type = other DNA
tgcgcgaagtatatcc

SEQ ID NO: 17617 - DNA, 16 bp, synthetic construct
  misc_feature 1..16: note = synthetic [barcode part1]
  source 1..16: mol_type = other DNA
aactctgcggacgaag

SEQ ID NO: 17618 - DNA, 16 bp, synthetic construct
  misc_feature 1..16: note = synthetic [barcode part1]
  source 1..16: mol_type = other DNA
tgtactccgttagact

SEQ ID NO: 17619 - DNA, 16 bp, synthetic construct
  misc_feature 1..16: note = synthetic [barcode part1]
  source 1..16: mol_type = other DNA
gatctactaagacgag

SEQ ID NO: 17620 - DNA, 16 bp, synthetic construct
  misc_feature 1..16: note = synthetic [barcode part1]
  source 1..16: mol_type = other DNA
ttgcaaggcaactacc

SEQ ID NO: 17621 - DNA, 16 bp, synthetic construct
  misc_feature 1..16: note = synthetic [barcode part1]
  source 1..16: mol_type = other DNA
gatcgatactggtcac

SEQ ID NO: 17622 - DNA, 16 bp, synthetic construct
  misc_feature 1..16: note = synthetic [barcode part1]
  source 1..16: mol_type = other DNA
cagaacggtgactacg

SEQ ID NO: 17623 - DNA, 16 bp, synthetic construct
  misc_feature 1..16: note = synthetic [barcode part1]
  source 1..16: mol_type = other DNA
cggattacacacctcc

SEQ ID NO: 17624 - DNA, 16 bp, synthetic construct
  misc_feature 1..16: note = synthetic [barcode part1]
  source 1..16: mol_type = other DNA
gattgaccgtaacacc

SEQ ID NO: 17625 - DNA, 16 bp, synthetic construct
  misc_feature 1..16: note = synthetic [barcode part1]
  source 1..16: mol_type = other DNA
tcgaaggccagtgtag

SEQ ID NO: 17626 - DNA, 16 bp, synthetic construct
  misc_feature 1..16: note = synthetic [barcode part1]
  source 1..16: mol_type = other DNA
gcacacagacttcagt

SEQ ID NO: 17627 - DNA, 16 bp, synthetic construct
  misc_feature 1..16: note = synthetic [barcode part1]
  source 1..16: mol_type = other DNA
aatcacgcgtgatcac

SEQ ID NO: 17628 - DNA, 16 bp, synthetic construct
  misc_feature 1..16: note = synthetic [barcode part1]
  source 1..16: mol_type = other DNA
aggcgatcacagatcg

SEQ ID NO: 17629 - DNA, 16 bp, synthetic construct
  misc_feature 1..16: note = synthetic [barcode part1]
  source 1..16: mol_type = other DNA
gcacgatcacaatcgt

SEQ ID NO: 17630 - DNA, 16 bp, synthetic construct
  misc_feature 1..16: note = synthetic [barcode part1]
  source 1..16: mol_type = other DNA
agttcttgcgcaattc

SEQ ID NO: 17631 - DNA, 16 bp, synthetic construct
  misc_feature 1..16: note = synthetic [barcode part1]
  source 1..16: mol_type = other DNA
gaagacacttaacggt

SEQ ID NO: 17632 - DNA, 16 bp, synthetic construct
  misc_feature 1..16: note = synthetic [barcode part1]
  source 1..16: mol_type = other DNA
gcggaataacaaggtg

SEQ ID NO: 17633 - DNA, 16 bp, synthetic construct
  misc_feature 1..16: note = synthetic [barcode part1]
  source 1..16: mol_type = other DNA
aggattatacgaaccg

SEQ ID NO: 17634 - DNA, 16 bp, synthetic construct
  misc_feature 1..16: note = synthetic [barcode part1]
  source 1..16: mol_type = other DNA
aacgagactaacgtgt

SEQ ID NO: 17635 - DNA, 16 bp, synthetic construct
  misc_feature 1..16: note = synthetic [barcode part1]
  source 1..16: mol_type = other DNA
gtgtggaccgttgaag

SEQ ID NO: 17636 - DNA, 16 bp, synthetic construct
  misc_feature 1..16: note = synthetic [barcode part1]
  source 1..16: mol_type = other DNA
tctaggtaacggtaag

SEQ ID NO: 17637 - DNA, 16 bp, synthetic construct
  misc_feature 1..16: note = synthetic [barcode part1]
  source 1..16: mol_type = other DNA
gtccacgtaactctcg

SEQ ID NO: 17638 - DNA, 16 bp, synthetic construct
  misc_feature 1..16: note = synthetic [barcode part1]
  source 1..16: mol_type = other DNA
tggatcttccgtcacg

SEQ ID NO: 17639 - DNA, 16 bp, synthetic construct
  misc_feature 1..16: note = synthetic [barcode part1]
  source 1..16: mol_type = other DNA
aactcgacgtatcttc

SEQ ID NO: 17640 - DNA, 16 bp, synthetic construct
  misc_feature 1..16: note = synthetic [barcode part1]
  source 1..16: mol_type = other DNA
gcgacaacttgcgaag

SEQ ID NO: 17641 - DNA, 16 bp, synthetic construct
  misc_feature 1..16: note = synthetic [barcode part1]
  source 1..16: mol_type = other DNA
tagtcagactgcgatc

SEQ ID NO: 17642 - DNA, 16 bp, synthetic construct
  misc_feature 1..16: note = synthetic [barcode part1]
  source 1..16: mol_type = other DNA
agtctctgaccgcact

SEQ ID NO: 17643 - DNA, 16 bp, synthetic construct
  misc_feature 1..16: note = synthetic [barcode part1]
  source 1..16: mol_type = other DNA
gcgatagtctgcagag

SEQ ID NO: 17644 - DNA, 16 bp, synthetic construct
  misc_feature 1..16: note = synthetic [barcode part1]
  source 1..16: mol_type = other DNA
acttgaatcacctcgt

SEQ ID NO: 17645 - DNA, 16 bp, synthetic construct
  misc_feature 1..16: note = synthetic [barcode part1]
  source 1..16: mol_type = other DNA
atcacttgagttcgtc

SEQ ID NO: 17646 - DNA, 16 bp, synthetic construct
  misc_feature 1..16: note = synthetic [barcode part1]
  source 1..16: mol_type = other DNA
aaggtggtccagacac

SEQ ID NO: 17647 - DNA, 16 bp, synthetic construct
  misc_feature 1..16: note = synthetic [barcode part1]
  source 1..16: mol_type = other DNA
accgtccaataggact

SEQ ID NO: 17648 - DNA, 16 bp, synthetic construct
  misc_feature 1..16: note = synthetic [barcode part1]
  source 1..16: mol_type = other DNA
agtgtgtgtacgtcac

SEQ ID NO: 17649 - DNA, 16 bp, synthetic construct
  misc_feature 1..16: note = synthetic [barcode part1]
  source 1..16: mol_type = other DNA
taagaaggcgttagtc

SEQ ID NO: 17650 - DNA, 16 bp, synthetic construct
  misc_feature 1..16: note = synthetic [barcode part1]
  source 1..16: mol_type = other DNA
ccaagaggcactcaag

SEQ ID NO: 17651 - DNA, 16 bp, synthetic construct
  misc_feature 1..16: note = synthetic [barcode part1]
  source 1..16: mol_type = other DNA
taataacctggtggcc

SEQ ID NO: 17652 - DNA, 16 bp, synthetic construct
  misc_feature 1..16: note = synthetic [barcode part1]
  source 1..16: mol_type = other DNA
gaggtggtcgtagact

SEQ ID NO: 17653 - DNA, 16 bp, synthetic construct
  misc_feature 1..16: note = synthetic [barcode part1]
  source 1..16: mol_type = other DNA
tgcctcttggcgattg

SEQ ID NO: 17654 - DNA, 16 bp, synthetic construct
  misc_feature 1..16: note = synthetic [barcode part1]
  source 1..16: mol_type = other DNA
cacttcctagtggtcg

SEQ ID NO: 17655 - DNA, 16 bp, synthetic construct
  misc_feature 1..16: note = synthetic [barcode part1]
  source 1..16: mol_type = other DNA
ccacgtgtctcagttg

SEQ ID NO: 17656 - DNA, 16 bp, synthetic construct
  misc_feature 1..16: note = synthetic [barcode part1]
  source 1..16: mol_type = other DNA
acctgagtggaatagt

SEQ ID NO: 17657 - DNA, 16 bp, synthetic construct
  misc_feature 1..16: note = synthetic [barcode part1]
  source 1..16: mol_type = other DNA
gaactaccgttgaacc

SEQ ID NO: 17658 - DNA, 16 bp, synthetic construct
  misc_feature 1..16: note = synthetic [barcode part1]
  source 1..16: mol_type = other DNA
gaatcgttcgttggac

SEQ ID NO: 17659 - DNA, 16 bp, synthetic construct
  misc_feature 1..16: note = synthetic [barcode part1]
  source 1..16: mol_type = other DNA
tgccgcaagttagttg

SEQ ID NO: 17660 - DNA, 16 bp, synthetic construct
  misc_feature 1..16: note = synthetic [barcode part1]
  source 1..16: mol_type = other DNA
cgcacttcagactgtc

SEQ ID NO: 17661 - DNA, 16 bp, synthetic construct
  misc_feature 1..16: note = synthetic [barcode part1]
  source 1..16: mol_type = other DNA
tgttgccgacagtaac

SEQ ID NO: 17662 - DNA, 16 bp, synthetic construct
  misc_feature 1..16: note = synthetic [barcode part1]
  source 1..16: mol_type = other DNA
tagaaggacgcaccgt

SEQ ID NO: 17663 - DNA, 16 bp, synthetic construct
  misc_feature 1..16: note = synthetic [barcode part1]
  source 1..16: mol_type = other DNA
tcggttctccacgaac

SEQ ID NO: 17664 - DNA, 16 bp, synthetic construct
  misc_feature 1..16: note = synthetic [barcode part1]
  source 1..16: mol_type = other DNA
gtggcaatatcagtag

SEQ ID NO: 17665 - DNA, 16 bp, synthetic construct
  misc_feature 1..16: note = synthetic [barcode part1]
  source 1..16: mol_type = other DNA
gcgtatactgagatcc

SEQ ID NO: 17666 - DNA, 16 bp, synthetic construct
  misc_feature 1..16: note = synthetic [barcode part1]
  source 1..16: mol_type = other DNA
tgttgtgaaccgatcg

SEQ ID NO: 17667 - DNA, 16 bp, synthetic construct
  misc_feature 1..16: note = synthetic [barcode part1]
  source 1..16: mol_type = other DNA
tacgcaacgaacctac

SEQ ID NO: 17668 - DNA, 16 bp, synthetic construct
  misc_feature 1..16: note = synthetic [barcode part1]
  source 1..16: mol_type = other DNA
atccagttacgagaag

SEQ ID NO: 17669 - DNA, 16 bp, synthetic construct
  misc_feature 1..16: note = synthetic [barcode part1]
  source 1..16: mol_type = other DNA
cgcgtagtatcttgcc

SEQ ID NO: 17670 - DNA, 16 bp, synthetic construct
  misc_feature 1..16: note = synthetic [barcode part1]
  source 1..16: mol_type = other DNA
tgtaacgatctcaggc

SEQ ID NO: 17671 - DNA, 16 bp, synthetic construct
  misc_feature 1..16: note = synthetic [barcode part1]
  source 1..16: mol_type = other DNA
caaccttgcaccggtt

SEQ ID NO: 17672 - DNA, 16 bp, synthetic construct
  misc_feature 1..16: note = synthetic [barcode part1]
  source 1..16: mol_type = other DNA
ccgtatcgtaggaatc

SEQ ID NO: 17673 - DNA, 16 bp, synthetic construct
  misc_feature 1..16: note = synthetic [barcode part1]
  source 1..16: mol_type = other DNA
tgtggatataacaggc

SEQ ID NO: 17674 - DNA, 16 bp, synthetic construct
  misc_feature 1..16: note = synthetic [barcode part1]
  source 1..16: mol_type = other DNA
gatcttccgaccttct

SEQ ID NO: 17675 - DNA, 16 bp, synthetic construct
  misc_feature 1..16: note = synthetic [barcode part1]
  source 1..16: mol_type = other DNA
gcagaccggaatagtc

SEQ ID NO: 17676 - DNA, 16 bp, synthetic construct
  misc_feature 1..16: note = synthetic [barcode part1]
  source 1..16: mol_type = other DNA
gcagtgttgtggtact

SEQ ID NO: 17677 - DNA, 16 bp, synthetic construct
  misc_feature 1..16: note = synthetic [barcode part1]
  source 1..16: mol_type = other DNA
tagttctgtcagtgtc

SEQ ID NO: 17678 - DNA, 16 bp, synthetic construct
  misc_feature 1..16: note = synthetic [barcode part1]
  source 1..16: mol_type = other DNA
gccggttattaaccag

SEQ ID NO: 17679 - DNA, 16 bp, synthetic construct
  misc_feature 1..16: note = synthetic [barcode part1]
  source 1..16: mol_type = other DNA
ttgcacaaccaacacg

SEQ ID NO: 17680 - DNA, 16 bp, synthetic construct
  misc_feature 1..16: note = synthetic [barcode part1]
  source 1..16: mol_type = other DNA
tcagtgacgaactacc

SEQ ID NO: 17681 - DNA, 16 bp, synthetic construct
  misc_feature 1..16: note = synthetic [barcode part1]
  source 1..16: mol_type = other DNA
atccaaggagtctgtc

SEQ ID NO: 17682 - DNA, 16 bp, synthetic construct
  misc_feature 1..16: note = synthetic [barcode part1]
  source 1..16: mol_type = other DNA
agaaggcgcagttgtc

SEQ ID NO: 17683 - DNA, 16 bp, synthetic construct
  misc_feature 1..16: note = synthetic [barcode part1]
  source 1..16: mol_type = other DNA
gcaacactatacgcgt

SEQ ID NO: 17684 - DNA, 16 bp, synthetic construct
  misc_feature 1..16: note = synthetic [barcode part1]
  source 1..16: mol_type = other DNA
tatcgcagagagagag

SEQ ID NO: 17685 - DNA, 16 bp, synthetic construct
  misc_feature 1..16: note = synthetic [barcode part1]
  source 1..16: mol_type = other DNA
caatcagacgtcacac

SEQ ID NO: 17686 - DNA, 16 bp, synthetic construct
  misc_feature 1..16: note = synthetic [barcode part1]
  source 1..16: mol_type = other DNA
tcgtgagtaggttcgt

SEQ ID NO: 17687 - DNA, 16 bp, synthetic construct
  misc_feature 1..16: note = synthetic [barcode part1]
  source 1..16: mol_type = other DNA
cgaaccagtcagactt

SEQ ID NO: 17688 - DNA, 16 bp, synthetic construct
  misc_feature 1..16: note = synthetic [barcode part1]
  source 1..16: mol_type = other DNA
taggcagataggtgag

SEQ ID NO: 17689 - DNA, 16 bp, synthetic construct
  misc_feature 1..16: note = synthetic [barcode part1]
  source 1..16: mol_type = other DNA
tacgacaaggtggacc

SEQ ID NO: 17690 - DNA, 16 bp, synthetic construct
  misc_feature 1..16: note = synthetic [barcode part1]
  source 1..16: mol_type = other DNA
taacggtgagacgtgc

SEQ ID NO: 17691 - DNA, 16 bp, synthetic construct
  misc_feature 1..16: note = synthetic [barcode part1]
  source 1..16: mol_type = other DNA
attcaagtcgccttgt

SEQ ID NO: 17692 - DNA, 16 bp, synthetic construct
  misc_feature 1..16: note = synthetic [barcode part1]
  source 1..16: mol_type = other DNA
cagagtgagactgaag

SEQ ID NO: 17693 - DNA, 16 bp, synthetic construct
  misc_feature 1..16: note = synthetic [barcode part1]
  source 1..16: mol_type = other DNA
tggagaacgcgcaact

SEQ ID NO: 17694 - DNA, 16 bp, synthetic construct
  misc_feature 1..16: note = synthetic [barcode part1]
  source 1..16: mol_type = other DNA
aaccgtaatcgcacac

SEQ ID NO: 17695 - DNA, 16 bp, synthetic construct
  misc_feature 1..16: note = synthetic [barcode part1]
  source 1..16: mol_type = other DNA
cacacttagaccactt

SEQ ID NO: 17696 - DNA, 16 bp, synthetic construct
  misc_feature 1..16: note = synthetic [barcode part1]
  source 1..16: mol_type = other DNA
caagaccagttctggt

SEQ ID NO: 17697 - DNA, 16 bp, synthetic construct
  misc_feature 1..16: note = synthetic [barcode part1]
  source 1..16: mol_type = other DNA
tctcacaacacctcct

SEQ ID NO: 17698 - DNA, 16 bp, synthetic construct
  misc_feature 1..16: note = synthetic [barcode part1]
  source 1..16: mol_type = other DNA
actgtctatcctgcct

SEQ ID NO: 17699 - DNA, 16 bp, synthetic construct
  misc_feature 1..16: note = synthetic [barcode part1]
  source 1..16: mol_type = other DNA
tgaacacgccgaagac

SEQ ID NO: 17700 - DNA, 16 bp, synthetic construct
  misc_feature 1..16: note = synthetic [barcode part1]
  source 1..16: mol_type = other DNA
cctgtctatagtgttg

SEQ ID NO: 17701 - DNA, 16 bp, synthetic construct
  misc_feature 1..16: note = synthetic [barcode part1]
  source 1..16: mol_type = other DNA
tcgaccttgtcagtgc

SEQ ID NO: 17702 - DNA, 16 bp, synthetic construct
  misc_feature 1..16: note = synthetic [barcode part1]
  source 1..16: mol_type = other DNA
ttcctaggtgtgttgt

SEQ ID NO: 17703 - DNA, 16 bp, synthetic construct
  misc_feature 1..16: note = synthetic [barcode part1]
  source 1..16: mol_type = other DNA
aagtaggcaccacggt

SEQ ID NO: 17704 - DNA, 16 bp, synthetic construct
  misc_feature 1..16: note = synthetic [barcode part1]
  source 1..16: mol_type = other DNA
tagagaagttgtgtgc

SEQ ID NO: 17705 - DNA, 16 bp, synthetic construct
  misc_feature 1..16: note = synthetic [barcode part1]
  source 1..16: mol_type = other DNA
aggacgaacagactcc

SEQ ID NO: 17706 - DNA, 16 bp, synthetic construct
  misc_feature 1..16: note = synthetic [barcode part1]
  source 1..16: mol_type = other DNA
caaggactaccgagtg

SEQ ID NO: 17707 - DNA, 16 bp, synthetic construct
  misc_feature 1..16: note = synthetic [barcode part1]
  source 1..16: mol_type = other DNA
ccggatagttcgtagt

SEQ ID NO: 17708 - DNA, 16 bp, synthetic construct
  misc_feature 1..16: note = synthetic [barcode part1]
  source 1..16: mol_type = other DNA
gattcttctgagtacc

SEQ ID NO: 17709 - DNA, 16 bp, synthetic construct
  misc_feature 1..16: note = synthetic [barcode part1]
  source 1..16: mol_type = other DNA
tgcctcactgtcttac

SEQ ID NO: 17710 - DNA, 16 bp, synthetic construct
  misc_feature 1..16: note = synthetic [barcode part1]
  source 1..16: mol_type = other DNA
cagttgttggacctag

SEQ ID NO: 17711 - DNA, 16 bp, synthetic construct
  misc_feature 1..16: note = synthetic [barcode part1]
  source 1..16: mol_type = other DNA
gcagttacgtgcaatc

SEQ ID NO: 17712 - DNA, 16 bp, synthetic construct
  misc_feature 1..16: note = synthetic [barcode part1]
  source 1..16: mol_type = other DNA
actagaccgaagatac

SEQ ID NO: 17713 - DNA, 16 bp, synthetic construct
  misc_feature 1..16: note = synthetic [barcode part1]
  source 1..16: mol_type = other DNA
cggtcaatagtgtcgt

SEQ ID NO: 17714 - DNA, 16 bp, synthetic construct
  misc_feature 1..16: note = synthetic [barcode part1]
  source 1..16: mol_type = other DNA
acgaatccgtgtcaac

SEQ ID NO: 17715 - DNA, 16 bp, synthetic construct
  misc_feature 1..16: note = synthetic [barcode part1]
  source 1..16: mol_type = other DNA
atacagtcggcgtgtt

SEQ ID NO: 17716 - DNA, 16 bp, synthetic construct
  misc_feature 1..16: note = synthetic [barcode part1]
  source 1..16: mol_type = other DNA
tggtgcctgttcactg

SEQ ID NO: 17717 - DNA, 16 bp, synthetic construct
  misc_feature 1..16: note = synthetic [barcode part1]
  source 1..16: mol_type = other DNA
taagtgaggcgagtag

SEQ ID NO: 17718 - DNA, 16 bp, synthetic construct
  misc_feature 1..16: note = synthetic [barcode part1]
  source 1..16: mol_type = other DNA
acttgtctgtccgtct

SEQ ID NO: 17719 - DNA, 16 bp, synthetic construct
  misc_feature 1..16: note = synthetic [barcode part1]
  source 1..16: mol_type = other DNA
ttgaacgattcgtggc

SEQ ID NO: 17720 - DNA, 16 bp, synthetic construct
  misc_feature 1..16: note = synthetic [barcode part1]
  source 1..16: mol_type = other DNA
atcacgaggatagatc

SEQ ID NO: 17721 - DNA, 16 bp, synthetic construct
  misc_feature 1..16: note = synthetic [barcode part1]
  source 1..16: mol_type = other DNA
accagttggaacttcg

SEQ ID NO: 17722 - DNA, 16 bp, synthetic construct
  misc_feature 1..16: note = synthetic [barcode part1]
  source 1..16: mol_type = other DNA
ccagtatagttccttg

SEQ ID NO: 17723 - DNA, 16 bp, synthetic construct
  misc_feature 1..16: note = synthetic [barcode part1]
  source 1..16: mol_type = other DNA
gtgaatcggaagtcgc

SEQ ID NO: 17724 - DNA, 16 bp, synthetic construct
  misc_feature 1..16: note = synthetic [barcode part1]
  source 1..16: mol_type = other DNA
acttgcaggagtgacg

SEQ ID NO: 17725 - DNA, 16 bp, synthetic construct
  misc_feature 1..16: note = synthetic [barcode part1]
  source 1..16: mol_type = other DNA
attgcgtattgtcctg

SEQ ID NO: 17726 - DNA, 16 bp, synthetic construct
  misc_feature 1..16: note = synthetic [barcode part1]
  source 1..16: mol_type = other DNA
acggatcgtgtgactt

SEQ ID NO: 17727 - DNA, 16 bp, synthetic construct
  misc_feature 1..16: note = synthetic [barcode part1]
  source 1..16: mol_type = other DNA
cagtgtatagtccttc

SEQ ID NO: 17728 - DNA, 16 bp, synthetic construct
  misc_feature 1..16: note = synthetic [barcode part1]
  source 1..16: mol_type = other DNA
gcgagtcctgaatatc

SEQ ID NO: 17729 - DNA, 16 bp, synthetic construct
  misc_feature 1..16: note = synthetic [barcode part1]
  source 1..16: mol_type = other DNA
cgtacgaccgtcactt

SEQ ID NO: 17730 - DNA, 16 bp, synthetic construct
  misc_feature 1..16: note = synthetic [barcode part1]
  source 1..16: mol_type = other DNA
aaccgcacggtatact

SEQ ID NO: 17731 - DNA, 16 bp, synthetic construct
  misc_feature 1..16: note = synthetic [barcode part1]
  source 1..16: mol_type = other DNA
aatctcgagtgtcgtg

SEQ ID NO: 17732 - DNA, 16 bp, synthetic construct
  misc_feature 1..16: note = synthetic [barcode part1]
  source 1..16: mol_type = other DNA
atccagttcgacagtg

SEQ ID NO: 17733 - DNA, 16 bp, synthetic construct
  misc_feature 1..16: note = synthetic [barcode part1]
  source 1..16: mol_type = other DNA
ttctcctgtcgtagtc

SEQ ID NO: 17734 - DNA, 16 bp, synthetic construct
  misc_feature 1..16: note = synthetic [barcode part1]
  source 1..16: mol_type = other DNA
tcgtaactacaacgcg

SEQ ID NO: 17735 - DNA, 16 bp, synthetic construct
  misc_feature 1..16: note = synthetic [barcode part1]
  source 1..16: mol_type = other DNA
cagtggtgactgttgt

SEQ ID NO: 17736 - DNA, 16 bp, synthetic construct
  misc_feature 1..16: note = synthetic [barcode part1]
  source 1..16: mol_type = other DNA
tcttcaggaggaacct

SEQ ID NO: 17737 - DNA, 16 bp, synthetic construct
  misc_feature 1..16: note = synthetic [barcode part1]
  source 1..16: mol_type = other DNA
gatactacgaccgact

SEQ ID NO: 17738 - DNA, 16 bp, synthetic construct
  misc_feature 1..16: note = synthetic [barcode part1]
  source 1..16: mol_type = other DNA
tggaggtgcctagtag

SEQ ID NO: 17739 - DNA, 16 bp, synthetic construct
  misc_feature 1..16: note = synthetic [barcode part1]
  source 1..16: mol_type = other DNA
agattgcagtacgaac

SEQ ID NO: 17740 - DNA, 16 bp, synthetic construct
  misc_feature 1..16: note = synthetic [barcode part1]
  source 1..16: mol_type = other DNA
ttagtccaacgacggt

SEQ ID NO: 17741 - DNA, 16 bp, synthetic construct
  misc_feature 1..16: note = synthetic [barcode part1]
  source 1..16: mol_type = other DNA
cctaagtcggattcag

SEQ ID NO: 17742 - DNA, 16 bp, synthetic construct
  misc_feature 1..16: note = synthetic [barcode part1]
  source 1..16: mol_type = other DNA
ccaaggataaccttcg

SEQ ID NO: 17743 - DNA, 16 bp, synthetic construct
  misc_feature 1..16: note = synthetic [barcode part1]
  source 1..16: mol_type = other DNA
aggtaccaggcaacgt

SEQ ID NO: 17744 - DNA, 16 bp, synthetic construct
  misc_feature 1..16: note = synthetic [barcode part1]
  source 1..16: mol_type = other DNA
gaagacaacagtctgt

SEQ ID NO: 17745 - DNA, 16 bp, synthetic construct
  misc_feature 1..16: note = synthetic [barcode part1]
  source 1..16: mol_type = other DNA
cactgaggacagtctt

SEQ ID NO: 17746 - DNA, 16 bp, synthetic construct
  misc_feature 1..16: note = synthetic [barcode part1]
  source 1..16: mol_type = other DNA
gccttaactgaagtcg

SEQ ID NO: 17747 - DNA, 16 bp, synthetic construct
  misc_feature 1..16: note = synthetic [barcode part1]
  source 1..16: mol_type = other DNA
tgttcagaagacggcg

SEQ ID NO: 17748 - DNA, 16 bp, synthetic construct
  misc_feature 1..16: note = synthetic [barcode part1]
  source 1..16: mol_type = other DNA
acttatcctgcaacac

SEQ ID NO: 17749 - DNA, 16 bp, synthetic construct
  misc_feature 1..16: note = synthetic [barcode part1]
  source 1..16: mol_type = other DNA
cgagttgtgtggaggt

SEQ ID NO: 17750 - DNA, 16 bp, synthetic construct
  misc_feature 1..16: note = synthetic [barcode part1]
  source 1..16: mol_type = other DNA
cgccttaagtgaagtc

SEQ ID NO: 17751 - DNA, 16 bp, synthetic construct
  misc_feature 1..16: note = synthetic [barcode part1]
  source 1..16: mol_type = other DNA
gactgtactaatcctc

SEQ ID NO: 17752 - DNA, 16 bp, synthetic construct
  misc_feature 1..16: note = synthetic [barcode part1]
  source 1..16: mol_type = other DNA
tcaattcctcggttcc

SEQ ID NO: 17753 - DNA, 16 bp, synthetic construct
  misc_feature 1..16: note = synthetic [barcode part1]
  source 1..16: mol_type = other DNA
acttctagaactgtcc

SEQ ID NO: 17754 - DNA, 16 bp, synthetic construct
  misc_feature 1..16: note = synthetic [barcode part1]
  source 1..16: mol_type = other DNA
aaggtaactgtaggtc

SEQ ID NO: 17755 - DNA, 16 bp, synthetic construct
  misc_feature 1..16: note = synthetic [barcode part1]
  source 1..16: mol_type = other DNA
actcgtcagtgagtac

SEQ ID NO: 17756 - DNA, 16 bp, synthetic construct
  misc_feature 1..16: note = synthetic [barcode part1]
  source 1..16: mol_type = other DNA
cctctgttaccgaacg

SEQ ID NO: 17757 - DNA, 16 bp, synthetic construct
  misc_feature 1..16: note = synthetic [barcode part1]
  source 1..16: mol_type = other DNA
aacgtgccggtgtatt

SEQ ID NO: 17758 - DNA, 16 bp, synthetic construct
  misc_feature 1..16: note = synthetic [barcode part1]
  source 1..16: mol_type = other DNA
tacttcacaccacctc

SEQ ID NO: 17759 - DNA, 16 bp, synthetic construct
  misc_feature 1..16: note = synthetic [barcode part1]
  source 1..16: mol_type = other DNA
gaacgacaatcacgcg

SEQ ID NO: 17760 - DNA, 16 bp, synthetic construct
  misc_feature 1..16: note = synthetic [barcode part1]
  source 1..16: mol_type = other DNA
cgcgtgatatcagtac

SEQ ID NO: 17761 - DNA, 16 bp, synthetic construct
  misc_feature 1..16: note = synthetic [barcode part1]
  source 1..16: mol_type = other DNA
agatcctctggttgag

SEQ ID NO: 17762 - DNA, 16 bp, synthetic construct
  misc_feature 1..16: note = synthetic [barcode part1]
  source 1..16: mol_type = other DNA
caattcgtagaggtag

SEQ ID NO: 17763 - DNA, 16 bp, synthetic construct
  misc_feature 1..16: note = synthetic [barcode part1]
  source 1..16: mol_type = other DNA
ccacactgtctggtac

SEQ ID NO: 17764 - DNA, 16 bp, synthetic construct
  misc_feature 1..16: note = synthetic [barcode part1]
  source 1..16: mol_type = other DNA
aaggatagttctcgcc

SEQ ID NO: 17765 - DNA, 16 bp, synthetic construct
  misc_feature 1..16: note = synthetic [barcode part1]
  source 1..16: mol_type = other DNA
tgcctcgtcgcagatt

SEQ ID NO: 17766 - DNA, 16 bp, synthetic construct
  misc_feature 1..16: note = synthetic [barcode part1]
  source 1..16: mol_type = other DNA
gaagtcgaaggtagtg

SEQ ID NO: 17767 - DNA, 16 bp, synthetic construct
  misc_feature 1..16: note = synthetic [barcode part1]
  source 1..16: mol_type = other DNA
aatccgagtatctctc

SEQ ID NO: 17768 - DNA, 16 bp, synthetic construct
  misc_feature 1..16: note = synthetic [barcode part1]
  source 1..16: mol_type = other DNA
agaggtgacctagtgc

SEQ ID NO: 17769 - DNA, 16 bp, synthetic construct
  misc_feature 1..16: note = synthetic [barcode part1]
  source 1..16: mol_type = other DNA
acgtgtgttggttggt

SEQ ID NO: 17770 - DNA, 16 bp, synthetic construct
  misc_feature 1..16: note = synthetic [barcode part1]
  source 1..16: mol_type = other DNA
agagattccttgaccg

SEQ ID NO: 17771 - DNA, 16 bp, synthetic construct
  misc_feature 1..16: note = synthetic [barcode part1]
  source 1..16: mol_type = other DNA
gacttaaggccactgt

SEQ ID NO: 17772 - DNA, 16 bp, synthetic construct
  misc_feature 1..16: note = synthetic [barcode part1]
  source 1..16: mol_type = other DNA
caactctgaccagagt

SEQ ID NO: 17773 - DNA, 16 bp, synthetic construct
  misc_feature 1..16: note = synthetic [barcode part1]
  source 1..16: mol_type = other DNA
atatcgagtcaggagt

SEQ ID NO: 17774 - DNA, 16 bp, synthetic construct
  misc_feature 1..16: note = synthetic [barcode part1]
  source 1..16: mol_type = other DNA
aagtgaggcggtgtct

SEQ ID NO: 17775 - DNA, 16 bp, synthetic construct
  misc_feature 1..16: note = synthetic [barcode part1]
  source 1..16: mol_type = other DNA
atcgtgacagaacctc

SEQ ID NO: 17776 - DNA, 16 bp, synthetic construct
  misc_feature 1..16: note = synthetic [barcode part1]
  source 1..16: mol_type = other DNA
cagaaggcgtgatcac

SEQ ID NO: 17777 - DNA, 16 bp, synthetic construct
  misc_feature 1..16: note = synthetic [barcode part1]
  source 1..16: mol_type = other DNA
ttgactcgcgaagtgt

SEQ ID NO: 17778 - DNA, 16 bp, synthetic construct
  misc_feature 1..16: note = synthetic [barcode part1]
  source 1..16: mol_type = other DNA
caatctgaagtacgag

SEQ ID NO: 17779 - DNA, 16 bp, synthetic construct
  misc_feature 1..16: note = synthetic [barcode part1]
  source 1..16: mol_type = other DNA
gacttcttcagacgtt

SEQ ID NO: 17780 - DNA, 16 bp, synthetic construct
  misc_feature 1..16: note = synthetic [barcode part1]
  source 1..16: mol_type = other DNA
gaccaacgttgcagtt

SEQ ID NO: 17781 - DNA, 16 bp, synthetic construct
  misc_feature 1..16: note = synthetic [barcode part1]
  source 1..16: mol_type = other DNA
gtatcctgcaccttct

SEQ ID NO: 17782 - DNA, 16 bp, synthetic construct
  misc_feature 1..16: note = synthetic [barcode part1]
  source 1..16: mol_type = other DNA
atactgcggcggatag

SEQ ID NO: 17783 - DNA, 16 bp, synthetic construct
  misc_feature 1..16: note = synthetic [barcode part1]
  source 1..16: mol_type = other DNA
tgaacgcaggacggtt

SEQ ID NO: 17784 - DNA, 16 bp, synthetic construct
  misc_feature 1..16: note = synthetic [barcode part1]
  source 1..16: mol_type = other DNA
agaagacggatatcct

SEQ ID NO: 17785 - DNA, 16 bp, synthetic construct
  misc_feature 1..16: note = synthetic [barcode part1]
  source 1..16: mol_type = other DNA
agtattggacctcggt

SEQ ID NO: 17786 - DNA, 16 bp, synthetic construct
  misc_feature 1..16: note = synthetic [barcode part1]
  source 1..16: mol_type = other DNA
gtctaggatctgtggt

SEQ ID NO: 17787 - DNA, 16 bp, synthetic construct
  misc_feature 1..16: note = synthetic [barcode part1]
  source 1..16: mol_type = other DNA
cgtcactacaactgcc

SEQ ID NO: 17788 - DNA, 16 bp, synthetic construct
  misc_feature 1..16: note = synthetic [barcode part1]
  source 1..16: mol_type = other DNA
gactgcacctcaacct

SEQ ID NO: 17789 - DNA, 16 bp, synthetic construct
  misc_feature 1..16: note = synthetic [barcode part1]
  source 1..16: mol_type = other DNA
aagatcaccaggtgcg

SEQ ID NO: 17790 - DNA, 16 bp, synthetic construct
  misc_feature 1..16: note = synthetic [barcode part1]
  source 1..16: mol_type = other DNA
acctacttgagacctt

SEQ ID NO: 17791 - DNA, 16 bp, synthetic construct
  misc_feature 1..16: note = synthetic [barcode part1]
  source 1..16: mol_type = other DNA
actgtaggagttccac

SEQ ID NO: 17792 - DNA, 16 bp, synthetic construct
  misc_feature 1..16: note = synthetic [barcode part1]
  source 1..16: mol_type = other DNA
atcgacagaaccggac

SEQ ID NO: 17793 - DNA, 16 bp, synthetic construct
  misc_feature 1..16: note = synthetic [barcode part1]
  source 1..16: mol_type = other DNA
tcaactggtactgcag

SEQ ID NO: 17794 - DNA, 16 bp, synthetic construct
  misc_feature 1..16: note = synthetic [barcode part1]
  source 1..16: mol_type = other DNA
tgacgatctgaaccac

SEQ ID NO: 17795 - DNA, 16 bp, synthetic construct
  misc_feature 1..16: note = synthetic [barcode part1]
  source 1..16: mol_type = other DNA
tatcggtctctaactg

SEQ ID NO: 17796 - DNA, 16 bp, synthetic construct
  misc_feature 1..16: note = synthetic [barcode part1]
  source 1..16: mol_type = other DNA
tcacagttcgagatcg

SEQ ID NO: 17797 - DNA, 16 bp, synthetic construct
  misc_feature 1..16: note = synthetic [barcode part1]
  source 1..16: mol_type = other DNA
ttctacgcgatctagt

SEQ ID NO: 17798 - DNA, 16 bp, synthetic construct
  misc_feature 1..16: note = synthetic [barcode part1]
  source 1..16: mol_type = other DNA
cctgacctcaagaagt

SEQ ID NO: 17799 - DNA, 16 bp, synthetic construct
  misc_feature 1..16: note = synthetic [barcode part1]
  source 1..16: mol_type = other DNA
aaccagtgtactgtgc

SEQ ID NO: 17800 - DNA, 16 bp, synthetic construct
  misc_feature 1..16: note = synthetic [barcode part1]
  source 1..16: mol_type = other DNA
cgactagtacgacgtt

SEQ ID NO: 17801 - DNA, 16 bp, synthetic construct
  misc_feature 1..16: note = synthetic [barcode part1]
  source 1..16: mol_type = other DNA
gtacagtgatcagaac

SEQ ID NO: 17802 - DNA, 16 bp, synthetic construct
  misc_feature 1..16: note = synthetic [barcode part1]
  source 1..16: mol_type = other DNA
gagtaggttgtctacc

SEQ ID NO: 17803 - DNA, 16 bp, synthetic construct
  misc_feature 1..16: note = synthetic [barcode part1]
  source 1..16: mol_type = other DNA
gcaggatatctcactg

SEQ ID NO: 17804 - DNA, 16 bp, synthetic construct
  misc_feature 1..16: note = synthetic [barcode part1]
  source 1..16: mol_type = other DNA
cggcactctgtaatag

SEQ ID NO: 17805 - DNA, 16 bp, synthetic construct
  misc_feature 1..16: note = synthetic [barcode part1]
  source 1..16: mol_type = other DNA
aataatccggttcggc

SEQ ID NO: 17806 - DNA, 16 bp, synthetic construct
  misc_feature 1..16: note = synthetic [barcode part1]
  source 1..16: mol_type = other DNA
aggttcaagactagac

SEQ ID NO: 17807 - DNA, 16 bp, synthetic construct
  misc_feature 1..16: note = synthetic [barcode part1]
  source 1..16: mol_type = other DNA
tgcaagtatccacgac

SEQ ID NO: 17808 - DNA, 16 bp, synthetic construct
  misc_feature 1..16: note = synthetic [barcode part1]
  source 1..16: mol_type = other DNA
taggtactggtcctcc

SEQ ID NO: 17809 - DNA, 16 bp, synthetic construct
  misc_feature 1..16: note = synthetic [barcode part1]
  source 1..16: mol_type = other DNA
ccgtgttgtagaagtc

SEQ ID NO: 17810 - DNA, 16 bp, synthetic construct
  misc_feature 1..16: note = synthetic [barcode part1]
  source 1..16: mol_type = other DNA
gcgaaggtagtaactt

SEQ ID NO: 17811 - DNA, 16 bp, synthetic construct
  misc_feature 1..16: note = synthetic [barcode part1]
  source 1..16: mol_type = other DNA
tgtgcaatcgccactc

SEQ ID NO: 17812 - DNA, 16 bp, synthetic construct
  misc_feature 1..16: note = synthetic [barcode part1]
  source 1..16: mol_type = other DNA
gtactaccgttcaccg

SEQ ID NO: 17813 - DNA, 16 bp, synthetic construct
  misc_feature 1..16: note = synthetic [barcode part1]
  source 1..16: mol_type = other DNA
atcacttccactccac

SEQ ID NO: 17814 - DNA, 16 bp, synthetic construct
  misc_feature 1..16: note = synthetic [barcode part1]
  source 1..16: mol_type = other DNA
cactgcgtagtgttag

SEQ ID NO: 17815 - DNA, 16 bp, synthetic construct
  misc_feature 1..16: note = synthetic [barcode part1]
  source 1..16: mol_type = other DNA
gcagtataccgtaacc

SEQ ID NO: 17816 - DNA, 16 bp, synthetic construct
  misc_feature 1..16: note = synthetic [barcode part1]
  source 1..16: mol_type = other DNA
aagacggtaaggcaac

SEQ ID NO: 17817 - DNA, 16 bp, synthetic construct
  misc_feature 1..16: note = synthetic [barcode part1]
  source 1..16: mol_type = other DNA
tcgactagacctcaag

SEQ ID NO: 17818 - DNA, 16 bp, synthetic construct
  misc_feature 1..16: note = synthetic [barcode part1]
  source 1..16: mol_type = other DNA
aacgacttcaggttgc

SEQ ID NO: 17819 - DNA, 16 bp, synthetic construct
  misc_feature 1..16: note = synthetic [barcode part1]
  source 1..16: mol_type = other DNA
attggcgacttcttgt

SEQ ID NO: 17820 - DNA, 16 bp, synthetic construct
  misc_feature 1..16: note = synthetic [barcode part1]
  source 1..16: mol_type = other DNA
actgacgtctgattct

SEQ ID NO: 17821 - DNA, 16 bp, synthetic construct
  misc_feature 1..16: note = synthetic [barcode part1]
  source 1..16: mol_type = other DNA
acagatcacgtctgac

SEQ ID NO: 17822 - DNA, 16 bp, synthetic construct
  misc_feature 1..16: note = synthetic [barcode part1]
  source 1..16: mol_type = other DNA
acttgttggcgttgcc

SEQ ID NO: 17823 - DNA, 16 bp, synthetic construct
  misc_feature 1..16: note = synthetic [barcode part1]
  source 1..16: mol_type = other DNA
gtaggaggccgttaac

SEQ ID NO: 17824 - DNA, 16 bp, synthetic construct
  misc_feature 1..16: note = synthetic [barcode part1]
  source 1..16: mol_type = other DNA
aatagaggtattcggc

SEQ ID NO: 17825 - DNA, 16 bp, synthetic construct
  misc_feature 1..16: note = synthetic [barcode part1]
  source 1..16: mol_type = other DNA
gaactggtgtatagtg

SEQ ID NO: 17826 - DNA, 16 bp, synthetic construct
  misc_feature 1..16: note = synthetic [barcode part1]
  source 1..16: mol_type = other DNA
agttagaacaaccgtg

SEQ ID NO: 17827 - DNA, 16 bp, synthetic construct
  misc_feature 1..16: note = synthetic [barcode part1]
  source 1..16: mol_type = other DNA
tctgttagtgcgattc

SEQ ID NO: 17828 - DNA, 16 bp, synthetic construct
  misc_feature 1..16: note = synthetic [barcode part1]
  source 1..16: mol_type = other DNA
gcagttgaccaacgtt

SEQ ID NO: 17829 - DNA, 16 bp, synthetic construct
  misc_feature 1..16: note = synthetic [barcode part1]
  source 1..16: mol_type = other DNA
gtgtgataaggaatcc

SEQ ID NO: 17830 - DNA, 16 bp, synthetic construct
  misc_feature 1..16: note = synthetic [barcode part1]
  source 1..16: mol_type = other DNA
cgaattcaataaggcg

SEQ ID NO: 17831 - DNA, 16 bp, synthetic construct
  misc_feature 1..16: note = synthetic [barcode part1]
  source 1..16: mol_type = other DNA
cacgagtctgcgaatt

SEQ ID NO: 17832 - DNA, 16 bp, synthetic construct
  misc_feature 1..16: note = synthetic [barcode part1]
  source 1..16: mol_type = other DNA
ttcgtgtaaccgttgt

SEQ ID NO: 17833 - DNA, 16 bp, synthetic construct
  misc_feature 1..16: note = synthetic [barcode part1]
  source 1..16: mol_type = other DNA
atcttgcaagtgcctt

SEQ ID NO: 17834 - DNA, 16 bp, synthetic construct
  misc_feature 1..16: note = synthetic [barcode part1]
  source 1..16: mol_type = other DNA
tctgcctgtgatattg

SEQ ID NO: 17835 - DNA, 16 bp, synthetic construct
  misc_feature 1..16: note = synthetic [barcode part1]
  source 1..16: mol_type = other DNA
tagataggtaacgtcg

SEQ ID NO: 17836 - DNA, 16 bp, synthetic construct
  misc_feature 1..16: note = synthetic [barcode part1]
  source 1..16: mol_type = other DNA
atcagaacagtgcgcg

SEQ ID NO: 17837 - DNA, 16 bp, synthetic construct
  misc_feature 1..16: note = synthetic [barcode part1]
  source 1..16: mol_type = other DNA
cgagactggttgactt

SEQ ID NO: 17838 - DNA, 16 bp, synthetic construct
  misc_feature 1..16: note = synthetic [barcode part1]
  source 1..16: mol_type = other DNA
tacgtgagtagttgcc

SEQ ID NO: 17839 - DNA, 16 bp, synthetic construct
  misc_feature 1..16: note = synthetic [barcode part1]
  source 1..16: mol_type = other DNA
gcaactacgtgactac

SEQ ID NO: 17840 - DNA, 16 bp, synthetic construct
  misc_feature 1..16: note = synthetic [barcode part1]
  source 1..16: mol_type = other DNA
gaattcgttcgcagac

SEQ ID NO: 17841 - DNA, 16 bp, synthetic construct
  misc_feature 1..16: note = synthetic [barcode part1]
  source 1..16: mol_type = other DNA
ttgtcttcacagactg

SEQ ID NO: 17842 - DNA, 16 bp, synthetic construct
  misc_feature 1..16: note = synthetic [barcode part1]
  source 1..16: mol_type = other DNA
gatcaacggttggttc

SEQ ID NO: 17843 - DNA, 16 bp, synthetic construct
  misc_feature 1..16: note = synthetic [barcode part1]
  source 1..16: mol_type = other DNA
gtctctcgcgtgttag

SEQ ID NO: 17844 - DNA, 16 bp, synthetic construct
  misc_feature 1..16: note = synthetic [barcode part1]
  source 1..16: mol_type = other DNA
gaagtggagtaagacc

SEQ ID NO: 17845 - DNA, 16 bp, synthetic construct
  misc_feature 1..16: note = synthetic [barcode part1]
  source 1..16: mol_type = other DNA
atctactcgaacaggc

SEQ ID NO: 17846 - DNA, 16 bp, synthetic construct
  misc_feature 1..16: note = synthetic [barcode part1]
  source 1..16: mol_type = other DNA
acggacctccttgatc

SEQ ID NO: 17847 - DNA, 16 bp, synthetic construct
  misc_feature 1..16: note = synthetic [barcode part1]
  source 1..16: mol_type = other DNA
aagatcttcgcgacgt

SEQ ID NO: 17848 - DNA, 16 bp, synthetic construct
  misc_feature 1..16: note = synthetic [barcode part1]
  source 1..16: mol_type = other DNA
gaccgtattggcctct

SEQ ID NO: 17849 - DNA, 16 bp, synthetic construct
  misc_feature 1..16: note = synthetic [barcode part1]
  source 1..16: mol_type = other DNA
gtctctcagaggattg

SEQ ID NO: 17850 - DNA, 16 bp, synthetic construct
  misc_feature 1..16: note = synthetic [barcode part1]
  source 1..16: mol_type = other DNA
cgtgttattgaaggag

SEQ ID NO: 17851 - DNA, 16 bp, synthetic construct
  misc_feature 1..16: note = synthetic [barcode part1]
  source 1..16: mol_type = other DNA
aatatctcctgacctg

SEQ ID NO: 17852 - DNA, 16 bp, synthetic construct
  misc_feature 1..16: note = synthetic [barcode part1]
  source 1..16: mol_type = other DNA
gcaccacagtgaacag

SEQ ID NO: 17853 - DNA, 16 bp, synthetic construct
  misc_feature 1..16: note = synthetic [barcode part1]
  source 1..16: mol_type = other DNA
agtctcagataggtag

SEQ ID NO: 17854 - DNA, 16 bp, synthetic construct
  misc_feature 1..16: note = synthetic [barcode part1]
  source 1..16: mol_type = other DNA
attcggtcgactcaag

SEQ ID NO: 17855 - DNA, 16 bp, synthetic construct
  misc_feature 1..16: note = synthetic [barcode part1]
  source 1..16: mol_type = other DNA
tctgttgcaacctcct

SEQ ID NO: 17856 - DNA, 16 bp, synthetic construct
  misc_feature 1..16: note = synthetic [barcode part1]
  source 1..16: mol_type = other DNA
gagtgagtactgtggc

SEQ ID NO: 17857 - DNA, 16 bp, synthetic construct
  misc_feature 1..16: note = synthetic [barcode part1]
  source 1..16: mol_type = other DNA
ccgagtcttaacagtg

SEQ ID NO: 17858 - DNA, 16 bp, synthetic construct
  misc_feature 1..16: note = synthetic [barcode part1]
  source 1..16: mol_type = other DNA
cgtgtcgaaggtcaag

SEQ ID NO: 17859 - DNA, 16 bp, synthetic construct
  misc_feature 1..16: note = synthetic [barcode part1]
  source 1..16: mol_type = other DNA
tgcgtaacaggttcac

SEQ ID NO: 17860 - DNA, 16 bp, synthetic construct
  misc_feature 1..16: note = synthetic [barcode part1]
  source 1..16: mol_type = other DNA
ttacttctgcgccgag

SEQ ID NO: 17861 - DNA, 16 bp, synthetic construct
  misc_feature 1..16: note = synthetic [barcode part1]
  source 1..16: mol_type = other DNA
taagtcctactcggag

SEQ ID NO: 17862 - DNA, 16 bp, synthetic construct
  misc_feature 1..16: note = synthetic [barcode part1]
  source 1..16: mol_type = other DNA
gaccgcgttctagtct

SEQ ID NO: 17863 - DNA, 16 bp, synthetic construct
  misc_feature 1..16: note = synthetic [barcode part1]
  source 1..16: mol_type = other DNA
gcaacttcgaactacg

SEQ ID NO: 17864 - DNA, 16 bp, synthetic construct
  misc_feature 1..16: note = synthetic [barcode part1]
  source 1..16: mol_type = other DNA
aaggtatccttgcgtg

SEQ ID NO: 17865 - DNA, 16 bp, synthetic construct
  misc_feature 1..16: note = synthetic [barcode part1]
  source 1..16: mol_type = other DNA
aataccggtattgcgc

SEQ ID NO: 17866 - DNA, 16 bp, synthetic construct
  misc_feature 1..16: note = synthetic [barcode part1]
  source 1..16: mol_type = other DNA
tacctaccgcctatct

SEQ ID NO: 17867 - DNA, 16 bp, synthetic construct
  misc_feature 1..16: note = synthetic [barcode part1]
  source 1..16: mol_type = other DNA
cgcacagataagatac

SEQ ID NO: 17868 - DNA, 16 bp, synthetic construct
  misc_feature 1..16: note = synthetic [barcode part1]
  source 1..16: mol_type = other DNA
gaagaccaccgtgtag

SEQ ID NO: 17869 - DNA, 16 bp, synthetic construct
  misc_feature 1..16: note = synthetic [barcode part1]
  source 1..16: mol_type = other DNA
atccttaacagttcgc

SEQ ID NO: 17870 - DNA, 16 bp, synthetic construct
  misc_feature 1..16: note = synthetic [barcode part1]
  source 1..16: mol_type = other DNA
caatacagtcgtctct

SEQ ID NO: 17871 - DNA, 16 bp, synthetic construct
  misc_feature 1..16: note = synthetic [barcode part1]
  source 1..16: mol_type = other DNA
agtaattcctctgtgc

SEQ ID NO: 17872 - DNA, 16 bp, synthetic construct
  misc_feature 1..16: note = synthetic [barcode part1]
  source 1..16: mol_type = other DNA
ccttctgcactggtag

SEQ ID NO: 17873 - DNA, 16 bp, synthetic construct
  misc_feature 1..16: note = synthetic [barcode part1]
  source 1..16: mol_type = other DNA
attctctaccggtgcg

SEQ ID NO: 17874 - DNA, 16 bp, synthetic construct
  misc_feature 1..16: note = synthetic [barcode part1]
  source 1..16: mol_type = other DNA
cctcgttgtcttgttg

SEQ ID NO: 17875 - DNA, 16 bp, synthetic construct
  misc_feature 1..16: note = synthetic [barcode part1]
  source 1..16: mol_type = other DNA
tggacgacctgaagtg

SEQ ID NO: 17876 - DNA, 16 bp, synthetic construct
  misc_feature 1..16: note = synthetic [barcode part1]
  source 1..16: mol_type = other DNA
gatatccttgccgtcg

SEQ ID NO: 17877 - DNA, 16 bp, synthetic construct
  misc_feature 1..16: note = synthetic [barcode part1]
  source 1..16: mol_type = other DNA
caggcgttagtctctc

SEQ ID NO: 17878 - DNA, 16 bp, synthetic construct
  misc_feature 1..16: note = synthetic [barcode part1]
  source 1..16: mol_type = other DNA
gcgtggtagaaccaac

SEQ ID NO: 17879 - DNA, 16 bp, synthetic construct
  misc_feature 1..16: note = synthetic [barcode part1]
  source 1..16: mol_type = other DNA
cgtaactactatcctg

SEQ ID NO: 17880 - DNA, 16 bp, synthetic construct
  misc_feature 1..16: note = synthetic [barcode part1]
  source 1..16: mol_type = other DNA
tacgtacacacgtgtg

SEQ ID NO: 17881 - DNA, 16 bp, synthetic construct
  misc_feature 1..16: note = synthetic [barcode part1]
  source 1..16: mol_type = other DNA
ttcgtcggtgcgattc

SEQ ID NO: 17882 - DNA, 16 bp, synthetic construct
  misc_feature 1..16: note = synthetic [barcode part1]
  source 1..16: mol_type = other DNA
cactcgtactcacttc

SEQ ID NO: 17883 - DNA, 16 bp, synthetic construct
  misc_feature 1..16: note = synthetic [barcode part1]
  source 1..16: mol_type = other DNA
tggtaggattcacaag

SEQ ID NO: 17884 - DNA, 16 bp, synthetic construct
  misc_feature 1..16: note = synthetic [barcode part1]
  source 1..16: mol_type = other DNA
agattcagagtcaggt

SEQ ID NO: 17885 - DNA, 16 bp, synthetic construct
  misc_feature 1..16: note = synthetic [barcode part1]
  source 1..16: mol_type = other DNA
aagtggccttcgttag

SEQ ID NO: 17886 - DNA, 16 bp, synthetic construct
  misc_feature 1..16: note = synthetic [barcode part1]
  source 1..16: mol_type = other DNA
tggttctacgtatcgt

SEQ ID NO: 17887 - DNA, 16 bp, synthetic construct
  misc_feature 1..16: note = synthetic [barcode part1]
  source 1..16: mol_type = other DNA
gtgagtgcaagtgaag

SEQ ID NO: 17888 - DNA, 16 bp, synthetic construct
  misc_feature 1..16: note = synthetic [barcode part1]
  source 1..16: mol_type = other DNA
attgtgccaatctctg

SEQ ID NO: 17889 - DNA, 16 bp, synthetic construct
  misc_feature 1..16: note = synthetic [barcode part1]
  source 1..16: mol_type = other DNA
aagtgcggtattcctg

SEQ ID NO: 17890 - DNA, 16 bp, synthetic construct
  misc_feature 1..16: note = synthetic [barcode part1]
  source 1..16: mol_type = other DNA
ttataagaccttccgc

SEQ ID NO: 17891 - DNA, 16 bp, synthetic construct
  misc_feature 1..16: note = synthetic [barcode part1]
  source 1..16: mol_type = other DNA
gacgccttgttaacag

SEQ ID NO: 17892 - DNA, 16 bp, synthetic construct
  misc_feature 1..16: note = synthetic [barcode part1]
  source 1..16: mol_type = other DNA
agagtcggtataatcg

SEQ ID NO: 17893 - DNA, 16 bp, synthetic construct
  misc_feature 1..16: note = synthetic [barcode part1]
  source 1..16: mol_type = other DNA
tgaccagtcctctctt

SEQ ID NO: 17894 - DNA, 16 bp, synthetic construct
  misc_feature 1..16: note = synthetic [barcode part1]
  source 1..16: mol_type = other DNA
tacactggtcagtgtg

SEQ ID NO: 17895 - DNA, 16 bp, synthetic construct
  misc_feature 1..16: note = synthetic [barcode part1]
  source 1..16: mol_type = other DNA
tccactcaagtagacg

SEQ ID NO: 17896 - DNA, 16 bp, synthetic construct
  misc_feature 1..16: note = synthetic [barcode part1]
  source 1..16: mol_type = other DNA
gcaaggacgactcaac

SEQ ID NO: 17897 - DNA, 16 bp, synthetic construct
  misc_feature 1..16: note = synthetic [barcode part1]
  source 1..16: mol_type = other DNA
ataggtaggcgagtag

SEQ ID NO: 17898 - DNA, 16 bp, synthetic construct
  misc_feature 1..16: note = synthetic [barcode part1]
  source 1..16: mol_type = other DNA
gtctcgttaagttcac

SEQ ID NO: 17899 - DNA, 16 bp, synthetic construct
  misc_feature 1..16: note = synthetic [barcode part1]
  source 1..16: mol_type = other DNA
ttatcactgtcgcctc

SEQ ID NO: 17900 - DNA, 16 bp, synthetic construct
  misc_feature 1..16: note = synthetic [barcode part1]
  source 1..16: mol_type = other DNA
cgtggtctcctactag

SEQ ID NO: 17901 - DNA, 16 bp, synthetic construct
  misc_feature 1..16: note = synthetic [barcode part1]
  source 1..16: mol_type = other DNA
gtggttgagtcctcct

SEQ ID NO: 17902 - DNA, 16 bp, synthetic construct
  misc_feature 1..16: note = synthetic [barcode part1]
  source 1..16: mol_type = other DNA
tcttgcaatcggactt

SEQ ID NO: 17903 - DNA, 16 bp, synthetic construct
  misc_feature 1..16: note = synthetic [barcode part1]
  source 1..16: mol_type = other DNA
tgtggacgtggcaagt

SEQ ID NO: 17904 - DNA, 16 bp, synthetic construct
  misc_feature 1..16: note = synthetic [barcode part1]
  source 1..16: mol_type = other DNA
aaccggtcttcgaagt

SEQ ID NO: 17905 - DNA, 16 bp, synthetic construct
  misc_feature 1..16: note = synthetic [barcode part1]
  source 1..16: mol_type = other DNA
taacggtccttatacc

SEQ ID NO: 17906 - DNA, 16 bp, synthetic construct
  misc_feature 1..16: note = synthetic [barcode part1]
  source 1..16: mol_type = other DNA
aactgtacacgcgact

SEQ ID NO: 17907 - DNA, 16 bp, synthetic construct
  misc_feature 1..16: note = synthetic [barcode part1]
  source 1..16: mol_type = other DNA
tccgttgtgcaccaac

SEQ ID NO: 17908 - DNA, 16 bp, synthetic construct
  misc_feature 1..16: note = synthetic [barcode part1]
  source 1..16: mol_type = other DNA
cgacgattcagactgt

SEQ ID NO: 17909 - DNA, 16 bp, synthetic construct
  misc_feature 1..16: note = synthetic [barcode part1]
  source 1..16: mol_type = other DNA
ccgacgactatactcc

SEQ ID NO: 17910 - DNA, 16 bp, synthetic construct
  misc_feature 1..16: note = synthetic [barcode part1]
  source 1..16: mol_type = other DNA
atcacgtgtcactccg

SEQ ID NO: 17911 - DNA, 16 bp, synthetic construct
  misc_feature 1..16: note = synthetic [barcode part1]
  source 1..16: mol_type = other DNA
gtactaaccgacacgt

SEQ ID NO: 17912 - DNA, 16 bp, synthetic construct
  misc_feature 1..16: note = synthetic [barcode part1]
  source 1..16: mol_type = other DNA
caccttgtcgtaggtc

SEQ ID NO: 17913 - DNA, 16 bp, synthetic construct
  misc_feature 1..16: note = synthetic [barcode part1]
  source 1..16: mol_type = other DNA
agtacgtggccttctc

SEQ ID NO: 17914 - DNA, 16 bp, synthetic construct
  misc_feature 1..16: note = synthetic [barcode part1]
  source 1..16: mol_type = other DNA
ttccttaggcgtaccg

SEQ ID NO: 17915 - DNA, 16 bp, synthetic construct
  misc_feature 1..16: note = synthetic [barcode part1]
  source 1..16: mol_type = other DNA
gacagtgacttacaag

SEQ ID NO: 17916 - DNA, 16 bp, synthetic construct
  misc_feature 1..16: note = synthetic [barcode part1]
  source 1..16: mol_type = other DNA
cctcaatcgacctctt

SEQ ID NO: 17917 - DNA, 16 bp, synthetic construct
  misc_feature 1..16: note = synthetic [barcode part1]
  source 1..16: mol_type = other DNA
gttgtagtcgcaacac

SEQ ID NO: 17918 - DNA, 16 bp, synthetic construct
  misc_feature 1..16: note = synthetic [barcode part1]
  source 1..16: mol_type = other DNA
gactactgcaacctag

SEQ ID NO: 17919 - DNA, 16 bp, synthetic construct
  misc_feature 1..16: note = synthetic [barcode part1]
  source 1..16: mol_type = other DNA
ccaggtaacgaatcct

SEQ ID NO: 17920 - DNA, 16 bp, synthetic construct
  misc_feature 1..16: note = synthetic [barcode part1]
  source 1..16: mol_type = other DNA
ataccagaatcgtgcc

SEQ ID NO: 17921 - DNA, 16 bp, synthetic construct
  misc_feature 1..16: note = synthetic [barcode part1]
  source 1..16: mol_type = other DNA
cagttaggaagaggac

SEQ ID NO: 17922 - DNA, 16 bp, synthetic construct
  misc_feature 1..16: note = synthetic [barcode part1]
  source 1..16: mol_type = other DNA
tccagtatccacaccg

SEQ ID NO: 17923 - DNA, 16 bp, synthetic construct
  misc_feature 1..16: note = synthetic [barcode part1]
  source 1..16: mol_type = other DNA
tggatatcagtcctct

SEQ ID NO: 17924 - DNA, 16 bp, synthetic construct
  misc_feature 1..16: note = synthetic [barcode part1]
  source 1..16: mol_type = other DNA
gacgtagttacacctg

SEQ ID NO: 17925 - DNA, 16 bp, synthetic construct
  misc_feature 1..16: note = synthetic [barcode part1]
  source 1..16: mol_type = other DNA
gccttgcagtacgtct

SEQ ID NO: 17926 - DNA, 16 bp, synthetic construct
  misc_feature 1..16: note = synthetic [barcode part1]
  source 1..16: mol_type = other DNA
tcgcgttgtaacttac

SEQ ID NO: 17927 - DNA, 16 bp, synthetic construct
  misc_feature 1..16: note = synthetic [barcode part1]
  source 1..16: mol_type = other DNA
ccgacttggatacctc

SEQ ID NO: 17928 - DNA, 16 bp, synthetic construct
  misc_feature 1..16: note = synthetic [barcode part1]
  source 1..16: mol_type = other DNA
tactcgttccagagtt

SEQ ID NO: 17929 - DNA, 16 bp, synthetic construct
  misc_feature 1..16: note = synthetic [barcode part1]
  source 1..16: mol_type = other DNA
aagaggagtatcgcag

SEQ ID NO: 17930 - DNA, 16 bp, synthetic construct
  misc_feature 1..16: note = synthetic [barcode part1]
  source 1..16: mol_type = other DNA
tcacactaggccgtct

SEQ ID NO: 17931 - DNA, 16 bp, synthetic construct
  misc_feature 1..16: note = synthetic [barcode part1]
  source 1..16: mol_type = other DNA
cgactcctggtatatt

SEQ ID NO: 17932 - DNA, 16 bp, synthetic construct
  misc_feature 1..16: note = synthetic [barcode part1]
  source 1..16: mol_type = other DNA
cgtattcgaaccgcct

SEQ ID NO: 17933 - DNA, 16 bp, synthetic construct
  misc_feature 1..16: note = synthetic [barcode part1]
  source 1..16: mol_type = other DNA
aagtaagaagtctcgc

SEQ ID NO: 17934 - DNA, 16 bp, synthetic construct
  misc_feature 1..16: note = synthetic [barcode part1]
  source 1..16: mol_type = other DNA
gtctagactacgaacc

SEQ ID NO: 17935 - DNA, 16 bp, synthetic construct
  misc_feature 1..16: note = synthetic [barcode part1]
  source 1..16: mol_type = other DNA
ccttagttacagacct

SEQ ID NO: 17936 - DNA, 16 bp, synthetic construct
  misc_feature 1..16: note = synthetic [barcode part1]
  source 1..16: mol_type = other DNA
cgccttaacttgtaac

SEQ ID NO: 17937 - DNA, 16 bp, synthetic construct
  misc_feature 1..16: note = synthetic [barcode part1]
  source 1..16: mol_type = other DNA
aacgacctgcggaagt

SEQ ID NO: 17938 - DNA, 16 bp, synthetic construct
  misc_feature 1..16: note = synthetic [barcode part1]
  source 1..16: mol_type = other DNA
agaccgtgagtgtggt

SEQ ID NO: 17939 - DNA, 16 bp, synthetic construct
  misc_feature 1..16: note = synthetic [barcode part1]
  source 1..16: mol_type = other DNA
cgaagtcagtcctagt

SEQ ID NO: 17940 - DNA, 16 bp, synthetic construct
  misc_feature 1..16: note = synthetic [barcode part1]
  source 1..16: mol_type = other DNA
agtgtcaccggaattc

SEQ ID NO: 17941 - DNA, 16 bp, synthetic construct
  misc_feature 1..16: note = synthetic [barcode part1]
  source 1..16: mol_type = other DNA
cacgcaacgaagaatt

SEQ ID NO: 17942 - DNA, 16 bp, synthetic construct
  misc_feature 1..16: note = synthetic [barcode part1]
  source 1..16: mol_type = other DNA
tgaggtcttgatcggt

SEQ ID NO: 17943 - DNA, 16 bp, synthetic construct
  misc_feature 1..16: note = synthetic [barcode part1]
  source 1..16: mol_type = other DNA
gagattatacgagtcg

SEQ ID NO: 17944 - DNA, 16 bp, synthetic construct
  misc_feature 1..16: note = synthetic [barcode part1]
  source 1..16: mol_type = other DNA
ttccacgatcaggtcc

SEQ ID NO: 17945 - DNA, 16 bp, synthetic construct
  misc_feature 1..16: note = synthetic [barcode part1]
  source 1..16: mol_type = other DNA
gtaacgtcgatcaacc

SEQ ID NO: 17946 - DNA, 16 bp, synthetic construct
  misc_feature 1..16: note = synthetic [barcode part1]
  source 1..16: mol_type = other DNA
ataaggaattgccgac

SEQ ID NO: 17947 - DNA, 16 bp, synthetic construct
  misc_feature 1..16: note = synthetic [barcode part1]
  source 1..16: mol_type = other DNA
caccaatatcagtgcg

SEQ ID NO: 17948 - DNA, 16 bp, synthetic construct
  misc_feature 1..16: note = synthetic [barcode part1]
  source 1..16: mol_type = other DNA
acttgacgtgtctccg

SEQ ID NO: 17949 - DNA, 16 bp, synthetic construct
  misc_feature 1..16: note = synthetic [barcode part1]
  source 1..16: mol_type = other DNA
cggttgaaggatcctt

SEQ ID NO: 17950 - DNA, 16 bp, synthetic construct
  misc_feature 1..16: note = synthetic [barcode part1]
  source 1..16: mol_type = other DNA
atctatcacgacgttc

SEQ ID NO: 17951 - DNA, 16 bp, synthetic construct
  misc_feature 1..16: note = synthetic [barcode part1]
  source 1..16: mol_type = other DNA
atacaataccgacgcc

SEQ ID NO: 17952 - DNA, 16 bp, synthetic construct
  misc_feature 1..16: note = synthetic [barcode part1]
  source 1..16: mol_type = other DNA
agaatccgataagtgc

SEQ ID NO: 17953 - DNA, 16 bp, synthetic construct
  misc_feature 1..16: note = synthetic [barcode part1]
  source 1..16: mol_type = other DNA
gcaacaccagtgttgt

SEQ ID NO: 17954 - DNA, 16 bp, synthetic construct
  misc_feature 1..16: note = synthetic [barcode part1]
  source 1..16: mol_type = other DNA
ttataagaggcgcctc

SEQ ID NO: 17955 - DNA, 16 bp, synthetic construct
  misc_feature 1..16: note = synthetic [barcode part1]
  source 1..16: mol_type = other DNA
cggcgtgaggatagtt

SEQ ID NO: 17956 - DNA, 16 bp, synthetic construct
  misc_feature 1..16: note = synthetic [barcode part1]
  source 1..16: mol_type = other DNA
cgatataggcctgtgt

SEQ ID NO: 17957 - DNA, 16 bp, synthetic construct
  misc_feature 1..16: note = synthetic [barcode part1]
  source 1..16: mol_type = other DNA
tctcctgcgaacctag

SEQ ID NO: 17958 - DNA, 16 bp, synthetic construct
  misc_feature 1..16: note = synthetic [barcode part1]
  source 1..16: mol_type = other DNA
acgtatctactctgtg

SEQ ID NO: 17959 - DNA, 16 bp, synthetic construct
  misc_feature 1..16: note = synthetic [barcode part1]
  source 1..16: mol_type = other DNA
gtgtaggtctaacaag

SEQ ID NO: 17960 - DNA, 16 bp, synthetic construct
  misc_feature 1..16: note = synthetic [barcode part1]
  source 1..16: mol_type = other DNA
gataccgccttcttct

SEQ ID NO: 17961 - DNA, 16 bp, synthetic construct
  misc_feature 1..16: note = synthetic [barcode part1]
  source 1..16: mol_type = other DNA
cagagagagttccttc

SEQ ID NO: 17962 - DNA, 16 bp, synthetic construct
  misc_feature 1..16: note = synthetic [barcode part1]
  source 1..16: mol_type = other DNA
cacagtgcctgaagtt

SEQ ID NO: 17963 - DNA, 16 bp, synthetic construct
  misc_feature 1..16: note = synthetic [barcode part1]
  source 1..16: mol_type = other DNA
actgagtccactagac

SEQ ID NO: 17964 - DNA, 16 bp, synthetic construct
  misc_feature 1..16: note = synthetic [barcode part1]
  source 1..16: mol_type = other DNA
tcagaaccagagttcc

SEQ ID NO: 17965 - DNA, 16 bp, synthetic construct
  misc_feature 1..16: note = synthetic [barcode part1]
  source 1..16: mol_type = other DNA
taggtctggcaagacg

SEQ ID NO: 17966 - DNA, 16 bp, synthetic construct
  misc_feature 1..16: note = synthetic [barcode part1]
  source 1..16: mol_type = other DNA
gcgactcaacacgaag

SEQ ID NO: 17967 - DNA, 16 bp, synthetic construct
  misc_feature 1..16: note = synthetic [barcode part1]
  source 1..16: mol_type = other DNA
tcggcacgtatatcag

SEQ ID NO: 17968 - DNA, 16 bp, synthetic construct
  misc_feature 1..16: note = synthetic [barcode part1]
  source 1..16: mol_type = other DNA
gcacttccgacgattc

SEQ ID NO: 17969 - DNA, 16 bp, synthetic construct
  misc_feature 1..16: note = synthetic [barcode part1]
  source 1..16: mol_type = other DNA
gttccgcacctggatt

SEQ ID NO: 17970 - DNA, 16 bp, synthetic construct
  misc_feature 1..16: note = synthetic [barcode part1]
  source 1..16: mol_type = other DNA
tcaagtccagtctgag

SEQ ID NO: 17971 - DNA, 16 bp, synthetic construct
  misc_feature 1..16: note = synthetic [barcode part1]
  source 1..16: mol_type = other DNA
tctgtcctctacctag

SEQ ID NO: 17972 - DNA, 16 bp, synthetic construct
  misc_feature 1..16: note = synthetic [barcode part1]
  source 1..16: mol_type = other DNA
aagttagtgcgtaacg

SEQ ID NO: 17973 - DNA, 16 bp, synthetic construct
  misc_feature 1..16: note = synthetic [barcode part1]
  source 1..16: mol_type = other DNA
agtcaactgtgacgtc

SEQ ID NO: 17974 - DNA, 16 bp, synthetic construct
  misc_feature 1..16: note = synthetic [barcode part1]
  source 1..16: mol_type = other DNA
tagtgtgcctcgttgc

SEQ ID NO: 17975 - DNA, 16 bp, synthetic construct
  misc_feature 1..16: note = synthetic [barcode part1]
  source 1..16: mol_type = other DNA
accttcacgtccttgt

SEQ ID NO: 17976 - DNA, 16 bp, synthetic construct
  misc_feature 1..16: note = synthetic [barcode part1]
  source 1..16: mol_type = other DNA
agattattgtctccgc

SEQ ID NO: 17977 - DNA, 16 bp, synthetic construct
  misc_feature 1..16: note = synthetic [barcode part1]
  source 1..16: mol_type = other DNA
atccgatatcgtcgag

SEQ ID NO: 17978 - DNA, 16 bp, synthetic construct
  misc_feature 1..16: note = synthetic [barcode part1]
  source 1..16: mol_type = other DNA
tgcaggtggtacttgt

SEQ ID NO: 17979 - DNA, 16 bp, synthetic construct
  misc_feature 1..16: note = synthetic [barcode part1]
  source 1..16: mol_type = other DNA
atctcgtgcagttact

SEQ ID NO: 17980 - DNA, 16 bp, synthetic construct
  misc_feature 1..16: note = synthetic [barcode part1]
  source 1..16: mol_type = other DNA
attcgtgaccgaggag

SEQ ID NO: 17981 - DNA, 16 bp, synthetic construct
  misc_feature 1..16: note = synthetic [barcode part1]
  source 1..16: mol_type = other DNA
gagaatatctaacggc

SEQ ID NO: 17982 - DNA, 16 bp, synthetic construct
  misc_feature 1..16: note = synthetic [barcode part1]
  source 1..16: mol_type = other DNA
taggtacgactacgtc

SEQ ID NO: 17983 - DNA, 16 bp, synthetic construct
  misc_feature 1..16: note = synthetic [barcode part1]
  source 1..16: mol_type = other DNA
taatcgcgaactgaag

SEQ ID NO: 17984 - DNA, 16 bp, synthetic construct
  misc_feature 1..16: note = synthetic [barcode part1]
  source 1..16: mol_type = other DNA
ccggtcttcgttactt

SEQ ID NO: 17985 - DNA, 16 bp, synthetic construct
  misc_feature 1..16: note = synthetic [barcode part1]
  source 1..16: mol_type = other DNA
atccgcgcaacttctg

SEQ ID NO: 17986 - DNA, 16 bp, synthetic construct
  misc_feature 1..16: note = synthetic [barcode part1]
  source 1..16: mol_type = other DNA
ccaacttgcctaagtt

SEQ ID NO: 17987 - DNA, 16 bp, synthetic construct
  misc_feature 1..16: note = synthetic [barcode part1]
  source 1..16: mol_type = other DNA
cagactgactggactt

SEQ ID NO: 17988 - DNA, 16 bp, synthetic construct
  misc_feature 1..16: note = synthetic [barcode part1]
  source 1..16: mol_type = other DNA
tgcactagaagtcaag

SEQ ID NO: 17989 - DNA, 16 bp, synthetic construct
  misc_feature 1..16: note = synthetic [barcode part1]
  source 1..16: mol_type = other DNA
tgttcgtggacagact

SEQ ID NO: 17990 - DNA, 16 bp, synthetic construct
  misc_feature 1..16: note = synthetic [barcode part1]
  source 1..16: mol_type = other DNA
acaccggaagacaacc

SEQ ID NO: 17991 - DNA, 16 bp, synthetic construct
  misc_feature 1..16: note = synthetic [barcode part1]
  source 1..16: mol_type = other DNA
tagaccgatacagagt

SEQ ID NO: 17992 - DNA, 16 bp, synthetic construct
  misc_feature 1..16: note = synthetic [barcode part1]
  source 1..16: mol_type = other DNA
gcgactggtgttaatc

SEQ ID NO: 17993 - DNA, 16 bp, synthetic construct
  misc_feature 1..16: note = synthetic [barcode part1]
  source 1..16: mol_type = other DNA
gtaactcggcacgaag

SEQ ID NO: 17994 - DNA, 16 bp, synthetic construct
  misc_feature 1..16: note = synthetic [barcode part1]
  source 1..16: mol_type = other DNA
cagacttagacagtag

SEQ ID NO: 17995 - DNA, 16 bp, synthetic construct
  misc_feature 1..16: note = synthetic [barcode part1]
  source 1..16: mol_type = other DNA
gagtggtgtacttaag

SEQ ID NO: 17996 - DNA, 16 bp, synthetic construct
  misc_feature 1..16: note = synthetic [barcode part1]
  source 1..16: mol_type = other DNA
acgtgcacagtatcgt

SEQ ID NO: 17997 - DNA, 16 bp, synthetic construct
  misc_feature 1..16: note = synthetic [barcode part1]
  source 1..16: mol_type = other DNA
gtcagacacagaagtt

SEQ ID NO: 17998 - DNA, 16 bp, synthetic construct
  misc_feature 1..16: note = synthetic [barcode part1]
  source 1..16: mol_type = other DNA
acttaccgttcgtcct

SEQ ID NO: 17999 - DNA, 16 bp, synthetic construct
  misc_feature 1..16: note = synthetic [barcode part1]
  source 1..16: mol_type = other DNA
ttcagacctcgacctg

SEQ ID NO: 18000 - DNA, 16 bp, synthetic construct
  misc_feature 1..16: note = synthetic [barcode part1]
  source 1..16: mol_type = other DNA
tgttatctcgccactc

SEQ ID NO: 18001 - DNA, 16 bp, synthetic construct
  misc_feature 1..16: note = synthetic [barcode part1]
  source 1..16: mol_type = other DNA
gttacggcctatccgt

SEQ ID NO: 18002 - DNA, 16 bp, synthetic construct
  misc_feature 1..16: note = synthetic [barcode part1]
  source 1..16: mol_type = other DNA
ttcgcgttaacttgac

SEQ ID NO: 18003 - DNA, 16 bp, synthetic construct
  misc_feature 1..16: note = synthetic [barcode part1]
  source 1..16: mol_type = other DNA
aggatagacctgtagt

SEQ ID NO: 18004 - DNA, 16 bp, synthetic construct
  misc_feature 1..16: note = synthetic [barcode part1]
  source 1..16: mol_type = other DNA
gcactggaggaatcac

SEQ ID NO: 18005 - DNA, 16 bp, synthetic construct
  misc_feature 1..16: note = synthetic [barcode part1]
  source 1..16: mol_type = other DNA
gattcgactcctgcac

SEQ ID NO: 18006 - DNA, 16 bp, synthetic construct
  misc_feature 1..16: note = synthetic [barcode part1]
  source 1..16: mol_type = other DNA
gacacacgactggagt

SEQ ID NO: 18007 - DNA, 16 bp, synthetic construct
  misc_feature 1..16: note = synthetic [barcode part1]
  source 1..16: mol_type = other DNA
accacgaatctacctt

SEQ ID NO: 18008 - DNA, 16 bp, synthetic construct
  misc_feature 1..16: note = synthetic [barcode part1]
  source 1..16: mol_type = other DNA
aaccaactcaggactc

SEQ ID NO: 18009 - DNA, 16 bp, synthetic construct
  misc_feature 1..16: note = synthetic [barcode part1]
  source 1..16: mol_type = other DNA
gtcctatagacgttct

SEQ ID NO: 18010 - DNA, 16 bp, synthetic construct
  misc_feature 1..16: note = synthetic [barcode part1]
  source 1..16: mol_type = other DNA
ttctggaccgtctgtg

SEQ ID NO: 18011 - DNA, 16 bp, synthetic construct
  misc_feature 1..16: note = synthetic [barcode part1]
  source 1..16: mol_type = other DNA
agttcggtcctgtatt

SEQ ID NO: 18012 - DNA, 16 bp, synthetic construct
  misc_feature 1..16: note = synthetic [barcode part1]
  source 1..16: mol_type = other DNA
acgcgaaggattattg

SEQ ID NO: 18013 - DNA, 16 bp, synthetic construct
  misc_feature 1..16: note = synthetic [barcode part1]
  source 1..16: mol_type = other DNA
tagtgtgtcgacgtac

SEQ ID NO: 18014 - DNA, 16 bp, synthetic construct
  misc_feature 1..16: note = synthetic [barcode part1]
  source 1..16: mol_type = other DNA
cgtggtcaggaatcag

SEQ ID NO: 18015 - DNA, 16 bp, synthetic construct
  misc_feature 1..16: note = synthetic [barcode part1]
  source 1..16: mol_type = other DNA
gacactgacgtacact

SEQ ID NO: 18016 - DNA, 16 bp, synthetic construct
  misc_feature 1..16: note = synthetic [barcode part1]
  source 1..16: mol_type = other DNA
cgaccttactacgcac

SEQ ID NO: 18017 - DNA, 16 bp, synthetic construct
  misc_feature 1..16: note = synthetic [barcode part1]
  source 1..16: mol_type = other DNA
tcctctcttgaggtct

SEQ ID NO: 18018 - DNA, 16 bp, synthetic construct
  misc_feature 1..16: note = synthetic [barcode part1]
  source 1..16: mol_type = other DNA
tgcaatctgcgttgag

SEQ ID NO: 18019 - DNA, 16 bp, synthetic construct
  misc_feature 1..16: note = synthetic [barcode part1]
  source 1..16: mol_type = other DNA
aagacgaggtatctgt

SEQ ID NO: 18020 - DNA, 16 bp, synthetic construct
  misc_feature 1..16: note = synthetic [barcode part1]
  source 1..16: mol_type = other DNA
tctgacactgcactcg

SEQ ID NO: 18021 - DNA, 16 bp, synthetic construct
  misc_feature 1..16: note = synthetic [barcode part1]
  source 1..16: mol_type = other DNA
aacaacacactgtccg

SEQ ID NO: 18022 - DNA, 16 bp, synthetic construct
  misc_feature 1..16: note = synthetic [barcode part1]
  source 1..16: mol_type = other DNA
actcaccacttgttcc

SEQ ID NO: 18023 - DNA, 16 bp, synthetic construct
  misc_feature 1..16: note = synthetic [barcode part1]
  source 1..16: mol_type = other DNA
ccgtgaagtggttgtt

SEQ ID NO: 18024 - DNA, 16 bp, synthetic construct
  misc_feature 1..16: note = synthetic [barcode part1]
  source 1..16: mol_type = other DNA
agtaacagtggcagag

SEQ ID NO: 18025 - DNA, 16 bp, synthetic construct
  misc_feature 1..16: note = synthetic [barcode part1]
  source 1..16: mol_type = other DNA
gttgatactgtcacct

SEQ ID NO: 18026 - DNA, 16 bp, synthetic construct
  misc_feature 1..16: note = synthetic [barcode part1]
  source 1..16: mol_type = other DNA
taagagtcgtcaggcg

SEQ ID NO: 18027 - DNA, 16 bp, synthetic construct
  misc_feature 1..16: note = synthetic [barcode part1]
  source 1..16: mol_type = other DNA
tggaccggaagtgtac

SEQ ID NO: 18028 - DNA, 16 bp, synthetic construct
  misc_feature 1..16: note = synthetic [barcode part1]
  source 1..16: mol_type = other DNA
tgttcagaccacctcg

SEQ ID NO: 18029 - DNA, 16 bp, synthetic construct
  misc_feature 1..16: note = synthetic [barcode part1]
  source 1..16: mol_type = other DNA
tggattgtacaaggac

SEQ ID NO: 18030 - DNA, 16 bp, synthetic construct
  misc_feature 1..16: note = synthetic [barcode part1]
  source 1..16: mol_type = other DNA
ccttgtccgagtgttg

SEQ ID NO: 18031 - DNA, 16 bp, synthetic construct
  misc_feature 1..16: note = synthetic [barcode part1]
  source 1..16: mol_type = other DNA
gtcgagtacagtctgt

SEQ ID NO: 18032 - DNA, 16 bp, synthetic construct
  misc_feature 1..16: note = synthetic [barcode part1]
  source 1..16: mol_type = other DNA
aggcgagtacctatct

SEQ ID NO: 18033 - DNA, 16 bp, synthetic construct
  misc_feature 1..16: note = synthetic [barcode part1]
  source 1..16: mol_type = other DNA
gcactggaggatagtc

SEQ ID NO: 18034 - DNA, 16 bp, synthetic construct
  misc_feature 1..16: note = synthetic [barcode part1]
  source 1..16: mol_type = other DNA
agatcgcgaactacct

SEQ ID NO: 18035 - DNA, 16 bp, synthetic construct
  misc_feature 1..16: note = synthetic [barcode part1]
  source 1..16: mol_type = other DNA
cgatctcagagaatcc

SEQ ID NO: 18036 - DNA, 16 bp, synthetic construct
  misc_feature 1..16: note = synthetic [barcode part1]
  source 1..16: mol_type = other DNA
taggtacgactgtacc

SEQ ID NO: 18037 - DNA, 16 bp, synthetic construct
  misc_feature 1..16: note = synthetic [barcode part1]
  source 1..16: mol_type = other DNA
gtcctgcgaacgttct

SEQ ID NO: 18038 - DNA, 16 bp, synthetic construct
  misc_feature 1..16: note = synthetic [barcode part1]
  source 1..16: mol_type = other DNA
gaccacacacacaact

SEQ ID NO: 18039 - DNA, 16 bp, synthetic construct
  misc_feature 1..16: note = synthetic [barcode part1]
  source 1..16: mol_type = other DNA
ccgagacaatactgtc

SEQ ID NO: 18040 - DNA, 16 bp, synthetic construct
  misc_feature 1..16: note = synthetic [barcode part1]
  source 1..16: mol_type = other DNA
ccacgttcttggcaac

SEQ ID NO: 18041 - DNA, 16 bp, synthetic construct
  misc_feature 1..16: note = synthetic [barcode part1]
  source 1..16: mol_type = other DNA
aacacaccacagttgc

SEQ ID NO: 18042 - DNA, 16 bp, synthetic construct
  misc_feature 1..16: note = synthetic [barcode part1]
  source 1..16: mol_type = other DNA
ttcagtcggttctcct

SEQ ID NO: 18043 - DNA, 16 bp, synthetic construct
  misc_feature 1..16: note = synthetic [barcode part1]
  source 1..16: mol_type = other DNA
accttgaactacgacg

SEQ ID NO: 18044 - DNA, 16 bp, synthetic construct
  misc_feature 1..16: note = synthetic [barcode part1]
  source 1..16: mol_type = other DNA
cgcaagtagtaaggtt

SEQ ID NO: 18045 - DNA, 16 bp, synthetic construct
  misc_feature 1..16: note = synthetic [barcode part1]
  source 1..16: mol_type = other DNA
gtccttgaacaacttc

SEQ ID NO: 18046 - DNA, 16 bp, synthetic construct
  misc_feature 1..16: note = synthetic [barcode part1]
  source 1..16: mol_type = other DNA
acgttaggtcgtcctc

SEQ ID NO: 18047 - DNA, 16 bp, synthetic construct
  misc_feature 1..16: note = synthetic [barcode part1]
  source 1..16: mol_type = other DNA
cgtaggcagatagtgc

SEQ ID NO: 18048 - DNA, 16 bp, synthetic construct
  misc_feature 1..16: note = synthetic [barcode part1]
  source 1..16: mol_type = other DNA
acgatcttccgtaccg

SEQ ID NO: 18049 - DNA, 16 bp, synthetic construct
  misc_feature 1..16: note = synthetic [barcode part1]
  source 1..16: mol_type = other DNA
aaccaggagtacgtcg

SEQ ID NO: 18050 - DNA, 16 bp, synthetic construct
  misc_feature 1..16: note = synthetic [barcode part1]
  source 1..16: mol_type = other DNA
actcggatctgagtgt

SEQ ID NO: 18051 - DNA, 16 bp, synthetic construct
  misc_feature 1..16: note = synthetic [barcode part1]
  source 1..16: mol_type = other DNA
atagaggcaacttggt

SEQ ID NO: 18052 - DNA, 16 bp, synthetic construct
  misc_feature 1..16: note = synthetic [barcode part1]
  source 1..16: mol_type = other DNA
aagattcacagacggt

SEQ ID NO: 18053 - DNA, 16 bp, synthetic construct
  misc_feature 1..16: note = synthetic [barcode part1]
  source 1..16: mol_type = other DNA
gaattgagttagtgcg

SEQ ID NO: 18054 - DNA, 16 bp, synthetic construct
  misc_feature 1..16: note = synthetic [barcode part1]
  source 1..16: mol_type = other DNA
actgtgtactgtcttg

SEQ ID NO: 18055 - DNA, 16 bp, synthetic construct
  misc_feature 1..16: note = synthetic [barcode part1]
  source 1..16: mol_type = other DNA
tctagttgttacacgc

SEQ ID NO: 18056 - DNA, 16 bp, synthetic construct
  misc_feature 1..16: note = synthetic [barcode part1]
  source 1..16: mol_type = other DNA
cagttgattccaggac

SEQ ID NO: 18057 - DNA, 16 bp, synthetic construct
  misc_feature 1..16: note = synthetic [barcode part1]
  source 1..16: mol_type = other DNA
gttcgatcagtctgag

SEQ ID NO: 18058 - DNA, 16 bp, synthetic construct
  misc_feature 1..16: note = synthetic [barcode part1]
  source 1..16: mol_type = other DNA
tatctctgagagtgcg

SEQ ID NO: 18059 - DNA, 16 bp, synthetic construct
  misc_feature 1..16: note = synthetic [barcode part1]
  source 1..16: mol_type = other DNA
tcaggcgtctactacc

SEQ ID NO: 18060 - DNA, 16 bp, synthetic construct
  misc_feature 1..16: note = synthetic [barcode part1]
  source 1..16: mol_type = other DNA
taagtcgtctccgcac

SEQ ID NO: 18061 - DNA, 16 bp, synthetic construct
  misc_feature 1..16: note = synthetic [barcode part1]
  source 1..16: mol_type = other DNA
gttaacctgtgcgtag

SEQ ID NO: 18062 - DNA, 16 bp, synthetic construct
  misc_feature 1..16: note = synthetic [barcode part1]
  source 1..16: mol_type = other DNA
ccgtaggatcttccac

SEQ ID NO: 18063 - DNA, 16 bp, synthetic construct
  misc_feature 1..16: note = synthetic [barcode part1]
  source 1..16: mol_type = other DNA
caagtcaagaacgtac

SEQ ID NO: 18064 - DNA, 16 bp, synthetic construct
  misc_feature 1..16: note = synthetic [barcode part1]
  source 1..16: mol_type = other DNA
tcctgtgagaagtgtc

SEQ ID NO: 18065 - DNA, 16 bp, synthetic construct
  misc_feature 1..16: note = synthetic [barcode part1]
  source 1..16: mol_type = other DNA
gatatccacctcttag

SEQ ID NO: 18066 - DNA, 16 bp, synthetic construct
  misc_feature 1..16: note = synthetic [barcode part1]
  source 1..16: mol_type = other DNA
atacgcgtcaggatct

SEQ ID NO: 18067 - DNA, 16 bp, synthetic construct
  misc_feature 1..16: note = synthetic [barcode part1]
  source 1..16: mol_type = other DNA
tgcgtatcttcaggag

SEQ ID NO: 18068 - DNA, 16 bp, synthetic construct
  misc_feature 1..16: note = synthetic [barcode part1]
  source 1..16: mol_type = other DNA
ttcgccgtcagtacgt

SEQ ID NO: 18069 - DNA, 16 bp, synthetic construct
  misc_feature 1..16: note = synthetic [barcode part1]
  source 1..16: mol_type = other DNA
acaatccgatacagag

SEQ ID NO: 18070 - DNA, 16 bp, synthetic construct
  misc_feature 1..16: note = synthetic [barcode part1]
  source 1..16: mol_type = other DNA
cctctcacactggtag

SEQ ID NO: 18071 - DNA, 16 bp, synthetic construct
  misc_feature 1..16: note = synthetic [barcode part1]
  source 1..16: mol_type = other DNA
acgaccaatcgtgtgt

SEQ ID NO: 18072 - DNA, 16 bp, synthetic construct
  misc_feature 1..16: note = synthetic [barcode part1]
  source 1..16: mol_type = other DNA
tctcggcagtcgtact

SEQ ID NO: 18073 - DNA, 16 bp, synthetic construct
  misc_feature 1..16: note = synthetic [barcode part1]
  source 1..16: mol_type = other DNA
tctgtaccagttcagt

SEQ ID NO: 18074 - DNA, 16 bp, synthetic construct
  misc_feature 1..16: note = synthetic [barcode part1]
  source 1..16: mol_type = other DNA
cggttcttgactatac

SEQ ID NO: 18075 - DNA, 16 bp, synthetic construct
  misc_feature 1..16: note = synthetic [barcode part1]
  source 1..16: mol_type = other DNA
atacacgccttctctc

SEQ ID NO: 18076 - DNA, 16 bp, synthetic construct
  misc_feature 1..16: note = synthetic [barcode part1]
  source 1..16: mol_type = other DNA
tgcagttcgtgttgag

SEQ ID NO: 18077 - DNA, 16 bp, synthetic construct
  misc_feature 1..16: note = synthetic [barcode part1]
  source 1..16: mol_type = other DNA
tcgtagtgttacggtg

SEQ ID NO: 18078 - DNA, 16 bp, synthetic construct
  misc_feature 1..16: note = synthetic [barcode part1]
  source 1..16: mol_type = other DNA
tcactagtatactccg

SEQ ID NO: 18079 - DNA, 16 bp, synthetic construct
  misc_feature 1..16: note = synthetic [barcode part1]
  source 1..16: mol_type = other DNA
gagataacaagacggc

SEQ ID NO: 18080 - DNA, 16 bp, synthetic construct
  misc_feature 1..16: note = synthetic [barcode part1]
  source 1..16: mol_type = other DNA
agtataccggtcgtgt

SEQ ID NO: 18081 - DNA, 16 bp, synthetic construct
  misc_feature 1..16: note = synthetic [barcode part1]
  source 1..16: mol_type = other DNA
aggtcgtaacacaagt

SEQ ID NO: 18082 - DNA, 16 bp, synthetic construct
  misc_feature 1..16: note = synthetic [barcode part1]
  source 1..16: mol_type = other DNA
gatagtaatccgcaag

SEQ ID NO: 18083 - DNA, 16 bp, synthetic construct
  misc_feature 1..16: note = synthetic [barcode part1]
  source 1..16: mol_type = other DNA
cactgaatccagtgac

SEQ ID NO: 18084 - DNA, 16 bp, synthetic construct
  misc_feature 1..16: note = synthetic [barcode part1]
  source 1..16: mol_type = other DNA
gttcgttcgttgtagt

SEQ ID NO: 18085 - DNA, 16 bp, synthetic construct
  misc_feature 1..16: note = synthetic [barcode part1]
  source 1..16: mol_type = other DNA
aacctcacggacgaag

SEQ ID NO: 18086 - DNA, 16 bp, synthetic construct
  misc_feature 1..16: note = synthetic [barcode part1]
  source 1..16: mol_type = other DNA
cgaccagattgcaatc

SEQ ID NO: 18087 - DNA, 16 bp, synthetic construct
  misc_feature 1..16: note = synthetic [barcode part1]
  source 1..16: mol_type = other DNA
tggtacgtgcaagtct

SEQ ID NO: 18088 - DNA, 16 bp, synthetic construct
  misc_feature 1..16: note = synthetic [barcode part1]
  source 1..16: mol_type = other DNA
tggtacgcctctgact

SEQ ID NO: 18089 - DNA, 16 bp, synthetic construct
  misc_feature 1..16: note = synthetic [barcode part1]
  source 1..16: mol_type = other DNA
agtgtctcttgtggag

SEQ ID NO: 18090 - DNA, 16 bp, synthetic construct
  misc_feature 1..16: note = synthetic [barcode part1]
  source 1..16: mol_type = other DNA
gacgtcgattggttac

SEQ ID NO: 18091 - DNA, 16 bp, synthetic construct
  misc_feature 1..16: note = synthetic [barcode part1]
  source 1..16: mol_type = other DNA
agaatagaggcagtgc

SEQ ID NO: 18092 - DNA, 16 bp, synthetic construct
  misc_feature 1..16: note = synthetic [barcode part1]
  source 1..16: mol_type = other DNA
cggactctgaatatcg

SEQ ID NO: 18093 - DNA, 16 bp, synthetic construct
  misc_feature 1..16: note = synthetic [barcode part1]
  source 1..16: mol_type = other DNA
cgcgagttgagtattc

SEQ ID NO: 18094 - DNA, 16 bp, synthetic construct
  misc_feature 1..16: note = synthetic [barcode part1]
  source 1..16: mol_type = other DNA
ttgatccgtaaccgtt

SEQ ID NO: 18095 - DNA, 16 bp, synthetic construct
  misc_feature 1..16: note = synthetic [barcode part1]
  source 1..16: mol_type = other DNA
accagtatagaaggtc

SEQ ID NO: 18096 - DNA, 16 bp, synthetic construct
  misc_feature 1..16: note = synthetic [barcode part1]
  source 1..16: mol_type = other DNA
cgaggcctataacgtt

SEQ ID NO: 18097 - DNA, 16 bp, synthetic construct
  misc_feature 1..16: note = synthetic [barcode part1]
  source 1..16: mol_type = other DNA
gactactgacacggag

SEQ ID NO: 18098 - DNA, 16 bp, synthetic construct
  misc_feature 1..16: note = synthetic [barcode part1]
  source 1..16: mol_type = other DNA
cgtccaggaaggttag

SEQ ID NO: 18099 - DNA, 16 bp, synthetic construct
  misc_feature 1..16: note = synthetic [barcode part1]
  source 1..16: mol_type = other DNA
acgaggtggtactcag

SEQ ID NO: 18100 - DNA, 16 bp, synthetic construct
  misc_feature 1..16: note = synthetic [barcode part1]
  source 1..16: mol_type = other DNA
gccttctaagaagtcg

SEQ ID NO: 18101 - DNA, 16 bp, synthetic construct
  misc_feature 1..16: note = synthetic [barcode part1]
  source 1..16: mol_type = other DNA
acaacacaccaaccac

SEQ ID NO: 18102 - DNA, 16 bp, synthetic construct
  misc_feature 1..16: note = synthetic [barcode part1]
  source 1..16: mol_type = other DNA
gacttctatcgcctct

SEQ ID NO: 18103 - DNA, 16 bp, synthetic construct
  misc_feature 1..16: note = synthetic [barcode part1]
  source 1..16: mol_type = other DNA
attaaggaccggtgcg

SEQ ID NO: 18104 - DNA, 16 bp, synthetic construct
  misc_feature 1..16: note = synthetic [barcode part1]
  source 1..16: mol_type = other DNA
ataacgactgcgtaag

SEQ ID NO: 18105 - DNA, 16 bp, synthetic construct
  misc_feature 1..16: note = synthetic [barcode part1]
  source 1..16: mol_type = other DNA
ttatcgcgagtggtgt

SEQ ID NO: 18106 - DNA, 16 bp, synthetic construct
  misc_feature 1..16: note = synthetic [barcode part1]
  source 1..16: mol_type = other DNA
tacgttgtggtacacg

SEQ ID NO: 18107 - DNA, 16 bp, synthetic construct
  misc_feature 1..16: note = synthetic [barcode part1]
  source 1..16: mol_type = other DNA
tctcaaggtccgttcg

SEQ ID NO: 18108 - DNA, 16 bp, synthetic construct
  misc_feature 1..16: note = synthetic [barcode part1]
  source 1..16: mol_type = other DNA
aacggtgcgttcgaag

SEQ ID NO: 18109 - DNA, 16 bp, synthetic construct
  misc_feature 1..16: note = synthetic [barcode part1]
  source 1..16: mol_type = other DNA
tcgtacaccgaaggag

SEQ ID NO: 18110 - DNA, 16 bp, synthetic construct
  misc_feature 1..16: note = synthetic [barcode part1]
  source 1..16: mol_type = other DNA
atataacgtcgcgcac

SEQ ID NO: 18111 - DNA, 16 bp, synthetic construct
  misc_feature 1..16: note = synthetic [barcode part1]
  source 1..16: mol_type = other DNA
tcgtaccagattatcc

SEQ ID NO: 18112 - DNA, 16 bp, synthetic construct
  misc_feature 1..16: note = synthetic [barcode part1]
  source 1..16: mol_type = other DNA
actctgacagtcagtg

SEQ ID NO: 18113 - DNA, 16 bp, synthetic construct
  misc_feature 1..16: note = synthetic [barcode part1]
  source 1..16: mol_type = other DNA
ccacaatccagagttg

SEQ ID NO: 18114 - DNA, 16 bp, synthetic construct
  misc_feature 1..16: note = synthetic [barcode part1]
  source 1..16: mol_type = other DNA
atcagtgtcgcacaac

SEQ ID NO: 18115 - DNA, 16 bp, synthetic construct
  misc_feature 1..16: note = synthetic [barcode part1]
  source 1..16: mol_type = other DNA
accggtacgtcttatt

SEQ ID NO: 18116 - DNA, 16 bp, synthetic construct
  misc_feature 1..16: note = synthetic [barcode part1]
  source 1..16: mol_type = other DNA
ccactattaggtgtct

SEQ ID NO: 18117 - DNA, 16 bp, synthetic construct
  misc_feature 1..16: note = synthetic [barcode part1]
  source 1..16: mol_type = other DNA
caggtgttaatctcct

SEQ ID NO: 18118 - DNA, 16 bp, synthetic construct
  misc_feature 1..16: note = synthetic [barcode part1]
  source 1..16: mol_type = other DNA
tggtcgcctattattg

SEQ ID NO: 18119 - DNA, 16 bp, synthetic construct
  misc_feature 1..16: note = synthetic [barcode part1]
  source 1..16: mol_type = other DNA
gcaccgtacttactcg

SEQ ID NO: 18120 - DNA, 16 bp, synthetic construct
  misc_feature 1..16: note = synthetic [barcode part1]
  source 1..16: mol_type = other DNA
ttccaatccgagtgcc

SEQ ID NO: 18121 - DNA, 16 bp, synthetic construct
  misc_feature 1..16: note = synthetic [barcode part1]
  source 1..16: mol_type = other DNA
tactcacttgcaacgt

SEQ ID NO: 18122 - DNA, 16 bp, synthetic construct
  misc_feature 1..16: note = synthetic [barcode part1]
  source 1..16: mol_type = other DNA
tcgtctgtgaacgaac

SEQ ID NO: 18123 - DNA, 16 bp, synthetic construct
  misc_feature 1..16: note = synthetic [barcode part1]
  source 1..16: mol_type = other DNA
tgtgactaaccgtgtg

SEQ ID NO: 18124 - DNA, 16 bp, synthetic construct
  misc_feature 1..16: note = synthetic [barcode part1]
  source 1..16: mol_type = other DNA
tccgtaacggaataag

SEQ ID NO: 18125 - DNA, 16 bp, synthetic construct
  misc_feature 1..16: note = synthetic [barcode part1]
  source 1..16: mol_type = other DNA
acaaccgatcacacgt

SEQ ID NO: 18126 - DNA, 16 bp, synthetic construct
  misc_feature 1..16: note = synthetic [barcode part1]
  source 1..16: mol_type = other DNA
tactcacggacagact

SEQ ID NO: 18127 - DNA, 16 bp, synthetic construct
  misc_feature 1..16: note = synthetic [barcode part1]
  source 1..16: mol_type = other DNA
tattcgcgacactact

SEQ ID NO: 18128 - DNA, 16 bp, synthetic construct
  misc_feature 1..16: note = synthetic [barcode part1]
  source 1..16: mol_type = other DNA
agtagtctcgaaccac

SEQ ID NO: 18129 - DNA, 16 bp, synthetic construct
  misc_feature 1..16: note = synthetic [barcode part1]
  source 1..16: mol_type = other DNA
tagacgtgacttgtgc

SEQ ID NO: 18130 - DNA, 16 bp, synthetic construct
  misc_feature 1..16: note = synthetic [barcode part1]
  source 1..16: mol_type = other DNA
ttggtgatactcttgc

SEQ ID NO: 18131 - DNA, 16 bp, synthetic construct
  misc_feature 1..16: note = synthetic [barcode part1]
  source 1..16: mol_type = other DNA
attgcggtctattcgt

SEQ ID NO: 18132 - DNA, 16 bp, synthetic construct
  misc_feature 1..16: note = synthetic [barcode part1]
  source 1..16: mol_type = other DNA
gacttaggaagacgcc

SEQ ID NO: 18133 - DNA, 16 bp, synthetic construct
  misc_feature 1..16: note = synthetic [barcode part1]
  source 1..16: mol_type = other DNA
tcaaggttaggcggac

SEQ ID NO: 18134 - DNA, 16 bp, synthetic construct
  misc_feature 1..16: note = synthetic [barcode part1]
  source 1..16: mol_type = other DNA
aagaaggtcctccttg

SEQ ID NO: 18135 - DNA, 16 bp, synthetic construct
  misc_feature 1..16: note = synthetic [barcode part1]
  source 1..16: mol_type = other DNA
tggccagatcaattgc

SEQ ID NO: 18136 - DNA, 16 bp, synthetic construct
  misc_feature 1..16: note = synthetic [barcode part1]
  source 1..16: mol_type = other DNA
gaattccggtcgattg

SEQ ID NO: 18137 - DNA, 16 bp, synthetic construct
  misc_feature 1..16: note = synthetic [barcode part1]
  source 1..16: mol_type = other DNA
cctgcgtaacttgatt

SEQ ID NO: 18138 - DNA, 16 bp, synthetic construct
  misc_feature 1..16: note = synthetic [barcode part1]
  source 1..16: mol_type = other DNA
aacgtcacagtcaacc

SEQ ID NO: 18139 - DNA, 16 bp, synthetic construct
  misc_feature 1..16: note = synthetic [barcode part1]
  source 1..16: mol_type = other DNA
tcgtagtagaggagag

SEQ ID NO: 18140 - DNA, 16 bp, synthetic construct
  misc_feature 1..16: note = synthetic [barcode part1]
  source 1..16: mol_type = other DNA
tctgaacaacgcactg

SEQ ID NO: 18141 - DNA, 16 bp, synthetic construct
  misc_feature 1..16: note = synthetic [barcode part1]
  source 1..16: mol_type = other DNA
tgtcaacgttggtacg

SEQ ID NO: 18142 - DNA, 16 bp, synthetic construct
  misc_feature 1..16: note = synthetic [barcode part1]
  source 1..16: mol_type = other DNA
cgattgaaccgtaacc

SEQ ID NO: 18143 - DNA, 16 bp, synthetic construct
  misc_feature 1..16: note = synthetic [barcode part1]
  source 1..16: mol_type = other DNA
ttagaatctgtccgtc

SEQ ID NO: 18144 - DNA, 16 bp, synthetic construct
  misc_feature 1..16: note = synthetic [barcode part1]
  source 1..16: mol_type = other DNA
tcgtgatcgactagtg

SEQ ID NO: 18145 - DNA, 16 bp, synthetic construct
  misc_feature 1..16: note = synthetic [barcode part1]
  source 1..16: mol_type = other DNA
tccggactagatctag

SEQ ID NO: 18146 - DNA, 16 bp, synthetic construct
  misc_feature 1..16: note = synthetic [barcode part1]
  source 1..16: mol_type = other DNA
cacgaattgtcgcctc

SEQ ID NO: 18147 - DNA, 16 bp, synthetic construct
  misc_feature 1..16: note = synthetic [barcode part1]
  source 1..16: mol_type = other DNA
gtaactcttcgtgccg

SEQ ID NO: 18148 - DNA, 16 bp, synthetic construct
  misc_feature 1..16: note = synthetic [barcode part1]
  source 1..16: mol_type = other DNA
gatagtactacaggtg

SEQ ID NO: 18149 - DNA, 16 bp, synthetic construct
  misc_feature 1..16: note = synthetic [barcode part1]
  source 1..16: mol_type = other DNA
agtgtaatccaacgag

SEQ ID NO: 18150 - DNA, 16 bp, synthetic construct
  misc_feature 1..16: note = synthetic [barcode part1]
  source 1..16: mol_type = other DNA
ttactcaggtgtcgcc

SEQ ID NO: 18151 - DNA, 16 bp, synthetic construct
  misc_feature 1..16: note = synthetic [barcode part1]
  source 1..16: mol_type = other DNA
ccacagaagtgacggt

SEQ ID NO: 18152 - DNA, 16 bp, synthetic construct
  misc_feature 1..16: note = synthetic [barcode part1]
  source 1..16: mol_type = other DNA
accgtaacttgttcac

SEQ ID NO: 18153 - DNA, 16 bp, synthetic construct
  misc_feature 1..16: note = synthetic [barcode part1]
  source 1..16: mol_type = other DNA
gagaccagttgagaag

SEQ ID NO: 18154 - DNA, 16 bp, synthetic construct
  misc_feature 1..16: note = synthetic [barcode part1]
  source 1..16: mol_type = other DNA
caccaaggaactgtct

SEQ ID NO: 18155 - DNA, 16 bp, synthetic construct
  misc_feature 1..16: note = synthetic [barcode part1]
  source 1..16: mol_type = other DNA
actgcaatatcacggc

SEQ ID NO: 18156 - DNA, 16 bp, synthetic construct
  misc_feature 1..16: note = synthetic [barcode part1]
  source 1..16: mol_type = other DNA
taggtgtacacgactc

SEQ ID NO: 18157 - DNA, 16 bp, synthetic construct
  misc_feature 1..16: note = synthetic [barcode part1]
  source 1..16: mol_type = other DNA
cgagaacagacgtaag

SEQ ID NO: 18158 - DNA, 16 bp, synthetic construct
  misc_feature 1..16: note = synthetic [barcode part1]
  source 1..16: mol_type = other DNA
cgtacagtggagaatt

SEQ ID NO: 18159 - DNA, 16 bp, synthetic construct
  misc_feature 1..16: note = synthetic [barcode part1]
  source 1..16: mol_type = other DNA
gaaggtgcctatatcc

SEQ ID NO: 18160 - DNA, 16 bp, synthetic construct
  misc_feature 1..16: note = synthetic [barcode part1]
  source 1..16: mol_type = other DNA
agtggacgttctggag

SEQ ID NO: 18161 - DNA, 16 bp, synthetic construct
  misc_feature 1..16: note = synthetic [barcode part1]
  source 1..16: mol_type = other DNA
ccttgcggttagacct

SEQ ID NO: 18162 - DNA, 16 bp, synthetic construct
  misc_feature 1..16: note = synthetic [barcode part1]
  source 1..16: mol_type = other DNA
agtccgataactcggt

SEQ ID NO: 18163 - DNA, 16 bp, synthetic construct
  misc_feature 1..16: note = synthetic [barcode part1]
  source 1..16: mol_type = other DNA
gtaccttccgaattgt

SEQ ID NO: 18164 - DNA, 16 bp, synthetic construct
  misc_feature 1..16: note = synthetic [barcode part1]
  source 1..16: mol_type = other DNA
gtccgaggttctgttc

SEQ ID NO: 18165 - DNA, 16 bp, synthetic construct
  misc_feature 1..16: note = synthetic [barcode part1]
  source 1..16: mol_type = other DNA
cgtgtcttagaccacc

SEQ ID NO: 18166 - DNA, 16 bp, synthetic construct
  misc_feature 1..16: note = synthetic [barcode part1]
  source 1..16: mol_type = other DNA
agtatccgtaaccacg

SEQ ID NO: 18167 - DNA, 16 bp, synthetic construct
  misc_feature 1..16: note = synthetic [barcode part1]
  source 1..16: mol_type = other DNA
tctccaacggcgtgtt

SEQ ID NO: 18168 - DNA, 16 bp, synthetic construct
  misc_feature 1..16: note = synthetic [barcode part1]
  source 1..16: mol_type = other DNA
cgttcaattaggcacg

SEQ ID NO: 18169 - DNA, 16 bp, synthetic construct
  misc_feature 1..16: note = synthetic [barcode part1]
  source 1..16: mol_type = other DNA
ttcgacaacgaggacg

SEQ ID NO: 18170 - DNA, 16 bp, synthetic construct
  misc_feature 1..16: note = synthetic [barcode part1]
  source 1..16: mol_type = other DNA
gtctcctcacgtagtg

SEQ ID NO: 18171 - DNA, 16 bp, synthetic construct
  misc_feature 1..16: note = synthetic [barcode part1]
  source 1..16: mol_type = other DNA
gcgtatatcgagactc

SEQ ID NO: 18172 - DNA, 16 bp, synthetic construct
  misc_feature 1..16: note = synthetic [barcode part1]
  source 1..16: mol_type = other DNA
aggccacaacgtgaac

SEQ ID NO: 18173 - DNA, 16 bp, synthetic construct
  misc_feature 1..16: note = synthetic [barcode part1]
  source 1..16: mol_type = other DNA
gtgttagatcacttcc

SEQ ID NO: 18174 - DNA, 16 bp, synthetic construct
  misc_feature 1..16: note = synthetic [barcode part1]
  source 1..16: mol_type = other DNA
tggactacggtaatcc

SEQ ID NO: 18175 - DNA, 16 bp, synthetic construct
  misc_feature 1..16: note = synthetic [barcode part1]
  source 1..16: mol_type = other DNA
tatctaccgagtggac

SEQ ID NO: 18176 - DNA, 16 bp, synthetic construct
  misc_feature 1..16: note = synthetic [barcode part1]
  source 1..16: mol_type = other DNA
cgtgaacacgagtctt

SEQ ID NO: 18177 - DNA, 16 bp, synthetic construct
  misc_feature 1..16: note = synthetic [barcode part1]
  source 1..16: mol_type = other DNA
gaaggaattccgagag

SEQ ID NO: 18178 - DNA, 16 bp, synthetic construct
  misc_feature 1..16: note = synthetic [barcode part1]
  source 1..16: mol_type = other DNA
ttgaggtagacctcac

SEQ ID NO: 18179 - DNA, 16 bp, synthetic construct
  misc_feature 1..16: note = synthetic [barcode part1]
  source 1..16: mol_type = other DNA
ataacgccaataccgc

SEQ ID NO: 18180 - DNA, 16 bp, synthetic construct
  misc_feature 1..16: note = synthetic [barcode part1]
  source 1..16: mol_type = other DNA
tgaacacgatcgtgtc

SEQ ID NO: 18181 - DNA, 16 bp, synthetic construct
  misc_feature 1..16: note = synthetic [barcode part1]
  source 1..16: mol_type = other DNA
attatcctcgtggatc

SEQ ID NO: 18182 - DNA, 16 bp, synthetic construct
  misc_feature 1..16: note = synthetic [barcode part1]
  source 1..16: mol_type = other DNA
gccgtctcctactatt

SEQ ID NO: 18183 - DNA, 16 bp, synthetic construct
  misc_feature 1..16: note = synthetic [barcode part1]
  source 1..16: mol_type = other DNA
aagaggtaacgcgcct

SEQ ID NO: 18184 - DNA, 16 bp, synthetic construct
  misc_feature 1..16: note = synthetic [barcode part1]
  source 1..16: mol_type = other DNA
actggcgttacacaac

SEQ ID NO: 18185 - DNA, 16 bp, synthetic construct
  misc_feature 1..16: note = synthetic [barcode part1]
  source 1..16: mol_type = other DNA
tctgtgtcagtctagt

SEQ ID NO: 18186 - DNA, 16 bp, synthetic construct
  misc_feature 1..16: note = synthetic [barcode part1]
  source 1..16: mol_type = other DNA
cggccaagtgtatatc

SEQ ID NO: 18187 - DNA, 16 bp, synthetic construct
  misc_feature 1..16: note = synthetic [barcode part1]
  source 1..16: mol_type = other DNA
ttccgtgtgtactctc

SEQ ID NO: 18188 - DNA, 16 bp, synthetic construct
  misc_feature 1..16: note = synthetic [barcode part1]
  source 1..16: mol_type = other DNA
tagacgtaccaagaac

SEQ ID NO: 18189 - DNA, 16 bp, synthetic construct
  misc_feature 1..16: note = synthetic [barcode part1]
  source 1..16: mol_type = other DNA
aatcgcacggtgtatc

SEQ ID NO: 18190 - DNA, 16 bp, synthetic construct
  misc_feature 1..16: note = synthetic [barcode part1]
  source 1..16: mol_type = other DNA
cgaagtggagtgttcg

SEQ ID NO: 18191 - DNA, 16 bp, synthetic construct
  misc_feature 1..16: note = synthetic [barcode part1]
  source 1..16: mol_type = other DNA
cgttctctccttgtag

SEQ ID NO: 18192 - DNA, 16 bp, synthetic construct
  misc_feature 1..16: note = synthetic [barcode part1]
  source 1..16: mol_type = other DNA
attcgtgcggtcttcg

SEQ ID NO: 18193 - DNA, 16 bp, synthetic construct
  misc_feature 1..16: note = synthetic [barcode part1]
  source 1..16: mol_type = other DNA
gaccaacggttagtct

SEQ ID NO: 18194 - DNA, 16 bp, synthetic construct
  misc_feature 1..16: note = synthetic [barcode part1]
  source 1..16: mol_type = other DNA
gtggtagtggacctag

SEQ ID NO: 18195 - DNA, 16 bp, synthetic construct
  misc_feature 1..16: note = synthetic [barcode part1]
  source 1..16: mol_type = other DNA
gcgcggtaatcctctt

SEQ ID NO: 18196 - DNA, 16 bp, synthetic construct
  misc_feature 1..16: note = synthetic [barcode part1]
  source 1..16: mol_type = other DNA
cctaagacacaacgtc

SEQ ID NO: 18197 - DNA, 16 bp, synthetic construct
  misc_feature 1..16: note = synthetic [barcode part1]
  source 1..16: mol_type = other DNA
gagtaggaacgttgcc

SEQ ID NO: 18198 - DNA, 16 bp, synthetic construct
  misc_feature 1..16: note = synthetic [barcode part1]
  source 1..16: mol_type = other DNA
tgcctctatacggaag

SEQ ID NO: 18199 - DNA, 16 bp, synthetic construct
  misc_feature 1..16: note = synthetic [barcode part1]
  source 1..16: mol_type = other DNA
ccttacgttctacgtc

SEQ ID NO: 18200 - DNA, 16 bp, synthetic construct
  misc_feature 1..16: note = synthetic [barcode part1]
  source 1..16: mol_type = other DNA
ttactaaccagtggcg

SEQ ID NO: 18201 - DNA, 16 bp, synthetic construct
  misc_feature 1..16: note = synthetic [barcode part1]
  source 1..16: mol_type = other DNA
acttagaaggcaacgt

SEQ ID NO: 18202 - DNA, 16 bp, synthetic construct
  misc_feature 1..16: note = synthetic [barcode part1]
  source 1..16: mol_type = other DNA
acgtgtaaggaggaac

SEQ ID NO: 18203 - DNA, 16 bp, synthetic construct
  misc_feature 1..16: note = synthetic [barcode part1]
  source 1..16: mol_type = other DNA
gcactaacaatcttcc

SEQ ID NO: 18204 - DNA, 16 bp, synthetic construct
  misc_feature 1..16: note = synthetic [barcode part1]
  source 1..16: mol_type = other DNA
tctggtcgcacactac

SEQ ID NO: 18205 - DNA, 16 bp, synthetic construct
  misc_feature 1..16: note = synthetic [barcode part1]
  source 1..16: mol_type = other DNA
cgcgtctactcttgtt

SEQ ID NO: 18206 - DNA, 16 bp, synthetic construct
  misc_feature 1..16: note = synthetic [barcode part1]
  source 1..16: mol_type = other DNA
gccttggcgatattag

SEQ ID NO: 18207 - DNA, 16 bp, synthetic construct
  misc_feature 1..16: note = synthetic [barcode part1]
  source 1..16: mol_type = other DNA
agtcggttcctagagt

SEQ ID NO: 18208 - DNA, 16 bp, synthetic construct
  misc_feature 1..16: note = synthetic [barcode part1]
  source 1..16: mol_type = other DNA
caattccgacctctct

SEQ ID NO: 18209 - DNA, 16 bp, synthetic construct
  misc_feature 1..16: note = synthetic [barcode part1]
  source 1..16: mol_type = other DNA
agtgtacaccacacac

SEQ ID NO: 18210 - DNA, 16 bp, synthetic construct
  misc_feature 1..16: note = synthetic [barcode part1]
  source 1..16: mol_type = other DNA
taccagattgtgtctc

SEQ ID NO: 18211 - DNA, 16 bp, synthetic construct
  misc_feature 1..16: note = synthetic [barcode part1]
  source 1..16: mol_type = other DNA
ttctcagtgtggttgt

SEQ ID NO: 18212 - DNA, 16 bp, synthetic construct
  misc_feature 1..16: note = synthetic [barcode part1]
  source 1..16: mol_type = other DNA
ccaggatcctggaatt

SEQ ID NO: 18213 - DNA, 16 bp, synthetic construct
  misc_feature 1..16: note = synthetic [barcode part1]
  source 1..16: mol_type = other DNA
actaagacctcctgag

SEQ ID NO: 18214 - DNA, 16 bp, synthetic construct
  misc_feature 1..16: note = synthetic [barcode part1]
  source 1..16: mol_type = other DNA
aggttaacaacgcgcg

SEQ ID NO: 18215 - DNA, 16 bp, synthetic construct
  misc_feature 1..16: note = synthetic [barcode part1]
  source 1..16: mol_type = other DNA
ccactacagtatctac

SEQ ID NO: 18216 - DNA, 16 bp, synthetic construct
  misc_feature 1..16: note = synthetic [barcode part1]
  source 1..16: mol_type = other DNA
atacaccgaaccggag

SEQ ID NO: 18217 - DNA, 16 bp, synthetic construct
  misc_feature 1..16: note = synthetic [barcode part1]
  source 1..16: mol_type = other DNA
gcaccttgtatccttc

SEQ ID NO: 18218 - DNA, 16 bp, synthetic construct
  misc_feature 1..16: note = synthetic [barcode part1]
  source 1..16: mol_type = other DNA
accgaacgcggaagtt

SEQ ID NO: 18219 - DNA, 16 bp, synthetic construct
  misc_feature 1..16: note = synthetic [barcode part1]
  source 1..16: mol_type = other DNA
cgttacctattggcgc

SEQ ID NO: 18220 - DNA, 16 bp, synthetic construct
  misc_feature 1..16: note = synthetic [barcode part1]
  source 1..16: mol_type = other DNA
agtaagaacacgactc

SEQ ID NO: 18221 - DNA, 16 bp, synthetic construct
  misc_feature 1..16: note = synthetic [barcode part1]
  source 1..16: mol_type = other DNA
attcgcctcgtctatc

SEQ ID NO: 18222 - DNA, 16 bp, synthetic construct
  misc_feature 1..16: note = synthetic [barcode part1]
  source 1..16: mol_type = other DNA
tcggatagacgtctac

SEQ ID NO: 18223 - DNA, 16 bp, synthetic construct
  misc_feature 1..16: note = synthetic [barcode part1]
  source 1..16: mol_type = other DNA
ccgacgtagtcttctg

SEQ ID NO: 18224 - DNA, 16 bp, synthetic construct
  misc_feature 1..16: note = synthetic [barcode part1]
  source 1..16: mol_type = other DNA
tgtggtaccacttatc

SEQ ID NO: 18225 - DNA, 16 bp, synthetic construct
  misc_feature 1..16: note = synthetic [barcode part1]
  source 1..16: mol_type = other DNA
ttgatatcctcagtcg

SEQ ID NO: 18226 - DNA, 16 bp, synthetic construct
  misc_feature 1..16: note = synthetic [barcode part1]
  source 1..16: mol_type = other DNA
tgttcgcctatctgtc

SEQ ID NO: 18227 - DNA, 16 bp, synthetic construct
  misc_feature 1..16: note = synthetic [barcode part1]
  source 1..16: mol_type = other DNA
cctagagattgcgact

SEQ ID NO: 18228 - DNA, 16 bp, synthetic construct
  misc_feature 1..16: note = synthetic [barcode part1]
  source 1..16: mol_type = other DNA
taccgtctctaacctc

SEQ ID NO: 18229 - DNA, 16 bp, synthetic construct
  misc_feature 1..16: note = synthetic [barcode part1]
  source 1..16: mol_type = other DNA
caacagtggttactgc

SEQ ID NO: 18230 - DNA, 16 bp, synthetic construct
  misc_feature 1..16: note = synthetic [barcode part1]
  source 1..16: mol_type = other DNA
cagatctaggtggcag

SEQ ID NO: 18231 - DNA, 16 bp, synthetic construct
  misc_feature 1..16: note = synthetic [barcode part1]
  source 1..16: mol_type = other DNA
ccttgtacacgagagt

SEQ ID NO: 18232 - DNA, 16 bp, synthetic construct
  misc_feature 1..16: note = synthetic [barcode part1]
  source 1..16: mol_type = other DNA
cgcgagtcagatattc

SEQ ID NO: 18233 - DNA, 16 bp, synthetic construct
  misc_feature 1..16: note = synthetic [barcode part1]
  source 1..16: mol_type = other DNA
actcctgacgatccac

SEQ ID NO: 18234 - DNA, 16 bp, synthetic construct
  misc_feature 1..16: note = synthetic [barcode part1]
  source 1..16: mol_type = other DNA
gtaccaagtgtgactc

SEQ ID NO: 18235 - DNA, 16 bp, synthetic construct
  misc_feature 1..16: note = synthetic [barcode part1]
  source 1..16: mol_type = other DNA
cacgattggaacggtg

SEQ ID NO: 18236 - DNA, 16 bp, synthetic construct
  misc_feature 1..16: note = synthetic [barcode part1]
  source 1..16: mol_type = other DNA
ttctggttcagtgtgt

SEQ ID NO: 18237 - DNA, 16 bp, synthetic construct
  misc_feature 1..16: note = synthetic [barcode part1]
  source 1..16: mol_type = other DNA
actcgtcgaacagatc

SEQ ID NO: 18238 - DNA, 16 bp, synthetic construct
  misc_feature 1..16: note = synthetic [barcode part1]
  source 1..16: mol_type = other DNA
ttccgcgagaagtgtt

SEQ ID NO: 18239 - DNA, 16 bp, synthetic construct
  misc_feature 1..16: note = synthetic [barcode part1]
  source 1..16: mol_type = other DNA
ttattgccgaggcaac

SEQ ID NO: 18240 - DNA, 16 bp, synthetic construct
  misc_feature 1..16: note = synthetic [barcode part1]
  source 1..16: mol_type = other DNA
atcgatcaaccggttg

SEQ ID NO: 18241 - DNA, 16 bp, synthetic construct
  misc_feature 1..16: note = synthetic [barcode part1]
  source 1..16: mol_type = other DNA
tcacaccttgttgaac

SEQ ID NO: 18242 - DNA, 16 bp, synthetic construct
  misc_feature 1..16: note = synthetic [barcode part1]
  source 1..16: mol_type = other DNA
cacaagtcaggtgttc

SEQ ID NO: 18243 - DNA, 16 bp, synthetic construct
  misc_feature 1..16: note = synthetic [barcode part1]
  source 1..16: mol_type = other DNA
caagaccttgatcggt

SEQ ID NO: 18244 - DNA, 16 bp, synthetic construct
  misc_feature 1..16: note = synthetic [barcode part1]
  source 1..16: mol_type = other DNA
tgagacgtcgtgtgag

SEQ ID NO: 18245 - DNA, 16 bp, synthetic construct
  misc_feature 1..16: note = synthetic [barcode part1]
  source 1..16: mol_type = other DNA
tacgactctaggtacg

SEQ ID NO: 18246 - DNA, 16 bp, synthetic construct
  misc_feature 1..16: note = synthetic [barcode part1]
  source 1..16: mol_type = other DNA
tacctaggatctgcag

SEQ ID NO: 18247 - DNA, 16 bp, synthetic construct
  misc_feature 1..16: note = synthetic [barcode part1]
  source 1..16: mol_type = other DNA
gttggagatcgacacg

SEQ ID NO: 18248 - DNA, 16 bp, synthetic construct
  misc_feature 1..16: note = synthetic [barcode part1]
  source 1..16: mol_type = other DNA
accacctgatacttac

SEQ ID NO: 18249 - DNA, 16 bp, synthetic construct
  misc_feature 1..16: note = synthetic [barcode part1]
  source 1..16: mol_type = other DNA
ttcctaacgacacgcc

SEQ ID NO: 18250 - DNA, 16 bp, synthetic construct
  misc_feature 1..16: note = synthetic [barcode part1]
  source 1..16: mol_type = other DNA
taacggccgtaggagt

SEQ ID NO: 18251 - DNA, 16 bp, synthetic construct
  misc_feature 1..16: note = synthetic [barcode part1]
  source 1..16: mol_type = other DNA
acgccgaccttattgc

SEQ ID NO: 18252 - DNA, 16 bp, synthetic construct
  misc_feature 1..16: note = synthetic [barcode part1]
  source 1..16: mol_type = other DNA
gatccaatcttcgtac

SEQ ID NO: 18253 - DNA, 16 bp, synthetic construct
  misc_feature 1..16: note = synthetic [barcode part1]
  source 1..16: mol_type = other DNA
gatcttggcgaacgag

SEQ ID NO: 18254 - DNA, 16 bp, synthetic construct
  misc_feature 1..16: note = synthetic [barcode part1]
  source 1..16: mol_type = other DNA
tgagtacttggtgtgc

SEQ ID NO: 18255 - DNA, 16 bp, synthetic construct
  misc_feature 1..16: note = synthetic [barcode part1]
  source 1..16: mol_type = other DNA
tacaggcctcactatt

SEQ ID NO: 18256 - DNA, 16 bp, synthetic construct
  misc_feature 1..16: note = synthetic [barcode part1]
  source 1..16: mol_type = other DNA
cacttagactaccttg

SEQ ID NO: 18257 - DNA, 16 bp, synthetic construct
  misc_feature 1..16: note = synthetic [barcode part1]
  source 1..16: mol_type = other DNA
acagttgacacgttgc

SEQ ID NO: 18258 - DNA, 16 bp, synthetic construct
  misc_feature 1..16: note = synthetic [barcode part1]
  source 1..16: mol_type = other DNA
tcaacctcgttagtgt

SEQ ID NO: 18259 - DNA, 16 bp, synthetic construct
  misc_feature 1..16: note = synthetic [barcode part1]
  source 1..16: mol_type = other DNA
aatctctccagtgcgc

SEQ ID NO: 18260 - DNA, 16 bp, synthetic construct
  misc_feature 1..16: note = synthetic [barcode part1]
  source 1..16: mol_type = other DNA
cgtcttggtcttgttc

SEQ ID NO: 18261 - DNA, 16 bp, synthetic construct
  misc_feature 1..16: note = synthetic [barcode part1]
  source 1..16: mol_type = other DNA
tcgtaccgaatcgtcc

SEQ ID NO: 18262 - DNA, 16 bp, synthetic construct
  misc_feature 1..16: note = synthetic [barcode part1]
  source 1..16: mol_type = other DNA
actagtggagtcggac

SEQ ID NO: 18263 - DNA, 16 bp, synthetic construct
  misc_feature 1..16: note = synthetic [barcode part1]
  source 1..16: mol_type = other DNA
tgtgtgaagtggtaac

SEQ ID NO: 18264 - DNA, 16 bp, synthetic construct
  misc_feature 1..16: note = synthetic [barcode part1]
  source 1..16: mol_type = other DNA
tctctgagtgtcaact

SEQ ID NO: 18265 - DNA, 16 bp, synthetic construct
  misc_feature 1..16: note = synthetic [barcode part1]
  source 1..16: mol_type = other DNA
gagtctaggtaacaac

SEQ ID NO: 18266 - DNA, 16 bp, synthetic construct
  misc_feature 1..16: note = synthetic [barcode part1]
  source 1..16: mol_type = other DNA
tcgtagactacgtgac

SEQ ID NO: 18267 - DNA, 16 bp, synthetic construct
  misc_feature 1..16: note = synthetic [barcode part1]
  source 1..16: mol_type = other DNA
acggcgtactataacc

SEQ ID NO: 18268 - DNA, 16 bp, synthetic construct
  misc_feature 1..16: note = synthetic [barcode part1]
  source 1..16: mol_type = other DNA
gtgtggttacgatcgt

SEQ ID NO: 18269 - DNA, 16 bp, synthetic construct
  misc_feature 1..16: note = synthetic [barcode part1]
  source 1..16: mol_type = other DNA
ccacttcgattatacg

SEQ ID NO: 18270 - DNA, 16 bp, synthetic construct
  misc_feature 1..16: note = synthetic [barcode part1]
  source 1..16: mol_type = other DNA
ccaacgcgaaggattg

SEQ ID NO: 18271 - DNA, 16 bp, synthetic construct
  misc_feature 1..16: note = synthetic [barcode part1]
  source 1..16: mol_type = other DNA
acgttcaacttcgccg

SEQ ID NO: 18272 - DNA, 16 bp, synthetic construct
  misc_feature 1..16: note = synthetic [barcode part1]
  source 1..16: mol_type = other DNA
tggtcagactggttgt

SEQ ID NO: 18273 - DNA, 16 bp, synthetic construct
  misc_feature 1..16: note = synthetic [barcode part1]
  source 1..16: mol_type = other DNA
agtatcgtgaccgatc

SEQ ID NO: 18274 - DNA, 16 bp, synthetic construct
  misc_feature 1..16: note = synthetic [barcode part1]
  source 1..16: mol_type = other DNA
ccgcactgtctagtgt

SEQ ID NO: 18275 - DNA, 16 bp, synthetic construct
  misc_feature 1..16: note = synthetic [barcode part1]
  source 1..16: mol_type = other DNA
taacacctacttaccg

SEQ ID NO: 18276 - DNA, 16 bp, synthetic construct
  misc_feature 1..16: note = synthetic [barcode part1]
  source 1..16: mol_type = other DNA
accacggtgtctgttc

SEQ ID NO: 18277 - DNA, 16 bp, synthetic construct
  misc_feature 1..16: note = synthetic [barcode part1]
  source 1..16: mol_type = other DNA
cgaacttgtgatagag

SEQ ID NO: 18278 - DNA, 16 bp, synthetic construct
  misc_feature 1..16: note = synthetic [barcode part1]
  source 1..16: mol_type = other DNA
gcaccaataatcctct

SEQ ID NO: 18279 - DNA, 16 bp, synthetic construct
  misc_feature 1..16: note = synthetic [barcode part1]
  source 1..16: mol_type = other DNA
tcggccttgaggaatt

SEQ ID NO: 18280 - DNA, 16 bp, synthetic construct
  misc_feature 1..16: note = synthetic [barcode part1]
  source 1..16: mol_type = other DNA
tacaagatcgacggcg

SEQ ID NO: 18281 - DNA, 16 bp, synthetic construct
  misc_feature 1..16: note = synthetic [barcode part1]
  source 1..16: mol_type = other DNA
acacgactagtgcact

SEQ ID NO: 18282 - DNA, 16 bp, synthetic construct
  misc_feature 1..16: note = synthetic [barcode part1]
  source 1..16: mol_type = other DNA
tcgtcaatcctcgcag

SEQ ID NO: 18283 - DNA, 16 bp, synthetic construct
  misc_feature 1..16: note = synthetic [barcode part1]
  source 1..16: mol_type = other DNA
gacttagttgagtcgc

SEQ ID NO: 18284 - DNA, 16 bp, synthetic construct
  misc_feature 1..16: note = synthetic [barcode part1]
  source 1..16: mol_type = other DNA
atcgtgtcaacctccg

SEQ ID NO: 18285 - DNA, 16 bp, synthetic construct
  misc_feature 1..16: note = synthetic [barcode part1]
  source 1..16: mol_type = other DNA
tgtcggagtaagaact

SEQ ID NO: 18286 - DNA, 16 bp, synthetic construct
  misc_feature 1..16: note = synthetic [barcode part1]
  source 1..16: mol_type = other DNA
agtccaactgacaacc

SEQ ID NO: 18287 - DNA, 16 bp, synthetic construct
  misc_feature 1..16: note = synthetic [barcode part1]
  source 1..16: mol_type = other DNA
agagatatctgacgac

SEQ ID NO: 18288 - DNA, 16 bp, synthetic construct
  misc_feature 1..16: note = synthetic [barcode part1]
  source 1..16: mol_type = other DNA
gacctctcgtgttgac

SEQ ID NO: 18289 - DNA, 16 bp, synthetic construct
  misc_feature 1..16: note = synthetic [barcode part1]
  source 1..16: mol_type = other DNA
agtccaagactcgatc

SEQ ID NO: 18290 - DNA, 16 bp, synthetic construct
  misc_feature 1..16: note = synthetic [barcode part1]
  source 1..16: mol_type = other DNA
ttgccacgtgagtctc

SEQ ID NO: 18291 - DNA, 16 bp, synthetic construct
  misc_feature 1..16: note = synthetic [barcode part1]
  source 1..16: mol_type = other DNA
cctcaacctagacacc

SEQ ID NO: 18292 - DNA, 16 bp, synthetic construct
  misc_feature 1..16: note = synthetic [barcode part1]
  source 1..16: mol_type = other DNA
aggacaaccgcgagtt

SEQ ID NO: 18293 - DNA, 16 bp, synthetic construct
  misc_feature 1..16: note = synthetic [barcode part1]
  source 1..16: mol_type = other DNA
actgaggatatcaacg

SEQ ID NO: 18294 - DNA, 16 bp, synthetic construct
  misc_feature 1..16: note = synthetic [barcode part1]
  source 1..16: mol_type = other DNA
cacgtaataaggaacc

SEQ ID NO: 18295 - DNA, 16 bp, synthetic construct
  misc_feature 1..16: note = synthetic [barcode part1]
  source 1..16: mol_type = other DNA
agagttacgacaggag

SEQ ID NO: 18296 - DNA, 16 bp, synthetic construct
  misc_feature 1..16: note = synthetic [barcode part1]
  source 1..16: mol_type = other DNA
tcagtgtcctctcgag

SEQ ID NO: 18297 - DNA, 16 bp, synthetic construct
  misc_feature 1..16: note = synthetic [barcode part1]
  source 1..16: mol_type = other DNA
ttgactccgagaggtt

SEQ ID NO: 18298 - DNA, 16 bp, synthetic construct
  misc_feature 1..16: note = synthetic [barcode part1]
  source 1..16: mol_type = other DNA
aggcgtcctatcttgc

SEQ ID NO: 18299 - DNA, 16 bp, synthetic construct
  misc_feature 1..16: note = synthetic [barcode part1]
  source 1..16: mol_type = other DNA
gtcacagtaggcgagt

SEQ ID NO: 18300 - DNA, 16 bp, synthetic construct
  misc_feature 1..16: note = synthetic [barcode part1]
  source 1..16: mol_type = other DNA
gaggagttatctcgtc

SEQ ID NO: 18301 - DNA, 16 bp, synthetic construct
  misc_feature 1..16: note = synthetic [barcode part1]
  source 1..16: mol_type = other DNA
aggtctgtagacctgt

SEQ ID NO: 18302 - DNA, 16 bp, synthetic construct
  misc_feature 1..16: note = synthetic [barcode part1]
  source 1..16: mol_type = other DNA
tacttggatcgttctg

SEQ ID NO: 18303 - DNA, 16 bp, synthetic construct
  misc_feature 1..16: note = synthetic [barcode part1]
  source 1..16: mol_type = other DNA
gtgcacaacacgtgtt

SEQ ID NO: 18304 - DNA, 16 bp, synthetic construct
  misc_feature 1..16: note = synthetic [barcode part1]
  source 1..16: mol_type = other DNA
ccaactctagagaacc

SEQ ID NO: 18305 - DNA, 16 bp, synthetic construct
  misc_feature 1..16: note = synthetic [barcode part1]
  source 1..16: mol_type = other DNA
gtgccgatagttcctc

SEQ ID NO: 18306 - DNA, 16 bp, synthetic construct
  misc_feature 1..16: note = synthetic [barcode part1]
  source 1..16: mol_type = other DNA
ccaggtgttgccttac

SEQ ID NO: 18307 - DNA, 16 bp, synthetic construct
  misc_feature 1..16: note = synthetic [barcode part1]
  source 1..16: mol_type = other DNA
aggtagaggcaccgtt

SEQ ID NO: 18308 - DNA, 16 bp, synthetic construct
  misc_feature 1..16: note = synthetic [barcode part1]
  source 1..16: mol_type = other DNA
tgagtggcacttgttg

SEQ ID NO: 18309 - DNA, 16 bp, synthetic construct
  misc_feature 1..16: note = synthetic [barcode part1]
  source 1..16: mol_type = other DNA
atccgtagatccacag

SEQ ID NO: 18310 - DNA, 16 bp, synthetic construct
  misc_feature 1..16: note = synthetic [barcode part1]
  source 1..16: mol_type = other DNA
cacctaacttcgttag

SEQ ID NO: 18311 - DNA, 16 bp, synthetic construct
  misc_feature 1..16: note = synthetic [barcode part1]
  source 1..16: mol_type = other DNA
tggcgcaactatcctc

SEQ ID NO: 18312 - DNA, 16 bp, synthetic construct
  misc_feature 1..16: note = synthetic [barcode part1]
  source 1..16: mol_type = other DNA
agactcgaataacggt

SEQ ID NO: 18313 - DNA, 16 bp, synthetic construct
  misc_feature 1..16: note = synthetic [barcode part1]
  source 1..16: mol_type = other DNA
agtactcgatacgtcg

SEQ ID NO: 18314 - DNA, 16 bp, synthetic construct
  misc_feature 1..16: note = synthetic [barcode part1]
  source 1..16: mol_type = other DNA
acacagtgtgtactgc

SEQ ID NO: 18315 - DNA, 16 bp, synthetic construct
  misc_feature 1..16: note = synthetic [barcode part1]
  source 1..16: mol_type = other DNA
tatagtaccgcaacgc

SEQ ID NO: 18316 - DNA, 16 bp, synthetic construct
  misc_feature 1..16: note = synthetic [barcode part1]
  source 1..16: mol_type = other DNA
tgtagacgtccgtaac

SEQ ID NO: 18317 - DNA, 16 bp, synthetic construct
  misc_feature 1..16: note = synthetic [barcode part1]
  source 1..16: mol_type = other DNA
cgccacacagtattag

SEQ ID NO: 18318 - DNA, 16 bp, synthetic construct
  misc_feature 1..16: note = synthetic [barcode part1]
  source 1..16: mol_type = other DNA
acgcagattgttagag

SEQ ID NO: 18319 - DNA, 16 bp, synthetic construct
  misc_feature 1..16: note = synthetic [barcode part1]
  source 1..16: mol_type = other DNA
ataatacacgccgcac

SEQ ID NO: 18320 - DNA, 16 bp, synthetic construct
  misc_feature 1..16: note = synthetic [barcode part1]
  source 1..16: mol_type = other DNA
tgacgttcactgcaag

SEQ ID NO: 18321 - DNA, 16 bp, synthetic construct
  misc_feature 1..16: note = synthetic [barcode part1]
  source 1..16: mol_type = other DNA
taatcgacggccgatt

SEQ ID NO: 18322 - DNA, 16 bp, synthetic construct
  misc_feature 1..16: note = synthetic [barcode part1]
  source 1..16: mol_type = other DNA
ccgaataattcgcgac

SEQ ID NO: 18323 - DNA, 16 bp, synthetic construct
  misc_feature 1..16: note = synthetic [barcode part1]
  source 1..16: mol_type = other DNA
gttcactcactcacct

SEQ ID NO: 18324 - DNA, 16 bp, synthetic construct
  misc_feature 1..16: note = synthetic [barcode part1]
  source 1..16: mol_type = other DNA
atctccactgtgtcct

SEQ ID NO: 18325 - DNA, 16 bp, synthetic construct
  misc_feature 1..16: note = synthetic [barcode part1]
  source 1..16: mol_type = other DNA
tgatagtgcactcctt

SEQ ID NO: 18326 - DNA, 16 bp, synthetic construct
  misc_feature 1..16: note = synthetic [barcode part1]
  source 1..16: mol_type = other DNA
cggtcctcgcacaatt

SEQ ID NO: 18327 - DNA, 16 bp, synthetic construct
  misc_feature 1..16: note = synthetic [barcode part1]
  source 1..16: mol_type = other DNA
gacgtgtggaggactt

SEQ ID NO: 18328 - DNA, 16 bp, synthetic construct
  misc_feature 1..16: note = synthetic [barcode part1]
  source 1..16: mol_type = other DNA
cgtggtaattccaggt

SEQ ID NO: 18329 - DNA, 16 bp, synthetic construct
  misc_feature 1..16: note = synthetic [barcode part1]
  source 1..16: mol_type = other DNA
tagagaggtcggcact

SEQ ID NO: 18330 - DNA, 16 bp, synthetic construct
  misc_feature 1..16: note = synthetic [barcode part1]
  source 1..16: mol_type = other DNA
gttagacttcagtggc

SEQ ID NO: 18331 - DNA, 16 bp, synthetic construct
  misc_feature 1..16: note = synthetic [barcode part1]
  source 1..16: mol_type = other DNA
aagtacaacgcgagag

SEQ ID NO: 18332 - DNA, 16 bp, synthetic construct
  misc_feature 1..16: note = synthetic [barcode part1]
  source 1..16: mol_type = other DNA
gaaccgtgaactacct

SEQ ID NO: 18333 - DNA, 16 bp, synthetic construct
  misc_feature 1..16: note = synthetic [barcode part1]
  source 1..16: mol_type = other DNA
tattcaccgttgtgac

SEQ ID NO: 18334 - DNA, 16 bp, synthetic construct
  misc_feature 1..16: note = synthetic [barcode part1]
  source 1..16: mol_type = other DNA
aataccgccttggaac

SEQ ID NO: 18335 - DNA, 16 bp, synthetic construct
  misc_feature 1..16: note = synthetic [barcode part1]
  source 1..16: mol_type = other DNA
ttccttacgtcggcag

SEQ ID NO: 18336 - DNA, 16 bp, synthetic construct
  misc_feature 1..16: note = synthetic [barcode part1]
  source 1..16: mol_type = other DNA
aagttgcaccttcgcc

SEQ ID NO: 18337 - DNA, 16 bp, synthetic construct
  misc_feature 1..16: note = synthetic [barcode part1]
  source 1..16: mol_type = other DNA
atattgactggtgcgc

SEQ ID NO: 18338 - DNA, 16 bp, synthetic construct
  misc_feature 1..16: note = synthetic [barcode part1]
  source 1..16: mol_type = other DNA
tcggtgaccactaagt

SEQ ID NO: 18339 - DNA, 16 bp, synthetic construct
  misc_feature 1..16: note = synthetic [barcode part1]
  source 1..16: mol_type = other DNA
acaactacggtcacgt

SEQ ID NO: 18340 - DNA, 16 bp, synthetic construct
  misc_feature 1..16: note = synthetic [barcode part1]
  source 1..16: mol_type = other DNA
tactcgccttactcac

SEQ ID NO: 18341 - DNA, 16 bp, synthetic construct
  misc_feature 1..16: note = synthetic [barcode part1]
  source 1..16: mol_type = other DNA
tgagtaatccaaggtg

SEQ ID NO: 18342 - DNA, 16 bp, synthetic construct
  misc_feature 1..16: note = synthetic [barcode part1]
  source 1..16: mol_type = other DNA
ttggacttcagtggtg

SEQ ID NO: 18343 - DNA, 16 bp, synthetic construct
  misc_feature 1..16: note = synthetic [barcode part1]
  source 1..16: mol_type = other DNA
tccgccactctattgt

SEQ ID NO: 18344 - DNA, 16 bp, synthetic construct
  misc_feature 1..16: note = synthetic [barcode part1]
  source 1..16: mol_type = other DNA
gataagacctccgatc

SEQ ID NO: 18345 - DNA, 16 bp, synthetic construct
  misc_feature 1..16: note = synthetic [barcode part1]
  source 1..16: mol_type = other DNA
tgcggcgtgttcactt

SEQ ID NO: 18346 - DNA, 16 bp, synthetic construct
  misc_feature 1..16: note = synthetic [barcode part1]
  source 1..16: mol_type = other DNA
aacgatcttggatcgc

SEQ ID NO: 18347 - DNA, 16 bp, synthetic construct
  misc_feature 1..16: note = synthetic [barcode part1]
  source 1..16: mol_type = other DNA
accagtaacctggatc

SEQ ID NO: 18348 - DNA, 16 bp, synthetic construct
  misc_feature 1..16: note = synthetic [barcode part1]
  source 1..16: mol_type = other DNA
tgtacttagaccactc

SEQ ID NO: 18349 - DNA, 16 bp, synthetic construct
  misc_feature 1..16: note = synthetic [barcode part1]
  source 1..16: mol_type = other DNA
cgttgatcttcctaag

SEQ ID NO: 18350 - DNA, 16 bp, synthetic construct
  misc_feature 1..16: note = synthetic [barcode part1]
  source 1..16: mol_type = other DNA
gcaatctcaccaagtg

SEQ ID NO: 18351 - DNA, 16 bp, synthetic construct
  misc_feature 1..16: note = synthetic [barcode part1]
  source 1..16: mol_type = other DNA
acgattgattggtgcc

SEQ ID NO: 18352 - DNA, 16 bp, synthetic construct
  misc_feature 1..16: note = synthetic [barcode part1]
  source 1..16: mol_type = other DNA
accttatactctccgc

SEQ ID NO: 18353 - DNA, 16 bp, synthetic construct
  misc_feature 1..16: note = synthetic [barcode part1]
  source 1..16: mol_type = other DNA
ttacgttgcgattcac

SEQ ID NO: 18354 - DNA, 16 bp, synthetic construct
  misc_feature 1..16: note = synthetic [barcode part1]
  source 1..16: mol_type = other DNA
actaagtgcgagaact

SEQ ID NO: 18355 - DNA, 16 bp, synthetic construct
  misc_feature 1..16: note = synthetic [barcode part1]
  source 1..16: mol_type = other DNA
tacttggatcgagaag

SEQ ID NO: 18356 - DNA, 16 bp, synthetic construct
  misc_feature 1..16: note = synthetic [barcode part1]
  source 1..16: mol_type = other DNA
cgaacgcactatcctc

SEQ ID NO: 18357 - DNA, 16 bp, synthetic construct
  misc_feature 1..16: note = synthetic [barcode part1]
  source 1..16: mol_type = other DNA
gtgttgatcctattgc

SEQ ID NO: 18358 - DNA, 16 bp, synthetic construct
  misc_feature 1..16: note = synthetic [barcode part1]
  source 1..16: mol_type = other DNA
cgtattgtgatacgcg

SEQ ID NO: 18359 - DNA, 16 bp, synthetic construct
  misc_feature 1..16: note = synthetic [barcode part1]
  source 1..16: mol_type = other DNA
acgccgagagataacc

SEQ ID NO: 18360 - DNA, 16 bp, synthetic construct
  misc_feature 1..16: note = synthetic [barcode part1]
  source 1..16: mol_type = other DNA
aacgtacacgtcagtc

SEQ ID NO: 18361 - DNA, 16 bp, synthetic construct
  misc_feature 1..16: note = synthetic [barcode part1]
  source 1..16: mol_type = other DNA
agtactgacaccacac

SEQ ID NO: 18362 - DNA, 16 bp, synthetic construct
  misc_feature 1..16: note = synthetic [barcode part1]
  source 1..16: mol_type = other DNA
cggtcttactgtgcac

SEQ ID NO: 18363 - DNA, 16 bp, synthetic construct
  misc_feature 1..16: note = synthetic [barcode part1]
  source 1..16: mol_type = other DNA
gagactcggcaagtgt

SEQ ID NO: 18364 - DNA, 16 bp, synthetic construct
  misc_feature 1..16: note = synthetic [barcode part1]
  source 1..16: mol_type = other DNA
gcagtcgccttagttc

SEQ ID NO: 18365 - DNA, 16 bp, synthetic construct
  misc_feature 1..16: note = synthetic [barcode part1]
  source 1..16: mol_type = other DNA
ccacttgtcacttacc

SEQ ID NO: 18366 - DNA, 16 bp, synthetic construct
  misc_feature 1..16: note = synthetic [barcode part1]
  source 1..16: mol_type = other DNA
gcgatacgattgacct

SEQ ID NO: 18367 - DNA, 16 bp, synthetic construct
  misc_feature 1..16: note = synthetic [barcode part1]
  source 1..16: mol_type = other DNA
ttgtacctctggcggt

SEQ ID NO: 18368 - DNA, 16 bp, synthetic construct
  misc_feature 1..16: note = synthetic [barcode part1]
  source 1..16: mol_type = other DNA
cgtctcactacaggtc

SEQ ID NO: 18369 - DNA, 16 bp, synthetic construct
  misc_feature 1..16: note = synthetic [barcode part1]
  source 1..16: mol_type = other DNA
gttctgacctcagaag

SEQ ID NO: 18370 - DNA, 16 bp, synthetic construct
  misc_feature 1..16: note = synthetic [barcode part1]
  source 1..16: mol_type = other DNA
tgatctcaggactggt

SEQ ID NO: 18371 - DNA, 16 bp, synthetic construct
  misc_feature 1..16: note = synthetic [barcode part1]
  source 1..16: mol_type = other DNA
acaacgtgactggttc

SEQ ID NO: 18372 - DNA, 16 bp, synthetic construct
  misc_feature 1..16: note = synthetic [barcode part1]
  source 1..16: mol_type = other DNA
tcgtcggaacttaacg

SEQ ID NO: 18373 - DNA, 16 bp, synthetic construct
  misc_feature 1..16: note = synthetic [barcode part1]
  source 1..16: mol_type = other DNA
aatcttcgattcacgc

SEQ ID NO: 18374 - DNA, 16 bp, synthetic construct
  misc_feature 1..16: note = synthetic [barcode part1]
  source 1..16: mol_type = other DNA
actgaggtacgaccag

SEQ ID NO: 18375 - DNA, 16 bp, synthetic construct
  misc_feature 1..16: note = synthetic [barcode part1]
  source 1..16: mol_type = other DNA
gtagagaactactggt

SEQ ID NO: 18376 - DNA, 16 bp, synthetic construct
  misc_feature 1..16: note = synthetic [barcode part1]
  source 1..16: mol_type = other DNA
cagacttcacctagag

SEQ ID NO: 18377 - DNA, 16 bp, synthetic construct
  misc_feature 1..16: note = synthetic [barcode part1]
  source 1..16: mol_type = other DNA
tctagtccaactacgt

SEQ ID NO: 18378 - DNA, 16 bp, synthetic construct
  misc_feature 1..16: note = synthetic [barcode part1]
  source 1..16: mol_type = other DNA
gtcctaactctcttcg

SEQ ID NO: 18379 - DNA, 16 bp, synthetic construct
  misc_feature 1..16: note = synthetic [barcode part1]
  source 1..16: mol_type = other DNA
aacctcaggacgaacg

SEQ ID NO: 18380 - DNA, 16 bp, synthetic construct
  misc_feature 1..16: note = synthetic [barcode part1]
  source 1..16: mol_type = other DNA
taggtgttcttatcgc

SEQ ID NO: 18381 - DNA, 16 bp, synthetic construct
  misc_feature 1..16: note = synthetic [barcode part1]
  source 1..16: mol_type = other DNA
gtactcctggttcgac

SEQ ID NO: 18382 - DNA, 16 bp, synthetic construct
  misc_feature 1..16: note = synthetic [barcode part1]
  source 1..16: mol_type = other DNA
gcagacagtagacaag

SEQ ID NO: 18383 - DNA, 16 bp, synthetic construct
  misc_feature 1..16: note = synthetic [barcode part1]
  source 1..16: mol_type = other DNA
tcaaggtccacctgtc

SEQ ID NO: 18384 - DNA, 16 bp, synthetic construct
  misc_feature 1..16: note = synthetic [barcode part1]
  source 1..16: mol_type = other DNA
tcacgtcgtgatctgc

SEQ ID NO: 18385 - DNA, 16 bp, synthetic construct
  misc_feature 1..16: note = synthetic [barcode part1]
  source 1..16: mol_type = other DNA
cgtgtcgttccgattg

SEQ ID NO: 18386 - DNA, 16 bp, synthetic construct
  misc_feature 1..16: note = synthetic [barcode part1]
  source 1..16: mol_type = other DNA
gttcgtcgcaatattc

SEQ ID NO: 18387 - DNA, 16 bp, synthetic construct
  misc_feature 1..16: note = synthetic [barcode part1]
  source 1..16: mol_type = other DNA
tactggtacaccaacg

SEQ ID NO: 18388 - DNA, 16 bp, synthetic construct
  misc_feature 1..16: note = synthetic [barcode part1]
  source 1..16: mol_type = other DNA
agtactgtgtggtgtc

SEQ ID NO: 18389 - DNA, 16 bp, synthetic construct
  misc_feature 1..16: note = synthetic [barcode part1]
  source 1..16: mol_type = other DNA
acgaactgcgtctaac

SEQ ID NO: 18390 - DNA, 16 bp, synthetic construct
  misc_feature 1..16: note = synthetic [barcode part1]
  source 1..16: mol_type = other DNA
cgaccaacaacgttgt

SEQ ID NO: 18391 - DNA, 16 bp, synthetic construct
  misc_feature 1..16: note = synthetic [barcode part1]
  source 1..16: mol_type = other DNA
cacgtgatccgatcct

SEQ ID NO: 18392 - DNA, 16 bp, synthetic construct
  misc_feature 1..16: note = synthetic [barcode part1]
  source 1..16: mol_type = other DNA
cctgtacggttgtcac

SEQ ID NO: 18393 - DNA, 16 bp, synthetic construct
  misc_feature 1..16: note = synthetic [barcode part1]
  source 1..16: mol_type = other DNA
gactagtgagatctcc

SEQ ID NO: 18394 - DNA, 16 bp, synthetic construct
  misc_feature 1..16: note = synthetic [barcode part1]
  source 1..16: mol_type = other DNA
cgaagaatcaggaggt

SEQ ID NO: 18395 - DNA, 16 bp, synthetic construct
  misc_feature 1..16: note = synthetic [barcode part1]
  source 1..16: mol_type = other DNA
actgagtacagaagtc

SEQ ID NO: 18396 - DNA, 16 bp, synthetic construct
  misc_feature 1..16: note = synthetic [barcode part1]
  source 1..16: mol_type = other DNA
aactgtcgcgagagtg

SEQ ID NO: 18397 - DNA, 16 bp, synthetic construct
  misc_feature 1..16: note = synthetic [barcode part1]
  source 1..16: mol_type = other DNA
aattgagatctaggcg

SEQ ID NO: 18398 - DNA, 16 bp, synthetic construct
  misc_feature 1..16: note = synthetic [barcode part1]
  source 1..16: mol_type = other DNA
gattcaggcgcagaac

SEQ ID NO: 18399 - DNA, 16 bp, synthetic construct
  misc_feature 1..16: note = synthetic [barcode part1]
  source 1..16: mol_type = other DNA
caagtgcaaggattgt

SEQ ID NO: 18400 - DNA, 16 bp, synthetic construct
  misc_feature 1..16: note = synthetic [barcode part1]
  source 1..16: mol_type = other DNA
gaacgtgtggcaactg

SEQ ID NO: 18401 - DNA, 16 bp, synthetic construct
  misc_feature 1..16: note = synthetic [barcode part1]
  source 1..16: mol_type = other DNA
actacgtcaacaagag

SEQ ID NO: 18402 - DNA, 16 bp, synthetic construct
  misc_feature 1..16: note = synthetic [barcode part1]
  source 1..16: mol_type = other DNA
aatatctgcctctcag

SEQ ID NO: 18403 - DNA, 16 bp, synthetic construct
  misc_feature 1..16: note = synthetic [barcode part1]
  source 1..16: mol_type = other DNA
atccggcctcctatag

SEQ ID NO: 18404 - DNA, 16 bp, synthetic construct
  misc_feature 1..16: note = synthetic [barcode part1]
  source 1..16: mol_type = other DNA
cagacagtggatagag

SEQ ID NO: 18405 - DNA, 16 bp, synthetic construct
  misc_feature 1..16: note = synthetic [barcode part1]
  source 1..16: mol_type = other DNA
agttacgcaactacgc

SEQ ID NO: 18406 - DNA, 16 bp, synthetic construct
  misc_feature 1..16: note = synthetic [barcode part1]
  source 1..16: mol_type = other DNA
tatccgaactatcctg

SEQ ID NO: 18407 - DNA, 16 bp, synthetic construct
  misc_feature 1..16: note = synthetic [barcode part1]
  source 1..16: mol_type = other DNA
aagtctgtccaatctc

SEQ ID NO: 18408 - DNA, 16 bp, synthetic construct
  misc_feature 1..16: note = synthetic [barcode part1]
  source 1..16: mol_type = other DNA
aacactaccgagacct

SEQ ID NO: 18409 - DNA, 16 bp, synthetic construct
  misc_feature 1..16: note = synthetic [barcode part1]
  source 1..16: mol_type = other DNA
tagtcgatacgtgtgc

SEQ ID NO: 18410 - DNA, 16 bp, synthetic construct
  misc_feature 1..16: note = synthetic [barcode part1]
  source 1..16: mol_type = other DNA
cctaagacgcgtatac

SEQ ID NO: 18411 - DNA, 16 bp, synthetic construct
  misc_feature 1..16: note = synthetic [barcode part1]
  source 1..16: mol_type = other DNA
caactcttgcgattgt

SEQ ID NO: 18412 - DNA, 16 bp, synthetic construct
  misc_feature 1..16: note = synthetic [barcode part1]
  source 1..16: mol_type = other DNA
gcgcgatatatcgatc

SEQ ID NO: 18413 - DNA, 16 bp, synthetic construct
  misc_feature 1..16: note = synthetic [barcode part1]
  source 1..16: mol_type = other DNA
ccaacggtgtctctac

SEQ ID NO: 18414 - DNA, 16 bp, synthetic construct
  misc_feature 1..16: note = synthetic [barcode part1]
  source 1..16: mol_type = other DNA
atactatctcgcctag

SEQ ID NO: 18415 - DNA, 16 bp, synthetic construct
  misc_feature 1..16: note = synthetic [barcode part1]
  source 1..16: mol_type = other DNA
cctgtgtctgacagtc

SEQ ID NO: 18416 - DNA, 16 bp, synthetic construct
  misc_feature 1..16: note = synthetic [barcode part1]
  source 1..16: mol_type = other DNA
agtcgactcaagacct

SEQ ID NO: 18417 - DNA, 16 bp, synthetic construct
  misc_feature 1..16: note = synthetic [barcode part1]
  source 1..16: mol_type = other DNA
tataggacgacagttg

SEQ ID NO: 18418 - DNA, 16 bp, synthetic construct
  misc_feature 1..16: note = synthetic [barcode part1]
  source 1..16: mol_type = other DNA
aggtaaggtaacacct

SEQ ID NO: 18419 - DNA, 16 bp, synthetic construct
  misc_feature 1..16: note = synthetic [barcode part1]
  source 1..16: mol_type = other DNA
gtctccgtctaatagt

SEQ ID NO: 18420 - DNA, 16 bp, synthetic construct
  misc_feature 1..16: note = synthetic [barcode part1]
  source 1..16: mol_type = other DNA
gcgtgattacacgact

SEQ ID NO: 18421 - DNA, 16 bp, synthetic construct
  misc_feature 1..16: note = synthetic [barcode part1]
  source 1..16: mol_type = other DNA
gcacaaccaacacgtt

SEQ ID NO: 18422 - DNA, 16 bp, synthetic construct
  misc_feature 1..16: note = synthetic [barcode part1]
  source 1..16: mol_type = other DNA
ttaggcggaacggtgt

SEQ ID NO: 18423 - DNA, 16 bp, synthetic construct
  misc_feature 1..16: note = synthetic [barcode part1]
  source 1..16: mol_type = other DNA
tctaagacctcggagt

SEQ ID NO: 18424 - DNA, 16 bp, synthetic construct
  misc_feature 1..16: note = synthetic [barcode part1]
  source 1..16: mol_type = other DNA
agttgacggttgatcc

SEQ ID NO: 18425 - DNA, 16 bp, synthetic construct
  misc_feature 1..16: note = synthetic [barcode part1]
  source 1..16: mol_type = other DNA
gccaagaagtcttctg

SEQ ID NO: 18426 - DNA, 16 bp, synthetic construct
  misc_feature 1..16: note = synthetic [barcode part1]
  source 1..16: mol_type = other DNA
atcaagacacacagtg

SEQ ID NO: 18427 - DNA, 16 bp, synthetic construct
  misc_feature 1..16: note = synthetic [barcode part1]
  source 1..16: mol_type = other DNA
agaccttgaccgattg

SEQ ID NO: 18428 - DNA, 16 bp, synthetic construct
  misc_feature 1..16: note = synthetic [barcode part1]
  source 1..16: mol_type = other DNA
gatcgtgaatcctctt

SEQ ID NO: 18429 - DNA, 16 bp, synthetic construct
  misc_feature 1..16: note = synthetic [barcode part1]
  source 1..16: mol_type = other DNA
agaacaaggtggagtc

SEQ ID NO: 18430 - DNA, 16 bp, synthetic construct
  misc_feature 1..16: note = synthetic [barcode part1]
  source 1..16: mol_type = other DNA
tcaacacgtacgtcag

SEQ ID NO: 18431 - DNA, 16 bp, synthetic construct
  misc_feature 1..16: note = synthetic [barcode part1]
  source 1..16: mol_type = other DNA
tggtgacgactcgatt

SEQ ID NO: 18432 - DNA, 16 bp, synthetic construct
  misc_feature 1..16: note = synthetic [barcode part1]
  source 1..16: mol_type = other DNA
aggttgcctgtattct

SEQ ID NO: 18433 - DNA, 16 bp, synthetic construct
  misc_feature 1..16: note = synthetic [barcode part1]
  source 1..16: mol_type = other DNA
gaggtaacgttgcctt

SEQ ID NO: 18434 - DNA, 16 bp, synthetic construct
  misc_feature 1..16: note = synthetic [barcode part1]
  source 1..16: mol_type = other DNA
acctaacctctatacg

SEQ ID NO: 18435 - DNA, 16 bp, synthetic construct
  misc_feature 1..16: note = synthetic [barcode part1]
  source 1..16: mol_type = other DNA
gattctgtgtctatcg

SEQ ID NO: 18436 - DNA, 16 bp, synthetic construct
  misc_feature 1..16: note = synthetic [barcode part1]
  source 1..16: mol_type = other DNA
cagattgtctcgcacc

SEQ ID NO: 18437 - DNA, 16 bp, synthetic construct
  misc_feature 1..16: note = synthetic [barcode part1]
  source 1..16: mol_type = other DNA
taccaagttaccaggc

SEQ ID NO: 18438 - DNA, 16 bp, synthetic construct
  misc_feature 1..16: note = synthetic [barcode part1]
  source 1..16: mol_type = other DNA
tacgccttatcaggcc

SEQ ID NO: 18439 - DNA, 16 bp, synthetic construct
  misc_feature 1..16: note = synthetic [barcode part1]
  source 1..16: mol_type = other DNA
cctaggattcctctct

SEQ ID NO: 18440 - DNA, 16 bp, synthetic construct
  misc_feature 1..16: note = synthetic [barcode part1]
  source 1..16: mol_type = other DNA
tgtgaaccttagacgc

SEQ ID NO: 18441 - DNA, 16 bp, synthetic construct
  misc_feature 1..16: note = synthetic [barcode part1]
  source 1..16: mol_type = other DNA
agagttctcgtccgtc

SEQ ID NO: 18442 - DNA, 16 bp, synthetic construct
  misc_feature 1..16: note = synthetic [barcode part1]
  source 1..16: mol_type = other DNA
aagtacctgtccgaac

SEQ ID NO: 18443 - DNA, 16 bp, synthetic construct
  misc_feature 1..16: note = synthetic [barcode part1]
  source 1..16: mol_type = other DNA
actcggaggcaaggtt

SEQ ID NO: 18444 - DNA, 16 bp, synthetic construct
  misc_feature 1..16: note = synthetic [barcode part1]
  source 1..16: mol_type = other DNA
tgttccgcagatattc

SEQ ID NO: 18445 - DNA, 16 bp, synthetic construct
  misc_feature 1..16: note = synthetic [barcode part1]
  source 1..16: mol_type = other DNA
cacaacgcaagtaagt

SEQ ID NO: 18446 - DNA, 16 bp, synthetic construct
  misc_feature 1..16: note = synthetic [barcode part1]
  source 1..16: mol_type = other DNA
tggttggcgatcaact

SEQ ID NO: 18447 - DNA, 16 bp, synthetic construct
  misc_feature 1..16: note = synthetic [barcode part1]
  source 1..16: mol_type = other DNA
tctggcgtgttcctag

SEQ ID NO: 18448 - DNA, 16 bp, synthetic construct
  misc_feature 1..16: note = synthetic [barcode part1]
  source 1..16: mol_type = other DNA
accaagtggacgcaac

SEQ ID NO: 18449 - DNA, 16 bp, synthetic construct
  misc_feature 1..16: note = synthetic [barcode part1]
  source 1..16: mol_type = other DNA
tgacggatattcagag

SEQ ID NO: 18450 - DNA, 16 bp, synthetic construct
  misc_feature 1..16: note = synthetic [barcode part1]
  source 1..16: mol_type = other DNA
ccgtaaggtctctcgt

SEQ ID NO: 18451 - DNA, 16 bp, synthetic construct
  misc_feature 1..16: note = synthetic [barcode part1]
  source 1..16: mol_type = other DNA
gcagttacttcctaac

SEQ ID NO: 18452 - DNA, 16 bp, synthetic construct
  misc_feature 1..16: note = synthetic [barcode part1]
  source 1..16: mol_type = other DNA
tcactgtgcagattct

SEQ ID NO: 18453 - DNA, 16 bp, synthetic construct
  misc_feature 1..16: note = synthetic [barcode part1]
  source 1..16: mol_type = other DNA
gttggcgacagaacac

SEQ ID NO: 18454 - DNA, 16 bp, synthetic construct
  misc_feature 1..16: note = synthetic [barcode part1]
  source 1..16: mol_type = other DNA
ccaggaacaatctctg

SEQ ID NO: 18455 - DNA, 16 bp, synthetic construct
  misc_feature 1..16: note = synthetic [barcode part1]
  source 1..16: mol_type = other DNA
aagatagttgcgaacc

SEQ ID NO: 18456 - DNA, 16 bp, synthetic construct
  misc_feature 1..16: note = synthetic [barcode part1]
  source 1..16: mol_type = other DNA
gttcaggtcgtgaact

SEQ ID NO: 18457 - DNA, 16 bp, synthetic construct
  misc_feature 1..16: note = synthetic [barcode part1]
  source 1..16: mol_type = other DNA
tggcaacctgacagtt

SEQ ID NO: 18458 - DNA, 16 bp, synthetic construct
  misc_feature 1..16: note = synthetic [barcode part1]
  source 1..16: mol_type = other DNA
ttcaataccacgtctg

SEQ ID NO: 18459 - DNA, 16 bp, synthetic construct
  misc_feature 1..16: note = synthetic [barcode part1]
  source 1..16: mol_type = other DNA
gatagtctgcaagaac

SEQ ID NO: 18460 - DNA, 16 bp, synthetic construct
  misc_feature 1..16: note = synthetic [barcode part1]
  source 1..16: mol_type = other DNA
cctcgtaagtctgacc

SEQ ID NO: 18461 - DNA, 16 bp, synthetic construct
  misc_feature 1..16: note = synthetic [barcode part1]
  source 1..16: mol_type = other DNA
gacggaatcaacacgc

SEQ ID NO: 18462 - DNA, 16 bp, synthetic construct
  misc_feature 1..16: note = synthetic [barcode part1]
  source 1..16: mol_type = other DNA
acgttagtcctgtcgc

SEQ ID NO: 18463 - DNA, 16 bp, synthetic construct
  misc_feature 1..16: note = synthetic [barcode part1]
  source 1..16: mol_type = other DNA
gcggatccaacagaac

SEQ ID NO: 18464 - DNA, 16 bp, synthetic construct
  misc_feature 1..16: note = synthetic [barcode part1]
  source 1..16: mol_type = other DNA
ccttctcctaaggtct

SEQ ID NO: 18465 - DNA, 16 bp, synthetic construct
  misc_feature 1..16: note = synthetic [barcode part1]
  source 1..16: mol_type = other DNA
cagacgtggagatcgt

SEQ ID NO: 18466 - DNA, 16 bp, synthetic construct
  misc_feature 1..16: note = synthetic [barcode part1]
  source 1..16: mol_type = other DNA
attgacaacaggacgt

SEQ ID NO: 18467 - DNA, 16 bp, synthetic construct
  misc_feature 1..16: note = synthetic [barcode part1]
  source 1..16: mol_type = other DNA
caacacgtgtaccagt

SEQ ID NO: 18468 - DNA, 16 bp, synthetic construct
  misc_feature 1..16: note = synthetic [barcode part1]
  source 1..16: mol_type = other DNA
aggaccttctgtccgt

SEQ ID NO: 18469 - DNA, 16 bp, synthetic construct
  misc_feature 1..16: note = synthetic [barcode part1]
  source 1..16: mol_type = other DNA
tcgccgtggatctgtt

SEQ ID NO: 18470 - DNA, 16 bp, synthetic construct
  misc_feature 1..16: note = synthetic [barcode part1]
  source 1..16: mol_type = other DNA
gtgtggtcgcgtaatt

SEQ ID NO: 18471 - DNA, 16 bp, synthetic construct
  misc_feature 1..16: note = synthetic [barcode part1]
  source 1..16: mol_type = other DNA
gcagaggattattggt

SEQ ID NO: 18472 - DNA, 16 bp, synthetic construct
  misc_feature 1..16: note = synthetic [barcode part1]
  source 1..16: mol_type = other DNA
gacagtcaccactagt

SEQ ID NO: 18473 - DNA, 16 bp, synthetic construct
  misc_feature 1..16: note = synthetic [barcode part1]
  source 1..16: mol_type = other DNA
ttcgcgcgtacttctt

SEQ ID NO: 18474 - DNA, 16 bp, synthetic construct
  misc_feature 1..16: note = synthetic [barcode part1]
  source 1..16: mol_type = other DNA
tctccacggatcactg

SEQ ID NO: 18475 - DNA, 16 bp, synthetic construct
  misc_feature 1..16: note = synthetic [barcode part1]
  source 1..16: mol_type = other DNA
gccgagtcagaagtac

SEQ ID NO: 18476 - DNA, 16 bp, synthetic construct
  misc_feature 1..16: note = synthetic [barcode part1]
  source 1..16: mol_type = other DNA
ttacagacacctcgtt

SEQ ID NO: 18477 - DNA, 16 bp, synthetic construct
  misc_feature 1..16: note = synthetic [barcode part1]
  source 1..16: mol_type = other DNA
gtccggtgagaatacg

SEQ ID NO: 18478 - DNA, 16 bp, synthetic construct
  misc_feature 1..16: note = synthetic [barcode part1]
  source 1..16: mol_type = other DNA
accacctcgagataac

SEQ ID NO: 18479 - DNA, 16 bp, synthetic construct
  misc_feature 1..16: note = synthetic [barcode part1]
  source 1..16: mol_type = other DNA
gagtaaggtctgcctt

SEQ ID NO: 18480 - DNA, 16 bp, synthetic construct
  misc_feature 1..16: note = synthetic [barcode part1]
  source 1..16: mol_type = other DNA
tgaatcctcgttctag

SEQ ID NO: 18481 - DNA, 16 bp, synthetic construct
  misc_feature 1..16: note = synthetic [barcode part1]
  source 1..16: mol_type = other DNA
tggcagaacagacctg

SEQ ID NO: 18482 - DNA, 16 bp, synthetic construct
  misc_feature 1..16: note = synthetic [barcode part1]
  source 1..16: mol_type = other DNA
gcaacagacagttgcg

SEQ ID NO: 18483 - DNA, 16 bp, synthetic construct
  misc_feature 1..16: note = synthetic [barcode part1]
  source 1..16: mol_type = other DNA
actcagaaggtggtgc

SEQ ID NO: 18484 - DNA, 16 bp, synthetic construct
  misc_feature 1..16: note = synthetic [barcode part1]
  source 1..16: mol_type = other DNA
gagtgttctcgtcacc

SEQ ID NO: 18485 - DNA, 16 bp, synthetic construct
  misc_feature 1..16: note = synthetic [barcode part1]
  source 1..16: mol_type = other DNA
gtcgattggaaccttg

SEQ ID NO: 18486 - DNA, 16 bp, synthetic construct
  misc_feature 1..16: note = synthetic [barcode part1]
  source 1..16: mol_type = other DNA
gttccgtacgattatc

SEQ ID NO: 18487 - DNA, 16 bp, synthetic construct
  misc_feature 1..16: note = synthetic [barcode part1]
  source 1..16: mol_type = other DNA
aagatcacttccgacg

SEQ ID NO: 18488 - DNA, 16 bp, synthetic construct
  misc_feature 1..16: note = synthetic [barcode part1]
  source 1..16: mol_type = other DNA
cgtatcagattctctg

SEQ ID NO: 18489 - DNA, 16 bp, synthetic construct
  misc_feature 1..16: note = synthetic [barcode part1]
  source 1..16: mol_type = other DNA
tgcgttctctgtatcc

SEQ ID NO: 18490 - DNA, 16 bp, synthetic construct
  misc_feature 1..16: note = synthetic [barcode part1]
  source 1..16: mol_type = other DNA
ttaactcactcaggtc

SEQ ID NO: 18491 - DNA, 16 bp, synthetic construct
  misc_feature 1..16: note = synthetic [barcode part1]
  source 1..16: mol_type = other DNA
tctgcggataagttcg

SEQ ID NO: 18492 - DNA, 16 bp, synthetic construct
  misc_feature 1..16: note = synthetic [barcode part1]
  source 1..16: mol_type = other DNA
aggtgagtgccgtaac

SEQ ID NO: 18493 - DNA, 16 bp, synthetic construct
  misc_feature 1..16: note = synthetic [barcode part1]
  source 1..16: mol_type = other DNA
taggtcacctcacacc

SEQ ID NO: 18494 - DNA, 16 bp, synthetic construct
  misc_feature 1..16: note = synthetic [barcode part1]
  source 1..16: mol_type = other DNA
gactgccaacgtagag

SEQ ID NO: 18495 - DNA, 16 bp, synthetic construct
  misc_feature 1..16: note = synthetic [barcode part1]
  source 1..16: mol_type = other DNA
ttactgtgtggatctc

SEQ ID NO: 18496 - DNA, 16 bp, synthetic construct
  misc_feature 1..16: note = synthetic [barcode part1]
  source 1..16: mol_type = other DNA
gtacgcaaccgattgt

SEQ ID NO: 18497 - DNA, 16 bp, synthetic construct
  misc_feature 1..16: note = synthetic [barcode part1]
  source 1..16: mol_type = other DNA
tatctacctgtggcgc

SEQ ID NO: 18498 - DNA, 16 bp, synthetic construct
  misc_feature 1..16: note = synthetic [barcode part1]
  source 1..16: mol_type = other DNA
agaacctaagtgaacc

SEQ ID NO: 18499 - DNA, 16 bp, synthetic construct
  misc_feature 1..16: note = synthetic [barcode part1]
  source 1..16: mol_type = other DNA
gtaccgataacttcct

SEQ ID NO: 18500 - DNA, 16 bp, synthetic construct
  misc_feature 1..16: note = synthetic [barcode part1]
  source 1..16: mol_type = other DNA
ttcgcaatccgtcgtg

SEQ ID NO: 18501 - DNA, 16 bp, synthetic construct
  misc_feature 1..16: note = synthetic [barcode part1]
  source 1..16: mol_type = other DNA
tacgcgacttgatctt

SEQ ID NO: 18502 - DNA, 16 bp, synthetic construct
  misc_feature 1..16: note = synthetic [barcode part1]
  source 1..16: mol_type = other DNA
tccggtggaatacgag

SEQ ID NO: 18503 - DNA, 16 bp, synthetic construct
  misc_feature 1..16: note = synthetic [barcode part1]
  source 1..16: mol_type = other DNA
gtccagagacacttgt

SEQ ID NO: 18504 - DNA, 16 bp, synthetic construct
  misc_feature 1..16: note = synthetic [barcode part1]
  source 1..16: mol_type = other DNA
tcagttcctgttgcct

SEQ ID NO: 18505 - DNA, 16 bp, synthetic construct
  misc_feature 1..16: note = synthetic [barcode part1]
  source 1..16: mol_type = other DNA
ttgcgcgagaagatcg

SEQ ID NO: 18506 - DNA, 16 bp, synthetic construct
  misc_feature 1..16: note = synthetic [barcode part1]
  source 1..16: mol_type = other DNA
gagacacagtccagtg

SEQ ID NO: 18507 - DNA, 16 bp, synthetic construct
  misc_feature 1..16: note = synthetic [barcode part1]
  source 1..16: mol_type = other DNA
gcggcagttattactg

SEQ ID NO: 18508 - DNA, 16 bp, synthetic construct
  misc_feature 1..16: note = synthetic [barcode part1]
  source 1..16: mol_type = other DNA
ttcttccgtatacgcc

SEQ ID NO: 18509 - DNA, 16 bp, synthetic construct
  misc_feature 1..16: note = synthetic [barcode part1]
  source 1..16: mol_type = other DNA
gcgagagaccgaatct

SEQ ID NO: 18510 - DNA, 16 bp, synthetic construct
  misc_feature 1..16: note = synthetic [barcode part1]
  source 1..16: mol_type = other DNA
gaagattccgatctcg

SEQ ID NO: 18511 - DNA, 16 bp, synthetic construct
  misc_feature 1..16: note = synthetic [barcode part1]
  source 1..16: mol_type = other DNA
tgacgccacaatatcg

SEQ ID NO: 18512 - DNA, 16 bp, synthetic construct
  misc_feature 1..16: note = synthetic [barcode part1]
  source 1..16: mol_type = other DNA
ataccgagagaatcac

SEQ ID NO: 18513 - DNA, 16 bp, synthetic construct
  misc_feature 1..16: note = synthetic [barcode part1]
  source 1..16: mol_type = other DNA
tcctctccgactagtt

SEQ ID NO: 18514 - DNA, 16 bp, synthetic construct
  misc_feature 1..16: note = synthetic [barcode part1]
  source 1..16: mol_type = other DNA
gtctacctaagatctc

SEQ ID NO: 18515 - DNA, 16 bp, synthetic construct
  misc_feature 1..16: note = synthetic [barcode part1]
  source 1..16: mol_type = other DNA
ccggtaagtctccgtt

SEQ ID NO: 18516 - DNA, 16 bp, synthetic construct
  misc_feature 1..16: note = synthetic [barcode part1]
  source 1..16: mol_type = other DNA
taacgtgaggatagtc

SEQ ID NO: 18517 - DNA, 16 bp, synthetic construct
  misc_feature 1..16: note = synthetic [barcode part1]
  source 1..16: mol_type = other DNA
tatctcttctccgcag

SEQ ID NO: 18518 - DNA, 16 bp, synthetic construct
  misc_feature 1..16: note = synthetic [barcode part1]
  source 1..16: mol_type = other DNA
gccttgcaagtcaagt

SEQ ID NO: 18519 - DNA, 16 bp, synthetic construct
  misc_feature 1..16: note = synthetic [barcode part1]
  source 1..16: mol_type = other DNA
gaattgtacgaggact

SEQ ID NO: 18520 - DNA, 16 bp, synthetic construct
  misc_feature 1..16: note = synthetic [barcode part1]
  source 1..16: mol_type = other DNA
acactgtgtaagtgag

SEQ ID NO: 18521 - DNA, 16 bp, synthetic construct
  misc_feature 1..16: note = synthetic [barcode part1]
  source 1..16: mol_type = other DNA
gattattactctcgcg

SEQ ID NO: 18522 - DNA, 16 bp, synthetic construct
  misc_feature 1..16: note = synthetic [barcode part1]
  source 1..16: mol_type = other DNA
acacggtggaagacct

SEQ ID NO: 18523 - DNA, 16 bp, synthetic construct
  misc_feature 1..16: note = synthetic [barcode part1]
  source 1..16: mol_type = other DNA
taaggagacactgact

SEQ ID NO: 18524 - DNA, 16 bp, synthetic construct
  misc_feature 1..16: note = synthetic [barcode part1]
  source 1..16: mol_type = other DNA
ttaacgcactaacgcg

SEQ ID NO: 18525 - DNA, 16 bp, synthetic construct
  misc_feature 1..16: note = synthetic [barcode part1]
  source 1..16: mol_type = other DNA
ttgattcttgtgcgac

SEQ ID NO: 18526 - DNA, 16 bp, synthetic construct
  misc_feature 1..16: note = synthetic [barcode part1]
  source 1..16: mol_type = other DNA
tgtcagttggtgtgtg

SEQ ID NO: 18527 - DNA, 16 bp, synthetic construct
  misc_feature 1..16: note = synthetic [barcode part1]
  source 1..16: mol_type = other DNA
tccgatacctacgtcg

SEQ ID NO: 18528 - DNA, 16 bp, synthetic construct
  misc_feature 1..16: note = synthetic [barcode part1]
  source 1..16: mol_type = other DNA
actagtgtactccgcc

SEQ ID NO: 18529 - DNA, 16 bp, synthetic construct
  misc_feature 1..16: note = synthetic [barcode part1]
  source 1..16: mol_type = other DNA
ttcacacctagtggtt

SEQ ID NO: 18530 - DNA, 16 bp, synthetic construct
  misc_feature 1..16: note = synthetic [barcode part1]
  source 1..16: mol_type = other DNA
actaacgacgaagtac

SEQ ID NO: 18531 - DNA, 16 bp, synthetic construct
  misc_feature 1..16: note = synthetic [barcode part1]
  source 1..16: mol_type = other DNA
gagtgttgaacagtac

SEQ ID NO: 18532 - DNA, 16 bp, synthetic construct
  misc_feature 1..16: note = synthetic [barcode part1]
  source 1..16: mol_type = other DNA
tcactcgataagtggc

SEQ ID NO: 18533 - DNA, 16 bp, synthetic construct
  misc_feature 1..16: note = synthetic [barcode part1]
  source 1..16: mol_type = other DNA
acgaattcagtggagt

SEQ ID NO: 18534 - DNA, 16 bp, synthetic construct
  misc_feature 1..16: note = synthetic [barcode part1]
  source 1..16: mol_type = other DNA
ccgtccaagatagact

SEQ ID NO: 18535 - DNA, 16 bp, synthetic construct
  misc_feature 1..16: note = synthetic [barcode part1]
  source 1..16: mol_type = other DNA
ataggatcaccgtctg

SEQ ID NO: 18536 - DNA, 16 bp, synthetic construct
  misc_feature 1..16: note = synthetic [barcode part1]
  source 1..16: mol_type = other DNA
cctcgttgtaagtccg

SEQ ID NO: 18537 - DNA, 16 bp, synthetic construct
  misc_feature 1..16: note = synthetic [barcode part1]
  source 1..16: mol_type = other DNA
agaaggtctgcgcagt

SEQ ID NO: 18538 - DNA, 16 bp, synthetic construct
  misc_feature 1..16: note = synthetic [barcode part1]
  source 1..16: mol_type = other DNA
aacgtacacgttgacc

SEQ ID NO: 18539 - DNA, 16 bp, synthetic construct
  misc_feature 1..16: note = synthetic [barcode part1]
  source 1..16: mol_type = other DNA
tggcgactaacgattc

SEQ ID NO: 18540 - DNA, 16 bp, synthetic construct
  misc_feature 1..16: note = synthetic [barcode part1]
  source 1..16: mol_type = other DNA
gccacggtattcgtct

SEQ ID NO: 18541 - DNA, 16 bp, synthetic construct
  misc_feature 1..16: note = synthetic [barcode part1]
  source 1..16: mol_type = other DNA
tctctaacgacgtgcc

SEQ ID NO: 18542 - DNA, 16 bp, synthetic construct
  misc_feature 1..16: note = synthetic [barcode part1]
  source 1..16: mol_type = other DNA
tggactgactgaacct

SEQ ID NO: 18543 - DNA, 16 bp, synthetic construct
  misc_feature 1..16: note = synthetic [barcode part1]
  source 1..16: mol_type = other DNA
agttggcaatcctggt

SEQ ID NO: 18544 - DNA, 16 bp, synthetic construct
  misc_feature 1..16: note = synthetic [barcode part1]
  source 1..16: mol_type = other DNA
tgtacacactgcaacg

SEQ ID NO: 18545 - DNA, 16 bp, synthetic construct
  misc_feature 1..16: note = synthetic [barcode part1]
  source 1..16: mol_type = other DNA
tctctctgattccgac

SEQ ID NO: 18546 - DNA, 16 bp, synthetic construct
  misc_feature 1..16: note = synthetic [barcode part1]
  source 1..16: mol_type = other DNA
cactaacacgcgttag

SEQ ID NO: 18547 - DNA, 16 bp, synthetic construct
  misc_feature 1..16: note = synthetic [barcode part1]
  source 1..16: mol_type = other DNA
tgatcgaagaagaggc

SEQ ID NO: 18548 - DNA, 16 bp, synthetic construct
  misc_feature 1..16: note = synthetic [barcode part1]
  source 1..16: mol_type = other DNA
gtagacttcttgccgc

SEQ ID NO: 18549 - DNA, 16 bp, synthetic construct
  misc_feature 1..16: note = synthetic [barcode part1]
  source 1..16: mol_type = other DNA
aggttctgatcgactg

SEQ ID NO: 18550 - DNA, 16 bp, synthetic construct
  misc_feature 1..16: note = synthetic [barcode part1]
  source 1..16: mol_type = other DNA
gagttgtcctggtaac

SEQ ID NO: 18551 - DNA, 16 bp, synthetic construct
  misc_feature 1..16: note = synthetic [barcode part1]
  source 1..16: mol_type = other DNA
agtcgtgtagtgcact

SEQ ID NO: 18552 - DNA, 16 bp, synthetic construct
  misc_feature 1..16: note = synthetic [barcode part1]
  source 1..16: mol_type = other DNA
acttacgtggtcctcg

SEQ ID NO: 18553 - DNA, 16 bp, synthetic construct
  misc_feature 1..16: note = synthetic [barcode part1]
  source 1..16: mol_type = other DNA
gttactgttcttgcag

SEQ ID NO: 18554 - DNA, 16 bp, synthetic construct
  misc_feature 1..16: note = synthetic [barcode part1]
  source 1..16: mol_type = other DNA
cgccttgttcgagtgt

SEQ ID NO: 18555 - DNA, 16 bp, synthetic construct
  misc_feature 1..16: note = synthetic [barcode part1]
  source 1..16: mol_type = other DNA
ccgttcttacgtcgag

SEQ ID NO: 18556 - DNA, 16 bp, synthetic construct
  misc_feature 1..16: note = synthetic [barcode part1]
  source 1..16: mol_type = other DNA
taaccttgcgtgccac

SEQ ID NO: 18557 - DNA, 16 bp, synthetic construct
  misc_feature 1..16: note = synthetic [barcode part1]
  source 1..16: mol_type = other DNA
ttgcggagtaaccact

SEQ ID NO: 18558 - DNA, 16 bp, synthetic construct
  misc_feature 1..16: note = synthetic [barcode part1]
  source 1..16: mol_type = other DNA
ttatcggttccacgcg

SEQ ID NO: 18559 - DNA, 16 bp, synthetic construct
  misc_feature 1..16: note = synthetic [barcode part1]
  source 1..16: mol_type = other DNA
acggtcagtgtcgatt

SEQ ID NO: 18560 - DNA, 16 bp, synthetic construct
  misc_feature 1..16: note = synthetic [barcode part1]
  source 1..16: mol_type = other DNA
gtcgtctcaggtatcc

SEQ ID NO: 18561 - DNA, 16 bp, synthetic construct
  misc_feature 1..16: note = synthetic [barcode part1]
  source 1..16: mol_type = other DNA
tatcgttacctctcgc

SEQ ID NO: 18562 - DNA, 16 bp, synthetic construct
  misc_feature 1..16: note = synthetic [barcode part1]
  source 1..16: mol_type = other DNA
taaccgatcctgagac

SEQ ID NO: 18563 - DNA, 16 bp, synthetic construct
  misc_feature 1..16: note = synthetic [barcode part1]
  source 1..16: mol_type = other DNA
atctcgtcgaggagtt

SEQ ID NO: 18564 - DNA, 16 bp, synthetic construct
  misc_feature 1..16: note = synthetic [barcode part1]
  source 1..16: mol_type = other DNA
gtggtagtatcctgtg

SEQ ID NO: 18565 - DNA, 16 bp, synthetic construct
  misc_feature 1..16: note = synthetic [barcode part1]
  source 1..16: mol_type = other DNA
ccagtccttaccactt

SEQ ID NO: 18566 - DNA, 16 bp, synthetic construct
  misc_feature 1..16: note = synthetic [barcode part1]
  source 1..16: mol_type = other DNA
accgcagtcacctatc

SEQ ID NO: 18567 - DNA, 16 bp, synthetic construct
  misc_feature 1..16: note = synthetic [barcode part1]
  source 1..16: mol_type = other DNA
aagtcgtaagtgcggc

SEQ ID NO: 18568 - DNA, 16 bp, synthetic construct
  misc_feature 1..16: note = synthetic [barcode part1]
  source 1..16: mol_type = other DNA
aggattagaggcaacg

SEQ ID NO: 18569 - DNA, 16 bp, synthetic construct
  misc_feature 1..16: note = synthetic [barcode part1]
  source 1..16: mol_type = other DNA
actcagtaacctggtg

SEQ ID NO: 18570 - DNA, 16 bp, synthetic construct
  misc_feature 1..16: note = synthetic [barcode part1]
  source 1..16: mol_type = other DNA
tatatacgtgccgcag

SEQ ID NO: 18571 - DNA, 16 bp, synthetic construct
  misc_feature 1..16: note = synthetic [barcode part1]
  source 1..16: mol_type = other DNA
tactgttgaacgtctc

SEQ ID NO: 18572 - DNA, 16 bp, synthetic construct
  misc_feature 1..16: note = synthetic [barcode part1]
  source 1..16: mol_type = other DNA
ataccagtgcgtcaac

SEQ ID NO: 18573 - DNA, 16 bp, synthetic construct
  misc_feature 1..16: note = synthetic [barcode part1]
  source 1..16: mol_type = other DNA
accacagtgttgcagt

SEQ ID NO: 18574 - DNA, 16 bp, synthetic construct
  misc_feature 1..16: note = synthetic [barcode part1]
  source 1..16: mol_type = other DNA
ttcgattgttaacgcc

SEQ ID NO: 18575 - DNA, 16 bp, synthetic construct
  misc_feature 1..16: note = synthetic [barcode part1]
  source 1..16: mol_type = other DNA
tcctcaacgcaattgt

SEQ ID NO: 18576 - DNA, 16 bp, synthetic construct
  misc_feature 1..16: note = synthetic [barcode part1]
  source 1..16: mol_type = other DNA
gtcacaaggcaggtac

SEQ ID NO: 18577 - DNA, 16 bp, synthetic construct
  misc_feature 1..16: note = synthetic [barcode part1]
  source 1..16: mol_type = other DNA
gcaatctggattgtcg

SEQ ID NO: 18578 - DNA, 16 bp, synthetic construct
  misc_feature 1..16: note = synthetic [barcode part1]
  source 1..16: mol_type = other DNA
agattacgaacacggt

SEQ ID NO: 18579 - DNA, 16 bp, synthetic construct
  misc_feature 1..16: note = synthetic [barcode part1]
  source 1..16: mol_type = other DNA
aagacgccggtgattg

SEQ ID NO: 18580 - DNA, 16 bp, synthetic construct
  misc_feature 1..16: note = synthetic [barcode part1]
  source 1..16: mol_type = other DNA
ccttaatagtcacacc

SEQ ID NO: 18581 - DNA, 16 bp, synthetic construct
  misc_feature 1..16: note = synthetic [barcode part1]
  source 1..16: mol_type = other DNA
tggatactcctcaatc

SEQ ID NO: 18582 - DNA, 16 bp, synthetic construct
  misc_feature 1..16: note = synthetic [barcode part1]
  source 1..16: mol_type = other DNA
gtaacgttacgcacac

SEQ ID NO: 18583 - DNA, 16 bp, synthetic construct
  misc_feature 1..16: note = synthetic [barcode part1]
  source 1..16: mol_type = other DNA
acgtgtaactaaccgc

SEQ ID NO: 18584 - DNA, 16 bp, synthetic construct
  misc_feature 1..16: note = synthetic [barcode part1]
  source 1..16: mol_type = other DNA
cgtcactgaatcgaac

SEQ ID NO: 18585 - DNA, 16 bp, synthetic construct
  misc_feature 1..16: note = synthetic [barcode part1]
  source 1..16: mol_type = other DNA
gtcaaggtctcaatcg

SEQ ID NO: 18586 - DNA, 16 bp, synthetic construct
  misc_feature 1..16: note = synthetic [barcode part1]
  source 1..16: mol_type = other DNA
aagttgatagtgtgcg

SEQ ID NO: 18587 - DNA, 16 bp, synthetic construct
  misc_feature 1..16: note = synthetic [barcode part1]
  source 1..16: mol_type = other DNA
cgaattgaactcgacc

SEQ ID NO: 18588 - DNA, 16 bp, synthetic construct
  misc_feature 1..16: note = synthetic [barcode part1]
  source 1..16: mol_type = other DNA
tattccgccgtaagtt

SEQ ID NO: 18589 - DNA, 16 bp, synthetic construct
  misc_feature 1..16: note = synthetic [barcode part1]
  source 1..16: mol_type = other DNA
actaagaacgtaccag

SEQ ID NO: 18590 - DNA, 16 bp, synthetic construct
  misc_feature 1..16: note = synthetic [barcode part1]
  source 1..16: mol_type = other DNA
tgcaggacttctgtag

SEQ ID NO: 18591 - DNA, 16 bp, synthetic construct
  misc_feature 1..16: note = synthetic [barcode part1]
  source 1..16: mol_type = other DNA
tatccgccttgagacc

SEQ ID NO: 18592 - DNA, 16 bp, synthetic construct
  misc_feature 1..16: note = synthetic [barcode part1]
  source 1..16: mol_type = other DNA
aggaggttgttaacac

SEQ ID NO: 18593 - DNA, 16 bp, synthetic construct
  misc_feature 1..16: note = synthetic [barcode part1]
  source 1..16: mol_type = other DNA
tgcacttcagaggtgt

SEQ ID NO: 18594 - DNA, 16 bp, synthetic construct
  misc_feature 1..16: note = synthetic [barcode part1]
  source 1..16: mol_type = other DNA
actctgcagacgtctc

SEQ ID NO: 18595 - DNA, 16 bp, synthetic construct
  misc_feature 1..16: note = synthetic [barcode part1]
  source 1..16: mol_type = other DNA
acacgtagactgactc

SEQ ID NO: 18596 - DNA, 16 bp, synthetic construct
  misc_feature 1..16: note = synthetic [barcode part1]
  source 1..16: mol_type = other DNA
cgcaatagtaggtggc

SEQ ID NO: 18597 - DNA, 16 bp, synthetic construct
  misc_feature 1..16: note = synthetic [barcode part1]
  source 1..16: mol_type = other DNA
tcagttcctacgtagt

SEQ ID NO: 18598 - DNA, 16 bp, synthetic construct
  misc_feature 1..16: note = synthetic [barcode part1]
  source 1..16: mol_type = other DNA
acagttgaccaacacc

SEQ ID NO: 18599 - DNA, 16 bp, synthetic construct
  misc_feature 1..16: note = synthetic [barcode part1]
  source 1..16: mol_type = other DNA
ccgagacctatctacc

SEQ ID NO: 18600 - DNA, 16 bp, synthetic construct
  misc_feature 1..16: note = synthetic [barcode part1]
  source 1..16: mol_type = other DNA
tgcaatcgttaccttg

SEQ ID NO: 18601 - DNA, 16 bp, synthetic construct
  misc_feature 1..16: note = synthetic [barcode part1]
  source 1..16: mol_type = other DNA
atccaagaacgaggcc

SEQ ID NO: 18602 - DNA, 16 bp, synthetic construct
  misc_feature 1..16: note = synthetic [barcode part1]
  source 1..16: mol_type = other DNA
tggatcgttggcaact

SEQ ID NO: 18603 - DNA, 16 bp, synthetic construct
  misc_feature 1..16: note = synthetic [barcode part1]
  source 1..16: mol_type = other DNA
caacctctaatacacc

SEQ ID NO: 18604 - DNA, 16 bp, synthetic construct
  misc_feature 1..16: note = synthetic [barcode part1]
  source 1..16: mol_type = other DNA
gagttctaccaaccag

SEQ ID NO: 18605 - DNA, 16 bp, synthetic construct
  misc_feature 1..16: note = synthetic [barcode part1]
  source 1..16: mol_type = other DNA
tgccttacaccgttct

SEQ ID NO: 18606 - DNA, 16 bp, synthetic construct
  misc_feature 1..16: note = synthetic [barcode part1]
  source 1..16: mol_type = other DNA
tcagtggtcaccaagt

SEQ ID NO: 18607 - DNA, 16 bp, synthetic construct
  misc_feature 1..16: note = synthetic [barcode part1]
  source 1..16: mol_type = other DNA
caattgcacaaccacg

SEQ ID NO: 18608 - DNA, 16 bp, synthetic construct
  misc_feature 1..16: note = synthetic [barcode part1]
  source 1..16: mol_type = other DNA
tattctccgcaggaag

SEQ ID NO: 18609 - DNA, 16 bp, synthetic construct
  misc_feature 1..16: note = synthetic [barcode part1]
  source 1..16: mol_type = other DNA
taagtaccgtaccggt

SEQ ID NO: 18610 - DNA, 16 bp, synthetic construct
  misc_feature 1..16: note = synthetic [barcode part1]
  source 1..16: mol_type = other DNA
caaggtgtattgacag

SEQ ID NO: 18611 - DNA, 16 bp, synthetic construct
  misc_feature 1..16: note = synthetic [barcode part1]
  source 1..16: mol_type = other DNA
gttactgtgcacctcg

SEQ ID NO: 18612 - DNA, 16 bp, synthetic construct
  misc_feature 1..16: note = synthetic [barcode part1]
  source 1..16: mol_type = other DNA
agtccaagaggtacgc

SEQ ID NO: 18613 - DNA, 16 bp, synthetic construct
  misc_feature 1..16: note = synthetic [barcode part1]
  source 1..16: mol_type = other DNA
ccacggaatagaatac

SEQ ID NO: 18614 - DNA, 16 bp, synthetic construct
  misc_feature 1..16: note = synthetic [barcode part1]
  source 1..16: mol_type = other DNA
tcaacgaccgtacctc

SEQ ID NO: 18615 - DNA, 16 bp, synthetic construct
  misc_feature 1..16: note = synthetic [barcode part1]
  source 1..16: mol_type = other DNA
tgagacggatatactg

SEQ ID NO: 18616 - DNA, 16 bp, synthetic construct
  misc_feature 1..16: note = synthetic [barcode part1]
  source 1..16: mol_type = other DNA
gcgtaatctccgatcc

SEQ ID NO: 18617 - DNA, 16 bp, synthetic construct
  misc_feature 1..16: note = synthetic [barcode part1]
  source 1..16: mol_type = other DNA
agattatcgccttcac

SEQ ID NO: 18618 - DNA, 16 bp, synthetic construct
  misc_feature 1..16: note = synthetic [barcode part1]
  source 1..16: mol_type = other DNA
ataatcggaggaacct

SEQ ID NO: 18619 - DNA, 16 bp, synthetic construct
  misc_feature 1..16: note = synthetic [barcode part1]
  source 1..16: mol_type = other DNA
agttgtaccagttcct

SEQ ID NO: 18620 - DNA, 16 bp, synthetic construct
  misc_feature 1..16: note = synthetic [barcode part1]
  source 1..16: mol_type = other DNA
taagaggtacggttgt

SEQ ID NO: 18621 - DNA, 16 bp, synthetic construct
  misc_feature 1..16: note = synthetic [barcode part1]
  source 1..16: mol_type = other DNA
gtatcgtgtaacgtcg

SEQ ID NO: 18622 - DNA, 16 bp, synthetic construct
  misc_feature 1..16: note = synthetic [barcode part1]
  source 1..16: mol_type = other DNA
gaccaatcacgtacac

SEQ ID NO: 18623 - DNA, 16 bp, synthetic construct
  misc_feature 1..16: note = synthetic [barcode part1]
  source 1..16: mol_type = other DNA
ataccttgcacaggac

SEQ ID NO: 18624 - DNA, 16 bp, synthetic construct
  misc_feature 1..16: note = synthetic [barcode part1]
  source 1..16: mol_type = other DNA
atcgcagtcgtccgtt

SEQ ID NO: 18625 - DNA, 16 bp, synthetic construct
  misc_feature 1..16: note = synthetic [barcode part1]
  source 1..16: mol_type = other DNA
gacaatccacgtctcc

SEQ ID NO: 18626 - DNA, 16 bp, synthetic construct
  misc_feature 1..16: note = synthetic [barcode part1]
  source 1..16: mol_type = other DNA
tgtctgcggtactacc

SEQ ID NO: 18627 - DNA, 16 bp, synthetic construct
  misc_feature 1..16: note = synthetic [barcode part1]
  source 1..16: mol_type = other DNA
cgtattgccgactctg

SEQ ID NO: 18628 - DNA, 16 bp, synthetic construct
  misc_feature 1..16: note = synthetic [barcode part1]
  source 1..16: mol_type = other DNA
tcgtctaagactctgt

SEQ ID NO: 18629 - DNA, 16 bp, synthetic construct
  misc_feature 1..16: note = synthetic [barcode part1]
  source 1..16: mol_type = other DNA
cagactaccagattgc

SEQ ID NO: 18630 - DNA, 16 bp, synthetic construct
  misc_feature 1..16: note = synthetic [barcode part1]
  source 1..16: mol_type = other DNA
cgaacagtctaggacg

SEQ ID NO: 18631 - DNA, 16 bp, synthetic construct
  misc_feature 1..16: note = synthetic [barcode part1]
  source 1..16: mol_type = other DNA
atcgcaatcgcaacac

SEQ ID NO: 18632 - DNA, 16 bp, synthetic construct
  misc_feature 1..16: note = synthetic [barcode part1]
  source 1..16: mol_type = other DNA
gtcgaacctgcgttct

SEQ ID NO: 18633 - DNA, 16 bp, synthetic construct
  misc_feature 1..16: note = synthetic [barcode part1]
  source 1..16: mol_type = other DNA
acctgccaacgtcact

SEQ ID NO: 18634 - DNA, 16 bp, synthetic construct
  misc_feature 1..16: note = synthetic [barcode part1]
  source 1..16: mol_type = other DNA
acctcggaatcgattg

SEQ ID NO: 18635 - DNA, 16 bp, synthetic construct
  misc_feature 1..16: note = synthetic [barcode part1]
  source 1..16: mol_type = other DNA
cctcgcaaggaatact

SEQ ID NO: 18636 - DNA, 16 bp, synthetic construct
  misc_feature 1..16: note = synthetic [barcode part1]
  source 1..16: mol_type = other DNA
ccttgtacggtaatct

SEQ ID NO: 18637 - DNA, 16 bp, synthetic construct
  misc_feature 1..16: note = synthetic [barcode part1]
  source 1..16: mol_type = other DNA
tggattggccaagttc

SEQ ID NO: 18638 - DNA, 16 bp, synthetic construct
  misc_feature 1..16: note = synthetic [barcode part1]
  source 1..16: mol_type = other DNA
tacgcaggtggttact

SEQ ID NO: 18639 - DNA, 16 bp, synthetic construct
  misc_feature 1..16: note = synthetic [barcode part1]
  source 1..16: mol_type = other DNA
cagtgacaccagatct

SEQ ID NO: 18640 - DNA, 16 bp, synthetic construct
  misc_feature 1..16: note = synthetic [barcode part1]
  source 1..16: mol_type = other DNA
tcctagatacctgccg

SEQ ID NO: 18641 - DNA, 16 bp, synthetic construct
  misc_feature 1..16: note = synthetic [barcode part1]
  source 1..16: mol_type = other DNA
ttccgcggatccagtt

SEQ ID NO: 18642 - DNA, 16 bp, synthetic construct
  misc_feature 1..16: note = synthetic [barcode part1]
  source 1..16: mol_type = other DNA
cctctagtgtgcagtc

SEQ ID NO: 18643 - DNA, 16 bp, synthetic construct
  misc_feature 1..16: note = synthetic [barcode part1]
  source 1..16: mol_type = other DNA
gacagacttgtctacg

SEQ ID NO: 18644 - DNA, 16 bp, synthetic construct
  misc_feature 1..16: note = synthetic [barcode part1]
  source 1..16: mol_type = other DNA
gtgtactggatacctg

SEQ ID NO: 18645 - DNA, 16 bp, synthetic construct
  misc_feature 1..16: note = synthetic [barcode part1]
  source 1..16: mol_type = other DNA
atcagacctcggtaac

SEQ ID NO: 18646 - DNA, 16 bp, synthetic construct
  misc_feature 1..16: note = synthetic [barcode part1]
  source 1..16: mol_type = other DNA
tgaaccagtcagatcc

SEQ ID NO: 18647 - DNA, 16 bp, synthetic construct
  misc_feature 1..16: note = synthetic [barcode part1]
  source 1..16: mol_type = other DNA
agaacctcctacttac

SEQ ID NO: 18648 - DNA, 16 bp, synthetic construct
  misc_feature 1..16: note = synthetic [barcode part1]
  source 1..16: mol_type = other DNA
gccttctgtaccagtg

SEQ ID NO: 18649 - DNA, 16 bp, synthetic construct
  misc_feature 1..16: note = synthetic [barcode part1]
  source 1..16: mol_type = other DNA
gtcaagtgcgagaacc

SEQ ID NO: 18650 - DNA, 16 bp, synthetic construct
  misc_feature 1..16: note = synthetic [barcode part1]
  source 1..16: mol_type = other DNA
agttgcgaatctcctt

SEQ ID NO: 18651 - DNA, 16 bp, synthetic construct
  misc_feature 1..16: note = synthetic [barcode part1]
  source 1..16: mol_type = other DNA
ttgttacctgcaggcc

SEQ ID NO: 18652 - DNA, 16 bp, synthetic construct
  misc_feature 1..16: note = synthetic [barcode part1]
  source 1..16: mol_type = other DNA
ttcagttatcacgtgc

SEQ ID NO: 18653 - DNA, 16 bp, synthetic construct
  misc_feature 1..16: note = synthetic [barcode part1]
  source 1..16: mol_type = other DNA
gcctgaactgtgaact

SEQ ID NO: 18654 - DNA, 16 bp, synthetic construct
  misc_feature 1..16: note = synthetic [barcode part1]
  source 1..16: mol_type = other DNA
cacgtattctcctctg

SEQ ID NO: 18655 - DNA, 16 bp, synthetic construct
  misc_feature 1..16: note = synthetic [barcode part1]
  source 1..16: mol_type = other DNA
cctctcacttgcagag

SEQ ID NO: 18656 - DNA, 16 bp, synthetic construct
  misc_feature 1..16: note = synthetic [barcode part1]
  source 1..16: mol_type = other DNA
ttcgcgtaatcgttac

SEQ ID NO: 18657 - DNA, 16 bp, synthetic construct
  misc_feature 1..16: note = synthetic [barcode part1]
  source 1..16: mol_type = other DNA
tgattctaagaccggc

SEQ ID NO: 18658 - DNA, 16 bp, synthetic construct
  misc_feature 1..16: note = synthetic [barcode part1]
  source 1..16: mol_type = other DNA
atccttgtgaaggcgt

SEQ ID NO: 18659 - DNA, 16 bp, synthetic construct
  misc_feature 1..16: note = synthetic [barcode part1]
  source 1..16: mol_type = other DNA
tgtaccagttgcacag

SEQ ID NO: 18660 - DNA, 16 bp, synthetic construct
  misc_feature 1..16: note = synthetic [barcode part1]
  source 1..16: mol_type = other DNA
cgtggtcgtatctaag

SEQ ID NO: 18661 - DNA, 16 bp, synthetic construct
  misc_feature 1..16: note = synthetic [barcode part1]
  source 1..16: mol_type = other DNA
atctgaggagttcgtc

SEQ ID NO: 18662 - DNA, 16 bp, synthetic construct
  misc_feature 1..16: note = synthetic [barcode part1]
  source 1..16: mol_type = other DNA
gagacaggaacgatac

SEQ ID NO: 18663 - DNA, 16 bp, synthetic construct
  misc_feature 1..16: note = synthetic [barcode part1]
  source 1..16: mol_type = other DNA
gtgagttctcttaacc

SEQ ID NO: 18664 - DNA, 16 bp, synthetic construct
  misc_feature 1..16: note = synthetic [barcode part1]
  source 1..16: mol_type = other DNA
ttgacgtagtcctccg

SEQ ID NO: 18665 - DNA, 16 bp, synthetic construct
  misc_feature 1..16: note = synthetic [barcode part1]
  source 1..16: mol_type = other DNA
gagttctactgtgacg

SEQ ID NO: 18666 - DNA, 16 bp, synthetic construct
  misc_feature 1..16: note = synthetic [barcode part1]
  source 1..16: mol_type = other DNA
aactacgaagaggttc

SEQ ID NO: 18667 - DNA, 16 bp, synthetic construct
  misc_feature 1..16: note = synthetic [barcode part1]
  source 1..16: mol_type = other DNA
cgtgtcctgttgaatt

SEQ ID NO: 18668 - DNA, 16 bp, synthetic construct
  misc_feature 1..16: note = synthetic [barcode part1]
  source 1..16: mol_type = other DNA
accagtaaggccgaac

SEQ ID NO: 18669 - DNA, 16 bp, synthetic construct
  misc_feature 1..16: note = synthetic [barcode part1]
  source 1..16: mol_type = other DNA
aaccgttggcaattcg

SEQ ID NO: 18670 - DNA, 16 bp, synthetic construct
  misc_feature 1..16: note = synthetic [barcode part1]
  source 1..16: mol_type = other DNA
tacgaacaacgttcgc

SEQ ID NO: 18671 - DNA, 16 bp, synthetic construct
  misc_feature 1..16: note = synthetic [barcode part1]
  source 1..16: mol_type = other DNA
cgttagataagtcgcc

SEQ ID NO: 18672 - DNA, 16 bp, synthetic construct
  misc_feature 1..16: note = synthetic [barcode part1]
  source 1..16: mol_type = other DNA
aactggtacgttgcac

SEQ ID NO: 18673 - DNA, 16 bp, synthetic construct
  misc_feature 1..16: note = synthetic [barcode part1]
  source 1..16: mol_type = other DNA
ttcttgtccgtcggag

SEQ ID NO: 18674 - DNA, 16 bp, synthetic construct
  misc_feature 1..16: note = synthetic [barcode part1]
  source 1..16: mol_type = other DNA
agtgacggatattcag

SEQ ID NO: 18675 - DNA, 16 bp, synthetic construct
  misc_feature 1..16: note = synthetic [barcode part1]
  source 1..16: mol_type = other DNA
aagatctcacctgtct

SEQ ID NO: 18676 - DNA, 16 bp, synthetic construct
  misc_feature 1..16: note = synthetic [barcode part1]
  source 1..16: mol_type = other DNA
gttggattccgcactc

SEQ ID NO: 18677 - DNA, 16 bp, synthetic construct
  misc_feature 1..16: note = synthetic [barcode part1]
  source 1..16: mol_type = other DNA
ttgcacaggagttaag

SEQ ID NO: 18678 - DNA, 16 bp, synthetic construct
  misc_feature 1..16: note = synthetic [barcode part1]
  source 1..16: mol_type = other DNA
agtgtcagtgtacgtc

SEQ ID NO: 18679 - DNA, 16 bp, synthetic construct
  misc_feature 1..16: note = synthetic [barcode part1]
  source 1..16: mol_type = other DNA
atctcactcgtcacct

SEQ ID NO: 18680 - DNA, 16 bp, synthetic construct
  misc_feature 1..16: note = synthetic [barcode part1]
  source 1..16: mol_type = other DNA
aacgagacgcactggt

SEQ ID NO: 18681 - DNA, 16 bp, synthetic construct
  misc_feature 1..16: note = synthetic [barcode part1]
  source 1..16: mol_type = other DNA
tacgtgtctccagaag

SEQ ID NO: 18682 - DNA, 16 bp, synthetic construct
  misc_feature 1..16: note = synthetic [barcode part1]
  source 1..16: mol_type = other DNA
gattgtaccagtctct

SEQ ID NO: 18683 - DNA, 16 bp, synthetic construct
  misc_feature 1..16: note = synthetic [barcode part1]
  source 1..16: mol_type = other DNA
ttatctgaggcagacc

SEQ ID NO: 18684 - DNA, 16 bp, synthetic construct
  misc_feature 1..16: note = synthetic [barcode part1]
  source 1..16: mol_type = other DNA
gttaggcgtaactcgt

SEQ ID NO: 18685 - DNA, 16 bp, synthetic construct
  misc_feature 1..16: note = synthetic [barcode part1]
  source 1..16: mol_type = other DNA
tacggagaccagactg

SEQ ID NO: 18686 - DNA, 16 bp, synthetic construct
  misc_feature 1..16: note = synthetic [barcode part1]
  source 1..16: mol_type = other DNA
tgtaagaagtcgtcag

SEQ ID NO: 18687 - DNA, 16 bp, synthetic construct
  misc_feature 1..16: note = synthetic [barcode part1]
  source 1..16: mol_type = other DNA
ccaaggtggatagatt

SEQ ID NO: 18688 - DNA, 16 bp, synthetic construct
  misc_feature 1..16: note = synthetic [barcode part1]
  source 1..16: mol_type = other DNA
acgtgatattgcgtgc

SEQ ID NO: 18689 - DNA, 16 bp, synthetic construct
  misc_feature 1..16: note = synthetic [barcode part1]
  source 1..16: mol_type = other DNA
gttagtcggttagtcg

SEQ ID NO: 18690 - DNA, 16 bp, synthetic construct
  misc_feature 1..16: note = synthetic [barcode part1]
  source 1..16: mol_type = other DNA
aactcctccagatact

SEQ ID NO: 18691 - DNA, 16 bp, synthetic construct
  misc_feature 1..16: note = synthetic [barcode part1]
  source 1..16: mol_type = other DNA
gaggtggcctactatt

SEQ ID NO: 18692 - DNA, 16 bp, synthetic construct
  misc_feature 1..16: note = synthetic [barcode part1]
  source 1..16: mol_type = other DNA
aaggcagtcgtcttac

SEQ ID NO: 18693 - DNA, 16 bp, synthetic construct
  misc_feature 1..16: note = synthetic [barcode part1]
  source 1..16: mol_type = other DNA
gccgttctctgttgtt

SEQ ID NO: 18694 - DNA, 16 bp, synthetic construct
  misc_feature 1..16: note = synthetic [barcode part1]
  source 1..16: mol_type = other DNA
tcctaattgtgtcgac

SEQ ID NO: 18695 - DNA, 16 bp, synthetic construct
  misc_feature 1..16: note = synthetic [barcode part1]
  source 1..16: mol_type = other DNA
aagtgttcgtcactct

SEQ ID NO: 18696 - DNA, 16 bp, synthetic construct
  misc_feature 1..16: note = synthetic [barcode part1]
  source 1..16: mol_type = other DNA
aacagaggtcggaagt

SEQ ID NO: 18697 - DNA, 16 bp, synthetic construct
  misc_feature 1..16: note = synthetic [barcode part1]
  source 1..16: mol_type = other DNA
atatccgagacctgtg

SEQ ID NO: 18698 - DNA, 16 bp, synthetic construct
  misc_feature 1..16: note = synthetic [barcode part1]
  source 1..16: mol_type = other DNA
ttggtcactgagatcg

SEQ ID NO: 18699 - DNA, 16 bp, synthetic construct
  misc_feature 1..16: note = synthetic [barcode part1]
  source 1..16: mol_type = other DNA
tatcttcgtcgccgag

SEQ ID NO: 18700 - DNA, 16 bp, synthetic construct
  misc_feature 1..16: note = synthetic [barcode part1]
  source 1..16: mol_type = other DNA
acttggagtagtgaac

SEQ ID NO: 18701 - DNA, 16 bp, synthetic construct
  misc_feature 1..16: note = synthetic [barcode part1]
  source 1..16: mol_type = other DNA
ttctggtcacaggcct

SEQ ID NO: 18702 - DNA, 16 bp, synthetic construct
  misc_feature 1..16: note = synthetic [barcode part1]
  source 1..16: mol_type = other DNA
ccactacggtgttcac

SEQ ID NO: 18703 - DNA, 16 bp, synthetic construct
  misc_feature 1..16: note = synthetic [barcode part1]
  source 1..16: mol_type = other DNA
gaggagtacagttatc

SEQ ID NO: 18704 - DNA, 16 bp, synthetic construct
  misc_feature 1..16: note = synthetic [barcode part1]
  source 1..16: mol_type = other DNA
actggattggagacgc

SEQ ID NO: 18705 - DNA, 16 bp, synthetic construct
  misc_feature 1..16: note = synthetic [barcode part1]
  source 1..16: mol_type = other DNA
ttcttgaacgcgttac

SEQ ID NO: 18706 - DNA, 16 bp, synthetic construct
  misc_feature 1..16: note = synthetic [barcode part1]
  source 1..16: mol_type = other DNA
acgttgtggataagtg

SEQ ID NO: 18707 - DNA, 16 bp, synthetic construct
  misc_feature 1..16: note = synthetic [barcode part1]
  source 1..16: mol_type = other DNA
tgtccactgccacaac

SEQ ID NO: 18708 - DNA, 16 bp, synthetic construct
  misc_feature 1..16: note = synthetic [barcode part1]
  source 1..16: mol_type = other DNA
gtgaggttacttagag

SEQ ID NO: 18709 - DNA, 16 bp, synthetic construct
  misc_feature 1..16: note = synthetic [barcode part1]
  source 1..16: mol_type = other DNA
gtgaattgtgtccggt

SEQ ID NO: 18710 - DNA, 16 bp, synthetic construct
  misc_feature 1..16: note = synthetic [barcode part1]
  source 1..16: mol_type = other DNA
tactcgtataggcggt

SEQ ID NO: 18711 - DNA, 16 bp, synthetic construct
  misc_feature 1..16: note = synthetic [barcode part1]
  source 1..16: mol_type = other DNA
gtagaggcaacagtcc

SEQ ID NO: 18712 - DNA, 16 bp, synthetic construct
  misc_feature 1..16: note = synthetic [barcode part1]
  source 1..16: mol_type = other DNA
acgtgatccagaaggc

SEQ ID NO: 18713 - DNA, 16 bp, synthetic construct
  misc_feature 1..16: note = synthetic [barcode part1]
  source 1..16: mol_type = other DNA
cacggcagttcacttc

SEQ ID NO: 18714 - DNA, 16 bp, synthetic construct
  misc_feature 1..16: note = synthetic [barcode part1]
  source 1..16: mol_type = other DNA
cggcggtccttatact

SEQ ID NO: 18715 - DNA, 16 bp, synthetic construct
  misc_feature 1..16: note = synthetic [barcode part1]
  source 1..16: mol_type = other DNA
gatcacagatcttctc

SEQ ID NO: 18716 - DNA, 16 bp, synthetic construct
  misc_feature 1..16: note = synthetic [barcode part1]
  source 1..16: mol_type = other DNA
gcaactggactggagt

SEQ ID NO: 18717 - DNA, 16 bp, synthetic construct
  misc_feature 1..16: note = synthetic [barcode part1]
  source 1..16: mol_type = other DNA
tactgttagtgacggc

SEQ ID NO: 18718 - DNA, 16 bp, synthetic construct
  misc_feature 1..16: note = synthetic [barcode part1]
  source 1..16: mol_type = other DNA
ttgtgagtatctcacc

SEQ ID NO: 18719 - DNA, 16 bp, synthetic construct
  misc_feature 1..16: note = synthetic [barcode part1]
  source 1..16: mol_type = other DNA
cgtcgacttgatctcg

SEQ ID NO: 18720 - DNA, 16 bp, synthetic construct
  misc_feature 1..16: note = synthetic [barcode part1]
  source 1..16: mol_type = other DNA
aacgcgaacggttcag

SEQ ID NO: 18721 - DNA, 16 bp, synthetic construct
  misc_feature 1..16: note = synthetic [barcode part1]
  source 1..16: mol_type = other DNA
tcgagacaataggtgt

SEQ ID NO: 18722 - DNA, 16 bp, synthetic construct
  misc_feature 1..16: note = synthetic [barcode part1]
  source 1..16: mol_type = other DNA
tatcaaggaaccgcct

SEQ ID NO: 18723 - DNA, 16 bp, synthetic construct
  misc_feature 1..16: note = synthetic [barcode part1]
  source 1..16: mol_type = other DNA
tggcacgagagactac

SEQ ID NO: 18724 - DNA, 16 bp, synthetic construct
  misc_feature 1..16: note = synthetic [barcode part1]
  source 1..16: mol_type = other DNA
ccgaggtggataagtc

SEQ ID NO: 18725 - DNA, 16 bp, synthetic construct
  misc_feature 1..16: note = synthetic [barcode part1]
  source 1..16: mol_type = other DNA
agtctccactgagaac

SEQ ID NO: 18726 - DNA, 16 bp, synthetic construct
  misc_feature 1..16: note = synthetic [barcode part1]
  source 1..16: mol_type = other DNA
tccagaggccacaatt

SEQ ID NO: 18727 - DNA, 16 bp, synthetic construct
  misc_feature 1..16: note = synthetic [barcode part1]
  source 1..16: mol_type = other DNA
cctacctgtggataag

SEQ ID NO: 18728 - DNA, 16 bp, synthetic construct
  misc_feature 1..16: note = synthetic [barcode part1]
  source 1..16: mol_type = other DNA
agtcgcggactagaac

SEQ ID NO: 18729 - DNA, 16 bp, synthetic construct
  misc_feature 1..16: note = synthetic [barcode part1]
  source 1..16: mol_type = other DNA
accttaggaaggagag

SEQ ID NO: 18730 - DNA, 16 bp, synthetic construct
  misc_feature 1..16: note = synthetic [barcode part1]
  source 1..16: mol_type = other DNA
cagagaacaacacact

SEQ ID NO: 18731 - DNA, 16 bp, synthetic construct
  misc_feature 1..16: note = synthetic [barcode part1]
  source 1..16: mol_type = other DNA
atacctgcagacgttg

SEQ ID NO: 18732 - DNA, 16 bp, synthetic construct
  misc_feature 1..16: note = synthetic [barcode part1]
  source 1..16: mol_type = other DNA
gtgccgtgcaatattg

SEQ ID NO: 18733 - DNA, 16 bp, synthetic construct
  misc_feature 1..16: note = synthetic [barcode part1]
  source 1..16: mol_type = other DNA
ccgcctactcaaggtt

SEQ ID NO: 18734 - DNA, 16 bp, synthetic construct
  misc_feature 1..16: note = synthetic [barcode part1]
  source 1..16: mol_type = other DNA
acgaattggccgtact

SEQ ID NO: 18735 - DNA, 16 bp, synthetic construct
  misc_feature 1..16: note = synthetic [barcode part1]
  source 1..16: mol_type = other DNA
gtgtctcaatcactac

SEQ ID NO: 18736 - DNA, 16 bp, synthetic construct
  misc_feature 1..16: note = synthetic [barcode part1]
  source 1..16: mol_type = other DNA
atcgaatcttgcgtct

SEQ ID NO: 18737 - DNA, 16 bp, synthetic construct
  misc_feature 1..16: note = synthetic [barcode part1]
  source 1..16: mol_type = other DNA
tgaatatctcctgacc

SEQ ID NO: 18738 - DNA, 16 bp, synthetic construct
  misc_feature 1..16: note = synthetic [barcode part1]
  source 1..16: mol_type = other DNA
ccttcagtggtgtacc

SEQ ID NO: 18739 - DNA, 16 bp, synthetic construct
  misc_feature 1..16: note = synthetic [barcode part1]
  source 1..16: mol_type = other DNA
gttcggcgtactcttg

SEQ ID NO: 18740 - DNA, 16 bp, synthetic construct
  misc_feature 1..16: note = synthetic [barcode part1]
  source 1..16: mol_type = other DNA
gttgaggcaacacgtg

SEQ ID NO: 18741 - DNA, 16 bp, synthetic construct
  misc_feature 1..16: note = synthetic [barcode part1]
  source 1..16: mol_type = other DNA
gagagacgtgattatc

SEQ ID NO: 18742 - DNA, 16 bp, synthetic construct
  misc_feature 1..16: note = synthetic [barcode part1]
  source 1..16: mol_type = other DNA
tagtcggttgactggt

SEQ ID NO: 18743 - DNA, 16 bp, synthetic construct
  misc_feature 1..16: note = synthetic [barcode part1]
  source 1..16: mol_type = other DNA
gtaacaagttcaggtg

SEQ ID NO: 18744 - DNA, 16 bp, synthetic construct
  misc_feature 1..16: note = synthetic [barcode part1]
  source 1..16: mol_type = other DNA
gacagttcttcgcgtc

SEQ ID NO: 18745 - DNA, 16 bp, synthetic construct
  misc_feature 1..16: note = synthetic [barcode part1]
  source 1..16: mol_type = other DNA
agtaccgtaacgtcgt

SEQ ID NO: 18746 - DNA, 16 bp, synthetic construct
  misc_feature 1..16: note = synthetic [barcode part1]
  source 1..16: mol_type = other DNA
gagtatcacttacggc

SEQ ID NO: 18747 - DNA, 16 bp, synthetic construct
  misc_feature 1..16: note = synthetic [barcode part1]
  source 1..16: mol_type = other DNA
acaaccactagttctc

SEQ ID NO: 18748 - DNA, 16 bp, synthetic construct
  misc_feature 1..16: note = synthetic [barcode part1]
  source 1..16: mol_type = other DNA
gagtactgtaggttcc

SEQ ID NO: 18749 - DNA, 16 bp, synthetic construct
  misc_feature 1..16: note = synthetic [barcode part1]
  source 1..16: mol_type = other DNA
gccactgcacaagaag

SEQ ID NO: 18750 - DNA, 16 bp, synthetic construct
  misc_feature 1..16: note = synthetic [barcode part1]
  source 1..16: mol_type = other DNA
ttgtgtgttcttcgag

SEQ ID NO: 18751 - DNA, 16 bp, synthetic construct
  misc_feature 1..16: note = synthetic [barcode part1]
  source 1..16: mol_type = other DNA
gagacttgcaagtaac

SEQ ID NO: 18752 - DNA, 16 bp, synthetic construct
  misc_feature 1..16: note = synthetic [barcode part1]
  source 1..16: mol_type = other DNA
tggtgtgcgtagatct

SEQ ID NO: 18753 - DNA, 16 bp, synthetic construct
  misc_feature 1..16: note = synthetic [barcode part1]
  source 1..16: mol_type = other DNA
attgttctctgccacc

SEQ ID NO: 18754 - DNA, 16 bp, synthetic construct
  misc_feature 1..16: note = synthetic [barcode part1]
  source 1..16: mol_type = other DNA
gcgcctaagtatctag

SEQ ID NO: 18755 - DNA, 16 bp, synthetic construct
  misc_feature 1..16: note = synthetic [barcode part1]
  source 1..16: mol_type = other DNA
tgactacgttcgaacg

SEQ ID NO: 18756 - DNA, 16 bp, synthetic construct
  misc_feature 1..16: note = synthetic [barcode part1]
  source 1..16: mol_type = other DNA
atcaccactagtggtg

SEQ ID NO: 18757 - DNA, 16 bp, synthetic construct
  misc_feature 1..16: note = synthetic [barcode part1]
  source 1..16: mol_type = other DNA
cacctcacactacttc

SEQ ID NO: 18758 - DNA, 16 bp, synthetic construct
  misc_feature 1..16: note = synthetic [barcode part1]
  source 1..16: mol_type = other DNA
cgcacctggtgatctt

SEQ ID NO: 18759 - DNA, 16 bp, synthetic construct
  misc_feature 1..16: note = synthetic [barcode part1]
  source 1..16: mol_type = other DNA
acgcctggtgatagag

SEQ ID NO: 18760 - DNA, 16 bp, synthetic construct
  misc_feature 1..16: note = synthetic [barcode part1]
  source 1..16: mol_type = other DNA
acactactcgtgacag

SEQ ID NO: 18761 - DNA, 16 bp, synthetic construct
  misc_feature 1..16: note = synthetic [barcode part1]
  source 1..16: mol_type = other DNA
gacggtctccttgtac

SEQ ID NO: 18762 - DNA, 16 bp, synthetic construct
  misc_feature 1..16: note = synthetic [barcode part1]
  source 1..16: mol_type = other DNA
ttcgtgcctaataacc

SEQ ID NO: 18763 - DNA, 16 bp, synthetic construct
  misc_feature 1..16: note = synthetic [barcode part1]
  source 1..16: mol_type = other DNA
acgaacggtaggtaag

SEQ ID NO: 18764 - DNA, 16 bp, synthetic construct
  misc_feature 1..16: note = synthetic [barcode part1]
  source 1..16: mol_type = other DNA
cggagttgagatcctt

SEQ ID NO: 18765 - DNA, 16 bp, synthetic construct
  misc_feature 1..16: note = synthetic [barcode part1]
  source 1..16: mol_type = other DNA
gtggcgtcaatactac

SEQ ID NO: 18766 - DNA, 16 bp, synthetic construct
  misc_feature 1..16: note = synthetic [barcode part1]
  source 1..16: mol_type = other DNA
tgaagaggagagacct

SEQ ID NO: 18767 - DNA, 16 bp, synthetic construct
  misc_feature 1..16: note = synthetic [barcode part1]
  source 1..16: mol_type = other DNA
ttagagttgccgcagt

SEQ ID NO: 18768 - DNA, 16 bp, synthetic construct
  misc_feature 1..16: note = synthetic [barcode part1]
  source 1..16: mol_type = other DNA
cacgttatcggtcctg

SEQ ID NO: 18769 - DNA, 16 bp, synthetic construct
  misc_feature 1..16: note = synthetic [barcode part1]
  source 1..16: mol_type = other DNA
cgttacttgcctcact

SEQ ID NO: 18770 - DNA, 16 bp, synthetic construct
  misc_feature 1..16: note = synthetic [barcode part1]
  source 1..16: mol_type = other DNA
gaggtcaacacgactg

SEQ ID NO: 18771 - DNA, 16 bp, synthetic construct
  misc_feature 1..16: note = synthetic [barcode part1]
  source 1..16: mol_type = other DNA
accggtcaatcgattg

SEQ ID NO: 18772 - DNA, 16 bp, synthetic construct
  misc_feature 1..16: note = synthetic [barcode part1]
  source 1..16: mol_type = other DNA
tgagtgtcgtatcgac

SEQ ID NO: 18773 - DNA, 16 bp, synthetic construct
  misc_feature 1..16: note = synthetic [barcode part1]
  source 1..16: mol_type = other DNA
tcgaggaccgatacag

SEQ ID NO: 18774 - DNA, 16 bp, synthetic construct
  misc_feature 1..16: note = synthetic [barcode part1]
  source 1..16: mol_type = other DNA
agaacaatcacgaacc

SEQ ID NO: 18775 - DNA, 16 bp, synthetic construct
  misc_feature 1..16: note = synthetic [barcode part1]
  source 1..16: mol_type = other DNA
aatatctctgccgccg

SEQ ID NO: 18776 - DNA, 16 bp, synthetic construct
  misc_feature 1..16: note = synthetic [barcode part1]
  source 1..16: mol_type = other DNA
acctattagatcctgc

SEQ ID NO: 18777 - DNA, 16 bp, synthetic construct
  misc_feature 1..16: note = synthetic [barcode part1]
  source 1..16: mol_type = other DNA
ccttggcgtatccagt

SEQ ID NO: 18778 - DNA, 16 bp, synthetic construct
  misc_feature 1..16: note = synthetic [barcode part1]
  source 1..16: mol_type = other DNA
cctgtcgaaggtaact

SEQ ID NO: 18779 - DNA, 16 bp, synthetic construct
  misc_feature 1..16: note = synthetic [barcode part1]
  source 1..16: mol_type = other DNA
tcgtatcgacacaggt

SEQ ID NO: 18780 - DNA, 16 bp, synthetic construct
  misc_feature 1..16: note = synthetic [barcode part1]
  source 1..16: mol_type = other DNA
gtcctctagttaggag

SEQ ID NO: 18781 - DNA, 16 bp, synthetic construct
  misc_feature 1..16: note = synthetic [barcode part1]
  source 1..16: mol_type = other DNA
tcttggtccggtacgt

SEQ ID NO: 18782 - DNA, 16 bp, synthetic construct
  misc_feature 1..16: note = synthetic [barcode part1]
  source 1..16: mol_type = other DNA
tgacctcttctggttc

SEQ ID NO: 18783 - DNA, 16 bp, synthetic construct
  misc_feature 1..16: note = synthetic [barcode part1]
  source 1..16: mol_type = other DNA
agaccactctatacct

SEQ ID NO: 18784 - DNA, 16 bp, synthetic construct
  misc_feature 1..16: note = synthetic [barcode part1]
  source 1..16: mol_type = other DNA
accggtcaactagttg

SEQ ID NO: 18785 - DNA, 16 bp, synthetic construct
  misc_feature 1..16: note = synthetic [barcode part1]
  source 1..16: mol_type = other DNA
gcctcactagatccgt

SEQ ID NO: 18786 - DNA, 16 bp, synthetic construct
  misc_feature 1..16: note = synthetic [barcode part1]
  source 1..16: mol_type = other DNA
taggatatcgtgtgag

SEQ ID NO: 18787 - DNA, 16 bp, synthetic construct
  misc_feature 1..16: note = synthetic [barcode part1]
  source 1..16: mol_type = other DNA
gacttcttgacctcct

SEQ ID NO: 18788 - DNA, 16 bp, synthetic construct
  misc_feature 1..16: note = synthetic [barcode part1]
  source 1..16: mol_type = other DNA
acggagttgttcggag

SEQ ID NO: 18789 - DNA, 16 bp, synthetic construct
  misc_feature 1..16: note = synthetic [barcode part1]
  source 1..16: mol_type = other DNA
aacgtgtccaatcttc

SEQ ID NO: 18790 - DNA, 16 bp, synthetic construct
  misc_feature 1..16: note = synthetic [barcode part1]
  source 1..16: mol_type = other DNA
gaccttcctaagtatc

SEQ ID NO: 18791 - DNA, 16 bp, synthetic construct
  misc_feature 1..16: note = synthetic [barcode part1]
  source 1..16: mol_type = other DNA
aatccactccgaacag

SEQ ID NO: 18792 - DNA, 16 bp, synthetic construct
  misc_feature 1..16: note = synthetic [barcode part1]
  source 1..16: mol_type = other DNA
gtccaggacaataggc

SEQ ID NO: 18793 - DNA, 16 bp, synthetic construct
  misc_feature 1..16: note = synthetic [barcode part1]
  source 1..16: mol_type = other DNA
gtccagagtagacctt

SEQ ID NO: 18794 - DNA, 16 bp, synthetic construct
  misc_feature 1..16: note = synthetic [barcode part1]
  source 1..16: mol_type = other DNA
attgtccacgacgagt

SEQ ID NO: 18795 - DNA, 16 bp, synthetic construct
  misc_feature 1..16: note = synthetic [barcode part1]
  source 1..16: mol_type = other DNA
gagtacgatcgccaag

SEQ ID NO: 18796 - DNA, 16 bp, synthetic construct
  misc_feature 1..16: note = synthetic [barcode part1]
  source 1..16: mol_type = other DNA
cgaattgcgtgtctcc

SEQ ID NO: 18797 - DNA, 16 bp, synthetic construct
  misc_feature 1..16: note = synthetic [barcode part1]
  source 1..16: mol_type = other DNA
gcacagttcgacctct

SEQ ID NO: 18798 - DNA, 16 bp, synthetic construct
  misc_feature 1..16: note = synthetic [barcode part1]
  source 1..16: mol_type = other DNA
agtctcctcagatatc

SEQ ID NO: 18799 - DNA, 16 bp, synthetic construct
  misc_feature 1..16: note = synthetic [barcode part1]
  source 1..16: mol_type = other DNA
cagagttaccgtaacc

SEQ ID NO: 18800 - DNA, 16 bp, synthetic construct
  misc_feature 1..16: note = synthetic [barcode part1]
  source 1..16: mol_type = other DNA
tcgtctcacgcgattg

SEQ ID NO: 18801 - DNA, 16 bp, synthetic construct
  misc_feature 1..16: note = synthetic [barcode part1]
  source 1..16: mol_type = other DNA
ttacgcctaccaggtc

SEQ ID NO: 18802 - DNA, 16 bp, synthetic construct
  misc_feature 1..16: note = synthetic [barcode part1]
  source 1..16: mol_type = other DNA
tgtcaagtgccttcgc

SEQ ID NO: 18803 - DNA, 16 bp, synthetic construct
  misc_feature 1..16: note = synthetic [barcode part1]
  source 1..16: mol_type = other DNA
caatctctcggtctct

SEQ ID NO: 18804 - DNA, 16 bp, synthetic construct
  misc_feature 1..16: note = synthetic [barcode part1]
  source 1..16: mol_type = other DNA
aggttaacgtacaacg

SEQ ID NO: 18805 - DNA, 16 bp, synthetic construct
  misc_feature 1..16: note = synthetic [barcode part1]
  source 1..16: mol_type = other DNA
acaacacacactgtgc

SEQ ID NO: 18806 - DNA, 16 bp, synthetic construct
  misc_feature 1..16: note = synthetic [barcode part1]
  source 1..16: mol_type = other DNA
cagtgacctagatcgt

SEQ ID NO: 18807 - DNA, 16 bp, synthetic construct
  misc_feature 1..16: note = synthetic [barcode part1]
  source 1..16: mol_type = other DNA
aatcgcggttgacgtt

SEQ ID NO: 18808 - DNA, 16 bp, synthetic construct
  misc_feature 1..16: note = synthetic [barcode part1]
  source 1..16: mol_type = other DNA
atatctcttccacgcc

SEQ ID NO: 18809 - DNA, 16 bp, synthetic construct
  misc_feature 1..16: note = synthetic [barcode part1]
  source 1..16: mol_type = other DNA
ttcgcggagacagtag

SEQ ID NO: 18810 - DNA, 16 bp, synthetic construct
  misc_feature 1..16: note = synthetic [barcode part1]
  source 1..16: mol_type = other DNA
cagtatcgaacctcag

SEQ ID NO: 18811 - DNA, 16 bp, synthetic construct
  misc_feature 1..16: note = synthetic [barcode part1]
  source 1..16: mol_type = other DNA
gtagtcttctgtatcg

SEQ ID NO: 18812 - DNA, 16 bp, synthetic construct
  misc_feature 1..16: note = synthetic [barcode part1]
  source 1..16: mol_type = other DNA
taacagaagacctgtg

SEQ ID NO: 18813 - DNA, 16 bp, synthetic construct
  misc_feature 1..16: note = synthetic [barcode part1]
  source 1..16: mol_type = other DNA
gtgcagttgtggttgt

SEQ ID NO: 18814 - DNA, 16 bp, synthetic construct
  misc_feature 1..16: note = synthetic [barcode part1]
  source 1..16: mol_type = other DNA
atattaggagacgacc

SEQ ID NO: 18815 - DNA, 16 bp, synthetic construct
  misc_feature 1..16: note = synthetic [barcode part1]
  source 1..16: mol_type = other DNA
agttgtaccagagagt

SEQ ID NO: 18816 - DNA, 16 bp, synthetic construct
  misc_feature 1..16: note = synthetic [barcode part1]
  source 1..16: mol_type = other DNA
caagtgtacacctgac

SEQ ID NO: 18817 - DNA, 16 bp, synthetic construct
  misc_feature 1..16: note = synthetic [barcode part1]
  source 1..16: mol_type = other DNA
attgtgccacgaactg

SEQ ID NO: 18818 - DNA, 16 bp, synthetic construct
  misc_feature 1..16: note = synthetic [barcode part1]
  source 1..16: mol_type = other DNA
gaattcgcaggttcac

SEQ ID NO: 18819 - DNA, 16 bp, synthetic construct
  misc_feature 1..16: note = synthetic [barcode part1]
  source 1..16: mol_type = other DNA
taatctcacgcgccac

SEQ ID NO: 18820 - DNA, 16 bp, synthetic construct
  misc_feature 1..16: note = synthetic [barcode part1]
  source 1..16: mol_type = other DNA
ttactctagagtggcg

SEQ ID NO: 18821 - DNA, 16 bp, synthetic construct
  misc_feature 1..16: note = synthetic [barcode part1]
  source 1..16: mol_type = other DNA
cacctgtcacttgttc

SEQ ID NO: 18822 - DNA, 16 bp, synthetic construct
  misc_feature 1..16: note = synthetic [barcode part1]
  source 1..16: mol_type = other DNA
ttaggaattcctggcg

SEQ ID NO: 18823 - DNA, 16 bp, synthetic construct
  misc_feature 1..16: note = synthetic [barcode part1]
  source 1..16: mol_type = other DNA
cgttctaccacttcgt

SEQ ID NO: 18824 - DNA, 16 bp, synthetic construct
  misc_feature 1..16: note = synthetic [barcode part1]
  source 1..16: mol_type = other DNA
acagtaatctgtggag

SEQ ID NO: 18825 - DNA, 16 bp, synthetic construct
  misc_feature 1..16: note = synthetic [barcode part1]
  source 1..16: mol_type = other DNA
caattaagtgtgcgcc

SEQ ID NO: 18826 - DNA, 16 bp, synthetic construct
  misc_feature 1..16: note = synthetic [barcode part1]
  source 1..16: mol_type = other DNA
aaccgagaacacgtcg

SEQ ID NO: 18827 - DNA, 16 bp, synthetic construct
  misc_feature 1..16: note = synthetic [barcode part1]
  source 1..16: mol_type = other DNA
ttatctgacggcgtcc

SEQ ID NO: 18828 - DNA, 16 bp, synthetic construct
  misc_feature 1..16: note = synthetic [barcode part1]
  source 1..16: mol_type = other DNA
tactcacacggacagt

SEQ ID NO: 18829 - DNA, 16 bp, synthetic construct
  misc_feature 1..16: note = synthetic [barcode part1]
  source 1..16: mol_type = other DNA
actccgttctaacctc

SEQ ID NO: 18830 - DNA, 16 bp, synthetic construct
  misc_feature 1..16: note = synthetic [barcode part1]
  source 1..16: mol_type = other DNA
acacgactcaattcct

SEQ ID NO: 18831 - DNA, 16 bp, synthetic construct
  misc_feature 1..16: note = synthetic [barcode part1]
  source 1..16: mol_type = other DNA
tccgttgttctgttgc

SEQ ID NO: 18832 - DNA, 16 bp, synthetic construct
  misc_feature 1..16: note = synthetic [barcode part1]
  source 1..16: mol_type = other DNA
ttgcctcaaccgtacg

SEQ ID NO: 18833 - DNA, 16 bp, synthetic construct
  misc_feature 1..16: note = synthetic [barcode part1]
  source 1..16: mol_type = other DNA
tccgtcggattcgtgt

SEQ ID NO: 18834 - DNA, 16 bp, synthetic construct
  misc_feature 1..16: note = synthetic [barcode part1]
  source 1..16: mol_type = other DNA
agagtcgagagatcag

SEQ ID NO: 18835 - DNA, 16 bp, synthetic construct
  misc_feature 1..16: note = synthetic [barcode part1]
  source 1..16: mol_type = other DNA
tagacctctcaccgtg

SEQ ID NO: 18836 - DNA, 16 bp, synthetic construct
  misc_feature 1..16: note = synthetic [barcode part1]
  source 1..16: mol_type = other DNA
ttgccaacaactcgag

SEQ ID NO: 18837 - DNA, 16 bp, synthetic construct
  misc_feature 1..16: note = synthetic [barcode part1]
  source 1..16: mol_type = other DNA
tcgtgttctgccaggt

SEQ ID NO: 18838 - DNA, 16 bp, synthetic construct
  misc_feature 1..16: note = synthetic [barcode part1]
  source 1..16: mol_type = other DNA
tgtgacgacctgcctt

SEQ ID NO: 18839 - DNA, 16 bp, synthetic construct
  misc_feature 1..16: note = synthetic [barcode part1]
  source 1..16: mol_type = other DNA
gtctgaagtggatctc

SEQ ID NO: 18840 - DNA, 16 bp, synthetic construct
  misc_feature 1..16: note = synthetic [barcode part1]
  source 1..16: mol_type = other DNA
gcggaccaggaattgt

SEQ ID NO: 18841 - DNA, 16 bp, synthetic construct
  misc_feature 1..16: note = synthetic [barcode part1]
  source 1..16: mol_type = other DNA
ttgtctgtcgtccgtt

SEQ ID NO: 18842 - DNA, 16 bp, synthetic construct
  misc_feature 1..16: note = synthetic [barcode part1]
  source 1..16: mol_type = other DNA
agaccgacgtggttag

SEQ ID NO: 18843 - DNA, 16 bp, synthetic construct
  misc_feature 1..16: note = synthetic [barcode part1]
  source 1..16: mol_type = other DNA
aggacacaaccgtcag

SEQ ID NO: 18844 - DNA, 16 bp, synthetic construct
  misc_feature 1..16: note = synthetic [barcode part1]
  source 1..16: mol_type = other DNA
gccgtgacaagtagac

SEQ ID NO: 18845 - DNA, 16 bp, synthetic construct
  misc_feature 1..16: note = synthetic [barcode part1]
  source 1..16: mol_type = other DNA
gccaatacttaactcc

SEQ ID NO: 18846 - DNA, 16 bp, synthetic construct
  misc_feature 1..16: note = synthetic [barcode part1]
  source 1..16: mol_type = other DNA
tggcgtagatcacgtt

SEQ ID NO: 18847 - DNA, 16 bp, synthetic construct
  misc_feature 1..16: note = synthetic [barcode part1]
  source 1..16: mol_type = other DNA
cgtgaacgtcctgtct

SEQ ID NO: 18848 - DNA, 16 bp, synthetic construct
  misc_feature 1..16: note = synthetic [barcode part1]
  source 1..16: mol_type = other DNA
tccgcgcgacttaatc

SEQ ID NO: 18849 - DNA, 16 bp, synthetic construct
  misc_feature 1..16: note = synthetic [barcode part1]
  source 1..16: mol_type = other DNA
cacacggtattagtgc

SEQ ID NO: 18850 - DNA, 16 bp, synthetic construct
  misc_feature 1..16: note = synthetic [barcode part1]
  source 1..16: mol_type = other DNA
tatctcgcctgtcact

SEQ ID NO: 18851 - DNA, 16 bp, synthetic construct
  misc_feature 1..16: note = synthetic [barcode part1]
  source 1..16: mol_type = other DNA
aacactcctactgttg

SEQ ID NO: 18852 - DNA, 16 bp, synthetic construct
  misc_feature 1..16: note = synthetic [barcode part1]
  source 1..16: mol_type = other DNA
cacaatcgcacttgag

SEQ ID NO: 18853 - DNA, 16 bp, synthetic construct
  misc_feature 1..16: note = synthetic [barcode part1]
  source 1..16: mol_type = other DNA
cctcgcaccgataact

SEQ ID NO: 18854 - DNA, 16 bp, synthetic construct
  misc_feature 1..16: note = synthetic [barcode part1]
  source 1..16: mol_type = other DNA
cgtgaccactaaggag

SEQ ID NO: 18855 - DNA, 16 bp, synthetic construct
  misc_feature 1..16: note = synthetic [barcode part1]
  source 1..16: mol_type = other DNA
tgagtggtgtctgttg

SEQ ID NO: 18856 - DNA, 16 bp, synthetic construct
  misc_feature 1..16: note = synthetic [barcode part1]
  source 1..16: mol_type = other DNA
acgacactacggtgtt

SEQ ID NO: 18857 - DNA, 16 bp, synthetic construct
  misc_feature 1..16: note = synthetic [barcode part1]
  source 1..16: mol_type = other DNA
acacctagacgaggtg

SEQ ID NO: 18858 - DNA, 16 bp, synthetic construct
  misc_feature 1..16: note = synthetic [barcode part1]
  source 1..16: mol_type = other DNA
cagactactctacgcc

SEQ ID NO: 18859 - DNA, 16 bp, synthetic construct
  misc_feature 1..16: note = synthetic [barcode part1]
  source 1..16: mol_type = other DNA
gataggcacctacttg

SEQ ID NO: 18860 - DNA, 16 bp, synthetic construct
  misc_feature 1..16: note = synthetic [barcode part1]
  source 1..16: mol_type = other DNA
accaatcctggagttg

SEQ ID NO: 18861 - DNA, 16 bp, synthetic construct
  misc_feature 1..16: note = synthetic [barcode part1]
  source 1..16: mol_type = other DNA
gtgcgtgtacaatacc

SEQ ID NO: 18862 - DNA, 16 bp, synthetic construct
  misc_feature 1..16: note = synthetic [barcode part1]
  source 1..16: mol_type = other DNA
agttgactggtaccac

SEQ ID NO: 18863 - DNA, 16 bp, synthetic construct
  misc_feature 1..16: note = synthetic [barcode part1]
  source 1..16: mol_type = other DNA
gcaggtctgattctcc

SEQ ID NO: 18864 - DNA, 16 bp, synthetic construct
  misc_feature 1..16: note = synthetic [barcode part1]
  source 1..16: mol_type = other DNA
agactggcgactacag

SEQ ID NO: 18865 - DNA, 16 bp, synthetic construct
  misc_feature 1..16: note = synthetic [barcode part1]
  source 1..16: mol_type = other DNA
gcaggagtgacgactt

SEQ ID NO: 18866 - DNA, 16 bp, synthetic construct
  misc_feature 1..16: note = synthetic [barcode part1]
  source 1..16: mol_type = other DNA
tggtgccaggtaagtg

SEQ ID NO: 18867 - DNA, 16 bp, synthetic construct
  misc_feature 1..16: note = synthetic [barcode part1]
  source 1..16: mol_type = other DNA
acgcacctgttctacg

SEQ ID NO: 18868 - DNA, 16 bp, synthetic construct
  misc_feature 1..16: note = synthetic [barcode part1]
  source 1..16: mol_type = other DNA
acgagtcaccacctct

SEQ ID NO: 18869 - DNA, 16 bp, synthetic construct
  misc_feature 1..16: note = synthetic [barcode part1]
  source 1..16: mol_type = other DNA
ccttctggtaaggtag

SEQ ID NO: 18870 - DNA, 16 bp, synthetic construct
  misc_feature 1..16: note = synthetic [barcode part1]
  source 1..16: mol_type = other DNA
ttcacttcaagactcg

SEQ ID NO: 18871 - DNA, 16 bp, synthetic construct
  misc_feature 1..16: note = synthetic [barcode part1]
  source 1..16: mol_type = other DNA
tggtatccaagtagag

SEQ ID NO: 18872 - DNA, 16 bp, synthetic construct
  misc_feature 1..16: note = synthetic [barcode part1]
  source 1..16: mol_type = other DNA
acgacgatatcgatag

SEQ ID NO: 18873 - DNA, 16 bp, synthetic construct
  misc_feature 1..16: note = synthetic [barcode part1]
  source 1..16: mol_type = other DNA
gtgatcgaagaggcct

SEQ ID NO: 18874 - DNA, 16 bp, synthetic construct
  misc_feature 1..16: note = synthetic [barcode part1]
  source 1..16: mol_type = other DNA
gtctggagtagactct

SEQ ID NO: 18875 - DNA, 16 bp, synthetic construct
  misc_feature 1..16: note = synthetic [barcode part1]
  source 1..16: mol_type = other DNA
gatcacgccgacttct

SEQ ID NO: 18876 - DNA, 16 bp, synthetic construct
  misc_feature 1..16: note = synthetic [barcode part1]
  source 1..16: mol_type = other DNA
aatcgtggaaggattc

SEQ ID NO: 18877 - DNA, 16 bp, synthetic construct
  misc_feature 1..16: note = synthetic [barcode part1]
  source 1..16: mol_type = other DNA
tgagaggtggttgcac

SEQ ID NO: 18878 - DNA, 16 bp, synthetic construct
  misc_feature 1..16: note = synthetic [barcode part1]
  source 1..16: mol_type = other DNA
aagtcactacctccgc

SEQ ID NO: 18879 - DNA, 16 bp, synthetic construct
  misc_feature 1..16: note = synthetic [barcode part1]
  source 1..16: mol_type = other DNA
tgttgcctggaagatc

SEQ ID NO: 18880 - DNA, 16 bp, synthetic construct
  misc_feature 1..16: note = synthetic [barcode part1]
  source 1..16: mol_type = other DNA
acttgacgtcactgag

SEQ ID NO: 18881 - DNA, 16 bp, synthetic construct
  misc_feature 1..16: note = synthetic [barcode part1]
  source 1..16: mol_type = other DNA
aaggatacgttaggtc

SEQ ID NO: 18882 - DNA, 16 bp, synthetic construct
  misc_feature 1..16: note = synthetic [barcode part1]
  source 1..16: mol_type = other DNA
tgttgcacgcgtatag

SEQ ID NO: 18883 - DNA, 16 bp, synthetic construct
  misc_feature 1..16: note = synthetic [barcode part1]
  source 1..16: mol_type = other DNA
tggaatcagagaggac

SEQ ID NO: 18884 - DNA, 16 bp, synthetic construct
  misc_feature 1..16: note = synthetic [barcode part1]
  source 1..16: mol_type = other DNA
tatcggatagaagtgc

SEQ ID NO: 18885 - DNA, 16 bp, synthetic construct
  misc_feature 1..16: note = synthetic [barcode part1]
  source 1..16: mol_type = other DNA
caggatccaactgact

SEQ ID NO: 18886 - DNA, 16 bp, synthetic construct
  misc_feature 1..16: note = synthetic [barcode part1]
  source 1..16: mol_type = other DNA
acggcaacctgtgaag

SEQ ID NO: 18887 - DNA, 16 bp, synthetic construct
  misc_feature 1..16: note = synthetic [barcode part1]
  source 1..16: mol_type = other DNA
cgcgtgaggattgaac

SEQ ID NO: 18888 - DNA, 16 bp, synthetic construct
  misc_feature 1..16: note = synthetic [barcode part1]
  source 1..16: mol_type = other DNA
taacttccgcagttac

SEQ ID NO: 18889 - DNA, 16 bp, synthetic construct
  misc_feature 1..16: note = synthetic [barcode part1]
  source 1..16: mol_type = other DNA
tgccggtgttatacag

SEQ ID NO: 18890 - DNA, 16 bp, synthetic construct
  misc_feature 1..16: note = synthetic [barcode part1]
  source 1..16: mol_type = other DNA
tataccgaactgagag

SEQ ID NO: 18891 - DNA, 16 bp, synthetic construct
  misc_feature 1..16: note = synthetic [barcode part1]
  source 1..16: mol_type = other DNA
cgaaccaactggactt

SEQ ID NO: 18892 - DNA, 16 bp, synthetic construct
  misc_feature 1..16: note = synthetic [barcode part1]
  source 1..16: mol_type = other DNA
gtcacttatctcgcct

SEQ ID NO: 18893 - DNA, 16 bp, synthetic construct
  misc_feature 1..16: note = synthetic [barcode part1]
  source 1..16: mol_type = other DNA
tgccagaggtaactct

SEQ ID NO: 18894 - DNA, 16 bp, synthetic construct
  misc_feature 1..16: note = synthetic [barcode part1]
  source 1..16: mol_type = other DNA
aaccgacgcgtatact

SEQ ID NO: 18895 - DNA, 16 bp, synthetic construct
  misc_feature 1..16: note = synthetic [barcode part1]
  source 1..16: mol_type = other DNA
tcaagatacctgcctt

SEQ ID NO: 18896 - DNA, 16 bp, synthetic construct
  misc_feature 1..16: note = synthetic [barcode part1]
  source 1..16: mol_type = other DNA
tgtatctccgttagac

SEQ ID NO: 18897 - DNA, 16 bp, synthetic construct
  misc_feature 1..16: note = synthetic [barcode part1]
  source 1..16: mol_type = other DNA
gtatccaggtgtctag

SEQ ID NO: 18898 - DNA, 16 bp, synthetic construct
  misc_feature 1..16: note = synthetic [barcode part1]
  source 1..16: mol_type = other DNA
tgacactagtactgcg

SEQ ID NO: 18899 - DNA, 16 bp, synthetic construct
  misc_feature 1..16: note = synthetic [barcode part1]
  source 1..16: mol_type = other DNA
gtgccagttgagtatc

SEQ ID NO: 18900 - DNA, 16 bp, synthetic construct
  misc_feature 1..16: note = synthetic [barcode part1]
  source 1..16: mol_type = other DNA
gcagatcggaggttgt

SEQ ID NO: 18901 - DNA, 16 bp, synthetic construct
  misc_feature 1..16: note = synthetic [barcode part1]
  source 1..16: mol_type = other DNA
gttcaccgagtgaatc

SEQ ID NO: 18902 - DNA, 16 bp, synthetic construct
  misc_feature 1..16: note = synthetic [barcode part1]
  source 1..16: mol_type = other DNA
taccagacctgacaac

SEQ ID NO: 18903 - DNA, 16 bp, synthetic construct
  misc_feature 1..16: note = synthetic [barcode part1]
  source 1..16: mol_type = other DNA
aattggacgtcttgcg

SEQ ID NO: 18904 - DNA, 16 bp, synthetic construct
  misc_feature 1..16: note = synthetic [barcode part1]
  source 1..16: mol_type = other DNA
agtcgatagaacctcc

SEQ ID NO: 18905 - DNA, 16 bp, synthetic construct
  misc_feature 1..16: note = synthetic [barcode part1]
  source 1..16: mol_type = other DNA
ttgacttgacaacggc

SEQ ID NO: 18906 - DNA, 16 bp, synthetic construct
  misc_feature 1..16: note = synthetic [barcode part1]
  source 1..16: mol_type = other DNA
tgtcaacttctggccg

SEQ ID NO: 18907 - DNA, 16 bp, synthetic construct
  misc_feature 1..16: note = synthetic [barcode part1]
  source 1..16: mol_type = other DNA
tcggtgactgcgttct

SEQ ID NO: 18908 - DNA, 16 bp, synthetic construct
  misc_feature 1..16: note = synthetic [barcode part1]
  source 1..16: mol_type = other DNA
actggcgcaaggaatc

SEQ ID NO: 18909 - DNA, 16 bp, synthetic construct
  misc_feature 1..16: note = synthetic [barcode part1]
  source 1..16: mol_type = other DNA
acttgccggatcctac

SEQ ID NO: 18910 - DNA, 16 bp, synthetic construct
  misc_feature 1..16: note = synthetic [barcode part1]
  source 1..16: mol_type = other DNA
tgtgacaccgttcacc

SEQ ID NO: 18911 - DNA, 16 bp, synthetic construct
  misc_feature 1..16: note = synthetic [barcode part1]
  source 1..16: mol_type = other DNA
ttcgcctgacagatag

SEQ ID NO: 18912 - DNA, 16 bp, synthetic construct
  misc_feature 1..16: note = synthetic [barcode part1]
  source 1..16: mol_type = other DNA
gccacgagaacgaatc

SEQ ID NO: 18913 - DNA, 16 bp, synthetic construct
  misc_feature 1..16: note = synthetic [barcode part1]
  source 1..16: mol_type = other DNA
atcgttgacacctccg

SEQ ID NO: 18914 - DNA, 16 bp, synthetic construct
  misc_feature 1..16: note = synthetic [barcode part1]
  source 1..16: mol_type = other DNA
tctcctcagtcttggt

SEQ ID NO: 18915 - DNA, 16 bp, synthetic construct
  misc_feature 1..16: note = synthetic [barcode part1]
  source 1..16: mol_type = other DNA
tattccagaatccacc

SEQ ID NO: 18916 - DNA, 16 bp, synthetic construct
  misc_feature 1..16: note = synthetic [barcode part1]
  source 1..16: mol_type = other DNA
tggtcctcacgattgc

SEQ ID NO: 18917 - DNA, 16 bp, synthetic construct
  misc_feature 1..16: note = synthetic [barcode part1]
  source 1..16: mol_type = other DNA
gcaattaggagtcagt

SEQ ID NO: 18918 - DNA, 16 bp, synthetic construct
  misc_feature 1..16: note = synthetic [barcode part1]
  source 1..16: mol_type = other DNA
aacgactaagagtacc

SEQ ID NO: 18919 - DNA, 16 bp, synthetic construct
  misc_feature 1..16: note = synthetic [barcode part1]
  source 1..16: mol_type = other DNA
ttagaagtccttggcg

SEQ ID NO: 18920 - DNA, 16 bp, synthetic construct
  misc_feature 1..16: note = synthetic [barcode part1]
  source 1..16: mol_type = other DNA
cgagtattctctggcc

SEQ ID NO: 18921 - DNA, 16 bp, synthetic construct
  misc_feature 1..16: note = synthetic [barcode part1]
  source 1..16: mol_type = other DNA
acgaacgcagagttcg

SEQ ID NO: 18922 - DNA, 16 bp, synthetic construct
  misc_feature 1..16: note = synthetic [barcode part1]
  source 1..16: mol_type = other DNA
gtattcggaattcgcg

SEQ ID NO: 18923 - DNA, 16 bp, synthetic construct
  misc_feature 1..16: note = synthetic [barcode part1]
  source 1..16: mol_type = other DNA
cgtatctgtgatctgt

SEQ ID NO: 18924 - DNA, 16 bp, synthetic construct
  misc_feature 1..16: note = synthetic [barcode part1]
  source 1..16: mol_type = other DNA
gcaacttgacaactcg

SEQ ID NO: 18925 - DNA, 16 bp, synthetic construct
  misc_feature 1..16: note = synthetic [barcode part1]
  source 1..16: mol_type = other DNA
tacggtgaggcggatt

SEQ ID NO: 18926 - DNA, 16 bp, synthetic construct
  misc_feature 1..16: note = synthetic [barcode part1]
  source 1..16: mol_type = other DNA
tcactacgttccacct

SEQ ID NO: 18927 - DNA, 16 bp, synthetic construct
  misc_feature 1..16: note = synthetic [barcode part1]
  source 1..16: mol_type = other DNA
aaggatactgtcagac

SEQ ID NO: 18928 - DNA, 16 bp, synthetic construct
  misc_feature 1..16: note = synthetic [barcode part1]
  source 1..16: mol_type = other DNA
tcggttccgccaatac

SEQ ID NO: 18929 - DNA, 16 bp, synthetic construct
  misc_feature 1..16: note = synthetic [barcode part1]
  source 1..16: mol_type = other DNA
aacggtgtagatactg

SEQ ID NO: 18930 - DNA, 16 bp, synthetic construct
  misc_feature 1..16: note = synthetic [barcode part1]
  source 1..16: mol_type = other DNA
agtctcctataggttc

SEQ ID NO: 18931 - DNA, 16 bp, synthetic construct
  misc_feature 1..16: note = synthetic [barcode part1]
  source 1..16: mol_type = other DNA
agataacagagtggcg

SEQ ID NO: 18932 - DNA, 16 bp, synthetic construct
  misc_feature 1..16: note = synthetic [barcode part1]
  source 1..16: mol_type = other DNA
tctctgatacgcgatt

SEQ ID NO: 18933 - DNA, 16 bp, synthetic construct
  misc_feature 1..16: note = synthetic [barcode part1]
  source 1..16: mol_type = other DNA
aatcgcaattgcacgc

SEQ ID NO: 18934 - DNA, 16 bp, synthetic construct
  misc_feature 1..16: note = synthetic [barcode part1]
  source 1..16: mol_type = other DNA
ttcagtgttgtcggag

SEQ ID NO: 18935 - DNA, 16 bp, synthetic construct
  misc_feature 1..16: note = synthetic [barcode part1]
  source 1..16: mol_type = other DNA
gcgactaataccgact

SEQ ID NO: 18936 - DNA, 16 bp, synthetic construct
  misc_feature 1..16: note = synthetic [barcode part1]
  source 1..16: mol_type = other DNA
atcacaactgtggcgt

SEQ ID NO: 18937 - DNA, 16 bp, synthetic construct
  misc_feature 1..16: note = synthetic [barcode part1]
  source 1..16: mol_type = other DNA
actctactcacacagt

SEQ ID NO: 18938 - DNA, 16 bp, synthetic construct
  misc_feature 1..16: note = synthetic [barcode part1]
  source 1..16: mol_type = other DNA
cagatcgcagtctagt

SEQ ID NO: 18939 - DNA, 16 bp, synthetic construct
  misc_feature 1..16: note = synthetic [barcode part1]
  source 1..16: mol_type = other DNA
cactccaagatctgcc

SEQ ID NO: 18940 - DNA, 16 bp, synthetic construct
  misc_feature 1..16: note = synthetic [barcode part1]
  source 1..16: mol_type = other DNA
taaggcgtaggaagtg

SEQ ID NO: 18941 - DNA, 16 bp, synthetic construct
  misc_feature 1..16: note = synthetic [barcode part1]
  source 1..16: mol_type = other DNA
tctgtcactccactgt

SEQ ID NO: 18942 - DNA, 16 bp, synthetic construct
  misc_feature 1..16: note = synthetic [barcode part1]
  source 1..16: mol_type = other DNA
caccgcagttaactag

SEQ ID NO: 18943 - DNA, 16 bp, synthetic construct
  misc_feature 1..16: note = synthetic [barcode part1]
  source 1..16: mol_type = other DNA
cgtcacggttaatcag

SEQ ID NO: 18944 - DNA, 16 bp, synthetic construct
  misc_feature 1..16: note = synthetic [barcode part1]
  source 1..16: mol_type = other DNA
cgcctcctaatagtcg

SEQ ID NO: 18945 - DNA, 16 bp, synthetic construct
  misc_feature 1..16: note = synthetic [barcode part1]
  source 1..16: mol_type = other DNA
aattagttggccgacc

SEQ ID NO: 18946 - DNA, 16 bp, synthetic construct
  misc_feature 1..16: note = synthetic [barcode part1]
  source 1..16: mol_type = other DNA
cgaagttccgaagttc

SEQ ID NO: 18947 - DNA, 16 bp, synthetic construct
  misc_feature 1..16: note = synthetic [barcode part1]
  source 1..16: mol_type = other DNA
cgagtcctatcactcg

SEQ ID NO: 18948 - DNA, 16 bp, synthetic construct
  misc_feature 1..16: note = synthetic [barcode part1]
  source 1..16: mol_type = other DNA
tgaaccagtgtagaac

SEQ ID NO: 18949 - DNA, 16 bp, synthetic construct
  misc_feature 1..16: note = synthetic [barcode part1]
  source 1..16: mol_type = other DNA
aacgtggtattagacg

SEQ ID NO: 18950 - DNA, 16 bp, synthetic construct
  misc_feature 1..16: note = synthetic [barcode part1]
  source 1..16: mol_type = other DNA
ttaggactacctgttc

SEQ ID NO: 18951 - DNA, 16 bp, synthetic construct
  misc_feature 1..16: note = synthetic [barcode part1]
  source 1..16: mol_type = other DNA
gttacgacttaggacc

SEQ ID NO: 18952 - DNA, 16 bp, synthetic construct
  misc_feature 1..16: note = synthetic [barcode part1]
  source 1..16: mol_type = other DNA
gtcgaacaacggtctt

SEQ ID NO: 18953 - DNA, 16 bp, synthetic construct
  misc_feature 1..16: note = synthetic [barcode part1]
  source 1..16: mol_type = other DNA
cagatatcgatcctct

SEQ ID NO: 18954 - DNA, 16 bp, synthetic construct
  misc_feature 1..16: note = synthetic [barcode part1]
  source 1..16: mol_type = other DNA
tggttccgcactaacc

SEQ ID NO: 18955 - DNA, 16 bp, synthetic construct
  misc_feature 1..16: note = synthetic [barcode part1]
  source 1..16: mol_type = other DNA
attccacgaaccaggt

SEQ ID NO: 18956 - DNA, 16 bp, synthetic construct
  misc_feature 1..16: note = synthetic [barcode part1]
  source 1..16: mol_type = other DNA
tatctcgtgaggtggt

SEQ ID NO: 18957 - DNA, 16 bp, synthetic construct
  misc_feature 1..16: note = synthetic [barcode part1]
  source 1..16: mol_type = other DNA
tccactcgtctacttg

SEQ ID NO: 18958 - DNA, 16 bp, synthetic construct
  misc_feature 1..16: note = synthetic [barcode part1]
  source 1..16: mol_type = other DNA
cctatcgacgtgactc

SEQ ID NO: 18959 - DNA, 16 bp, synthetic construct
  misc_feature 1..16: note = synthetic [barcode part1]
  source 1..16: mol_type = other DNA
agttgaactacgtgag

SEQ ID NO: 18960 - DNA, 16 bp, synthetic construct
  misc_feature 1..16: note = synthetic [barcode part1]
  source 1..16: mol_type = other DNA
cagttccgcgttgatc

SEQ ID NO: 18961 - DNA, 16 bp, synthetic construct
  misc_feature 1..16: note = synthetic [barcode part1]
  source 1..16: mol_type = other DNA
tctggtattgtgtctg

SEQ ID NO: 18962 - DNA, 16 bp, synthetic construct
  misc_feature 1..16: note = synthetic [barcode part1]
  source 1..16: mol_type = other DNA
ttcctctaccgatcac

SEQ ID NO: 18963 - DNA, 16 bp, synthetic construct
  misc_feature 1..16: note = synthetic [barcode part1]
  source 1..16: mol_type = other DNA
attcggttctcgcacg

SEQ ID NO: 18964 - DNA, 16 bp, synthetic construct
  misc_feature 1..16: note = synthetic [barcode part1]
  source 1..16: mol_type = other DNA
caccactcctataggc

SEQ ID NO: 18965 - DNA, 16 bp, synthetic construct
  misc_feature 1..16: note = synthetic [barcode part1]
  source 1..16: mol_type = other DNA
tcctacagattgtcgt

SEQ ID NO: 18966 - DNA, 16 bp, synthetic construct
  misc_feature 1..16: note = synthetic [barcode part1]
  source 1..16: mol_type = other DNA
cagttgtgtgattgcg

SEQ ID NO: 18967 - DNA, 16 bp, synthetic construct
  misc_feature 1..16: note = synthetic [barcode part1]
  source 1..16: mol_type = other DNA
acttgtgttctcggcg

SEQ ID NO: 18968 - DNA, 16 bp, synthetic construct
  misc_feature 1..16: note = synthetic [barcode part1]
  source 1..16: mol_type = other DNA
gcgtgaagtaattcag

SEQ ID NO: 18969 - DNA, 16 bp, synthetic construct
  misc_feature 1..16: note = synthetic [barcode part1]
  source 1..16: mol_type = other DNA
tgacggtacgcgaagt

SEQ ID NO: 18970 - DNA, 16 bp, synthetic construct
  misc_feature 1..16: note = synthetic [barcode part1]
  source 1..16: mol_type = other DNA
tcagtctcgccagtgt

SEQ ID NO: 18971 - DNA, 16 bp, synthetic construct
  misc_feature 1..16: note = synthetic [barcode part1]
  source 1..16: mol_type = other DNA
tcctacaagagtgcgt

SEQ ID NO: 18972 - DNA, 16 bp, synthetic construct
  misc_feature 1..16: note = synthetic [barcode part1]
  source 1..16: mol_type = other DNA
gttggtgcaggaggtt

SEQ ID NO: 18973 - DNA, 16 bp, synthetic construct
  misc_feature 1..16: note = synthetic [barcode part1]
  source 1..16: mol_type = other DNA
cgttcactctgttcac

SEQ ID NO: 18974 - DNA, 16 bp, synthetic construct
  misc_feature 1..16: note = synthetic [barcode part1]
  source 1..16: mol_type = other DNA
tctcggcaacctacgt

SEQ ID NO: 18975 - DNA, 16 bp, synthetic construct
  misc_feature 1..16: note = synthetic [barcode part1]
  source 1..16: mol_type = other DNA
gtgaatccttctggcc

SEQ ID NO: 18976 - DNA, 16 bp, synthetic construct
  misc_feature 1..16: note = synthetic [barcode part1]
  source 1..16: mol_type = other DNA
acctaactacaggaag

SEQ ID NO: 18977 - DNA, 16 bp, synthetic construct
  misc_feature 1..16: note = synthetic [barcode part1]
  source 1..16: mol_type = other DNA
tgttctagtccgcgac

SEQ ID NO: 18978 - DNA, 16 bp, synthetic construct
  misc_feature 1..16: note = synthetic [barcode part1]
  source 1..16: mol_type = other DNA
acgtaatctaggaggt

SEQ ID NO: 18979 - DNA, 16 bp, synthetic construct
  misc_feature 1..16: note = synthetic [barcode part1]
  source 1..16: mol_type = other DNA
cggtgaccagtaattc

SEQ ID NO: 18980 - DNA, 16 bp, synthetic construct
  misc_feature 1..16: note = synthetic [barcode part1]
  source 1..16: mol_type = other DNA
tgtacgttgaccagtg

SEQ ID NO: 18981 - DNA, 16 bp, synthetic construct
  misc_feature 1..16: note = synthetic [barcode part1]
  source 1..16: mol_type = other DNA
gagactcttgcctatt

SEQ ID NO: 18982 - DNA, 16 bp, synthetic construct
  misc_feature 1..16: note = synthetic [barcode part1]
  source 1..16: mol_type = other DNA
cagttgtagtgtgtcg

SEQ ID NO: 18983 - DNA, 16 bp, synthetic construct
  misc_feature 1..16: note = synthetic [barcode part1]
  source 1..16: mol_type = other DNA
tgtaacggagtagatc

SEQ ID NO: 18984 - DNA, 16 bp, synthetic construct
  misc_feature 1..16: note = synthetic [barcode part1]
  source 1..16: mol_type = other DNA
agacttggtaagacac

SEQ ID NO: 18985 - DNA, 16 bp, synthetic construct
  misc_feature 1..16: note = synthetic [barcode part1]
  source 1..16: mol_type = other DNA
tctagaggagatctcc

SEQ ID NO: 18986 - DNA, 16 bp, synthetic construct
  misc_feature 1..16: note = synthetic [barcode part1]
  source 1..16: mol_type = other DNA
tgtaggtctataggcc

SEQ ID NO: 18987 - DNA, 16 bp, synthetic construct
  misc_feature 1..16: note = synthetic [barcode part1]
  source 1..16: mol_type = other DNA
tctgcgcaccaagtct

SEQ ID NO: 18988 - DNA, 16 bp, synthetic construct
  misc_feature 1..16: note = synthetic [barcode part1]
  source 1..16: mol_type = other DNA
caaccgaagttctggt

SEQ ID NO: 18989 - DNA, 16 bp, synthetic construct
  misc_feature 1..16: note = synthetic [barcode part1]
  source 1..16: mol_type = other DNA
agactgcgtagtctgt

SEQ ID NO: 18990 - DNA, 16 bp, synthetic construct
  misc_feature 1..16: note = synthetic [barcode part1]
  source 1..16: mol_type = other DNA
gaatcgcgaacacggt

SEQ ID NO: 18991 - DNA, 16 bp, synthetic construct
  misc_feature 1..16: note = synthetic [barcode part1]
  source 1..16: mol_type = other DNA
cgtgacagaactctgt

SEQ ID NO: 18992 - DNA, 16 bp, synthetic construct
  misc_feature 1..16: note = synthetic [barcode part1]
  source 1..16: mol_type = other DNA
aacgtctgacgtactg

SEQ ID NO: 18993 - DNA, 16 bp, synthetic construct
  misc_feature 1..16: note = synthetic [barcode part1]
  source 1..16: mol_type = other DNA
acctgagtggatacct

SEQ ID NO: 18994 - DNA, 16 bp, synthetic construct
  misc_feature 1..16: note = synthetic [barcode part1]
  source 1..16: mol_type = other DNA
tatctggcaataggag

SEQ ID NO: 18995 - DNA, 16 bp, synthetic construct
  misc_feature 1..16: note = synthetic [barcode part1]
  source 1..16: mol_type = other DNA
aactcagtggtgactc

SEQ ID NO: 18996 - DNA, 16 bp, synthetic construct
  misc_feature 1..16: note = synthetic [barcode part1]
  source 1..16: mol_type = other DNA
gatctccggttgtgtc

SEQ ID NO: 18997 - DNA, 16 bp, synthetic construct
  misc_feature 1..16: note = synthetic [barcode part1]
  source 1..16: mol_type = other DNA
tacgcgaatagaacgt

SEQ ID NO: 18998 - DNA, 16 bp, synthetic construct
  misc_feature 1..16: note = synthetic [barcode part1]
  source 1..16: mol_type = other DNA
actgcgagaatctcgt

SEQ ID NO: 18999 - DNA, 16 bp, synthetic construct
  misc_feature 1..16: note = synthetic [barcode part1]
  source 1..16: mol_type = other DNA
aacactcaagttggag

SEQ ID NO: 19000 - DNA, 16 bp, synthetic construct
  misc_feature 1..16: note = synthetic [barcode part1]
  source 1..16: mol_type = other DNA
gcactatctatctgtg

SEQ ID NO: 19001 - DNA, 16 bp, synthetic construct
  misc_feature 1..16: note = synthetic [barcode part1]
  source 1..16: mol_type = other DNA
cacggatctattctgt

SEQ ID NO: 19002 - DNA, 16 bp, synthetic construct
  misc_feature 1..16: note = synthetic [barcode part1]
  source 1..16: mol_type = other DNA
gtacgcagattgacct

SEQ ID NO: 19003 - DNA, 16 bp, synthetic construct
  misc_feature 1..16: note = synthetic [barcode part1]
  source 1..16: mol_type = other DNA
tctggaatcctcttcc

SEQ ID NO: 19004 - DNA, 16 bp, synthetic construct
  misc_feature 1..16: note = synthetic [barcode part1]
  source 1..16: mol_type = other DNA
cacgtcttagattacc

SEQ ID NO: 19005 - DNA, 16 bp, synthetic construct
  misc_feature 1..16: note = synthetic [barcode part1]
  source 1..16: mol_type = other DNA
tctatcactctgtcgc

SEQ ID NO: 19006 - DNA, 16 bp, synthetic construct
  misc_feature 1..16: note = synthetic [barcode part1]
  source 1..16: mol_type = other DNA
tctgagattccggaac

SEQ ID NO: 19007 - DNA, 16 bp, synthetic construct
  misc_feature 1..16: note = synthetic [barcode part1]
  source 1..16: mol_type = other DNA
cggtagtactactggt

SEQ ID NO: 19008 - DNA, 16 bp, synthetic construct
  misc_feature 1..16: note = synthetic [barcode part1]
  source 1..16: mol_type = other DNA
cgtgagtggtagaatt

SEQ ID NO: 19009 - DNA, 16 bp, synthetic construct
  misc_feature 1..16: note = synthetic [barcode part1]
  source 1..16: mol_type = other DNA
tctctcggagttgaag

SEQ ID NO: 19010 - DNA, 16 bp, synthetic construct
  misc_feature 1..16: note = synthetic [barcode part1]
  source 1..16: mol_type = other DNA
aacagaagtgtctgac

SEQ ID NO: 19011 - DNA, 16 bp, synthetic construct
  misc_feature 1..16: note = synthetic [barcode part1]
  source 1..16: mol_type = other DNA
gagtgcctggatattc

SEQ ID NO: 19012 - DNA, 16 bp, synthetic construct
  misc_feature 1..16: note = synthetic [barcode part1]
  source 1..16: mol_type = other DNA
ccactgcacttgcagt

SEQ ID NO: 19013 - DNA, 16 bp, synthetic construct
  misc_feature 1..16: note = synthetic [barcode part1]
  source 1..16: mol_type = other DNA
tatacgccttcgagag

SEQ ID NO: 19014 - DNA, 16 bp, synthetic construct
  misc_feature 1..16: note = synthetic [barcode part1]
  source 1..16: mol_type = other DNA
gtctccttgtacgacg

SEQ ID NO: 19015 - DNA, 16 bp, synthetic construct
  misc_feature 1..16: note = synthetic [barcode part1]
  source 1..16: mol_type = other DNA
tcgtccgattccgagt

SEQ ID NO: 19016 - DNA, 16 bp, synthetic construct
  misc_feature 1..16: note = synthetic [barcode part1]
  source 1..16: mol_type = other DNA
ttcgagatacacgtgc

SEQ ID NO: 19017 - DNA, 16 bp, synthetic construct
  misc_feature 1..16: note = synthetic [barcode part1]
  source 1..16: mol_type = other DNA
tacggtgccgcctatt

SEQ ID NO: 19018 - DNA, 16 bp, synthetic construct
  misc_feature 1..16: note = synthetic [barcode part1]
  source 1..16: mol_type = other DNA
gtgtgcggattagttc

SEQ ID NO: 19019 - DNA, 16 bp, synthetic construct
  misc_feature 1..16: note = synthetic [barcode part1]
  source 1..16: mol_type = other DNA
gcaggatcaagtattg

SEQ ID NO: 19020 - DNA, 16 bp, synthetic construct
  misc_feature 1..16: note = synthetic [barcode part1]
  source 1..16: mol_type = other DNA
ccgataaggtatagac

SEQ ID NO: 19021 - DNA, 16 bp, synthetic construct
  misc_feature 1..16: note = synthetic [barcode part1]
  source 1..16: mol_type = other DNA
aggttcgtcaccgtct

SEQ ID NO: 19022 - DNA, 16 bp, synthetic construct
  misc_feature 1..16: note = synthetic [barcode part1]
  source 1..16: mol_type = other DNA
cgattgtacttcctag

SEQ ID NO: 19023 - DNA, 16 bp, synthetic construct
  misc_feature 1..16: note = synthetic [barcode part1]
  source 1..16: mol_type = other DNA
actgactaaccggttg

SEQ ID NO: 19024 - DNA, 16 bp, synthetic construct
  misc_feature 1..16: note = synthetic [barcode part1]
  source 1..16: mol_type = other DNA
tgtcaaggaaccactc

SEQ ID NO: 19025 - DNA, 16 bp, synthetic construct
  misc_feature 1..16: note = synthetic [barcode part1]
  source 1..16: mol_type = other DNA
gttacaggaacaggcc

SEQ ID NO: 19026 - DNA, 16 bp, synthetic construct
  misc_feature 1..16: note = synthetic [barcode part1]
  source 1..16: mol_type = other DNA
tccgatcagtctcttc

SEQ ID NO: 19027 - DNA, 16 bp, synthetic construct
  misc_feature 1..16: note = synthetic [barcode part1]
  source 1..16: mol_type = other DNA
agtacacgccgtatac

SEQ ID NO: 19028 - DNA, 16 bp, synthetic construct
  misc_feature 1..16: note = synthetic [barcode part1]
  source 1..16: mol_type = other DNA
gaaggatagacgtctt

SEQ ID NO: 19029 - DNA, 16 bp, synthetic construct
  misc_feature 1..16: note = synthetic [barcode part1]
  source 1..16: mol_type = other DNA
cacgcctgcaattcgt

SEQ ID NO: 19030 - DNA, 16 bp, synthetic construct
  misc_feature 1..16: note = synthetic [barcode part1]
  source 1..16: mol_type = other DNA
gcaattacggcacgtt

SEQ ID NO: 19031 - DNA, 16 bp, synthetic construct
  misc_feature 1..16: note = synthetic [barcode part1]
  source 1..16: mol_type = other DNA
ttccacacagtaacct

SEQ ID NO: 19032 - DNA, 16 bp, synthetic construct
  misc_feature 1..16: note = synthetic [barcode part1]
  source 1..16: mol_type = other DNA
actgcagaagtgagtt

SEQ ID NO: 19033 - DNA, 16 bp, synthetic construct
  misc_feature 1..16: note = synthetic [barcode part1]
  source 1..16: mol_type = other DNA
atccaagtgccactcc

SEQ ID NO: 19034 - DNA, 16 bp, synthetic construct
  misc_feature 1..16: note = synthetic [barcode part1]
  source 1..16: mol_type = other DNA
tgttatctccgtgaac

SEQ ID NO: 19035 - DNA, 16 bp, synthetic construct
  misc_feature 1..16: note = synthetic [barcode part1]
  source 1..16: mol_type = other DNA
gttcaggacctgtagt

SEQ ID NO: 19036 - DNA, 16 bp, synthetic construct
  misc_feature 1..16: note = synthetic [barcode part1]
  source 1..16: mol_type = other DNA
acggaagtacaccttc

SEQ ID NO: 19037 - DNA, 16 bp, synthetic construct
  misc_feature 1..16: note = synthetic [barcode part1]
  source 1..16: mol_type = other DNA
acagtggcctacgaag

SEQ ID NO: 19038 - DNA, 16 bp, synthetic construct
  misc_feature 1..16: note = synthetic [barcode part1]
  source 1..16: mol_type = other DNA
tgatatactcctggtc

SEQ ID NO: 19039 - DNA, 16 bp, synthetic construct
  misc_feature 1..16: note = synthetic [barcode part1]
  source 1..16: mol_type = other DNA
cagagagaactaaggc

SEQ ID NO: 19040 - DNA, 16 bp, synthetic construct
  misc_feature 1..16: note = synthetic [barcode part1]
  source 1..16: mol_type = other DNA
tatatcctaccaggtc

SEQ ID NO: 19041 - DNA, 16 bp, synthetic construct
  misc_feature 1..16: note = synthetic [barcode part1]
  source 1..16: mol_type = other DNA
ataaccgttcctcaac

SEQ ID NO: 19042 - DNA, 16 bp, synthetic construct
  misc_feature 1..16: note = synthetic [barcode part1]
  source 1..16: mol_type = other DNA
gttggagttggagaag

SEQ ID NO: 19043 - DNA, 16 bp, synthetic construct
  misc_feature 1..16: note = synthetic [barcode part1]
  source 1..16: mol_type = other DNA
tgagacttgtggtgtc

SEQ ID NO: 19044 - DNA, 16 bp, synthetic construct
  misc_feature 1..16: note = synthetic [barcode part1]
  source 1..16: mol_type = other DNA
ttgtgcacaacacgtg

SEQ ID NO: 19045 - DNA, 16 bp, synthetic construct
  misc_feature 1..16: note = synthetic [barcode part1]
  source 1..16: mol_type = other DNA
gtaggcctcttcagtc

SEQ ID NO: 19046 - DNA, 16 bp, synthetic construct
  misc_feature 1..16: note = synthetic [barcode part1]
  source 1..16: mol_type = other DNA
cggtacagttactctt

SEQ ID NO: 19047 - DNA, 16 bp, synthetic construct
  misc_feature 1..16: note = synthetic [barcode part1]
  source 1..16: mol_type = other DNA
cctagaacaaccgatc

SEQ ID NO: 19048 - DNA, 16 bp, synthetic construct
  misc_feature 1..16: note = synthetic [barcode part1]
  source 1..16: mol_type = other DNA
agtaaggtgcgaactt

SEQ ID NO: 19049 - DNA, 16 bp, synthetic construct
  misc_feature 1..16: note = synthetic [barcode part1]
  source 1..16: mol_type = other DNA
cgaggatcgaattgcg

SEQ ID NO: 19050 - DNA, 16 bp, synthetic construct
  misc_feature 1..16: note = synthetic [barcode part1]
  source 1..16: mol_type = other DNA
agattcgcgccttacc

SEQ ID NO: 19051 - DNA, 16 bp, synthetic construct
  misc_feature 1..16: note = synthetic [barcode part1]
  source 1..16: mol_type = other DNA
cgaccacttgtcactg

SEQ ID NO: 19052 - DNA, 16 bp, synthetic construct
  misc_feature 1..16: note = synthetic [barcode part1]
  source 1..16: mol_type = other DNA
cggcaaccaacaattc

SEQ ID NO: 19053 - DNA, 16 bp, synthetic construct
  misc_feature 1..16: note = synthetic [barcode part1]
  source 1..16: mol_type = other DNA
tcggtccgcaattatt

SEQ ID NO: 19054 - DNA, 16 bp, synthetic construct
  misc_feature 1..16: note = synthetic [barcode part1]
  source 1..16: mol_type = other DNA
atccgtaacgtccaag

SEQ ID NO: 19055 - DNA, 16 bp, synthetic construct
  misc_feature 1..16: note = synthetic [barcode part1]
  source 1..16: mol_type = other DNA
tccagtctcagttctc

SEQ ID NO: 19056 - DNA, 16 bp, synthetic construct
  misc_feature 1..16: note = synthetic [barcode part1]
  source 1..16: mol_type = other DNA
tgaacactcgatacgc

SEQ ID NO: 19057 - DNA, 16 bp, synthetic construct
  misc_feature 1..16: note = synthetic [barcode part1]
  source 1..16: mol_type = other DNA
gcgttggaccaagaac

SEQ ID NO: 19058 - DNA, 16 bp, synthetic construct
  misc_feature 1..16: note = synthetic [barcode part1]
  source 1..16: mol_type = other DNA
ccactcgtctacttgt

SEQ ID NO: 19059 - DNA, 16 bp, synthetic construct
  misc_feature 1..16: note = synthetic [barcode part1]
  source 1..16: mol_type = other DNA
accgttcctgtgaacc

SEQ ID NO: 19060 - DNA, 16 bp, synthetic construct
  misc_feature 1..16: note = synthetic [barcode part1]
  source 1..16: mol_type = other DNA
gacaggtgccttagag

SEQ ID NO: 19061 - DNA, 16 bp, synthetic construct
  misc_feature 1..16: note = synthetic [barcode part1]
  source 1..16: mol_type = other DNA
ccaagtactcactatc

SEQ ID NO: 19062 - DNA, 16 bp, synthetic construct
  misc_feature 1..16: note = synthetic [barcode part1]
  source 1..16: mol_type = other DNA
gaagaatactcaggtc

SEQ ID NO: 19063 - DNA, 16 bp, synthetic construct
  misc_feature 1..16: note = synthetic [barcode part1]
  source 1..16: mol_type = other DNA
tgcctcggtagactct

SEQ ID NO: 19064 - DNA, 16 bp, synthetic construct
  misc_feature 1..16: note = synthetic [barcode part1]
  source 1..16: mol_type = other DNA
tgactacggcaataag

SEQ ID NO: 19065 - DNA, 16 bp, synthetic construct
  misc_feature 1..16: note = synthetic [barcode part1]
  source 1..16: mol_type = other DNA
tcagatacctaccgtt

SEQ ID NO: 19066 - DNA, 16 bp, synthetic construct
  misc_feature 1..16: note = synthetic [barcode part1]
  source 1..16: mol_type = other DNA
tgaactaacgcaaggt

SEQ ID NO: 19067 - DNA, 16 bp, synthetic construct
  misc_feature 1..16: note = synthetic [barcode part1]
  source 1..16: mol_type = other DNA
atattacgcctacctg

SEQ ID NO: 19068 - DNA, 16 bp, synthetic construct
  misc_feature 1..16: note = synthetic [barcode part1]
  source 1..16: mol_type = other DNA
gtggtccttgtgtctg

SEQ ID NO: 19069 - DNA, 16 bp, synthetic construct
  misc_feature 1..16: note = synthetic [barcode part1]
  source 1..16: mol_type = other DNA
atatctcaccggattc

SEQ ID NO: 19070 - DNA, 16 bp, synthetic construct
  misc_feature 1..16: note = synthetic [barcode part1]
  source 1..16: mol_type = other DNA
atcgaataggccacct

SEQ ID NO: 19071 - DNA, 16 bp, synthetic construct
  misc_feature 1..16: note = synthetic [barcode part1]
  source 1..16: mol_type = other DNA
atctacgttcttgacg

SEQ ID NO: 19072 - DNA, 16 bp, synthetic construct
  misc_feature 1..16: note = synthetic [barcode part1]
  source 1..16: mol_type = other DNA
tcgcggatccaacttc

SEQ ID NO: 19073 - DNA, 16 bp, synthetic construct
  misc_feature 1..16: note = synthetic [barcode part1]
  source 1..16: mol_type = other DNA
ttgtaccggtgatctt

SEQ ID NO: 19074 - DNA, 16 bp, synthetic construct
  misc_feature 1..16: note = synthetic [barcode part1]
  source 1..16: mol_type = other DNA
gcctaatctgagtcag

SEQ ID NO: 19075 - DNA, 16 bp, synthetic construct
  misc_feature 1..16: note = synthetic [barcode part1]
  source 1..16: mol_type = other DNA
tgtacgacgaaggacc

SEQ ID NO: 19076 - DNA, 16 bp, synthetic construct
  misc_feature 1..16: note = synthetic [barcode part1]
  source 1..16: mol_type = other DNA
aaccacactaggaggc

SEQ ID NO: 19077 - DNA, 16 bp, synthetic construct
  misc_feature 1..16: note = synthetic [barcode part1]
  source 1..16: mol_type = other DNA
tcaacttcagacctac

SEQ ID NO: 19078 - DNA, 16 bp, synthetic construct
  misc_feature 1..16: note = synthetic [barcode part1]
  source 1..16: mol_type = other DNA
atccaagaggtggtgc

SEQ ID NO: 19079 - DNA, 16 bp, synthetic construct
  misc_feature 1..16: note = synthetic [barcode part1]
  source 1..16: mol_type = other DNA
agatctctcctaggag

SEQ ID NO: 19080 - DNA, 16 bp, synthetic construct
  misc_feature 1..16: note = synthetic [barcode part1]
  source 1..16: mol_type = other DNA
agacaggcctatctac

SEQ ID NO: 19081 - DNA, 16 bp, synthetic construct
  misc_feature 1..16: note = synthetic [barcode part1]
  source 1..16: mol_type = other DNA
acttgtgaagaaccag

SEQ ID NO: 19082 - DNA, 16 bp, synthetic construct
  misc_feature 1..16: note = synthetic [barcode part1]
  source 1..16: mol_type = other DNA
gtcaatacctgactct

SEQ ID NO: 19083 - DNA, 16 bp, synthetic construct
  misc_feature 1..16: note = synthetic [barcode part1]
  source 1..16: mol_type = other DNA
ttagaatcctactcgc

SEQ ID NO: 19084 - DNA, 16 bp, synthetic construct
  misc_feature 1..16: note = synthetic [barcode part1]
  source 1..16: mol_type = other DNA
gatatcacgtgtgcgt

SEQ ID NO: 19085 - DNA, 16 bp, synthetic construct
  misc_feature 1..16: note = synthetic [barcode part1]
  source 1..16: mol_type = other DNA
ccgcagacaagaagtc

SEQ ID NO: 19086 - DNA, 16 bp, synthetic construct
  misc_feature 1..16: note = synthetic [barcode part1]
  source 1..16: mol_type = other DNA
gtgtctaggtatccag

SEQ ID NO: 19087 - DNA, 16 bp, synthetic construct
  misc_feature 1..16: note = synthetic [barcode part1]
  source 1..16: mol_type = other DNA
gattaacggtctcggt

SEQ ID NO: 19088 - DNA, 16 bp, synthetic construct
  misc_feature 1..16: note = synthetic [barcode part1]
  source 1..16: mol_type = other DNA
caatcgagtactgcac

SEQ ID NO: 19089 - DNA, 16 bp, synthetic construct
  misc_feature 1..16: note = synthetic [barcode part1]
  source 1..16: mol_type = other DNA
ttacgagatagagtgc

SEQ ID NO: 19090 - DNA, 16 bp, synthetic construct
  misc_feature 1..16: note = synthetic [barcode part1]
  source 1..16: mol_type = other DNA
tccgcgcaattactgc

SEQ ID NO: 19091 - DNA, 16 bp, synthetic construct
  misc_feature 1..16: note = synthetic [barcode part1]
  source 1..16: mol_type = other DNA
gcggccaataccaatt

SEQ ID NO: 19092 - DNA, 16 bp, synthetic construct
  misc_feature 1..16: note = synthetic [barcode part1]
  source 1..16: mol_type = other DNA
tgttggtgtgttgacg

SEQ ID NO: 19093 - DNA, 16 bp, synthetic construct
  misc_feature 1..16: note = synthetic [barcode part1]
  source 1..16: mol_type = other DNA
acgcgtatcagttggt

SEQ ID NO: 19094 - DNA, 16 bp, synthetic construct
  misc_feature 1..16: note = synthetic [barcode part1]
  source 1..16: mol_type = other DNA
taacgaactgcggacg

SEQ ID NO: 19095 - DNA, 16 bp, synthetic construct
  misc_feature 1..16: note = synthetic [barcode part1]
  source 1..16: mol_type = other DNA
tagacacgacttgcac

SEQ ID NO: 19096 - DNA, 16 bp, synthetic construct
  misc_feature 1..16: note = synthetic [barcode part1]
  source 1..16: mol_type = other DNA
cacttgtccgtggtgt

SEQ ID NO: 19097 - DNA, 16 bp, synthetic construct
  misc_feature 1..16: note = synthetic [barcode part1]
  source 1..16: mol_type = other DNA
tagagtcgtgtgtgtc

SEQ ID NO: 19098 - DNA, 16 bp, synthetic construct
  misc_feature 1..16: note = synthetic [barcode part1]
  source 1..16: mol_type = other DNA
gtgcctctaatccggt

SEQ ID NO: 19099 - DNA, 16 bp, synthetic construct
  misc_feature 1..16: note = synthetic [barcode part1]
  source 1..16: mol_type = other DNA
gttgaatcgttcctgt

SEQ ID NO: 19100 - DNA, 16 bp, synthetic construct
  misc_feature 1..16: note = synthetic [barcode part1]
  source 1..16: mol_type = other DNA
cctcgtgccagattgt

SEQ ID NO: 19101 - DNA, 16 bp, synthetic construct
  misc_feature 1..16: note = synthetic [barcode part1]
  source 1..16: mol_type = other DNA
tacgaacacgacaggc

SEQ ID NO: 19102 - DNA, 16 bp, synthetic construct
  misc_feature 1..16: note = synthetic [barcode part1]
  source 1..16: mol_type = other DNA
ccacctagttccgaac

SEQ ID NO: 19103 - DNA, 16 bp, synthetic construct
  misc_feature 1..16: note = synthetic [barcode part1]
  source 1..16: mol_type = other DNA
acaacgcaatcctggt

SEQ ID NO: 19104 - DNA, 16 bp, synthetic construct
  misc_feature 1..16: note = synthetic [barcode part1]
  source 1..16: mol_type = other DNA
agtcggatcactatcg

SEQ ID NO: 19105 - DNA, 16 bp, synthetic construct
  misc_feature 1..16: note = synthetic [barcode part1]
  source 1..16: mol_type = other DNA
tccgtcagacttgcac

SEQ ID NO: 19106 - DNA, 16 bp, synthetic construct
  misc_feature 1..16: note = synthetic [barcode part1]
  source 1..16: mol_type = other DNA
tcactgttcacaggtt

SEQ ID NO: 19107 - DNA, 16 bp, synthetic construct
  misc_feature 1..16: note = synthetic [barcode part1]
  source 1..16: mol_type = other DNA
ccaatcacgtgtacag

SEQ ID NO: 19108 - DNA, 16 bp, synthetic construct
  misc_feature 1..16: note = synthetic [barcode part1]
  source 1..16: mol_type = other DNA
gttggcgtgttctgtc

SEQ ID NO: 19109 - DNA, 16 bp, synthetic construct
  misc_feature 1..16: note = synthetic [barcode part1]
  source 1..16: mol_type = other DNA
gaactataggtacggt

SEQ ID NO: 19110 - DNA, 16 bp, synthetic construct
  misc_feature 1..16: note = synthetic [barcode part1]
  source 1..16: mol_type = other DNA
taggattgcaccacgt

SEQ ID NO: 19111 - DNA, 16 bp, synthetic construct
  misc_feature 1..16: note = synthetic [barcode part1]
  source 1..16: mol_type = other DNA
cgtgtagttacacggt

SEQ ID NO: 19112 - DNA, 16 bp, synthetic construct
  misc_feature 1..16: note = synthetic [barcode part1]
  source 1..16: mol_type = other DNA
acctgaacacttggac

SEQ ID NO: 19113 - DNA, 16 bp, synthetic construct
  misc_feature 1..16: note = synthetic [barcode part1]
  source 1..16: mol_type = other DNA
ttctggattacggcag

SEQ ID NO: 19114 - DNA, 16 bp, synthetic construct
  misc_feature 1..16: note = synthetic [barcode part1]
  source 1..16: mol_type = other DNA
tgccgtggattagttg

SEQ ID NO: 19115 - DNA, 16 bp, synthetic construct
  misc_feature 1..16: note = synthetic [barcode part1]
  source 1..16: mol_type = other DNA
cgagattcgcagtatc

SEQ ID NO: 19116 - DNA, 16 bp, synthetic construct
  misc_feature 1..16: note = synthetic [barcode part1]
  source 1..16: mol_type = other DNA
aggtatcacttgcgac

SEQ ID NO: 19117 - DNA, 16 bp, synthetic construct
  misc_feature 1..16: note = synthetic [barcode part1]
  source 1..16: mol_type = other DNA
acacaggcaggaatag

SEQ ID NO: 19118 - DNA, 16 bp, synthetic construct
  misc_feature 1..16: note = synthetic [barcode part1]
  source 1..16: mol_type = other DNA
tacctcagttccacct

SEQ ID NO: 19119 - DNA, 16 bp, synthetic construct
  misc_feature 1..16: note = synthetic [barcode part1]
  source 1..16: mol_type = other DNA
ccgtgcacacaattag

SEQ ID NO: 19120 - DNA, 16 bp, synthetic construct
  misc_feature 1..16: note = synthetic [barcode part1]
  source 1..16: mol_type = other DNA
tagtaacgtgcgaagt

SEQ ID NO: 19121 - DNA, 16 bp, synthetic construct
  misc_feature 1..16: note = synthetic [barcode part1]
  source 1..16: mol_type = other DNA
cggtcacagatatctg

SEQ ID NO: 19122 - DNA, 16 bp, synthetic construct
  misc_feature 1..16: note = synthetic [barcode part1]
  source 1..16: mol_type = other DNA
taagtgcgcgtaatcc

SEQ ID NO: 19123 - DNA, 16 bp, synthetic construct
  misc_feature 1..16: note = synthetic [barcode part1]
  source 1..16: mol_type = other DNA
tctgacttgcacgatt

SEQ ID NO: 19124 - DNA, 16 bp, synthetic construct
  misc_feature 1..16: note = synthetic [barcode part1]
  source 1..16: mol_type = other DNA
caccaggttattaggc

SEQ ID NO: 19125 - DNA, 16 bp, synthetic construct
  misc_feature 1..16: note = synthetic [barcode part1]
  source 1..16: mol_type = other DNA
tagtacctcacctgcg

SEQ ID NO: 19126 - DNA, 16 bp, synthetic construct
  misc_feature 1..16: note = synthetic [barcode part1]
  source 1..16: mol_type = other DNA
caccgacctaattccg

SEQ ID NO: 19127 - DNA, 16 bp, synthetic construct
  misc_feature 1..16: note = synthetic [barcode part1]
  source 1..16: mol_type = other DNA
tcgtacttccgtacct

SEQ ID NO: 19128 - DNA, 16 bp, synthetic construct
  misc_feature 1..16: note = synthetic [barcode part1]
  source 1..16: mol_type = other DNA
tgccaatatacgccag

SEQ ID NO: 19129 - DNA, 16 bp, synthetic construct
  misc_feature 1..16: note = synthetic [barcode part1]
  source 1..16: mol_type = other DNA
cgtgattcttctaacg

SEQ ID NO: 19130 - DNA, 16 bp, synthetic construct
  misc_feature 1..16: note = synthetic [barcode part1]
  source 1..16: mol_type = other DNA
taccgcgtatacacag

SEQ ID NO: 19131 - DNA, 16 bp, synthetic construct
  misc_feature 1..16: note = synthetic [barcode part1]
  source 1..16: mol_type = other DNA
cgatcaaccagaactc

SEQ ID NO: 19132 - DNA, 16 bp, synthetic construct
  misc_feature 1..16: note = synthetic [barcode part1]
  source 1..16: mol_type = other DNA
gattgtcaagtgcaag

SEQ ID NO: 19133 - DNA, 16 bp, synthetic construct
  misc_feature 1..16: note = synthetic [barcode part1]
  source 1..16: mol_type = other DNA
ttgtgacggttagtcg

SEQ ID NO: 19134 - DNA, 16 bp, synthetic construct
  misc_feature 1..16: note = synthetic [barcode part1]
  source 1..16: mol_type = other DNA
aataccgcaattggcc

SEQ ID NO: 19135 - DNA, 16 bp, synthetic construct
  misc_feature 1..16: note = synthetic [barcode part1]
  source 1..16: mol_type = other DNA
tccttgagtatcgact

SEQ ID NO: 19136 - DNA, 16 bp, synthetic construct
  misc_feature 1..16: note = synthetic [barcode part1]
  source 1..16: mol_type = other DNA
taattcctgcggtcgc

SEQ ID NO: 19137 - DNA, 16 bp, synthetic construct
  misc_feature 1..16: note = synthetic [barcode part1]
  source 1..16: mol_type = other DNA
gcgtaataccaacgtc

SEQ ID NO: 19138 - DNA, 16 bp, synthetic construct
  misc_feature 1..16: note = synthetic [barcode part1]
  source 1..16: mol_type = other DNA
gcgtacgaattagtcc

SEQ ID NO: 19139 - DNA, 16 bp, synthetic construct
  misc_feature 1..16: note = synthetic [barcode part1]
  source 1..16: mol_type = other DNA
ttcgtagaacgcctag

SEQ ID NO: 19140 - DNA, 16 bp, synthetic construct
  misc_feature 1..16: note = synthetic [barcode part1]
  source 1..16: mol_type = other DNA
gaattgccactgagtc

SEQ ID NO: 19141 - DNA, 16 bp, synthetic construct
  misc_feature 1..16: note = synthetic [barcode part1]
  source 1..16: mol_type = other DNA
ccgtagataccagtgt

SEQ ID NO: 19142 - DNA, 16 bp, synthetic construct
  misc_feature 1..16: note = synthetic [barcode part1]
  source 1..16: mol_type = other DNA
tctgagttccggttcg

SEQ ID NO: 19143 - DNA, 16 bp, synthetic construct
  misc_feature 1..16: note = synthetic [barcode part1]
  source 1..16: mol_type = other DNA
tcggcaagagtcactt

SEQ ID NO: 19144 - DNA, 16 bp, synthetic construct
  misc_feature 1..16: note = synthetic [barcode part1]
  source 1..16: mol_type = other DNA
tggtccgttgttgaag

SEQ ID NO: 19145 - DNA, 16 bp, synthetic construct
  misc_feature 1..16: note = synthetic [barcode part1]
  source 1..16: mol_type = other DNA
cgatcctcacgtgatc

SEQ ID NO: 19146 - DNA, 16 bp, synthetic construct
  misc_feature 1..16: note = synthetic [barcode part1]
  source 1..16: mol_type = other DNA
ttgaggcgtctatctt

SEQ ID NO: 19147 - DNA, 16 bp, synthetic construct
  misc_feature 1..16: note = synthetic [barcode part1]
  source 1..16: mol_type = other DNA
cggcgttagtaggtag

SEQ ID NO: 19148 - DNA, 16 bp, synthetic construct
  misc_feature 1..16: note = synthetic [barcode part1]
  source 1..16: mol_type = other DNA
ccagtaacgttagacc

SEQ ID NO: 19149 - DNA, 16 bp, synthetic construct
  misc_feature 1..16: note = synthetic [barcode part1]
  source 1..16: mol_type = other DNA
tgagttaacgccttct

SEQ ID NO: 19150 - DNA, 16 bp, synthetic construct
  misc_feature 1..16: note = synthetic [barcode part1]
  source 1..16: mol_type = other DNA
tcgtaacaccgtagtg

SEQ ID NO: 19151 - DNA, 16 bp, synthetic construct
  misc_feature 1..16: note = synthetic [barcode part1]
  source 1..16: mol_type = other DNA
accgaacttcaacggt

SEQ ID NO: 19152 - DNA, 16 bp, synthetic construct
  misc_feature 1..16: note = synthetic [barcode part1]
  source 1..16: mol_type = other DNA
gtggttgtcttgactt

SEQ ID NO: 19153 - DNA, 16 bp, synthetic construct
  misc_feature 1..16: note = synthetic [barcode part1]
  source 1..16: mol_type = other DNA
tcgtgaatcaccgtcc

SEQ ID NO: 19154 - DNA, 16 bp, synthetic construct
  misc_feature 1..16: note = synthetic [barcode part1]
  source 1..16: mol_type = other DNA
gaaccgtgtcctcact

SEQ ID NO: 19155 - DNA, 16 bp, synthetic construct
  misc_feature 1..16: note = synthetic [barcode part1]
  source 1..16: mol_type = other DNA
gccactcaacacctgt

SEQ ID NO: 19156 - DNA, 16 bp, synthetic construct
  misc_feature 1..16: note = synthetic [barcode part1]
  source 1..16: mol_type = other DNA
gatctagatcgttggc

SEQ ID NO: 19157 - DNA, 16 bp, synthetic construct
  misc_feature 1..16: note = synthetic [barcode part1]
  source 1..16: mol_type = other DNA
atccagtatcgagtcg

SEQ ID NO: 19158 - DNA, 16 bp, synthetic construct
  misc_feature 1..16: note = synthetic [barcode part1]
  source 1..16: mol_type = other DNA
gttcgtagtgtctgag

SEQ ID NO: 19159 - DNA, 16 bp, synthetic construct
  misc_feature 1..16: note = synthetic [barcode part1]
  source 1..16: mol_type = other DNA
ccttgtgatcgttaac

SEQ ID NO: 19160 - DNA, 16 bp, synthetic construct
  misc_feature 1..16: note = synthetic [barcode part1]
  source 1..16: mol_type = other DNA
ttgacacgtcagtgtg

SEQ ID NO: 19161 - DNA, 16 bp, synthetic construct
  misc_feature 1..16: note = synthetic [barcode part1]
  source 1..16: mol_type = other DNA
gagaacgttgttagac

SEQ ID NO: 19162 - DNA, 16 bp, synthetic construct
  misc_feature 1..16: note = synthetic [barcode part1]
  source 1..16: mol_type = other DNA
ttcactaagagtggcc

SEQ ID NO: 19163 - DNA, 16 bp, synthetic construct
  misc_feature 1..16: note = synthetic [barcode part1]
  source 1..16: mol_type = other DNA
attagtgcctgcaggt

SEQ ID NO: 19164 - DNA, 16 bp, synthetic construct
  misc_feature 1..16: note = synthetic [barcode part1]
  source 1..16: mol_type = other DNA
cggagaatcagtcttc

SEQ ID NO: 19165 - DNA, 16 bp, synthetic construct
  misc_feature 1..16: note = synthetic [barcode part1]
  source 1..16: mol_type = other DNA
ttaggtaccgtggact

SEQ ID NO: 19166 - DNA, 16 bp, synthetic construct
  misc_feature 1..16: note = synthetic [barcode part1]
  source 1..16: mol_type = other DNA
atccaagttactccac

SEQ ID NO: 19167 - DNA, 16 bp, synthetic construct
  misc_feature 1..16: note = synthetic [barcode part1]
  source 1..16: mol_type = other DNA
aaccacgttccttagt

SEQ ID NO: 19168 - DNA, 16 bp, synthetic construct
  misc_feature 1..16: note = synthetic [barcode part1]
  source 1..16: mol_type = other DNA
cactagttcctgattg

SEQ ID NO: 19169 - DNA, 16 bp, synthetic construct
  misc_feature 1..16: note = synthetic [barcode part1]
  source 1..16: mol_type = other DNA
atcaacctgcagtacg

SEQ ID NO: 19170 - DNA, 16 bp, synthetic construct
  misc_feature 1..16: note = synthetic [barcode part1]
  source 1..16: mol_type = other DNA
tacttcgaggcagtgt

SEQ ID NO: 19171 - DNA, 16 bp, synthetic construct
  misc_feature 1..16: note = synthetic [barcode part1]
  source 1..16: mol_type = other DNA
cgaattccagacactg

SEQ ID NO: 19172 - DNA, 16 bp, synthetic construct
  misc_feature 1..16: note = synthetic [barcode part1]
  source 1..16: mol_type = other DNA
cggagtagttcttcag

SEQ ID NO: 19173 - DNA, 16 bp, synthetic construct
  misc_feature 1..16: note = synthetic [barcode part1]
  source 1..16: mol_type = other DNA
agatagttgcgccgag

SEQ ID NO: 19174 - DNA, 16 bp, synthetic construct
  misc_feature 1..16: note = synthetic [barcode part1]
  source 1..16: mol_type = other DNA
gagtggaaggtcctac

SEQ ID NO: 19175 - DNA, 16 bp, synthetic construct
  misc_feature 1..16: note = synthetic [barcode part1]
  source 1..16: mol_type = other DNA
gtcgtgattactcact

SEQ ID NO: 19176 - DNA, 16 bp, synthetic construct
  misc_feature 1..16: note = synthetic [barcode part1]
  source 1..16: mol_type = other DNA
cgaactactggtgatc

SEQ ID NO: 19177 - DNA, 16 bp, synthetic construct
  misc_feature 1..16: note = synthetic [barcode part1]
  source 1..16: mol_type = other DNA
ttcaggaccttctctc

SEQ ID NO: 19178 - DNA, 16 bp, synthetic construct
  misc_feature 1..16: note = synthetic [barcode part1]
  source 1..16: mol_type = other DNA
ttcactgtgtgaacct

SEQ ID NO: 19179 - DNA, 16 bp, synthetic construct
  misc_feature 1..16: note = synthetic [barcode part1]
  source 1..16: mol_type = other DNA
gttgtgtcctcgtcag

SEQ ID NO: 19180 - DNA, 16 bp, synthetic construct
  misc_feature 1..16: note = synthetic [barcode part1]
  source 1..16: mol_type = other DNA
gtcactctctgaatac

SEQ ID NO: 19181 - DNA, 16 bp, synthetic construct
  misc_feature 1..16: note = synthetic [barcode part1]
  source 1..16: mol_type = other DNA
cagtcttagtcgaggt

SEQ ID NO: 19182 - DNA, 16 bp, synthetic construct
  misc_feature 1..16: note = synthetic [barcode part1]
  source 1..16: mol_type = other DNA
cacttatcgagacttc

SEQ ID NO: 19183 - DNA, 16 bp, synthetic construct
  misc_feature 1..16: note = synthetic [barcode part1]
  source 1..16: mol_type = other DNA
tgaactcgtaacagag

SEQ ID NO: 19184 - DNA, 16 bp, synthetic construct
  misc_feature 1..16: note = synthetic [barcode part1]
  source 1..16: mol_type = other DNA
tctcaatccgagtatc

SEQ ID NO: 19185 - DNA, 16 bp, synthetic construct
  misc_feature 1..16: note = synthetic [barcode part1]
  source 1..16: mol_type = other DNA
agaggaattgaggtcg

SEQ ID NO: 19186 - DNA, 16 bp, synthetic construct
  misc_feature 1..16: note = synthetic [barcode part1]
  source 1..16: mol_type = other DNA
cctgactatcggtacc

SEQ ID NO: 19187 - DNA, 16 bp, synthetic construct
  misc_feature 1..16: note = synthetic [barcode part1]
  source 1..16: mol_type = other DNA
tacaggttgttactcc

SEQ ID NO: 19188 - DNA, 16 bp, synthetic construct
  misc_feature 1..16: note = synthetic [barcode part1]
  source 1..16: mol_type = other DNA
gaattcctcaaccgag

SEQ ID NO: 19189 - DNA, 16 bp, synthetic construct
  misc_feature 1..16: note = synthetic [barcode part1]
  source 1..16: mol_type = other DNA
gcacgcgatatacgtt

SEQ ID NO: 19190 - DNA, 16 bp, synthetic construct
  misc_feature 1..16: note = synthetic [barcode part1]
  source 1..16: mol_type = other DNA
gccacagattctgaac

SEQ ID NO: 19191 - DNA, 16 bp, synthetic construct
  misc_feature 1..16: note = synthetic [barcode part1]
  source 1..16: mol_type = other DNA
tggagaacgtacagtt

SEQ ID NO: 19192 - DNA, 16 bp, synthetic construct
  misc_feature 1..16: note = synthetic [barcode part1]
  source 1..16: mol_type = other DNA
gcgagagaacttgatt

SEQ ID NO: 19193 - DNA, 16 bp, synthetic construct
  misc_feature 1..16: note = synthetic [barcode part1]
  source 1..16: mol_type = other DNA
acaactcctcagtgag

SEQ ID NO: 19194 - DNA, 16 bp, synthetic construct
  misc_feature 1..16: note = synthetic [barcode part1]
  source 1..16: mol_type = other DNA
accagtgttactgtct

SEQ ID NO: 19195 - DNA, 16 bp, synthetic construct
  misc_feature 1..16: note = synthetic [barcode part1]
  source 1..16: mol_type = other DNA
cggtccaacaacttag

SEQ ID NO: 19196 - DNA, 16 bp, synthetic construct
  misc_feature 1..16: note = synthetic [barcode part1]
  source 1..16: mol_type = other DNA
cggaacagaatatctg

SEQ ID NO: 19197 - DNA, 16 bp, synthetic construct
  misc_feature 1..16: note = synthetic [barcode part1]
  source 1..16: mol_type = other DNA
ttcactgcgcggatct

SEQ ID NO: 19198 - DNA, 16 bp, synthetic construct
  misc_feature 1..16: note = synthetic [barcode part1]
  source 1..16: mol_type = other DNA
tacttgtacgagtggc

SEQ ID NO: 19199 - DNA, 16 bp, synthetic construct
  misc_feature 1..16: note = synthetic [barcode part1]
  source 1..16: mol_type = other DNA
gacggttagtcgttgt

SEQ ID NO: 19200 - DNA, 16 bp, synthetic construct
  misc_feature 1..16: note = synthetic [barcode part1]
  source 1..16: mol_type = other DNA
ccgacgataggagtac

SEQ ID NO: 19201 - DNA, 16 bp, synthetic construct
  misc_feature 1..16: note = synthetic [barcode part1]
  source 1..16: mol_type = other DNA
actaaccaccacagtg

SEQ ID NO: 19202 - DNA, 16 bp, synthetic construct
  misc_feature 1..16: note = synthetic [barcode part1]
  source 1..16: mol_type = other DNA
acagtggcctaatctg

SEQ ID NO: 19203 - DNA, 16 bp, synthetic construct
  misc_feature 1..16: note = synthetic [barcode part1]
  source 1..16: mol_type = other DNA
gaggtacagtccaacg

SEQ ID NO: 19204 - DNA, 16 bp, synthetic construct
  misc_feature 1..16: note = synthetic [barcode part1]
  source 1..16: mol_type = other DNA
aattgtggaggccggt

SEQ ID NO: 19205 - DNA, 16 bp, synthetic construct
  misc_feature 1..16: note = synthetic [barcode part1]
  source 1..16: mol_type = other DNA
cctgacttatagttgc

SEQ ID NO: 19206 - DNA, 16 bp, synthetic construct
  misc_feature 1..16: note = synthetic [barcode part1]
  source 1..16: mol_type = other DNA
ttactgcaggtggtgt

SEQ ID NO: 19207 - DNA, 16 bp, synthetic construct
  misc_feature 1..16: note = synthetic [barcode part1]
  source 1..16: mol_type = other DNA
tgccttaacgaacctt

SEQ ID NO: 19208 - DNA, 16 bp, synthetic construct
  misc_feature 1..16: note = synthetic [barcode part1]
  source 1..16: mol_type = other DNA
gttggcctaatcaacg

SEQ ID NO: 19209 - DNA, 16 bp, synthetic construct
  misc_feature 1..16: note = synthetic [barcode part1]
  source 1..16: mol_type = other DNA
tgcaatctggcgagag

SEQ ID NO: 19210 - DNA, 16 bp, synthetic construct
  misc_feature 1..16: note = synthetic [barcode part1]
  source 1..16: mol_type = other DNA
cagaggacacgattgc

SEQ ID NO: 19211 - DNA, 16 bp, synthetic construct
  misc_feature 1..16: note = synthetic [barcode part1]
  source 1..16: mol_type = other DNA
cagaattgactccggt

SEQ ID NO: 19212 - DNA, 16 bp, synthetic construct
  misc_feature 1..16: note = synthetic [barcode part1]
  source 1..16: mol_type = other DNA
gtaacacctccaagac

SEQ ID NO: 19213 - DNA, 16 bp, synthetic construct
  misc_feature 1..16: note = synthetic [barcode part1]
  source 1..16: mol_type = other DNA
agacttgacctagacc

SEQ ID NO: 19214 - DNA, 16 bp, synthetic construct
  misc_feature 1..16: note = synthetic [barcode part1]
  source 1..16: mol_type = other DNA
tgccttgagtagaacc

SEQ ID NO: 19215 - DNA, 16 bp, synthetic construct
  misc_feature 1..16: note = synthetic [barcode part1]
  source 1..16: mol_type = other DNA
ccaatctacgaggtgt

SEQ ID NO: 19216 - DNA, 16 bp, synthetic construct
  misc_feature 1..16: note = synthetic [barcode part1]
  source 1..16: mol_type = other DNA
cgccgttatccgaact

SEQ ID NO: 19217 - DNA, 16 bp, synthetic construct
  misc_feature 1..16: note = synthetic [barcode part1]
  source 1..16: mol_type = other DNA
gcaggtctaacaggac

SEQ ID NO: 19218 - DNA, 16 bp, synthetic construct
  misc_feature 1..16: note = synthetic [barcode part1]
  source 1..16: mol_type = other DNA
cgatagtcgactcaac

SEQ ID NO: 19219 - DNA, 16 bp, synthetic construct
  misc_feature 1..16: note = synthetic [barcode part1]
  source 1..16: mol_type = other DNA
gtgtaacgtcggtatc

SEQ ID NO: 19220 - DNA, 16 bp, synthetic construct
  misc_feature 1..16: note = synthetic [barcode part1]
  source 1..16: mol_type = other DNA
gttctcgattcgacgc

SEQ ID NO: 19221 - DNA, 16 bp, synthetic construct
  misc_feature 1..16: note = synthetic [barcode part1]
  source 1..16: mol_type = other DNA
ttacttcggtcgcacg

SEQ ID NO: 19222 - DNA, 16 bp, synthetic construct
  misc_feature 1..16: note = synthetic [barcode part1]
  source 1..16: mol_type = other DNA
tccacaacactacttg

SEQ ID NO: 19223 - DNA, 16 bp, synthetic construct
  misc_feature 1..16: note = synthetic [barcode part1]
  source 1..16: mol_type = other DNA
gcctaccagatcctgt

SEQ ID NO: 19224 - DNA, 16 bp, synthetic construct
  misc_feature 1..16: note = synthetic [barcode part1]
  source 1..16: mol_type = other DNA
cgttgtacttcctctg

SEQ ID NO: 19225 - DNA, 16 bp, synthetic construct
  misc_feature 1..16: note = synthetic [barcode part1]
  source 1..16: mol_type = other DNA
agttgtactctctggt

SEQ ID NO: 19226 - DNA, 16 bp, synthetic construct
  misc_feature 1..16: note = synthetic [barcode part1]
  source 1..16: mol_type = other DNA
ttgcagagtgagatac

SEQ ID NO: 19227 - DNA, 16 bp, synthetic construct
  misc_feature 1..16: note = synthetic [barcode part1]
  source 1..16: mol_type = other DNA
gcacagtacactggtt

SEQ ID NO: 19228 - DNA, 16 bp, synthetic construct
  misc_feature 1..16: note = synthetic [barcode part1]
  source 1..16: mol_type = other DNA
cagtataccaacgcgt

SEQ ID NO: 19229 - DNA, 16 bp, synthetic construct
  misc_feature 1..16: note = synthetic [barcode part1]
  source 1..16: mol_type = other DNA
gcggtattctcagagt

SEQ ID NO: 19230 - DNA, 16 bp, synthetic construct
  misc_feature 1..16: note = synthetic [barcode part1]
  source 1..16: mol_type = other DNA
cactctctagtagttg

SEQ ID NO: 19231 - DNA, 16 bp, synthetic construct
  misc_feature 1..16: note = synthetic [barcode part1]
  source 1..16: mol_type = other DNA
tcaatcgcgtagtgtg

SEQ ID NO: 19232 - DNA, 16 bp, synthetic construct
  misc_feature 1..16: note = synthetic [barcode part1]
  source 1..16: mol_type = other DNA
gttgaacgacagtctc

SEQ ID NO: 19233 - DNA, 16 bp, synthetic construct
  misc_feature 1..16: note = synthetic [barcode part1]
  source 1..16: mol_type = other DNA
gcacgtatcttggagt

SEQ ID NO: 19234 - DNA, 16 bp, synthetic construct
  misc_feature 1..16: note = synthetic [barcode part1]
  source 1..16: mol_type = other DNA
accagagtaacacgcg

SEQ ID NO: 19235 - DNA, 16 bp, synthetic construct
  misc_feature 1..16: note = synthetic [barcode part1]
  source 1..16: mol_type = other DNA
tgtgttcgacggcctt

SEQ ID NO: 19236 - DNA, 16 bp, synthetic construct
  misc_feature 1..16: note = synthetic [barcode part1]
  source 1..16: mol_type = other DNA
acgcacgatcaattgc

SEQ ID NO: 19237 - DNA, 16 bp, synthetic construct
  misc_feature 1..16: note = synthetic [barcode part1]
  source 1..16: mol_type = other DNA
ttgtactcgtcagatc

SEQ ID NO: 19238 - DNA, 16 bp, synthetic construct
  misc_feature 1..16: note = synthetic [barcode part1]
  source 1..16: mol_type = other DNA
caaccgaatcacgact

SEQ ID NO: 19239 - DNA, 16 bp, synthetic construct
  misc_feature 1..16: note = synthetic [barcode part1]
  source 1..16: mol_type = other DNA
agtgaggagaacgatc

SEQ ID NO: 19240 - DNA, 16 bp, synthetic construct
  misc_feature 1..16: note = synthetic [barcode part1]
  source 1..16: mol_type = other DNA
ataacgcagttctggc

SEQ ID NO: 19241 - DNA, 16 bp, synthetic construct
  misc_feature 1..16: note = synthetic [barcode part1]
  source 1..16: mol_type = other DNA
tgagaatctgtgtccg

SEQ ID NO: 19242 - DNA, 16 bp, synthetic construct
  misc_feature 1..16: note = synthetic [barcode part1]
  source 1..16: mol_type = other DNA
gatcacgacgccaatt

SEQ ID NO: 19243 - DNA, 16 bp, synthetic construct
  misc_feature 1..16: note = synthetic [barcode part1]
  source 1..16: mol_type = other DNA
tcgtccgaggtaagtt

SEQ ID NO: 19244 - DNA, 16 bp, synthetic construct
  misc_feature 1..16: note = synthetic [barcode part1]
  source 1..16: mol_type = other DNA
gagtcgtacctagtgt

SEQ ID NO: 19245 - DNA, 16 bp, synthetic construct
  misc_feature 1..16: note = synthetic [barcode part1]
  source 1..16: mol_type = other DNA
tacaattcctcgtcag

SEQ ID NO: 19246 - DNA, 16 bp, synthetic construct
  misc_feature 1..16: note = synthetic [barcode part1]
  source 1..16: mol_type = other DNA
aacgccgatattgcac

SEQ ID NO: 19247 - DNA, 16 bp, synthetic construct
  misc_feature 1..16: note = synthetic [barcode part1]
  source 1..16: mol_type = other DNA
tctgtcgtgtattgac

SEQ ID NO: 19248 - DNA, 16 bp, synthetic construct
  misc_feature 1..16: note = synthetic [barcode part1]
  source 1..16: mol_type = other DNA
tcgatcagagaccttg

SEQ ID NO: 19249 - DNA, 16 bp, synthetic construct
  misc_feature 1..16: note = synthetic [barcode part1]
  source 1..16: mol_type = other DNA
ttaatcctcacgtgac

SEQ ID NO: 19250 - DNA, 16 bp, synthetic construct
  misc_feature 1..16: note = synthetic [barcode part1]
  source 1..16: mol_type = other DNA
tacacacaccaaccag

SEQ ID NO: 19251 - DNA, 16 bp, synthetic construct
  misc_feature 1..16: note = synthetic [barcode part1]
  source 1..16: mol_type = other DNA
acctcgcgcctagatt

SEQ ID NO: 19252 - DNA, 16 bp, synthetic construct
  misc_feature 1..16: note = synthetic [barcode part1]
  source 1..16: mol_type = other DNA
ataaggaactactggc

SEQ ID NO: 19253 - DNA, 16 bp, synthetic construct
  misc_feature 1..16: note = synthetic [barcode part1]
  source 1..16: mol_type = other DNA
tgaaggagaccgaagt

SEQ ID NO: 19254 - DNA, 16 bp, synthetic construct
  misc_feature 1..16: note = synthetic [barcode part1]
  source 1..16: mol_type = other DNA
gtagtgcgtcgtgatt

SEQ ID NO: 19255 - DNA, 16 bp, synthetic construct
  misc_feature 1..16: note = synthetic [barcode part1]
  source 1..16: mol_type = other DNA
tgcagacttacttcgt

SEQ ID NO: 19256 - DNA, 16 bp, synthetic construct
  misc_feature 1..16: note = synthetic [barcode part1]
  source 1..16: mol_type = other DNA
tgacgtagtgtggttc

SEQ ID NO: 19257 - DNA, 16 bp, synthetic construct
  misc_feature 1..16: note = synthetic [barcode part1]
  source 1..16: mol_type = other DNA
taggtcgtcaagtcgt

SEQ ID NO: 19258 - DNA, 16 bp, synthetic construct
  misc_feature 1..16: note = synthetic [barcode part1]
  source 1..16: mol_type = other DNA
tgtgagtgagtctacc

SEQ ID NO: 19259 - DNA, 16 bp, synthetic construct
  misc_feature 1..16: note = synthetic [barcode part1]
  source 1..16: mol_type = other DNA
agttaagtctggcctg

SEQ ID NO: 19260 - DNA, 16 bp, synthetic construct
  misc_feature 1..16: note = synthetic [barcode part1]
  source 1..16: mol_type = other DNA
cagtcgacgatactgt

SEQ ID NO: 19261 - DNA, 16 bp, synthetic construct
  misc_feature 1..16: note = synthetic [barcode part1]
  source 1..16: mol_type = other DNA
ttaccgttgagtacct

SEQ ID NO: 19262 - DNA, 16 bp, synthetic construct
  misc_feature 1..16: note = synthetic [barcode part1]
  source 1..16: mol_type = other DNA
cctaccgaaggtagtt

SEQ ID NO: 19263 - DNA, 16 bp, synthetic construct
  misc_feature 1..16: note = synthetic [barcode part1]
  source 1..16: mol_type = other DNA
gagtacgcctctatag

SEQ ID NO: 19264 - DNA, 16 bp, synthetic construct
  misc_feature 1..16: note = synthetic [barcode part1]
  source 1..16: mol_type = other DNA
tcttggcacgcagttc

SEQ ID NO: 19265 - DNA, 16 bp, synthetic construct
  misc_feature 1..16: note = synthetic [barcode part1]
  source 1..16: mol_type = other DNA
tctagtggaactaccg

SEQ ID NO: 19266 - DNA, 16 bp, synthetic construct
  misc_feature 1..16: note = synthetic [barcode part1]
  source 1..16: mol_type = other DNA
tgattaatacgcgcgc

SEQ ID NO: 19267 - DNA, 16 bp, synthetic construct
  misc_feature 1..16: note = synthetic [barcode part1]
  source 1..16: mol_type = other DNA
ttgcctagttctaggt

SEQ ID NO: 19268 - DNA, 16 bp, synthetic construct
  misc_feature 1..16: note = synthetic [barcode part1]
  source 1..16: mol_type = other DNA
ccgtctgagtaccgtt

SEQ ID NO: 19269 - DNA, 16 bp, synthetic construct
  misc_feature 1..16: note = synthetic [barcode part1]
  source 1..16: mol_type = other DNA
gaatagacactgtgac

SEQ ID NO: 19270 - DNA, 16 bp, synthetic construct
  misc_feature 1..16: note = synthetic [barcode part1]
  source 1..16: mol_type = other DNA
cgatatagtacggcct

SEQ ID NO: 19271 - DNA, 16 bp, synthetic construct
  misc_feature 1..16: note = synthetic [barcode part1]
  source 1..16: mol_type = other DNA
gatcctcttggcacac

SEQ ID NO: 19272 - DNA, 16 bp, synthetic construct
  misc_feature 1..16: note = synthetic [barcode part1]
  source 1..16: mol_type = other DNA
aggacgattactccac

SEQ ID NO: 19273 - DNA, 16 bp, synthetic construct
  misc_feature 1..16: note = synthetic [barcode part1]
  source 1..16: mol_type = other DNA
tggcaagttcaggcag

SEQ ID NO: 19274 - DNA, 16 bp, synthetic construct
  misc_feature 1..16: note = synthetic [barcode part1]
  source 1..16: mol_type = other DNA
cggtctgcctatatcg

SEQ ID NO: 19275 - DNA, 16 bp, synthetic construct
  misc_feature 1..16: note = synthetic [barcode part1]
  source 1..16: mol_type = other DNA
gtcttataagtgcctc

SEQ ID NO: 19276 - DNA, 16 bp, synthetic construct
  misc_feature 1..16: note = synthetic [barcode part1]
  source 1..16: mol_type = other DNA
atagtcctactcctag

SEQ ID NO: 19277 - DNA, 16 bp, synthetic construct
  misc_feature 1..16: note = synthetic [barcode part1]
  source 1..16: mol_type = other DNA
tccttgcgacgatctg

SEQ ID NO: 19278 - DNA, 16 bp, synthetic construct
  misc_feature 1..16: note = synthetic [barcode part1]
  source 1..16: mol_type = other DNA
caattggcgataccac

SEQ ID NO: 19279 - DNA, 16 bp, synthetic construct
  misc_feature 1..16: note = synthetic [barcode part1]
  source 1..16: mol_type = other DNA
caaggcagtaaggtag

SEQ ID NO: 19280 - DNA, 16 bp, synthetic construct
  misc_feature 1..16: note = synthetic [barcode part1]
  source 1..16: mol_type = other DNA
tcgacctagtaacgac

SEQ ID NO: 19281 - DNA, 16 bp, synthetic construct
  misc_feature 1..16: note = synthetic [barcode part1]
  source 1..16: mol_type = other DNA
acacttctgcgtcctt

SEQ ID NO: 19282 - DNA, 16 bp, synthetic construct
  misc_feature 1..16: note = synthetic [barcode part1]
  source 1..16: mol_type = other DNA
acaccttaactcggtt

SEQ ID NO: 19283 - DNA, 16 bp, synthetic construct
  misc_feature 1..16: note = synthetic [barcode part1]
  source 1..16: mol_type = other DNA
gaagtctctcaggatc

SEQ ID NO: 19284 - DNA, 16 bp, synthetic construct
  misc_feature 1..16: note = synthetic [barcode part1]
  source 1..16: mol_type = other DNA
gcgttcttggtgatcc

SEQ ID NO: 19285 - DNA, 16 bp, synthetic construct
  misc_feature 1..16: note = synthetic [barcode part1]
  source 1..16: mol_type = other DNA
tcactgttgaacacct

SEQ ID NO: 19286 - DNA, 16 bp, synthetic construct
  misc_feature 1..16: note = synthetic [barcode part1]
  source 1..16: mol_type = other DNA
gttcctaacaactcgt

SEQ ID NO: 19287 - DNA, 16 bp, synthetic construct
  misc_feature 1..16: note = synthetic [barcode part1]
  source 1..16: mol_type = other DNA
cggaatcaccgattgt

SEQ ID NO: 19288 - DNA, 16 bp, synthetic construct
  misc_feature 1..16: note = synthetic [barcode part1]
  source 1..16: mol_type = other DNA
atcagaacctcagtcg

SEQ ID NO: 19289 - DNA, 16 bp, synthetic construct
  misc_feature 1..16: note = synthetic [barcode part1]
  source 1..16: mol_type = other DNA
tacgataacctgcctt

SEQ ID NO: 19290 - DNA, 16 bp, synthetic construct
  misc_feature 1..16: note = synthetic [barcode part1]
  source 1..16: mol_type = other DNA
agtcggtacgcgtatt

SEQ ID NO: 19291 - DNA, 16 bp, synthetic construct
  misc_feature 1..16: note = synthetic [barcode part1]
  source 1..16: mol_type = other DNA
ccagtcttctgtggac

SEQ ID NO: 19292 - DNA, 16 bp, synthetic construct
  misc_feature 1..16: note = synthetic [barcode part1]
  source 1..16: mol_type = other DNA
atcaatagacaacggc

SEQ ID NO: 19293 - DNA, 16 bp, synthetic construct
  misc_feature 1..16: note = synthetic [barcode part1]
  source 1..16: mol_type = other DNA
agttaatcgcgacacc

SEQ ID NO: 19294 - DNA, 16 bp, synthetic construct
  misc_feature 1..16: note = synthetic [barcode part1]
  source 1..16: mol_type = other DNA
caccaagagtggttct

SEQ ID NO: 19295 - DNA, 16 bp, synthetic construct
  misc_feature 1..16: note = synthetic [barcode part1]
  source 1..16: mol_type = other DNA
cctaccttaagtggag

SEQ ID NO: 19296 - DNA, 16 bp, synthetic construct
  misc_feature 1..16: note = synthetic [barcode part1]
  source 1..16: mol_type = other DNA
tggtcgaagaaggagt

SEQ ID NO: 19297 - DNA, 16 bp, synthetic construct
  misc_feature 1..16: note = synthetic [barcode part1]
  source 1..16: mol_type = other DNA
accgtgcgagaatcag

SEQ ID NO: 19298 - DNA, 16 bp, synthetic construct
  misc_feature 1..16: note = synthetic [barcode part1]
  source 1..16: mol_type = other DNA
gtggactccggatatt

SEQ ID NO: 19299 - DNA, 16 bp, synthetic construct
  misc_feature 1..16: note = synthetic [barcode part1]
  source 1..16: mol_type = other DNA
gacaactgttaggtcc

SEQ ID NO: 19300 - DNA, 16 bp, synthetic construct
  misc_feature 1..16: note = synthetic [barcode part1]
  source 1..16: mol_type = other DNA
gaagaatacctagacc

SEQ ID NO: 19301 - DNA, 16 bp, synthetic construct
  misc_feature 1..16: note = synthetic [barcode part1]
  source 1..16: mol_type = other DNA
agaggtaacagtctgt

SEQ ID NO: 19302 - DNA, 16 bp, synthetic construct
  misc_feature 1..16: note = synthetic [barcode part1]
  source 1..16: mol_type = other DNA
tgcctatcgaacgagt

SEQ ID NO: 19303 - DNA, 16 bp, synthetic construct
  misc_feature 1..16: note = synthetic [barcode part1]
  source 1..16: mol_type = other DNA
aatcgacctaaggtcc

SEQ ID NO: 19304 - DNA, 16 bp, synthetic construct
  misc_feature 1..16: note = synthetic [barcode part1]
  source 1..16: mol_type = other DNA
ccaccgttctagacgt

SEQ ID NO: 19305 - DNA, 16 bp, synthetic construct
  misc_feature 1..16: note = synthetic [barcode part1]
  source 1..16: mol_type = other DNA
caggcgtcttctaacc

SEQ ID NO: 19306 - DNA, 16 bp, synthetic construct
  misc_feature 1..16: note = synthetic [barcode part1]
  source 1..16: mol_type = other DNA
aggtggaataacgttc

SEQ ID NO: 19307 - DNA, 16 bp, synthetic construct
  misc_feature 1..16: note = synthetic [barcode part1]
  source 1..16: mol_type = other DNA
cgtcagaccacgtctt

SEQ ID NO: 19308 - DNA, 16 bp, synthetic construct
  misc_feature 1..16: note = synthetic [barcode part1]
  source 1..16: mol_type = other DNA
attgcgttgcgagttg

SEQ ID NO: 19309 - DNA, 16 bp, synthetic construct
  misc_feature 1..16: note = synthetic [barcode part1]
  source 1..16: mol_type = other DNA
gccgagtcaaggatac

SEQ ID NO: 19310 - DNA, 16 bp, synthetic construct
  misc_feature 1..16: note = synthetic [barcode part1]
  source 1..16: mol_type = other DNA
tacctgagtcacctcg

SEQ ID NO: 19311 - DNA, 16 bp, synthetic construct
  misc_feature 1..16: note = synthetic [barcode part1]
  source 1..16: mol_type = other DNA
tcaacctcggagagtt

SEQ ID NO: 19312 - DNA, 16 bp, synthetic construct
  misc_feature 1..16: note = synthetic [barcode part1]
  source 1..16: mol_type = other DNA
cgagttgcgtaggagt

SEQ ID NO: 19313 - DNA, 16 bp, synthetic construct
  misc_feature 1..16: note = synthetic [barcode part1]
  source 1..16: mol_type = other DNA
gacagagttgagtatc

SEQ ID NO: 19314 - DNA, 16 bp, synthetic construct
  misc_feature 1..16: note = synthetic [barcode part1]
  source 1..16: mol_type = other DNA
acaacaactgtcaccg

SEQ ID NO: 19315 - DNA, 16 bp, synthetic construct
  misc_feature 1..16: note = synthetic [barcode part1]
  source 1..16: mol_type = other DNA
atatacaaccggccac

SEQ ID NO: 19316 - DNA, 16 bp, synthetic construct
  misc_feature 1..16: note = synthetic [barcode part1]
  source 1..16: mol_type = other DNA
ccactgtatagattcc

SEQ ID NO: 19317 - DNA, 16 bp, synthetic construct
  misc_feature 1..16: note = synthetic [barcode part1]
  source 1..16: mol_type = other DNA
agatctccgcaatacg

SEQ ID NO: 19318 - DNA, 16 bp, synthetic construct
  misc_feature 1..16: note = synthetic [barcode part1]
  source 1..16: mol_type = other DNA
accagtacctaattcc

SEQ ID NO: 19319 - DNA, 16 bp, synthetic construct
  misc_feature 1..16: note = synthetic [barcode part1]
  source 1..16: mol_type = other DNA
tgcaaggagttactag

SEQ ID NO: 19320 - DNA, 16 bp, synthetic construct
  misc_feature 1..16: note = synthetic [barcode part1]
  source 1..16: mol_type = other DNA
acacacagactggttc

SEQ ID NO: 19321 - DNA, 16 bp, synthetic construct
  misc_feature 1..16: note = synthetic [barcode part1]
  source 1..16: mol_type = other DNA
ttcgtagacaggttcg

SEQ ID NO: 19322 - DNA, 16 bp, synthetic construct
  misc_feature 1..16: note = synthetic [barcode part1]
  source 1..16: mol_type = other DNA
tcgttattctgccacc

SEQ ID NO: 19323 - DNA, 16 bp, synthetic construct
  misc_feature 1..16: note = synthetic [barcode part1]
  source 1..16: mol_type = other DNA
ttctggagtccgtctg

SEQ ID NO: 19324 - DNA, 16 bp, synthetic construct
  misc_feature 1..16: note = synthetic [barcode part1]
  source 1..16: mol_type = other DNA
cactagttctcagttg

SEQ ID NO: 19325 - DNA, 16 bp, synthetic construct
  misc_feature 1..16: note = synthetic [barcode part1]
  source 1..16: mol_type = other DNA
ccgtataaccacacag

SEQ ID NO: 19326 - DNA, 16 bp, synthetic construct
  misc_feature 1..16: note = synthetic [barcode part1]
  source 1..16: mol_type = other DNA
caacggtagttcggtt

SEQ ID NO: 19327 - DNA, 16 bp, synthetic construct
  misc_feature 1..16: note = synthetic [barcode part1]
  source 1..16: mol_type = other DNA
aagtccagtaaccacc

SEQ ID NO: 19328 - DNA, 16 bp, synthetic construct
  misc_feature 1..16: note = synthetic [barcode part1]
  source 1..16: mol_type = other DNA
acactcacttgccgtg

SEQ ID NO: 19329 - DNA, 16 bp, synthetic construct
  misc_feature 1..16: note = synthetic [barcode part1]
  source 1..16: mol_type = other DNA
ataaccgaggatcggc

SEQ ID NO: 19330 - DNA, 16 bp, synthetic construct
  misc_feature 1..16: note = synthetic [barcode part1]
  source 1..16: mol_type = other DNA
aaggttctctgagacc

SEQ ID NO: 19331 - DNA, 16 bp, synthetic construct
  misc_feature 1..16: note = synthetic [barcode part1]
  source 1..16: mol_type = other DNA
acagatacaggatctg

SEQ ID NO: 19332 - DNA, 16 bp, synthetic construct
  misc_feature 1..16: note = synthetic [barcode part1]
  source 1..16: mol_type = other DNA
acaacacgtactgcac

SEQ ID NO: 19333 - DNA, 16 bp, synthetic construct
  misc_feature 1..16: note = synthetic [barcode part1]
  source 1..16: mol_type = other DNA
tacaagtgcagtaggt

SEQ ID NO: 19334 - DNA, 16 bp, synthetic construct
  misc_feature 1..16: note = synthetic [barcode part1]
  source 1..16: mol_type = other DNA
cgttaggtcgcacctt

SEQ ID NO: 19335 - DNA, 16 bp, synthetic construct
  misc_feature 1..16: note = synthetic [barcode part1]
  source 1..16: mol_type = other DNA
tatatccgtctggcgc

SEQ ID NO: 19336 - DNA, 16 bp, synthetic construct
  misc_feature 1..16: note = synthetic [barcode part1]
  source 1..16: mol_type = other DNA
tcttacagttaggtcc

SEQ ID NO: 19337 - DNA, 16 bp, synthetic construct
  misc_feature 1..16: note = synthetic [barcode part1]
  source 1..16: mol_type = other DNA
tctcaattcaacgcac

SEQ ID NO: 19338 - DNA, 16 bp, synthetic construct
  misc_feature 1..16: note = synthetic [barcode part1]
  source 1..16: mol_type = other DNA
gtccacttgtctactc

SEQ ID NO: 19339 - DNA, 16 bp, synthetic construct
  misc_feature 1..16: note = synthetic [barcode part1]
  source 1..16: mol_type = other DNA
taatctctcggtcctc

SEQ ID NO: 19340 - DNA, 16 bp, synthetic construct
  misc_feature 1..16: note = synthetic [barcode part1]
  source 1..16: mol_type = other DNA
aatcaacttggccggt

SEQ ID NO: 19341 - DNA, 16 bp, synthetic construct
  misc_feature 1..16: note = synthetic [barcode part1]
  source 1..16: mol_type = other DNA
taggttgatcgtcgac

SEQ ID NO: 19342 - DNA, 16 bp, synthetic construct
  misc_feature 1..16: note = synthetic [barcode part1]
  source 1..16: mol_type = other DNA
aggcagtacacaaccg

SEQ ID NO: 19343 - DNA, 16 bp, synthetic construct
  misc_feature 1..16: note = synthetic [barcode part1]
  source 1..16: mol_type = other DNA
agtaatccgtgagagt

SEQ ID NO: 19344 - DNA, 16 bp, synthetic construct
  misc_feature 1..16: note = synthetic [barcode part1]
  source 1..16: mol_type = other DNA
gacagttctggtagtc

SEQ ID NO: 19345 - DNA, 16 bp, synthetic construct
  misc_feature 1..16: note = synthetic [barcode part1]
  source 1..16: mol_type = other DNA
tcgtgcggaagaatcg

SEQ ID NO: 19346 - DNA, 16 bp, synthetic construct
  misc_feature 1..16: note = synthetic [barcode part1]
  source 1..16: mol_type = other DNA
cctgagaccttcttct

SEQ ID NO: 19347 - DNA, 16 bp, synthetic construct
  misc_feature 1..16: note = synthetic [barcode part1]
  source 1..16: mol_type = other DNA
cagagtctgtgacact

SEQ ID NO: 19348 - DNA, 16 bp, synthetic construct
  misc_feature 1..16: note = synthetic [barcode part1]
  source 1..16: mol_type = other DNA
gtaaccgcacgtgatt

SEQ ID NO: 19349 - DNA, 16 bp, synthetic construct
  misc_feature 1..16: note = synthetic [barcode part1]
  source 1..16: mol_type = other DNA
gcgaagattcttacgc

SEQ ID NO: 19350 - DNA, 16 bp, synthetic construct
  misc_feature 1..16: note = synthetic [barcode part1]
  source 1..16: mol_type = other DNA
attactactggtggcg

SEQ ID NO: 19351 - DNA, 16 bp, synthetic construct
  misc_feature 1..16: note = synthetic [barcode part1]
  source 1..16: mol_type = other DNA
tacggtgcgttcgtct

SEQ ID NO: 19352 - DNA, 16 bp, synthetic construct
  misc_feature 1..16: note = synthetic [barcode part1]
  source 1..16: mol_type = other DNA
ttataagtgtcctgcc

SEQ ID NO: 19353 - DNA, 16 bp, synthetic construct
  misc_feature 1..16: note = synthetic [barcode part1]
  source 1..16: mol_type = other DNA
tagtccacctacaccg

SEQ ID NO: 19354 - DNA, 16 bp, synthetic construct
  misc_feature 1..16: note = synthetic [barcode part1]
  source 1..16: mol_type = other DNA
tggtgtgtgacctcct

SEQ ID NO: 19355 - DNA, 16 bp, synthetic construct
  misc_feature 1..16: note = synthetic [barcode part1]
  source 1..16: mol_type = other DNA
tgcgaacgccttgtct

SEQ ID NO: 19356 - DNA, 16 bp, synthetic construct
  misc_feature 1..16: note = synthetic [barcode part1]
  source 1..16: mol_type = other DNA
ttccacacaacggcct

SEQ ID NO: 19357 - DNA, 16 bp, synthetic construct
  misc_feature 1..16: note = synthetic [barcode part1]
  source 1..16: mol_type = other DNA
tctagtcctgaggagt

SEQ ID NO: 19358 - DNA, 16 bp, synthetic construct
  misc_feature 1..16: note = synthetic [barcode part1]
  source 1..16: mol_type = other DNA
cctctacgaattatcg

SEQ ID NO: 19359 - DNA, 16 bp, synthetic construct
  misc_feature 1..16: note = synthetic [barcode part1]
  source 1..16: mol_type = other DNA
cgtaaggactatcaag

SEQ ID NO: 19360 - DNA, 16 bp, synthetic construct
  misc_feature 1..16: note = synthetic [barcode part1]
  source 1..16: mol_type = other DNA
tcactaccaggtgcct

SEQ ID NO: 19361 - DNA, 16 bp, synthetic construct
  misc_feature 1..16: note = synthetic [barcode part1]
  source 1..16: mol_type = other DNA
ttgtcgtctacgagtt

SEQ ID NO: 19362 - DNA, 16 bp, synthetic construct
  misc_feature 1..16: note = synthetic [barcode part1]
  source 1..16: mol_type = other DNA
cagtgcacaacgaggt

SEQ ID NO: 19363 - DNA, 16 bp, synthetic construct
  misc_feature 1..16: note = synthetic [barcode part1]
  source 1..16: mol_type = other DNA
gttccgcagtatactt

SEQ ID NO: 19364 - DNA, 16 bp, synthetic construct
  misc_feature 1..16: note = synthetic [barcode part1]
  source 1..16: mol_type = other DNA
accagtagtcttccgc

SEQ ID NO: 19365 - DNA, 16 bp, synthetic construct
  misc_feature 1..16: note = synthetic [barcode part1]
  source 1..16: mol_type = other DNA
gttgtcacgatctgag

SEQ ID NO: 19366 - DNA, 16 bp, synthetic construct
  misc_feature 1..16: note = synthetic [barcode part1]
  source 1..16: mol_type = other DNA
taatcgcgaacgtctg

SEQ ID NO: 19367 - DNA, 16 bp, synthetic construct
  misc_feature 1..16: note = synthetic [barcode part1]
  source 1..16: mol_type = other DNA
tctctgcgacagtctg

SEQ ID NO: 19368 - DNA, 16 bp, synthetic construct
  misc_feature 1..16: note = synthetic [barcode part1]
  source 1..16: mol_type = other DNA
cctacactaatagtcc

SEQ ID NO: 19369 - DNA, 16 bp, synthetic construct
  misc_feature 1..16: note = synthetic [barcode part1]
  source 1..16: mol_type = other DNA
tgatataccggcgtac

SEQ ID NO: 19370 - DNA, 16 bp, synthetic construct
  misc_feature 1..16: note = synthetic [barcode part1]
  source 1..16: mol_type = other DNA
caccttcagttcggtg

SEQ ID NO: 19371 - DNA, 16 bp, synthetic construct
  misc_feature 1..16: note = synthetic [barcode part1]
  source 1..16: mol_type = other DNA
acggttggactcctct

SEQ ID NO: 19372 - DNA, 16 bp, synthetic construct
  misc_feature 1..16: note = synthetic [barcode part1]
  source 1..16: mol_type = other DNA
atcgtactcgagtgtg

SEQ ID NO: 19373 - DNA, 16 bp, synthetic construct
  misc_feature 1..16: note = synthetic [barcode part1]
  source 1..16: mol_type = other DNA
aggtgttgacacttgc

SEQ ID NO: 19374 - DNA, 16 bp, synthetic construct
  misc_feature 1..16: note = synthetic [barcode part1]
  source 1..16: mol_type = other DNA
accgcggataatacct

SEQ ID NO: 19375 - DNA, 16 bp, synthetic construct
  misc_feature 1..16: note = synthetic [barcode part1]
  source 1..16: mol_type = other DNA
taggactacgttgtgc

SEQ ID NO: 19376 - DNA, 16 bp, synthetic construct
  misc_feature 1..16: note = synthetic [barcode part1]
  source 1..16: mol_type = other DNA
ccacacttagaccgtc

SEQ ID NO: 19377 - DNA, 16 bp, synthetic construct
  misc_feature 1..16: note = synthetic [barcode part1]
  source 1..16: mol_type = other DNA
cctggttgtacgtcac

SEQ ID NO: 19378 - DNA, 16 bp, synthetic construct
  misc_feature 1..16: note = synthetic [barcode part1]
  source 1..16: mol_type = other DNA
tgcgttagacctcctg

SEQ ID NO: 19379 - DNA, 16 bp, synthetic construct
  misc_feature 1..16: note = synthetic [barcode part1]
  source 1..16: mol_type = other DNA
tccaattacgtcgatc

SEQ ID NO: 19380 - DNA, 16 bp, synthetic construct
  misc_feature 1..16: note = synthetic [barcode part1]
  source 1..16: mol_type = other DNA
gttctgagactgatcg

SEQ ID NO: 19381 - DNA, 16 bp, synthetic construct
  misc_feature 1..16: note = synthetic [barcode part1]
  source 1..16: mol_type = other DNA
acgatcgcacacaact

SEQ ID NO: 19382 - DNA, 16 bp, synthetic construct
  misc_feature 1..16: note = synthetic [barcode part1]
  source 1..16: mol_type = other DNA
cctacacgactattac

SEQ ID NO: 19383 - DNA, 16 bp, synthetic construct
  misc_feature 1..16: note = synthetic [barcode part1]
  source 1..16: mol_type = other DNA
gtaggcagataccgtg

SEQ ID NO: 19384 - DNA, 16 bp, synthetic construct
  misc_feature 1..16: note = synthetic [barcode part1]
  source 1..16: mol_type = other DNA
cgcgatatagataggt

SEQ ID NO: 19385 - DNA, 16 bp, synthetic construct
  misc_feature 1..16: note = synthetic [barcode part1]
  source 1..16: mol_type = other DNA
aaccttcggtctgcgt

SEQ ID NO: 19386 - DNA, 16 bp, synthetic construct
  misc_feature 1..16: note = synthetic [barcode part1]
  source 1..16: mol_type = other DNA
taccgaatcgcacctc

SEQ ID NO: 19387 - DNA, 16 bp, synthetic construct
  misc_feature 1..16: note = synthetic [barcode part1]
  source 1..16: mol_type = other DNA
gatcgatatatcgcgc

SEQ ID NO: 19388 - DNA, 16 bp, synthetic construct
  misc_feature 1..16: note = synthetic [barcode part1]
  source 1..16: mol_type = other DNA
tcaagaattggcgtag

SEQ ID NO: 19389 - DNA, 16 bp, synthetic construct
  misc_feature 1..16: note = synthetic [barcode part1]
  source 1..16: mol_type = other DNA
agaccttatacgtgcg

SEQ ID NO: 19390 - DNA, 16 bp, synthetic construct
  misc_feature 1..16: note = synthetic [barcode part1]
  source 1..16: mol_type = other DNA
tccttagtggcgcgtt

SEQ ID NO: 19391 - DNA, 16 bp, synthetic construct
  misc_feature 1..16: note = synthetic [barcode part1]
  source 1..16: mol_type = other DNA
gccttaagtgtacgtg

SEQ ID NO: 19392 - DNA, 16 bp, synthetic construct
  misc_feature 1..16: note = synthetic [barcode part1]
  source 1..16: mol_type = other DNA
taggtcagactaccac

SEQ ID NO: 19393 - DNA, 16 bp, synthetic construct
  misc_feature 1..16: note = synthetic [barcode part1]
  source 1..16: mol_type = other DNA
taacgacctggactac

SEQ ID NO: 19394 - DNA, 16 bp, synthetic construct
  misc_feature 1..16: note = synthetic [barcode part1]
  source 1..16: mol_type = other DNA
gtgtcgagttggaggt

SEQ ID NO: 19395 - DNA, 16 bp, synthetic construct
  misc_feature 1..16: note = synthetic [barcode part1]
  source 1..16: mol_type = other DNA
tattagttcggtcctg

SEQ ID NO: 19396 - DNA, 16 bp, synthetic construct
  misc_feature 1..16: note = synthetic [barcode part1]
  source 1..16: mol_type = other DNA
gagaggtattctctgc

SEQ ID NO: 19397 - DNA, 16 bp, synthetic construct
  misc_feature 1..16: note = synthetic [barcode part1]
  source 1..16: mol_type = other DNA
gtggtgcaactaatcc

SEQ ID NO: 19398 - DNA, 16 bp, synthetic construct
  misc_feature 1..16: note = synthetic [barcode part1]
  source 1..16: mol_type = other DNA
acgaggagattcggtc

SEQ ID NO: 19399 - DNA, 16 bp, synthetic construct
  misc_feature 1..16: note = synthetic [barcode part1]
  source 1..16: mol_type = other DNA
ccacggtagttaatcg

SEQ ID NO: 19400 - DNA, 16 bp, synthetic construct
  misc_feature 1..16: note = synthetic [barcode part1]
  source 1..16: mol_type = other DNA
acttgagtctattgcc

SEQ ID NO: 19401 - DNA, 16 bp, synthetic construct
  misc_feature 1..16: note = synthetic [barcode part1]
  source 1..16: mol_type = other DNA
taactcgtccgtaccg

SEQ ID NO: 19402 - DNA, 16 bp, synthetic construct
  misc_feature 1..16: note = synthetic [barcode part1]
  source 1..16: mol_type = other DNA
gtacactacctgagtg

SEQ ID NO: 19403 - DNA, 16 bp, synthetic construct
  misc_feature 1..16: note = synthetic [barcode part1]
  source 1..16: mol_type = other DNA
tctgagtacgatcacg

SEQ ID NO: 19404 - DNA, 16 bp, synthetic construct
  misc_feature 1..16: note = synthetic [barcode part1]
  source 1..16: mol_type = other DNA
agtctgtcttgccacg

SEQ ID NO: 19405 - DNA, 16 bp, synthetic construct
  misc_feature 1..16: note = synthetic [barcode part1]
  source 1..16: mol_type = other DNA
gttccggatatcgtag

SEQ ID NO: 19406 - DNA, 16 bp, synthetic construct
  misc_feature 1..16: note = synthetic [barcode part1]
  source 1..16: mol_type = other DNA
actggactgtctccgt

SEQ ID NO: 19407 - DNA, 16 bp, synthetic construct
  misc_feature 1..16: note = synthetic [barcode part1]
  source 1..16: mol_type = other DNA
aacgtacctagagaac

SEQ ID NO: 19408 - DNA, 16 bp, synthetic construct
  misc_feature 1..16: note = synthetic [barcode part1]
  source 1..16: mol_type = other DNA
tgcagtattgcctatc

SEQ ID NO: 19409 - DNA, 16 bp, synthetic construct
  misc_feature 1..16: note = synthetic [barcode part1]
  source 1..16: mol_type = other DNA
gcgttctgttggatcc

SEQ ID NO: 19410 - DNA, 16 bp, synthetic construct
  misc_feature 1..16: note = synthetic [barcode part1]
  source 1..16: mol_type = other DNA
agttgtgtcagttctc

SEQ ID NO: 19411 - DNA, 16 bp, synthetic construct
  misc_feature 1..16: note = synthetic [barcode part1]
  source 1..16: mol_type = other DNA
aacaattaagacgcgc

SEQ ID NO: 19412 - DNA, 16 bp, synthetic construct
  misc_feature 1..16: note = synthetic [barcode part1]
  source 1..16: mol_type = other DNA
gtacgagtattgagtg

SEQ ID NO: 19413 - DNA, 16 bp, synthetic construct
  misc_feature 1..16: note = synthetic [barcode part1]
  source 1..16: mol_type = other DNA
tcgaatctgtattccg

SEQ ID NO: 19414 - DNA, 16 bp, synthetic construct
  misc_feature 1..16: note = synthetic [barcode part1]
  source 1..16: mol_type = other DNA
tggcgaataggtgtcg

SEQ ID NO: 19415 - DNA, 16 bp, synthetic construct
  misc_feature 1..16: note = synthetic [barcode part1]
  source 1..16: mol_type = other DNA
actattcggtactcac

SEQ ID NO: 19416 - DNA, 16 bp, synthetic construct
  misc_feature 1..16: note = synthetic [barcode part1]
  source 1..16: mol_type = other DNA
tatcgagtcaccagac

SEQ ID NO: 19417 - DNA, 16 bp, synthetic construct
  misc_feature 1..16: note = synthetic [barcode part1]
  source 1..16: mol_type = other DNA
gatacgttcagtcttc

SEQ ID NO: 19418 - DNA, 16 bp, synthetic construct
  misc_feature 1..16: note = synthetic [barcode part1]
  source 1..16: mol_type = other DNA
aattgtggcgccagtt

SEQ ID NO: 19419 - DNA, 16 bp, synthetic construct
  misc_feature 1..16: note = synthetic [barcode part1]
  source 1..16: mol_type = other DNA
gtggagagtcgttgac

SEQ ID NO: 19420 - DNA, 16 bp, synthetic construct
  misc_feature 1..16: note = synthetic [barcode part1]
  source 1..16: mol_type = other DNA
aactgacgtacgtacc

SEQ ID NO: 19421 - DNA, 16 bp, synthetic construct
  misc_feature 1..16: note = synthetic [barcode part1]
  source 1..16: mol_type = other DNA
agtgtggcgagttacg

SEQ ID NO: 19422 - DNA, 16 bp, synthetic construct
  misc_feature 1..16: note = synthetic [barcode part1]
  source 1..16: mol_type = other DNA
atcgaacaacgacctc

SEQ ID NO: 19423 - DNA, 16 bp, synthetic construct
  misc_feature 1..16: note = synthetic [barcode part1]
  source 1..16: mol_type = other DNA
attggtagtccggact

SEQ ID NO: 19424 - DNA, 16 bp, synthetic construct
  misc_feature 1..16: note = synthetic [barcode part1]
  source 1..16: mol_type = other DNA
ttgtccgcagatagac

SEQ ID NO: 19425 - DNA, 16 bp, synthetic construct
  misc_feature 1..16: note = synthetic [barcode part1]
  source 1..16: mol_type = other DNA
tagtgaatccaccgtg

SEQ ID NO: 19426 - DNA, 16 bp, synthetic construct
  misc_feature 1..16: note = synthetic [barcode part1]
  source 1..16: mol_type = other DNA
cctgttgtgcaggttc

SEQ ID NO: 19427 - DNA, 16 bp, synthetic construct
  misc_feature 1..16: note = synthetic [barcode part1]
  source 1..16: mol_type = other DNA
gtacgcacaatcggtt

SEQ ID NO: 19428 - DNA, 16 bp, synthetic construct
  misc_feature 1..16: note = synthetic [barcode part1]
  source 1..16: mol_type = other DNA
tgttcgacgataagag

SEQ ID NO: 19429 - DNA, 16 bp, synthetic construct
  misc_feature 1..16: note = synthetic [barcode part1]
  source 1..16: mol_type = other DNA
tcggtctctgtataac

SEQ ID NO: 19430 - DNA, 16 bp, synthetic construct
  misc_feature 1..16: note = synthetic [barcode part1]
  source 1..16: mol_type = other DNA
gttagtgagtgtgtcc

SEQ ID NO: 19431 - DNA, 16 bp, synthetic construct
  misc_feature 1..16: note = synthetic [barcode part1]
  source 1..16: mol_type = other DNA
tctctgacacacagtt

SEQ ID NO: 19432 - DNA, 16 bp, synthetic construct
  misc_feature 1..16: note = synthetic [barcode part1]
  source 1..16: mol_type = other DNA
tactccgatctcactc

SEQ ID NO: 19433 - DNA, 16 bp, synthetic construct
  misc_feature 1..16: note = synthetic [barcode part1]
  source 1..16: mol_type = other DNA
cctgaagaccgcaatt

SEQ ID NO: 19434 - DNA, 16 bp, synthetic construct
  misc_feature 1..16: note = synthetic [barcode part1]
  source 1..16: mol_type = other DNA
tcgataccgtggttag

SEQ ID NO: 19435 - DNA, 16 bp, synthetic construct
  misc_feature 1..16: note = synthetic [barcode part1]
  source 1..16: mol_type = other DNA
ccaactacacgtacag

SEQ ID NO: 19436 - DNA, 16 bp, synthetic construct
  misc_feature 1..16: note = synthetic [barcode part1]
  source 1..16: mol_type = other DNA
gttagtgacgagacgc

SEQ ID NO: 19437 - DNA, 16 bp, synthetic construct
  misc_feature 1..16: note = synthetic [barcode part1]
  source 1..16: mol_type = other DNA
aggttgcacggagact

SEQ ID NO: 19438 - DNA, 16 bp, synthetic construct
  misc_feature 1..16: note = synthetic [barcode part1]
  source 1..16: mol_type = other DNA
acttactcgtcacggc

SEQ ID NO: 19439 - DNA, 16 bp, synthetic construct
  misc_feature 1..16: note = synthetic [barcode part1]
  source 1..16: mol_type = other DNA
aagagtgacttgacgt

SEQ ID NO: 19440 - DNA, 16 bp, synthetic construct
  misc_feature 1..16: note = synthetic [barcode part1]
  source 1..16: mol_type = other DNA
gagtattgtctgcggt

SEQ ID NO: 19441 - DNA, 16 bp, synthetic construct
  misc_feature 1..16: note = synthetic [barcode part1]
  source 1..16: mol_type = other DNA
tgcggtatactgcagt

SEQ ID NO: 19442 - DNA, 16 bp, synthetic construct
  misc_feature 1..16: note = synthetic [barcode part1]
  source 1..16: mol_type = other DNA
tggcagacagagtaag

SEQ ID NO: 19443 - DNA, 16 bp, synthetic construct
  misc_feature 1..16: note = synthetic [barcode part1]
  source 1..16: mol_type = other DNA
caattcgtcgtatctg

SEQ ID NO: 19444 - DNA, 16 bp, synthetic construct
  misc_feature 1..16: note = synthetic [barcode part1]
  source 1..16: mol_type = other DNA
ccaaggatcaatacag

SEQ ID NO: 19445 - DNA, 16 bp, synthetic construct
  misc_feature 1..16: note = synthetic [barcode part1]
  source 1..16: mol_type = other DNA
ttgcaacgccgattag

SEQ ID NO: 19446 - DNA, 16 bp, synthetic construct
  misc_feature 1..16: note = synthetic [barcode part1]
  source 1..16: mol_type = other DNA
gtctgtaattgtctcg

SEQ ID NO: 19447 - DNA, 16 bp, synthetic construct
  misc_feature 1..16: note = synthetic [barcode part1]
  source 1..16: mol_type = other DNA
caggtgcaactgtatc

SEQ ID NO: 19448 - DNA, 16 bp, synthetic construct
  misc_feature 1..16: note = synthetic [barcode part1]
  source 1..16: mol_type = other DNA
cgtgtattcctggaag

SEQ ID NO: 19449 - DNA, 16 bp, synthetic construct
  misc_feature 1..16: note = synthetic [barcode part1]
  source 1..16: mol_type = other DNA
gtcagaggccaatacg

SEQ ID NO: 19450 - DNA, 16 bp, synthetic construct
  misc_feature 1..16: note = synthetic [barcode part1]
  source 1..16: mol_type = other DNA
acgtactagtggtaag

SEQ ID NO: 19451 - DNA, 16 bp, synthetic construct
  misc_feature 1..16: note = synthetic [barcode part1]
  source 1..16: mol_type = other DNA
ttcctggtgcgtagtc

SEQ ID NO: 19452 - DNA, 16 bp, synthetic construct
  misc_feature 1..16: note = synthetic [barcode part1]
  source 1..16: mol_type = other DNA
ttgaggcgtcttaggt

SEQ ID NO: 19453 - DNA, 16 bp, synthetic construct
  misc_feature 1..16: note = synthetic [barcode part1]
  source 1..16: mol_type = other DNA
ccggtactcttggttg

SEQ ID NO: 19454 - DNA, 16 bp, synthetic construct
  misc_feature 1..16: note = synthetic [barcode part1]
  source 1..16: mol_type = other DNA
ttgacgagagtgtaac

SEQ ID NO: 19455 - DNA, 16 bp, synthetic construct
  misc_feature 1..16: note = synthetic [barcode part1]
  source 1..16: mol_type = other DNA
gatagttcttccacgt

SEQ ID NO: 19456 - DNA, 16 bp, synthetic construct
  misc_feature 1..16: note = synthetic [barcode part1]
  source 1..16: mol_type = other DNA
cacgtaacctacgaac

SEQ ID NO: 19457 - DNA, 16 bp, synthetic construct
  misc_feature 1..16: note = synthetic [barcode part1]
  source 1..16: mol_type = other DNA
aacagtaacctgcaag

SEQ ID NO: 19458 - DNA, 16 bp, synthetic construct
  misc_feature 1..16: note = synthetic [barcode part1]
  source 1..16: mol_type = other DNA
cagagtctcttgaggt

SEQ ID NO: 19459 - DNA, 16 bp, synthetic construct
  misc_feature 1..16: note = synthetic [barcode part1]
  source 1..16: mol_type = other DNA
atattaggaccgcacc

SEQ ID NO: 19460 - DNA, 16 bp, synthetic construct
  misc_feature 1..16: note = synthetic [barcode part1]
  source 1..16: mol_type = other DNA
cacgtggtaagttcac

SEQ ID NO: 19461 - DNA, 16 bp, synthetic construct
  misc_feature 1..16: note = synthetic [barcode part1]
  source 1..16: mol_type = other DNA
cgtagtagtggtatcc

SEQ ID NO: 19462 - DNA, 16 bp, synthetic construct
  misc_feature 1..16: note = synthetic [barcode part1]
  source 1..16: mol_type = other DNA
cggtagtaggaatact

SEQ ID NO: 19463 - DNA, 16 bp, synthetic construct
  misc_feature 1..16: note = synthetic [barcode part1]
  source 1..16: mol_type = other DNA
gcctaattggttcgag

SEQ ID NO: 19464 - DNA, 16 bp, synthetic construct
  misc_feature 1..16: note = synthetic [barcode part1]
  source 1..16: mol_type = other DNA
gttcacctgcctattc

SEQ ID NO: 19465 - DNA, 16 bp, synthetic construct
  misc_feature 1..16: note = synthetic [barcode part1]
  source 1..16: mol_type = other DNA
gcgatcacttcaatct

SEQ ID NO: 19466 - DNA, 16 bp, synthetic construct
  misc_feature 1..16: note = synthetic [barcode part1]
  source 1..16: mol_type = other DNA
acctgtcacaagtgac

SEQ ID NO: 19467 - DNA, 16 bp, synthetic construct
  misc_feature 1..16: note = synthetic [barcode part1]
  source 1..16: mol_type = other DNA
ttgactgtgtggtacg

SEQ ID NO: 19468 - DNA, 16 bp, synthetic construct
  misc_feature 1..16: note = synthetic [barcode part1]
  source 1..16: mol_type = other DNA
agtgttagaccgacct

SEQ ID NO: 19469 - DNA, 16 bp, synthetic construct
  misc_feature 1..16: note = synthetic [barcode part1]
  source 1..16: mol_type = other DNA
aactgacacacgtgtc

SEQ ID NO: 19470 - DNA, 16 bp, synthetic construct
  misc_feature 1..16: note = synthetic [barcode part1]
  source 1..16: mol_type = other DNA
gttgaggtgacgtgtg

SEQ ID NO: 19471 - DNA, 16 bp, synthetic construct
  misc_feature 1..16: note = synthetic [barcode part1]
  source 1..16: mol_type = other DNA
taacagtgaggcgcgt

SEQ ID NO: 19472 - DNA, 16 bp, synthetic construct
  misc_feature 1..16: note = synthetic [barcode part1]
  source 1..16: mol_type = other DNA
actcggacactgtcct

SEQ ID NO: 19473 - DNA, 16 bp, synthetic construct
  misc_feature 1..16: note = synthetic [barcode part1]
  source 1..16: mol_type = other DNA
ccacctgttcacttgt

SEQ ID NO: 19474 - DNA, 16 bp, synthetic construct
  misc_feature 1..16: note = synthetic [barcode part1]
  source 1..16: mol_type = other DNA
ccttcgtacggtctag

SEQ ID NO: 19475 - DNA, 16 bp, synthetic construct
  misc_feature 1..16: note = synthetic [barcode part1]
  source 1..16: mol_type = other DNA
tatcgccacaactatc

SEQ ID NO: 19476 - DNA, 16 bp, synthetic construct
  misc_feature 1..16: note = synthetic [barcode part1]
  source 1..16: mol_type = other DNA
ttgtctagtaggcgac

SEQ ID NO: 19477 - DNA, 16 bp, synthetic construct
  misc_feature 1..16: note = synthetic [barcode part1]
  source 1..16: mol_type = other DNA
ccaaccttgaaggatc

SEQ ID NO: 19478 - DNA, 16 bp, synthetic construct
  misc_feature 1..16: note = synthetic [barcode part1]
  source 1..16: mol_type = other DNA
gtggttaaggagattc

SEQ ID NO: 19479 - DNA, 16 bp, synthetic construct
  misc_feature 1..16: note = synthetic [barcode part1]
  source 1..16: mol_type = other DNA
gtcgtagtacttacct

SEQ ID NO: 19480 - DNA, 16 bp, synthetic construct
  misc_feature 1..16: note = synthetic [barcode part1]
  source 1..16: mol_type = other DNA
gaggcctaatattgcc

SEQ ID NO: 19481 - DNA, 16 bp, synthetic construct
  misc_feature 1..16: note = synthetic [barcode part1]
  source 1..16: mol_type = other DNA
acggtgacgaacctag

SEQ ID NO: 19482 - DNA, 16 bp, synthetic construct
  misc_feature 1..16: note = synthetic [barcode part1]
  source 1..16: mol_type = other DNA
gagaggccgttagtgt

SEQ ID NO: 19483 - DNA, 16 bp, synthetic construct
  misc_feature 1..16: note = synthetic [barcode part1]
  source 1..16: mol_type = other DNA
gatacgcctctccagt

SEQ ID NO: 19484 - DNA, 16 bp, synthetic construct
  misc_feature 1..16: note = synthetic [barcode part1]
  source 1..16: mol_type = other DNA
tgcctgttacctgttc

SEQ ID NO: 19485 - DNA, 16 bp, synthetic construct
  misc_feature 1..16: note = synthetic [barcode part1]
  source 1..16: mol_type = other DNA
tccaacttaaccgtgt

SEQ ID NO: 19486 - DNA, 16 bp, synthetic construct
  misc_feature 1..16: note = synthetic [barcode part1]
  source 1..16: mol_type = other DNA
agtacacgactaagac

SEQ ID NO: 19487 - DNA, 16 bp, synthetic construct
  misc_feature 1..16: note = synthetic [barcode part1]
  source 1..16: mol_type = other DNA
acagatcggttacacc

SEQ ID NO: 19488 - DNA, 16 bp, synthetic construct
  misc_feature 1..16: note = synthetic [barcode part1]
  source 1..16: mol_type = other DNA
gagattaacacggccg

SEQ ID NO: 19489 - DNA, 16 bp, synthetic construct
  misc_feature 1..16: note = synthetic [barcode part1]
  source 1..16: mol_type = other DNA
taccgtctactagtac

SEQ ID NO: 19490 - DNA, 16 bp, synthetic construct
  misc_feature 1..16: note = synthetic [barcode part1]
  source 1..16: mol_type = other DNA
gccactcctcaagtgt

SEQ ID NO: 19491 - DNA, 16 bp, synthetic construct
  misc_feature 1..16: note = synthetic [barcode part1]
  source 1..16: mol_type = other DNA
accgagtggtataagt

SEQ ID NO: 19492 - DNA, 16 bp, synthetic construct
  misc_feature 1..16: note = synthetic [barcode part1]
  source 1..16: mol_type = other DNA
tcggccttactggtgt

SEQ ID NO: 19493 - DNA, 16 bp, synthetic construct
  misc_feature 1..16: note = synthetic [barcode part1]
  source 1..16: mol_type = other DNA
tcctagaggcaggtag

SEQ ID NO: 19494 - DNA, 16 bp, synthetic construct
  misc_feature 1..16: note = synthetic [barcode part1]
  source 1..16: mol_type = other DNA
ccgtcgtactctactt

SEQ ID NO: 19495 - DNA, 16 bp, synthetic construct
  misc_feature 1..16: note = synthetic [barcode part1]
  source 1..16: mol_type = other DNA
aagttcacaccgacgt

SEQ ID NO: 19496 - DNA, 16 bp, synthetic construct
  misc_feature 1..16: note = synthetic [barcode part1]
  source 1..16: mol_type = other DNA
ttccaatcggttcctc

SEQ ID NO: 19497 - DNA, 16 bp, synthetic construct
  misc_feature 1..16: note = synthetic [barcode part1]
  source 1..16: mol_type = other DNA
cctaattacgtgttgc

SEQ ID NO: 19498 - DNA, 16 bp, synthetic construct
  misc_feature 1..16: note = synthetic [barcode part1]
  source 1..16: mol_type = other DNA
cgtaggcagtaagacc

SEQ ID NO: 19499 - DNA, 16 bp, synthetic construct
  misc_feature 1..16: note = synthetic [barcode part1]
  source 1..16: mol_type = other DNA
tacgtggtgaaggatt

SEQ ID NO: 19500 - DNA, 16 bp, synthetic construct
  misc_feature 1..16: note = synthetic [barcode part1]
  source 1..16: mol_type = other DNA
acttgtgtgtgaaccg

SEQ ID NO: 19501 - DNA, 16 bp, synthetic construct
  misc_feature 1..16: note = synthetic [barcode part1]
  source 1..16: mol_type = other DNA
aactctcaccgaaggt

SEQ ID NO: 19502 - DNA, 16 bp, synthetic construct
  misc_feature 1..16: note = synthetic [barcode part1]
  source 1..16: mol_type = other DNA
cgagactctaggactt

SEQ ID NO: 19503 - DNA, 16 bp, synthetic construct
  misc_feature 1..16: note = synthetic [barcode part1]
  source 1..16: mol_type = other DNA
ttgttggaagagtgtg

SEQ ID NO: 19504 - DNA, 16 bp, synthetic construct
  misc_feature 1..16: note = synthetic [barcode part1]
  source 1..16: mol_type = other DNA
tgtcactggactgagt

SEQ ID NO: 19505 - DNA, 16 bp, synthetic construct
  misc_feature 1..16: note = synthetic [barcode part1]
  source 1..16: mol_type = other DNA
ttagagaccaggcacg

SEQ ID NO: 19506 - DNA, 16 bp, synthetic construct
  misc_feature 1..16: note = synthetic [barcode part1]
  source 1..16: mol_type = other DNA
attaggcctgtcagac

SEQ ID NO: 19507 - DNA, 16 bp, synthetic construct
  misc_feature 1..16: note = synthetic [barcode part1]
  source 1..16: mol_type = other DNA
tctctggtgattacac

SEQ ID NO: 19508 - DNA, 16 bp, synthetic construct
  misc_feature 1..16: note = synthetic [barcode part1]
  source 1..16: mol_type = other DNA
ttcactgtacgccggt

SEQ ID NO: 19509 - DNA, 16 bp, synthetic construct
  misc_feature 1..16: note = synthetic [barcode part1]
  source 1..16: mol_type = other DNA
tctctaggtcagtgtt

SEQ ID NO: 19510 - DNA, 16 bp, synthetic construct
  misc_feature 1..16: note = synthetic [barcode part1]
  source 1..16: mol_type = other DNA
tcaccgtaatattcgc

SEQ ID NO: 19511 - DNA, 16 bp, synthetic construct
  misc_feature 1..16: note = synthetic [barcode part1]
  source 1..16: mol_type = other DNA
acaactcgtctctgcg

SEQ ID NO: 19512 - DNA, 16 bp, synthetic construct
  misc_feature 1..16: note = synthetic [barcode part1]
  source 1..16: mol_type = other DNA
ttacaattgcgacgcg

SEQ ID NO: 19513 - DNA, 16 bp, synthetic construct
  misc_feature 1..16: note = synthetic [barcode part1]
  source 1..16: mol_type = other DNA
aaggtggtattcgaac

SEQ ID NO: 19514 - DNA, 16 bp, synthetic construct
  misc_feature 1..16: note = synthetic [barcode part1]
  source 1..16: mol_type = other DNA
acgtgatcacgcaatc

SEQ ID NO: 19515 - DNA, 16 bp, synthetic construct
  misc_feature 1..16: note = synthetic [barcode part1]
  source 1..16: mol_type = other DNA
gtgcaagattcggcag

SEQ ID NO: 19516 - DNA, 16 bp, synthetic construct
  misc_feature 1..16: note = synthetic [barcode part1]
  source 1..16: mol_type = other DNA
cctagtccgattgtgc

SEQ ID NO: 19517 - DNA, 16 bp, synthetic construct
  misc_feature 1..16: note = synthetic [barcode part1]
  source 1..16: mol_type = other DNA
gacgtagatcttcacg

SEQ ID NO: 19518 - DNA, 16 bp, synthetic construct
  misc_feature 1..16: note = synthetic [barcode part1]
  source 1..16: mol_type = other DNA
ttccgtgtggcaatcc

SEQ ID NO: 19519 - DNA, 16 bp, synthetic construct
  misc_feature 1..16: note = synthetic [barcode part1]
  source 1..16: mol_type = other DNA
tagttctgccgcgtac

SEQ ID NO: 19520 - DNA, 16 bp, synthetic construct
  misc_feature 1..16: note = synthetic [barcode part1]
  source 1..16: mol_type = other DNA
ttcacttcagaacctg

SEQ ID NO: 19521 - DNA, 16 bp, synthetic construct
  misc_feature 1..16: note = synthetic [barcode part1]
  source 1..16: mol_type = other DNA
ttactaccgttcagac

SEQ ID NO: 19522 - DNA, 16 bp, synthetic construct
  misc_feature 1..16: note = synthetic [barcode part1]
  source 1..16: mol_type = other DNA
gttacctagtactcgt

SEQ ID NO: 19523 - DNA, 16 bp, synthetic construct
  misc_feature 1..16: note = synthetic [barcode part1]
  source 1..16: mol_type = other DNA
cgatagtgtcggattc

SEQ ID NO: 19524 - DNA, 16 bp, synthetic construct
  misc_feature 1..16: note = synthetic [barcode part1]
  source 1..16: mol_type = other DNA
gaggtgtgccgaattg

SEQ ID NO: 19525 - DNA, 16 bp, synthetic construct
  misc_feature 1..16: note = synthetic [barcode part1]
  source 1..16: mol_type = other DNA
gtacagtccaattctc

SEQ ID NO: 19526 - DNA, 16 bp, synthetic construct
  misc_feature 1..16: note = synthetic [barcode part1]
  source 1..16: mol_type = other DNA
aagttgtgcctggtgt

SEQ ID NO: 19527 - DNA, 16 bp, synthetic construct
  misc_feature 1..16: note = synthetic [barcode part1]
  source 1..16: mol_type = other DNA
gtgtagtataccggtc

SEQ ID NO: 19528 - DNA, 16 bp, synthetic construct
  misc_feature 1..16: note = synthetic [barcode part1]
  source 1..16: mol_type = other DNA
actgatctcagaaccg

SEQ ID NO: 19529 - DNA, 16 bp, synthetic construct
  misc_feature 1..16: note = synthetic [barcode part1]
  source 1..16: mol_type = other DNA
tcggcacaactctctg

SEQ ID NO: 19530 - DNA, 16 bp, synthetic construct
  misc_feature 1..16: note = synthetic [barcode part1]
  source 1..16: mol_type = other DNA
gcggagatcggtgatt

SEQ ID NO: 19531 - DNA, 16 bp, synthetic construct
  misc_feature 1..16: note = synthetic [barcode part1]
  source 1..16: mol_type = other DNA
acgtatcgagtgtctg

SEQ ID NO: 19532 - DNA, 16 bp, synthetic construct
  misc_feature 1..16: note = synthetic [barcode part1]
  source 1..16: mol_type = other DNA
gtgcaagtactctcag

SEQ ID NO: 19533 - DNA, 16 bp, synthetic construct
  misc_feature 1..16: note = synthetic [barcode part1]
  source 1..16: mol_type = other DNA
gaataacaggacgacg

SEQ ID NO: 19534 - DNA, 16 bp, synthetic construct
  misc_feature 1..16: note = synthetic [barcode part1]
  source 1..16: mol_type = other DNA
aggtctgcctataggt

SEQ ID NO: 19535 - DNA, 16 bp, synthetic construct
  misc_feature 1..16: note = synthetic [barcode part1]
  source 1..16: mol_type = other DNA
tgatagataccgtccg

SEQ ID NO: 19536 - DNA, 16 bp, synthetic construct
  misc_feature 1..16: note = synthetic [barcode part1]
  source 1..16: mol_type = other DNA
cggtatagactacacc

SEQ ID NO: 19537 - DNA, 16 bp, synthetic construct
  misc_feature 1..16: note = synthetic [barcode part1]
  source 1..16: mol_type = other DNA
gagtctgacggttgtt

SEQ ID NO: 19538 - DNA, 16 bp, synthetic construct
  misc_feature 1..16: note = synthetic [barcode part1]
  source 1..16: mol_type = other DNA
tcttgccaacgcctag

SEQ ID NO: 19539 - DNA, 16 bp, synthetic construct
  misc_feature 1..16: note = synthetic [barcode part1]
  source 1..16: mol_type = other DNA
ttacgttggtgacttc

SEQ ID NO: 19540 - DNA, 16 bp, synthetic construct
  misc_feature 1..16: note = synthetic [barcode part1]
  source 1..16: mol_type = other DNA
acctagacttgtcgcc

SEQ ID NO: 19541 - DNA, 16 bp, synthetic construct
  misc_feature 1..16: note = synthetic [barcode part1]
  source 1..16: mol_type = other DNA
ccacggaagatacttc

SEQ ID NO: 19542 - DNA, 16 bp, synthetic construct
  misc_feature 1..16: note = synthetic [barcode part1]
  source 1..16: mol_type = other DNA
gtgcagtgatcggagt

SEQ ID NO: 19543 - DNA, 16 bp, synthetic construct
  misc_feature 1..16: note = synthetic [barcode part1]
  source 1..16: mol_type = other DNA
gagtccactgttatct

SEQ ID NO: 19544 - DNA, 16 bp, synthetic construct
  misc_feature 1..16: note = synthetic [barcode part1]
  source 1..16: mol_type = other DNA
actacagacgagtggc

SEQ ID NO: 19545 - DNA, 16 bp, synthetic construct
  misc_feature 1..16: note = synthetic [barcode part1]
  source 1..16: mol_type = other DNA
cgttactgcctagatt

SEQ ID NO: 19546 - DNA, 16 bp, synthetic construct
  misc_feature 1..16: note = synthetic [barcode part1]
  source 1..16: mol_type = other DNA
gacaaggcaattcctc

SEQ ID NO: 19547 - DNA, 16 bp, synthetic construct
  misc_feature 1..16: note = synthetic [barcode part1]
  source 1..16: mol_type = other DNA
tcttggtccggatatt

SEQ ID NO: 19548 - DNA, 16 bp, synthetic construct
  misc_feature 1..16: note = synthetic [barcode part1]
  source 1..16: mol_type = other DNA
tagataggtggtatcg

SEQ ID NO: 19549 - DNA, 16 bp, synthetic construct
  misc_feature 1..16: note = synthetic [barcode part1]
  source 1..16: mol_type = other DNA
gagtactcagaacaac

SEQ ID NO: 19550 - DNA, 16 bp, synthetic construct
  misc_feature 1..16: note = synthetic [barcode part1]
  source 1..16: mol_type = other DNA
attgtgaggcgtcact

SEQ ID NO: 19551 - DNA, 16 bp, synthetic construct
  misc_feature 1..16: note = synthetic [barcode part1]
  source 1..16: mol_type = other DNA
gcgatacgccacaatt

SEQ ID NO: 19552 - DNA, 16 bp, synthetic construct
  misc_feature 1..16: note = synthetic [barcode part1]
  source 1..16: mol_type = other DNA
aactcaccggatactg

SEQ ID NO: 19553 - DNA, 16 bp, synthetic construct
  misc_feature 1..16: note = synthetic [barcode part1]
  source 1..16: mol_type = other DNA
tgcacggagtagtgac

SEQ ID NO: 19554 - DNA, 16 bp, synthetic construct
  misc_feature 1..16: note = synthetic [barcode part1]
  source 1..16: mol_type = other DNA
actccgtgaactagac

SEQ ID NO: 19555 - DNA, 16 bp, synthetic construct
  misc_feature 1..16: note = synthetic [barcode part1]
  source 1..16: mol_type = other DNA
gataatcgcgtaaggt

SEQ ID NO: 19556 - DNA, 16 bp, synthetic construct
  misc_feature 1..16: note = synthetic [barcode part1]
  source 1..16: mol_type = other DNA
ttcggaatcaactggc

SEQ ID NO: 19557 - DNA, 16 bp, synthetic construct
  misc_feature 1..16: note = synthetic [barcode part1]
  source 1..16: mol_type = other DNA
tgcctaattccactag

SEQ ID NO: 19558 - DNA, 16 bp, synthetic construct
  misc_feature 1..16: note = synthetic [barcode part1]
  source 1..16: mol_type = other DNA
atcacacctgagtgtg

SEQ ID NO: 19559 - DNA, 16 bp, synthetic construct
  misc_feature 1..16: note = synthetic [barcode part1]
  source 1..16: mol_type = other DNA
tctcgattgtgttggt

SEQ ID NO: 19560 - DNA, 16 bp, synthetic construct
  misc_feature 1..16: note = synthetic [barcode part1]
  source 1..16: mol_type = other DNA
tagttggtgcagtacc

SEQ ID NO: 19561 - DNA, 16 bp, synthetic construct
  misc_feature 1..16: note = synthetic [barcode part1]
  source 1..16: mol_type = other DNA
aggactgtacggatcg

SEQ ID NO: 19562 - DNA, 16 bp, synthetic construct
  misc_feature 1..16: note = synthetic [barcode part1]
  source 1..16: mol_type = other DNA
taatccgacgacctag

SEQ ID NO: 19563 - DNA, 16 bp, synthetic construct
  misc_feature 1..16: note = synthetic [barcode part1]
  source 1..16: mol_type = other DNA
aacgtcgataccacgt

SEQ ID NO: 19564 - DNA, 16 bp, synthetic construct
  misc_feature 1..16: note = synthetic [barcode part1]
  source 1..16: mol_type = other DNA
atacggtaatctctcc

SEQ ID NO: 19565 - DNA, 16 bp, synthetic construct
  misc_feature 1..16: note = synthetic [barcode part1]
  source 1..16: mol_type = other DNA
aacacgtacgtcagtc

SEQ ID NO: 19566 - DNA, 16 bp, synthetic construct
  misc_feature 1..16: note = synthetic [barcode part1]
  source 1..16: mol_type = other DNA
accggtctagttaacg

SEQ ID NO: 19567 - DNA, 16 bp, synthetic construct
  misc_feature 1..16: note = synthetic [barcode part1]
  source 1..16: mol_type = other DNA
gatacactgtgatcgc

SEQ ID NO: 19568 - DNA, 16 bp, synthetic construct
  misc_feature 1..16: note = synthetic [barcode part1]
  source 1..16: mol_type = other DNA
ttgtcacggtgaggtt

SEQ ID NO: 19569 - DNA, 16 bp, synthetic construct
  misc_feature 1..16: note = synthetic [barcode part1]
  source 1..16: mol_type = other DNA
ttctcctaaggtctcc

SEQ ID NO: 19570 - DNA, 16 bp, synthetic construct
  misc_feature 1..16: note = synthetic [barcode part1]
  source 1..16: mol_type = other DNA
acacggattcgacgag

SEQ ID NO: 19571 - DNA, 16 bp, synthetic construct
  misc_feature 1..16: note = synthetic [barcode part1]
  source 1..16: mol_type = other DNA
cactaccacaaccgtc

SEQ ID NO: 19572 - DNA, 16 bp, synthetic construct
  misc_feature 1..16: note = synthetic [barcode part1]
  source 1..16: mol_type = other DNA
cgtggtctaacttccg

SEQ ID NO: 19573 - DNA, 16 bp, synthetic construct
  misc_feature 1..16: note = synthetic [barcode part1]
  source 1..16: mol_type = other DNA
caagaattcaccgaag

SEQ ID NO: 19574 - DNA, 16 bp, synthetic construct
  misc_feature 1..16: note = synthetic [barcode part1]
  source 1..16: mol_type = other DNA
cgaggtcaatcttgac

SEQ ID NO: 19575 - DNA, 16 bp, synthetic construct
  misc_feature 1..16: note = synthetic [barcode part1]
  source 1..16: mol_type = other DNA
aggattatataggccg

SEQ ID NO: 19576 - DNA, 16 bp, synthetic construct
  misc_feature 1..16: note = synthetic [barcode part1]
  source 1..16: mol_type = other DNA
attgcgtcttctaacg

SEQ ID NO: 19577 - DNA, 16 bp, synthetic construct
  misc_feature 1..16: note = synthetic [barcode part1]
  source 1..16: mol_type = other DNA
agtgttgtgtgtgtgc

SEQ ID NO: 19578 - DNA, 16 bp, synthetic construct
  misc_feature 1..16: note = synthetic [barcode part1]
  source 1..16: mol_type = other DNA
cagatacctggtacac

SEQ ID NO: 19579 - DNA, 16 bp, synthetic construct
  misc_feature 1..16: note = synthetic [barcode part1]
  source 1..16: mol_type = other DNA
cctgaatactcgagtg

SEQ ID NO: 19580 - DNA, 16 bp, synthetic construct
  misc_feature 1..16: note = synthetic [barcode part1]
  source 1..16: mol_type = other DNA
aactagacactccgtg

SEQ ID NO: 19581 - DNA, 16 bp, synthetic construct
  misc_feature 1..16: note = synthetic [barcode part1]
  source 1..16: mol_type = other DNA
tggcgtgcaattcctc

SEQ ID NO: 19582 - DNA, 16 bp, synthetic construct
  misc_feature 1..16: note = synthetic [barcode part1]
  source 1..16: mol_type = other DNA
attggcgtggaggact

SEQ ID NO: 19583 - DNA, 16 bp, synthetic construct
  misc_feature 1..16: note = synthetic [barcode part1]
  source 1..16: mol_type = other DNA
ttccgtcacgatagag

SEQ ID NO: 19584 - DNA, 16 bp, synthetic construct
  misc_feature 1..16: note = synthetic [barcode part1]
  source 1..16: mol_type = other DNA
gattcagtcagtggtc

SEQ ID NO: 19585 - DNA, 16 bp, synthetic construct
  misc_feature 1..16: note = synthetic [barcode part1]
  source 1..16: mol_type = other DNA
acttgtcggactccgt

SEQ ID NO: 19586 - DNA, 16 bp, synthetic construct
  misc_feature 1..16: note = synthetic [barcode part1]
  source 1..16: mol_type = other DNA
gtgccttccgacaatc

SEQ ID NO: 19587 - DNA, 16 bp, synthetic construct
  misc_feature 1..16: note = synthetic [barcode part1]
  source 1..16: mol_type = other DNA
atctcacgttcggatt

SEQ ID NO: 19588 - DNA, 16 bp, synthetic construct
  misc_feature 1..16: note = synthetic [barcode part1]
  source 1..16: mol_type = other DNA
gtcaacagtggaatac

SEQ ID NO: 19589 - DNA, 16 bp, synthetic construct
  misc_feature 1..16: note = synthetic [barcode part1]
  source 1..16: mol_type = other DNA
ccttacctagacgtcg

SEQ ID NO: 19590 - DNA, 16 bp, synthetic construct
  misc_feature 1..16: note = synthetic [barcode part1]
  source 1..16: mol_type = other DNA
agtataggttcgacag

SEQ ID NO: 19591 - DNA, 16 bp, synthetic construct
  misc_feature 1..16: note = synthetic [barcode part1]
  source 1..16: mol_type = other DNA
aattgcgtcaaccttc

SEQ ID NO: 19592 - DNA, 16 bp, synthetic construct
  misc_feature 1..16: note = synthetic [barcode part1]
  source 1..16: mol_type = other DNA
tccgtgcgttactggt

SEQ ID NO: 19593 - DNA, 16 bp, synthetic construct
  misc_feature 1..16: note = synthetic [barcode part1]
  source 1..16: mol_type = other DNA
tctaccgtgcgttgac

SEQ ID NO: 19594 - DNA, 16 bp, synthetic construct
  misc_feature 1..16: note = synthetic [barcode part1]
  source 1..16: mol_type = other DNA
gcaccttcggttcaac

SEQ ID NO: 19595 - DNA, 16 bp, synthetic construct
  misc_feature 1..16: note = synthetic [barcode part1]
  source 1..16: mol_type = other DNA
atagaacttacaggcg

SEQ ID NO: 19596 - DNA, 16 bp, synthetic construct
  misc_feature 1..16: note = synthetic [barcode part1]
  source 1..16: mol_type = other DNA
cgtgaattcactccgc

SEQ ID NO: 19597 - DNA, 16 bp, synthetic construct
  misc_feature 1..16: note = synthetic [barcode part1]
  source 1..16: mol_type = other DNA
tcgatcctaagaggtc

SEQ ID NO: 19598 - DNA, 16 bp, synthetic construct
  misc_feature 1..16: note = synthetic [barcode part1]
  source 1..16: mol_type = other DNA
cagaggatcctaactc

SEQ ID NO: 19599 - DNA, 16 bp, synthetic construct
  misc_feature 1..16: note = synthetic [barcode part1]
  source 1..16: mol_type = other DNA
gatccttaatccacgt

SEQ ID NO: 19600 - DNA, 16 bp, synthetic construct
  misc_feature 1..16: note = synthetic [barcode part1]
  source 1..16: mol_type = other DNA
tattcgcgtccgttct

SEQ ID NO: 19601 - DNA, 16 bp, synthetic construct
  misc_feature 1..16: note = synthetic [barcode part1]
  source 1..16: mol_type = other DNA
cgaaggacacgatcac

SEQ ID NO: 19602 - DNA, 16 bp, synthetic construct
  misc_feature 1..16: note = synthetic [barcode part1]
  source 1..16: mol_type = other DNA
agtcgaggataacgag

SEQ ID NO: 19603 - DNA, 16 bp, synthetic construct
  misc_feature 1..16: note = synthetic [barcode part1]
  source 1..16: mol_type = other DNA
tctctaatcggtcctc

SEQ ID NO: 19604 - DNA, 16 bp, synthetic construct
  misc_feature 1..16: note = synthetic [barcode part1]
  source 1..16: mol_type = other DNA
gcgaagagtacaagac

SEQ ID NO: 19605 - DNA, 16 bp, synthetic construct
  misc_feature 1..16: note = synthetic [barcode part1]
  source 1..16: mol_type = other DNA
ttcgtatctctcgtgc

SEQ ID NO: 19606 - DNA, 16 bp, synthetic construct
  misc_feature 1..16: note = synthetic [barcode part1]
  source 1..16: mol_type = other DNA
tgaattaagtccggcc

SEQ ID NO: 19607 - DNA, 16 bp, synthetic construct
  misc_feature 1..16: note = synthetic [barcode part1]
  source 1..16: mol_type = other DNA
tggaataccgtcactg

SEQ ID NO: 19608 - DNA, 16 bp, synthetic construct
  misc_feature 1..16: note = synthetic [barcode part1]
  source 1..16: mol_type = other DNA
gcacttcaactaccgc

SEQ ID NO: 19609 - DNA, 16 bp, synthetic construct
  misc_feature 1..16: note = synthetic [barcode part1]
  source 1..16: mol_type = other DNA
cagatcaccttgtatc

SEQ ID NO: 19610 - DNA, 16 bp, synthetic construct
  misc_feature 1..16: note = synthetic [barcode part1]
  source 1..16: mol_type = other DNA
gtcactatctccgcag

SEQ ID NO: 19611 - DNA, 16 bp, synthetic construct
  misc_feature 1..16: note = synthetic [barcode part1]
  source 1..16: mol_type = other DNA
caggatctgtgacgtt

SEQ ID NO: 19612 - DNA, 16 bp, synthetic construct
  misc_feature 1..16: note = synthetic [barcode part1]
  source 1..16: mol_type = other DNA
gataattgaggtacgc

SEQ ID NO: 19613 - DNA, 16 bp, synthetic construct
  misc_feature 1..16: note = synthetic [barcode part1]
  source 1..16: mol_type = other DNA
cgtcctgtccgttatt

SEQ ID NO: 19614 - DNA, 16 bp, synthetic construct
  misc_feature 1..16: note = synthetic [barcode part1]
  source 1..16: mol_type = other DNA
agacggaggaccttac

SEQ ID NO: 19615 - DNA, 16 bp, synthetic construct
  misc_feature 1..16: note = synthetic [barcode part1]
  source 1..16: mol_type = other DNA
tgtacagttaccactc

SEQ ID NO: 19616 - DNA, 16 bp, synthetic construct
  misc_feature 1..16: note = synthetic [barcode part1]
  source 1..16: mol_type = other DNA
ttaataatccgcgcct

SEQ ID NO: 19617 - DNA, 16 bp, synthetic construct
  misc_feature 1..16: note = synthetic [barcode part1]
  source 1..16: mol_type = other DNA
tgcaataccacctgtt

SEQ ID NO: 19618 - DNA, 16 bp, synthetic construct
  misc_feature 1..16: note = synthetic [barcode part1]
  source 1..16: mol_type = other DNA
gagtgttattccactc

SEQ ID NO: 19619 - DNA, 16 bp, synthetic construct
  misc_feature 1..16: note = synthetic [barcode part1]
  source 1..16: mol_type = other DNA
agttgtaaccgcgtgt

SEQ ID NO: 19620 - DNA, 16 bp, synthetic construct
  misc_feature 1..16: note = synthetic [barcode part1]
  source 1..16: mol_type = other DNA
actgaggtacgcaacg

SEQ ID NO: 19621 - DNA, 16 bp, synthetic construct
  misc_feature 1..16: note = synthetic [barcode part1]
  source 1..16: mol_type = other DNA
ccaagtagatagaacc

SEQ ID NO: 19622 - DNA, 16 bp, synthetic construct
  misc_feature 1..16: note = synthetic [barcode part1]
  source 1..16: mol_type = other DNA
tccgtacctagtaatc

SEQ ID NO: 19623 - DNA, 16 bp, synthetic construct
  misc_feature 1..16: note = synthetic [barcode part1]
  source 1..16: mol_type = other DNA
aagtgccgcctcactt

SEQ ID NO: 19624 - DNA, 16 bp, synthetic construct
  misc_feature 1..16: note = synthetic [barcode part1]
  source 1..16: mol_type = other DNA
cctaattgtgtcagtc

SEQ ID NO: 19625 - DNA, 16 bp, synthetic construct
  misc_feature 1..16: note = synthetic [barcode part1]
  source 1..16: mol_type = other DNA
ccggcctacagttatc

SEQ ID NO: 19626 - DNA, 16 bp, synthetic construct
  misc_feature 1..16: note = synthetic [barcode part1]
  source 1..16: mol_type = other DNA
tgttacctcacgcggt

SEQ ID NO: 19627 - DNA, 16 bp, synthetic construct
  misc_feature 1..16: note = synthetic [barcode part1]
  source 1..16: mol_type = other DNA
aagtaacctaacgcag

SEQ ID NO: 19628 - DNA, 16 bp, synthetic construct
  misc_feature 1..16: note = synthetic [barcode part1]
  source 1..16: mol_type = other DNA
gtcacagacttgtctt

SEQ ID NO: 19629 - DNA, 16 bp, synthetic construct
  misc_feature 1..16: note = synthetic [barcode part1]
  source 1..16: mol_type = other DNA
gagtgccagtgagatc

SEQ ID NO: 19630 - DNA, 16 bp, synthetic construct
  misc_feature 1..16: note = synthetic [barcode part1]
  source 1..16: mol_type = other DNA
cacaagtgtaacagac

SEQ ID NO: 19631 - DNA, 16 bp, synthetic construct
  misc_feature 1..16: note = synthetic [barcode part1]
  source 1..16: mol_type = other DNA
tgtcagtgtgttggtg

SEQ ID NO: 19632 - DNA, 16 bp, synthetic construct
  misc_feature 1..16: note = synthetic [barcode part1]
  source 1..16: mol_type = other DNA
ttcaggagtgcgtatc

SEQ ID NO: 19633 - DNA, 16 bp, synthetic construct
  misc_feature 1..16: note = synthetic [barcode part1]
  source 1..16: mol_type = other DNA
caccgttctgttactc

SEQ ID NO: 19634 - DNA, 16 bp, synthetic construct
  misc_feature 1..16: note = synthetic [barcode part1]
  source 1..16: mol_type = other DNA
tagtcaggatcagtcc

SEQ ID NO: 19635 - DNA, 16 bp, synthetic construct
  misc_feature 1..16: note = synthetic [barcode part1]
  source 1..16: mol_type = other DNA
atattccgtgccttcc

SEQ ID NO: 19636 - DNA, 16 bp, synthetic construct
  misc_feature 1..16: note = synthetic [barcode part1]
  source 1..16: mol_type = other DNA
cacgccttggactact

SEQ ID NO: 19637 - DNA, 16 bp, synthetic construct
  misc_feature 1..16: note = synthetic [barcode part1]
  source 1..16: mol_type = other DNA
tctggtcgattccttc

SEQ ID NO: 19638 - DNA, 16 bp, synthetic construct
  misc_feature 1..16: note = synthetic [barcode part1]
  source 1..16: mol_type = other DNA
ttcgcaagtgaatccg

SEQ ID NO: 19639 - DNA, 16 bp, synthetic construct
  misc_feature 1..16: note = synthetic [barcode part1]
  source 1..16: mol_type = other DNA
tataatccgactctcg

SEQ ID NO: 19640 - DNA, 16 bp, synthetic construct
  misc_feature 1..16: note = synthetic [barcode part1]
  source 1..16: mol_type = other DNA
tagaaccgactgactc

SEQ ID NO: 19641 - DNA, 16 bp, synthetic construct
  misc_feature 1..16: note = synthetic [barcode part1]
  source 1..16: mol_type = other DNA
tggacagtgttgtaag

SEQ ID NO: 19642 - DNA, 16 bp, synthetic construct
  misc_feature 1..16: note = synthetic [barcode part1]
  source 1..16: mol_type = other DNA
tctggaatcaaggtcc

SEQ ID NO: 19643 - DNA, 16 bp, synthetic construct
  misc_feature 1..16: note = synthetic [barcode part1]
  source 1..16: mol_type = other DNA
ttatcctgccacttcg

SEQ ID NO: 19644 - DNA, 16 bp, synthetic construct
  misc_feature 1..16: note = synthetic [barcode part1]
  source 1..16: mol_type = other DNA
ttcggcctgacacact

SEQ ID NO: 19645 - DNA, 16 bp, synthetic construct
  misc_feature 1..16: note = synthetic [barcode part1]
  source 1..16: mol_type = other DNA
gcacgacaaggagttc

SEQ ID NO: 19646 - DNA, 16 bp, synthetic construct
  misc_feature 1..16: note = synthetic [barcode part1]
  source 1..16: mol_type = other DNA
gttgacgtaccttact

SEQ ID NO: 19647 - DNA, 16 bp, synthetic construct
  misc_feature 1..16: note = synthetic [barcode part1]
  source 1..16: mol_type = other DNA
ttaggaacacgccgag

SEQ ID NO: 19648 - DNA, 16 bp, synthetic construct
  misc_feature 1..16: note = synthetic [barcode part1]
  source 1..16: mol_type = other DNA
actgcggttacttatc

SEQ ID NO: 19649 - DNA, 16 bp, synthetic construct
  misc_feature 1..16: note = synthetic [barcode part1]
  source 1..16: mol_type = other DNA
agaaggactcttcctg

SEQ ID NO: 19650 - DNA, 16 bp, synthetic construct
  misc_feature 1..16: note = synthetic [barcode part1]
  source 1..16: mol_type = other DNA
agttgacctaggatcc

SEQ ID NO: 19651 - DNA, 16 bp, synthetic construct
  misc_feature 1..16: note = synthetic [barcode part1]
  source 1..16: mol_type = other DNA
cgttctcgccaagttg

SEQ ID NO: 19652 - DNA, 16 bp, synthetic construct
  misc_feature 1..16: note = synthetic [barcode part1]
  source 1..16: mol_type = other DNA
gtattgagagacgact

SEQ ID NO: 19653 - DNA, 16 bp, synthetic construct
  misc_feature 1..16: note = synthetic [barcode part1]
  source 1..16: mol_type = other DNA
tgcctacagtaccacc

SEQ ID NO: 19654 - DNA, 16 bp, synthetic construct
  misc_feature 1..16: note = synthetic [barcode part1]
  source 1..16: mol_type = other DNA
caactcactacgtccg

SEQ ID NO: 19655 - DNA, 16 bp, synthetic construct
  misc_feature 1..16: note = synthetic [barcode part1]
  source 1..16: mol_type = other DNA
gagttcgcctataggt

SEQ ID NO: 19656 - DNA, 16 bp, synthetic construct
  misc_feature 1..16: note = synthetic [barcode part1]
  source 1..16: mol_type = other DNA
acaggtcctctaccgt

SEQ ID NO: 19657 - DNA, 16 bp, synthetic construct
  misc_feature 1..16: note = synthetic [barcode part1]
  source 1..16: mol_type = other DNA
gtgaggataacaatcc

SEQ ID NO: 19658 - DNA, 16 bp, synthetic construct
  misc_feature 1..16: note = synthetic [barcode part1]
  source 1..16: mol_type = other DNA
ccttggtcgtagatcc

SEQ ID NO: 19659 - DNA, 16 bp, synthetic construct
  misc_feature 1..16: note = synthetic [barcode part1]
  source 1..16: mol_type = other DNA
agttcttgatccacac

SEQ ID NO: 19660 - DNA, 16 bp, synthetic construct
  misc_feature 1..16: note = synthetic [barcode part1]
  source 1..16: mol_type = other DNA
atctcttatcgcgtag

SEQ ID NO: 19661 - DNA, 16 bp, synthetic construct
  misc_feature 1..16: note = synthetic [barcode part1]
  source 1..16: mol_type = other DNA
agttcttgtgtagtcc

SEQ ID NO: 19662 - DNA, 16 bp, synthetic construct
  misc_feature 1..16: note = synthetic [barcode part1]
  source 1..16: mol_type = other DNA
agttacgatcggtgtc

SEQ ID NO: 19663 - DNA, 16 bp, synthetic construct
  misc_feature 1..16: note = synthetic [barcode part1]
  source 1..16: mol_type = other DNA
tgtgaacagtgtccac

SEQ ID NO: 19664 - DNA, 16 bp, synthetic construct
  misc_feature 1..16: note = synthetic [barcode part1]
  source 1..16: mol_type = other DNA
gagttctactggtcag

SEQ ID NO: 19665 - DNA, 16 bp, synthetic construct
  misc_feature 1..16: note = synthetic [barcode part1]
  source 1..16: mol_type = other DNA
ccacaggttattactc

SEQ ID NO: 19666 - DNA, 16 bp, synthetic construct
  misc_feature 1..16: note = synthetic [barcode part1]
  source 1..16: mol_type = other DNA
ttcgtagacagacctg

SEQ ID NO: 19667 - DNA, 16 bp, synthetic construct
  misc_feature 1..16: note = synthetic [barcode part1]
  source 1..16: mol_type = other DNA
tcgtacagagattgag

SEQ ID NO: 19668 - DNA, 16 bp, synthetic construct
  misc_feature 1..16: note = synthetic [barcode part1]
  source 1..16: mol_type = other DNA
taaggaagtgccgacc

SEQ ID NO: 19669 - DNA, 16 bp, synthetic construct
  misc_feature 1..16: note = synthetic [barcode part1]
  source 1..16: mol_type = other DNA
gtacacaacgtcgtac

SEQ ID NO: 19670 - DNA, 16 bp, synthetic construct
  misc_feature 1..16: note = synthetic [barcode part1]
  source 1..16: mol_type = other DNA
tagtggcagaggcgtt

SEQ ID NO: 19671 - DNA, 16 bp, synthetic construct
  misc_feature 1..16: note = synthetic [barcode part1]
  source 1..16: mol_type = other DNA
gatccgccttgttacg

SEQ ID NO: 19672 - DNA, 16 bp, synthetic construct
  misc_feature 1..16: note = synthetic [barcode part1]
  source 1..16: mol_type = other DNA
cggacgtacacaattc

SEQ ID NO: 19673 - DNA, 16 bp, synthetic construct
  misc_feature 1..16: note = synthetic [barcode part1]
  source 1..16: mol_type = other DNA
gagttcagacagtggc

SEQ ID NO: 19674 - DNA, 16 bp, synthetic construct
  misc_feature 1..16: note = synthetic [barcode part1]
  source 1..16: mol_type = other DNA
gtggtgaataatcacg

SEQ ID NO: 19675 - DNA, 16 bp, synthetic construct
  misc_feature 1..16: note = synthetic [barcode part1]
  source 1..16: mol_type = other DNA
aaggacggtctggtac

SEQ ID NO: 19676 - DNA, 16 bp, synthetic construct
  misc_feature 1..16: note = synthetic [barcode part1]
  source 1..16: mol_type = other DNA
cactctgcctactatc

SEQ ID NO: 19677 - DNA, 16 bp, synthetic construct
  misc_feature 1..16: note = synthetic [barcode part1]
  source 1..16: mol_type = other DNA
tgtagaacacactccg

SEQ ID NO: 19678 - DNA, 16 bp, synthetic construct
  misc_feature 1..16: note = synthetic [barcode part1]
  source 1..16: mol_type = other DNA
aactcacggcagagtg

SEQ ID NO: 19679 - DNA, 16 bp, synthetic construct
  misc_feature 1..16: note = synthetic [barcode part1]
  source 1..16: mol_type = other DNA
agattagtgtacggtg

SEQ ID NO: 19680 - DNA, 16 bp, synthetic construct
  misc_feature 1..16: note = synthetic [barcode part1]
  source 1..16: mol_type = other DNA
acagtactggtgtcac

SEQ ID NO: 19681 - DNA, 16 bp, synthetic construct
  misc_feature 1..16: note = synthetic [barcode part1]
  source 1..16: mol_type = other DNA
aggacctagataggtt

SEQ ID NO: 19682 - DNA, 16 bp, synthetic construct
  misc_feature 1..16: note = synthetic [barcode part1]
  source 1..16: mol_type = other DNA
ttgttaaggccaccag

SEQ ID NO: 19683 - DNA, 16 bp, synthetic construct
  misc_feature 1..16: note = synthetic [barcode part1]
  source 1..16: mol_type = other DNA
agtgagacgcaggtct

SEQ ID NO: 19684 - DNA, 16 bp, synthetic construct
  misc_feature 1..16: note = synthetic [barcode part1]
  source 1..16: mol_type = other DNA
gaattagtgcgactag

SEQ ID NO: 19685 - DNA, 16 bp, synthetic construct
  misc_feature 1..16: note = synthetic [barcode part1]
  source 1..16: mol_type = other DNA
aattgattcggccgac

SEQ ID NO: 19686 - DNA, 16 bp, synthetic construct
  misc_feature 1..16: note = synthetic [barcode part1]
  source 1..16: mol_type = other DNA
gcgtgaattcgacgag

SEQ ID NO: 19687 - DNA, 16 bp, synthetic construct
  misc_feature 1..16: note = synthetic [barcode part1]
  source 1..16: mol_type = other DNA
aattggcaccgcaatc

SEQ ID NO: 19688 - DNA, 16 bp, synthetic construct
  misc_feature 1..16: note = synthetic [barcode part1]
  source 1..16: mol_type = other DNA
ccttggtaaccgtgtc

SEQ ID NO: 19689 - DNA, 16 bp, synthetic construct
  misc_feature 1..16: note = synthetic [barcode part1]
  source 1..16: mol_type = other DNA
aagtcctccttggaag

SEQ ID NO: 19690 - DNA, 16 bp, synthetic construct
  misc_feature 1..16: note = synthetic [barcode part1]
  source 1..16: mol_type = other DNA
gtactacacggataag

SEQ ID NO: 19691 - DNA, 16 bp, synthetic construct
  misc_feature 1..16: note = synthetic [barcode part1]
  source 1..16: mol_type = other DNA
gatcagttgcacgtac

SEQ ID NO: 19692 - DNA, 16 bp, synthetic construct
  misc_feature 1..16: note = synthetic [barcode part1]
  source 1..16: mol_type = other DNA
ttctaattgcaccggt

SEQ ID NO: 19693 - DNA, 16 bp, synthetic construct
  misc_feature 1..16: note = synthetic [barcode part1]
  source 1..16: mol_type = other DNA
ttgttgtaggtctacc

SEQ ID NO: 19694 - DNA, 16 bp, synthetic construct
  misc_feature 1..16: note = synthetic [barcode part1]
  source 1..16: mol_type = other DNA
gtacggacacttctag

SEQ ID NO: 19695 - DNA, 16 bp, synthetic construct
  misc_feature 1..16: note = synthetic [barcode part1]
  source 1..16: mol_type = other DNA
tagagtaaggccgaag

SEQ ID NO: 19696 - DNA, 16 bp, synthetic construct
  misc_feature 1..16: note = synthetic [barcode part1]
  source 1..16: mol_type = other DNA
aacgtggtagattgtg

SEQ ID NO: 19697 - DNA, 16 bp, synthetic construct
  misc_feature 1..16: note = synthetic [barcode part1]
  source 1..16: mol_type = other DNA
tacgtggaccttccgt

SEQ ID NO: 19698 - DNA, 16 bp, synthetic construct
  misc_feature 1..16: note = synthetic [barcode part1]
  source 1..16: mol_type = other DNA
acacttcgagacgtgt

SEQ ID NO: 19699 - DNA, 16 bp, synthetic construct
  misc_feature 1..16: note = synthetic [barcode part1]
  source 1..16: mol_type = other DNA
gcctatatcgagtacg

SEQ ID NO: 19700 - DNA, 16 bp, synthetic construct
  misc_feature 1..16: note = synthetic [barcode part1]
  source 1..16: mol_type = other DNA
tcgtaacctaaggtcg

SEQ ID NO: 19701 - DNA, 16 bp, synthetic construct
  misc_feature 1..16: note = synthetic [barcode part1]
  source 1..16: mol_type = other DNA
taatcctgtgcgccac

SEQ ID NO: 19702 - DNA, 16 bp, synthetic construct
  misc_feature 1..16: note = synthetic [barcode part1]
  source 1..16: mol_type = other DNA
gcacagacctggtaag

SEQ ID NO: 19703 - DNA, 16 bp, synthetic construct
  misc_feature 1..16: note = synthetic [barcode part1]
  source 1..16: mol_type = other DNA
taaggataggttgtcg

SEQ ID NO: 19704 - DNA, 16 bp, synthetic construct
  misc_feature 1..16: note = synthetic [barcode part1]
  source 1..16: mol_type = other DNA
atagaacggattcacg

SEQ ID NO: 19705 - DNA, 16 bp, synthetic construct
  misc_feature 1..16: note = synthetic [barcode part1]
  source 1..16: mol_type = other DNA
acgttcactgcaagtg

SEQ ID NO: 19706 - DNA, 16 bp, synthetic construct
  misc_feature 1..16: note = synthetic [barcode part1]
  source 1..16: mol_type = other DNA
atatacacgtggtgcc

SEQ ID NO: 19707 - DNA, 16 bp, synthetic construct
  misc_feature 1..16: note = synthetic [barcode part1]
  source 1..16: mol_type = other DNA
tgtcctacggaacagt

SEQ ID NO: 19708 - DNA, 16 bp, synthetic construct
  misc_feature 1..16: note = synthetic [barcode part1]
  source 1..16: mol_type = other DNA
gccgtggtagaattct

SEQ ID NO: 19709 - DNA, 16 bp, synthetic construct
  misc_feature 1..16: note = synthetic [barcode part1]
  source 1..16: mol_type = other DNA
cgcagtgattctgaac

SEQ ID NO: 19710 - DNA, 16 bp, synthetic construct
  misc_feature 1..16: note = synthetic [barcode part1]
  source 1..16: mol_type = other DNA
accgtccaatatctgt

SEQ ID NO: 19711 - DNA, 16 bp, synthetic construct
  misc_feature 1..16: note = synthetic [barcode part1]
  source 1..16: mol_type = other DNA
gttgcctgtccgtaac

SEQ ID NO: 19712 - DNA, 16 bp, synthetic construct
  misc_feature 1..16: note = synthetic [barcode part1]
  source 1..16: mol_type = other DNA
caaggaagaccttcct

SEQ ID NO: 19713 - DNA, 16 bp, synthetic construct
  misc_feature 1..16: note = synthetic [barcode part1]
  source 1..16: mol_type = other DNA
tcgagtggaacgacgt

SEQ ID NO: 19714 - DNA, 16 bp, synthetic construct
  misc_feature 1..16: note = synthetic [barcode part1]
  source 1..16: mol_type = other DNA
taccggaggtgatctt

SEQ ID NO: 19715 - DNA, 16 bp, synthetic construct
  misc_feature 1..16: note = synthetic [barcode part1]
  source 1..16: mol_type = other DNA
attggtgagatcagac

SEQ ID NO: 19716 - DNA, 16 bp, synthetic construct
  misc_feature 1..16: note = synthetic [barcode part1]
  source 1..16: mol_type = other DNA
cagatatcacaggcct

SEQ ID NO: 19717 - DNA, 16 bp, synthetic construct
  misc_feature 1..16: note = synthetic [barcode part1]
  source 1..16: mol_type = other DNA
ttgtcgcggataacac

SEQ ID NO: 19718 - DNA, 16 bp, synthetic construct
  misc_feature 1..16: note = synthetic [barcode part1]
  source 1..16: mol_type = other DNA
gtctaacaggacgcag

SEQ ID NO: 19719 - DNA, 16 bp, synthetic construct
  misc_feature 1..16: note = synthetic [barcode part1]
  source 1..16: mol_type = other DNA
acgcagtcgatacact

SEQ ID NO: 19720 - DNA, 16 bp, synthetic construct
  misc_feature 1..16: note = synthetic [barcode part1]
  source 1..16: mol_type = other DNA
cctcgcaccgaattgt

SEQ ID NO: 19721 - DNA, 16 bp, synthetic construct
  misc_feature 1..16: note = synthetic [barcode part1]
  source 1..16: mol_type = other DNA
gttatcttgccactcc

SEQ ID NO: 19722 - DNA, 16 bp, synthetic construct
  misc_feature 1..16: note = synthetic [barcode part1]
  source 1..16: mol_type = other DNA
tactgaggcctctacc

SEQ ID NO: 19723 - DNA, 16 bp, synthetic construct
  misc_feature 1..16: note = synthetic [barcode part1]
  source 1..16: mol_type = other DNA
ccgttgtattctgtcc

SEQ ID NO: 19724 - DNA, 16 bp, synthetic construct
  misc_feature 1..16: note = synthetic [barcode part1]
  source 1..16: mol_type = other DNA
tcctacgcagtctgac

SEQ ID NO: 19725 - DNA, 16 bp, synthetic construct
  misc_feature 1..16: note = synthetic [barcode part1]
  source 1..16: mol_type = other DNA
tactgaaggtgcaagt

SEQ ID NO: 19726 - DNA, 16 bp, synthetic construct
  misc_feature 1..16: note = synthetic [barcode part1]
  source 1..16: mol_type = other DNA
tgttagaacctccact

SEQ ID NO: 19727 - DNA, 16 bp, synthetic construct
  misc_feature 1..16: note = synthetic [barcode part1]
  source 1..16: mol_type = other DNA
ccgacgtgactagaag

SEQ ID NO: 19728 - DNA, 16 bp, synthetic construct
  misc_feature 1..16: note = synthetic [barcode part1]
  source 1..16: mol_type = other DNA
ttgatccacctcctgt

SEQ ID NO: 19729 - DNA, 16 bp, synthetic construct
  misc_feature 1..16: note = synthetic [barcode part1]
  source 1..16: mol_type = other DNA
gttccgtcgtcaacac

SEQ ID NO: 19730 - DNA, 16 bp, synthetic construct
  misc_feature 1..16: note = synthetic [barcode part1]
  source 1..16: mol_type = other DNA
attcctaatccgacac

SEQ ID NO: 19731 - DNA, 16 bp, synthetic construct
  misc_feature 1..16: note = synthetic [barcode part1]
  source 1..16: mol_type = other DNA
gttgatagtggaacgt

SEQ ID NO: 19732 - DNA, 16 bp, synthetic construct
  misc_feature 1..16: note = synthetic [barcode part1]
  source 1..16: mol_type = other DNA
tggttggcgtaacgtt

SEQ ID NO: 19733 - DNA, 16 bp, synthetic construct
  misc_feature 1..16: note = synthetic [barcode part1]
  source 1..16: mol_type = other DNA
caaggtcaccgattgt

SEQ ID NO: 19734 - DNA, 16 bp, synthetic construct
  misc_feature 1..16: note = synthetic [barcode part1]
  source 1..16: mol_type = other DNA
ccgaagatcttcaacg

SEQ ID NO: 19735 - DNA, 16 bp, synthetic construct
  misc_feature 1..16: note = synthetic [barcode part1]
  source 1..16: mol_type = other DNA
gaagtgagtagactct

SEQ ID NO: 19736 - DNA, 16 bp, synthetic construct
  misc_feature 1..16: note = synthetic [barcode part1]
  source 1..16: mol_type = other DNA
acacgtacgataccac

SEQ ID NO: 19737 - DNA, 16 bp, synthetic construct
  misc_feature 1..16: note = synthetic [barcode part1]
  source 1..16: mol_type = other DNA
tgtgtgttcgaagtcg

SEQ ID NO: 19738 - DNA, 16 bp, synthetic construct
  misc_feature 1..16: note = synthetic [barcode part1]
  source 1..16: mol_type = other DNA
ttaggtaccaccttgt

SEQ ID NO: 19739 - DNA, 16 bp, synthetic construct
  misc_feature 1..16: note = synthetic [barcode part1]
  source 1..16: mol_type = other DNA
tctcagaccactcgtg

SEQ ID NO: 19740 - DNA, 16 bp, synthetic construct
  misc_feature 1..16: note = synthetic [barcode part1]
  source 1..16: mol_type = other DNA
atacgtgaaggaaggc

SEQ ID NO: 19741 - DNA, 16 bp, synthetic construct
  misc_feature 1..16: note = synthetic [barcode part1]
  source 1..16: mol_type = other DNA
tctcggtgttactctc

SEQ ID NO: 19742 - DNA, 16 bp, synthetic construct
  misc_feature 1..16: note = synthetic [barcode part1]
  source 1..16: mol_type = other DNA
actcttaccgtcaggc

SEQ ID NO: 19743 - DNA, 16 bp, synthetic construct
  misc_feature 1..16: note = synthetic [barcode part1]
  source 1..16: mol_type = other DNA
tgcaagtagtagagtc

SEQ ID NO: 19744 - DNA, 16 bp, synthetic construct
  misc_feature 1..16: note = synthetic [barcode part1]
  source 1..16: mol_type = other DNA
attgcggttactcact

SEQ ID NO: 19745 - DNA, 16 bp, synthetic construct
  misc_feature 1..16: note = synthetic [barcode part1]
  source 1..16: mol_type = other DNA
cgtgttctaccgagtc

SEQ ID NO: 19746 - DNA, 16 bp, synthetic construct
  misc_feature 1..16: note = synthetic [barcode part1]
  source 1..16: mol_type = other DNA
gtgccgaccttcaatc

SEQ ID NO: 19747 - DNA, 16 bp, synthetic construct
  misc_feature 1..16: note = synthetic [barcode part1]
  source 1..16: mol_type = other DNA
acctgttggcgtcact

SEQ ID NO: 19748 - DNA, 16 bp, synthetic construct
  misc_feature 1..16: note = synthetic [barcode part1]
  source 1..16: mol_type = other DNA
acgatcaatacaccgc

SEQ ID NO: 19749 - DNA, 16 bp, synthetic construct
  misc_feature 1..16: note = synthetic [barcode part1]
  source 1..16: mol_type = other DNA
tcctgtgactgttggc

SEQ ID NO: 19750 - DNA, 16 bp, synthetic construct
  misc_feature 1..16: note = synthetic [barcode part1]
  source 1..16: mol_type = other DNA
cgtaacacacttgttc

SEQ ID NO: 19751 - DNA, 16 bp, synthetic construct
  misc_feature 1..16: note = synthetic [barcode part1]
  source 1..16: mol_type = other DNA
cggttagtcaaccagt

SEQ ID NO: 19752 - DNA, 16 bp, synthetic construct
  misc_feature 1..16: note = synthetic [barcode part1]
  source 1..16: mol_type = other DNA
acttacgtacgtcgag

SEQ ID NO: 19753 - DNA, 16 bp, synthetic construct
  misc_feature 1..16: note = synthetic [barcode part1]
  source 1..16: mol_type = other DNA
tccagtctggtgtacc

SEQ ID NO: 19754 - DNA, 16 bp, synthetic construct
  misc_feature 1..16: note = synthetic [barcode part1]
  source 1..16: mol_type = other DNA
tattgaggagtcgcct

SEQ ID NO: 19755 - DNA, 16 bp, synthetic construct
  misc_feature 1..16: note = synthetic [barcode part1]
  source 1..16: mol_type = other DNA
tgccgacgtatatcag

SEQ ID NO: 19756 - DNA, 16 bp, synthetic construct
  misc_feature 1..16: note = synthetic [barcode part1]
  source 1..16: mol_type = other DNA
aagtctcagagtcctg

SEQ ID NO: 19757 - DNA, 16 bp, synthetic construct
  misc_feature 1..16: note = synthetic [barcode part1]
  source 1..16: mol_type = other DNA
ccgacaccagttatag

SEQ ID NO: 19758 - DNA, 16 bp, synthetic construct
  misc_feature 1..16: note = synthetic [barcode part1]
  source 1..16: mol_type = other DNA
aagtaggtgagacctt

SEQ ID NO: 19759 - DNA, 16 bp, synthetic construct
  misc_feature 1..16: note = synthetic [barcode part1]
  source 1..16: mol_type = other DNA
gacaactggtcgttac

SEQ ID NO: 19760 - DNA, 16 bp, synthetic construct
  misc_feature 1..16: note = synthetic [barcode part1]
  source 1..16: mol_type = other DNA
taacgcaccagatacc

SEQ ID NO: 19761 - DNA, 16 bp, synthetic construct
  misc_feature 1..16: note = synthetic [barcode part1]
  source 1..16: mol_type = other DNA
ttcgcgttggcaatcc

SEQ ID NO: 19762 - DNA, 16 bp, synthetic construct
  misc_feature 1..16: note = synthetic [barcode part1]
  source 1..16: mol_type = other DNA
acacctacactattcg

SEQ ID NO: 19763 - DNA, 16 bp, synthetic construct
  misc_feature 1..16: note = synthetic [barcode part1]
  source 1..16: mol_type = other DNA
cacgacaccgtctgtt

SEQ ID NO: 19764 - DNA, 16 bp, synthetic construct
  misc_feature 1..16: note = synthetic [barcode part1]
  source 1..16: mol_type = other DNA
gttagtgattcggacc

SEQ ID NO: 19765 - DNA, 16 bp, synthetic construct
  misc_feature 1..16: note = synthetic [barcode part1]
  source 1..16: mol_type = other DNA
acttgttgccttagac

SEQ ID NO: 19766 - DNA, 16 bp, synthetic construct
  misc_feature 1..16: note = synthetic [barcode part1]
  source 1..16: mol_type = other DNA
agtgatcttctgcgcc

SEQ ID NO: 19767 - DNA, 16 bp, synthetic construct
  misc_feature 1..16: note = synthetic [barcode part1]
  source 1..16: mol_type = other DNA
gtgttcaattctaccg

SEQ ID NO: 19768 - DNA, 16 bp, synthetic construct
  misc_feature 1..16: note = synthetic [barcode part1]
  source 1..16: mol_type = other DNA
aggcaggttcgagact

SEQ ID NO: 19769 - DNA, 16 bp, synthetic construct
  misc_feature 1..16: note = synthetic [barcode part1]
  source 1..16: mol_type = other DNA
gcacgtatcttctcct

SEQ ID NO: 19770 - DNA, 16 bp, synthetic construct
  misc_feature 1..16: note = synthetic [barcode part1]
  source 1..16: mol_type = other DNA
ccgattataatcggcg

SEQ ID NO: 19771 - DNA, 16 bp, synthetic construct
  misc_feature 1..16: note = synthetic [barcode part1]
  source 1..16: mol_type = other DNA
atatcggatacctggc

SEQ ID NO: 19772 - DNA, 16 bp, synthetic construct
  misc_feature 1..16: note = synthetic [barcode part1]
  source 1..16: mol_type = other DNA
tggatctggtaggacg

SEQ ID NO: 19773 - DNA, 16 bp, synthetic construct
  misc_feature 1..16: note = synthetic [barcode part1]
  source 1..16: mol_type = other DNA
ccacctgaggttctgt

SEQ ID NO: 19774 - DNA, 16 bp, synthetic construct
  misc_feature 1..16: note = synthetic [barcode part1]
  source 1..16: mol_type = other DNA
tcaccgtgaacctacc

SEQ ID NO: 19775 - DNA, 16 bp, synthetic construct
  misc_feature 1..16: note = synthetic [barcode part1]
  source 1..16: mol_type = other DNA
cggtcttcacacaacc

SEQ ID NO: 19776 - DNA, 16 bp, synthetic construct
  misc_feature 1..16: note = synthetic [barcode part1]
  source 1..16: mol_type = other DNA
tgatcgaagtcgatcc

SEQ ID NO: 19777 - DNA, 16 bp, synthetic construct
  misc_feature 1..16: note = synthetic [barcode part1]
  source 1..16: mol_type = other DNA
agaagatccgcgcaac

SEQ ID NO: 19778 - DNA, 16 bp, synthetic construct
  misc_feature 1..16: note = synthetic [barcode part1]
  source 1..16: mol_type = other DNA
cgcacttcgaattgcc

SEQ ID NO: 19779 - DNA, 16 bp, synthetic construct
  misc_feature 1..16: note = synthetic [barcode part1]
  source 1..16: mol_type = other DNA
ttggataggcaggatt

SEQ ID NO: 19780 - DNA, 16 bp, synthetic construct
  misc_feature 1..16: note = synthetic [barcode part1]
  source 1..16: mol_type = other DNA
cgtccagtgtagattg

SEQ ID NO: 19781 - DNA, 16 bp, synthetic construct
  misc_feature 1..16: note = synthetic [barcode part1]
  source 1..16: mol_type = other DNA
aaggtcggtataactg

SEQ ID NO: 19782 - DNA, 16 bp, synthetic construct
  misc_feature 1..16: note = synthetic [barcode part1]
  source 1..16: mol_type = other DNA
gacgtgaggtatagag

SEQ ID NO: 19783 - DNA, 16 bp, synthetic construct
  misc_feature 1..16: note = synthetic [barcode part1]
  source 1..16: mol_type = other DNA
actctgcacagagtac

SEQ ID NO: 19784 - DNA, 16 bp, synthetic construct
  misc_feature 1..16: note = synthetic [barcode part1]
  source 1..16: mol_type = other DNA
gtaatcggtaccaacc

SEQ ID NO: 19785 - DNA, 16 bp, synthetic construct
  misc_feature 1..16: note = synthetic [barcode part1]
  source 1..16: mol_type = other DNA
taacgtggtgcaatcc

SEQ ID NO: 19786 - DNA, 16 bp, synthetic construct
  misc_feature 1..16: note = synthetic [barcode part1]
  source 1..16: mol_type = other DNA
ttcagtccggcacact

SEQ ID NO: 19787 - DNA, 16 bp, synthetic construct
  misc_feature 1..16: note = synthetic [barcode part1]
  source 1..16: mol_type = other DNA
taaccacctcgtgaag

SEQ ID NO: 19788 - DNA, 16 bp, synthetic construct
  misc_feature 1..16: note = synthetic [barcode part1]
  source 1..16: mol_type = other DNA
cctgtctgacgttacg

SEQ ID NO: 19789 - DNA, 16 bp, synthetic construct
  misc_feature 1..16: note = synthetic [barcode part1]
  source 1..16: mol_type = other DNA
gcagttatcaaggaac

SEQ ID NO: 19790 - DNA, 16 bp, synthetic construct
  misc_feature 1..16: note = synthetic [barcode part1]
  source 1..16: mol_type = other DNA
gataaccgtgttcttc

SEQ ID NO: 19791 - DNA, 16 bp, synthetic construct
  misc_feature 1..16: note = synthetic [barcode part1]
  source 1..16: mol_type = other DNA
taagtagagtgtcgtg

SEQ ID NO: 19792 - DNA, 16 bp, synthetic construct
  misc_feature 1..16: note = synthetic [barcode part1]
  source 1..16: mol_type = other DNA
gccacgaataagtggc

SEQ ID NO: 19793 - DNA, 16 bp, synthetic construct
  misc_feature 1..16: note = synthetic [barcode part1]
  source 1..16: mol_type = other DNA
gaatcggaatctctcg

SEQ ID NO: 19794 - DNA, 16 bp, synthetic construct
  misc_feature 1..16: note = synthetic [barcode part1]
  source 1..16: mol_type = other DNA
tatatccgcgagaacc

SEQ ID NO: 19795 - DNA, 16 bp, synthetic construct
  misc_feature 1..16: note = synthetic [barcode part1]
  source 1..16: mol_type = other DNA
ccaccttatacctaag

SEQ ID NO: 19796 - DNA, 16 bp, synthetic construct
  misc_feature 1..16: note = synthetic [barcode part1]
  source 1..16: mol_type = other DNA
cgaatcaatactcctc

SEQ ID NO: 19797 - DNA, 16 bp, synthetic construct
  misc_feature 1..16: note = synthetic [barcode part1]
  source 1..16: mol_type = other DNA
gttgccgtcttcacag

SEQ ID NO: 19798 - DNA, 16 bp, synthetic construct
  misc_feature 1..16: note = synthetic [barcode part1]
  source 1..16: mol_type = other DNA
gtcggcgtctaatcct

SEQ ID NO: 19799 - DNA, 16 bp, synthetic construct
  misc_feature 1..16: note = synthetic [barcode part1]
  source 1..16: mol_type = other DNA
tctagacacgatcacg

SEQ ID NO: 19800 - DNA, 16 bp, synthetic construct
  misc_feature 1..16: note = synthetic [barcode part1]
  source 1..16: mol_type = other DNA
tccagtcaagaccaac

SEQ ID NO: 19801 - DNA, 16 bp, synthetic construct
  misc_feature 1..16: note = synthetic [barcode part1]
  source 1..16: mol_type = other DNA
cgtgattcgcactaag

SEQ ID NO: 19802 - DNA, 16 bp, synthetic construct
  misc_feature 1..16: note = synthetic [barcode part1]
  source 1..16: mol_type = other DNA
cgacgatacacctcct

SEQ ID NO: 19803 - DNA, 16 bp, synthetic construct
  misc_feature 1..16: note = synthetic [barcode part1]
  source 1..16: mol_type = other DNA
tcgcaggacaagacac

SEQ ID NO: 19804 - DNA, 16 bp, synthetic construct
  misc_feature 1..16: note = synthetic [barcode part1]
  source 1..16: mol_type = other DNA
acagagaagagtgcgt

SEQ ID NO: 19805 - DNA, 16 bp, synthetic construct
  misc_feature 1..16: note = synthetic [barcode part1]
  source 1..16: mol_type = other DNA
tcgtgagaataacggt

SEQ ID NO: 19806 - DNA, 16 bp, synthetic construct
  misc_feature 1..16: note = synthetic [barcode part1]
  source 1..16: mol_type = other DNA
ttacggtggaactctg

SEQ ID NO: 19807 - DNA, 16 bp, synthetic construct
  misc_feature 1..16: note = synthetic [barcode part1]
  source 1..16: mol_type = other DNA
aagtacagtgcaggag

SEQ ID NO: 19808 - DNA, 16 bp, synthetic construct
  misc_feature 1..16: note = synthetic [barcode part1]
  source 1..16: mol_type = other DNA
tcgaacggtagacctt

SEQ ID NO: 19809 - DNA, 16 bp, synthetic construct
  misc_feature 1..16: note = synthetic [barcode part1]
  source 1..16: mol_type = other DNA
accgacagaaccaggt

SEQ ID NO: 19810 - DNA, 16 bp, synthetic construct
  misc_feature 1..16: note = synthetic [barcode part1]
  source 1..16: mol_type = other DNA
gacttggtcgacagtt

SEQ ID NO: 19811 - DNA, 16 bp, synthetic construct
  misc_feature 1..16: note = synthetic [barcode part1]
  source 1..16: mol_type = other DNA
cgttctaggcgaagtt

SEQ ID NO: 19812 - DNA, 16 bp, synthetic construct
  misc_feature 1..16: note = synthetic [barcode part1]
  source 1..16: mol_type = other DNA
acctacactcttaacg

SEQ ID NO: 19813 - DNA, 16 bp, synthetic construct
  misc_feature 1..16: note = synthetic [barcode part1]
  source 1..16: mol_type = other DNA
tcctgcaggcctaatc

SEQ ID NO: 19814 - DNA, 16 bp, synthetic construct
  misc_feature 1..16: note = synthetic [barcode part1]
  source 1..16: mol_type = other DNA
acttgtcctacaacgt

SEQ ID NO: 19815 - DNA, 16 bp, synthetic construct
  misc_feature 1..16: note = synthetic [barcode part1]
  source 1..16: mol_type = other DNA
taggatacttgtggag

SEQ ID NO: 19816 - DNA, 16 bp, synthetic construct
  misc_feature 1..16: note = synthetic [barcode part1]
  source 1..16: mol_type = other DNA
acgagacaataggacg

SEQ ID NO: 19817 - DNA, 16 bp, synthetic construct
  misc_feature 1..16: note = synthetic [barcode part1]
  source 1..16: mol_type = other DNA
tcgtattacaatccgc

SEQ ID NO: 19818 - DNA, 16 bp, synthetic construct
  misc_feature 1..16: note = synthetic [barcode part1]
  source 1..16: mol_type = other DNA
actgtgattgtggtgc

SEQ ID NO: 19819 - DNA, 16 bp, synthetic construct
  misc_feature 1..16: note = synthetic [barcode part1]
  source 1..16: mol_type = other DNA
caacacacgtagatcc

SEQ ID NO: 19820 - DNA, 16 bp, synthetic construct
  misc_feature 1..16: note = synthetic [barcode part1]
  source 1..16: mol_type = other DNA
ttaataggcagaggtc

SEQ ID NO: 19821 - DNA, 16 bp, synthetic construct
  misc_feature 1..16: note = synthetic [barcode part1]
  source 1..16: mol_type = other DNA
cggcactgtaatactg

SEQ ID NO: 19822 - DNA, 16 bp, synthetic construct
  misc_feature 1..16: note = synthetic [barcode part1]
  source 1..16: mol_type = other DNA
ttgcaacgtcacagtg

SEQ ID NO: 19823 - DNA, 16 bp, synthetic construct
  misc_feature 1..16: note = synthetic [barcode part1]
  source 1..16: mol_type = other DNA
gacttagaatccgacc

SEQ ID NO: 19824 - DNA, 16 bp, synthetic construct
  misc_feature 1..16: note = synthetic [barcode part1]
  source 1..16: mol_type = other DNA
acctacttggaactct

SEQ ID NO: 19825 - DNA, 16 bp, synthetic construct
  misc_feature 1..16: note = synthetic [barcode part1]
  source 1..16: mol_type = other DNA
caccagattacactct

SEQ ID NO: 19826 - DNA, 16 bp, synthetic construct
  misc_feature 1..16: note = synthetic [barcode part1]
  source 1..16: mol_type = other DNA
aagtctccggtatcag

SEQ ID NO: 19827 - DNA, 16 bp, synthetic construct
  misc_feature 1..16: note = synthetic [barcode part1]
  source 1..16: mol_type = other DNA
tgtgacaacagacggc

SEQ ID NO: 19828 - DNA, 16 bp, synthetic construct
  misc_feature 1..16: note = synthetic [barcode part1]
  source 1..16: mol_type = other DNA
aacgattacgcgaagt

SEQ ID NO: 19829 - DNA, 16 bp, synthetic construct
  misc_feature 1..16: note = synthetic [barcode part1]
  source 1..16: mol_type = other DNA
ccaacgagacacaggt

SEQ ID NO: 19830 - DNA, 16 bp, synthetic construct
  misc_feature 1..16: note = synthetic [barcode part1]
  source 1..16: mol_type = other DNA
cgtgttctgtctctac

SEQ ID NO: 19831 - DNA, 16 bp, synthetic construct
  misc_feature 1..16: note = synthetic [barcode part1]
  source 1..16: mol_type = other DNA
gacggtcgtatcttcc

SEQ ID NO: 19832 - DNA, 16 bp, synthetic construct
  misc_feature 1..16: note = synthetic [barcode part1]
  source 1..16: mol_type = other DNA
tgcagacaacgaagtt

SEQ ID NO: 19833 - DNA, 16 bp, synthetic construct
  misc_feature 1..16: note = synthetic [barcode part1]
  source 1..16: mol_type = other DNA
gatctcactgttcgcg

SEQ ID NO: 19834 - DNA, 16 bp, synthetic construct
  misc_feature 1..16: note = synthetic [barcode part1]
  source 1..16: mol_type = other DNA
ttatcggaatccggtg

SEQ ID NO: 19835 - DNA, 16 bp, synthetic construct
  misc_feature 1..16: note = synthetic [barcode part1]
  source 1..16: mol_type = other DNA
tcgcgtcttacacctt

SEQ ID NO: 19836 - DNA, 16 bp, synthetic construct
  misc_feature 1..16: note = synthetic [barcode part1]
  source 1..16: mol_type = other DNA
tgatcgagtcaatcgc

SEQ ID NO: 19837 - DNA, 16 bp, synthetic construct
  misc_feature 1..16: note = synthetic [barcode part1]
  source 1..16: mol_type = other DNA
aagaccgactaggaag

SEQ ID NO: 19838 - DNA, 16 bp, synthetic construct
  misc_feature 1..16: note = synthetic [barcode part1]
  source 1..16: mol_type = other DNA
gtaggcagtaatatcg

SEQ ID NO: 19839 - DNA, 16 bp, synthetic construct
  misc_feature 1..16: note = synthetic [barcode part1]
  source 1..16: mol_type = other DNA
caaccaattggccaac

SEQ ID NO: 19840 - DNA, 16 bp, synthetic construct
  misc_feature 1..16: note = synthetic [barcode part1]
  source 1..16: mol_type = other DNA
tgtctaccgagtaggt

SEQ ID NO: 19841 - DNA, 16 bp, synthetic construct
  misc_feature 1..16: note = synthetic [barcode part1]
  source 1..16: mol_type = other DNA
atcttattaccggcgt

SEQ ID NO: 19842 - DNA, 16 bp, synthetic construct
  misc_feature 1..16: note = synthetic [barcode part1]
  source 1..16: mol_type = other DNA
tacttctcaactcgag

SEQ ID NO: 19843 - DNA, 16 bp, synthetic construct
  misc_feature 1..16: note = synthetic [barcode part1]
  source 1..16: mol_type = other DNA
ccaatcttccgactct

SEQ ID NO: 19844 - DNA, 16 bp, synthetic construct
  misc_feature 1..16: note = synthetic [barcode part1]
  source 1..16: mol_type = other DNA
tgagagatcggaaggt

SEQ ID NO: 19845 - DNA, 16 bp, synthetic construct
  misc_feature 1..16: note = synthetic [barcode part1]
  source 1..16: mol_type = other DNA
ttgacgtacactggtg

SEQ ID NO: 19846 - DNA, 16 bp, synthetic construct
  misc_feature 1..16: note = synthetic [barcode part1]
  source 1..16: mol_type = other DNA
gtcagactgagtcact

SEQ ID NO: 19847 - DNA, 16 bp, synthetic construct
  misc_feature 1..16: note = synthetic [barcode part1]
  source 1..16: mol_type = other DNA
taggtgtcgataagac

SEQ ID NO: 19848 - DNA, 16 bp, synthetic construct
  misc_feature 1..16: note = synthetic [barcode part1]
  source 1..16: mol_type = other DNA
tatcgtcggtatacct

SEQ ID NO: 19849 - DNA, 16 bp, synthetic construct
  misc_feature 1..16: note = synthetic [barcode part1]
  source 1..16: mol_type = other DNA
ttcttgttgagtcacg

SEQ ID NO: 19850 - DNA, 16 bp, synthetic construct
  misc_feature 1..16: note = synthetic [barcode part1]
  source 1..16: mol_type = other DNA
actacttcttaccgcc

SEQ ID NO: 19851 - DNA, 16 bp, synthetic construct
  misc_feature 1..16: note = synthetic [barcode part1]
  source 1..16: mol_type = other DNA
actctataggtactcc

SEQ ID NO: 19852 - DNA, 16 bp, synthetic construct
  misc_feature 1..16: note = synthetic [barcode part1]
  source 1..16: mol_type = other DNA
gtcagtagaatcagac

SEQ ID NO: 19853 - DNA, 16 bp, synthetic construct
  misc_feature 1..16: note = synthetic [barcode part1]
  source 1..16: mol_type = other DNA
acacaaccacacagtc

SEQ ID NO: 19854 - DNA, 16 bp, synthetic construct
  misc_feature 1..16: note = synthetic [barcode part1]
  source 1..16: mol_type = other DNA
agtcacacaactgtgc

SEQ ID NO: 19855 - DNA, 16 bp, synthetic construct
  misc_feature 1..16: note = synthetic [barcode part1]
  source 1..16: mol_type = other DNA
tcaacaggcctctgtc

SEQ ID NO: 19856 - DNA, 16 bp, synthetic construct
  misc_feature 1..16: note = synthetic [barcode part1]
  source 1..16: mol_type = other DNA
cggtacacaatctctt

SEQ ID NO: 19857 - DNA, 16 bp, synthetic construct
  misc_feature 1..16: note = synthetic [barcode part1]
  source 1..16: mol_type = other DNA
aggaacagacggcctt

SEQ ID NO: 19858 - DNA, 16 bp, synthetic construct
  misc_feature 1..16: note = synthetic [barcode part1]
  source 1..16: mol_type = other DNA
gtgtgcctatctcgtg

SEQ ID NO: 19859 - DNA, 16 bp, synthetic construct
  misc_feature 1..16: note = synthetic [barcode part1]
  source 1..16: mol_type = other DNA
accttccactacgcag

SEQ ID NO: 19860 - DNA, 16 bp, synthetic construct
  misc_feature 1..16: note = synthetic [barcode part1]
  source 1..16: mol_type = other DNA
gaatacaagttgccag

SEQ ID NO: 19861 - DNA, 16 bp, synthetic construct
  misc_feature 1..16: note = synthetic [barcode part1]
  source 1..16: mol_type = other DNA
caatcttcgatcgtac

SEQ ID NO: 19862 - DNA, 16 bp, synthetic construct
  misc_feature 1..16: note = synthetic [barcode part1]
  source 1..16: mol_type = other DNA
tataactaccgttccg

SEQ ID NO: 19863 - DNA, 16 bp, synthetic construct
  misc_feature 1..16: note = synthetic [barcode part1]
  source 1..16: mol_type = other DNA
aagtctctcctccttg

SEQ ID NO: 19864 - DNA, 16 bp, synthetic construct
  misc_feature 1..16: note = synthetic [barcode part1]
  source 1..16: mol_type = other DNA
tacacacctgagactg

SEQ ID NO: 19865 - DNA, 16 bp, synthetic construct
  misc_feature 1..16: note = synthetic [barcode part1]
  source 1..16: mol_type = other DNA
gaatcggtctcaatcg

SEQ ID NO: 19866 - DNA, 16 bp, synthetic construct
  misc_feature 1..16: note = synthetic [barcode part1]
  source 1..16: mol_type = other DNA
cgttcgcggtactact

SEQ ID NO: 19867 - DNA, 16 bp, synthetic construct
  misc_feature 1..16: note = synthetic [barcode part1]
  source 1..16: mol_type = other DNA
atcacgttgcaggttg

SEQ ID NO: 19868 - DNA, 16 bp, synthetic construct
  misc_feature 1..16: note = synthetic [barcode part1]
  source 1..16: mol_type = other DNA
accactaccttcgcag

SEQ ID NO: 19869 - DNA, 16 bp, synthetic construct
  misc_feature 1..16: note = synthetic [barcode part1]
  source 1..16: mol_type = other DNA
cggtatatcagtacgc

SEQ ID NO: 19870 - DNA, 16 bp, synthetic construct
  misc_feature 1..16: note = synthetic [barcode part1]
  source 1..16: mol_type = other DNA
agaataccggtaactg

SEQ ID NO: 19871 - DNA, 16 bp, synthetic construct
  misc_feature 1..16: note = synthetic [barcode part1]
  source 1..16: mol_type = other DNA
aggcagatatccgttc

SEQ ID NO: 19872 - DNA, 16 bp, synthetic construct
  misc_feature 1..16: note = synthetic [barcode part1]
  source 1..16: mol_type = other DNA
cggtatagtgtgactc

SEQ ID NO: 19873 - DNA, 16 bp, synthetic construct
  misc_feature 1..16: note = synthetic [barcode part1]
  source 1..16: mol_type = other DNA
tggttgagaagaaggc

SEQ ID NO: 19874 - DNA, 16 bp, synthetic construct
  misc_feature 1..16: note = synthetic [barcode part1]
  source 1..16: mol_type = other DNA
acgtccgttcactacg

SEQ ID NO: 19875 - DNA, 16 bp, synthetic construct
  misc_feature 1..16: note = synthetic [barcode part1]
  source 1..16: mol_type = other DNA
tattcgtgttccgaac

SEQ ID NO: 19876 - DNA, 16 bp, synthetic construct
  misc_feature 1..16: note = synthetic [barcode part1]
  source 1..16: mol_type = other DNA
acacgcagaagtcctt

SEQ ID NO: 19877 - DNA, 16 bp, synthetic construct
  misc_feature 1..16: note = synthetic [barcode part1]
  source 1..16: mol_type = other DNA
acctgtaccttcggtg

SEQ ID NO: 19878 - DNA, 16 bp, synthetic construct
  misc_feature 1..16: note = synthetic [barcode part1]
  source 1..16: mol_type = other DNA
acagataagtaccacg

SEQ ID NO: 19879 - DNA, 16 bp, synthetic construct
  misc_feature 1..16: note = synthetic [barcode part1]
  source 1..16: mol_type = other DNA
tgaggtgaagtcgaag

SEQ ID NO: 19880 - DNA, 16 bp, synthetic construct
  misc_feature 1..16: note = synthetic [barcode part1]
  source 1..16: mol_type = other DNA
gcaaccgtcctaactc

SEQ ID NO: 19881 - DNA, 16 bp, synthetic construct
  misc_feature 1..16: note = synthetic [barcode part1]
  source 1..16: mol_type = other DNA
attattggcgttcctg

SEQ ID NO: 19882 - DNA, 16 bp, synthetic construct
  misc_feature 1..16: note = synthetic [barcode part1]
  source 1..16: mol_type = other DNA
gagtcactgtcagact

SEQ ID NO: 19883 - DNA, 16 bp, synthetic construct
  misc_feature 1..16: note = synthetic [barcode part1]
  source 1..16: mol_type = other DNA
gtcgtctgataagacc

SEQ ID NO: 19884 - DNA, 16 bp, synthetic construct
  misc_feature 1..16: note = synthetic [barcode part1]
  source 1..16: mol_type = other DNA
tcaggaggatcgtacg

SEQ ID NO: 19885 - DNA, 16 bp, synthetic construct
  misc_feature 1..16: note = synthetic [barcode part1]
  source 1..16: mol_type = other DNA
gtaagtcaccagaggc

SEQ ID NO: 19886 - DNA, 16 bp, synthetic construct
  misc_feature 1..16: note = synthetic [barcode part1]
  source 1..16: mol_type = other DNA
gcacctccagtaacct

SEQ ID NO: 19887 - DNA, 16 bp, synthetic construct
  misc_feature 1..16: note = synthetic [barcode part1]
  source 1..16: mol_type = other DNA
gtcctgtacaactatc

SEQ ID NO: 19888 - DNA, 16 bp, synthetic construct
  misc_feature 1..16: note = synthetic [barcode part1]
  source 1..16: mol_type = other DNA
ttcgtgtaccactagt

SEQ ID NO: 19889 - DNA, 16 bp, synthetic construct
  misc_feature 1..16: note = synthetic [barcode part1]
  source 1..16: mol_type = other DNA
ataccacacttcggag

SEQ ID NO: 19890 - DNA, 16 bp, synthetic construct
  misc_feature 1..16: note = synthetic [barcode part1]
  source 1..16: mol_type = other DNA
tcttcgcaggttgtcg

SEQ ID NO: 19891 - DNA, 16 bp, synthetic construct
  misc_feature 1..16: note = synthetic [barcode part1]
  source 1..16: mol_type = other DNA
acaccaatcttactgc

SEQ ID NO: 19892 - DNA, 16 bp, synthetic construct
  misc_feature 1..16: note = synthetic [barcode part1]
  source 1..16: mol_type = other DNA
acggagtgtcctattg

SEQ ID NO: 19893 - DNA, 16 bp, synthetic construct
  misc_feature 1..16: note = synthetic [barcode part1]
  source 1..16: mol_type = other DNA
ataggcgtgaggttcg

SEQ ID NO: 19894 - DNA, 16 bp, synthetic construct
  misc_feature 1..16: note = synthetic [barcode part1]
  source 1..16: mol_type = other DNA
ccgagatcgcctatct

SEQ ID NO: 19895 - DNA, 16 bp, synthetic construct
  misc_feature 1..16: note = synthetic [barcode part1]
  source 1..16: mol_type = other DNA
agaacgaggatctgtt

SEQ ID NO: 19896 - DNA, 16 bp, synthetic construct
  misc_feature 1..16: note = synthetic [barcode part1]
  source 1..16: mol_type = other DNA
gtctcacttcgcgaac

SEQ ID NO: 19897 - DNA, 16 bp, synthetic construct
  misc_feature 1..16: note = synthetic [barcode part1]
  source 1..16: mol_type = other DNA
cggaacagtctcttag

SEQ ID NO: 19898 - DNA, 16 bp, synthetic construct
  misc_feature 1..16: note = synthetic [barcode part1]
  source 1..16: mol_type = other DNA
tctaacggtccgatag

SEQ ID NO: 19899 - DNA, 16 bp, synthetic construct
  misc_feature 1..16: note = synthetic [barcode part1]
  source 1..16: mol_type = other DNA
aagtctgcggatctac

SEQ ID NO: 19900 - DNA, 16 bp, synthetic construct
  misc_feature 1..16: note = synthetic [barcode part1]
  source 1..16: mol_type = other DNA
gcgtcttgttgaattc

SEQ ID NO: 19901 - DNA, 16 bp, synthetic construct
  misc_feature 1..16: note = synthetic [barcode part1]
  source 1..16: mol_type = other DNA
aagagtacgccgaacc

SEQ ID NO: 19902 - DNA, 16 bp, synthetic construct
  misc_feature 1..16: note = synthetic [barcode part1]
  source 1..16: mol_type = other DNA
acgtgttcaccaacag

SEQ ID NO: 19903 - DNA, 16 bp, synthetic construct
  misc_feature 1..16: note = synthetic [barcode part1]
  source 1..16: mol_type = other DNA
cgaccaatcttgaggt

SEQ ID NO: 19904 - DNA, 16 bp, synthetic construct
  misc_feature 1..16: note = synthetic [barcode part1]
  source 1..16: mol_type = other DNA
gatacgttggtcgtac

SEQ ID NO: 19905 - DNA, 16 bp, synthetic construct
  misc_feature 1..16: note = synthetic [barcode part1]
  source 1..16: mol_type = other DNA
cgatcggaatcgattc

SEQ ID NO: 19906 - DNA, 16 bp, synthetic construct
  misc_feature 1..16: note = synthetic [barcode part1]
  source 1..16: mol_type = other DNA
gacgtaggtccgatag

SEQ ID NO: 19907 - DNA, 16 bp, synthetic construct
  misc_feature 1..16: note = synthetic [barcode part1]
  source 1..16: mol_type = other DNA
gtgcacgtgtaatacc

SEQ ID NO: 19908 - DNA, 16 bp, synthetic construct
  misc_feature 1..16: note = synthetic [barcode part1]
  source 1..16: mol_type = other DNA
tcaacgtgatcctccg

SEQ ID NO: 19909 - DNA, 16 bp, synthetic construct
  misc_feature 1..16: note = synthetic [barcode part1]
  source 1..16: mol_type = other DNA
aatagtgacttgcgag

SEQ ID NO: 19910 - DNA, 16 bp, synthetic construct
  misc_feature 1..16: note = synthetic [barcode part1]
  source 1..16: mol_type = other DNA
gtgcaagatcttcgtg

SEQ ID NO: 19911 - DNA, 16 bp, synthetic construct
  misc_feature 1..16: note = synthetic [barcode part1]
  source 1..16: mol_type = other DNA
ttcctggtctctcaac

SEQ ID NO: 19912 - DNA, 16 bp, synthetic construct
  misc_feature 1..16: note = synthetic [barcode part1]
  source 1..16: mol_type = other DNA
aacgccaaggacttct

SEQ ID NO: 19913 - DNA, 16 bp, synthetic construct
  misc_feature 1..16: note = synthetic [barcode part1]
  source 1..16: mol_type = other DNA
gaggttgccaagtgtg

SEQ ID NO: 19914 - DNA, 16 bp, synthetic construct
  misc_feature 1..16: note = synthetic [barcode part1]
  source 1..16: mol_type = other DNA
ccggtggtgaattgtt

SEQ ID NO: 19915 - DNA, 16 bp, synthetic construct
  misc_feature 1..16: note = synthetic [barcode part1]
  source 1..16: mol_type = other DNA
acaccagaatccgtgt

SEQ ID NO: 19916 - DNA, 16 bp, synthetic construct
  misc_feature 1..16: note = synthetic [barcode part1]
  source 1..16: mol_type = other DNA
gatattggccagtcgt

SEQ ID NO: 19917 - DNA, 16 bp, synthetic construct
  misc_feature 1..16: note = synthetic [barcode part1]
  source 1..16: mol_type = other DNA
ttgcgtatacgtgacg

SEQ ID NO: 19918 - DNA, 16 bp, synthetic construct
  misc_feature 1..16: note = synthetic [barcode part1]
  source 1..16: mol_type = other DNA
caacagtatcgagtcc

SEQ ID NO: 19919 - DNA, 16 bp, synthetic construct
  misc_feature 1..16: note = synthetic [barcode part1]
  source 1..16: mol_type = other DNA
cgtcgacgattctctg

SEQ ID NO: 19920 - DNA, 16 bp, synthetic construct
  misc_feature 1..16: note = synthetic [barcode part1]
  source 1..16: mol_type = other DNA
atcactgactgaaccg

SEQ ID NO: 19921 - DNA, 16 bp, synthetic construct
  misc_feature 1..16: note = synthetic [barcode part1]
  source 1..16: mol_type = other DNA
gcaacactggttgact

SEQ ID NO: 19922 - DNA, 16 bp, synthetic construct
  misc_feature 1..16: note = synthetic [barcode part1]
  source 1..16: mol_type = other DNA
tctcagtcctccgatt

SEQ ID NO: 19923 - DNA, 16 bp, synthetic construct
  misc_feature 1..16: note = synthetic [barcode part1]
  source 1..16: mol_type = other DNA
agtcctctgtgaattc

SEQ ID NO: 19924 - DNA, 16 bp, synthetic construct
  misc_feature 1..16: note = synthetic [barcode part1]
  source 1..16: mol_type = other DNA
acgaacttagtcttcc

SEQ ID NO: 19925 - DNA, 16 bp, synthetic construct
  misc_feature 1..16: note = synthetic [barcode part1]
  source 1..16: mol_type = other DNA
caagtaaggcaggtag

SEQ ID NO: 19926 - DNA, 16 bp, synthetic construct
  misc_feature 1..16: note = synthetic [barcode part1]
  source 1..16: mol_type = other DNA
aatcaactgtgcgcgt

SEQ ID NO: 19927 - DNA, 16 bp, synthetic construct
  misc_feature 1..16: note = synthetic [barcode part1]
  source 1..16: mol_type = other DNA
tgtacgtcaacaccag

SEQ ID NO: 19928 - DNA, 16 bp, synthetic construct
  misc_feature 1..16: note = synthetic [barcode part1]
  source 1..16: mol_type = other DNA
aggtatacgattcgag

SEQ ID NO: 19929 - DNA, 16 bp, synthetic construct
  misc_feature 1..16: note = synthetic [barcode part1]
  source 1..16: mol_type = other DNA
ttcggtaccacgttcg

SEQ ID NO: 19930 - DNA, 16 bp, synthetic construct
  misc_feature 1..16: note = synthetic [barcode part1]
  source 1..16: mol_type = other DNA
acgttctctgacgatt

SEQ ID NO: 19931 - DNA, 16 bp, synthetic construct
  misc_feature 1..16: note = synthetic [barcode part1]
  source 1..16: mol_type = other DNA
tctagtcgccgtgtgt

SEQ ID NO: 19932 - DNA, 16 bp, synthetic construct
  misc_feature 1..16: note = synthetic [barcode part1]
  source 1..16: mol_type = other DNA
cctctaatagtcacgt

SEQ ID NO: 19933 - DNA, 16 bp, synthetic construct
  misc_feature 1..16: note = synthetic [barcode part1]
  source 1..16: mol_type = other DNA
ttcgtgaacgagttcg

SEQ ID NO: 19934 - DNA, 16 bp, synthetic construct
  misc_feature 1..16: note = synthetic [barcode part1]
  source 1..16: mol_type = other DNA
ccgagacacagtattc

SEQ ID NO: 19935 - DNA, 16 bp, synthetic construct
  misc_feature 1..16: note = synthetic [barcode part1]
  source 1..16: mol_type = other DNA
tctcttagtccaggcg

SEQ ID NO: 19936 - DNA, 16 bp, synthetic construct
  misc_feature 1..16: note = synthetic [barcode part1]
  source 1..16: mol_type = other DNA
cgtacgcaatctcaag

SEQ ID NO: 19937 - DNA, 16 bp, synthetic construct
  misc_feature 1..16: note = synthetic [barcode part1]
  source 1..16: mol_type = other DNA
tacggcgttcaagatc

SEQ ID NO: 19938 - DNA, 16 bp, synthetic construct
  misc_feature 1..16: note = synthetic [barcode part1]
  source 1..16: mol_type = other DNA
aagacttagtggacgt

SEQ ID NO: 19939 - DNA, 16 bp, synthetic construct
  misc_feature 1..16: note = synthetic [barcode part1]
  source 1..16: mol_type = other DNA
ttgtcgaactggactg

SEQ ID NO: 19940 - DNA, 16 bp, synthetic construct
  misc_feature 1..16: note = synthetic [barcode part1]
  source 1..16: mol_type = other DNA
gtctccgttacactct

SEQ ID NO: 19941 - DNA, 16 bp, synthetic construct
  misc_feature 1..16: note = synthetic [barcode part1]
  source 1..16: mol_type = other DNA
atctgtcacggtatct

SEQ ID NO: 19942 - DNA, 16 bp, synthetic construct
  misc_feature 1..16: note = synthetic [barcode part1]
  source 1..16: mol_type = other DNA
caactagacactgtgc

SEQ ID NO: 19943 - DNA, 16 bp, synthetic construct
  misc_feature 1..16: note = synthetic [barcode part1]
  source 1..16: mol_type = other DNA
atcctccgtgtaccag

SEQ ID NO: 19944 - DNA, 16 bp, synthetic construct
  misc_feature 1..16: note = synthetic [barcode part1]
  source 1..16: mol_type = other DNA
agacacgtgattcaag

SEQ ID NO: 19945 - DNA, 16 bp, synthetic construct
  misc_feature 1..16: note = synthetic [barcode part1]
  source 1..16: mol_type = other DNA
aacaaggaggacgact

SEQ ID NO: 19946 - DNA, 16 bp, synthetic construct
  misc_feature 1..16: note = synthetic [barcode part1]
  source 1..16: mol_type = other DNA
gtggtgtatatcgcgt

SEQ ID NO: 19947 - DNA, 16 bp, synthetic construct
  misc_feature 1..16: note = synthetic [barcode part1]
  source 1..16: mol_type = other DNA
caatcactcgttgttg

SEQ ID NO: 19948 - DNA, 16 bp, synthetic construct
  misc_feature 1..16: note = synthetic [barcode part1]
  source 1..16: mol_type = other DNA
actgtagtggagtctc

SEQ ID NO: 19949 - DNA, 16 bp, synthetic construct
  misc_feature 1..16: note = synthetic [barcode part1]
  source 1..16: mol_type = other DNA
cgactctaccggtatc

SEQ ID NO: 19950 - DNA, 16 bp, synthetic construct
  misc_feature 1..16: note = synthetic [barcode part1]
  source 1..16: mol_type = other DNA
ttcctcctcgagactt

SEQ ID NO: 19951 - DNA, 16 bp, synthetic construct
  misc_feature 1..16: note = synthetic [barcode part1]
  source 1..16: mol_type = other DNA
tatccgagtgcaatcg

SEQ ID NO: 19952 - DNA, 16 bp, synthetic construct
  misc_feature 1..16: note = synthetic [barcode part1]
  source 1..16: mol_type = other DNA
ttgcagtcgtacgtag

SEQ ID NO: 19953 - DNA, 16 bp, synthetic construct
  misc_feature 1..16: note = synthetic [barcode part1]
  source 1..16: mol_type = other DNA
caggagtccgttgaag

SEQ ID NO: 19954 - DNA, 16 bp, synthetic construct
  misc_feature 1..16: note = synthetic [barcode part1]
  source 1..16: mol_type = other DNA
ttgattcctcgcaggc

SEQ ID NO: 19955 - DNA, 16 bp, synthetic construct
  misc_feature 1..16: note = synthetic [barcode part1]
  source 1..16: mol_type = other DNA
gtggccaatactagtc

SEQ ID NO: 19956 - DNA, 16 bp, synthetic construct
  misc_feature 1..16: note = synthetic [barcode part1]
  source 1..16: mol_type = other DNA
cgagtataccgaaggc

SEQ ID NO: 19957 - DNA, 16 bp, synthetic construct
  misc_feature 1..16: note = synthetic [barcode part1]
  source 1..16: mol_type = other DNA
gtactaacggtctctt

SEQ ID NO: 19958 - DNA, 16 bp, synthetic construct
  misc_feature 1..16: note = synthetic [barcode part1]
  source 1..16: mol_type = other DNA
tatcaagacgaggact

SEQ ID NO: 19959 - DNA, 16 bp, synthetic construct
  misc_feature 1..16: note = synthetic [barcode part1]
  source 1..16: mol_type = other DNA
tgatatactccaccac

SEQ ID NO: 19960 - DNA, 16 bp, synthetic construct
  misc_feature 1..16: note = synthetic [barcode part1]
  source 1..16: mol_type = other DNA
aatccaggattcgacc

SEQ ID NO: 19961 - DNA, 16 bp, synthetic construct
  misc_feature 1..16: note = synthetic [barcode part1]
  source 1..16: mol_type = other DNA
acgcgtagactctagt

SEQ ID NO: 19962 - DNA, 16 bp, synthetic construct
  misc_feature 1..16: note = synthetic [barcode part1]
  source 1..16: mol_type = other DNA
tcctgaactcaagacg

SEQ ID NO: 19963 - DNA, 16 bp, synthetic construct
  misc_feature 1..16: note = synthetic [barcode part1]
  source 1..16: mol_type = other DNA
gcgactagtcggtatt

SEQ ID NO: 19964 - DNA, 16 bp, synthetic construct
  misc_feature 1..16: note = synthetic [barcode part1]
  source 1..16: mol_type = other DNA
tggtacaagagtagtc

SEQ ID NO: 19965 - DNA, 16 bp, synthetic construct
  misc_feature 1..16: note = synthetic [barcode part1]
  source 1..16: mol_type = other DNA
tccttctattacggcc

SEQ ID NO: 19966 - DNA, 16 bp, synthetic construct
  misc_feature 1..16: note = synthetic [barcode part1]
  source 1..16: mol_type = other DNA
tacgagtgagtggcac

SEQ ID NO: 19967 - DNA, 16 bp, synthetic construct
  misc_feature 1..16: note = synthetic [barcode part1]
  source 1..16: mol_type = other DNA
caagaggatcgcacac

SEQ ID NO: 19968 - DNA, 16 bp, synthetic construct
  misc_feature 1..16: note = synthetic [barcode part1]
  source 1..16: mol_type = other DNA
taccgccacggttgtt

SEQ ID NO: 19969 - DNA, 16 bp, synthetic construct
  misc_feature 1..16: note = synthetic [barcode part1]
  source 1..16: mol_type = other DNA
atcctgcagtggtaac

SEQ ID NO: 19970 - DNA, 16 bp, synthetic construct
  misc_feature 1..16: note = synthetic [barcode part1]
  source 1..16: mol_type = other DNA
acgcggtatcagtatc

SEQ ID NO: 19971 - DNA, 16 bp, synthetic construct
  misc_feature 1..16: note = synthetic [barcode part1]
  source 1..16: mol_type = other DNA
gtagtcttgaaccacg

SEQ ID NO: 19972 - DNA, 16 bp, synthetic construct
  misc_feature 1..16: note = synthetic [barcode part1]
  source 1..16: mol_type = other DNA
cacgtattacagtgcg

SEQ ID NO: 19973 - DNA, 16 bp, synthetic construct
  misc_feature 1..16: note = synthetic [barcode part1]
  source 1..16: mol_type = other DNA
aggtggtgtactcgag

SEQ ID NO: 19974 - DNA, 16 bp, synthetic construct
  misc_feature 1..16: note = synthetic [barcode part1]
  source 1..16: mol_type = other DNA
gattcagaacctgacc

SEQ ID NO: 19975 - DNA, 16 bp, synthetic construct
  misc_feature 1..16: note = synthetic [barcode part1]
  source 1..16: mol_type = other DNA
tgttgagaggtacaac

SEQ ID NO: 19976 - DNA, 16 bp, synthetic construct
  misc_feature 1..16: note = synthetic [barcode part1]
  source 1..16: mol_type = other DNA
tacttaccaaggtctc

SEQ ID NO: 19977 - DNA, 16 bp, synthetic construct
  misc_feature 1..16: note = synthetic [barcode part1]
  source 1..16: mol_type = other DNA
gaactgtgacgatctc

SEQ ID NO: 19978 - DNA, 16 bp, synthetic construct
  misc_feature 1..16: note = synthetic [barcode part1]
  source 1..16: mol_type = other DNA
cagttctactggtact

SEQ ID NO: 19979 - DNA, 16 bp, synthetic construct
  misc_feature 1..16: note = synthetic [barcode part1]
  source 1..16: mol_type = other DNA
gcaaggaccagtgatc

SEQ ID NO: 19980 - DNA, 16 bp, synthetic construct
  misc_feature 1..16: note = synthetic [barcode part1]
  source 1..16: mol_type = other DNA
atcttacctgcgtaac

SEQ ID NO: 19981 - DNA, 16 bp, synthetic construct
  misc_feature 1..16: note = synthetic [barcode part1]
  source 1..16: mol_type = other DNA
gcgagtacggaattcg

SEQ ID NO: 19982 - DNA, 16 bp, synthetic construct
  misc_feature 1..16: note = synthetic [barcode part1]
  source 1..16: mol_type = other DNA
taagaggccaacctct

SEQ ID NO: 19983 - DNA, 16 bp, synthetic construct
  misc_feature 1..16: note = synthetic [barcode part1]
  source 1..16: mol_type = other DNA
atctgaattcgccgtt

SEQ ID NO: 19984 - DNA, 16 bp, synthetic construct
  misc_feature 1..16: note = synthetic [barcode part1]
  source 1..16: mol_type = other DNA
atagaagtgcgtctcc

SEQ ID NO: 19985 - DNA, 16 bp, synthetic construct
  misc_feature 1..16: note = synthetic [barcode part1]
  source 1..16: mol_type = other DNA
tagtgcacctcactgc

SEQ ID NO: 19986 - DNA, 16 bp, synthetic construct
  misc_feature 1..16: note = synthetic [barcode part1]
  source 1..16: mol_type = other DNA
caggaagtctctcaac

SEQ ID NO: 19987 - DNA, 16 bp, synthetic construct
  misc_feature 1..16: note = synthetic [barcode part1]
  source 1..16: mol_type = other DNA
attcctaggacacgac

SEQ ID NO: 19988 - DNA, 16 bp, synthetic construct
  misc_feature 1..16: note = synthetic [barcode part1]
  source 1..16: mol_type = other DNA
gtggcgtatcaattgc

SEQ ID NO: 19989 - DNA, 16 bp, synthetic construct
  misc_feature 1..16: note = synthetic [barcode part1]
  source 1..16: mol_type = other DNA
ttgagtgacgacaggc

SEQ ID NO: 19990 - DNA, 16 bp, synthetic construct
  misc_feature 1..16: note = synthetic [barcode part1]
  source 1..16: mol_type = other DNA
aggacggatccacagt

SEQ ID NO: 19991 - DNA, 16 bp, synthetic construct
  misc_feature 1..16: note = synthetic [barcode part1]
  source 1..16: mol_type = other DNA
aagttgactggtctcg

SEQ ID NO: 19992 - DNA, 16 bp, synthetic construct
  misc_feature 1..16: note = synthetic [barcode part1]
  source 1..16: mol_type = other DNA
aggaagattctctccg

SEQ ID NO: 19993 - DNA, 16 bp, synthetic construct
  misc_feature 1..16: note = synthetic [barcode part1]
  source 1..16: mol_type = other DNA
tatctgtgacgttgtc

SEQ ID NO: 19994 - DNA, 16 bp, synthetic construct
  misc_feature 1..16: note = synthetic [barcode part1]
  source 1..16: mol_type = other DNA
tctctagatcgcgcgt

SEQ ID NO: 19995 - DNA, 16 bp, synthetic construct
  misc_feature 1..16: note = synthetic [barcode part1]
  source 1..16: mol_type = other DNA
agacgaatccggaatt

SEQ ID NO: 19996 - DNA, 16 bp, synthetic construct
  misc_feature 1..16: note = synthetic [barcode part1]
  source 1..16: mol_type = other DNA
gtagatccgattcttc

SEQ ID NO: 19997 - DNA, 16 bp, synthetic construct
  misc_feature 1..16: note = synthetic [barcode part1]
  source 1..16: mol_type = other DNA
gccagtgataatcacc

SEQ ID NO: 19998 - DNA, 16 bp, synthetic construct
  misc_feature 1..16: note = synthetic [barcode part1]
  source 1..16: mol_type = other DNA
tactcactctgcctgt

SEQ ID NO: 19999 - DNA, 16 bp, synthetic construct
  misc_feature 1..16: note = synthetic [barcode part1]
  source 1..16: mol_type = other DNA
tctgccacacgaactc

SEQ ID NO: 20000 - DNA, 16 bp, synthetic construct
  misc_feature 1..16: note = synthetic [barcode part1]
  source 1..16: mol_type = other DNA
gtatcgtgaatagacg

SEQ ID NO: 20001 - DNA, 16 bp, synthetic construct
  misc_feature 1..16: note = synthetic [barcode part1]
  source 1..16: mol_type = other DNA
gactcagtgacgactt

SEQ ID NO: 20002 - DNA, 16 bp, synthetic construct
  misc_feature 1..16: note = synthetic [barcode part1]
  source 1..16: mol_type = other DNA
aacaactcgtgttcct

SEQ ID NO: 20003 - DNA, 16 bp, synthetic construct
  misc_feature 1..16: note = synthetic [barcode part1]
  source 1..16: mol_type = other DNA
gagacttagacttcgc

SEQ ID NO: 20004 - DNA, 16 bp, synthetic construct
  misc_feature 1..16: note = synthetic [barcode part1]
  source 1..16: mol_type = other DNA
taggtcgaccgaactt

SEQ ID NO: 20005 - DNA, 16 bp, synthetic construct
  misc_feature 1..16: note = synthetic [barcode part1]
  source 1..16: mol_type = other DNA
ccggcctggtatattc

SEQ ID NO: 20006 - DNA, 16 bp, synthetic construct
  misc_feature 1..16: note = synthetic [barcode part1]
  source 1..16: mol_type = other DNA
taccactcttggtcct

SEQ ID NO: 20007 - DNA, 16 bp, synthetic construct
  misc_feature 1..16: note = synthetic [barcode part1]
  source 1..16: mol_type = other DNA
taccaagttcacactc

SEQ ID NO: 20008 - DNA, 16 bp, synthetic construct
  misc_feature 1..16: note = synthetic [barcode part1]
  source 1..16: mol_type = other DNA
gcgaattagtccgtac

SEQ ID NO: 20009 - DNA, 16 bp, synthetic construct
  misc_feature 1..16: note = synthetic [barcode part1]
  source 1..16: mol_type = other DNA
ttagtccacgatcgtt

SEQ ID NO: 20010 - DNA, 16 bp, synthetic construct
  misc_feature 1..16: note = synthetic [barcode part1]
  source 1..16: mol_type = other DNA
cggatattgtgagtcc

SEQ ID NO: 20011 - DNA, 16 bp, synthetic construct
  misc_feature 1..16: note = synthetic [barcode part1]
  source 1..16: mol_type = other DNA
gagactcagatctcgt

SEQ ID NO: 20012 - DNA, 16 bp, synthetic construct
  misc_feature 1..16: note = synthetic [barcode part1]
  source 1..16: mol_type = other DNA
caggatcacgttgtgt

SEQ ID NO: 20013 - DNA, 16 bp, synthetic construct
  misc_feature 1..16: note = synthetic [barcode part1]
  source 1..16: mol_type = other DNA
tgtcggacttgcgtct

SEQ ID NO: 20014 - DNA, 16 bp, synthetic construct
  misc_feature 1..16: note = synthetic [barcode part1]
  source 1..16: mol_type = other DNA
aacacgttaatcgcgc

SEQ ID NO: 20015 - DNA, 16 bp, synthetic construct
  misc_feature 1..16: note = synthetic [barcode part1]
  source 1..16: mol_type = other DNA
agaaggttccgcgagt

SEQ ID NO: 20016 - DNA, 16 bp, synthetic construct
  misc_feature 1..16: note = synthetic [barcode part1]
  source 1..16: mol_type = other DNA
gaccttcaatctgcgc

SEQ ID NO: 20017 - DNA, 16 bp, synthetic construct
  misc_feature 1..16: note = synthetic [barcode part1]
  source 1..16: mol_type = other DNA
gtacctctggtgactc

SEQ ID NO: 20018 - DNA, 16 bp, synthetic construct
  misc_feature 1..16: note = synthetic [barcode part1]
  source 1..16: mol_type = other DNA
tcgagtattgcggatc

SEQ ID NO: 20019 - DNA, 16 bp, synthetic construct
  misc_feature 1..16: note = synthetic [barcode part1]
  source 1..16: mol_type = other DNA
tcgttcactcgtctgt

SEQ ID NO: 20020 - DNA, 16 bp, synthetic construct
  misc_feature 1..16: note = synthetic [barcode part1]
  source 1..16: mol_type = other DNA
gaccagatatcctacg

SEQ ID NO: 20021 - DNA, 16 bp, synthetic construct
  misc_feature 1..16: note = synthetic [barcode part1]
  source 1..16: mol_type = other DNA
tggcctgtactcctag

SEQ ID NO: 20022 - DNA, 16 bp, synthetic construct
  misc_feature 1..16: note = synthetic [barcode part1]
  source 1..16: mol_type = other DNA
cgaggatcaagtcgtg

SEQ ID NO: 20023 - DNA, 16 bp, synthetic construct
  misc_feature 1..16: note = synthetic [barcode part1]
  source 1..16: mol_type = other DNA
gttgaatacctggcgt

SEQ ID NO: 20024 - DNA, 16 bp, synthetic construct
  misc_feature 1..16: note = synthetic [barcode part1]
  source 1..16: mol_type = other DNA
aggacgatcgcgaatc

SEQ ID NO: 20025 - DNA, 16 bp, synthetic construct
  misc_feature 1..16: note = synthetic [barcode part1]
  source 1..16: mol_type = other DNA
taacaccgtagtgtcg

SEQ ID NO: 20026 - DNA, 16 bp, synthetic construct
  misc_feature 1..16: note = synthetic [barcode part1]
  source 1..16: mol_type = other DNA
aggacagtgttcaggc

SEQ ID NO: 20027 - DNA, 16 bp, synthetic construct
  misc_feature 1..16: note = synthetic [barcode part1]
  source 1..16: mol_type = other DNA
ccactggtccttgtag

SEQ ID NO: 20028 - DNA, 16 bp, synthetic construct
  misc_feature 1..16: note = synthetic [barcode part1]
  source 1..16: mol_type = other DNA
caattctcgtaactgc

SEQ ID NO: 20029 - DNA, 16 bp, synthetic construct
  misc_feature 1..16: note = synthetic [barcode part1]
  source 1..16: mol_type = other DNA
tcagtacgatcctccg

SEQ ID NO: 20030 - DNA, 16 bp, synthetic construct
  misc_feature 1..16: note = synthetic [barcode part1]
  source 1..16: mol_type = other DNA
tgaagtctgtgacacc

SEQ ID NO: 20031 - DNA, 16 bp, synthetic construct
  misc_feature 1..16: note = synthetic [barcode part1]
  source 1..16: mol_type = other DNA
ttgattccaccggcac

SEQ ID NO: 20032 - DNA, 16 bp, synthetic construct
  misc_feature 1..16: note = synthetic [barcode part1]
  source 1..16: mol_type = other DNA
gcagattgcgtctaac

SEQ ID NO: 20033 - DNA, 16 bp, synthetic construct
  misc_feature 1..16: note = synthetic [barcode part1]
  source 1..16: mol_type = other DNA
agaccacctcgatagt

SEQ ID NO: 20034 - DNA, 16 bp, synthetic construct
  misc_feature 1..16: note = synthetic [barcode part1]
  source 1..16: mol_type = other DNA
cagttggcaacactgt

SEQ ID NO: 20035 - DNA, 16 bp, synthetic construct
  misc_feature 1..16: note = synthetic [barcode part1]
  source 1..16: mol_type = other DNA
cgtatcttcgcacctt

SEQ ID NO: 20036 - DNA, 16 bp, synthetic construct
  misc_feature 1..16: note = synthetic [barcode part1]
  source 1..16: mol_type = other DNA
taggcgagtggtatcg

SEQ ID NO: 20037 - DNA, 16 bp, synthetic construct
  misc_feature 1..16: note = synthetic [barcode part1]
  source 1..16: mol_type = other DNA
atcagtacgttggcgt

SEQ ID NO: 20038 - DNA, 16 bp, synthetic construct
  misc_feature 1..16: note = synthetic [barcode part1]
  source 1..16: mol_type = other DNA
gttctgatcagtcgag

SEQ ID NO: 20039 - DNA, 16 bp, synthetic construct
  misc_feature 1..16: note = synthetic [barcode part1]
  source 1..16: mol_type = other DNA
atctctacctgacggc

SEQ ID NO: 20040 - DNA, 16 bp, synthetic construct
  misc_feature 1..16: note = synthetic [barcode part1]
  source 1..16: mol_type = other DNA
tgcctattaggcgagt

SEQ ID NO: 20041 - DNA, 16 bp, synthetic construct
  misc_feature 1..16: note = synthetic [barcode part1]
  source 1..16: mol_type = other DNA
tagttccaccgcgtgt

SEQ ID NO: 20042 - DNA, 16 bp, synthetic construct
  misc_feature 1..16: note = synthetic [barcode part1]
  source 1..16: mol_type = other DNA
tgcacgattcaatcct

SEQ ID NO: 20043 - DNA, 16 bp, synthetic construct
  misc_feature 1..16: note = synthetic [barcode part1]
  source 1..16: mol_type = other DNA
tgtggccgttgttctg

SEQ ID NO: 20044 - DNA, 16 bp, synthetic construct
  misc_feature 1..16: note = synthetic [barcode part1]
  source 1..16: mol_type = other DNA
tctaatactcgcgttg

SEQ ID NO: 20045 - DNA, 16 bp, synthetic construct
  misc_feature 1..16: note = synthetic [barcode part1]
  source 1..16: mol_type = other DNA
aagattgcgcaggtcg

SEQ ID NO: 20046 - DNA, 16 bp, synthetic construct
  misc_feature 1..16: note = synthetic [barcode part1]
  source 1..16: mol_type = other DNA
gtaataccgtgcacgt

SEQ ID NO: 20047 - DNA, 16 bp, synthetic construct
  misc_feature 1..16: note = synthetic [barcode part1]
  source 1..16: mol_type = other DNA
gcagtcgtctcctaac

SEQ ID NO: 20048 - DNA, 16 bp, synthetic construct
  misc_feature 1..16: note = synthetic [barcode part1]
  source 1..16: mol_type = other DNA
tcgtacaaccgatacg

SEQ ID NO: 20049 - DNA, 16 bp, synthetic construct
  misc_feature 1..16: note = synthetic [barcode part1]
  source 1..16: mol_type = other DNA
ttagacgaacagagtc

SEQ ID NO: 20050 - DNA, 16 bp, synthetic construct
  misc_feature 1..16: note = synthetic [barcode part1]
  source 1..16: mol_type = other DNA
tcgcggactactgttc

SEQ ID NO: 20051 - DNA, 16 bp, synthetic construct
  misc_feature 1..16: note = synthetic [barcode part1]
  source 1..16: mol_type = other DNA
taacgcagaaggccac

SEQ ID NO: 20052 - DNA, 16 bp, synthetic construct
  misc_feature 1..16: note = synthetic [barcode part1]
  source 1..16: mol_type = other DNA
aaggtggtaagtactc

SEQ ID NO: 20053 - DNA, 16 bp, synthetic construct
  misc_feature 1..16: note = synthetic [barcode part1]
  source 1..16: mol_type = other DNA
agaggacttcgacttc

SEQ ID NO: 20054 - DNA, 16 bp, synthetic construct
  misc_feature 1..16: note = synthetic [barcode part1]
  source 1..16: mol_type = other DNA
gatattatacggcgcc

SEQ ID NO: 20055 - DNA, 16 bp, synthetic construct
  misc_feature 1..16: note = synthetic [barcode part1]
  source 1..16: mol_type = other DNA
gcgcgacaactaaggt

SEQ ID NO: 20056 - DNA, 16 bp, synthetic construct
  misc_feature 1..16: note = synthetic [barcode part1]
  source 1..16: mol_type = other DNA
atcaaccgatcaaccg

SEQ ID NO: 20057 - DNA, 16 bp, synthetic construct
  misc_feature 1..16: note = synthetic [barcode part1]
  source 1..16: mol_type = other DNA
ttccaacgtacggcct

SEQ ID NO: 20058 - DNA, 16 bp, synthetic construct
  misc_feature 1..16: note = synthetic [barcode part1]
  source 1..16: mol_type = other DNA
acgattcgacagtctg

SEQ ID NO: 20059 - DNA, 16 bp, synthetic construct
  misc_feature 1..16: note = synthetic [barcode part1]
  source 1..16: mol_type = other DNA
tggtaacagttgccac

SEQ ID NO: 20060 - DNA, 16 bp, synthetic construct
  misc_feature 1..16: note = synthetic [barcode part1]
  source 1..16: mol_type = other DNA
gcgaatcactagaagt

SEQ ID NO: 20061 - DNA, 16 bp, synthetic construct
  misc_feature 1..16: note = synthetic [barcode part1]
  source 1..16: mol_type = other DNA
gcgttccaatccaatt

SEQ ID NO: 20062 - DNA, 16 bp, synthetic construct
  misc_feature 1..16: note = synthetic [barcode part1]
  source 1..16: mol_type = other DNA
caccaccggatatcct

SEQ ID NO: 20063 - DNA, 16 bp, synthetic construct
  misc_feature 1..16: note = synthetic [barcode part1]
  source 1..16: mol_type = other DNA
cgcgagttatcactcc

SEQ ID NO: 20064 - DNA, 16 bp, synthetic construct
  misc_feature 1..16: note = synthetic [barcode part1]
  source 1..16: mol_type = other DNA
gactcgaagaagtgtt

SEQ ID NO: 20065 - DNA, 16 bp, synthetic construct
  misc_feature 1..16: note = synthetic [barcode part1]
  source 1..16: mol_type = other DNA
agttacactggagagt

SEQ ID NO: 20066 - DNA, 16 bp, synthetic construct
  misc_feature 1..16: note = synthetic [barcode part1]
  source 1..16: mol_type = other DNA
aattctcaatccgcac

SEQ ID NO: 20067 - DNA, 16 bp, synthetic construct
  misc_feature 1..16: note = synthetic [barcode part1]
  source 1..16: mol_type = other DNA
cctaagtctaccaccg

SEQ ID NO: 20068 - DNA, 16 bp, synthetic construct
  misc_feature 1..16: note = synthetic [barcode part1]
  source 1..16: mol_type = other DNA
ttacgcaccgaaggag

SEQ ID NO: 20069 - DNA, 16 bp, synthetic construct
  misc_feature 1..16: note = synthetic [barcode part1]
  source 1..16: mol_type = other DNA
acaagtagacgttacg

SEQ ID NO: 20070 - DNA, 16 bp, synthetic construct
  misc_feature 1..16: note = synthetic [barcode part1]
  source 1..16: mol_type = other DNA
tcagtactgtgtggtg

SEQ ID NO: 20071 - DNA, 16 bp, synthetic construct
  misc_feature 1..16: note = synthetic [barcode part1]
  source 1..16: mol_type = other DNA
tcgtaggacaggacgt

SEQ ID NO: 20072 - DNA, 16 bp, synthetic construct
  misc_feature 1..16: note = synthetic [barcode part1]
  source 1..16: mol_type = other DNA
actggattactcttgc

SEQ ID NO: 20073 - DNA, 16 bp, synthetic construct
  misc_feature 1..16: note = synthetic [barcode part1]
  source 1..16: mol_type = other DNA
gtctgccttacctgtt

SEQ ID NO: 20074 - DNA, 16 bp, synthetic construct
  misc_feature 1..16: note = synthetic [barcode part1]
  source 1..16: mol_type = other DNA
tgtacttaggtgtggc

SEQ ID NO: 20075 - DNA, 16 bp, synthetic construct
  misc_feature 1..16: note = synthetic [barcode part1]
  source 1..16: mol_type = other DNA
tcctcaggtcacgtac

SEQ ID NO: 20076 - DNA, 16 bp, synthetic construct
  misc_feature 1..16: note = synthetic [barcode part1]
  source 1..16: mol_type = other DNA
gtgtctagacaaggcg

SEQ ID NO: 20077 - DNA, 16 bp, synthetic construct
  misc_feature 1..16: note = synthetic [barcode part1]
  source 1..16: mol_type = other DNA
atactcggaactcacg

SEQ ID NO: 20078 - DNA, 16 bp, synthetic construct
  misc_feature 1..16: note = synthetic [barcode part1]
  source 1..16: mol_type = other DNA
tcgcgttgttcctatc

SEQ ID NO: 20079 - DNA, 16 bp, synthetic construct
  misc_feature 1..16: note = synthetic [barcode part1]
  source 1..16: mol_type = other DNA
aatcgtgccttagttc

SEQ ID NO: 20080 - DNA, 16 bp, synthetic construct
  misc_feature 1..16: note = synthetic [barcode part1]
  source 1..16: mol_type = other DNA
tactaagttcgcacct

SEQ ID NO: 20081 - DNA, 16 bp, synthetic construct
  misc_feature 1..16: note = synthetic [barcode part1]
  source 1..16: mol_type = other DNA
gactggtgtactgtgt

SEQ ID NO: 20082 - DNA, 16 bp, synthetic construct
  misc_feature 1..16: note = synthetic [barcode part1]
  source 1..16: mol_type = other DNA
tgaattactcctgcac

SEQ ID NO: 20083 - DNA, 16 bp, synthetic construct
  misc_feature 1..16: note = synthetic [barcode part1]
  source 1..16: mol_type = other DNA
gtattcgcgttgcctg

SEQ ID NO: 20084 - DNA, 16 bp, synthetic construct
  misc_feature 1..16: note = synthetic [barcode part1]
  source 1..16: mol_type = other DNA
atcctatccaccactc

SEQ ID NO: 20085 - DNA, 16 bp, synthetic construct
  misc_feature 1..16: note = synthetic [barcode part1]
  source 1..16: mol_type = other DNA
cgaatcgacacctcct

SEQ ID NO: 20086 - DNA, 16 bp, synthetic construct
  misc_feature 1..16: note = synthetic [barcode part1]
  source 1..16: mol_type = other DNA
cctaatcgaccgaagt

SEQ ID NO: 20087 - DNA, 16 bp, synthetic construct
  misc_feature 1..16: note = synthetic [barcode part1]
  source 1..16: mol_type = other DNA
aactcttgacttgtgc

SEQ ID NO: 20088 - DNA, 16 bp, synthetic construct
  misc_feature 1..16: note = synthetic [barcode part1]
  source 1..16: mol_type = other DNA
tatccgacacgaactg

SEQ ID NO: 20089 - DNA, 16 bp, synthetic construct
  misc_feature 1..16: note = synthetic [barcode part1]
  source 1..16: mol_type = other DNA
ccgttgtggatctgtc

SEQ ID NO: 20090 - DNA, 16 bp, synthetic construct
  misc_feature 1..16: note = synthetic [barcode part1]
  source 1..16: mol_type = other DNA
gcggaggaattattac

SEQ ID NO: 20091 - DNA, 16 bp, synthetic construct
  misc_feature 1..16: note = synthetic [barcode part1]
  source 1..16: mol_type = other DNA
tattggcaaggccgag

SEQ ID NO: 20092 - DNA, 16 bp, synthetic construct
  misc_feature 1..16: note = synthetic [barcode part1]
  source 1..16: mol_type = other DNA
aaccagtactggttgc

SEQ ID NO: 20093 - DNA, 16 bp, synthetic construct
  misc_feature 1..16: note = synthetic [barcode part1]
  source 1..16: mol_type = other DNA
gccagacttactgaac

SEQ ID NO: 20094 - DNA, 16 bp, synthetic construct
  misc_feature 1..16: note = synthetic [barcode part1]
  source 1..16: mol_type = other DNA
agatctcgacctcaag

SEQ ID NO: 20095 - DNA, 16 bp, synthetic construct
  misc_feature 1..16: note = synthetic [barcode part1]
  source 1..16: mol_type = other DNA
acgacagttcaatccg

SEQ ID NO: 20096 - DNA, 16 bp, synthetic construct
  misc_feature 1..16: note = synthetic [barcode part1]
  source 1..16: mol_type = other DNA
ttgataagtcctcgtc

SEQ ID NO: 20097 - DNA, 16 bp, synthetic construct
  misc_feature 1..16: note = synthetic [barcode part1]
  source 1..16: mol_type = other DNA
gtgttagagttacgcc

SEQ ID NO: 20098 - DNA, 16 bp, synthetic construct
  misc_feature 1..16: note = synthetic [barcode part1]
  source 1..16: mol_type = other DNA
tactatcgcctaggcc

SEQ ID NO: 20099 - DNA, 16 bp, synthetic construct
  misc_feature 1..16: note = synthetic [barcode part1]
  source 1..16: mol_type = other DNA
ttagaccttcctacag

SEQ ID NO: 20100 - DNA, 16 bp, synthetic construct
  misc_feature 1..16: note = synthetic [barcode part1]
  source 1..16: mol_type = other DNA
ccacaagttacgtggt

SEQ ID NO: 20101 - DNA, 16 bp, synthetic construct
  misc_feature 1..16: note = synthetic [barcode part1]
  source 1..16: mol_type = other DNA
tgacgtgccaggtatt

SEQ ID NO: 20102 - DNA, 16 bp, synthetic construct
  misc_feature 1..16: note = synthetic [barcode part1]
  source 1..16: mol_type = other DNA
gatatagacctggtag

SEQ ID NO: 20103 - DNA, 16 bp, synthetic construct
  misc_feature 1..16: note = synthetic [barcode part1]
  source 1..16: mol_type = other DNA
cgatacgttctgccgt

SEQ ID NO: 20104 - DNA, 16 bp, synthetic construct
  misc_feature 1..16: note = synthetic [barcode part1]
  source 1..16: mol_type = other DNA
atagacagtgacgttg

SEQ ID NO: 20105 - DNA, 16 bp, synthetic construct
  misc_feature 1..16: note = synthetic [barcode part1]
  source 1..16: mol_type = other DNA
gtccgtctctacttgt

SEQ ID NO: 20106 - DNA, 16 bp, synthetic construct
  misc_feature 1..16: note = synthetic [barcode part1]
  source 1..16: mol_type = other DNA
caggtactcttatcgt

SEQ ID NO: 20107 - DNA, 16 bp, synthetic construct
  misc_feature 1..16: note = synthetic [barcode part1]
  source 1..16: mol_type = other DNA
agttacgtcagtcttc

SEQ ID NO: 20108 - DNA, 16 bp, synthetic construct
  misc_feature 1..16: note = synthetic [barcode part1]
  source 1..16: mol_type = other DNA
atagaccgccaaggac

SEQ ID NO: 20109 - DNA, 16 bp, synthetic construct
  misc_feature 1..16: note = synthetic [barcode part1]
  source 1..16: mol_type = other DNA
cacgaatctgtggatc

SEQ ID NO: 20110 - DNA, 16 bp, synthetic construct
  misc_feature 1..16: note = synthetic [barcode part1]
  source 1..16: mol_type = other DNA
accgagacttcaactg

SEQ ID NO: 20111 - DNA, 16 bp, synthetic construct
  misc_feature 1..16: note = synthetic [barcode part1]
  source 1..16: mol_type = other DNA
gcctctgtgaattact

SEQ ID NO: 20112 - DNA, 16 bp, synthetic construct
  misc_feature 1..16: note = synthetic [barcode part1]
  source 1..16: mol_type = other DNA
ttgttcgttcgaggtt

SEQ ID NO: 20113 - DNA, 16 bp, synthetic construct
  misc_feature 1..16: note = synthetic [barcode part1]
  source 1..16: mol_type = other DNA
tcggcaagtagttcgt

SEQ ID NO: 20114 - DNA, 16 bp, synthetic construct
  misc_feature 1..16: note = synthetic [barcode part1]
  source 1..16: mol_type = other DNA
gcctcgagtactatag

SEQ ID NO: 20115 - DNA, 16 bp, synthetic construct
  misc_feature 1..16: note = synthetic [barcode part1]
  source 1..16: mol_type = other DNA
tcctagacgcctgttg

SEQ ID NO: 20116 - DNA, 16 bp, synthetic construct
  misc_feature 1..16: note = synthetic [barcode part1]
  source 1..16: mol_type = other DNA
aggtgtgcaacaaccg

SEQ ID NO: 20117 - DNA, 16 bp, synthetic construct
  misc_feature 1..16: note = synthetic [barcode part1]
  source 1..16: mol_type = other DNA
aaccggaggtgtatcg

SEQ ID NO: 20118 - DNA, 16 bp, synthetic construct
  misc_feature 1..16: note = synthetic [barcode part1]
  source 1..16: mol_type = other DNA
gtgactagagagattc

SEQ ID NO: 20119 - DNA, 16 bp, synthetic construct
  misc_feature 1..16: note = synthetic [barcode part1]
  source 1..16: mol_type = other DNA
atctccagacggcctt

SEQ ID NO: 20120 - DNA, 16 bp, synthetic construct
  misc_feature 1..16: note = synthetic [barcode part1]
  source 1..16: mol_type = other DNA
tatcggacgagttacc

SEQ ID NO: 20121 - DNA, 16 bp, synthetic construct
  misc_feature 1..16: note = synthetic [barcode part1]
  source 1..16: mol_type = other DNA
gttacaggcaagtaac

SEQ ID NO: 20122 - DNA, 16 bp, synthetic construct
  misc_feature 1..16: note = synthetic [barcode part1]
  source 1..16: mol_type = other DNA
gaagattcgactacag

SEQ ID NO: 20123 - DNA, 16 bp, synthetic construct
  misc_feature 1..16: note = synthetic [barcode part1]
  source 1..16: mol_type = other DNA
agtcacacacagttgc

SEQ ID NO: 20124 - DNA, 16 bp, synthetic construct
  misc_feature 1..16: note = synthetic [barcode part1]
  source 1..16: mol_type = other DNA
aacacactgacacacc

SEQ ID NO: 20125 - DNA, 16 bp, synthetic construct
  misc_feature 1..16: note = synthetic [barcode part1]
  source 1..16: mol_type = other DNA
gttagtgcctgacctc

SEQ ID NO: 20126 - DNA, 16 bp, synthetic construct
  misc_feature 1..16: note = synthetic [barcode part1]
  source 1..16: mol_type = other DNA
tagagatcggagacag

SEQ ID NO: 20127 - DNA, 16 bp, synthetic construct
  misc_feature 1..16: note = synthetic [barcode part1]
  source 1..16: mol_type = other DNA
agagacgacctggtac

SEQ ID NO: 20128 - DNA, 16 bp, synthetic construct
  misc_feature 1..16: note = synthetic [barcode part1]
  source 1..16: mol_type = other DNA
tgttgacgtgtaccag

SEQ ID NO: 20129 - DNA, 16 bp, synthetic construct
  misc_feature 1..16: note = synthetic [barcode part1]
  source 1..16: mol_type = other DNA
ttgcctgagtgaacac

SEQ ID NO: 20130 - DNA, 16 bp, synthetic construct
  misc_feature 1..16: note = synthetic [barcode part1]
  source 1..16: mol_type = other DNA
agaaggacacgatacg

SEQ ID NO: 20131 - DNA, 16 bp, synthetic construct
  misc_feature 1..16: note = synthetic [barcode part1]
  source 1..16: mol_type = other DNA
tagacggaacagacag

SEQ ID NO: 20132 - DNA, 16 bp, synthetic construct
  misc_feature 1..16: note = synthetic [barcode part1]
  source 1..16: mol_type = other DNA
cctgtcgtgtagacct

SEQ ID NO: 20133 - DNA, 16 bp, synthetic construct
  misc_feature 1..16: note = synthetic [barcode part1]
  source 1..16: mol_type = other DNA
tcacagtgttgaccag

SEQ ID NO: 20134 - DNA, 16 bp, synthetic construct
  misc_feature 1..16: note = synthetic [barcode part1]
  source 1..16: mol_type = other DNA
tgaacaatcgtccgtg

SEQ ID NO: 20135 - DNA, 16 bp, synthetic construct
  misc_feature 1..16: note = synthetic [barcode part1]
  source 1..16: mol_type = other DNA
gtggcctgtagaagtg

SEQ ID NO: 20136 - DNA, 16 bp, synthetic construct
  misc_feature 1..16: note = synthetic [barcode part1]
  source 1..16: mol_type = other DNA
tgtgtggacaaggcgt

SEQ ID NO: 20137 - DNA, 16 bp, synthetic construct
  misc_feature 1..16: note = synthetic [barcode part1]
  source 1..16: mol_type = other DNA
gtcacctcactatctc

SEQ ID NO: 20138 - DNA, 16 bp, synthetic construct
  misc_feature 1..16: note = synthetic [barcode part1]
  source 1..16: mol_type = other DNA
tcacactcggaagtgt

SEQ ID NO: 20139 - DNA, 16 bp, synthetic construct
  misc_feature 1..16: note = synthetic [barcode part1]
  source 1..16: mol_type = other DNA
accgtcttctgttgtc

SEQ ID NO: 20140 - DNA, 16 bp, synthetic construct
  misc_feature 1..16: note = synthetic [barcode part1]
  source 1..16: mol_type = other DNA
ttccgtagatcgttgt

SEQ ID NO: 20141 - DNA, 16 bp, synthetic construct
  misc_feature 1..16: note = synthetic [barcode part1]
  source 1..16: mol_type = other DNA
aggagaaggagaagag

SEQ ID NO: 20142 - DNA, 16 bp, synthetic construct
  misc_feature 1..16: note = synthetic [barcode part1]
  source 1..16: mol_type = other DNA
gttcactgtctcaagt

SEQ ID NO: 20143 - DNA, 16 bp, synthetic construct
  misc_feature 1..16: note = synthetic [barcode part1]
  source 1..16: mol_type = other DNA
tagtgaagaattcgcg

SEQ ID NO: 20144 - DNA, 16 bp, synthetic construct
  misc_feature 1..16: note = synthetic [barcode part1]
  source 1..16: mol_type = other DNA
aattcaggactgccgt

SEQ ID NO: 20145 - DNA, 16 bp, synthetic construct
  misc_feature 1..16: note = synthetic [barcode part1]
  source 1..16: mol_type = other DNA
cctctagatcgatatc

SEQ ID NO: 20146 - DNA, 16 bp, synthetic construct
  misc_feature 1..16: note = synthetic [barcode part1]
  source 1..16: mol_type = other DNA
gtactctcggttcggt

SEQ ID NO: 20147 - DNA, 16 bp, synthetic construct
  misc_feature 1..16: note = synthetic [barcode part1]
  source 1..16: mol_type = other DNA
gtactcagtcttatcg

SEQ ID NO: 20148 - DNA, 16 bp, synthetic construct
  misc_feature 1..16: note = synthetic [barcode part1]
  source 1..16: mol_type = other DNA
gaacgttccgccttac

SEQ ID NO: 20149 - DNA, 16 bp, synthetic construct
  misc_feature 1..16: note = synthetic [barcode part1]
  source 1..16: mol_type = other DNA
cactcctgattatcag

SEQ ID NO: 20150 - DNA, 16 bp, synthetic construct
  misc_feature 1..16: note = synthetic [barcode part1]
  source 1..16: mol_type = other DNA
acaataggttcagacg

SEQ ID NO: 20151 - DNA, 16 bp, synthetic construct
  misc_feature 1..16: note = synthetic [barcode part1]
  source 1..16: mol_type = other DNA
aaccggcaagatcttc

SEQ ID NO: 20152 - DNA, 16 bp, synthetic construct
  misc_feature 1..16: note = synthetic [barcode part1]
  source 1..16: mol_type = other DNA
tcgcaagtgttggtgt

SEQ ID NO: 20153 - DNA, 16 bp, synthetic construct
  misc_feature 1..16: note = synthetic [barcode part1]
  source 1..16: mol_type = other DNA
gtaacaactgtcgtcg

SEQ ID NO: 20154 - DNA, 16 bp, synthetic construct
  misc_feature 1..16: note = synthetic [barcode part1]
  source 1..16: mol_type = other DNA
gtcttccgtattggcg

SEQ ID NO: 20155 - DNA, 16 bp, synthetic construct
  misc_feature 1..16: note = synthetic [barcode part1]
  source 1..16: mol_type = other DNA
agttctggtaagtgag

SEQ ID NO: 20156 - DNA, 16 bp, synthetic construct
  misc_feature 1..16: note = synthetic [barcode part1]
  source 1..16: mol_type = other DNA
gtctcactaagaggtc

SEQ ID NO: 20157 - DNA, 16 bp, synthetic construct
  misc_feature 1..16: note = synthetic [barcode part1]
  source 1..16: mol_type = other DNA
gatcactcactaggtg

SEQ ID NO: 20158 - DNA, 16 bp, synthetic construct
  misc_feature 1..16: note = synthetic [barcode part1]
  source 1..16: mol_type = other DNA
tacctagtgcaccaag

SEQ ID NO: 20159 - DNA, 16 bp, synthetic construct
  misc_feature 1..16: note = synthetic [barcode part1]
  source 1..16: mol_type = other DNA
ttgcaacttctctccg

SEQ ID NO: 20160 - DNA, 16 bp, synthetic construct
  misc_feature 1..16: note = synthetic [barcode part1]
  source 1..16: mol_type = other DNA
acttagaactctgcct

SEQ ID NO: 20161 - DNA, 16 bp, synthetic construct
  misc_feature 1..16: note = synthetic [barcode part1]
  source 1..16: mol_type = other DNA
tgcacaatctgattcc

SEQ ID NO: 20162 - DNA, 16 bp, synthetic construct
  misc_feature 1..16: note = synthetic [barcode part1]
  source 1..16: mol_type = other DNA
aggcgtattggtgacg

SEQ ID NO: 20163 - DNA, 16 bp, synthetic construct
  misc_feature 1..16: note = synthetic [barcode part1]
  source 1..16: mol_type = other DNA
gtcaggtggattgtct

SEQ ID NO: 20164 - DNA, 16 bp, synthetic construct
  misc_feature 1..16: note = synthetic [barcode part1]
  source 1..16: mol_type = other DNA
tctatacgtgcggaac

SEQ ID NO: 20165 - DNA, 16 bp, synthetic construct
  misc_feature 1..16: note = synthetic [barcode part1]
  source 1..16: mol_type = other DNA
gtactaatcctcgact

SEQ ID NO: 20166 - DNA, 16 bp, synthetic construct
  misc_feature 1..16: note = synthetic [barcode part1]
  source 1..16: mol_type = other DNA
tacacttgaaccactc

SEQ ID NO: 20167 - DNA, 16 bp, synthetic construct
  misc_feature 1..16: note = synthetic [barcode part1]
  source 1..16: mol_type = other DNA
tgttaatcggcgtacg

SEQ ID NO: 20168 - DNA, 16 bp, synthetic construct
  misc_feature 1..16: note = synthetic [barcode part1]
  source 1..16: mol_type = other DNA
gtactctcgtgtcctt

SEQ ID NO: 20169 - DNA, 16 bp, synthetic construct
  misc_feature 1..16: note = synthetic [barcode part1]
  source 1..16: mol_type = other DNA
agtacacaccagtgtc

SEQ ID NO: 20170 - DNA, 16 bp, synthetic construct
  misc_feature 1..16: note = synthetic [barcode part1]
  source 1..16: mol_type = other DNA
aacactgcgcgtatac

SEQ ID NO: 20171 - DNA, 16 bp, synthetic construct
  misc_feature 1..16: note = synthetic [barcode part1]
  source 1..16: mol_type = other DNA
ttgacttgcctggacc

SEQ ID NO: 20172 - DNA, 16 bp, synthetic construct
  misc_feature 1..16: note = synthetic [barcode part1]
  source 1..16: mol_type = other DNA
agttagacctacagag

SEQ ID NO: 20173 - DNA, 16 bp, synthetic construct
  misc_feature 1..16: note = synthetic [barcode part1]
  source 1..16: mol_type = other DNA
aaggaactgagttcgt

SEQ ID NO: 20174 - DNA, 16 bp, synthetic construct
  misc_feature 1..16: note = synthetic [barcode part1]
  source 1..16: mol_type = other DNA
acagataactccgaag

SEQ ID NO: 20175 - DNA, 16 bp, synthetic construct
  misc_feature 1..16: note = synthetic [barcode part1]
  source 1..16: mol_type = other DNA
cgaacgtaattcgcgt

SEQ ID NO: 20176 - DNA, 16 bp, synthetic construct
  misc_feature 1..16: note = synthetic [barcode part1]
  source 1..16: mol_type = other DNA
tggcaattctccgcac

SEQ ID NO: 20177 - DNA, 16 bp, synthetic construct
  misc_feature 1..16: note = synthetic [barcode part1]
  source 1..16: mol_type = other DNA
aaccgtgtgtagtcgt

SEQ ID NO: 20178 - DNA, 16 bp, synthetic construct
  misc_feature 1..16: note = synthetic [barcode part1]
  source 1..16: mol_type = other DNA
tgtgtgtctaggactg

SEQ ID NO: 20179 - DNA, 16 bp, synthetic construct
  misc_feature 1..16: note = synthetic [barcode part1]
  source 1..16: mol_type = other DNA
acaacactcgagatcc

SEQ ID NO: 20180 - DNA, 16 bp, synthetic construct
  misc_feature 1..16: note = synthetic [barcode part1]
  source 1..16: mol_type = other DNA
tggattatcttcgcgt

SEQ ID NO: 20181 - DNA, 16 bp, synthetic construct
  misc_feature 1..16: note = synthetic [barcode part1]
  source 1..16: mol_type = other DNA
cctctgagtactggtc

SEQ ID NO: 20182 - DNA, 16 bp, synthetic construct
  misc_feature 1..16: note = synthetic [barcode part1]
  source 1..16: mol_type = other DNA
taccgagtgaaccact

SEQ ID NO: 20183 - DNA, 16 bp, synthetic construct
  misc_feature 1..16: note = synthetic [barcode part1]
  source 1..16: mol_type = other DNA
atactccactgaacct

SEQ ID NO: 20184 - DNA, 16 bp, synthetic construct
  misc_feature 1..16: note = synthetic [barcode part1]
  source 1..16: mol_type = other DNA
caaggtccaatcggtt

SEQ ID NO: 20185 - DNA, 16 bp, synthetic construct
  misc_feature 1..16: note = synthetic [barcode part1]
  source 1..16: mol_type = other DNA
cactcgcggtatcact

SEQ ID NO: 20186 - DNA, 16 bp, synthetic construct
  misc_feature 1..16: note = synthetic [barcode part1]
  source 1..16: mol_type = other DNA
gactacacacggttac

SEQ ID NO: 20187 - DNA, 16 bp, synthetic construct
  misc_feature 1..16: note = synthetic [barcode part1]
  source 1..16: mol_type = other DNA
tatcacttcacgcaac

SEQ ID NO: 20188 - DNA, 16 bp, synthetic construct
  misc_feature 1..16: note = synthetic [barcode part1]
  source 1..16: mol_type = other DNA
tcgtccggaactctgt

SEQ ID NO: 20189 - DNA, 16 bp, synthetic construct
  misc_feature 1..16: note = synthetic [barcode part1]
  source 1..16: mol_type = other DNA
atcgtcctcgcagatc

SEQ ID NO: 20190 - DNA, 16 bp, synthetic construct
  misc_feature 1..16: note = synthetic [barcode part1]
  source 1..16: mol_type = other DNA
caatctgtcgtacttg

SEQ ID NO: 20191 - DNA, 16 bp, synthetic construct
  misc_feature 1..16: note = synthetic [barcode part1]
  source 1..16: mol_type = other DNA
tacacaggagtactcc

SEQ ID NO: 20192 - DNA, 16 bp, synthetic construct
  misc_feature 1..16: note = synthetic [barcode part1]
  source 1..16: mol_type = other DNA
tcgcgttcaggaatac

SEQ ID NO: 20193 - DNA, 16 bp, synthetic construct
  misc_feature 1..16: note = synthetic [barcode part1]
  source 1..16: mol_type = other DNA
gtggaaggttattgac

SEQ ID NO: 20194 - DNA, 16 bp, synthetic construct
  misc_feature 1..16: note = synthetic [barcode part1]
  source 1..16: mol_type = other DNA
gaacctaggcaataac

SEQ ID NO: 20195 - DNA, 16 bp, synthetic construct
  misc_feature 1..16: note = synthetic [barcode part1]
  source 1..16: mol_type = other DNA
acagtggtctgcagag

SEQ ID NO: 20196 - DNA, 16 bp, synthetic construct
  misc_feature 1..16: note = synthetic [barcode part1]
  source 1..16: mol_type = other DNA
gtgttgtatctatccg

SEQ ID NO: 20197 - DNA, 16 bp, synthetic construct
  misc_feature 1..16: note = synthetic [barcode part1]
  source 1..16: mol_type = other DNA
gttgatcgtactgcag

SEQ ID NO: 20198 - DNA, 16 bp, synthetic construct
  misc_feature 1..16: note = synthetic [barcode part1]
  source 1..16: mol_type = other DNA
tcgtattccgccgaac

SEQ ID NO: 20199 - DNA, 16 bp, synthetic construct
  misc_feature 1..16: note = synthetic [barcode part1]
  source 1..16: mol_type = other DNA
gttcgttgcagacagt

SEQ ID NO: 20200 - DNA, 16 bp, synthetic construct
  misc_feature 1..16: note = synthetic [barcode part1]
  source 1..16: mol_type = other DNA
tgccttaggcgttcgt

SEQ ID NO: 20201 - DNA, 16 bp, synthetic construct
  misc_feature 1..16: note = synthetic [barcode part1]
  source 1..16: mol_type = other DNA
gactaggataattgcg

SEQ ID NO: 20202 - DNA, 16 bp, synthetic construct
  misc_feature 1..16: note = synthetic [barcode part1]
  source 1..16: mol_type = other DNA
ttccacgtagtaactc

SEQ ID NO: 20203 - DNA, 16 bp, synthetic construct
  misc_feature 1..16: note = synthetic [barcode part1]
  source 1..16: mol_type = other DNA
cagtcttcacacgatt

SEQ ID NO: 20204 - DNA, 16 bp, synthetic construct
  misc_feature 1..16: note = synthetic [barcode part1]
  source 1..16: mol_type = other DNA
tgtctgagaggcaacg

SEQ ID NO: 20205 - DNA, 16 bp, synthetic construct
  misc_feature 1..16: note = synthetic [barcode part1]
  source 1..16: mol_type = other DNA
ttcaacctgtgcagtt

SEQ ID NO: 20206 - DNA, 16 bp, synthetic construct
  misc_feature 1..16: note = synthetic [barcode part1]
  source 1..16: mol_type = other DNA
tcagtagattcctacc

SEQ ID NO: 20207 - DNA, 16 bp, synthetic construct
  misc_feature 1..16: note = synthetic [barcode part1]
  source 1..16: mol_type = other DNA
accaaggattgtacag

SEQ ID NO: 20208 - DNA, 16 bp, synthetic construct
  misc_feature 1..16: note = synthetic [barcode part1]
  source 1..16: mol_type = other DNA
tgattcttgcaaccac

SEQ ID NO: 20209 - DNA, 16 bp, synthetic construct
  misc_feature 1..16: note = synthetic [barcode part1]
  source 1..16: mol_type = other DNA
caacactactccgaag

SEQ ID NO: 20210 - DNA, 16 bp, synthetic construct
  misc_feature 1..16: note = synthetic [barcode part1]
  source 1..16: mol_type = other DNA
caagtctcaggataag

SEQ ID NO: 20211 - DNA, 16 bp, synthetic construct
  misc_feature 1..16: note = synthetic [barcode part1]
  source 1..16: mol_type = other DNA
caacgtggtcgtctct

SEQ ID NO: 20212 - DNA, 16 bp, synthetic construct
  misc_feature 1..16: note = synthetic [barcode part1]
  source 1..16: mol_type = other DNA
acaggaggatcactgc

SEQ ID NO: 20213 - DNA, 16 bp, synthetic construct
  misc_feature 1..16: note = synthetic [barcode part1]
  source 1..16: mol_type = other DNA
taacgtcagacaggcg

SEQ ID NO: 20214 - DNA, 16 bp, synthetic construct
  misc_feature 1..16: note = synthetic [barcode part1]
  source 1..16: mol_type = other DNA
ataggagtgacctagt

SEQ ID NO: 20215 - DNA, 16 bp, synthetic construct
  misc_feature 1..16: note = synthetic [barcode part1]
  source 1..16: mol_type = other DNA
aggcgttgtggtgagt

SEQ ID NO: 20216 - DNA, 16 bp, synthetic construct
  misc_feature 1..16: note = synthetic [barcode part1]
  source 1..16: mol_type = other DNA
ttgacagagacacaac

SEQ ID NO: 20217 - DNA, 16 bp, synthetic construct
  misc_feature 1..16: note = synthetic [barcode part1]
  source 1..16: mol_type = other DNA
gacgtacaccagtact

SEQ ID NO: 20218 - DNA, 16 bp, synthetic construct
  misc_feature 1..16: note = synthetic [barcode part1]
  source 1..16: mol_type = other DNA
tagtgtatctcaccgt

SEQ ID NO: 20219 - DNA, 16 bp, synthetic construct
  misc_feature 1..16: note = synthetic [barcode part1]
  source 1..16: mol_type = other DNA
ccaagactggagtctt

SEQ ID NO: 20220 - DNA, 16 bp, synthetic construct
  misc_feature 1..16: note = synthetic [barcode part1]
  source 1..16: mol_type = other DNA
aggtgaacctacctgt

SEQ ID NO: 20221 - DNA, 16 bp, synthetic construct
  misc_feature 1..16: note = synthetic [barcode part1]
  source 1..16: mol_type = other DNA
tactatcaacggtggc

SEQ ID NO: 20222 - DNA, 16 bp, synthetic construct
  misc_feature 1..16: note = synthetic [barcode part1]
  source 1..16: mol_type = other DNA
cacctgtagtatcgcc

SEQ ID NO: 20223 - DNA, 16 bp, synthetic construct
  misc_feature 1..16: note = synthetic [barcode part1]
  source 1..16: mol_type = other DNA
ttatcgcacaggttct

SEQ ID NO: 20224 - DNA, 16 bp, synthetic construct
  misc_feature 1..16: note = synthetic [barcode part1]
  source 1..16: mol_type = other DNA
cgtgcgtattgatcag

SEQ ID NO: 20225 - DNA, 16 bp, synthetic construct
  misc_feature 1..16: note = synthetic [barcode part1]
  source 1..16: mol_type = other DNA
acactgtcttggaacg

SEQ ID NO: 20226 - DNA, 16 bp, synthetic construct
  misc_feature 1..16: note = synthetic [barcode part1]
  source 1..16: mol_type = other DNA
tcgttaccacctaagt

SEQ ID NO: 20227 - DNA, 16 bp, synthetic construct
  misc_feature 1..16: note = synthetic [barcode part1]
  source 1..16: mol_type = other DNA
attggtcaggacttcg

SEQ ID NO: 20228 - DNA, 16 bp, synthetic construct
  misc_feature 1..16: note = synthetic [barcode part1]
  source 1..16: mol_type = other DNA
cgtgccactaattccg

SEQ ID NO: 20229 - DNA, 16 bp, synthetic construct
  misc_feature 1..16: note = synthetic [barcode part1]
  source 1..16: mol_type = other DNA
agtcctcactgaagac

SEQ ID NO: 20230 - DNA, 16 bp, synthetic construct
  misc_feature 1..16: note = synthetic [barcode part1]
  source 1..16: mol_type = other DNA
ttcactaagttcacgc

SEQ ID NO: 20231 - DNA, 16 bp, synthetic construct
  misc_feature 1..16: note = synthetic [barcode part1]
  source 1..16: mol_type = other DNA
tatagttccaggcacg

SEQ ID NO: 20232 - DNA, 16 bp, synthetic construct
  misc_feature 1..16: note = synthetic [barcode part1]
  source 1..16: mol_type = other DNA
tgaacctggtggaacg

SEQ ID NO: 20233 - DNA, 16 bp, synthetic construct
  misc_feature 1..16: note = synthetic [barcode part1]
  source 1..16: mol_type = other DNA
ccacaggataggacac

SEQ ID NO: 20234 - DNA, 16 bp, synthetic construct
  misc_feature 1..16: note = synthetic [barcode part1]
  source 1..16: mol_type = other DNA
atactggactaaggac

SEQ ID NO: 20235 - DNA, 16 bp, synthetic construct
  misc_feature 1..16: note = synthetic [barcode part1]
  source 1..16: mol_type = other DNA
ttcggcctgcaactgt

SEQ ID NO: 20236 - DNA, 16 bp, synthetic construct
  misc_feature 1..16: note = synthetic [barcode part1]
  source 1..16: mol_type = other DNA
gaggtgaccgtagatc

SEQ ID NO: 20237 - DNA, 16 bp, synthetic construct
  misc_feature 1..16: note = synthetic [barcode part1]
  source 1..16: mol_type = other DNA
taaggaaggtctcctc

SEQ ID NO: 20238 - DNA, 16 bp, synthetic construct
  misc_feature 1..16: note = synthetic [barcode part1]
  source 1..16: mol_type = other DNA
ccggataacctcacct

SEQ ID NO: 20239 - DNA, 16 bp, synthetic construct
  misc_feature 1..16: note = synthetic [barcode part1]
  source 1..16: mol_type = other DNA
acggactgaggtggtt

SEQ ID NO: 20240 - DNA, 16 bp, synthetic construct
  misc_feature 1..16: note = synthetic [barcode part1]
  source 1..16: mol_type = other DNA
acttcgaacgtacgtg

SEQ ID NO: 20241 - DNA, 16 bp, synthetic construct
  misc_feature 1..16: note = synthetic [barcode part1]
  source 1..16: mol_type = other DNA
agatagactcactcgc

SEQ ID NO: 20242 - DNA, 16 bp, synthetic construct
  misc_feature 1..16: note = synthetic [barcode part1]
  source 1..16: mol_type = other DNA
tgacagttggtccaac

SEQ ID NO: 20243 - DNA, 16 bp, synthetic construct
  misc_feature 1..16: note = synthetic [barcode part1]
  source 1..16: mol_type = other DNA
gatctcctcgagtgtc

SEQ ID NO: 20244 - DNA, 16 bp, synthetic construct
  misc_feature 1..16: note = synthetic [barcode part1]
  source 1..16: mol_type = other DNA
gcgacactgactaatc

SEQ ID NO: 20245 - DNA, 16 bp, synthetic construct
  misc_feature 1..16: note = synthetic [barcode part1]
  source 1..16: mol_type = other DNA
agtgttacggtgtcgt

SEQ ID NO: 20246 - DNA, 16 bp, synthetic construct
  misc_feature 1..16: note = synthetic [barcode part1]
  source 1..16: mol_type = other DNA
gtcagatctacgcctc

SEQ ID NO: 20247 - DNA, 16 bp, synthetic construct
  misc_feature 1..16: note = synthetic [barcode part1]
  source 1..16: mol_type = other DNA
tgttcttgcgcaagag

SEQ ID NO: 20248 - DNA, 16 bp, synthetic construct
  misc_feature 1..16: note = synthetic [barcode part1]
  source 1..16: mol_type = other DNA
cggattaggagatatc

SEQ ID NO: 20249 - DNA, 16 bp, synthetic construct
  misc_feature 1..16: note = synthetic [barcode part1]
  source 1..16: mol_type = other DNA
tggtgccttacctacg

SEQ ID NO: 20250 - DNA, 16 bp, synthetic construct
  misc_feature 1..16: note = synthetic [barcode part1]
  source 1..16: mol_type = other DNA
gttggacgtctccact

SEQ ID NO: 20251 - DNA, 16 bp, synthetic construct
  misc_feature 1..16: note = synthetic [barcode part1]
  source 1..16: mol_type = other DNA
tcgtccactacctatc

SEQ ID NO: 20252 - DNA, 16 bp, synthetic construct
  misc_feature 1..16: note = synthetic [barcode part1]
  source 1..16: mol_type = other DNA
gcgttaatcttcgatc

SEQ ID NO: 20253 - DNA, 16 bp, synthetic construct
  misc_feature 1..16: note = synthetic [barcode part1]
  source 1..16: mol_type = other DNA
cgatctcagagtcaac

SEQ ID NO: 20254 - DNA, 16 bp, synthetic construct
  misc_feature 1..16: note = synthetic [barcode part1]
  source 1..16: mol_type = other DNA
ttctggtggcctgtgt

SEQ ID NO: 20255 - DNA, 16 bp, synthetic construct
  misc_feature 1..16: note = synthetic [barcode part1]
  source 1..16: mol_type = other DNA
gagattcctcggaatc

SEQ ID NO: 20256 - DNA, 16 bp, synthetic construct
  misc_feature 1..16: note = synthetic [barcode part1]
  source 1..16: mol_type = other DNA
taactcgatcttcacg

SEQ ID NO: 20257 - DNA, 16 bp, synthetic construct
  misc_feature 1..16: note = synthetic [barcode part1]
  source 1..16: mol_type = other DNA
gcgtcacaagtcttag

SEQ ID NO: 20258 - DNA, 16 bp, synthetic construct
  misc_feature 1..16: note = synthetic [barcode part1]
  source 1..16: mol_type = other DNA
agtagaactcctgacc

SEQ ID NO: 20259 - DNA, 16 bp, synthetic construct
  misc_feature 1..16: note = synthetic [barcode part1]
  source 1..16: mol_type = other DNA
cgcgtaactaccgtct

SEQ ID NO: 20260 - DNA, 16 bp, synthetic construct
  misc_feature 1..16: note = synthetic [barcode part1]
  source 1..16: mol_type = other DNA
tggttctagaaccggt

SEQ ID NO: 20261 - DNA, 16 bp, synthetic construct
  misc_feature 1..16: note = synthetic [barcode part1]
  source 1..16: mol_type = other DNA
tgtggagactgagtcg

SEQ ID NO: 20262 - DNA, 16 bp, synthetic construct
  misc_feature 1..16: note = synthetic [barcode part1]
  source 1..16: mol_type = other DNA
tgttaagtcgtgcctt

SEQ ID NO: 20263 - DNA, 16 bp, synthetic construct
  misc_feature 1..16: note = synthetic [barcode part1]
  source 1..16: mol_type = other DNA
gatccttgcacgacct

SEQ ID NO: 20264 - DNA, 16 bp, synthetic construct
  misc_feature 1..16: note = synthetic [barcode part1]
  source 1..16: mol_type = other DNA
ccttacggactgtcac

SEQ ID NO: 20265 - DNA, 16 bp, synthetic construct
  misc_feature 1..16: note = synthetic [barcode part1]
  source 1..16: mol_type = other DNA
gaggttgcacagactg

SEQ ID NO: 20266 - DNA, 16 bp, synthetic construct
  misc_feature 1..16: note = synthetic [barcode part1]
  source 1..16: mol_type = other DNA
acagtgtaattccggc

SEQ ID NO: 20267 - DNA, 16 bp, synthetic construct
  misc_feature 1..16: note = synthetic [barcode part1]
  source 1..16: mol_type = other DNA
gaatcctccagttgag

SEQ ID NO: 20268 - DNA, 16 bp, synthetic construct
  misc_feature 1..16: note = synthetic [barcode part1]
  source 1..16: mol_type = other DNA
tccacaatccaccacg

SEQ ID NO: 20269 - DNA, 16 bp, synthetic construct
  misc_feature 1..16: note = synthetic [barcode part1]
  source 1..16: mol_type = other DNA
tctagtgcagactgtg

SEQ ID NO: 20270 - DNA, 16 bp, synthetic construct
  misc_feature 1..16: note = synthetic [barcode part1]
  source 1..16: mol_type = other DNA
aagtgccggattcact

SEQ ID NO: 20271 - DNA, 16 bp, synthetic construct
  misc_feature 1..16: note = synthetic [barcode part1]
  source 1..16: mol_type = other DNA
agtggtcgtgcaaggt

SEQ ID NO: 20272 - DNA, 16 bp, synthetic construct
  misc_feature 1..16: note = synthetic [barcode part1]
  source 1..16: mol_type = other DNA
ttgcactcgttgagtt

SEQ ID NO: 20273 - DNA, 16 bp, synthetic construct
  misc_feature 1..16: note = synthetic [barcode part1]
  source 1..16: mol_type = other DNA
tcgatctaacggcagt

SEQ ID NO: 20274 - DNA, 16 bp, synthetic construct
  misc_feature 1..16: note = synthetic [barcode part1]
  source 1..16: mol_type = other DNA
tagtcgtcgttggtag

SEQ ID NO: 20275 - DNA, 16 bp, synthetic construct
  misc_feature 1..16: note = synthetic [barcode part1]
  source 1..16: mol_type = other DNA
taaggtcgcgttgtac

SEQ ID NO: 20276 - DNA, 16 bp, synthetic construct
  misc_feature 1..16: note = synthetic [barcode part1]
  source 1..16: mol_type = other DNA
atcacgagtgagtaac

SEQ ID NO: 20277 - DNA, 16 bp, synthetic construct
  misc_feature 1..16: note = synthetic [barcode part1]
  source 1..16: mol_type = other DNA
aatcgcgcacagttgt

SEQ ID NO: 20278 - DNA, 16 bp, synthetic construct
  misc_feature 1..16: note = synthetic [barcode part1]
  source 1..16: mol_type = other DNA
agtatccggtggcaag

SEQ ID NO: 20279 - DNA, 16 bp, synthetic construct
  misc_feature 1..16: note = synthetic [barcode part1]
  source 1..16: mol_type = other DNA
acaggtggcgatactg

SEQ ID NO: 20280 - DNA, 16 bp, synthetic construct
  misc_feature 1..16: note = synthetic [barcode part1]
  source 1..16: mol_type = other DNA
tccgtgtgatccaacc

SEQ ID NO: 20281 - DNA, 16 bp, synthetic construct
  misc_feature 1..16: note = synthetic [barcode part1]
  source 1..16: mol_type = other DNA
ccactcgtccgaagtt

SEQ ID NO: 20282 - DNA, 16 bp, synthetic construct
  misc_feature 1..16: note = synthetic [barcode part1]
  source 1..16: mol_type = other DNA
caactgtcttggtccg

SEQ ID NO: 20283 - DNA, 16 bp, synthetic construct
  misc_feature 1..16: note = synthetic [barcode part1]
  source 1..16: mol_type = other DNA
tctacttcaccacaag

SEQ ID NO: 20284 - DNA, 16 bp, synthetic construct
  misc_feature 1..16: note = synthetic [barcode part1]
  source 1..16: mol_type = other DNA
tgcgcctataacttgt

SEQ ID NO: 20285 - DNA, 16 bp, synthetic construct
  misc_feature 1..16: note = synthetic [barcode part1]
  source 1..16: mol_type = other DNA
acctaaccttccgcag

SEQ ID NO: 20286 - DNA, 16 bp, synthetic construct
  misc_feature 1..16: note = synthetic [barcode part1]
  source 1..16: mol_type = other DNA
ttaatacagaggaccg

SEQ ID NO: 20287 - DNA, 16 bp, synthetic construct
  misc_feature 1..16: note = synthetic [barcode part1]
  source 1..16: mol_type = other DNA
actcgcctctgagact

SEQ ID NO: 20288 - DNA, 16 bp, synthetic construct
  misc_feature 1..16: note = synthetic [barcode part1]
  source 1..16: mol_type = other DNA
cagatctgtcctgtcg

SEQ ID NO: 20289 - DNA, 16 bp, synthetic construct
  misc_feature 1..16: note = synthetic [barcode part1]
  source 1..16: mol_type = other DNA
tggtgacttcttacgt

SEQ ID NO: 20290 - DNA, 16 bp, synthetic construct
  misc_feature 1..16: note = synthetic [barcode part1]
  source 1..16: mol_type = other DNA
aataactgcgtctctc

SEQ ID NO: 20291 - DNA, 16 bp, synthetic construct
  misc_feature 1..16: note = synthetic [barcode part1]
  source 1..16: mol_type = other DNA
tcgattcagacgttct

SEQ ID NO: 20292 - DNA, 16 bp, synthetic construct
  misc_feature 1..16: note = synthetic [barcode part1]
  source 1..16: mol_type = other DNA
agtcgtggagactggt

SEQ ID NO: 20293 - DNA, 16 bp, synthetic construct
  misc_feature 1..16: note = synthetic [barcode part1]
  source 1..16: mol_type = other DNA
gttgatcacaccacag

SEQ ID NO: 20294 - DNA, 16 bp, synthetic construct
  misc_feature 1..16: note = synthetic [barcode part1]
  source 1..16: mol_type = other DNA
tctaggaggtcagttc

SEQ ID NO: 20295 - DNA, 16 bp, synthetic construct
  misc_feature 1..16: note = synthetic [barcode part1]
  source 1..16: mol_type = other DNA
cagagttatactgcgc

SEQ ID NO: 20296 - DNA, 16 bp, synthetic construct
  misc_feature 1..16: note = synthetic [barcode part1]
  source 1..16: mol_type = other DNA
tgcgatacttgagacc

SEQ ID NO: 20297 - DNA, 16 bp, synthetic construct
  misc_feature 1..16: note = synthetic [barcode part1]
  source 1..16: mol_type = other DNA
tgacctcacacaccac

SEQ ID NO: 20298 - DNA, 16 bp, synthetic construct
  misc_feature 1..16: note = synthetic [barcode part1]
  source 1..16: mol_type = other DNA
cgtccgatctctaacg

SEQ ID NO: 20299 - DNA, 16 bp, synthetic construct
  misc_feature 1..16: note = synthetic [barcode part1]
  source 1..16: mol_type = other DNA
cgtcttgagattcgcc

SEQ ID NO: 20300 - DNA, 16 bp, synthetic construct
  misc_feature 1..16: note = synthetic [barcode part1]
  source 1..16: mol_type = other DNA
cgcggacacaataggt

SEQ ID NO: 20301 - DNA, 16 bp, synthetic construct
  misc_feature 1..16: note = synthetic [barcode part1]
  source 1..16: mol_type = other DNA
cgcgagttctactgtc

SEQ ID NO: 20302 - DNA, 16 bp, synthetic construct
  misc_feature 1..16: note = synthetic [barcode part1]
  source 1..16: mol_type = other DNA
cgttctctaacagttg

SEQ ID NO: 20303 - DNA, 16 bp, synthetic construct
  misc_feature 1..16: note = synthetic [barcode part1]
  source 1..16: mol_type = other DNA
aacctactcacgaacg

SEQ ID NO: 20304 - DNA, 16 bp, synthetic construct
  misc_feature 1..16: note = synthetic [barcode part1]
  source 1..16: mol_type = other DNA
cgcgccgttaatcttg

SEQ ID NO: 20305 - DNA, 16 bp, synthetic construct
  misc_feature 1..16: note = synthetic [barcode part1]
  source 1..16: mol_type = other DNA
ttcgtcgattgaaggc

SEQ ID NO: 20306 - DNA, 16 bp, synthetic construct
  misc_feature 1..16: note = synthetic [barcode part1]
  source 1..16: mol_type = other DNA
ccgatatcaacgtgtg

SEQ ID NO: 20307 - DNA, 16 bp, synthetic construct
  misc_feature 1..16: note = synthetic [barcode part1]
  source 1..16: mol_type = other DNA
taattccgtcgtgcgc

SEQ ID NO: 20308 - DNA, 16 bp, synthetic construct
  misc_feature 1..16: note = synthetic [barcode part1]
  source 1..16: mol_type = other DNA
taggttacggtccagt

SEQ ID NO: 20309 - DNA, 16 bp, synthetic construct
  misc_feature 1..16: note = synthetic [barcode part1]
  source 1..16: mol_type = other DNA
cctgtattctccgtgt

SEQ ID NO: 20310 - DNA, 16 bp, synthetic construct
  misc_feature 1..16: note = synthetic [barcode part1]
  source 1..16: mol_type = other DNA
aagttcctctctcctg

SEQ ID NO: 20311 - DNA, 16 bp, synthetic construct
  misc_feature 1..16: note = synthetic [barcode part1]
  source 1..16: mol_type = other DNA
cgtagttcgactcctg

SEQ ID NO: 20312 - DNA, 16 bp, synthetic construct
  misc_feature 1..16: note = synthetic [barcode part1]
  source 1..16: mol_type = other DNA
gagagactctatagac

SEQ ID NO: 20313 - DNA, 16 bp, synthetic construct
  misc_feature 1..16: note = synthetic [barcode part1]
  source 1..16: mol_type = other DNA
tggagtcagaagaggt

SEQ ID NO: 20314 - DNA, 16 bp, synthetic construct
  misc_feature 1..16: note = synthetic [barcode part1]
  source 1..16: mol_type = other DNA
tattccgagacctact

SEQ ID NO: 20315 - DNA, 16 bp, synthetic construct
  misc_feature 1..16: note = synthetic [barcode part1]
  source 1..16: mol_type = other DNA
tggtgagttacctcag

SEQ ID NO: 20316 - DNA, 16 bp, synthetic construct
  misc_feature 1..16: note = synthetic [barcode part1]
  source 1..16: mol_type = other DNA
tgaaggccgttaggtg

SEQ ID NO: 20317 - DNA, 16 bp, synthetic construct
  misc_feature 1..16: note = synthetic [barcode part1]
  source 1..16: mol_type = other DNA
acctcgcgacaatagt

SEQ ID NO: 20318 - DNA, 16 bp, synthetic construct
  misc_feature 1..16: note = synthetic [barcode part1]
  source 1..16: mol_type = other DNA
caagtacgtgtggttc

SEQ ID NO: 20319 - DNA, 16 bp, synthetic construct
  misc_feature 1..16: note = synthetic [barcode part1]
  source 1..16: mol_type = other DNA
ttgtcaggaggacacg

SEQ ID NO: 20320 - DNA, 16 bp, synthetic construct
  misc_feature 1..16: note = synthetic [barcode part1]
  source 1..16: mol_type = other DNA
tgaacactgtgagtcc

SEQ ID NO: 20321 - DNA, 16 bp, synthetic construct
  misc_feature 1..16: note = synthetic [barcode part1]
  source 1..16: mol_type = other DNA
cacgagatagtaactg

SEQ ID NO: 20322 - DNA, 16 bp, synthetic construct
  misc_feature 1..16: note = synthetic [barcode part1]
  source 1..16: mol_type = other DNA
gaactggcacgtagtg

SEQ ID NO: 20323 - DNA, 16 bp, synthetic construct
  misc_feature 1..16: note = synthetic [barcode part1]
  source 1..16: mol_type = other DNA
tgccgacttagttccg

SEQ ID NO: 20324 - DNA, 16 bp, synthetic construct
  misc_feature 1..16: note = synthetic [barcode part1]
  source 1..16: mol_type = other DNA
gcaatactgcgtgtac

SEQ ID NO: 20325 - DNA, 16 bp, synthetic construct
  misc_feature 1..16: note = synthetic [barcode part1]
  source 1..16: mol_type = other DNA
cgttagaacggaggtc

SEQ ID NO: 20326 - DNA, 16 bp, synthetic construct
  misc_feature 1..16: note = synthetic [barcode part1]
  source 1..16: mol_type = other DNA
tccactcagtactgcg

SEQ ID NO: 20327 - DNA, 16 bp, synthetic construct
  misc_feature 1..16: note = synthetic [barcode part1]
  source 1..16: mol_type = other DNA
agtctctccagatact

SEQ ID NO: 20328 - DNA, 16 bp, synthetic construct
  misc_feature 1..16: note = synthetic [barcode part1]
  source 1..16: mol_type = other DNA
acgttccggtccaatc

SEQ ID NO: 20329 - DNA, 16 bp, synthetic construct
  misc_feature 1..16: note = synthetic [barcode part1]
  source 1..16: mol_type = other DNA
tctcaaccaacctcct

SEQ ID NO: 20330 - DNA, 16 bp, synthetic construct
  misc_feature 1..16: note = synthetic [barcode part1]
  source 1..16: mol_type = other DNA
tgatcacggtgtactg

SEQ ID NO: 20331 - DNA, 16 bp, synthetic construct
  misc_feature 1..16: note = synthetic [barcode part1]
  source 1..16: mol_type = other DNA
gtaatagacggtcgcg

SEQ ID NO: 20332 - DNA, 16 bp, synthetic construct
  misc_feature 1..16: note = synthetic [barcode part1]
  source 1..16: mol_type = other DNA
caccgaactatactct

SEQ ID NO: 20333 - DNA, 16 bp, synthetic construct
  misc_feature 1..16: note = synthetic [barcode part1]
  source 1..16: mol_type = other DNA
gtgcaccttactgtcg

SEQ ID NO: 20334 - DNA, 16 bp, synthetic construct
  misc_feature 1..16: note = synthetic [barcode part1]
  source 1..16: mol_type = other DNA
ttgcgcgttggttctg

SEQ ID NO: 20335 - DNA, 16 bp, synthetic construct
  misc_feature 1..16: note = synthetic [barcode part1]
  source 1..16: mol_type = other DNA
acctctgaacaattcc

SEQ ID NO: 20336 - DNA, 16 bp, synthetic construct
  misc_feature 1..16: note = synthetic [barcode part1]
  source 1..16: mol_type = other DNA
cggtgattcctgcgtt

SEQ ID NO: 20337 - DNA, 16 bp, synthetic construct
  misc_feature 1..16: note = synthetic [barcode part1]
  source 1..16: mol_type = other DNA
aggcgaaggtatcacc

SEQ ID NO: 20338 - DNA, 16 bp, synthetic construct
  misc_feature 1..16: note = synthetic [barcode part1]
  source 1..16: mol_type = other DNA
aacgcaggttcgacag

SEQ ID NO: 20339 - DNA, 16 bp, synthetic construct
  misc_feature 1..16: note = synthetic [barcode part1]
  source 1..16: mol_type = other DNA
atctggtcagtctgag

SEQ ID NO: 20340 - DNA, 16 bp, synthetic construct
  misc_feature 1..16: note = synthetic [barcode part1]
  source 1..16: mol_type = other DNA
gatacaccacaatcgc

SEQ ID NO: 20341 - DNA, 16 bp, synthetic construct
  misc_feature 1..16: note = synthetic [barcode part1]
  source 1..16: mol_type = other DNA
tcggacgacaacagac

SEQ ID NO: 20342 - DNA, 16 bp, synthetic construct
  misc_feature 1..16: note = synthetic [barcode part1]
  source 1..16: mol_type = other DNA
aactcttctagtacgc

SEQ ID NO: 20343 - DNA, 16 bp, synthetic construct
  misc_feature 1..16: note = synthetic [barcode part1]
  source 1..16: mol_type = other DNA
agttgcgtcggtctct

SEQ ID NO: 20344 - DNA, 16 bp, synthetic construct
  misc_feature 1..16: note = synthetic [barcode part1]
  source 1..16: mol_type = other DNA
tatcgactcaatctcg

SEQ ID NO: 20345 - DNA, 16 bp, synthetic construct
  misc_feature 1..16: note = synthetic [barcode part1]
  source 1..16: mol_type = other DNA
gcaactgattacgcgt

SEQ ID NO: 20346 - DNA, 16 bp, synthetic construct
  misc_feature 1..16: note = synthetic [barcode part1]
  source 1..16: mol_type = other DNA
tatactcacctccgtc

SEQ ID NO: 20347 - DNA, 16 bp, synthetic construct
  misc_feature 1..16: note = synthetic [barcode part1]
  source 1..16: mol_type = other DNA
acctgcggaagtaacg

SEQ ID NO: 20348 - DNA, 16 bp, synthetic construct
  misc_feature 1..16: note = synthetic [barcode part1]
  source 1..16: mol_type = other DNA
gacgattgtgcaggac

SEQ ID NO: 20349 - DNA, 16 bp, synthetic construct
  misc_feature 1..16: note = synthetic [barcode part1]
  source 1..16: mol_type = other DNA
agtactccggagaacg

SEQ ID NO: 20350 - DNA, 16 bp, synthetic construct
  misc_feature 1..16: note = synthetic [barcode part1]
  source 1..16: mol_type = other DNA
gacgcaagagttaccg

SEQ ID NO: 20351 - DNA, 16 bp, synthetic construct
  misc_feature 1..16: note = synthetic [barcode part1]
  source 1..16: mol_type = other DNA
accgtaacctacttac

SEQ ID NO: 20352 - DNA, 16 bp, synthetic construct
  misc_feature 1..16: note = synthetic [barcode part1]
  source 1..16: mol_type = other DNA
gcaatcgcgtacagtt

SEQ ID NO: 20353 - DNA, 16 bp, synthetic construct
  misc_feature 1..16: note = synthetic [barcode part1]
  source 1..16: mol_type = other DNA
cagagacttcacactg

SEQ ID NO: 20354 - DNA, 16 bp, synthetic construct
  misc_feature 1..16: note = synthetic [barcode part1]
  source 1..16: mol_type = other DNA
gtgcgatcgtagttgt

SEQ ID NO: 20355 - DNA, 16 bp, synthetic construct
  misc_feature 1..16: note = synthetic [barcode part1]
  source 1..16: mol_type = other DNA
agtctcacttggaacg

SEQ ID NO: 20356 - DNA, 16 bp, synthetic construct
  misc_feature 1..16: note = synthetic [barcode part1]
  source 1..16: mol_type = other DNA
tgtgatctggtctccg

SEQ ID NO: 20357 - DNA, 16 bp, synthetic construct
  misc_feature 1..16: note = synthetic [barcode part1]
  source 1..16: mol_type = other DNA
tacggattactacctc

SEQ ID NO: 20358 - DNA, 16 bp, synthetic construct
  misc_feature 1..16: note = synthetic [barcode part1]
  source 1..16: mol_type = other DNA
gcgagtaactcacttg

SEQ ID NO: 20359 - DNA, 16 bp, synthetic construct
  misc_feature 1..16: note = synthetic [barcode part1]
  source 1..16: mol_type = other DNA
tcagactaaccaccag

SEQ ID NO: 20360 - DNA, 16 bp, synthetic construct
  misc_feature 1..16: note = synthetic [barcode part1]
  source 1..16: mol_type = other DNA
tcgcctacgagatctc

SEQ ID NO: 20361 - DNA, 16 bp, synthetic construct
  misc_feature 1..16: note = synthetic [barcode part1]
  source 1..16: mol_type = other DNA
gttcttactgcacctc

SEQ ID NO: 20362 - DNA, 16 bp, synthetic construct
  misc_feature 1..16: note = synthetic [barcode part1]
  source 1..16: mol_type = other DNA
gaaggaaccgagattg

SEQ ID NO: 20363 - DNA, 16 bp, synthetic construct
  misc_feature 1..16: note = synthetic [barcode part1]
  source 1..16: mol_type = other DNA
accgtagttacgacgt

SEQ ID NO: 20364 - DNA, 16 bp, synthetic construct
  misc_feature 1..16: note = synthetic [barcode part1]
  source 1..16: mol_type = other DNA
atagtgactcggttcg

SEQ ID NO: 20365 - DNA, 16 bp, synthetic construct
  misc_feature 1..16: note = synthetic [barcode part1]
  source 1..16: mol_type = other DNA
tcggtggtgtcttcac

SEQ ID NO: 20366 - DNA, 16 bp, synthetic construct
  misc_feature 1..16: note = synthetic [barcode part1]
  source 1..16: mol_type = other DNA
ttcgtcaccaacgcgt

SEQ ID NO: 20367 - DNA, 16 bp, synthetic construct
  misc_feature 1..16: note = synthetic [barcode part1]
  source 1..16: mol_type = other DNA
tgccactgaattggac

SEQ ID NO: 20368 - DNA, 16 bp, synthetic construct
  misc_feature 1..16: note = synthetic [barcode part1]
  source 1..16: mol_type = other DNA
gttaattccggccaag

SEQ ID NO: 20369 - DNA, 16 bp, synthetic construct
  misc_feature 1..16: note = synthetic [barcode part1]
  source 1..16: mol_type = other DNA
cactacaataccgcag

SEQ ID NO: 20370 - DNA, 16 bp, synthetic construct
  misc_feature 1..16: note = synthetic [barcode part1]
  source 1..16: mol_type = other DNA
tccgtgtgtacttctc

SEQ ID NO: 20371 - DNA, 16 bp, synthetic construct
  misc_feature 1..16: note = synthetic [barcode part1]
  source 1..16: mol_type = other DNA
tctcgcaaccgaatcc

SEQ ID NO: 20372 - DNA, 16 bp, synthetic construct
  misc_feature 1..16: note = synthetic [barcode part1]
  source 1..16: mol_type = other DNA
cctctctcgaccaatt

SEQ ID NO: 20373 - DNA, 16 bp, synthetic construct
  misc_feature 1..16: note = synthetic [barcode part1]
  source 1..16: mol_type = other DNA
agtccaggcaccttct

SEQ ID NO: 20374 - DNA, 16 bp, synthetic construct
  misc_feature 1..16: note = synthetic [barcode part1]
  source 1..16: mol_type = other DNA
aataggtgagtcctag

SEQ ID NO: 20375 - DNA, 16 bp, synthetic construct
  misc_feature 1..16: note = synthetic [barcode part1]
  source 1..16: mol_type = other DNA
atctcgtaggcgcctt

SEQ ID NO: 20376 - DNA, 16 bp, synthetic construct
  misc_feature 1..16: note = synthetic [barcode part1]
  source 1..16: mol_type = other DNA
agtaccgtctctcctt

SEQ ID NO: 20377 - DNA, 16 bp, synthetic construct
  misc_feature 1..16: note = synthetic [barcode part1]
  source 1..16: mol_type = other DNA
ttcacacctgaactgt

SEQ ID NO: 20378 - DNA, 16 bp, synthetic construct
  misc_feature 1..16: note = synthetic [barcode part1]
  source 1..16: mol_type = other DNA
gtctgttgcggtacct

SEQ ID NO: 20379 - DNA, 16 bp, synthetic construct
  misc_feature 1..16: note = synthetic [barcode part1]
  source 1..16: mol_type = other DNA
tctaatcgcacgttac

SEQ ID NO: 20380 - DNA, 16 bp, synthetic construct
  misc_feature 1..16: note = synthetic [barcode part1]
  source 1..16: mol_type = other DNA
tggagagaatcaggac

SEQ ID NO: 20381 - DNA, 16 bp, synthetic construct
  misc_feature 1..16: note = synthetic [barcode part1]
  source 1..16: mol_type = other DNA
tctccttgaagtcctc

SEQ ID NO: 20382 - DNA, 16 bp, synthetic construct
  misc_feature 1..16: note = synthetic [barcode part1]
  source 1..16: mol_type = other DNA
cgacaatctctcacgc

SEQ ID NO: 20383 - DNA, 16 bp, synthetic construct
  misc_feature 1..16: note = synthetic [barcode part1]
  source 1..16: mol_type = other DNA
aacgcgcagtcttctc

SEQ ID NO: 20384 - DNA, 16 bp, synthetic construct
  misc_feature 1..16: note = synthetic [barcode part1]
  source 1..16: mol_type = other DNA
taggttgcagtgactc

SEQ ID NO: 20385 - DNA, 16 bp, synthetic construct
  misc_feature 1..16: note = synthetic [barcode part1]
  source 1..16: mol_type = other DNA
ttacggttctcctctg

SEQ ID NO: 20386 - DNA, 16 bp, synthetic construct
  misc_feature 1..16: note = synthetic [barcode part1]
  source 1..16: mol_type = other DNA
tgactaagtgccacgt

SEQ ID NO: 20387 - DNA, 16 bp, synthetic construct
  misc_feature 1..16: note = synthetic [barcode part1]
  source 1..16: mol_type = other DNA
tgtgtaggagtactcc

SEQ ID NO: 20388 - DNA, 16 bp, synthetic construct
  misc_feature 1..16: note = synthetic [barcode part1]
  source 1..16: mol_type = other DNA
ttggacaaggtctgtc

SEQ ID NO: 20389 - DNA, 16 bp, synthetic construct
  misc_feature 1..16: note = synthetic [barcode part1]
  source 1..16: mol_type = other DNA
tctccgaattggcgtc

SEQ ID NO: 20390 - DNA, 16 bp, synthetic construct
  misc_feature 1..16: note = synthetic [barcode part1]
  source 1..16: mol_type = other DNA
aacggtcaccgaatct

SEQ ID NO: 20391 - DNA, 16 bp, synthetic construct
  misc_feature 1..16: note = synthetic [barcode part1]
  source 1..16: mol_type = other DNA
tgatattgcagtgccg

SEQ ID NO: 20392 - DNA, 16 bp, synthetic construct
  misc_feature 1..16: note = synthetic [barcode part1]
  source 1..16: mol_type = other DNA
gttccacgtccagatc

SEQ ID NO: 20393 - DNA, 16 bp, synthetic construct
  misc_feature 1..16: note = synthetic [barcode part1]
  source 1..16: mol_type = other DNA
actcacctgagacctc

SEQ ID NO: 20394 - DNA, 16 bp, synthetic construct
  misc_feature 1..16: note = synthetic [barcode part1]
  source 1..16: mol_type = other DNA
gcctgccgtgatattc

SEQ ID NO: 20395 - DNA, 16 bp, synthetic construct
  misc_feature 1..16: note = synthetic [barcode part1]
  source 1..16: mol_type = other DNA
cacagataagttcgcc

SEQ ID NO: 20396 - DNA, 16 bp, synthetic construct
  misc_feature 1..16: note = synthetic [barcode part1]
  source 1..16: mol_type = other DNA
gcaaggtagacctgtg

SEQ ID NO: 20397 - DNA, 16 bp, synthetic construct
  misc_feature 1..16: note = synthetic [barcode part1]
  source 1..16: mol_type = other DNA
tgacgagtgtccgaag

SEQ ID NO: 20398 - DNA, 16 bp, synthetic construct
  misc_feature 1..16: note = synthetic [barcode part1]
  source 1..16: mol_type = other DNA
gagttgttaggaacac

SEQ ID NO: 20399 - DNA, 16 bp, synthetic construct
  misc_feature 1..16: note = synthetic [barcode part1]
  source 1..16: mol_type = other DNA
tgaccgaccagttagt

SEQ ID NO: 20400 - DNA, 16 bp, synthetic construct
  misc_feature 1..16: note = synthetic [barcode part1]
  source 1..16: mol_type = other DNA
tcgacaagttcttgtc

SEQ ID NO: 20401 - DNA, 16 bp, synthetic construct
  misc_feature 1..16: note = synthetic [barcode part1]
  source 1..16: mol_type = other DNA
aacagttgtgcgaagt

SEQ ID NO: 20402 - DNA, 16 bp, synthetic construct
  misc_feature 1..16: note = synthetic [barcode part1]
  source 1..16: mol_type = other DNA
tcacgtccttacactc

SEQ ID NO: 20403 - DNA, 16 bp, synthetic construct
  misc_feature 1..16: note = synthetic [barcode part1]
  source 1..16: mol_type = other DNA
aactctgacctacttg

SEQ ID NO: 20404 - DNA, 16 bp, synthetic construct
  misc_feature 1..16: note = synthetic [barcode part1]
  source 1..16: mol_type = other DNA
ataactagtcgacgcc

SEQ ID NO: 20405 - DNA, 16 bp, synthetic construct
  misc_feature 1..16: note = synthetic [barcode part1]
  source 1..16: mol_type = other DNA
cactcgtggacttcac

SEQ ID NO: 20406 - DNA, 16 bp, synthetic construct
  misc_feature 1..16: note = synthetic [barcode part1]
  source 1..16: mol_type = other DNA
cggtggtattagatcc

SEQ ID NO: 20407 - DNA, 16 bp, synthetic construct
  misc_feature 1..16: note = synthetic [barcode part1]
  source 1..16: mol_type = other DNA
cctctaaggaatcggt

SEQ ID NO: 20408 - DNA, 16 bp, synthetic construct
  misc_feature 1..16: note = synthetic [barcode part1]
  source 1..16: mol_type = other DNA
cctaagaactgtggtc

SEQ ID NO: 20409 - DNA, 16 bp, synthetic construct
  misc_feature 1..16: note = synthetic [barcode part1]
  source 1..16: mol_type = other DNA
tgtatccttcggtagt

SEQ ID NO: 20410 - DNA, 16 bp, synthetic construct
  misc_feature 1..16: note = synthetic [barcode part1]
  source 1..16: mol_type = other DNA
ttctgactggtggagt

SEQ ID NO: 20411 - DNA, 16 bp, synthetic construct
  misc_feature 1..16: note = synthetic [barcode part1]
  source 1..16: mol_type = other DNA
agattacctgccgagt

SEQ ID NO: 20412 - DNA, 16 bp, synthetic construct
  misc_feature 1..16: note = synthetic [barcode part1]
  source 1..16: mol_type = other DNA
tgaattactccacacc

SEQ ID NO: 20413 - DNA, 16 bp, synthetic construct
  misc_feature 1..16: note = synthetic [barcode part1]
  source 1..16: mol_type = other DNA
caccgaacctgtacct

SEQ ID NO: 20414 - DNA, 16 bp, synthetic construct
  misc_feature 1..16: note = synthetic [barcode part1]
  source 1..16: mol_type = other DNA
acggattagagatcac

SEQ ID NO: 20415 - DNA, 16 bp, synthetic construct
  misc_feature 1..16: note = synthetic [barcode part1]
  source 1..16: mol_type = other DNA
cgacgacttgaactac

SEQ ID NO: 20416 - DNA, 16 bp, synthetic construct
  misc_feature 1..16: note = synthetic [barcode part1]
  source 1..16: mol_type = other DNA
actcacactccaccag

SEQ ID NO: 20417 - DNA, 16 bp, synthetic construct
  misc_feature 1..16: note = synthetic [barcode part1]
  source 1..16: mol_type = other DNA
actctcggtgaagatc

SEQ ID NO: 20418 - DNA, 16 bp, synthetic construct
  misc_feature 1..16: note = synthetic [barcode part1]
  source 1..16: mol_type = other DNA
ttctcctggaaggaac

SEQ ID NO: 20419 - DNA, 16 bp, synthetic construct
  misc_feature 1..16: note = synthetic [barcode part1]
  source 1..16: mol_type = other DNA
tctatcagtcgtctcc

SEQ ID NO: 20420 - DNA, 16 bp, synthetic construct
  misc_feature 1..16: note = synthetic [barcode part1]
  source 1..16: mol_type = other DNA
aagtgcggacctaacg

SEQ ID NO: 20421 - DNA, 16 bp, synthetic construct
  misc_feature 1..16: note = synthetic [barcode part1]
  source 1..16: mol_type = other DNA
gtacacacaaccgatc

SEQ ID NO: 20422 - DNA, 16 bp, synthetic construct
  misc_feature 1..16: note = synthetic [barcode part1]
  source 1..16: mol_type = other DNA
agagagatcaaggtcg

SEQ ID NO: 20423 - DNA, 16 bp, synthetic construct
  misc_feature 1..16: note = synthetic [barcode part1]
  source 1..16: mol_type = other DNA
tccttggatatcgatc

SEQ ID NO: 20424 - DNA, 16 bp, synthetic construct
  misc_feature 1..16: note = synthetic [barcode part1]
  source 1..16: mol_type = other DNA
tacagtgtccgcctac

SEQ ID NO: 20425 - DNA, 16 bp, synthetic construct
  misc_feature 1..16: note = synthetic [barcode part1]
  source 1..16: mol_type = other DNA
gtaccgaattgttcct

SEQ ID NO: 20426 - DNA, 16 bp, synthetic construct
  misc_feature 1..16: note = synthetic [barcode part1]
  source 1..16: mol_type = other DNA
acttgttcgtcgcgac

SEQ ID NO: 20427 - DNA, 16 bp, synthetic construct
  misc_feature 1..16: note = synthetic [barcode part1]
  source 1..16: mol_type = other DNA
tgacactgatatcgcg

SEQ ID NO: 20428 - DNA, 16 bp, synthetic construct
  misc_feature 1..16: note = synthetic [barcode part1]
  source 1..16: mol_type = other DNA
gcggccagtattaact

SEQ ID NO: 20429 - DNA, 16 bp, synthetic construct
  misc_feature 1..16: note = synthetic [barcode part1]
  source 1..16: mol_type = other DNA
atccgaacgtcgtctc

SEQ ID NO: 20430 - DNA, 16 bp, synthetic construct
  misc_feature 1..16: note = synthetic [barcode part1]
  source 1..16: mol_type = other DNA
acactctgtgcctctt

SEQ ID NO: 20431 - DNA, 16 bp, synthetic construct
  misc_feature 1..16: note = synthetic [barcode part1]
  source 1..16: mol_type = other DNA
tcctcctggtcttagt

SEQ ID NO: 20432 - DNA, 16 bp, synthetic construct
  misc_feature 1..16: note = synthetic [barcode part1]
  source 1..16: mol_type = other DNA
gcgaaccaattacgtc

SEQ ID NO: 20433 - DNA, 16 bp, synthetic construct
  misc_feature 1..16: note = synthetic [barcode part1]
  source 1..16: mol_type = other DNA
attgaatccgcgcctc

SEQ ID NO: 20434 - DNA, 16 bp, synthetic construct
  misc_feature 1..16: note = synthetic [barcode part1]
  source 1..16: mol_type = other DNA
aggaccaattacctcg

SEQ ID NO: 20435 - DNA, 16 bp, synthetic construct
  misc_feature 1..16: note = synthetic [barcode part1]
  source 1..16: mol_type = other DNA
gatacctcttgcgaag

SEQ ID NO: 20436 - DNA, 16 bp, synthetic construct
  misc_feature 1..16: note = synthetic [barcode part1]
  source 1..16: mol_type = other DNA
acgttcagagtgatag

SEQ ID NO: 20437 - DNA, 16 bp, synthetic construct
  misc_feature 1..16: note = synthetic [barcode part1]
  source 1..16: mol_type = other DNA
cgttccttcaagttag

SEQ ID NO: 20438 - DNA, 16 bp, synthetic construct
  misc_feature 1..16: note = synthetic [barcode part1]
  source 1..16: mol_type = other DNA
taccagtaccaacgtg

SEQ ID NO: 20439 - DNA, 16 bp, synthetic construct
  misc_feature 1..16: note = synthetic [barcode part1]
  source 1..16: mol_type = other DNA
tacagtctaatcctcg

SEQ ID NO: 20440 - DNA, 16 bp, synthetic construct
  misc_feature 1..16: note = synthetic [barcode part1]
  source 1..16: mol_type = other DNA
cctacaacggaacgag

SEQ ID NO: 20441 - DNA, 16 bp, synthetic construct
  misc_feature 1..16: note = synthetic [barcode part1]
  source 1..16: mol_type = other DNA
gttgtacgaggcaacg

SEQ ID NO: 20442 - DNA, 16 bp, synthetic construct
  misc_feature 1..16: note = synthetic [barcode part1]
  source 1..16: mol_type = other DNA
ccggaattaaggcctt

SEQ ID NO: 20443 - DNA, 16 bp, synthetic construct
  misc_feature 1..16: note = synthetic [barcode part1]
  source 1..16: mol_type = other DNA
agacggtgattgtgcg

SEQ ID NO: 20444 - DNA, 16 bp, synthetic construct
  misc_feature 1..16: note = synthetic [barcode part1]
  source 1..16: mol_type = other DNA
ttgtaggttcacggac

SEQ ID NO: 20445 - DNA, 16 bp, synthetic construct
  misc_feature 1..16: note = synthetic [barcode part1]
  source 1..16: mol_type = other DNA
tgtagtggagtaagtc

SEQ ID NO: 20446 - DNA, 16 bp, synthetic construct
  misc_feature 1..16: note = synthetic [barcode part1]
  source 1..16: mol_type = other DNA
gaagttagattgtgcg

SEQ ID NO: 20447 - DNA, 16 bp, synthetic construct
  misc_feature 1..16: note = synthetic [barcode part1]
  source 1..16: mol_type = other DNA
aacgcgtccgatctct

SEQ ID NO: 20448 - DNA, 16 bp, synthetic construct
  misc_feature 1..16: note = synthetic [barcode part1]
  source 1..16: mol_type = other DNA
acggagtataagttcg

SEQ ID NO: 20449 - DNA, 16 bp, synthetic construct
  misc_feature 1..16: note = synthetic [barcode part1]
  source 1..16: mol_type = other DNA
gttccgtgtgagatac

SEQ ID NO: 20450 - DNA, 16 bp, synthetic construct
  misc_feature 1..16: note = synthetic [barcode part1]
  source 1..16: mol_type = other DNA
cactctaacgacgagt

SEQ ID NO: 20451 - DNA, 16 bp, synthetic construct
  misc_feature 1..16: note = synthetic [barcode part1]
  source 1..16: mol_type = other DNA
ccgtaagtccacaagt

SEQ ID NO: 20452 - DNA, 16 bp, synthetic construct
  misc_feature 1..16: note = synthetic [barcode part1]
  source 1..16: mol_type = other DNA
atcagacggattgtcc

SEQ ID NO: 20453 - DNA, 16 bp, synthetic construct
  misc_feature 1..16: note = synthetic [barcode part1]
  source 1..16: mol_type = other DNA
gccttgtgaactgaac

SEQ ID NO: 20454 - DNA, 16 bp, synthetic construct
  misc_feature 1..16: note = synthetic [barcode part1]
  source 1..16: mol_type = other DNA
actgagtcaagaacac

SEQ ID NO: 20455 - DNA, 16 bp, synthetic construct
  misc_feature 1..16: note = synthetic [barcode part1]
  source 1..16: mol_type = other DNA
acgtgttcagatccag

SEQ ID NO: 20456 - DNA, 16 bp, synthetic construct
  misc_feature 1..16: note = synthetic [barcode part1]
  source 1..16: mol_type = other DNA
tagttcggtggtctag

SEQ ID NO: 20457 - DNA, 16 bp, synthetic construct
  misc_feature 1..16: note = synthetic [barcode part1]
  source 1..16: mol_type = other DNA
ccgacgtgaggttaag

SEQ ID NO: 20458 - DNA, 16 bp, synthetic construct
  misc_feature 1..16: note = synthetic [barcode part1]
  source 1..16: mol_type = other DNA
gtgtaactgcgcaatc

SEQ ID NO: 20459 - DNA, 16 bp, synthetic construct
  misc_feature 1..16: note = synthetic [barcode part1]
  source 1..16: mol_type = other DNA
gtaactcgaatacgag

SEQ ID NO: 20460 - DNA, 16 bp, synthetic construct
  misc_feature 1..16: note = synthetic [barcode part1]
  source 1..16: mol_type = other DNA
agtaacaacggtggag

SEQ ID NO: 20461 - DNA, 16 bp, synthetic construct
  misc_feature 1..16: note = synthetic [barcode part1]
  source 1..16: mol_type = other DNA
atcctacgtctggatt

SEQ ID NO: 20462 - DNA, 16 bp, synthetic construct
  misc_feature 1..16: note = synthetic [barcode part1]
  source 1..16: mol_type = other DNA
taagtgccttcgccac

SEQ ID NO: 20463 - DNA, 16 bp, synthetic construct
  misc_feature 1..16: note = synthetic [barcode part1]
  source 1..16: mol_type = other DNA
gccaggttgaggatac

SEQ ID NO: 20464 - DNA, 16 bp, synthetic construct
  misc_feature 1..16: note = synthetic [barcode part1]
  source 1..16: mol_type = other DNA
tatccgattccgccag

SEQ ID NO: 20465 - DNA, 16 bp, synthetic construct
  misc_feature 1..16: note = synthetic [barcode part1]
  source 1..16: mol_type = other DNA
cgacttccgtgtagtc

SEQ ID NO: 20466 - DNA, 16 bp, synthetic construct
  misc_feature 1..16: note = synthetic [barcode part1]
  source 1..16: mol_type = other DNA
cgttccactcagacac

SEQ ID NO: 20467 - DNA, 16 bp, synthetic construct
  misc_feature 1..16: note = synthetic [barcode part1]
  source 1..16: mol_type = other DNA
gaagttcaggcagacc

SEQ ID NO: 20468 - DNA, 16 bp, synthetic construct
  misc_feature 1..16: note = synthetic [barcode part1]
  source 1..16: mol_type = other DNA
gcaccgagttaaggac

SEQ ID NO: 20469 - DNA, 16 bp, synthetic construct
  misc_feature 1..16: note = synthetic [barcode part1]
  source 1..16: mol_type = other DNA
ttaggaacttccgacg

SEQ ID NO: 20470 - DNA, 16 bp, synthetic construct
  misc_feature 1..16: note = synthetic [barcode part1]
  source 1..16: mol_type = other DNA
cgactaagattctggc

SEQ ID NO: 20471 - DNA, 16 bp, synthetic construct
  misc_feature 1..16: note = synthetic [barcode part1]
  source 1..16: mol_type = other DNA
gcaagacaacgcctag

SEQ ID NO: 20472 - DNA, 16 bp, synthetic construct
  misc_feature 1..16: note = synthetic [barcode part1]
  source 1..16: mol_type = other DNA
taactctgcgttggcc

SEQ ID NO: 20473 - DNA, 16 bp, synthetic construct
  misc_feature 1..16: note = synthetic [barcode part1]
  source 1..16: mol_type = other DNA
atctaggtaggcactc

SEQ ID NO: 20474 - DNA, 16 bp, synthetic construct
  misc_feature 1..16: note = synthetic [barcode part1]
  source 1..16: mol_type = other DNA
tcacgtcgcaattcgc

SEQ ID NO: 20475 - DNA, 16 bp, synthetic construct
  misc_feature 1..16: note = synthetic [barcode part1]
  source 1..16: mol_type = other DNA
aatctccaccaggagt

SEQ ID NO: 20476 - DNA, 16 bp, synthetic construct
  misc_feature 1..16: note = synthetic [barcode part1]
  source 1..16: mol_type = other DNA
ccgtgaatctggcctt

SEQ ID NO: 20477 - DNA, 16 bp, synthetic construct
  misc_feature 1..16: note = synthetic [barcode part1]
  source 1..16: mol_type = other DNA
gcgcaacctgatcttc

SEQ ID NO: 20478 - DNA, 16 bp, synthetic construct
  misc_feature 1..16: note = synthetic [barcode part1]
  source 1..16: mol_type = other DNA
cggttataagtgcctg

SEQ ID NO: 20479 - DNA, 16 bp, synthetic construct
  misc_feature 1..16: note = synthetic [barcode part1]
  source 1..16: mol_type = other DNA
caatcgaggagagaac

SEQ ID NO: 20480 - DNA, 16 bp, synthetic construct
  misc_feature 1..16: note = synthetic [barcode part1]
  source 1..16: mol_type = other DNA
gaggactcctcaattg

SEQ ID NO: 20481 - DNA, 16 bp, synthetic construct
  misc_feature 1..16: note = synthetic [barcode part1]
  source 1..16: mol_type = other DNA
gtcgttatacactctg

SEQ ID NO: 20482 - DNA, 16 bp, synthetic construct
  misc_feature 1..16: note = synthetic [barcode part1]
  source 1..16: mol_type = other DNA
tgagaggcacacagtc

SEQ ID NO: 20483 - DNA, 16 bp, synthetic construct
  misc_feature 1..16: note = synthetic [barcode part1]
  source 1..16: mol_type = other DNA
gcgtaagaagttgccg

SEQ ID NO: 20484 - DNA, 16 bp, synthetic construct
  misc_feature 1..16: note = synthetic [barcode part1]
  source 1..16: mol_type = other DNA
accgcggttactcgtt

SEQ ID NO: 20485 - DNA, 16 bp, synthetic construct
  misc_feature 1..16: note = synthetic [barcode part1]
  source 1..16: mol_type = other DNA
tcgcctataagattcc

SEQ ID NO: 20486 - DNA, 16 bp, synthetic construct
  misc_feature 1..16: note = synthetic [barcode part1]
  source 1..16: mol_type = other DNA
caacagtcgtacctcc

SEQ ID NO: 20487 - DNA, 16 bp, synthetic construct
  misc_feature 1..16: note = synthetic [barcode part1]
  source 1..16: mol_type = other DNA
caattggccaagatcc

SEQ ID NO: 20488 - DNA, 16 bp, synthetic construct
  misc_feature 1..16: note = synthetic [barcode part1]
  source 1..16: mol_type = other DNA
tgtcctctcgacagtg

SEQ ID NO: 20489 - DNA, 16 bp, synthetic construct
  misc_feature 1..16: note = synthetic [barcode part1]
  source 1..16: mol_type = other DNA
cggacaagtctcgaag

SEQ ID NO: 20490 - DNA, 16 bp, synthetic construct
  misc_feature 1..16: note = synthetic [barcode part1]
  source 1..16: mol_type = other DNA
gtgataagtgaggcag

SEQ ID NO: 20491 - DNA, 16 bp, synthetic construct
  misc_feature 1..16: note = synthetic [barcode part1]
  source 1..16: mol_type = other DNA
gcaacttgaacacaag

SEQ ID NO: 20492 - DNA, 16 bp, synthetic construct
  misc_feature 1..16: note = synthetic [barcode part1]
  source 1..16: mol_type = other DNA
gtcacggacaatatcc

SEQ ID NO: 20493 - DNA, 16 bp, synthetic construct
  misc_feature 1..16: note = synthetic [barcode part1]
  source 1..16: mol_type = other DNA
actgacggcgactatt

SEQ ID NO: 20494 - DNA, 16 bp, synthetic construct
  misc_feature 1..16: note = synthetic [barcode part1]
  source 1..16: mol_type = other DNA
tcgaacttcggtaacg

SEQ ID NO: 20495 - DNA, 16 bp, synthetic construct
  misc_feature 1..16: note = synthetic [barcode part1]
  source 1..16: mol_type = other DNA
cacaggataacggtcg

SEQ ID NO: 20496 - DNA, 16 bp, synthetic construct
  misc_feature 1..16: note = synthetic [barcode part1]
  source 1..16: mol_type = other DNA
accgacgataggacac

SEQ ID NO: 20497 - DNA, 16 bp, synthetic construct
  misc_feature 1..16: note = synthetic [barcode part1]
  source 1..16: mol_type = other DNA
aatcaaggcaaccgcg

SEQ ID NO: 20498 - DNA, 16 bp, synthetic construct
  misc_feature 1..16: note = synthetic [barcode part1]
  source 1..16: mol_type = other DNA
ccggaattagataggt

SEQ ID NO: 20499 - DNA, 16 bp, synthetic construct
  misc_feature 1..16: note = synthetic [barcode part1]
  source 1..16: mol_type = other DNA
ccaaggaaggagttag

SEQ ID NO: 20500 - DNA, 16 bp, synthetic construct
  misc_feature 1..16: note = synthetic [barcode part1]
  source 1..16: mol_type = other DNA
atccgaacttatcacc

SEQ ID NO: 20501 - DNA, 16 bp, synthetic construct
  misc_feature 1..16: note = synthetic [barcode part1]
  source 1..16: mol_type = other DNA
tgcggtcactaccttg

SEQ ID NO: 20502 - DNA, 16 bp, synthetic construct
  misc_feature 1..16: note = synthetic [barcode part1]
  source 1..16: mol_type = other DNA
acgattgtgcgtaacc

SEQ ID NO: 20503 - DNA, 16 bp, synthetic construct
  misc_feature 1..16: note = synthetic [barcode part1]
  source 1..16: mol_type = other DNA
gccttcaaggtacaac

SEQ ID NO: 20504 - DNA, 16 bp, synthetic construct
  misc_feature 1..16: note = synthetic [barcode part1]
  source 1..16: mol_type = other DNA
gattacaaccggcgtt

SEQ ID NO: 20505 - DNA, 16 bp, synthetic construct
  misc_feature 1..16: note = synthetic [barcode part1]
  source 1..16: mol_type = other DNA
acactagagtctgtgc

SEQ ID NO: 20506 - DNA, 16 bp, synthetic construct
  misc_feature 1..16: note = synthetic [barcode part1]
  source 1..16: mol_type = other DNA
actggatatctctgtc

SEQ ID NO: 20507 - DNA, 16 bp, synthetic construct
  misc_feature 1..16: note = synthetic [barcode part1]
  source 1..16: mol_type = other DNA
acctcacgtctgagtc

SEQ ID NO: 20508 - DNA, 16 bp, synthetic construct
  misc_feature 1..16: note = synthetic [barcode part1]
  source 1..16: mol_type = other DNA
ccaggtacgtcactct

SEQ ID NO: 20509 - DNA, 16 bp, synthetic construct
  misc_feature 1..16: note = synthetic [barcode part1]
  source 1..16: mol_type = other DNA
gatatcctaaggaacg

SEQ ID NO: 20510 - DNA, 16 bp, synthetic construct
  misc_feature 1..16: note = synthetic [barcode part1]
  source 1..16: mol_type = other DNA
cgacaaggagtagtag

SEQ ID NO: 20511 - DNA, 16 bp, synthetic construct
  misc_feature 1..16: note = synthetic [barcode part1]
  source 1..16: mol_type = other DNA
cgtagttagagtggcg

SEQ ID NO: 20512 - DNA, 16 bp, synthetic construct
  misc_feature 1..16: note = synthetic [barcode part1]
  source 1..16: mol_type = other DNA
tgcaggtgacagaatt

SEQ ID NO: 20513 - DNA, 16 bp, synthetic construct
  misc_feature 1..16: note = synthetic [barcode part1]
  source 1..16: mol_type = other DNA
ttacaccggattgtct

SEQ ID NO: 20514 - DNA, 16 bp, synthetic construct
  misc_feature 1..16: note = synthetic [barcode part1]
  source 1..16: mol_type = other DNA
tgagtctgtctcaccg

SEQ ID NO: 20515 - DNA, 16 bp, synthetic construct
  misc_feature 1..16: note = synthetic [barcode part1]
  source 1..16: mol_type = other DNA
gaagacgtctgtatcc

SEQ ID NO: 20516 - DNA, 16 bp, synthetic construct
  misc_feature 1..16: note = synthetic [barcode part1]
  source 1..16: mol_type = other DNA
gtcagtaacggagtgc

SEQ ID NO: 20517 - DNA, 16 bp, synthetic construct
  misc_feature 1..16: note = synthetic [barcode part1]
  source 1..16: mol_type = other DNA
caccagaacttgacgt

SEQ ID NO: 20518 - DNA, 16 bp, synthetic construct
  misc_feature 1..16: note = synthetic [barcode part1]
  source 1..16: mol_type = other DNA
taagtcaagtcgccgt

SEQ ID NO: 20519 - DNA, 16 bp, synthetic construct
  misc_feature 1..16: note = synthetic [barcode part1]
  source 1..16: mol_type = other DNA
aaccgacgttagtcgt

SEQ ID NO: 20520 - DNA, 16 bp, synthetic construct
  misc_feature 1..16: note = synthetic [barcode part1]
  source 1..16: mol_type = other DNA
ttctggttcagacgtt

SEQ ID NO: 20521 - DNA, 16 bp, synthetic construct
  misc_feature 1..16: note = synthetic [barcode part1]
  source 1..16: mol_type = other DNA
tccgtcagtcaagaac

SEQ ID NO: 20522 - DNA, 16 bp, synthetic construct
  misc_feature 1..16: note = synthetic [barcode part1]
  source 1..16: mol_type = other DNA
cgaacagattcgttcg

SEQ ID NO: 20523 - DNA, 16 bp, synthetic construct
  misc_feature 1..16: note = synthetic [barcode part1]
  source 1..16: mol_type = other DNA
cgatacagattgtgcc

SEQ ID NO: 20524 - DNA, 16 bp, synthetic construct
  misc_feature 1..16: note = synthetic [barcode part1]
  source 1..16: mol_type = other DNA
gtagtctgtctccacg

SEQ ID NO: 20525 - DNA, 16 bp, synthetic construct
  misc_feature 1..16: note = synthetic [barcode part1]
  source 1..16: mol_type = other DNA
gtcgtattaacggaag

SEQ ID NO: 20526 - DNA, 16 bp, synthetic construct
  misc_feature 1..16: note = synthetic [barcode part1]
  source 1..16: mol_type = other DNA
agaagatcgaggagtc

SEQ ID NO: 20527 - DNA, 16 bp, synthetic construct
  misc_feature 1..16: note = synthetic [barcode part1]
  source 1..16: mol_type = other DNA
gacaaccactggatct

SEQ ID NO: 20528 - DNA, 16 bp, synthetic construct
  misc_feature 1..16: note = synthetic [barcode part1]
  source 1..16: mol_type = other DNA
agtcacttgtccttag

SEQ ID NO: 20529 - DNA, 16 bp, synthetic construct
  misc_feature 1..16: note = synthetic [barcode part1]
  source 1..16: mol_type = other DNA
gccgatacgaggaact

SEQ ID NO: 20530 - DNA, 16 bp, synthetic construct
  misc_feature 1..16: note = synthetic [barcode part1]
  source 1..16: mol_type = other DNA
gcagttagaagagttc

SEQ ID NO: 20531 - DNA, 16 bp, synthetic construct
  misc_feature 1..16: note = synthetic [barcode part1]
  source 1..16: mol_type = other DNA
gagtaattcgacacag

SEQ ID NO: 20532 - DNA, 16 bp, synthetic construct
  misc_feature 1..16: note = synthetic [barcode part1]
  source 1..16: mol_type = other DNA
ttcgatccgtagttgt

SEQ ID NO: 20533 - DNA, 16 bp, synthetic construct
  misc_feature 1..16: note = synthetic [barcode part1]
  source 1..16: mol_type = other DNA
tgcgaagaatcactag

SEQ ID NO: 20534 - DNA, 16 bp, synthetic construct
  misc_feature 1..16: note = synthetic [barcode part1]
  source 1..16: mol_type = other DNA
aatccacacagtagag

SEQ ID NO: 20535 - DNA, 16 bp, synthetic construct
  misc_feature 1..16: note = synthetic [barcode part1]
  source 1..16: mol_type = other DNA
cggtcgtcttgacttg

SEQ ID NO: 20536 - DNA, 16 bp, synthetic construct
  misc_feature 1..16: note = synthetic [barcode part1]
  source 1..16: mol_type = other DNA
gcacggcacgttaatt

SEQ ID NO: 20537 - DNA, 16 bp, synthetic construct
  misc_feature 1..16: note = synthetic [barcode part1]
  source 1..16: mol_type = other DNA
aattcctgccacttcc

SEQ ID NO: 20538 - DNA, 16 bp, synthetic construct
  misc_feature 1..16: note = synthetic [barcode part1]
  source 1..16: mol_type = other DNA
aatcggttctcctctc

SEQ ID NO: 20539 - DNA, 16 bp, synthetic construct
  misc_feature 1..16: note = synthetic [barcode part1]
  source 1..16: mol_type = other DNA
taccgaacaagaacac

SEQ ID NO: 20540 - DNA, 16 bp, synthetic construct
  misc_feature 1..16: note = synthetic [barcode part1]
  source 1..16: mol_type = other DNA
tattgaggcctgacgt

SEQ ID NO: 20541 - DNA, 16 bp, synthetic construct
  misc_feature 1..16: note = synthetic [barcode part1]
  source 1..16: mol_type = other DNA
tcgtacactggtctcg

SEQ ID NO: 20542 - DNA, 16 bp, synthetic construct
  misc_feature 1..16: note = synthetic [barcode part1]
  source 1..16: mol_type = other DNA
cggtatagaggcagtc

SEQ ID NO: 20543 - DNA, 16 bp, synthetic construct
  misc_feature 1..16: note = synthetic [barcode part1]
  source 1..16: mol_type = other DNA
tggaggataacgcgtc

SEQ ID NO: 20544 - DNA, 16 bp, synthetic construct
  misc_feature 1..16: note = synthetic [barcode part1]
  source 1..16: mol_type = other DNA
gtcaacaggtgacgac

SEQ ID NO: 20545 - DNA, 16 bp, synthetic construct
  misc_feature 1..16: note = synthetic [barcode part1]
  source 1..16: mol_type = other DNA
atcacagtccgcctac

SEQ ID NO: 20546 - DNA, 16 bp, synthetic construct
  misc_feature 1..16: note = synthetic [barcode part1]
  source 1..16: mol_type = other DNA
gattgcgaaggttagt

SEQ ID NO: 20547 - DNA, 16 bp, synthetic construct
  misc_feature 1..16: note = synthetic [barcode part1]
  source 1..16: mol_type = other DNA
taaccgacacggtatc

SEQ ID NO: 20548 - DNA, 16 bp, synthetic construct
  misc_feature 1..16: note = synthetic [barcode part1]
  source 1..16: mol_type = other DNA
gaaggtcttagaggag

SEQ ID NO: 20549 - DNA, 16 bp, synthetic construct
  misc_feature 1..16: note = synthetic [barcode part1]
  source 1..16: mol_type = other DNA
cagtggcctaacaatc

SEQ ID NO: 20550 - DNA, 16 bp, synthetic construct
  misc_feature 1..16: note = synthetic [barcode part1]
  source 1..16: mol_type = other DNA
ttaactcggacgcctc

SEQ ID NO: 20551 - DNA, 16 bp, synthetic construct
  misc_feature 1..16: note = synthetic [barcode part1]
  source 1..16: mol_type = other DNA
gagttgccgttcctgt

SEQ ID NO: 20552 - DNA, 16 bp, synthetic construct
  misc_feature 1..16: note = synthetic [barcode part1]
  source 1..16: mol_type = other DNA
gtctgccttcaggact

SEQ ID NO: 20553 - DNA, 16 bp, synthetic construct
  misc_feature 1..16: note = synthetic [barcode part1]
  source 1..16: mol_type = other DNA
gtgagtgataacgttg

SEQ ID NO: 20554 - DNA, 16 bp, synthetic construct
  misc_feature 1..16: note = synthetic [barcode part1]
  source 1..16: mol_type = other DNA
gccgaatcgttgaact

SEQ ID NO: 20555 - DNA, 16 bp, synthetic construct
  misc_feature 1..16: note = synthetic [barcode part1]
  source 1..16: mol_type = other DNA
actctactccagtcct

SEQ ID NO: 20556 - DNA, 16 bp, synthetic construct
  misc_feature 1..16: note = synthetic [barcode part1]
  source 1..16: mol_type = other DNA
tccgttgttctcaacc

SEQ ID NO: 20557 - DNA, 16 bp, synthetic construct
  misc_feature 1..16: note = synthetic [barcode part1]
  source 1..16: mol_type = other DNA
gtacgacttgattcct

SEQ ID NO: 20558 - DNA, 16 bp, synthetic construct
  misc_feature 1..16: note = synthetic [barcode part1]
  source 1..16: mol_type = other DNA
ttagagtgcggacggt

SEQ ID NO: 20559 - DNA, 16 bp, synthetic construct
  misc_feature 1..16: note = synthetic [barcode part1]
  source 1..16: mol_type = other DNA
ttggtgtaccaacgtg

SEQ ID NO: 20560 - DNA, 16 bp, synthetic construct
  misc_feature 1..16: note = synthetic [barcode part1]
  source 1..16: mol_type = other DNA
aataacttctcgcgtc

SEQ ID NO: 20561 - DNA, 16 bp, synthetic construct
  misc_feature 1..16: note = synthetic [barcode part1]
  source 1..16: mol_type = other DNA
tggtgattcggtagtc

SEQ ID NO: 20562 - DNA, 16 bp, synthetic construct
  misc_feature 1..16: note = synthetic [barcode part1]
  source 1..16: mol_type = other DNA
tatatcaacgcgccag

SEQ ID NO: 20563 - DNA, 16 bp, synthetic construct
  misc_feature 1..16: note = synthetic [barcode part1]
  source 1..16: mol_type = other DNA
ttgacaggacagttcc

SEQ ID NO: 20564 - DNA, 16 bp, synthetic construct
  misc_feature 1..16: note = synthetic [barcode part1]
  source 1..16: mol_type = other DNA
gaactgcagtggtctt

SEQ ID NO: 20565 - DNA, 16 bp, synthetic construct
  misc_feature 1..16: note = synthetic [barcode part1]
  source 1..16: mol_type = other DNA
agatcacaggcgtgac

SEQ ID NO: 20566 - DNA, 16 bp, synthetic construct
  misc_feature 1..16: note = synthetic [barcode part1]
  source 1..16: mol_type = other DNA
gcgataggaatattcg

SEQ ID NO: 20567 - DNA, 16 bp, synthetic construct
  misc_feature 1..16: note = synthetic [barcode part1]
  source 1..16: mol_type = other DNA
tacgcaaggtagtggc

SEQ ID NO: 20568 - DNA, 16 bp, synthetic construct
  misc_feature 1..16: note = synthetic [barcode part1]
  source 1..16: mol_type = other DNA
gtgtacggttgatcgt

SEQ ID NO: 20569 - DNA, 16 bp, synthetic construct
  misc_feature 1..16: note = synthetic [barcode part1]
  source 1..16: mol_type = other DNA
agttcagtggtccaac

SEQ ID NO: 20570 - DNA, 16 bp, synthetic construct
  misc_feature 1..16: note = synthetic [barcode part1]
  source 1..16: mol_type = other DNA
tcacagataggaagtc

SEQ ID NO: 20571 - DNA, 16 bp, synthetic construct
  misc_feature 1..16: note = synthetic [barcode part1]
  source 1..16: mol_type = other DNA
tcgagttgattcgacg

SEQ ID NO: 20572 - DNA, 16 bp, synthetic construct
  misc_feature 1..16: note = synthetic [barcode part1]
  source 1..16: mol_type = other DNA
tcgagtacggatactc

SEQ ID NO: 20573 - DNA, 16 bp, synthetic construct
  misc_feature 1..16: note = synthetic [barcode part1]
  source 1..16: mol_type = other DNA
tggaggttccggtaag

SEQ ID NO: 20574 - DNA, 16 bp, synthetic construct
  misc_feature 1..16: note = synthetic [barcode part1]
  source 1..16: mol_type = other DNA
agtactccgaggagtg

SEQ ID NO: 20575 - DNA, 16 bp, synthetic construct
  misc_feature 1..16: note = synthetic [barcode part1]
  source 1..16: mol_type = other DNA
gcaacttattcctgtg

SEQ ID NO: 20576 - DNA, 16 bp, synthetic construct
  misc_feature 1..16: note = synthetic [barcode part1]
  source 1..16: mol_type = other DNA
tcaggattatctgtcc

SEQ ID NO: 20577 - DNA, 16 bp, synthetic construct
  misc_feature 1..16: note = synthetic [barcode part1]
  source 1..16: mol_type = other DNA
acgccacgcaagtaag

SEQ ID NO: 20578 - DNA, 16 bp, synthetic construct
  misc_feature 1..16: note = synthetic [barcode part1]
  source 1..16: mol_type = other DNA
attctcttgatacgcg

SEQ ID NO: 20579 - DNA, 16 bp, synthetic construct
  misc_feature 1..16: note = synthetic [barcode part1]
  source 1..16: mol_type = other DNA
cgaatctattccgttg

SEQ ID NO: 20580 - DNA, 16 bp, synthetic construct
  misc_feature 1..16: note = synthetic [barcode part1]
  source 1..16: mol_type = other DNA
acttggtatcgagtcg

SEQ ID NO: 20581 - DNA, 16 bp, synthetic construct
  misc_feature 1..16: note = synthetic [barcode part1]
  source 1..16: mol_type = other DNA
atcgttccggacacct

SEQ ID NO: 20582 - DNA, 16 bp, synthetic construct
  misc_feature 1..16: note = synthetic [barcode part1]
  source 1..16: mol_type = other DNA
ccggcgattattaggt

SEQ ID NO: 20583 - DNA, 16 bp, synthetic construct
  misc_feature 1..16: note = synthetic [barcode part1]
  source 1..16: mol_type = other DNA
gtagtctggacgcaag

SEQ ID NO: 20584 - DNA, 16 bp, synthetic construct
  misc_feature 1..16: note = synthetic [barcode part1]
  source 1..16: mol_type = other DNA
ataactaccttggtcc

SEQ ID NO: 20585 - DNA, 16 bp, synthetic construct
  misc_feature 1..16: note = synthetic [barcode part1]
  source 1..16: mol_type = other DNA
cgcgttctgaattact

SEQ ID NO: 20586 - DNA, 16 bp, synthetic construct
  misc_feature 1..16: note = synthetic [barcode part1]
  source 1..16: mol_type = other DNA
gacgtgacagaagtag

SEQ ID NO: 20587 - DNA, 16 bp, synthetic construct
  misc_feature 1..16: note = synthetic [barcode part1]
  source 1..16: mol_type = other DNA
acaggtgaagtaggtg

SEQ ID NO: 20588 - DNA, 16 bp, synthetic construct
  misc_feature 1..16: note = synthetic [barcode part1]
  source 1..16: mol_type = other DNA
tgagtcgcgacttagt

SEQ ID NO: 20589 - DNA, 16 bp, synthetic construct
  misc_feature 1..16: note = synthetic [barcode part1]
  source 1..16: mol_type = other DNA
acggttaatcacgtgc

SEQ ID NO: 20590 - DNA, 16 bp, synthetic construct
  misc_feature 1..16: note = synthetic [barcode part1]
  source 1..16: mol_type = other DNA
cacacaacgttccgtc

SEQ ID NO: 20591 - DNA, 16 bp, synthetic construct
  misc_feature 1..16: note = synthetic [barcode part1]
  source 1..16: mol_type = other DNA
ttcaggaggtcgattc

SEQ ID NO: 20592 - DNA, 16 bp, synthetic construct
  misc_feature 1..16: note = synthetic [barcode part1]
  source 1..16: mol_type = other DNA
caggttacttcacgcc

SEQ ID NO: 20593 - DNA, 16 bp, synthetic construct
  misc_feature 1..16: note = synthetic [barcode part1]
  source 1..16: mol_type = other DNA
taagaggaagaggcct

SEQ ID NO: 20594 - DNA, 16 bp, synthetic construct
  misc_feature 1..16: note = synthetic [barcode part1]
  source 1..16: mol_type = other DNA
aacagttcacgagagt

SEQ ID NO: 20595 - DNA, 16 bp, synthetic construct
  misc_feature 1..16: note = synthetic [barcode part1]
  source 1..16: mol_type = other DNA
atcgttgtcaggtcag

SEQ ID NO: 20596 - DNA, 16 bp, synthetic construct
  misc_feature 1..16: note = synthetic [barcode part1]
  source 1..16: mol_type = other DNA
aacaacacctatcgcg

SEQ ID NO: 20597 - DNA, 16 bp, synthetic construct
  misc_feature 1..16: note = synthetic [barcode part1]
  source 1..16: mol_type = other DNA
atcacacacgtaaccg

SEQ ID NO: 20598 - DNA, 16 bp, synthetic construct
  misc_feature 1..16: note = synthetic [barcode part1]
  source 1..16: mol_type = other DNA
ccagtataggattgag

SEQ ID NO: 20599 - DNA, 16 bp, synthetic construct
  misc_feature 1..16: note = synthetic [barcode part1]
  source 1..16: mol_type = other DNA
gcgttcgagtatctag

SEQ ID NO: 20600 - DNA, 16 bp, synthetic construct
  misc_feature 1..16: note = synthetic [barcode part1]
  source 1..16: mol_type = other DNA
attctctgcgttagtg

SEQ ID NO: 20601 - DNA, 16 bp, synthetic construct
  misc_feature 1..16: note = synthetic [barcode part1]
  source 1..16: mol_type = other DNA
aacggtgtgtccagag

SEQ ID NO: 20602 - DNA, 16 bp, synthetic construct
  misc_feature 1..16: note = synthetic [barcode part1]
  source 1..16: mol_type = other DNA
ttatacaggtctctcg

SEQ ID NO: 20603 - DNA, 16 bp, synthetic construct
  misc_feature 1..16: note = synthetic [barcode part1]
  source 1..16: mol_type = other DNA
aggcgagtctggagtt

SEQ ID NO: 20604 - DNA, 16 bp, synthetic construct
  misc_feature 1..16: note = synthetic [barcode part1]
  source 1..16: mol_type = other DNA
agatcaaccgaggaag

SEQ ID NO: 20605 - DNA, 16 bp, synthetic construct
  misc_feature 1..16: note = synthetic [barcode part1]
  source 1..16: mol_type = other DNA
aagaggataactggcg

SEQ ID NO: 20606 - DNA, 16 bp, synthetic construct
  misc_feature 1..16: note = synthetic [barcode part1]
  source 1..16: mol_type = other DNA
ccagtgcctaatcctg

SEQ ID NO: 20607 - DNA, 16 bp, synthetic construct
  misc_feature 1..16: note = synthetic [barcode part1]
  source 1..16: mol_type = other DNA
aactcggtggcaatct

SEQ ID NO: 20608 - DNA, 16 bp, synthetic construct
  misc_feature 1..16: note = synthetic [barcode part1]
  source 1..16: mol_type = other DNA
gcgtcaatcggatact

SEQ ID NO: 20609 - DNA, 16 bp, synthetic construct
  misc_feature 1..16: note = synthetic [barcode part1]
  source 1..16: mol_type = other DNA
tctccagaactgagac

SEQ ID NO: 20610 - DNA, 16 bp, synthetic construct
  misc_feature 1..16: note = synthetic [barcode part1]
  source 1..16: mol_type = other DNA
ttacctacggaatctc

SEQ ID NO: 20611 - DNA, 16 bp, synthetic construct
  misc_feature 1..16: note = synthetic [barcode part1]
  source 1..16: mol_type = other DNA
ccgtgaacgttctatt

SEQ ID NO: 20612 - DNA, 16 bp, synthetic construct
  misc_feature 1..16: note = synthetic [barcode part1]
  source 1..16: mol_type = other DNA
agaggacaagtcgaac

SEQ ID NO: 20613 - DNA, 16 bp, synthetic construct
  misc_feature 1..16: note = synthetic [barcode part1]
  source 1..16: mol_type = other DNA
ccttgactcgacacac

SEQ ID NO: 20614 - DNA, 16 bp, synthetic construct
  misc_feature 1..16: note = synthetic [barcode part1]
  source 1..16: mol_type = other DNA
ccggacaacgatagac

SEQ ID NO: 20615 - DNA, 16 bp, synthetic construct
  misc_feature 1..16: note = synthetic [barcode part1]
  source 1..16: mol_type = other DNA
gttgaacaggtacaac

SEQ ID NO: 20616 - DNA, 16 bp, synthetic construct
  misc_feature 1..16: note = synthetic [barcode part1]
  source 1..16: mol_type = other DNA
gataacacggacaccg

SEQ ID NO: 20617 - DNA, 16 bp, synthetic construct
  misc_feature 1..16: note = synthetic [barcode part1]
  source 1..16: mol_type = other DNA
ccaactaggtcaactg

SEQ ID NO: 20618 - DNA, 16 bp, synthetic construct
  misc_feature 1..16: note = synthetic [barcode part1]
  source 1..16: mol_type = other DNA
ccggtaacaggttact

SEQ ID NO: 20619 - DNA, 16 bp, synthetic construct
  misc_feature 1..16: note = synthetic [barcode part1]
  source 1..16: mol_type = other DNA
tagaggacacgcgact

SEQ ID NO: 20620 - DNA, 16 bp, synthetic construct
  misc_feature 1..16: note = synthetic [barcode part1]
  source 1..16: mol_type = other DNA
tctggaacaatcggtc

SEQ ID NO: 20621 - DNA, 16 bp, synthetic construct
  misc_feature 1..16: note = synthetic [barcode part1]
  source 1..16: mol_type = other DNA
atcaggtacgatccac

SEQ ID NO: 20622 - DNA, 16 bp, synthetic construct
  misc_feature 1..16: note = synthetic [barcode part1]
  source 1..16: mol_type = other DNA
gttgacacaccttatc

SEQ ID NO: 20623 - DNA, 16 bp, synthetic construct
  misc_feature 1..16: note = synthetic [barcode part1]
  source 1..16: mol_type = other DNA
aggaatagagtcactc

SEQ ID NO: 20624 - DNA, 16 bp, synthetic construct
  misc_feature 1..16: note = synthetic [barcode part1]
  source 1..16: mol_type = other DNA
tgatatacgcgccaac

SEQ ID NO: 20625 - DNA, 16 bp, synthetic construct
  misc_feature 1..16: note = synthetic [barcode part1]
  source 1..16: mol_type = other DNA
gtgagtgagtgtcgtg

SEQ ID NO: 20626 - DNA, 16 bp, synthetic construct
  misc_feature 1..16: note = synthetic [barcode part1]
  source 1..16: mol_type = other DNA
gtctaacgccagattg

SEQ ID NO: 20627 - DNA, 16 bp, synthetic construct
  misc_feature 1..16: note = synthetic [barcode part1]
  source 1..16: mol_type = other DNA
tacgactagaacggcg

SEQ ID NO: 20628 - DNA, 16 bp, synthetic construct
  misc_feature 1..16: note = synthetic [barcode part1]
  source 1..16: mol_type = other DNA
cggtaacctctgtatt

SEQ ID NO: 20629 - DNA, 16 bp, synthetic construct
  misc_feature 1..16: note = synthetic [barcode part1]
  source 1..16: mol_type = other DNA
ccaataccgtgtagtg

SEQ ID NO: 20630 - DNA, 16 bp, synthetic construct
  misc_feature 1..16: note = synthetic [barcode part1]
  source 1..16: mol_type = other DNA
cctctgtcttgtgttg

SEQ ID NO: 20631 - DNA, 16 bp, synthetic construct
  misc_feature 1..16: note = synthetic [barcode part1]
  source 1..16: mol_type = other DNA
tggtgcgttagtgtac

SEQ ID NO: 20632 - DNA, 16 bp, synthetic construct
  misc_feature 1..16: note = synthetic [barcode part1]
  source 1..16: mol_type = other DNA
gagtaggttcaggacc

SEQ ID NO: 20633 - DNA, 16 bp, synthetic construct
  misc_feature 1..16: note = synthetic [barcode part1]
  source 1..16: mol_type = other DNA
ttgttcgcctaaggtt

SEQ ID NO: 20634 - DNA, 16 bp, synthetic construct
  misc_feature 1..16: note = synthetic [barcode part1]
  source 1..16: mol_type = other DNA
tcgaggttccgtctgt

SEQ ID NO: 20635 - DNA, 16 bp, synthetic construct
  misc_feature 1..16: note = synthetic [barcode part1]
  source 1..16: mol_type = other DNA
cgtagtagttccgaac

SEQ ID NO: 20636 - DNA, 16 bp, synthetic construct
  misc_feature 1..16: note = synthetic [barcode part1]
  source 1..16: mol_type = other DNA
taagaactggatcacg

SEQ ID NO: 20637 - DNA, 16 bp, synthetic construct
  misc_feature 1..16: note = synthetic [barcode part1]
  source 1..16: mol_type = other DNA
gttctagatcgcaacg

SEQ ID NO: 20638 - DNA, 16 bp, synthetic construct
  misc_feature 1..16: note = synthetic [barcode part1]
  source 1..16: mol_type = other DNA
cggcgcagagatagtt

SEQ ID NO: 20639 - DNA, 16 bp, synthetic construct
  misc_feature 1..16: note = synthetic [barcode part1]
  source 1..16: mol_type = other DNA
tagactccggaataag

SEQ ID NO: 20640 - DNA, 16 bp, synthetic construct
  misc_feature 1..16: note = synthetic [barcode part1]
  source 1..16: mol_type = other DNA
tacgtccttgtactcc

SEQ ID NO: 20641 - DNA, 16 bp, synthetic construct
  misc_feature 1..16: note = synthetic [barcode part1]
  source 1..16: mol_type = other DNA
cgttgaggtgattcgt

SEQ ID NO: 20642 - DNA, 16 bp, synthetic construct
  misc_feature 1..16: note = synthetic [barcode part1]
  source 1..16: mol_type = other DNA
caattcgttcgacgag

SEQ ID NO: 20643 - DNA, 16 bp, synthetic construct
  misc_feature 1..16: note = synthetic [barcode part1]
  source 1..16: mol_type = other DNA
atataacgcgtaccgc

SEQ ID NO: 20644 - DNA, 16 bp, synthetic construct
  misc_feature 1..16: note = synthetic [barcode part1]
  source 1..16: mol_type = other DNA
ccaacggagtataggc

SEQ ID NO: 20645 - DNA, 16 bp, synthetic construct
  misc_feature 1..16: note = synthetic [barcode part1]
  source 1..16: mol_type = other DNA
cggcactcactataag

SEQ ID NO: 20646 - DNA, 16 bp, synthetic construct
  misc_feature 1..16: note = synthetic [barcode part1]
  source 1..16: mol_type = other DNA
gttcgtcaatattgcc

SEQ ID NO: 20647 - DNA, 16 bp, synthetic construct
  misc_feature 1..16: note = synthetic [barcode part1]
  source 1..16: mol_type = other DNA
gcgtatacgtatacgc

SEQ ID NO: 20648 - DNA, 16 bp, synthetic construct
  misc_feature 1..16: note = synthetic [barcode part1]
  source 1..16: mol_type = other DNA
cgtccttgtataggag

SEQ ID NO: 20649 - DNA, 16 bp, synthetic construct
  misc_feature 1..16: note = synthetic [barcode part1]
  source 1..16: mol_type = other DNA
gcggttaggaaccagt

SEQ ID NO: 20650 - DNA, 16 bp, synthetic construct
  misc_feature 1..16: note = synthetic [barcode part1]
  source 1..16: mol_type = other DNA
ttgtgagtggacctac

SEQ ID NO: 20651 - DNA, 16 bp, synthetic construct
  misc_feature 1..16: note = synthetic [barcode part1]
  source 1..16: mol_type = other DNA
cctagatcgccaatag

SEQ ID NO: 20652 - DNA, 16 bp, synthetic construct
  misc_feature 1..16: note = synthetic [barcode part1]
  source 1..16: mol_type = other DNA
cctgttgtgtgaattc

SEQ ID NO: 20653 - DNA, 16 bp, synthetic construct
  misc_feature 1..16: note = synthetic [barcode part1]
  source 1..16: mol_type = other DNA
atactggaccgccttc

SEQ ID NO: 20654 - DNA, 16 bp, synthetic construct
  misc_feature 1..16: note = synthetic [barcode part1]
  source 1..16: mol_type = other DNA
tacctcgttacaggcc

SEQ ID NO: 20655 - DNA, 16 bp, synthetic construct
  misc_feature 1..16: note = synthetic [barcode part1]
  source 1..16: mol_type = other DNA
atcctacctgtcacct

SEQ ID NO: 20656 - DNA, 16 bp, synthetic construct
  misc_feature 1..16: note = synthetic [barcode part1]
  source 1..16: mol_type = other DNA
cgtgtccttgtactct

SEQ ID NO: 20657 - DNA, 16 bp, synthetic construct
  misc_feature 1..16: note = synthetic [barcode part1]
  source 1..16: mol_type = other DNA
gttacctgcgaatctt

SEQ ID NO: 20658 - DNA, 16 bp, synthetic construct
  misc_feature 1..16: note = synthetic [barcode part1]
  source 1..16: mol_type = other DNA
ttccggtctggtgtac

SEQ ID NO: 20659 - DNA, 16 bp, synthetic construct
  misc_feature 1..16: note = synthetic [barcode part1]
  source 1..16: mol_type = other DNA
tgtacacaccagtcag

SEQ ID NO: 20660 - DNA, 16 bp, synthetic construct
  misc_feature 1..16: note = synthetic [barcode part1]
  source 1..16: mol_type = other DNA
tacttgtgacaggcac

SEQ ID NO: 20661 - DNA, 16 bp, synthetic construct
  misc_feature 1..16: note = synthetic [barcode part1]
  source 1..16: mol_type = other DNA
tcacgccttcggtagt

SEQ ID NO: 20662 - DNA, 16 bp, synthetic construct
  misc_feature 1..16: note = synthetic [barcode part1]
  source 1..16: mol_type = other DNA
tacaagtactctgcct

SEQ ID NO: 20663 - DNA, 16 bp, synthetic construct
  misc_feature 1..16: note = synthetic [barcode part1]
  source 1..16: mol_type = other DNA
tgacaacacacgaggc

SEQ ID NO: 20664 - DNA, 16 bp, synthetic construct
  misc_feature 1..16: note = synthetic [barcode part1]
  source 1..16: mol_type = other DNA
acactaggatcacacc

SEQ ID NO: 20665 - DNA, 16 bp, synthetic construct
  misc_feature 1..16: note = synthetic [barcode part1]
  source 1..16: mol_type = other DNA
tcagtaccagttgcag

SEQ ID NO: 20666 - DNA, 16 bp, synthetic construct
  misc_feature 1..16: note = synthetic [barcode part1]
  source 1..16: mol_type = other DNA
gataccagatcgatcc

SEQ ID NO: 20667 - DNA, 16 bp, synthetic construct
  misc_feature 1..16: note = synthetic [barcode part1]
  source 1..16: mol_type = other DNA
attcggtaggaacgcg

SEQ ID NO: 20668 - DNA, 16 bp, synthetic construct
  misc_feature 1..16: note = synthetic [barcode part1]
  source 1..16: mol_type = other DNA
tagatcacacggaagt

SEQ ID NO: 20669 - DNA, 16 bp, synthetic construct
  misc_feature 1..16: note = synthetic [barcode part1]
  source 1..16: mol_type = other DNA
cgttccaggacttacc

SEQ ID NO: 20670 - DNA, 16 bp, synthetic construct
  misc_feature 1..16: note = synthetic [barcode part1]
  source 1..16: mol_type = other DNA
atcacgtcagtctccg

SEQ ID NO: 20671 - DNA, 16 bp, synthetic construct
  misc_feature 1..16: note = synthetic [barcode part1]
  source 1..16: mol_type = other DNA
cctctaacacgtagtt

SEQ ID NO: 20672 - DNA, 16 bp, synthetic construct
  misc_feature 1..16: note = synthetic [barcode part1]
  source 1..16: mol_type = other DNA
taggtaagatactgcg

SEQ ID NO: 20673 - DNA, 16 bp, synthetic construct
  misc_feature 1..16: note = synthetic [barcode part1]
  source 1..16: mol_type = other DNA
tgagtggtacctactg

SEQ ID NO: 20674 - DNA, 16 bp, synthetic construct
  misc_feature 1..16: note = synthetic [barcode part1]
  source 1..16: mol_type = other DNA
tcgcagagtagtcact

SEQ ID NO: 20675 - DNA, 16 bp, synthetic construct
  misc_feature 1..16: note = synthetic [barcode part1]
  source 1..16: mol_type = other DNA
taggcagtagagtccg

SEQ ID NO: 20676 - DNA, 16 bp, synthetic construct
  misc_feature 1..16: note = synthetic [barcode part1]
  source 1..16: mol_type = other DNA
gatagaagtgtccggc

SEQ ID NO: 20677 - DNA, 16 bp, synthetic construct
  misc_feature 1..16: note = synthetic [barcode part1]
  source 1..16: mol_type = other DNA
gtgtcggattggagac

SEQ ID NO: 20678 - DNA, 16 bp, synthetic construct
  misc_feature 1..16: note = synthetic [barcode part1]
  source 1..16: mol_type = other DNA
tagtggtagtcactgc

SEQ ID NO: 20679 - DNA, 16 bp, synthetic construct
  misc_feature 1..16: note = synthetic [barcode part1]
  source 1..16: mol_type = other DNA
gatacgtacaccgatc

SEQ ID NO: 20680 - DNA, 16 bp, synthetic construct
  misc_feature 1..16: note = synthetic [barcode part1]
  source 1..16: mol_type = other DNA
gtctagtgagacgcag

SEQ ID NO: 20681 - DNA, 16 bp, synthetic construct
  misc_feature 1..16: note = synthetic [barcode part1]
  source 1..16: mol_type = other DNA
gacgatccgtacctct

SEQ ID NO: 20682 - DNA, 16 bp, synthetic construct
  misc_feature 1..16: note = synthetic [barcode part1]
  source 1..16: mol_type = other DNA
gaatagatccaaggtc

SEQ ID NO: 20683 - DNA, 16 bp, synthetic construct
  misc_feature 1..16: note = synthetic [barcode part1]
  source 1..16: mol_type = other DNA
ttgccgtctcgagtac

SEQ ID NO: 20684 - DNA, 16 bp, synthetic construct
  misc_feature 1..16: note = synthetic [barcode part1]
  source 1..16: mol_type = other DNA
cacgagtgacaggact

SEQ ID NO: 20685 - DNA, 16 bp, synthetic construct
  misc_feature 1..16: note = synthetic [barcode part1]
  source 1..16: mol_type = other DNA
aggagtgaataactcc

SEQ ID NO: 20686 - DNA, 16 bp, synthetic construct
  misc_feature 1..16: note = synthetic [barcode part1]
  source 1..16: mol_type = other DNA
tctcggcgtacagtct

SEQ ID NO: 20687 - DNA, 16 bp, synthetic construct
  misc_feature 1..16: note = synthetic [barcode part1]
  source 1..16: mol_type = other DNA
gaccttcggaagttac

SEQ ID NO: 20688 - DNA, 16 bp, synthetic construct
  misc_feature 1..16: note = synthetic [barcode part1]
  source 1..16: mol_type = other DNA
agaagttgaaggaccg

SEQ ID NO: 20689 - DNA, 16 bp, synthetic construct
  misc_feature 1..16: note = synthetic [barcode part1]
  source 1..16: mol_type = other DNA
ttggcagtagaggcgt

SEQ ID NO: 20690 - DNA, 16 bp, synthetic construct
  misc_feature 1..16: note = synthetic [barcode part1]
  source 1..16: mol_type = other DNA
ccagtgatactcttgt

SEQ ID NO: 20691 - DNA, 16 bp, synthetic construct
  misc_feature 1..16: note = synthetic [barcode part1]
  source 1..16: mol_type = other DNA
tcagagtgtgaacggc

SEQ ID NO: 20692 - DNA, 16 bp, synthetic construct
  misc_feature 1..16: note = synthetic [barcode part1]
  source 1..16: mol_type = other DNA
cgtggatcttactact

SEQ ID NO: 20693 - DNA, 16 bp, synthetic construct
  misc_feature 1..16: note = synthetic [barcode part1]
  source 1..16: mol_type = other DNA
tcgaaggtaactcctg

SEQ ID NO: 20694 - DNA, 16 bp, synthetic construct
  misc_feature 1..16: note = synthetic [barcode part1]
  source 1..16: mol_type = other DNA
gccacctatcctatct

SEQ ID NO: 20695 - DNA, 16 bp, synthetic construct
  misc_feature 1..16: note = synthetic [barcode part1]
  source 1..16: mol_type = other DNA
gtatacctattccacg

SEQ ID NO: 20696 - DNA, 16 bp, synthetic construct
  misc_feature 1..16: note = synthetic [barcode part1]
  source 1..16: mol_type = other DNA
tgcagtacggaattcc

SEQ ID NO: 20697 - DNA, 16 bp, synthetic construct
  misc_feature 1..16: note = synthetic [barcode part1]
  source 1..16: mol_type = other DNA
tctagaggattggtcc

SEQ ID NO: 20698 - DNA, 16 bp, synthetic construct
  misc_feature 1..16: note = synthetic [barcode part1]
  source 1..16: mol_type = other DNA
cgccttagacactcac

SEQ ID NO: 20699 - DNA, 16 bp, synthetic construct
  misc_feature 1..16: note = synthetic [barcode part1]
  source 1..16: mol_type = other DNA
attacctgtctgtgac

SEQ ID NO: 20700 - DNA, 16 bp, synthetic construct
  misc_feature 1..16: note = synthetic [barcode part1]
  source 1..16: mol_type = other DNA
gatcgttgttcggtag

SEQ ID NO: 20701 - DNA, 16 bp, synthetic construct
  misc_feature 1..16: note = synthetic [barcode part1]
  source 1..16: mol_type = other DNA
gcaacttctcgcgttg

SEQ ID NO: 20702 - DNA, 16 bp, synthetic construct
  misc_feature 1..16: note = synthetic [barcode part1]
  source 1..16: mol_type = other DNA
tcggattgtattctcg

SEQ ID NO: 20703 - DNA, 16 bp, synthetic construct
  misc_feature 1..16: note = synthetic [barcode part1]
  source 1..16: mol_type = other DNA
acgagagaatcactac

SEQ ID NO: 20704 - DNA, 16 bp, synthetic construct
  misc_feature 1..16: note = synthetic [barcode part1]
  source 1..16: mol_type = other DNA
cagagagttgaaggac

SEQ ID NO: 20705 - DNA, 16 bp, synthetic construct
  misc_feature 1..16: note = synthetic [barcode part1]
  source 1..16: mol_type = other DNA
ataggcgagactccag

SEQ ID NO: 20706 - DNA, 16 bp, synthetic construct
  misc_feature 1..16: note = synthetic [barcode part1]
  source 1..16: mol_type = other DNA
cgacaagtaggcactg

SEQ ID NO: 20707 - DNA, 16 bp, synthetic construct
  misc_feature 1..16: note = synthetic [barcode part1]
  source 1..16: mol_type = other DNA
tcttacagtcgtcaac

SEQ ID NO: 20708 - DNA, 16 bp, synthetic construct
  misc_feature 1..16: note = synthetic [barcode part1]
  source 1..16: mol_type = other DNA
ttaggcgtggacactt

SEQ ID NO: 20709 - DNA, 16 bp, synthetic construct
  misc_feature 1..16: note = synthetic [barcode part1]
  source 1..16: mol_type = other DNA
actacttaggtctacc

SEQ ID NO: 20710 - DNA, 16 bp, synthetic construct
  misc_feature 1..16: note = synthetic [barcode part1]
  source 1..16: mol_type = other DNA
actgtacgtacggttg

SEQ ID NO: 20711 - DNA, 16 bp, synthetic construct
  misc_feature 1..16: note = synthetic [barcode part1]
  source 1..16: mol_type = other DNA
aataaggaatccgcac

SEQ ID NO: 20712 - DNA, 16 bp, synthetic construct
  misc_feature 1..16: note = synthetic [barcode part1]
  source 1..16: mol_type = other DNA
gtgttacgtccacctg

SEQ ID NO: 20713 - DNA, 16 bp, synthetic construct
  misc_feature 1..16: note = synthetic [barcode part1]
  source 1..16: mol_type = other DNA
taggtgccttccaatt

SEQ ID NO: 20714 - DNA, 16 bp, synthetic construct
  misc_feature 1..16: note = synthetic [barcode part1]
  source 1..16: mol_type = other DNA
cagaattcggccagtt

SEQ ID NO: 20715 - DNA, 16 bp, synthetic construct
  misc_feature 1..16: note = synthetic [barcode part1]
  source 1..16: mol_type = other DNA
cggcctctaatacgtc

SEQ ID NO: 20716 - DNA, 16 bp, synthetic construct
  misc_feature 1..16: note = synthetic [barcode part1]
  source 1..16: mol_type = other DNA
aattccggtccactcg

SEQ ID NO: 20717 - DNA, 16 bp, synthetic construct
  misc_feature 1..16: note = synthetic [barcode part1]
  source 1..16: mol_type = other DNA
tactggtgtcacacag

SEQ ID NO: 20718 - DNA, 16 bp, synthetic construct
  misc_feature 1..16: note = synthetic [barcode part1]
  source 1..16: mol_type = other DNA
gtccgacaactgttag

SEQ ID NO: 20719 - DNA, 16 bp, synthetic construct
  misc_feature 1..16: note = synthetic [barcode part1]
  source 1..16: mol_type = other DNA
cagttactacttcacg

SEQ ID NO: 20720 - DNA, 16 bp, synthetic construct
  misc_feature 1..16: note = synthetic [barcode part1]
  source 1..16: mol_type = other DNA
gcagagactaatagtc

SEQ ID NO: 20721 - DNA, 16 bp, synthetic construct
  misc_feature 1..16: note = synthetic [barcode part1]
  source 1..16: mol_type = other DNA
accagttcgacgttag

SEQ ID NO: 20722 - DNA, 16 bp, synthetic construct
  misc_feature 1..16: note = synthetic [barcode part1]
  source 1..16: mol_type = other DNA
tccttctaattccggc

SEQ ID NO: 20723 - DNA, 16 bp, synthetic construct
  misc_feature 1..16: note = synthetic [barcode part1]
  source 1..16: mol_type = other DNA
acaattgccagtcctt

SEQ ID NO: 20724 - DNA, 16 bp, synthetic construct
  misc_feature 1..16: note = synthetic [barcode part1]
  source 1..16: mol_type = other DNA
agtcggatcacgcaag

SEQ ID NO: 20725 - DNA, 16 bp, synthetic construct
  misc_feature 1..16: note = synthetic [barcode part1]
  source 1..16: mol_type = other DNA
tattgcgatacgcacg

SEQ ID NO: 20726 - DNA, 16 bp, synthetic construct
  misc_feature 1..16: note = synthetic [barcode part1]
  source 1..16: mol_type = other DNA
tgaccgcagatcgaag

SEQ ID NO: 20727 - DNA, 16 bp, synthetic construct
  misc_feature 1..16: note = synthetic [barcode part1]
  source 1..16: mol_type = other DNA
aggagaacctcagaag

SEQ ID NO: 20728 - DNA, 16 bp, synthetic construct
  misc_feature 1..16: note = synthetic [barcode part1]
  source 1..16: mol_type = other DNA
tcgaatccacggagag

SEQ ID NO: 20729 - DNA, 16 bp, synthetic construct
  misc_feature 1..16: note = synthetic [barcode part1]
  source 1..16: mol_type = other DNA
gtggattgagagtcgc

SEQ ID NO: 20730 - DNA, 16 bp, synthetic construct
  misc_feature 1..16: note = synthetic [barcode part1]
  source 1..16: mol_type = other DNA
tgcgtatccttctctg

SEQ ID NO: 20731 - DNA, 16 bp, synthetic construct
  misc_feature 1..16: note = synthetic [barcode part1]
  source 1..16: mol_type = other DNA
gaattgagacctctcg

SEQ ID NO: 20732 - DNA, 16 bp, synthetic construct
  misc_feature 1..16: note = synthetic [barcode part1]
  source 1..16: mol_type = other DNA
caaggagaccagtgtc

SEQ ID NO: 20733 - DNA, 16 bp, synthetic construct
  misc_feature 1..16: note = synthetic [barcode part1]
  source 1..16: mol_type = other DNA
aattaacgccaaccgc

SEQ ID NO: 20734 - DNA, 16 bp, synthetic construct
  misc_feature 1..16: note = synthetic [barcode part1]
  source 1..16: mol_type = other DNA
tgacacgtcctcaatt

SEQ ID NO: 20735 - DNA, 16 bp, synthetic construct
  misc_feature 1..16: note = synthetic [barcode part1]
  source 1..16: mol_type = other DNA
atcacgtctgacacag

SEQ ID NO: 20736 - DNA, 16 bp, synthetic construct
  misc_feature 1..16: note = synthetic [barcode part1]
  source 1..16: mol_type = other DNA
aggtcacctactgagt

SEQ ID NO: 20737 - DNA, 16 bp, synthetic construct
  misc_feature 1..16: note = synthetic [barcode part1]
  source 1..16: mol_type = other DNA
tacggactaaggcggt

SEQ ID NO: 20738 - DNA, 16 bp, synthetic construct
  misc_feature 1..16: note = synthetic [barcode part1]
  source 1..16: mol_type = other DNA
ccaacaacttgacgac

SEQ ID NO: 20739 - DNA, 16 bp, synthetic construct
  misc_feature 1..16: note = synthetic [barcode part1]
  source 1..16: mol_type = other DNA
tagacgcggaacaatt

SEQ ID NO: 20740 - DNA, 16 bp, synthetic construct
  misc_feature 1..16: note = synthetic [barcode part1]
  source 1..16: mol_type = other DNA
cctaggaaggacttct

SEQ ID NO: 20741 - DNA, 16 bp, synthetic construct
  misc_feature 1..16: note = synthetic [barcode part1]
  source 1..16: mol_type = other DNA
gttcctacgccagact

SEQ ID NO: 20742 - DNA, 16 bp, synthetic construct
  misc_feature 1..16: note = synthetic [barcode part1]
  source 1..16: mol_type = other DNA
cgttattcaggagacc

SEQ ID NO: 20743 - DNA, 16 bp, synthetic construct
  misc_feature 1..16: note = synthetic [barcode part1]
  source 1..16: mol_type = other DNA
cgacctcgccgatatt

SEQ ID NO: 20744 - DNA, 16 bp, synthetic construct
  misc_feature 1..16: note = synthetic [barcode part1]
  source 1..16: mol_type = other DNA
tcttaatccggacgtt

SEQ ID NO: 20745 - DNA, 16 bp, synthetic construct
  misc_feature 1..16: note = synthetic [barcode part1]
  source 1..16: mol_type = other DNA
gcgttgaatcagaagt

SEQ ID NO: 20746 - DNA, 16 bp, synthetic construct
  misc_feature 1..16: note = synthetic [barcode part1]
  source 1..16: mol_type = other DNA
tgcaaggatacctctg

SEQ ID NO: 20747 - DNA, 16 bp, synthetic construct
  misc_feature 1..16: note = synthetic [barcode part1]
  source 1..16: mol_type = other DNA
ttcaggattgatcggc

SEQ ID NO: 20748 - DNA, 16 bp, synthetic construct
  misc_feature 1..16: note = synthetic [barcode part1]
  source 1..16: mol_type = other DNA
tgcctctaaggatacg

SEQ ID NO: 20749 - DNA, 16 bp, synthetic construct
  misc_feature 1..16: note = synthetic [barcode part1]
  source 1..16: mol_type = other DNA
tgacctaggactgttg

SEQ ID NO: 20750 - DNA, 16 bp, synthetic construct
  misc_feature 1..16: note = synthetic [barcode part1]
  source 1..16: mol_type = other DNA
atacgtgaccgattgc

SEQ ID NO: 20751 - DNA, 16 bp, synthetic construct
  misc_feature 1..16: note = synthetic [barcode part1]
  source 1..16: mol_type = other DNA
gtctacctgtcacgac

SEQ ID NO: 20752 - DNA, 16 bp, synthetic construct
  misc_feature 1..16: note = synthetic [barcode part1]
  source 1..16: mol_type = other DNA
gaacacgaatccgacg

SEQ ID NO: 20753 - DNA, 16 bp, synthetic construct
  misc_feature 1..16: note = synthetic [barcode part1]
  source 1..16: mol_type = other DNA
ttggacgttcgccgtt

SEQ ID NO: 20754 - DNA, 16 bp, synthetic construct
  misc_feature 1..16: note = synthetic [barcode part1]
  source 1..16: mol_type = other DNA
taggttggtacttctc

SEQ ID NO: 20755 - DNA, 16 bp, synthetic construct
  misc_feature 1..16: note = synthetic [barcode part1]
  source 1..16: mol_type = other DNA
tccaactcacgaccgt

SEQ ID NO: 20756 - DNA, 16 bp, synthetic construct
  misc_feature 1..16: note = synthetic [barcode part1]
  source 1..16: mol_type = other DNA
agataaccacgagttg

SEQ ID NO: 20757 - DNA, 16 bp, synthetic construct
  misc_feature 1..16: note = synthetic [barcode part1]
  source 1..16: mol_type = other DNA
gcgagatactcacgag

SEQ ID NO: 20758 - DNA, 16 bp, synthetic construct
  misc_feature 1..16: note = synthetic [barcode part1]
  source 1..16: mol_type = other DNA
ttagtctcgttaacgc

SEQ ID NO: 20759 - DNA, 16 bp, synthetic construct
  misc_feature 1..16: note = synthetic [barcode part1]
  source 1..16: mol_type = other DNA
cgtgtcgaatcctctg

SEQ ID NO: 20760 - DNA, 16 bp, synthetic construct
  misc_feature 1..16: note = synthetic [barcode part1]
  source 1..16: mol_type = other DNA
agaaggtgcctaagtt

SEQ ID NO: 20761 - DNA, 16 bp, synthetic construct
  misc_feature 1..16: note = synthetic [barcode part1]
  source 1..16: mol_type = other DNA
tacaattcctctgacg

SEQ ID NO: 20762 - DNA, 16 bp, synthetic construct
  misc_feature 1..16: note = synthetic [barcode part1]
  source 1..16: mol_type = other DNA
cagaagacgatacgtt

SEQ ID NO: 20763 - DNA, 16 bp, synthetic construct
  misc_feature 1..16: note = synthetic [barcode part1]
  source 1..16: mol_type = other DNA
gcgcaataaggccagt

SEQ ID NO: 20764 - DNA, 16 bp, synthetic construct
  misc_feature 1..16: note = synthetic [barcode part1]
  source 1..16: mol_type = other DNA
ttcgtccgagttccag

SEQ ID NO: 20765 - DNA, 16 bp, synthetic construct
  misc_feature 1..16: note = synthetic [barcode part1]
  source 1..16: mol_type = other DNA
tcttccgtacttcgtg

SEQ ID NO: 20766 - DNA, 16 bp, synthetic construct
  misc_feature 1..16: note = synthetic [barcode part1]
  source 1..16: mol_type = other DNA
cgtgtaacggagagtc

SEQ ID NO: 20767 - DNA, 16 bp, synthetic construct
  misc_feature 1..16: note = synthetic [barcode part1]
  source 1..16: mol_type = other DNA
ccggactgtacagaag

SEQ ID NO: 20768 - DNA, 16 bp, synthetic construct
  misc_feature 1..16: note = synthetic [barcode part1]
  source 1..16: mol_type = other DNA
accttagatacacgcg

SEQ ID NO: 20769 - DNA, 16 bp, synthetic construct
  misc_feature 1..16: note = synthetic [barcode part1]
  source 1..16: mol_type = other DNA
tcacgtaccaattctg

SEQ ID NO: 20770 - DNA, 16 bp, synthetic construct
  misc_feature 1..16: note = synthetic [barcode part1]
  source 1..16: mol_type = other DNA
atagattgtgcctggc

SEQ ID NO: 20771 - DNA, 16 bp, synthetic construct
  misc_feature 1..16: note = synthetic [barcode part1]
  source 1..16: mol_type = other DNA
acgtcagatcggaggt

SEQ ID NO: 20772 - DNA, 16 bp, synthetic construct
  misc_feature 1..16: note = synthetic [barcode part1]
  source 1..16: mol_type = other DNA
tcttggattacctacg

SEQ ID NO: 20773 - DNA, 16 bp, synthetic construct
  misc_feature 1..16: note = synthetic [barcode part1]
  source 1..16: mol_type = other DNA
cctacacctagtggtc

SEQ ID NO: 20774 - DNA, 16 bp, synthetic construct
  misc_feature 1..16: note = synthetic [barcode part1]
  source 1..16: mol_type = other DNA
tagactgttcttgcac

SEQ ID NO: 20775 - DNA, 16 bp, synthetic construct
  misc_feature 1..16: note = synthetic [barcode part1]
  source 1..16: mol_type = other DNA
gcgatatacacacgtc

SEQ ID NO: 20776 - DNA, 16 bp, synthetic construct
  misc_feature 1..16: note = synthetic [barcode part1]
  source 1..16: mol_type = other DNA
gcagaacttcaggcag

SEQ ID NO: 20777 - DNA, 16 bp, synthetic construct
  misc_feature 1..16: note = synthetic [barcode part1]
  source 1..16: mol_type = other DNA
aataatctctccgcac

SEQ ID NO: 20778 - DNA, 16 bp, synthetic construct
  misc_feature 1..16: note = synthetic [barcode part1]
  source 1..16: mol_type = other DNA
cgcgtaatcgtcgtct

SEQ ID NO: 20779 - DNA, 16 bp, synthetic construct
  misc_feature 1..16: note = synthetic [barcode part1]
  source 1..16: mol_type = other DNA
tacgacggtggtatct

SEQ ID NO: 20780 - DNA, 16 bp, synthetic construct
  misc_feature 1..16: note = synthetic [barcode part1]
  source 1..16: mol_type = other DNA
taacaacgtacctcct

SEQ ID NO: 20781 - DNA, 16 bp, synthetic construct
  misc_feature 1..16: note = synthetic [barcode part1]
  source 1..16: mol_type = other DNA
gacctatagacttgcg

SEQ ID NO: 20782 - DNA, 16 bp, synthetic construct
  misc_feature 1..16: note = synthetic [barcode part1]
  source 1..16: mol_type = other DNA
gttgcaactcgttcgc

SEQ ID NO: 20783 - DNA, 16 bp, synthetic construct
  misc_feature 1..16: note = synthetic [barcode part1]
  source 1..16: mol_type = other DNA
gactctcaacttgcgc

SEQ ID NO: 20784 - DNA, 16 bp, synthetic construct
  misc_feature 1..16: note = synthetic [barcode part1]
  source 1..16: mol_type = other DNA
tccaagtacctaggtg

SEQ ID NO: 20785 - DNA, 16 bp, synthetic construct
  misc_feature 1..16: note = synthetic [barcode part1]
  source 1..16: mol_type = other DNA
acacaacggagttaac

SEQ ID NO: 20786 - DNA, 16 bp, synthetic construct
  misc_feature 1..16: note = synthetic [barcode part1]
  source 1..16: mol_type = other DNA
agttcagagtcgtcac

SEQ ID NO: 20787 - DNA, 16 bp, synthetic construct
  misc_feature 1..16: note = synthetic [barcode part1]
  source 1..16: mol_type = other DNA
aggcggacactgtagt

SEQ ID NO: 20788 - DNA, 16 bp, synthetic construct
  misc_feature 1..16: note = synthetic [barcode part1]
  source 1..16: mol_type = other DNA
cagaacgtctagtctg

SEQ ID NO: 20789 - DNA, 16 bp, synthetic construct
  misc_feature 1..16: note = synthetic [barcode part1]
  source 1..16: mol_type = other DNA
acctagacaggtatcc

SEQ ID NO: 20790 - DNA, 16 bp, synthetic construct
  misc_feature 1..16: note = synthetic [barcode part1]
  source 1..16: mol_type = other DNA
cgagattcaatcggtc

SEQ ID NO: 20791 - DNA, 16 bp, synthetic construct
  misc_feature 1..16: note = synthetic [barcode part1]
  source 1..16: mol_type = other DNA
gtgtgtagtcgattgc

SEQ ID NO: 20792 - DNA, 16 bp, synthetic construct
  misc_feature 1..16: note = synthetic [barcode part1]
  source 1..16: mol_type = other DNA
agaggtcaccgtgtag

SEQ ID NO: 20793 - DNA, 16 bp, synthetic construct
  misc_feature 1..16: note = synthetic [barcode part1]
  source 1..16: mol_type = other DNA
tacacagtactggcac

SEQ ID NO: 20794 - DNA, 16 bp, synthetic construct
  misc_feature 1..16: note = synthetic [barcode part1]
  source 1..16: mol_type = other DNA
atctctaacagaggcc

SEQ ID NO: 20795 - DNA, 16 bp, synthetic construct
  misc_feature 1..16: note = synthetic [barcode part1]
  source 1..16: mol_type = other DNA
atctcacgacgtactt

SEQ ID NO: 20796 - DNA, 16 bp, synthetic construct
  misc_feature 1..16: note = synthetic [barcode part1]
  source 1..16: mol_type = other DNA
tcacgttcaggttgtt

SEQ ID NO: 20797 - DNA, 16 bp, synthetic construct
  misc_feature 1..16: note = synthetic [barcode part1]
  source 1..16: mol_type = other DNA
cacaatcctcttggcg

SEQ ID NO: 20798 - DNA, 16 bp, synthetic construct
  misc_feature 1..16: note = synthetic [barcode part1]
  source 1..16: mol_type = other DNA
gactacaggaattgac

SEQ ID NO: 20799 - DNA, 16 bp, synthetic construct
  misc_feature 1..16: note = synthetic [barcode part1]
  source 1..16: mol_type = other DNA
attggtggaattggac

SEQ ID NO: 20800 - DNA, 16 bp, synthetic construct
  misc_feature 1..16: note = synthetic [barcode part1]
  source 1..16: mol_type = other DNA
gtggtgtgtacgtgtt

SEQ ID NO: 20801 - DNA, 16 bp, synthetic construct
  misc_feature 1..16: note = synthetic [barcode part1]
  source 1..16: mol_type = other DNA
gcaagtcgtactcagt

SEQ ID NO: 20802 - DNA, 16 bp, synthetic construct
  misc_feature 1..16: note = synthetic [barcode part1]
  source 1..16: mol_type = other DNA
tacgtcagaggaattg

SEQ ID NO: 20803 - DNA, 16 bp, synthetic construct
  misc_feature 1..16: note = synthetic [barcode part1]
  source 1..16: mol_type = other DNA
cagtccttagtcgcac

SEQ ID NO: 20804 - DNA, 16 bp, synthetic construct
  misc_feature 1..16: note = synthetic [barcode part1]
  source 1..16: mol_type = other DNA
gtgcacctacttcgtg

SEQ ID NO: 20805 - DNA, 16 bp, synthetic construct
  misc_feature 1..16: note = synthetic [barcode part1]
  source 1..16: mol_type = other DNA
ttcgtgactcggatag

SEQ ID NO: 20806 - DNA, 16 bp, synthetic construct
  misc_feature 1..16: note = synthetic [barcode part1]
  source 1..16: mol_type = other DNA
gtgcacgatcacaatc

SEQ ID NO: 20807 - DNA, 16 bp, synthetic construct
  misc_feature 1..16: note = synthetic [barcode part1]
  source 1..16: mol_type = other DNA
gcacaatctctaatcc

SEQ ID NO: 20808 - DNA, 16 bp, synthetic construct
  misc_feature 1..16: note = synthetic [barcode part1]
  source 1..16: mol_type = other DNA
tatacgcgagacttcg

SEQ ID NO: 20809 - DNA, 16 bp, synthetic construct
  misc_feature 1..16: note = synthetic [barcode part1]
  source 1..16: mol_type = other DNA
ttctctcgagaaggac

SEQ ID NO: 20810 - DNA, 16 bp, synthetic construct
  misc_feature 1..16: note = synthetic [barcode part1]
  source 1..16: mol_type = other DNA
actcctgacttggcac

SEQ ID NO: 20811 - DNA, 16 bp, synthetic construct
  misc_feature 1..16: note = synthetic [barcode part1]
  source 1..16: mol_type = other DNA
gtctcgccaagttcgt

SEQ ID NO: 20812 - DNA, 16 bp, synthetic construct
  misc_feature 1..16: note = synthetic [barcode part1]
  source 1..16: mol_type = other DNA
gtcaacacggaagacc

SEQ ID NO: 20813 - DNA, 16 bp, synthetic construct
  misc_feature 1..16: note = synthetic [barcode part1]
  source 1..16: mol_type = other DNA
cgtctgcgtgaatagt

SEQ ID NO: 20814 - DNA, 16 bp, synthetic construct
  misc_feature 1..16: note = synthetic [barcode part1]
  source 1..16: mol_type = other DNA
acctccttgcggttag

SEQ ID NO: 20815 - DNA, 16 bp, synthetic construct
  misc_feature 1..16: note = synthetic [barcode part1]
  source 1..16: mol_type = other DNA
gagtgccaatacttgc

SEQ ID NO: 20816 - DNA, 16 bp, synthetic construct
  misc_feature 1..16: note = synthetic [barcode part1]
  source 1..16: mol_type = other DNA
taggccagagacacgt

SEQ ID NO: 20817 - DNA, 16 bp, synthetic construct
  misc_feature 1..16: note = synthetic [barcode part1]
  source 1..16: mol_type = other DNA
cactgagattcctgtt

SEQ ID NO: 20818 - DNA, 16 bp, synthetic construct
  misc_feature 1..16: note = synthetic [barcode part1]
  source 1..16: mol_type = other DNA
actcgaagtgatagac

SEQ ID NO: 20819 - DNA, 16 bp, synthetic construct
  misc_feature 1..16: note = synthetic [barcode part1]
  source 1..16: mol_type = other DNA
gccttcttcgattctg

SEQ ID NO: 20820 - DNA, 16 bp, synthetic construct
  misc_feature 1..16: note = synthetic [barcode part1]
  source 1..16: mol_type = other DNA
aattggtgcgcacact

SEQ ID NO: 20821 - DNA, 16 bp, synthetic construct
  misc_feature 1..16: note = synthetic [barcode part1]
  source 1..16: mol_type = other DNA
tggcgaccaataatcc

SEQ ID NO: 20822 - DNA, 16 bp, synthetic construct
  misc_feature 1..16: note = synthetic [barcode part1]
  source 1..16: mol_type = other DNA
gacgtgaattcctgtg

SEQ ID NO: 20823 - DNA, 16 bp, synthetic construct
  misc_feature 1..16: note = synthetic [barcode part1]
  source 1..16: mol_type = other DNA
gttctattcgccactc

SEQ ID NO: 20824 - DNA, 16 bp, synthetic construct
  misc_feature 1..16: note = synthetic [barcode part1]
  source 1..16: mol_type = other DNA
ttcctgactgacctct

SEQ ID NO: 20825 - DNA, 16 bp, synthetic construct
  misc_feature 1..16: note = synthetic [barcode part1]
  source 1..16: mol_type = other DNA
ttccagttgcaggcct

SEQ ID NO: 20826 - DNA, 16 bp, synthetic construct
  misc_feature 1..16: note = synthetic [barcode part1]
  source 1..16: mol_type = other DNA
tacacttgccttcgtc

SEQ ID NO: 20827 - DNA, 16 bp, synthetic construct
  misc_feature 1..16: note = synthetic [barcode part1]
  source 1..16: mol_type = other DNA
acttggattgtcttgc

SEQ ID NO: 20828 - DNA, 16 bp, synthetic construct
  misc_feature 1..16: note = synthetic [barcode part1]
  source 1..16: mol_type = other DNA
tcctggtacacttggc

SEQ ID NO: 20829 - DNA, 16 bp, synthetic construct
  misc_feature 1..16: note = synthetic [barcode part1]
  source 1..16: mol_type = other DNA
acgactgaattctcct

SEQ ID NO: 20830 - DNA, 16 bp, synthetic construct
  misc_feature 1..16: note = synthetic [barcode part1]
  source 1..16: mol_type = other DNA
tctaccggaagactac

SEQ ID NO: 20831 - DNA, 16 bp, synthetic construct
  misc_feature 1..16: note = synthetic [barcode part1]
  source 1..16: mol_type = other DNA
cgtactattgaccttg

SEQ ID NO: 20832 - DNA, 16 bp, synthetic construct
  misc_feature 1..16: note = synthetic [barcode part1]
  source 1..16: mol_type = other DNA
agtctccgactacacc

SEQ ID NO: 20833 - DNA, 16 bp, synthetic construct
  misc_feature 1..16: note = synthetic [barcode part1]
  source 1..16: mol_type = other DNA
tgcagagtctctgtag

SEQ ID NO: 20834 - DNA, 16 bp, synthetic construct
  misc_feature 1..16: note = synthetic [barcode part1]
  source 1..16: mol_type = other DNA
tcgacaggtgacttgt

SEQ ID NO: 20835 - DNA, 16 bp, synthetic construct
  misc_feature 1..16: note = synthetic [barcode part1]
  source 1..16: mol_type = other DNA
tcacgttcactaggtt

SEQ ID NO: 20836 - DNA, 16 bp, synthetic construct
  misc_feature 1..16: note = synthetic [barcode part1]
  source 1..16: mol_type = other DNA
ttgtcgcaacgaagtc

SEQ ID NO: 20837 - DNA, 16 bp, synthetic construct
  misc_feature 1..16: note = synthetic [barcode part1]
  source 1..16: mol_type = other DNA
tgtcgaatatcaggcc

SEQ ID NO: 20838 - DNA, 16 bp, synthetic construct
  misc_feature 1..16: note = synthetic [barcode part1]
  source 1..16: mol_type = other DNA
tggataatctaggacg

SEQ ID NO: 20839 - DNA, 16 bp, synthetic construct
  misc_feature 1..16: note = synthetic [barcode part1]
  source 1..16: mol_type = other DNA
tagatatagaacggcc

SEQ ID NO: 20840 - DNA, 16 bp, synthetic construct
  misc_feature 1..16: note = synthetic [barcode part1]
  source 1..16: mol_type = other DNA
agttctggcagataag

SEQ ID NO: 20841 - DNA, 16 bp, synthetic construct
  misc_feature 1..16: note = synthetic [barcode part1]
  source 1..16: mol_type = other DNA
tctgccggtacagtct

SEQ ID NO: 20842 - DNA, 16 bp, synthetic construct
  misc_feature 1..16: note = synthetic [barcode part1]
  source 1..16: mol_type = other DNA
atcgcaggcgatactt

SEQ ID NO: 20843 - DNA, 16 bp, synthetic construct
  misc_feature 1..16: note = synthetic [barcode part1]
  source 1..16: mol_type = other DNA
gtggtgtggagttctt

SEQ ID NO: 20844 - DNA, 16 bp, synthetic construct
  misc_feature 1..16: note = synthetic [barcode part1]
  source 1..16: mol_type = other DNA
atcactgtcttcacag

SEQ ID NO: 20845 - DNA, 16 bp, synthetic construct
  misc_feature 1..16: note = synthetic [barcode part1]
  source 1..16: mol_type = other DNA
gacagaatacgttggt

SEQ ID NO: 20846 - DNA, 16 bp, synthetic construct
  misc_feature 1..16: note = synthetic [barcode part1]
  source 1..16: mol_type = other DNA
cagaatcgtcgcaatc

SEQ ID NO: 20847 - DNA, 16 bp, synthetic construct
  misc_feature 1..16: note = synthetic [barcode part1]
  source 1..16: mol_type = other DNA
tcgcggttgtaatacg

SEQ ID NO: 20848 - DNA, 16 bp, synthetic construct
  misc_feature 1..16: note = synthetic [barcode part1]
  source 1..16: mol_type = other DNA
gattacgacacgtcac

SEQ ID NO: 20849 - DNA, 16 bp, synthetic construct
  misc_feature 1..16: note = synthetic [barcode part1]
  source 1..16: mol_type = other DNA
tgaagtaacaatcgcg

SEQ ID NO: 20850 - DNA, 16 bp, synthetic construct
  misc_feature 1..16: note = synthetic [barcode part1]
  source 1..16: mol_type = other DNA
taggatcgtactgcac

SEQ ID NO: 20851 - DNA, 16 bp, synthetic construct
  misc_feature 1..16: note = synthetic [barcode part1]
  source 1..16: mol_type = other DNA
gagtactgaacctacc

SEQ ID NO: 20852 - DNA, 16 bp, synthetic construct
  misc_feature 1..16: note = synthetic [barcode part1]
  source 1..16: mol_type = other DNA
cgtgtcggtattaacg

SEQ ID NO: 20853 - DNA, 16 bp, synthetic construct
  misc_feature 1..16: note = synthetic [barcode part1]
  source 1..16: mol_type = other DNA
cagatcaggaatacac

SEQ ID NO: 20854 - DNA, 16 bp, synthetic construct
  misc_feature 1..16: note = synthetic [barcode part1]
  source 1..16: mol_type = other DNA
tcggaataagtgaacc

SEQ ID NO: 20855 - DNA, 16 bp, synthetic construct
  misc_feature 1..16: note = synthetic [barcode part1]
  source 1..16: mol_type = other DNA
aggcaactcagtgcag

SEQ ID NO: 20856 - DNA, 16 bp, synthetic construct
  misc_feature 1..16: note = synthetic [barcode part1]
  source 1..16: mol_type = other DNA
taggttcgcgaatctg

SEQ ID NO: 20857 - DNA, 16 bp, synthetic construct
  misc_feature 1..16: note = synthetic [barcode part1]
  source 1..16: mol_type = other DNA
gtgtccgatctcactg

SEQ ID NO: 20858 - DNA, 16 bp, synthetic construct
  misc_feature 1..16: note = synthetic [barcode part1]
  source 1..16: mol_type = other DNA
ttgcgtcttgtcggac

SEQ ID NO: 20859 - DNA, 16 bp, synthetic construct
  misc_feature 1..16: note = synthetic [barcode part1]
  source 1..16: mol_type = other DNA
ttctacggatctggtt

SEQ ID NO: 20860 - DNA, 16 bp, synthetic construct
  misc_feature 1..16: note = synthetic [barcode part1]
  source 1..16: mol_type = other DNA
tggagtcctgactagt

SEQ ID NO: 20861 - DNA, 16 bp, synthetic construct
  misc_feature 1..16: note = synthetic [barcode part1]
  source 1..16: mol_type = other DNA
agaagtactactggac

SEQ ID NO: 20862 - DNA, 16 bp, synthetic construct
  misc_feature 1..16: note = synthetic [barcode part1]
  source 1..16: mol_type = other DNA
ttcgcgcgtcagactt

SEQ ID NO: 20863 - DNA, 16 bp, synthetic construct
  misc_feature 1..16: note = synthetic [barcode part1]
  source 1..16: mol_type = other DNA
ccttctctgatcggtt

SEQ ID NO: 20864 - DNA, 16 bp, synthetic construct
  misc_feature 1..16: note = synthetic [barcode part1]
  source 1..16: mol_type = other DNA
tgacctctgactgtgc

SEQ ID NO: 20865 - DNA, 16 bp, synthetic construct
  misc_feature 1..16: note = synthetic [barcode part1]
  source 1..16: mol_type = other DNA
aggcctagatagtagt

SEQ ID NO: 20866 - DNA, 16 bp, synthetic construct
  misc_feature 1..16: note = synthetic [barcode part1]
  source 1..16: mol_type = other DNA
cgaactgcctcgtgtt

SEQ ID NO: 20867 - DNA, 16 bp, synthetic construct
  misc_feature 1..16: note = synthetic [barcode part1]
  source 1..16: mol_type = other DNA
tccttcgaagtgtccg

SEQ ID NO: 20868 - DNA, 16 bp, synthetic construct
  misc_feature 1..16: note = synthetic [barcode part1]
  source 1..16: mol_type = other DNA
tattggccgtgatcag

SEQ ID NO: 20869 - DNA, 16 bp, synthetic construct
  misc_feature 1..16: note = synthetic [barcode part1]
  source 1..16: mol_type = other DNA
tgtcaagtactcttgc

SEQ ID NO: 20870 - DNA, 16 bp, synthetic construct
  misc_feature 1..16: note = synthetic [barcode part1]
  source 1..16: mol_type = other DNA
gcggaagtgtatcctt

SEQ ID NO: 20871 - DNA, 16 bp, synthetic construct
  misc_feature 1..16: note = synthetic [barcode part1]
  source 1..16: mol_type = other DNA
tacactctctgacagt

SEQ ID NO: 20872 - DNA, 16 bp, synthetic construct
  misc_feature 1..16: note = synthetic [barcode part1]
  source 1..16: mol_type = other DNA
aacttctgcgcgactc

SEQ ID NO: 20873 - DNA, 16 bp, synthetic construct
  misc_feature 1..16: note = synthetic [barcode part1]
  source 1..16: mol_type = other DNA
atctagatctgccgtt

SEQ ID NO: 20874 - DNA, 16 bp, synthetic construct
  misc_feature 1..16: note = synthetic [barcode part1]
  source 1..16: mol_type = other DNA
ataaccggttaacgcc

SEQ ID NO: 20875 - DNA, 16 bp, synthetic construct
  misc_feature 1..16: note = synthetic [barcode part1]
  source 1..16: mol_type = other DNA
gccttgttactggtgc

SEQ ID NO: 20876 - DNA, 16 bp, synthetic construct
  misc_feature 1..16: note = synthetic [barcode part1]
  source 1..16: mol_type = other DNA
tctatactctcgtgcc

SEQ ID NO: 20877 - DNA, 16 bp, synthetic construct
  misc_feature 1..16: note = synthetic [barcode part1]
  source 1..16: mol_type = other DNA
acggacacttaggacg

SEQ ID NO: 20878 - DNA, 16 bp, synthetic construct
  misc_feature 1..16: note = synthetic [barcode part1]
  source 1..16: mol_type = other DNA
aattccggtgacactg

SEQ ID NO: 20879 - DNA, 16 bp, synthetic construct
  misc_feature 1..16: note = synthetic [barcode part1]
  source 1..16: mol_type = other DNA
agttctcgtgcaactt

SEQ ID NO: 20880 - DNA, 16 bp, synthetic construct
  misc_feature 1..16: note = synthetic [barcode part1]
  source 1..16: mol_type = other DNA
aacaggacgactctct

SEQ ID NO: 20881 - DNA, 16 bp, synthetic construct
  misc_feature 1..16: note = synthetic [barcode part1]
  source 1..16: mol_type = other DNA
ttgtggtctccagaag

SEQ ID NO: 20882 - DNA, 16 bp, synthetic construct
  misc_feature 1..16: note = synthetic [barcode part1]
  source 1..16: mol_type = other DNA
tgcctaatcctcggtg

SEQ ID NO: 20883 - DNA, 16 bp, synthetic construct
  misc_feature 1..16: note = synthetic [barcode part1]
  source 1..16: mol_type = other DNA
tctgtgaaggttcacg

SEQ ID NO: 20884 - DNA, 16 bp, synthetic construct
  misc_feature 1..16: note = synthetic [barcode part1]
  source 1..16: mol_type = other DNA
gtcgtccgtgaactct

SEQ ID NO: 20885 - DNA, 16 bp, synthetic construct
  misc_feature 1..16: note = synthetic [barcode part1]
  source 1..16: mol_type = other DNA
gttctagtacgcacag

SEQ ID NO: 20886 - DNA, 16 bp, synthetic construct
  misc_feature 1..16: note = synthetic [barcode part1]
  source 1..16: mol_type = other DNA
atacgtctctaatccg

SEQ ID NO: 20887 - DNA, 16 bp, synthetic construct
  misc_feature 1..16: note = synthetic [barcode part1]
  source 1..16: mol_type = other DNA
tgaccaagtacacgtc

SEQ ID NO: 20888 - DNA, 16 bp, synthetic construct
  misc_feature 1..16: note = synthetic [barcode part1]
  source 1..16: mol_type = other DNA
tctcggcgttgttctt

SEQ ID NO: 20889 - DNA, 16 bp, synthetic construct
  misc_feature 1..16: note = synthetic [barcode part1]
  source 1..16: mol_type = other DNA
tcgtcctggaataacg

SEQ ID NO: 20890 - DNA, 16 bp, synthetic construct
  misc_feature 1..16: note = synthetic [barcode part1]
  source 1..16: mol_type = other DNA
ttccaccacgagtctg

SEQ ID NO: 20891 - DNA, 16 bp, synthetic construct
  misc_feature 1..16: note = synthetic [barcode part1]
  source 1..16: mol_type = other DNA
agtcgcgacactaatc

SEQ ID NO: 20892 - DNA, 16 bp, synthetic construct
  misc_feature 1..16: note = synthetic [barcode part1]
  source 1..16: mol_type = other DNA
gcactccttctacgtt

SEQ ID NO: 20893 - DNA, 16 bp, synthetic construct
  misc_feature 1..16: note = synthetic [barcode part1]
  source 1..16: mol_type = other DNA
cacttcctaactcaag

SEQ ID NO: 20894 - DNA, 16 bp, synthetic construct
  misc_feature 1..16: note = synthetic [barcode part1]
  source 1..16: mol_type = other DNA
cctgatctcttctgac

SEQ ID NO: 20895 - DNA, 16 bp, synthetic construct
  misc_feature 1..16: note = synthetic [barcode part1]
  source 1..16: mol_type = other DNA
caggtacgtcagaggt

SEQ ID NO: 20896 - DNA, 16 bp, synthetic construct
  misc_feature 1..16: note = synthetic [barcode part1]
  source 1..16: mol_type = other DNA
ttcttggcctcgatct

SEQ ID NO: 20897 - DNA, 16 bp, synthetic construct
  misc_feature 1..16: note = synthetic [barcode part1]
  source 1..16: mol_type = other DNA
tgaccgactctctctt

SEQ ID NO: 20898 - DNA, 16 bp, synthetic construct
  misc_feature 1..16: note = synthetic [barcode part1]
  source 1..16: mol_type = other DNA
cgacgattgcaggagt

SEQ ID NO: 20899 - DNA, 16 bp, synthetic construct
  misc_feature 1..16: note = synthetic [barcode part1]
  source 1..16: mol_type = other DNA
caatctgatccttacg

SEQ ID NO: 20900 - DNA, 16 bp, synthetic construct
  misc_feature 1..16: note = synthetic [barcode part1]
  source 1..16: mol_type = other DNA
gacaggtagtgtcgtg

SEQ ID NO: 20901 - DNA, 16 bp, synthetic construct
  misc_feature 1..16: note = synthetic [barcode part1]
  source 1..16: mol_type = other DNA
cgtcgtcaacgtgtct

SEQ ID NO: 20902 - DNA, 16 bp, synthetic construct
  misc_feature 1..16: note = synthetic [barcode part1]
  source 1..16: mol_type = other DNA
tagtggtgtcaagtcc

SEQ ID NO: 20903 - DNA, 16 bp, synthetic construct
  misc_feature 1..16: note = synthetic [barcode part1]
  source 1..16: mol_type = other DNA
gcgtacaaccgtaact

SEQ ID NO: 20904 - DNA, 16 bp, synthetic construct
  misc_feature 1..16: note = synthetic [barcode part1]
  source 1..16: mol_type = other DNA
gaattgtggcggttct

SEQ ID NO: 20905 - DNA, 16 bp, synthetic construct
  misc_feature 1..16: note = synthetic [barcode part1]
  source 1..16: mol_type = other DNA
tggcacaggagactgt

SEQ ID NO: 20906 - DNA, 16 bp, synthetic construct
  misc_feature 1..16: note = synthetic [barcode part1]
  source 1..16: mol_type = other DNA
tctaccaccggtacgt

SEQ ID NO: 20907 - DNA, 16 bp, synthetic construct
  misc_feature 1..16: note = synthetic [barcode part1]
  source 1..16: mol_type = other DNA
gatatcgtgtgtgcac

SEQ ID NO: 20908 - DNA, 16 bp, synthetic construct
  misc_feature 1..16: note = synthetic [barcode part1]
  source 1..16: mol_type = other DNA
tgttcgcaatactacc

SEQ ID NO: 20909 - DNA, 16 bp, synthetic construct
  misc_feature 1..16: note = synthetic [barcode part1]
  source 1..16: mol_type = other DNA
attagttgcacacgcg

SEQ ID NO: 20910 - DNA, 16 bp, synthetic construct
  misc_feature 1..16: note = synthetic [barcode part1]
  source 1..16: mol_type = other DNA
cagtgataatctggcc

SEQ ID NO: 20911 - DNA, 16 bp, synthetic construct
  misc_feature 1..16: note = synthetic [barcode part1]
  source 1..16: mol_type = other DNA
cgcctgccttagaatc

SEQ ID NO: 20912 - DNA, 16 bp, synthetic construct
  misc_feature 1..16: note = synthetic [barcode part1]
  source 1..16: mol_type = other DNA
acgataacgtctcgtg

SEQ ID NO: 20913 - DNA, 16 bp, synthetic construct
  misc_feature 1..16: note = synthetic [barcode part1]
  source 1..16: mol_type = other DNA
tcagttgaccagtcag

SEQ ID NO: 20914 - DNA, 16 bp, synthetic construct
  misc_feature 1..16: note = synthetic [barcode part1]
  source 1..16: mol_type = other DNA
cctgacgaagttactg

SEQ ID NO: 20915 - DNA, 16 bp, synthetic construct
  misc_feature 1..16: note = synthetic [barcode part1]
  source 1..16: mol_type = other DNA
tgttggagtaggaatc

SEQ ID NO: 20916 - DNA, 16 bp, synthetic construct
  misc_feature 1..16: note = synthetic [barcode part1]
  source 1..16: mol_type = other DNA
tgccactgttcaggtc

SEQ ID NO: 20917 - DNA, 16 bp, synthetic construct
  misc_feature 1..16: note = synthetic [barcode part1]
  source 1..16: mol_type = other DNA
tgtgcctcagatcacc

SEQ ID NO: 20918 - DNA, 16 bp, synthetic construct
  misc_feature 1..16: note = synthetic [barcode part1]
  source 1..16: mol_type = other DNA
gtgactgcctctcagt

SEQ ID NO: 20919 - DNA, 16 bp, synthetic construct
  misc_feature 1..16: note = synthetic [barcode part1]
  source 1..16: mol_type = other DNA
cggccgatagtattgt

SEQ ID NO: 20920 - DNA, 16 bp, synthetic construct
  misc_feature 1..16: note = synthetic [barcode part1]
  source 1..16: mol_type = other DNA
gttgttggatcaccag

SEQ ID NO: 20921 - DNA, 16 bp, synthetic construct
  misc_feature 1..16: note = synthetic [barcode part1]
  source 1..16: mol_type = other DNA
tattgatcgtggccag

SEQ ID NO: 20922 - DNA, 16 bp, synthetic construct
  misc_feature 1..16: note = synthetic [barcode part1]
  source 1..16: mol_type = other DNA
tgcgtggagattggac

SEQ ID NO: 20923 - DNA, 16 bp, synthetic construct
  misc_feature 1..16: note = synthetic [barcode part1]
  source 1..16: mol_type = other DNA
tatccgatacagaccg

SEQ ID NO: 20924 - DNA, 16 bp, synthetic construct
  misc_feature 1..16: note = synthetic [barcode part1]
  source 1..16: mol_type = other DNA
tgtcttgcactcaagt

SEQ ID NO: 20925 - DNA, 16 bp, synthetic construct
  misc_feature 1..16: note = synthetic [barcode part1]
  source 1..16: mol_type = other DNA
gcggcacgtatatact

SEQ ID NO: 20926 - DNA, 16 bp, synthetic construct
  misc_feature 1..16: note = synthetic [barcode part1]
  source 1..16: mol_type = other DNA
cagaccggaagatacc

SEQ ID NO: 20927 - DNA, 16 bp, synthetic construct
  misc_feature 1..16: note = synthetic [barcode part1]
  source 1..16: mol_type = other DNA
atacgcggactaacct

SEQ ID NO: 20928 - DNA, 16 bp, synthetic construct
  misc_feature 1..16: note = synthetic [barcode part1]
  source 1..16: mol_type = other DNA
ttaactccggaggatc

SEQ ID NO: 20929 - DNA, 16 bp, synthetic construct
  misc_feature 1..16: note = synthetic [barcode part1]
  source 1..16: mol_type = other DNA
aactattgtggagacg

SEQ ID NO: 20930 - DNA, 16 bp, synthetic construct
  misc_feature 1..16: note = synthetic [barcode part1]
  source 1..16: mol_type = other DNA
tcgcctatcacagtgc

SEQ ID NO: 20931 - DNA, 16 bp, synthetic construct
  misc_feature 1..16: note = synthetic [barcode part1]
  source 1..16: mol_type = other DNA
aagttgcgttcggtac

SEQ ID NO: 20932 - DNA, 16 bp, synthetic construct
  misc_feature 1..16: note = synthetic [barcode part1]
  source 1..16: mol_type = other DNA
acacttgtcgtagacg

SEQ ID NO: 20933 - DNA, 16 bp, synthetic construct
  misc_feature 1..16: note = synthetic [barcode part1]
  source 1..16: mol_type = other DNA
gtgaactaggacgacc

SEQ ID NO: 20934 - DNA, 16 bp, synthetic construct
  misc_feature 1..16: note = synthetic [barcode part1]
  source 1..16: mol_type = other DNA
tgactactgtcttgtg

SEQ ID NO: 20935 - DNA, 16 bp, synthetic construct
  misc_feature 1..16: note = synthetic [barcode part1]
  source 1..16: mol_type = other DNA
cgtataatcgccactt

SEQ ID NO: 20936 - DNA, 16 bp, synthetic construct
  misc_feature 1..16: note = synthetic [barcode part1]
  source 1..16: mol_type = other DNA
atctccgagtgacctc

SEQ ID NO: 20937 - DNA, 16 bp, synthetic construct
  misc_feature 1..16: note = synthetic [barcode part1]
  source 1..16: mol_type = other DNA
gcctggtctcctatag

SEQ ID NO: 20938 - DNA, 16 bp, synthetic construct
  misc_feature 1..16: note = synthetic [barcode part1]
  source 1..16: mol_type = other DNA
agacgtccttagacgt

SEQ ID NO: 20939 - DNA, 16 bp, synthetic construct
  misc_feature 1..16: note = synthetic [barcode part1]
  source 1..16: mol_type = other DNA
aagaacgacgatctgt

SEQ ID NO: 20940 - DNA, 16 bp, synthetic construct
  misc_feature 1..16: note = synthetic [barcode part1]
  source 1..16: mol_type = other DNA
gaacaggcctattcac

SEQ ID NO: 20941 - DNA, 16 bp, synthetic construct
  misc_feature 1..16: note = synthetic [barcode part1]
  source 1..16: mol_type = other DNA
gtatagtcggtcacgt

SEQ ID NO: 20942 - DNA, 16 bp, synthetic construct
  misc_feature 1..16: note = synthetic [barcode part1]
  source 1..16: mol_type = other DNA
aagacctgatatcgcc

SEQ ID NO: 20943 - DNA, 16 bp, synthetic construct
  misc_feature 1..16: note = synthetic [barcode part1]
  source 1..16: mol_type = other DNA
caacctcttaacctcc

SEQ ID NO: 20944 - DNA, 16 bp, synthetic construct
  misc_feature 1..16: note = synthetic [barcode part1]
  source 1..16: mol_type = other DNA
gttcacttccagagtt

SEQ ID NO: 20945 - DNA, 16 bp, synthetic construct
  misc_feature 1..16: note = synthetic [barcode part1]
  source 1..16: mol_type = other DNA
tctccaggtattgatc

SEQ ID NO: 20946 - DNA, 16 bp, synthetic construct
  misc_feature 1..16: note = synthetic [barcode part1]
  source 1..16: mol_type = other DNA
tcggagagaagtaacg

SEQ ID NO: 20947 - DNA, 16 bp, synthetic construct
  misc_feature 1..16: note = synthetic [barcode part1]
  source 1..16: mol_type = other DNA
cctaaccgtacactgc

SEQ ID NO: 20948 - DNA, 16 bp, synthetic construct
  misc_feature 1..16: note = synthetic [barcode part1]
  source 1..16: mol_type = other DNA
tgaggtccggtattgt

SEQ ID NO: 20949 - DNA, 16 bp, synthetic construct
  misc_feature 1..16: note = synthetic [barcode part1]
  source 1..16: mol_type = other DNA
cgtcggtagttggaag

SEQ ID NO: 20950 - DNA, 16 bp, synthetic construct
  misc_feature 1..16: note = synthetic [barcode part1]
  source 1..16: mol_type = other DNA
cctcacagtcaggttc

SEQ ID NO: 20951 - DNA, 16 bp, synthetic construct
  misc_feature 1..16: note = synthetic [barcode part1]
  source 1..16: mol_type = other DNA
ttgcagtgtgtgtgtg

SEQ ID NO: 20952 - DNA, 16 bp, synthetic construct
  misc_feature 1..16: note = synthetic [barcode part1]
  source 1..16: mol_type = other DNA
tcgatcctcactgttc

SEQ ID NO: 20953 - DNA, 16 bp, synthetic construct
  misc_feature 1..16: note = synthetic [barcode part1]
  source 1..16: mol_type = other DNA
gtagtggtcgttatcg

SEQ ID NO: 20954 - DNA, 16 bp, synthetic construct
  misc_feature 1..16: note = synthetic [barcode part1]
  source 1..16: mol_type = other DNA
aacgcaggcagtctag

SEQ ID NO: 20955 - DNA, 16 bp, synthetic construct
  misc_feature 1..16: note = synthetic [barcode part1]
  source 1..16: mol_type = other DNA
tccagattagaagacg

SEQ ID NO: 20956 - DNA, 16 bp, synthetic construct
  misc_feature 1..16: note = synthetic [barcode part1]
  source 1..16: mol_type = other DNA
cctcaactcgagtgtc

SEQ ID NO: 20957 - DNA, 16 bp, synthetic construct
  misc_feature 1..16: note = synthetic [barcode part1]
  source 1..16: mol_type = other DNA
attctcactgtgcctc

SEQ ID NO: 20958 - DNA, 16 bp, synthetic construct
  misc_feature 1..16: note = synthetic [barcode part1]
  source 1..16: mol_type = other DNA
ttcacgtggttcagtt

SEQ ID NO: 20959 - DNA, 16 bp, synthetic construct
  misc_feature 1..16: note = synthetic [barcode part1]
  source 1..16: mol_type = other DNA
attcgacgcactcctg

SEQ ID NO: 20960 - DNA, 16 bp, synthetic construct
  misc_feature 1..16: note = synthetic [barcode part1]
  source 1..16: mol_type = other DNA
agaacctcctatccgc

SEQ ID NO: 20961 - DNA, 16 bp, synthetic construct
  misc_feature 1..16: note = synthetic [barcode part1]
  source 1..16: mol_type = other DNA
cctggaaccttgaagt

SEQ ID NO: 20962 - DNA, 16 bp, synthetic construct
  misc_feature 1..16: note = synthetic [barcode part1]
  source 1..16: mol_type = other DNA
agtgttctctgtggag

SEQ ID NO: 20963 - DNA, 16 bp, synthetic construct
  misc_feature 1..16: note = synthetic [barcode part1]
  source 1..16: mol_type = other DNA
gtctagtgaagatacg

SEQ ID NO: 20964 - DNA, 16 bp, synthetic construct
  misc_feature 1..16: note = synthetic [barcode part1]
  source 1..16: mol_type = other DNA
aatctaagaaggtgcc

SEQ ID NO: 20965 - DNA, 16 bp, synthetic construct
  misc_feature 1..16: note = synthetic [barcode part1]
  source 1..16: mol_type = other DNA
tacactgttggaagag

SEQ ID NO: 20966 - DNA, 16 bp, synthetic construct
  misc_feature 1..16: note = synthetic [barcode part1]
  source 1..16: mol_type = other DNA
aagtccgtgagtctgt

SEQ ID NO: 20967 - DNA, 16 bp, synthetic construct
  misc_feature 1..16: note = synthetic [barcode part1]
  source 1..16: mol_type = other DNA
gagtcttgaggagaag

SEQ ID NO: 20968 - DNA, 16 bp, synthetic construct
  misc_feature 1..16: note = synthetic [barcode part1]
  source 1..16: mol_type = other DNA
tccaacaggcacgaag

SEQ ID NO: 20969 - DNA, 16 bp, synthetic construct
  misc_feature 1..16: note = synthetic [barcode part1]
  source 1..16: mol_type = other DNA
cgtggattatcgtctt

SEQ ID NO: 20970 - DNA, 16 bp, synthetic construct
  misc_feature 1..16: note = synthetic [barcode part1]
  source 1..16: mol_type = other DNA
cctctactgaaggtag

SEQ ID NO: 20971 - DNA, 16 bp, synthetic construct
  misc_feature 1..16: note = synthetic [barcode part1]
  source 1..16: mol_type = other DNA
acgtgatcaatacgcc

SEQ ID NO: 20972 - DNA, 16 bp, synthetic construct
  misc_feature 1..16: note = synthetic [barcode part1]
  source 1..16: mol_type = other DNA
aggacagttgttccac

SEQ ID NO: 20973 - DNA, 16 bp, synthetic construct
  misc_feature 1..16: note = synthetic [barcode part1]
  source 1..16: mol_type = other DNA
gtcaggttgagtcgtt

SEQ ID NO: 20974 - DNA, 16 bp, synthetic construct
  misc_feature 1..16: note = synthetic [barcode part1]
  source 1..16: mol_type = other DNA
ttgattctgccggtgc

SEQ ID NO: 20975 - DNA, 16 bp, synthetic construct
  misc_feature 1..16: note = synthetic [barcode part1]
  source 1..16: mol_type = other DNA
agacctgtgccttatt

SEQ ID NO: 20976 - DNA, 16 bp, synthetic construct
  misc_feature 1..16: note = synthetic [barcode part1]
  source 1..16: mol_type = other DNA
taggtgtgaggcagtc

SEQ ID NO: 20977 - DNA, 16 bp, synthetic construct
  misc_feature 1..16: note = synthetic [barcode part1]
  source 1..16: mol_type = other DNA
gactgttgtccgatag

SEQ ID NO: 20978 - DNA, 16 bp, synthetic construct
  misc_feature 1..16: note = synthetic [barcode part1]
  source 1..16: mol_type = other DNA
tgatcgtggtggcaag

SEQ ID NO: 20979 - DNA, 16 bp, synthetic construct
  misc_feature 1..16: note = synthetic [barcode part1]
  source 1..16: mol_type = other DNA
aattcggttaggtcgc

SEQ ID NO: 20980 - DNA, 16 bp, synthetic construct
  misc_feature 1..16: note = synthetic [barcode part1]
  source 1..16: mol_type = other DNA
cacgtagaacggcagt

SEQ ID NO: 20981 - DNA, 16 bp, synthetic construct
  misc_feature 1..16: note = synthetic [barcode part1]
  source 1..16: mol_type = other DNA
tacctccgtgtagaag

SEQ ID NO: 20982 - DNA, 16 bp, synthetic construct
  misc_feature 1..16: note = synthetic [barcode part1]
  source 1..16: mol_type = other DNA
accttcctcaatctcg

SEQ ID NO: 20983 - DNA, 16 bp, synthetic construct
  misc_feature 1..16: note = synthetic [barcode part1]
  source 1..16: mol_type = other DNA
tggtgtgtacggatct

SEQ ID NO: 20984 - DNA, 16 bp, synthetic construct
  misc_feature 1..16: note = synthetic [barcode part1]
  source 1..16: mol_type = other DNA
tgccgtcgaacacctt

SEQ ID NO: 20985 - DNA, 16 bp, synthetic construct
  misc_feature 1..16: note = synthetic [barcode part1]
  source 1..16: mol_type = other DNA
taaccaccgaacctag

SEQ ID NO: 20986 - DNA, 16 bp, synthetic construct
  misc_feature 1..16: note = synthetic [barcode part1]
  source 1..16: mol_type = other DNA
tgcctcgtactatcct

SEQ ID NO: 20987 - DNA, 16 bp, synthetic construct
  misc_feature 1..16: note = synthetic [barcode part1]
  source 1..16: mol_type = other DNA
tggtacaactatctcc

SEQ ID NO: 20988 - DNA, 16 bp, synthetic construct
  misc_feature 1..16: note = synthetic [barcode part1]
  source 1..16: mol_type = other DNA
gaacactgaatccgtc

SEQ ID NO: 20989 - DNA, 16 bp, synthetic construct
  misc_feature 1..16: note = synthetic [barcode part1]
  source 1..16: mol_type = other DNA
gtataaccttcctggt

SEQ ID NO: 20990 - DNA, 16 bp, synthetic construct
  misc_feature 1..16: note = synthetic [barcode part1]
  source 1..16: mol_type = other DNA
gaccagaggattagag

SEQ ID NO: 20991 - DNA, 16 bp, synthetic construct
  misc_feature 1..16: note = synthetic [barcode part1]
  source 1..16: mol_type = other DNA
gaagttagaccacgcg

SEQ ID NO: 20992 - DNA, 16 bp, synthetic construct
  misc_feature 1..16: note = synthetic [barcode part1]
  source 1..16: mol_type = other DNA
cgcgcaattgttgtcc

SEQ ID NO: 20993 - DNA, 16 bp, synthetic construct
  misc_feature 1..16: note = synthetic [barcode part1]
  source 1..16: mol_type = other DNA
tagtcctgtgcaccgt

SEQ ID NO: 20994 - DNA, 16 bp, synthetic construct
  misc_feature 1..16: note = synthetic [barcode part1]
  source 1..16: mol_type = other DNA
tctgcacagagtacac

SEQ ID NO: 20995 - DNA, 16 bp, synthetic construct
  misc_feature 1..16: note = synthetic [barcode part1]
  source 1..16: mol_type = other DNA
tattccttctcgcgtg

SEQ ID NO: 20996 - DNA, 16 bp, synthetic construct
  misc_feature 1..16: note = synthetic [barcode part1]
  source 1..16: mol_type = other DNA
tgtcgtcaatacactc

SEQ ID NO: 20997 - DNA, 16 bp, synthetic construct
  misc_feature 1..16: note = synthetic [barcode part1]
  source 1..16: mol_type = other DNA
cgcaagtgttccgtct

SEQ ID NO: 20998 - DNA, 16 bp, synthetic construct
  misc_feature 1..16: note = synthetic [barcode part1]
  source 1..16: mol_type = other DNA
caactccgtgttggtc

SEQ ID NO: 20999 - DNA, 16 bp, synthetic construct
  misc_feature 1..16: note = synthetic [barcode part1]
  source 1..16: mol_type = other DNA
agaccagtgatatacg

SEQ ID NO: 21000 - DNA, 16 bp, synthetic construct
  misc_feature 1..16: note = synthetic [barcode part1]
  source 1..16: mol_type = other DNA
tcgatcctattccgtc

SEQ ID NO: 21001 - DNA, 16 bp, synthetic construct
  misc_feature 1..16: note = synthetic [barcode part1]
  source 1..16: mol_type = other DNA
tgatcacctgtgcaag

SEQ ID NO: 21002 - DNA, 16 bp, synthetic construct
  misc_feature 1..16: note = synthetic [barcode part1]
  source 1..16: mol_type = other DNA
cgagagttatcggacg

SEQ ID NO: 21003 - DNA, 16 bp, synthetic construct
  misc_feature 1..16: note = synthetic [barcode part1]
  source 1..16: mol_type = other DNA
gtcggcgacttagatt

SEQ ID NO: 21004 - DNA, 16 bp, synthetic construct
  misc_feature 1..16: note = synthetic [barcode part1]
  source 1..16: mol_type = other DNA
agaccgcgttcctatc

SEQ ID NO: 21005 - DNA, 16 bp, synthetic construct
  misc_feature 1..16: note = synthetic [barcode part1]
  source 1..16: mol_type = other DNA
gattcggagttaccgt

SEQ ID NO: 21006 - DNA, 16 bp, synthetic construct
  misc_feature 1..16: note = synthetic [barcode part1]
  source 1..16: mol_type = other DNA
tacacgtgttgtgacg

SEQ ID NO: 21007 - DNA, 16 bp, synthetic construct
  misc_feature 1..16: note = synthetic [barcode part1]
  source 1..16: mol_type = other DNA
tgtattcacttggcac

SEQ ID NO: 21008 - DNA, 16 bp, synthetic construct
  misc_feature 1..16: note = synthetic [barcode part1]
  source 1..16: mol_type = other DNA
ttgtaggagtggcgac

SEQ ID NO: 21009 - DNA, 16 bp, synthetic construct
  misc_feature 1..16: note = synthetic [barcode part1]
  source 1..16: mol_type = other DNA
attcgttggactctac

SEQ ID NO: 21010 - DNA, 16 bp, synthetic construct
  misc_feature 1..16: note = synthetic [barcode part1]
  source 1..16: mol_type = other DNA
ttgtggttcgagatcg

SEQ ID NO: 21011 - DNA, 16 bp, synthetic construct
  misc_feature 1..16: note = synthetic [barcode part1]
  source 1..16: mol_type = other DNA
gttgtagacttcggac

SEQ ID NO: 21012 - DNA, 16 bp, synthetic construct
  misc_feature 1..16: note = synthetic [barcode part1]
  source 1..16: mol_type = other DNA
tcgtgtatacacggtg

SEQ ID NO: 21013 - DNA, 16 bp, synthetic construct
  misc_feature 1..16: note = synthetic [barcode part1]
  source 1..16: mol_type = other DNA
aaggatacggattacc

SEQ ID NO: 21014 - DNA, 16 bp, synthetic construct
  misc_feature 1..16: note = synthetic [barcode part1]
  source 1..16: mol_type = other DNA
aagaggaggaaggaag

SEQ ID NO: 21015 - DNA, 16 bp, synthetic construct
  misc_feature 1..16: note = synthetic [barcode part1]
  source 1..16: mol_type = other DNA
gtaggcagaataggtg

(The sequence listing continues in the following parts.)
